United States Patent Application Publication US 2011/0183924 A1 - sequence listing, part 215

SEQ ID NO: 538260 - DNA, 424 bp, Homo sapiens
  misc_feature (10)..(10): n is a, c, g, or t
  misc_feature (23)..(23): n is a, c, g, or t
  misc_feature (38)..(38): n is a, c, g, or t
  misc_feature (48)..(48): n is a, c, g, or t
  misc_feature (64)..(64): n is a, c, g, or t
  misc_feature (68)..(68): n is a, c, g, or t
  misc_feature (70)..(70): n is a, c, g, or t
  misc_feature (87)..(87): n is a, c, g, or t
  misc_feature (104)..(104): n is a, c, g, or t
  misc_feature (121)..(121): n is a, c, g, or t
  misc_feature (125)..(125): n is a, c, g, or t
  misc_feature (131)..(131): n is a, c, g, or t
  misc_feature (137)..(137): n is a, c, g, or t
  misc_feature (139)..(139): n is a, c, g, or t
  misc_feature (143)..(143): n is a, c, g, or t
  misc_feature (174)..(174): n is a, c, g, or t
  misc_feature (177)..(177): n is a, c, g, or t
  misc_feature (179)..(179): n is a, c, g, or t
  misc_feature (183)..(183): n is a, c, g, or t
  misc_feature (200)..(200): n is a, c, g, or t
  misc_feature (208)..(208): n is a, c, g, or t
  misc_feature (216)..(216): n is a, c, g, or t
  misc_feature (218)..(218): n is a, c, g, or t
  misc_feature (233)..(233): n is a, c, g, or t
  misc_feature (236)..(236): n is a, c, g, or t
  misc_feature (242)..(242): n is a, c, g, or t
  misc_feature (253)..(253): n is a, c, g, or t
  misc_feature (288)..(288): n is a, c, g, or t
  misc_feature (290)..(290): n is a, c, g, or t
  misc_feature (320)..(320): n is a, c, g, or t
  misc_feature (340)..(340): n is a, c, g, or t
  misc_feature (353)..(353): n is a, c, g, or t
  misc_feature (363)..(363): n is a, c, g, or t
  misc_feature (365)..(365): n is a, c, g, or t
  misc_feature (370)..(370): n is a, c, g, or t
  misc_feature (379)..(379): n is a, c, g, or t
  misc_feature (383)..(383): n is a, c, g, or t
  misc_feature (412)..(412): n is a, c, g, or t
  misc_feature (421)..(421): n is a, c, g, or t
gccgtatgcncggctctgtggantgcacctagggttanaggcactgtncccccaaccccctgcncctntngactctacttctgtttncagccccatttggcctnctgggggaaaagacccnccangagtcnctagangncatncctaactggcaaggccccctgcagaacctgnatnanatanaagcagtgggcaccaantccacacngcactatntntggagcagcctggangcntctganagatggtaatngtgagccacacaacaccccccacagcacccaggancntacaactggagacctcctagctatcccctnaaaacgataaggggcctaangatgctcactaangacagcattnanttttnttctgcccntatntttaccaggctgcttaaaattgacagaancaacgtgtncga

SEQ ID NO: 538261 - DNA, 925 bp, Homo sapiens
  misc_feature (573)..(573): n is a, c, g, or t
  misc_feature (625)..(625): n is a, c, g, or t
  misc_feature (634)..(634): n is a, c, g, or t
gatgggcaacatccgtggagtggtgcgtttccacggcagactgtggtggggccatcgcatcccagacctactttgtcactgtcagtgacccagcggtgccccctgcgggaggtacccgtgtctgtggcgggataagctggggtgagtggacagcgatagtgagagcggaggccctgggcacgagaggcggatctaaggtagttcggagatgtccccgtgaacgacgatctagtcttccatgcaaagatgaggatgtattggctacctggttctcctctggcgctcttccgccttatccatttggggctggcccaatcagtgcatgaatacctggagtgtgttctagcccgggagcatctgcgtggtagtaccggatcgtgcacagtcctgctctcttctggtgctgtgcccggtgtggctcatgctgggcctgtctgctcacgggcggggtgccctttagaagaggatctagctccagtgccatacgtgcagagagtgacttcgacgcggcggaaggatgagtcaagatctactaggctgatgtcttcgatccccctggacgctcagtcgtantggaagtctccctgcatggtcgctccacaaagcgactcttgcgtgagctagnctatcctgngatcctctagcgagcgatgtgacgagaggttcccataggaagggtcgagacatagcttgaacttctcgaccggggcattccctgaattgtgtgatagccgattgctctccgagtgaggactctatgtgcctacggtgctaccagcggatccgtgagcatctaaccctggattgttgaaccgggaatactccgggttagccgctcatgttctgcgacccagctctggaattgccacaaagttttgcccttcgtggccttgggaaggggttaagggccctcaaccaaccttcc

SEQ ID NO: 538262 - DNA, 244 bp, Homo sapiens
accgtaatatgtacagagtagggcctataaactggatgaccactgtcaaatgaaattaaggctgttgaggcagaaatgatttgataaaagtttattggaagccaaatgtgaggatgaacccaggaaaacacaccaacaaagttgagagtgttctggagtctgttacaagttggaaagttagaagacaggagggggactcttcatacaggagttgtcctttttcactggagggtacaatacaaag

SEQ ID NO: 538263 - DNA, 260 bp, Homo sapiens
  misc_feature (10)..(10): n is a, c, g, or t
  misc_feature (25)..(25): n is a, c, g, or t
  misc_feature (102)..(102): n is a, c, g, or t
  misc_feature (110)..(110): n is a, c, g, or t
  misc_feature (207)..(207): n is a, c, g, or t
  misc_feature (212)..(212): n is a, c, g, or t
atgaacccgnaaacctggctgctgnacgaccacgatgaacggctgcatgagtctgtgttcctccgtggggtggaccatatatacacgcctgctgcctgcccntgccagtntgcctgccctgcccagtgacagctgagccctggaactcctaaaccttttgccctggggcttccatcccaaccagtgccaaggacctcctcttccccnctccnaataataaagtctatggacagggctgtagtagaagtactaacacaaaa

SEQ ID NO: 538264 - DNA, 173 bp, Homo sapiens
  misc_feature (16)..(16): n is a, c, g, or t
  misc_feature (33)..(33): n is a, c, g, or t
  misc_feature (98)..(98): n is a, c, g, or t
  misc_feature (100)..(100): n is a, c, g, or t
  misc_feature (140)..(140): n is a, c, g, or t
ggaccggaaaggtagntgtactgagagcacatncgccgcacaagtaacctctgggaatggggttggagcagccctgccctcgctgtgaacttcctgtngntgctggttcacatgatgctcttatagttggtaagttttangaagtgtttgctgaggaattctgtcatctttaa

SEQ ID NO: 538265 - DNA, 698 bp, Homo sapiens
acgcctgcggggatccccgccagcccacggggggacaccccaccgaaacggggggttggcgcccagcaaacccccgctggtcacggtgcccagcacttttctcagctcttcgtctctggcacctgactaacgccttccctcaccggcgctctttaaaaccccggcaaagggtttcccctcccccagccccgctaacgagtgccctcgggccgaccccctcctggtcaagtctatcacagcaggggtccaggcctagtccggtcaccacaccctgcgcctcattgggcggaatgtttccccccctcggcagcccgaaatccggtgccaactgcaccagtctctataggcccccctcggcctccctccccagggctaatttttccgcccaacaccccttcgcggcgtggcttacaacgacttatgatctctggtgccccacacatggagctccatgtcaggaggggctaagactgagccgcgcccacggtggtgtccctttgtcgtccccccaggaatccgccctcgtgctgccccctgccatctcccccgcttgtggccccctggaggtgagttgcccacggctcctttttcgcgccgctccccctgagagcagtgatatgtgaccccccctgccccaaggcccaccaccgcacccacccccgcccaggggcccccaataatattagggaaacacatac

SEQ ID NO: 538266 - DNA, 555 bp, Homo sapiens
tcagtgagccactgtgccccaccccaacatgttatgtgtgttttttgagactgtcttgctctgtcatccaggctggagtgcagtggtacactcttggcttactgcagcctctgcctcccaggctgaggcagaagaatcgcttgaacctgggaggtggaggttgcagtgagctgatatggcgccattgcactgcgccattgcacttcaccctgggcaacagagcaagactccatctcaaaaaaaaaaagctgtagataatgggggtcccactatggtgctcaagctggtctgaaactcctggggctcaagtgatggtctggcctgggcctccgaacacttctgcctgggcctcccaaagtgtgggaattgacaggcgtgagctgccatgcccagcctcagcatttaatggtagatattagggggtatatgtgcagttaggtactggggttcatggtatgatgctgaggtaggggtaggattatccccatcacccaggtagtgggcatagtacccaatagttattaaaccttggccccaattttccatcttcccaca

SEQ ID NO: 538267 - DNA, 133 bp, Homo sapiens
gcctcacagcatacacgatgttgatatttcaggttgatatcacgctcccgtgccagctcacgaagaatgatgctgtgctgtgtgctggtcccatgcaactactacacgctagggcactgctcagtgactcagc

SEQ ID NO: 538268 - DNA, 1175 bp, Homo sapiens
ggacaggtgaagtgaccagagagcaaaaggcaaaggggtgggggctgggtgcagtggctcacacctgtattcccaacacttttggaggctgaggttggaggattgcttgagcccaggaattcgagaccagcctaggtgacatagtgagaccccatctctacaaaaaataaaaaattaaccaggtgtggtggcacgtgcctgggagtcccagcgacttgggaggctgaggtgggaggattgtttgagcctgggaggtcgaggctgtagtgagccctgattgcaccactgtactccagcctgggtgacagggcaagaccctgtctcaaaaaaaaaaaaaaaaaaattgggcaaaggggagacaaagagcccagcctgcttgttggctagccaaagtggtcctttcccttccaggtttgggcctggctcttaaaaggcaaaggctcctggcagtggtacattcctgggcattggtggtgggctacctggggttttaaacccaaaattcagaaggtcccggatcaaaggggcactggctgaggttcagcctcttctcttctggcgccagggaggcagcagctctgaattgggcccctgagcgctgccagggcccttggtccctgggggcgcatgtttacaaacagtgcagttctgggggcccgaggtaagcaggctgggtctcattggcgaacggccaggatctggggctctaggacttggggaaattgggccgtgtgccagaaggctggcaggcttttcctatgggactctcccgtgcccttgttcctgttgggccgttgttccccagtggcagggataaacttgaacgtctgtgaagaaaaaccctttccaggtgggggggcagtggtgcccaagtgtccccgttgtcaccacaaagctgttatgccgcaaagacccccgttgtaaacgcctgtgacacgatgacgtctctgagcgacccttgggtggcccccccaccggtggacgccgtatatgagtgggcgacaccaacgcaggggggaaaggaaggtcaccactcaccacaaatcacccgagagacgtacgaatcacttagcaggacagcgcgcttagaaaagggaggcagcgagaagagacacgacgaatcagctagatgcgaagacgaaacaatcgatgatcttgcgaagaagacgataaac

SEQ ID NO: 538269 - DNA, 493 bp, Homo sapiens
gttgtgaaccaattttttggaccggtcgcgttttcaaaaagggctctctcttcttgcctatataagacgccatgataggttacagctattgatgtaactgtagctgcaattttttgtgcaggactgagaaacacagtgcattatttattgcggaatcatttgcctttgtcctttaaaattaaactaacttgtctgtttatttaacacaacaattgaattgccttgaaagaaagtttgccagttgcggcttttttctcaatttcaatcaatttggttgcacagttgcattcttgtttctcctcacggaatttgttattacttgctttgcaatttttcttatgtctatcttcaacaattttctaaaaaacgtttgggcaaggggttggttttttcaccttggtggacattgttaaacaatttttaacggccttttttggcctttttaaaaattaaggttaaaacaaattaaagtttggagcccaatcctttgcag

SEQ ID NO: 538270 - DNA, 677 bp, Homo sapiens
gcacgaggtttttctaatacctgcacatacccttgatggttaaaagaaaattaccataaaataaagtggtcattttcaaaaaaaaaaagaaaacactattgccatataacttaaaataaaaaaataaaaactgaataagcaccaaaaacttggagagaaccatctgctgttaagacttctatcctattccttgttaaaggacacaccccatggcatttactacttggtgtgtataactatatccgttgcccatccaagtactgagagcctactttggatgtcagcaacactgagtccaggctcttgtgtgaacaccagagtctctccatagctccttacatagctaaaacatgaacagcaaggactgcacgcaaagtgattgaaggccagctgaggagaagttgctcgtgaatatccttttcttcatatatagcatatgaacaccttgaactatgcttgagcacttaggtgacaagaacttacgcacctgctgaggccctcgatatgttaaatagtaaccacttctagtgccagaaatcctaacgtatcatgaatgaagacctgtttactataactgggacctattgggcctagtgttgactatggaactaaatggacaaccatttaccgtaagtttaaacttgataccaaaatgtggtttaggataaaaaatcact

SEQ ID NO: 538271 - DNA, 282 bp, Homo sapiens
attttgggggacaaggttttgggggttttttttccccttttggaaccgccctattgaaaagtaagggcccttccattccaggccccctcaaattggacttgtttcctgccaaatttgggggatcatttgtattttaactttgtaatctaaggctctggactgttgaaaggctctcaattttgtggggtctccttagtatgtatgtgacttttcatgttgcaaaatcccccgatgggatggccccacttttgcttttaataaaaaatttgaatgagtaagaga

SEQ ID NO: 538272 - DNA, 155 bp, Homo sapiens
tggccccagggattaaagtttccctgttcccccctaagtttagaaggggaaaaaaaccccggttttaaatgggggaaacaattgggttttgtaaaaacttgtaaggggggaaaacctttttgttttttttttaaaaaaaaaaaccccccccggga

SEQ ID NO: 538273 - DNA, 890 bp, Homo sapiens
gagaccgcgtccgccccgcgagcacagagcctcgcctttgccgatccggcgtgccgtccacacccgccgaccagctcaccatggcagtgatgagtatcgccgcgcgtcgtcgctcgagcaacggctccggcactgtgcaaggccggcttcgcgggcgacgatgccccccgggccgtcttcccctccatcgtggtggcgccccaggcaccagggcgtgactggtgggcatgggtcatgaaggattcctatgtgggcgacgatggtcccatgatgtcatacgagtaggcatcctcagccctgaagtaccccagtctgagcacggtcgatcgtcaccaactgggacgacagtggaggaaaatctggcaccataccttctacaatgagctgcgcgtggctcccgaggagcaccccgtgctgctgaaccgaggcccccctgaagccccaaggccaaccggcgaggaagatgactccagagtcatgtttgagagcttctaagatgcccagccatgtactgttgctatccatggctgtgctatcgcctgtacgcctctggccgtaccactggcttcgtgatggactccgtgtgacggggtcaacccgacactgtgcccatctacgaggggtatgccctctccccattgtccatcctgcgtctggacctgtctgtccgggaccttgactgactacctcagtgaagatcctcaccgagcgcggctacggcttcaccaacacggcgatgcgggaaactcgtgggtgaccttaaggagaagctgtgctacagtcgccctggtacttacgatccaggagatggccaccggtgcttccagatcctcactgaagaaagagctacgagctgcctgagggcaggtcatcaccattggcaatgcacg

SEQ ID NO: 538274 - DNA, 840 bp, Homo sapiens
ctttaccagcaactggcctggtctggctcgggccctgctttgcctcctgttcagctgcggcgtgcagctgccatgctgactcactgatgtccacgcagactcgcaggagctggcagcatgggctccccagggctactgacaggctgggggcttctggattataagacggagaatgtatgtgatgaccaggaactaggctgggtgggcgccctgcaagaggcgtgctgctaggtatggggatccgtcggtcatatgtcggtagcggtgggctctccgtcgccgaaaacaaggctacgcaggcagcgggaccgtggaatcgccagttttcctatcatcaccaagacttcaaacggcggtttcgcgtcacgtcagatcaagggacgcgttggaaaccggctgtaggtgatgttggcctgaccttcagtgaatgccaccgtcacgtcacccgtccagtcccacttgtgctaactagcttggggtcgacggatggactgtgccccgaagggggcagggaaggtacacgagcagactcacgtgtgttagaaagcatggccagtcgtgtggttggttcacgtaggggaccctagcaggacctgtgcagatctgggagtatggatgcccaggtggcagagtggacgtatgtgccctctgagggccccttgcttggccccagggcccaggaactttcacaagctgttcatcgaaacaccacagtcaccttcaggcaagtacaggcttcgtctaaggtccgatgccttgtgagcacgctgggagcccaccgtattctgtagatgcaactggcgtgtatgaagccacaaattcagccgcctacgtgtccct

SEQ ID NO: 538275 - DNA, 1120 bp, Homo sapiens
  misc_feature (79)..(80): n is a, c, g, or t
  misc_feature (84)..(84): n is a, c, g, or t
  misc_feature (97)..(97): n is a, c, g, or t
cctgctatctgtttctctccgtgctgttctctcccgatgatgcgcctgccctgctctcactgtcctctctccccctcgnnctcncttcggccccccnctttcacgttcactctgtctctcccactatctctgcccccctctatccttgatacaacagctgacctcatttcccgataccttttcccccccgaagaagtgacaacgatctggcccgccccagtcccgaagacaagcccggatcctacccatggacatattacagacgagtgctccatcttctgggaatcgacgtctcaagaggcttctccatggtggtacaggatggtatacgtgacaggacctgaagtgtagtgaaccagataggcacatgtgccggcatcctgctagactctagagcaacccaaatattcatctacacgagactctagtagtgcgcctgggtccagattacttcactaccacaccctaccctatctcacctgcccagccctgtgctggggcccatgcaaataggaaatgatgggccagattgtctgcaaataaaccactaagctggtcttgcggcccaagtaaaaaaaacaaacaaccagaacaaagaacaaaccacaaaaaaacacaagaaacagcgcgacgcaacacaacacaacaacaaacagacaccgaggaaacaggcgccgcaccacacaccaacaaccacacacacaaaacaaagacaggccaaagaagagggccagccaaccaaagacaagagcaacacataccaaaaccaacgacaaagaggaggcaagcaccacgccacgcggaaccgggcaaacaacgccgccaccccgcccgcctaacgacaacgaccacaaacccggccggacaaataacagccagcacacacaaagaggaagacgaatacaccaaacaggagagaatcagaaaccgcaccacgacgaagcaccacaggaagcccaggaacgacagcacatacgcgcagccaacgcagcggacatacatgaaagacacgaaaaacaaccacggaaggaaccaacaacacacagcccaagaccggagcgagaacacccgacagcactcacgagcagggacacgaaagacgcgaagacaaaaacaacgg

SEQ ID NO: 538276 - DNA, 463 bp, Homo sapiens
tttttttttctttctttccctctcttttttagacagagtctcgctctgtcacccaggccggagtgcagtggcgcaatctcagttcactgcaacctcctccacctgggttgaagtgattctcctgcctcagcctcccaagtagctgggattacaggcacccacaaccacgcctggctaatttttgtatttttagtagagatggggtttcaccatgttggccaggctggtcttgaactcctgacctcaagtgatccacccgccttagcatccccaagttctgagaattaagggacaggagccaccatggcccagcctcttttccttataattttcttaataacattttctttcctctagcttactttattgtaagaatacagtatataatacacgcaacatgaaaaatgtgtgttaattgactgtttatcttattggtaaggctgcagtcaacagtcaaccgata

SEQ ID NO: 538277 - DNA, 1276 bp, Homo sapiens
ccttctatatccagctgcaggctgatgtattccattccattgtctagctggctatgagaagcccgagaaatcagacccatccgagctttcatggccaacagtcacctgaggtcagtgctcatcacgctggcacgtagagtaactggtgtgttaacatgcgcggagcaagcagacgtgatgtggagagccatggcgacatgcgccttgaacctggtggacaatcccagcggatctcccagatgcgatgagagaatatagcttcaaagtccccagctatacgcacgagggagagaacacaaatcctctaagcagttggctgccatccacgtctagccaggcctccagccaacgactctccgcatgactcttgctgaagctacgcaggcgccacacgctgactgaacgacttgcctgacggttctgctccattgaggcgcacggaacgtggcaaccaaacagagtctatggcccgcaaacctctcactcccccctctctggccagactacactccccttacacttccgcagctgccaccacgcactactactcgcaaccacgctggccactcgcattgcaaccccacacacctagtgcccactctagtcacttctctggctcaactgccccgtatcccacaaaggcccatcatcatgccagcacacattcgacctcaaatctactcgactgcctaccacttcggcccgtcaccactacctctctcgcactcaactcctccctcataccatacggcaatccgacacacccacctacaaccacccccctccatcactccacagcattctcttccctacttcatcatccacgtctcacacttcaccacttactaacactcacattattcattcccaacccacatacatatgccttaccttctcaatcgatggaacatcagacacaacactctcaccctatccactcctttacccaacacagacttccccccgcgcataaactacaacgtagccacaagcaccacaccacaccccaaccccatatgagaccaacataccatacctccttgatccctcacccaattcccatcatacctcccacatcgtcccttccaactacatccaagtcgtcactgcataaatataccatcatatccatatcccctattcttccctcttcaacagtacaccaaccacccaccatcctaccacaatacctccacaacaccccatcttcacttccaaactacttcttcacttacactcttccatacacctcttccacacccagcgctcagaccat

SEQ ID NO: 538278 - DNA, 145 bp, Homo sapiens
gattagtctactgcatgcgcttctagtaatctccttttacatttatactgctacaaagccttctcataattattcttagaagactagtcttgcgtggtatagggtgatatagtggtgttatagggtggtataggggtaccgagac

SEQ ID NO: 538279 - DNA, 387 bp, Homo sapiens
  misc_feature (20)..(20): n is a, c, g, or t
  misc_feature (66)..(66): n is a, c, g, or t
  misc_feature (81)..(81): n is a, c, g, or t
  misc_feature (84)..(84): n is a, c, g, or t
  misc_feature (110)..(110): n is a, c, g, or t
  misc_feature (125)..(125): n is a, c, g, or t
  misc_feature (152)..(152): n is a, c, g, or t
  misc_feature (163)..(163): n is a, c, g, or t
  misc_feature (180)..(180): n is a, c, g, or t
  misc_feature (191)..(191): n is a, c, g, or t
  misc_feature (202)..(202): n is a, c, g, or t
  misc_feature (209)..(209): n is a, c, g, or t
  misc_feature (224)..(224): n is a, c, g, or t
  misc_feature (239)..(239): n is a, c, g, or t
  misc_feature (248)..(248): n is a, c, g, or t
  misc_feature (291)..(291): n is a, c, g, or t
  misc_feature (382)..(382): n is a, c, g, or t
tgagaggagcgtggctgtcncctctctccgccatggcgtgtgcccgcccactgatatcggtgtacnccgaaaagggggagncanctggcaaaaatgtcactttgcctgcngtattcaaggctccnatacgaccagatatagtgaactttgtncacaccaactngcgcaaaaacaacaganagccctatgcngtcagtcaatnagcaggncatcagactagtgcngagtcttggggtacnggcagagcngtggctcgaatacccagagttcgaggtggtgggactcaccgcnctggccagggtgcttttggaaacatgtctcgtggaggccgaatgtatgcaccaaccaaaacctggcgccgttggcatcgtagagtgaacanaaccc

SEQ ID NO: 538280 - DNA, 1155 bp, Homo sapiens
gctgcgcagagcgagggcagccatggtcttaatcccgcgtgaatgattatgagctcgtgaggcggcttactgaccccatacgcttatcccagcgagctactgatatgcacgagcaggagatccaacagcaggaccgtgcctgtaatgaactgtcaggtatgaactagcgaaacctaatcaggtggatcccgtgaggtggatcgaagaaacgttcgatcgcagctattttccgacgaagaaccggtcgtcagactttgactttgaccgagaaacgtgtattggagctatcaggcccacgtcgctgtcgtcctagctgactgtccatctgactcacgacacggtgtactgcacgatccaagggacgagtctactgtagtacacaggctaggaactctaagcctggcacctgggacacagcatttgctttccacatgcaaattacgaccatttggggcctcggaggtcttgcacatgcccaattggccttcccagccaagtgcgctatcgtgcccaacgtggcacatgcgcctggctccatgtctccgtggcactcttctctgactgagcgacaacaggcacacactgtaatcagcgtaagcaagggggcatcaattacttattgtctcccaaagagctttcaaggctggggcagtgggaacccgttattcgccttgtgggcgcacgcccattggacggggcatctttgggaacattccccttaagttttgaaccaaaatcttaacctgtgtcccacatcttcgctccttttccagaatcgttaaccgagttttcctataaaaacgtggggccccgggaacaattgacacggctccccctttggggcgactaccgccgctcgccgttttgggtgaaagcgctttaaatttctctcagaaaggctccaagggactgggggccacatccctcgacggcgcgcagcttaatctgctaaacttcccgggaaacttggcaaggcgactgttcccaaattatccttttatacgccccagggcttgaatcccccacggtattccccgcttcgttccatgggcttcccaaggtgttaacacctcgcgagcgctgtggcttcaccaagagggaacccgtggggagcgccaacaaggtacagcacagctagtcctagggacaacgtgc

SEQ ID NO: 538281 - DNA, 126 bp, Homo sapiens
tcaggcactgattgcctacaacgaggtctgttagacatggttaacgcatttgatcactacaggtacttgtatgtacctagagaaggaacccatcctgggtgttggtgtgagttggtatatgctact

SEQ ID NO: 538282 - DNA, 348 bp, Homo sapiens
tttcagtttgctttctagtgagagacgtacaaccctctctttcacatggacactcagaggcctttgcagggttattaactggccaaactttcacactagtgggctcaaaggaatacaggggcccaatggagacggaggacgacagggaatggcctgtaggtggagcagtcagaacacacaaggcatttatagcttaagtttgcaatttttccaacggcacctgctcacttagtgtctctggtcacatttagggaattctcacaatgtttcaaactttgtcactatgattgtatctgtgatggcactccctgatcactgatcttgaatgtaactatagtaattgtttag

SEQ ID NO: 538283 - DNA, 871 bp, Homo sapiens
gttacagggtgatgataatctccatagattgattagaagtggcttgaaaaaggcaagatgactcttgatgacatggatgaaaatctacgaaatcagccctcgagttattcaatgatagtggatatactaaattatttccctagaaaggaagatgagaggagtggagtgtggtatggcgagaacggaggtgctatttcacagtcttttccagttaataatgggagcactgaaggtacagatgcatgagcagattatgcttgggtcctaatgcagggtatagggctggtagaagttgacgacagcaatgttgatctggcgagacaagtgtggttaagaacatcatgtaagaggttttgaacagctgatgactgtataagacaaagccaagatgcaaaattaggcttgatcggcacttttcgggataactatgaacaagtatgggattgtaatccggatggcgtttcggtacttagggtgaaatatttagataccttttggaacacttaagagtttcttgagacaatgactttgtaaggatttggtacctatgctatcattgcgtttatgactgttacagtgtcggtcactgagtccttggatttcgcgtgtgtgtcacctgcaattggttccggtctgtgcacatctctggtggtaatcgtacagtctcgggtcagctgtttacttcaggttgaaggctttgtgctagcgggaggatccattgcgggcgtccaccttcacgttctttggagcccgttgtttggctggcccgggcgggaacacgcggagtgcgtgctgcgtacaccctaagcgtttcggtgttggccgggtcccaccgttcttctccccgggtgcgctgtggtgcacctcgact

SEQ ID NO: 538284 - DNA, 374 bp, Homo sapiens
actgttttattttgtatcaaagaaaaaattttttgacacagttatcttgcttgtgttgcccagactgaattgcagtggcaaggatcacggtctcactgcagcttccaactcctgggctcaagtgatcttcctgtcacatgagtctcccaagtagttggaacacaggtgccagccaccacacctggctaatttggtttggttttgtttttttagagatgggctcttgctatgttgcctatactggtctcgaactgctggcctcaggcaatcttcccccctcggcctcccaaagtgctgggattacaggtgtgagccactgcaccctgcctcagtacctccattcttcccacacaccctcctcatgtgctccttcc

SEQ ID NO: 538285 - DNA, 395 bp, Homo sapiens
ctaatgctcgagatggatcggtgatctaaatccactccttcatagtaccggatctctctttcaccctccccttcgtgttcccccaatgttataaggtaggatggttggtgttctgccatggagacaagggctaacatagatttaagtgaatacattaacggtgctaaaaatgagaattctaacccaagacatgacattcttagctgtcacttaactattaaggccttttccacacgcattaatagtcccatttttctcttgcgtatatgtagcttagcccatggtcttcttggcacatgggtggacacggatctgcggggctctgccttaaacacacattgcagcttcaacttttctctttagtgttctgttcgaaactaatacttaccgagtca

SEQ ID NO: 538286 - DNA, 236 bp, Homo sapiens
ttccttccccttcacccgttcccccaagttttcacccctttttttccccttcccccccaaaccctttttttttttgggccctttcccccttcccctttttttttcccaaacccccttgggttggggcccgggttgggtgggccggccccccccccttcccctttcccccccgggtttgggtgggaaaccttttttttttggggttttttttttttgggtaaaaaaggtttttttta

SEQ ID NO: 538287 - DNA, 670 bp, Homo sapiens
  misc_feature (58)..(58): n is a, c, g, or t
  misc_feature (63)..(63): n is a, c, g, or t
cattatggccgggggaggaacgactgagctacgttgtcagaaggcggcggtgacctgnaacgnccgtgagaacgaggggacgtaacggaggcaggttggagccgctgccgtcgccatgacccgcggtaaccagcgtgagctcgcccgccagaagaatatgaaaaagcagagcgactcggttaagggaaagcgccgagatgacgggctttctgctgccgcccgcaagcagagggactcggagatcatgcagcagaagcagaaaaaggcaaacgagaagaaggaggaacccaagtagctttgtggcttcgtgtccaaccctcttgcccttcgcctgtgtgcctggagccagtcccaccacgctcgcgtttcctcctgtagtgctcacaggtcccagcaccgatggcattccctttgccctgagtctgcagcgggtcccttttgtgcttccttcccctcaggtagcctctcttcccctgggccactcccgggggtgagggggttaccccttcccagtgttttttattcctgtggggctcaccccaaagtatttagcgcccacccactttcagaatcggagatgcttagcgagcgcgcccgcaatcagagctctacctgggacaacacgccccaaagggagctacttcaacaatcccatggcgccggactaccg

SEQ ID NO: 538288 - DNA, 155 bp, Homo sapiens
ctgtttcttattactccagaggcataatatttaggtgctgtctacataaaataaattaggaatggtatgcttccagcttgaaaatgaacaaataaatttacatctagtactccatagtatgttggctgtatgtttcacataggcaaactgaagat

SEQ ID NO: 538289 - DNA, 727 bp, Homo sapiens
  misc_feature (58)..(58): n is a, c, g, or t
  misc_feature (63)..(63): n is a, c, g, or t
cattatggccgggggaggaacgactgagctacgttgtcagaaggcggcggtgacctgnaacgnccgtgagaacgaggggacgtaacggaggcaggttggagccgctgccgtcgccatgacccgcggtaaccagcgtgagctcgcccgccagaagaatatgaaaaagcagagcgactcggttaagggaaagcgccgagatgacgggctttctgctgccgcccgcaagcagagggactcggagatcatgcagcagaagcagaaaaaggcaaacgagaagaaggaggaacccaagtagctttgtggcttcgtgtccaaccctcttgcccttcgcctgtgtgcctggagccagtcccaccacgctcgcgtttcctcctgtagtgctcacaggtcccagcaccgatggcattccctttgccctgagtctgcagcgggtcccttttgtgcttccttcccctcaggtagcctctttccccctcgacccactcccgcgcgctgaccctcgccaccctccccccccctcccctcacatctgctgcccaccccttcccctccacttcccctccccttgccctcctatctccatctccccccccaccctctctcccccacccacctcacttccctcccaccctccctctcttattccctcttcctctccctccccctatcttctactcctctccctctcctctctccctctcattcctcctcccctatctcaccctcc

SEQ ID NO: 538290 - DNA, 370 bp, Homo sapiens
aaagctagatgacggtcgaaccatacatctatgagggggccatcgcgtcctatcgtctggcgcttcacatgtcactctgcggccagttacaccatggtcgctggtcaaacccctagtgttcacagattccatcacctaggagaatctctccgtcctagagtctggagaggctcccttttgtgattccttcccctcaagtaggctctctccttcccctgggccactcccgggggtgagggggttaccccttcccagtgttttttattcctgtggggctcaccccaaagtattaaaagtagctttgtaattcaaaaaaaaaaataatgacattaccctcggggggggcccggaacccaatttccccttttgg

SEQ ID NO: 538291 - DNA, 219 bp, Homo sapiens
cacgaggggttccctaaccactgaaataaagcctctgcggttcaaaaccattgcaaaatggcccagggattccataaccagggccaaaaacgagagggagctcacaatcagggtataaagacagtcggggctcaggtcataatcgcaactaggagtcccacccaaggcaaaaaacgagagggagctcccatccagtttaagaaggtatattcggttgct

SEQ ID NO: 538292 - DNA, 883 bp, Homo sapiens
  misc_feature (26)..(26): n is a, c, g, or t
  misc_feature (92)..(92): n is a, c, g, or t
  misc_feature (125)..(125): n is a, c, g, or t
  misc_feature (265)..(265): n is a, c, g, or t
  misc_feature (312)..(312): n is a, c, g, or t
  misc_feature (332)..(332): n is a, c, g, or t
  misc_feature (334)..(334): n is a, c, g, or t
  misc_feature (338)..(338): n is a, c, g, or t
  misc_feature (341)..(341): n is a, c, g, or t
  misc_feature (379)..(379): n is a, c, g, or t
  misc_feature (387)..(387): n is a, c, g, or t
  misc_feature (390)..(390): n is a, c, g, or t
  misc_feature (395)..(395): n is a, c, g, or t
  misc_feature (399)..(399): n is a, c, g, or t
  misc_feature (401)..(401): n is a, c, g, or t
  misc_feature (403)..(404): n is a, c, g, or t
  misc_feature (447)..(447): n is a, c, g, or t
  misc_feature (475)..(475): n is a, c, g, or t
  misc_feature (479)..(479): n is a, c, g, or t
  misc_feature (581)..(581): n is a, c, g, or t
  misc_feature (743)..(743): n is a, c, g, or t
  misc_feature (874)..(874): n is a, c, g, or t
gattatggctttacttcattatacangtcttgcagctgtcagaactgacacacacatttcccccaagagttagaacccttttcattagcagngatgaattgaaatgtcatgtctgagtgcaattnctgctccccactcccaccctcacaaaatcccaaaagtgaaaataaatcaataaaatccccatgatttactaatagtcatccctcctataacctttctaactagtcagtctgcagtggatgatataccaaggtgggaagcngctggtcctatcatgtagcattcctgtgcattgtgagcctgaggggncagcagcatgggagcgagantnctgnatnagacgtagtatataattaccttacttcatacttgcccnctccctanatnagacncctntntnntgttacatggaaaatactagaggagatgctaagagtggttttngtctacaattggaaatgcctgagacttnttanattccaaggaaggggtgagataaggggcaccaaagagaaagagcaggttagacagggatgctcaacactcttgtcaattccagtttaatgctatttaattcnaaaccatcttcttaatcacaaccaccttcatgcctaacgccctattgttcctaggttgaggtgctctgtctatatttctgggttgttgtctactgccacccctgggtggtactgtgatgtctgagtgagattgcaaccgggatgggagaaaagaagtgtganacagggaagatcaggggccacaatgcatcaattacagtgggtctcttttggtccccaggtatggtccactaccacaagtcccctttccctacctgtcttgtgcaaatgtcaaaaatagaatctctgcccanagagaaggg

SEQ ID NO: 538293 - DNA, 628 bp, Homo sapiens
  misc_feature (58)..(58): n is a, c, g, or t
  misc_feature (63)..(63): n is a, c, g, or t
cattatggccgggggaggaacgactgagctacgttgtcagaaggcggcggtgacctgnaacgnccgtgagaacgaggggacgtaacggaggcaggttggagccgctgccgtcgccatgacccgcggtaaccagcgtgagctcgcccgccagaagaatatgaaaaagcagagcgactcggttaagggaaagcgccgagatgacgggctttctgctgccgcccgcaagcagagggactcggagatcatgcagcagaagcagaaaaaggcaaacgagaagaaggaggaacccaagtagctttgtggcttcgtgtccaaccctcttgcccttcgcctgtgtgcctggagccagtcccaccacgctcgcgtttcctcctgtagtgctcacaggtcccagcaccgatggcattccctttgccctgagtctgcagcgggtcccttttgtgcttccttcccctcaggtagcctctcttcccctgggccactcccgggggtgagggggttaccccttcccagtgttttttattcctgtggggctcaccccaaagtattaaaagtagctttgtaattcaaaaaaaaaaataatgacattaccctcggggggggcccggaacccaatttccccttttgg

SEQ ID NO: 538294 - DNA, 784 bp, Homo sapiens
attaatgaaggacaaaatgtctcttaacttgtgagatcagtggcgagccatcccctgaaatcgaatggtttaaaaacaactgccaatttctatttcttcaagtgtcagcataaggcgtccagaaatgtatactcccttgaaatccgaagatgcatcagtcagcgatagtggcacagtacacaatgtaaggccaaaaatttcggtgtccagtgttcagtgttacagttgccttaatggtcctgtcgaatgccgctaaagattggaagctcttccatctgatatcagcattgactgagggcaaagttctaacagtagcctgtagcttcatgggtgtgagcctaccccagaagtaacatgtgtcctgtggtgcaagaaaaatccaccgagtcaagaacaggggagtggttcccacattgaaaatcgacagatgaccctgacatgcctgatcatcagtggacgtacagaaacacagatggtgaacttcatacccttgagttaagggactgaagttgtgcatctgacctctgtcacttgtggactatacattatgctgatccatttaaagaggggcctgtggccctttaatagtctaacactcattcttaactttttcgcaaaactgtttcaccagcgggaataactcctttcctgaactggcacatattgtcccggcaataagaatgtccttttggtattcaccctaacttgcgtcaaagtccaaaagatattccatccaacctttctgacatggtgccccagaatttactacattgggacgtgacat

SEQ ID NO: 538295 - DNA, 685 bp, Homo sapiens
  misc_feature (58)..(58): n is a, c, g, or t
  misc_feature (63)..(63): n is a, c, g, or t
cattatggccgggggaggaacgactgagctacgttgtcagaaggcggcggtgacctgnaacgnccgtgagaacgaggggacgtaacggaggcaggttggagccgctgccgtcgccatgacccgcggtaaccagcgtgagctcgcccgccagaagaatatgaaaaagcagagcgactcggttaagggaaagcgccgagatgacgggctttctgctgccgcccgcaagcagagggactcggagatcatgcagcagaagcagaaaaaggcaaacgagaagaaggaggaacccaagtagctttgtggcttcgtgtccaaccctcttgcccttcgcctgtgtgcctggagccagtcccaccacgctcgcgtttcctcctgtagtgctcacaggtcccagcaccgatggcattccctttgccctgagtctgcagcgggtcccttttgtgcttccttcccctcaggtagcctctctccccctgggccactcccgggggtgagggggttacccacttccagggctttatatttctggggggccaccccaaagactaaaagccgctttgcaacccacaaacagaaaaacccactaccagtgcacccctcggggccgcctccggccaaccgactttagactccaccaagcttacccccccgccccaattacagcctaactcggccaatcccccca

SEQ ID NO: 538296 - DNA, 666 bp, Homo sapiens
  misc_feature (58)..(58): n is a, c, g, or t
  misc_feature (63)..(63): n is a, c, g, or t
cattatggccgggggaggaacgactgagctacgttgtcagaaggcggcggtgacctgnaacgnccgtgagaacgaggggacgtaacggaggcaggttggagccgctgccgtcgccatgacccgcggtaaccagcgtgagctcgcccgccagaagaatatgaaaaagcagagcgactcggttaagggaaagcgccgagatgacgggctttctgctgccgcccgcaagcagagggactcggagatcatgcagcagaagcagaaaaaggcaaacgagaagaaggaggaacccaagtagctttgtggcttcgtgtccaaccctcttgcccttcgcctgtgtgcctggagccagtcccaccacgctcgcgtttcctcctgtagtgctcacaggtcccagcaccgatggcattccctttgccctgagtctgcagcgggtcccttttgtgcttccttcccctcaggtagcctctctccccctgggccactcccgggggtgagggggttaccccttcccctgggccactcccgggggtgagggggttaccccttcccagtgttttttattcctgtggggctcaccccaaagtattaaaagtagctttgtaattcaaaaaaaaaaataatgacattaccctcggggggggcccggaacccaatttccccttttgg

SEQ ID NO: 538297 - DNA, 612 bp, Homo sapiens
  misc_feature (58)..(58): n is a, c, g, or t
  misc_feature (63)..(63): n is a, c, g, or t
cattatggccgggggaggaacgactgagctacgttgtcagaaggcggcggtgacctgnaacgnccgtgagaacgaggggacgtaacggaggcaggttggagccgctgccgtcgccatgacccgcggtaaccagcgtgagctcgcccgccagaagaatatgaaaaagcagagcgactcggttaagggaaagcgccgagatgacgggctttctgctgccgcccgcaagcagagggactcggagatcatgcagcagaagcagaaccctcttgcccttcgcctgtgtgcctggagccagtcccaccacgctcgcgtttcctcctgtagtgctcacaggtcccagcaccgatggcattccctttgccctgagtctgcagcgggtcccttttgtgcttccttcccctcaggtagcctctctccccctgggccactcccgggggtgagggggttaccccttcccctgggccactcccgggggtgagggggttaccccttcccagtgttttttattcctgtggggctcaccccaaagtattaaaagtagctttgtaattcaaaaaaaaaaataatgacattaccctcggggggggcccggaacccaatttccccttttgg

SEQ ID NO: 538298 - DNA, 958 bp, Homo sapiens
  misc_feature (46)..(46): n is a, c, g, or t
  misc_feature (91)..(91): n is a, c, g, or t
  misc_feature (117)..(117): n is a, c, g, or t
  misc_feature (207)..(207): n is a, c, g, or t
  misc_feature (211)..(211): n is a, c, g, or t
  misc_feature (324)..(324): n is a, c, g, or t
  misc_feature (326)..(326): n is a, c, g, or t
  misc_feature (346)..(346): n is a, c, g, or t
  misc_feature (348)..(348): n is a, c, g, or t
  misc_feature (364)..(364): n is a, c, g, or t
  misc_feature (373)..(373): n is a, c, g, or t
  misc_feature (438)..(438): n is a, c, g, or t
  misc_feature (440)..(441): n is a, c, g, or t
  misc_feature (453)..(453): n is a, c, g, or t
  misc_feature (456)..(456): n is a, c, g, or t
  misc_feature (468)..(468): n is a, c, g, or t
  misc_feature (493)..(493): n is a, c, g, or t
  misc_feature (504)..(504): n is a, c, g, or t
  misc_feature (515)..(515): n is a, c, g, or t
  misc_feature (540)..(540): n is a, c, g, or t
  misc_feature (568)..(568): n is a, c, g, or t
  misc_feature (571)..(571): n is a, c, g, or t
  misc_feature (580)..(581): n is a, c, g, or t
  misc_feature (583)..(583): n is a, c, g, or t
  misc_feature (586)..(587): n is a, c, g, or t
  misc_feature (589)..(589): n is a, c, g, or t
aaagagagctacctcagggcttgaatgtggactagtcgtgaggagnagagtgcattgcttcctctagggttttatttcctccccaccctcnaaattgttagctcacagccttacagnaaaggacgggggcgggcgcctgccctcagtctgatttctgagcgtccctgggtctgaccttaagggcaagggcagggagcttcacatttnaaanacagttgtggttacggcagcccagtacttttggccctccttgctgttcggttctcctcccttctcccaacctcctcactggtgttgctgggtgtggtcctcaatacagaaaananacccttgggcctgtgtcacnanacttcagaccccttgngcaacagcnagaaggagactggtcgccttttgagcctcagctctcttcctcttgttctcctagggtgggagaanannaacaaaacgctnaantaagtcccaacnacttccatcttatcctttgtgcccnacatcccccancatcttgtccnttttgccctctggtacctcccagtnccccaacatctctacccccagggactcnganaacatgcannanaannanaaaaaggcaaacgagaagaaggaggaacccaagtagctttgtggcttcgtgtccaaccctcttgcccttcgcctgtgtgcctggagccagtcccaccacgctcgcgtttcctcctgtagtgctcacaggtcccagcaccgatggcattccctttgccctgagtctgcagcgggtcccttttgtgcttccttcccctcaggtagcctctcttcccctgggccactcccgggggtgagggggttaccccttcccagtgttttttattcctgtggggctcaccccaaagtattaaaagtagctttgtaattcaaaaaaaaaaataatgacattaccctcggggggggcccggaacccaatttccccttttgg

SEQ ID NO: 538299 - DNA, 102 bp, Homo sapiens
  misc_feature (73)..(73): n is a, c, g, or t
gctcgtttgcccctcgtgttcatggggagctcgttttcttttcctctaggcagagaagaggcgattggcggcngatggcattcttttcggcgccctcggcgt

SEQ ID NO: 538300 - DNA, 702 bp, Homo sapiens
  misc_feature (494)..(494): n is a, c, g, or t
  misc_feature (553)..(553): n is a, c, g, or t
  misc_feature (556)..(557): n is a, c, g, or t
  misc_feature (613)..(614): n is a, c, g, or t
  misc_feature (664)..(664): n is a, c, g, or t
  misc_feature (686)..(686): n is a, c, g, or t
  misc_feature (691)..(692): n is a, c, g, or t
cgagaggagtcggtggcagcggcggcggcgggaccggcagcagcagcagcagcagcagcagcaaccactagcctccgtgccccgcggcgctgccgcaccgacgccccaacgatgccgctcatccccgctcgttctcacgcgctgcccagacccacgctggtgcgcccatcccgtcgccatgtccctggcaggcgcgccgtcatagttgtcctcgctgatctcgccgctcggtccttccagcggccaagcgcgcgagcgagacgagcctgcgaactgcctacgccagcgaggcctagcgagcctactagcgcaagcagctcgccaggcaagtagcgctgtcaggccacatgccgccggcgtccgggcgtccgtggcggcatgctaccttctgaggctactcgtacgcctggcgaccgtagcaatcctgcgagggttcggcgattgactccttgctaccgaagaactgcaacctgcgcatgtggccgcacgtctgncggcggcgcgccgcacacctggcgaaacgaaaaccttgcagcgacctaacgagaggctnggnncgccgcaggctacaggcagcaaaggcaaagcgccctggaaagtacgcgaagtaacnncatgtgtgtggcccccgcttaacgtgtggcaagctgtgcgtgctttccgngcttcaggatcataaactcagntgcanntccgcagttc

SEQ ID NO: 538301 - DNA, 383 bp, Homo sapiens
aactggggactaccagaaatgcattacacacctggtataattcaaaatatattatcatagagacgggtcttatccatgtgcccaagctggtctcgaactatctggcctcaagtgaacctcctatctcagcctccaagagcactgggattccaggtctaaatactgcaactggtcacatactcttcttatgtaacacaagtctgccatcactctaagtgcacttgaatcatagatatgtctgatccatccacataacaactgcctcaaagttccttgcactcagtacctacaatcttcaattccatccaggaagcaatcaagatcacactctgaaaagcacttcatccctgcttagcaactgctctgatgctgacattatgcac

SEQ ID NO: 538302 - DNA, 371 bp, Homo sapiens
acacatataaacaagtttattagattgtcagtgatactttgagacaaattcaagttatttcattttacttcatataaacagaggaagggaggaaagttttaaacttcaagctttgttcaccatgtgtgcagttagcatccacaaaagccccattgggtttgggagaattagccccacagaattttaggacctaactgttaacatgcctcactgaaaaaacttggaacataaaaaactgaagtaggtccgtgggtttgggctatttataaacaatcacaagggcaaatttatgaatttgttcttaataccagtacaattacaattcccaattaaatggagaaccttttttaagaacaattacgggaacaaaa

SEQ ID NO: 538303 - DNA, 309 bp, Homo sapiens
tccgcgtcccaggctacaagtgatcctactacctcagcctcacaagtagcgtgggactaaaggcacacaccaccacgtccggctaattcttgtatttttggtagagatagggtttcgccatgttgagccagtgcctgtctcgaactcctggcctcaagtgatccaccggactcagcctcccataagttctgtgattacagacgtgagccaccacgcccggcccaccttaccaatttcaactgtgttacgtctaggtcgacctagacgtaacacagcatggttctcagaactgagccgttgcaggttgag

SEQ ID NO: 538304 - DNA, 107 bp, Homo sapiens
ggatatagggtcttactttgtcaacccagcctggagcagatagtgcaatcatagcccactgcaacctcaaacatttttgtagagatggggtctcactatgttgccca

SEQ ID NO: 538305 - DNA, 127 bp, Homo sapiens
  misc_feature (52)..(52): n is a, c, g, or t
  misc_feature (65)..(65): n is a, c, g, or t
  misc_feature (84)..(84): n is a, c, g, or t
cccggagtccctggaagtttgcggcaggacgcgcgcggggaggcggcggagnaagcccgacgtcncggagaacagggcgcagancggcatgggcatcgggcgcaggaggggggccgccgcgggccat

SEQ ID NO: 538306 - DNA, 285 bp, Homo sapiens
  misc_feature (107)..(107): n is a, c, g, or t
  misc_feature (115)..(115): n is a, c, g, or t
  misc_feature (159)..(159): n is a, c, g, or t
  misc_feature (186)..(186): n is a, c, g, or t
  misc_feature (253)..(253): n is a, c, g, or t
  misc_feature (274)..(274): n is a, c, g, or t
aatcaacaaaacgagaatagaaaaacaatagagaaaatcattggaactaaaacttgattatttaaaaagatcaagaaatttgacaaacctttagctagatggactanggaaaaangaacattcaaattaccaacatcaggaattaacgtagggatgttntagcagtcctaccttattcacaagggnatatgttccaagaccccaagtggatgcctgaaacaccacagatggtactgagctctatatgtatatntataaatttttttcctatgcntacatacttac

SEQ ID NO: 538307 - DNA, 129 bp, Homo sapiens
  misc_feature (79)..(79): n is a, c, g, or t
cccaggtagattgtcctaagattgagtgaagctgccaacattcgcggtcaagcgaagagggtggcagccgtacgcgggnttgaccgaccggcaatcaaaggaaatccggcatacccgaaggtatcccgc

SEQ ID NO: 538308 - DNA, 135 bp, Homo sapiens
tgcggtcctacgaagacccagccacacttttcccacagatgccgcagccagttggatgttaggacatggagcaccggagttcagggtgtgagagtcgcaatccccacatgtgcatgtggaagcccctgtggggat

SEQ ID NO: 538309 - DNA, 1446 bp, Homo sapiens
  misc_feature (238)..(238): n is a, c, g, or t
  misc_feature (392)..(392): n is a, c, g, or t
  misc_feature (457)..(457): n is a, c, g, or t
  misc_feature (492)..(492): n is a, c, g, or t
  misc_feature (494)..(494): n is a, c, g, or t
  misc_feature (543)..(543): n is a, c, g, or t
  misc_feature (684)..(684): n is a, c, g, or t
cgatgcaggttacttcgctgtatcataagaacgagcttatgaccttatactagatgcatggcgacctcggtaaatcatctagcacctgtatcgtgtctgtgctaaatccttgtgtatactgtgcgctattcttcctacatgatgtcctgatgacaagagaactcacaacgtaactagcgtagagccacttgtcgagagcggcgtccaggtgagaatatcacagagcgcggtacatganatcgtaactactcgtagactcgctgtcgcgatacaagtgcccctcagatgcgcttctacttctgccacacgtacacgcgagtacgcacttgatcgggctactactcttgtttgacctagtaacaccgaagcattcggaggggctccatagcggncattcccgcgtcctctcctataccacaactaccacaaattgcacagatgtgttggcctaacacantagattggctgactgtgaaagagccactcaccggnanatgagccaccgtacttcaacgggcgtggcactgtacatcctctccaacntccctaaccaattactttaccccccaaattataagttccgataggaagcccagggcagcacccgtgtcgaatccttcgccgtgtggagcgatttggaacgaaattcgaagggtaaggtgactgccccgaactttggaagcnccacgccaatattcggttattaacttaactttagccaattccaacagaggatgcggttcctttgccgcacgtcagttggaggcctagatcgcgcgcaagcaatataggggccttaaaccacacaccagaattggcgaatttcccggtggcacagttcctaacatccaaaagcccacttttcagcccggcctatcaatctgaaccgtgcggggggttattaacctaaccgtggttccaagttagcgtcttgacacagtcctatgttgagatggcaaacccaacagtatttcagtggccccaattctggtccgtcagaaatttaacttttcccccctagaaaaagttctttttgaccaactaaggggccgcgctattataccccgtaattaagacagcacaccccgtactaaccccgccgtcctaaggaagccaaaacaatacaacgacacaccgcaacaatgcacaacaacaaagcagggggggcgggaccggcaccacacaaagaaatacattccccccgcgagagggtccccaaaaggtattaacgccgctggatcccgaccacttctccgaggcacacaacaggagggcggccaccctaaaaagggagacgacagccaatatataaagccgtacaggaaccagagcgaccgcgcagttaaaaacagcgcgtgggtgtcatgtcggcaaatccgggacagccgcgggccacaacgtggtaaagagacaaccaagtctaggcgggggcggcaccaaacaagg

SEQ ID NO: 538310 - DNA, 508 bp, Homo sapiens
ctacatagtctcccaagaattttttaggatttgtttaagaaaatacaaattctcggctgggtctcatggctcatgcttgtaatcccagaactttgggaggacgaggcagctggatcacttgaggtcaggaatttgagaccagcctgaccaacatggggaaaccgtgactctacaaaaacacaaaaaattagctgggtgtggtggtaggtgcctgtaatcccagctacttgggaggctgaggcgggagaatcgcttgaaccccgaaggcagtgtttgtggtgagcagaaattgcttcattgcactccagcctgggcaacagaatgagaccctgtctggaaaaaacaaaaaaaaaaagggaatatcttctaaaaggtaggggtacctagttttcttccatagggtttcctataaagacaagggttttttcatcataaatatatatggggatctggtgggaggggtcagtggtacccagaggcgttccagcagaagcaagtccctgggggg

SEQ ID NO: 538311 - DNA, 1137 bp, Homo sapiens
  misc_feature (233)..(233): n is a, c, g, or t
  misc_feature (421)..(421): n is a, c, g, or t
  misc_feature (555)..(555): n is a, c, g, or t
  misc_feature (566)..(566): n is a, c, g, or t
  misc_feature (596)..(596): n is a, c, g, or t
agccctgaccgtgacccgagtctcacccagcatgatgttcgactgccgaatgagacatagatggcctgtctgtcgatctcgtgaccacgagtctgcatactctagacgtgtgtgacaacctgttgataacctgtgggtccggacagtgtacacatagtagagtgcgtgttggcagctacgccacgactgtcttggacccactctcatggagatcaacagtaaccaagtcatgncgtatcatatctgcctggcaaggtgggacatccgctcggagcatatctgctgcaacgtggttggtcctgctggtcacatgtatcgtatcgtgtgaaagatctttgtggaggatcctaaagttttccatcgggtaggagcgaaatggtcacaactgtccagcagtggttctgaacagtagggtaggacnacgcagctggcatgaacatgcacagccaatgtagtgatcccgagtcgcatgtccaacagaatagcttgacattgcctgatcgactcatatcggctcgggttgtgccgaaactaagccacgcattacgatactantagtgttcgantccctgtgtgaacgagacgaggacctaggnagtcgatacacagcgcattgctaagtgatgtgcatcgtagagaccctcgtatcaacgactgcactcgtgtgaaacaagcaggactagggcttggtagcaagcaagtcctcatgaaggaaatccatggtatccatcagatggaccgccacggaatacctgtctcggcgtgacgcaaaaggtccgttggcgttagggaaaacctcggagagagttgacggaacctatctttttcccggaacatttgggacgggcagtatttccccttaagggagttccttcgtccccggagagaccggtgatagaggggccccaagggtgtgtaaacccgggggccaagctaactatcctgtctgcacacacgatgcttcctcacgggatataccacctcgtcgcgcggtgacaatcgggcggctctctaatcgcgtcacacaccacattatacctaggatgaggtgtgcgaaccacgtcatcctgatgggtgttattcatacagacgacgagcgcgcagaacaatcccgacctcgtatgtatgctagtgcgg

SEQ ID NO: 538312 - DNA, 588 bp, Homo sapiens
  misc_feature (90)..(90): n is a, c, g, or t
tggatgacaaaataaatggtcccagaaagtaagtgtatgaatgtgttctttaatttagcccgagcttgcaacagaaagtcgtcatgcgcntgtttaactccgccctgtatataccagccttggatgcccacagcggtgcaacgaatagactagtacaccacgtgaaacttagttggcgtaacagattgagttccatgtctttgagatcctctcctgagttcctacgtggtacatcccgagtcgaagcgtgtcttcacatatataataaaaccttcaggtattaggatctcctgatgcacgcagttttcctagaattggaagaagttccgtcatggccatgtgccctatgctcctacctcatcatttccaataaatttcagaatattagacacagaagagacatcagggatcatctagtccaatctcaccatgttatcctggacaagaagtcagtaaacttttactgtaaaacaccaaattgtcagtatttctgaccttgtggggcatacaatcctgtctttactatgcaaatctgccctctgacaccaaagcagctatgacaatacttaatgaatgacatggtatgct

SEQ ID NO: 538313 - DNA, 401 bp, Homo sapiens
agtcctattcgacttggagagaccacctctgggaagtcaaatgaacagagactatcgccctcactccgcagatggagaaactgagatccagagccctcagctcagcatcatctaaaagaacaaccatattccttgtgtctagcagcagcctagagatgccccaaggctgcatcatccaatgtgaaagccaccagccacactaggttattgagcgcctgcagtgtggcaggtctgaaatgagaatggctgtcaatgtaaaatacttatcagagtcctgaagacttagctcaaaaaaagaatataaaatatctctttaataattttttatacatattacatgttgaaatgatattattttggatatattgggttaaataaaagacattataagaactaaaaaa

SEQ ID NO: 538314 - DNA, 113 bp, Homo sapiens
aagagttcgagaccagcctgggcgagatgacgaaaccccgtctctactaaaagagtacaaaaattagtcaggtgtcattgtgtgcacctgtagtcctagctgaataatctcaa

SEQ ID NO: 538315 - DNA, 467 bp, Homo sapiens
tcaaattatattcagaaagcttctgcccttgtacttattaaccaaagggtgttcaggggcatgcacaaactgatcctacagccggagatccactcccggatgttcacccagatgatccagacgcctttcataatgataaagctgctctgcttctttgcataagagaactgtccttttagccataaaacatttatagaacctctacctgctaagagtggctcttaccctactgtccatcttcgatagagtcatgaaccccctataaggcttactacagagccacattgctgggaacacctgcaccaccacaagccacctagccctcacatagcccgccaagggctctccagaccatacattcagaagcatgggatgagacctacttacatactgaccatattttggaacactcacctatacattggcagatcggaaacccattcctaacacacacactaatcaccgtt

SEQ ID NO: 538316 - DNA, 418 bp, Homo sapiens
  misc_feature (10)..(10): n is a, c, g, or t
  misc_feature (76)..(76): n is a, c, g, or t
  misc_feature (159)..(159): n is a, c, g, or t
  misc_feature (204)..(204): n is a, c, g, or t
  misc_feature (272)..(272): n is a, c, g, or t
  misc_feature (281)..(281): n is a, c, g, or t
  misc_feature (298)..(298): n is a, c, g, or t
  misc_feature (315)..(315): n is a, c, g, or t
  misc_feature (417)..(417): n is a, c, g, or t
agggtccaancgattctcctccctcggcctcctgagtaagatgggattaacaatgcaccctccccccgcgcccggnctaattttttgtgtttttaagtagagatggggtttcaccatgttgtccgggctggtctcgaagtcctgacctcgagtgatctnccccccttggcctcccaaagtgctgggattacagcctggatacanctgtggagcagccagagagtttgattcagccaggactaggcttttgacaggtgatggcataagcacanagggtccancaagtttaggacacaancaagagagtgactaaanccatggatgatggattccaaggatggcaaggaagtaagaacaggaaggcaagatggactaagataaagcagagaggacgaagaataaaaaagtttgtgtatna

SEQ ID NO: 538317 - DNA, 164 bp, Homo sapiens
gtataataccctgatacctatctttgagttcaacctataatacgtgtggctaggacacttcgtggctcaggtacgaacgtgcttgtggcagacaagtctgtggcttggtgagtctgtgtggacagcagcctctgatcatgtgcagggtactaagcgcgtacggg

SEQ ID NO: 538318 - DNA, 422 bp, Homo sapiens
gcacgagagcgggagatgctgctctctgtgctctttgacacgtgcataatgtgcaagaccatgtgacactgtgtgagcaccatatgtgtctgtgggggcacagaaggcttcatattttcaagtggaactctttacctggcccggacagaaggagaagaactttcacaccacaacaagaagccgggaagaacttcaaagggcacaagaaccaagtgaattggctgtgaatgtgcactgagaggaacgtgctggtcttaaggttccacaacaagaacgcgcgcctctgggaagtgcagagaaagcagtggattcggacacggggcctttcagaatttaaggccagactggcggtgtgccactttaacaaggacctggtgggcgccgagcaccgggacccgcgccacgggggctttctgtggccc

SEQ ID NO: 538319 - DNA, 402 bp, Homo sapiens
ggcgcgagccaggtagtcggccaaggagacattctgctcgccatcgtcgccctgggtagaggcgaagcgcagcaggccggcgatcttctccttgttggcgacgtcttcggccgggccttccttcatcacctggccgaagttcttccagaagcccttgtattgctcgggctcgttcttcgccagtttctccagcatgtcgaggacacgcttggtcagtgccgacttcatcgagtcaatgatcgggtctttctgcaggatttcccgcgagacgttcagcgacaggtcgttggaatccaccacgcccttgatgaagcgcaggtacagcggcaggaacgactcggcctggtccatgacgaacacgcgctgcacgtagagcttgaggcccttgggcgcttcacgctg

SEQ ID NO: 538320 - DNA, 768 bp, Homo sapiens
  misc_feature (44)..(44): n is a, c, g, or t
  misc_feature (294)..(294): n is a, c, g, or t
  misc_feature (297)..(297): n is a, c, g, or t
  misc_feature (307)..(307): n is a, c, g, or t
  misc_feature (419)..(419): n is a, c, g, or t
  misc_feature (531)..(531): n is a, c, g, or t
  misc_feature (569)..(569): n is a, c, g, or t
agaaaagttctccggtgctggacatattttggaaaacaccaaantagtgggaatgacccggaatgggatgcagaggtatgcccttcccttcaattctccctgcttgcccgcatgagggcagtacatgaacggctacagctgctgtactggaagcacaggctttagcacaagaaaaagctgaaaaagagctgtaccagaggctcgggagtgtctgacctgctctctcagcgcctgggctctcaaagttttttctttggagatgcccctgcctccttggacgcctttgtcttcagntanttggccctgntgctgcaggcaaagctgcccagtgggaagctgcaggtccacctgcgtgggctgcacaacctctgtgcctattgtacccacattttcagtttttacttcccctgggatggagntgaggtacccccgcaacgccagacaccagcaggcccagagatttaggaggagccataccggcgccggaaccagatcctatttgtgttggcaggaatggcaaccatggtgggntacgccttgttcagcggcattgtctccatccagcgggnaaagccttgttggggccccaggcacccggaccctgggcatggttgaggaggatgaaaaggaatgatttgtcctcacgctcccaagactggtttttttattttcatgcattccaaaggcccccgtgcctccttgttgttggtacagccggacacggggtgctgccacccaaaataaagccactcacactgattgggctca

SEQ ID NO: 538321 - DNA, 315 bp, Homo sapiens
tcctgtttgcgcctcctgagtagctgggattacaggcatctgccaccacacccagctatttgtgttatttttagcacacatggagtttcaccatgttggccaagctggtcttgatttcctgacctcgtgatccacctgccccggcctcccaaagtgctgagattacaggcacgatccactgcgcccggctgcccagcctaaccgcccagcctaatttctttctttcttttctttttttttttggagggggagtctcgctctgtcacctaggctggagggcaatggggcaatcttggttaattacaacctccgctt

SEQ ID NO: 538322 - DNA, 588 bp, Homo sapiens
catgatggtacactcatgttatcacctgactcagtcagactgtctaattatctgcaagttcacagatattctaaaacatgctgtccaacatacagactccctgaaactgttcctctggctttacatcacacaaatcagcctaccagtacataacaatacaaaccatcaccatgcagagtgataacctccatgtaagtgcagtttcagcaccaggcaaatggcagcaaaactcttcactacaggttcccttgccatcagtagtctcaccagggcgtgcatgtggtgcttttatatccccgcagtgtttaatccaatatccacgtggtagagactcagtagttgcctctcaagtgggaattagacttcaaagactctgattaaatcctatagcaggggtcagcagactatagcctgtggagccaactccggtctgtttttatgaatatctgactctttttgtaaataaagttttattggaacactcccacactcgttcatttacatgttgtctatgactgctttcacattattatagaagtgagtcatcgcggcagaaaccatatgacacacaaaggctaaaaaatattg

SEQ ID NO: 538323 - DNA, 868 bp, Homo sapiens
gccgcggattgccgtatacagggcagcgctcggggcttcgctcgctggctgcccgactcttgcccctcggtcgctgttccccgtcgccggcgccccgctctacgttgtcgtggcgccgccatggagcccgcgcctcgctggctggcggggctgctgcttcgacaaccgcgccctgcggcgccctgccctgtggatggctgcctgccgcccggtcccgatgggcgcccctgtccgcgcctgtggcccgtgccctgggggcctgcttcacccgctgtgcagcccaccccgctgcgtgcagcctgcgcctcgtggcgctgtcagagcccgcgctggcgttgctgggcctgggcgcgcctgcccgcgcgcgagccggagggccgaggccgcgctgttcttcagcggcaacgcgctcctgccgggcgccgagcccgccgcgcactgctacttgcgtgcaccaattcggcccagtccggccgggcagcttgggcgaccggcgccgccatgtacctgggcgaggtgttgcacggtgaccggcgagccgctgggacgcttgcagcttcaaggggcggccgggccacgccctttctccagacaggccgacggtcgcaaggtcctacggtcaagcatccgggagttctatgcagcgaagccatgttccacctggaagtcccaaacaacggcccggcgccttggtcacgtccgaattccaacggtgagagcgccgaacgtgttctatgactggtaatcccaaatattgaacaatgccacggtcgtgttagcgttgtagcttaccacgtttcataagggtatgaaatcccttggagactttaaagtcctgcggatagacaccaacggcgtatcagagcca

SEQ ID NO: 538324 - DNA, 482 bp, Homo sapiens
  misc_feature (7)..(7): n is a, c, g, or t
  misc_feature (159)..(159): n is a, c, g, or t
  misc_feature (162)..(162): n is a, c, g, or t
  misc_feature (172)..(172): n is a, c, g, or t
  misc_feature (256)..(256): n is a, c, g, or t
  misc_feature (280)..(280): n is a, c, g, or t
  misc_feature (300)..(300): n is a, c, g, or t
  misc_feature (334)..(334): n is a, c, g, or t
  misc_feature (380)..(380): n is a, c, g, or t
  misc_feature (466)..(466): n is a, c, g, or t
ggagaanaattttgtaaaatgtaaattagagggaagggaggatagaagaaaagtgggaaaaagaaaaaaagggtggaggatgggagatgaaaaagaaaaaaggaaggagaagggagaaggaggaggtgaaaggaagggaaaggagaaaaagaggagggnggnaggggggggnggattagaggtaaatatagaagtaaagagaaggggagaaggaaatgtagttaagagaaaatggaaaggagtaggggaaggagtngggggaaataagagagatgaagtnataagaactggtagggtggnagagagaggagaagtagtaaatggtaatgtagtnattgtaaaaagaaaggatattgaaggaagaaatgaattggtatgangtatatgtgtaggatgtatagagggaaatgaagtaaatgaaggaatggaatgtaaataaaaaaaggaggttggggtaaaaaatganaatgatgagggaaaat

SEQ ID NO: 538325 - DNA, 165 bp, Homo sapiens
agtagtagaatataactcaggtgacgaaatcagaataggtgtaggataaatggggtctcctcctccggggtggtcgaagaaggtggtgttgattgttgctggtctgtcacgtagtatagtgatgccagcgaggtaggactgggagagataggagaagtaggactg

SEQ ID NO: 538326 - DNA, 121 bp, Homo sapiens
ttcaatgcgccagaagttcagtacctgcttacgacggcatcggttaggctgagctgagggcatcataggagctgcttttcatggtagtcgaatttctttgaaaattgctttagaactctgt

SEQ ID NO: 538327 - DNA, 135 bp, Homo sapiens
atccccacggcctgttgtatgtgtaggggatgctgtacgcttctgggcgagatcctgatgcctgctgagattccacagtgcgtgcgccaggtcacacttgtaccccaccagcaccatgtgcacgtcatcctgagt

SEQ ID NO: 538328 - DNA, 224 bp, Homo sapiens
cgaatcgcgctgctggcgataaacgttgagtttttcttccgcttggtccagctcgctcgcgcacttcaggtaactggcacgtctgtaagaattcaaggctttgtgaatcctacgtcacgtcctcctggcagcgatattctgttgcaaatagttgttagcgatgctgttcagaatacgagtaatcaactggggatcatcaccagtcatgacctggagatctccag

SEQ ID NO: 538329 - DNA, 482 bp, Homo sapiens
  misc_feature (423)..(423): n is a, c, g, or t
  misc_feature (455)..(455): n is a, c, g, or t
  misc_feature (465)..(466): n is a, c, g, or t
aaagatacttgcttcagttttgcagtcaggaattcaagaactgcacaaccctcagaagtgaaaaatcactgggtagatttgcctcatcatcctttattgaaacaaaatacataatatctgtttggaaatatgtctcatgataaattaataaaactattattaaatgttttatttgatttcagctacacagtaacccagtaagataagtaacacaggcaattctgtttaacagatggaaaaaattagtggtccaagatgattactcagcgatcctgaagcgtagttctatattcctttccaccagcccaatgttgcccgtcctctcaaccttggtgcacattgctatctcctctgttatgggatgtcacacaatattcaatgcagtgaatttgaatatgaacagatattaagttttccctattntatgaacattctggttacttgggccttccttngtgacattcnnttgtacactttccact

SEQ ID NO: 538330 - DNA, 122 bp, Homo sapiens
  misc_feature (4)..(4): n is a, c, g, or t
aaangggttaaagacaaaacccaagcatgggattttgccggaaatattagcgttaaaggagctgagttgagtcaaaatcccatgcttgggttttgtctttaaccttgtaacgcttgcaatcc

SEQ ID NO: 538331 - DNA, 430 bp, Homo sapiens
  misc_feature (362)..(362): n is a, c, g, or t
  misc_feature (423)..(423): n is a, c, g, or t
ttgagacagggtcttgccctgctgcccaggctggagtgtagtggcgcgatctcggctcactggacccgcctcctggattcaagcacttctcctgcctcagcctcccgagcagctgggattaaaggcacccaccaccacacccactaatttttgtttgtttgtttgttttttttagtagagacagggtttcaccatgttgtccaggctggtcttcacctcaggtgatcctcccacctcggcctccaaaagtgctgggattccaggtgtgagccaccgtgcccagccttgcacctcagctttactgagctgttgtcctgggccttcctccccaccttttccgttgtgaacttctttttcttgtncttgctggcatttgcttggaatttccaatcaacggttgaacagaatcaatgaaagcagctnatgtgtt

SEQ ID NO: 538332 - DNA, 202 bp, Homo sapiens
tccgtgttgtgaccaacggtgtggttactgtgagtgttccgaatttaacagctcggatttgtagtgtttcaacccaggaaaattttacttcacagaagtaacaaggcgggaggcatggttagctcacgcctgtaaacccagcactttgggaggccacggtgggagaatcgcgttgaacccagtgaggtcgagaccagcctgg

SEQ ID NO: 538333 - DNA, 261 bp, Homo sapiens
tttgagatgatgatggagatagcggtcatggatgcggggccctcccgcaggtgctggtgatgatggagatagtgggcctgggtgcggggccctcccgcaggtgctggtgatgatggagatggcggtcatggatgcgtgggccctcccgcaggtgctggtgatgatggagatagcagacattggtgcgtagggcatcccgcaggtgcttgtgatggagatagcggtcatggatgcgggggcctcccgcaagtgctggtggtg

SEQ ID NO: 538334 - DNA, 325 bp, Homo sapiens
ggcagagctacggtctatgcaggcatcacgtgtgtggtagggggagagtctgtaggtaaacttgcgtactgagtcagttacacaagcaatgcatttccgtggagaagtatatccctacggtctgtgacaattatgctgccaatgttatggtagatggaaaaccggtgaatctgggcttatgggatacagctggacaagaagattatgacagattacgccccctatcctatccgcaaacagttggagaaacgtacggtaaggatataacctcccggggcaaagacaagccgattgccgatgtgttcttaattcgcttgttccgctg

SEQ ID NO: 538335 - DNA, 190 bp, Homo sapiens
ggccccccccccttttttttgggaaaatttttggtttttttttgggggggaaaaaaaacccaaccccccggggggggaattttttgggggcgggggccccccttttaaaaaaaaaaattttttttttggtaattttttttgggggggggaaaataaaaaaaaaaaaaccctttttttttgggggggggga

SEQ ID NO: 538336 - DNA, 141 bp, Homo sapiens
atatactcttcttaaccctttcaaaataaatttttcagggtgacagaaaggagagttaaaatacatttttgtaaaggtgttaacatttgactcacaaaggtaatggttctgttttattcaaattaaaagtttttcaattta

SEQ ID NO: 538337 - DNA, 213 bp, Homo sapiens
tgatctagaggatcccgtttctctgatcgctctgtgcccagactggagcacagggcatgatccatactgtggcctcaacctcctggactcaagtggatcctcccacctcaacctcttgagcagctggggccacaggcatataccatgcccagctaatctctttaattttgggtagagacagggtctatgttgctcaggctggtcttgcactcc

SEQ ID NO: 538338 - DNA, 313 bp, Homo sapiens
agcggcgccctttattttaataagtgtatgtatctccaacagcccatcgccttctctcagcaaatctgtttctctgtatctggcacacagcctcatcaacactttgcctatccagttgttatttctatttccaacacagggcacacacccagatggtcagcatagcattcacactcttcatttcattctttcacaccatttcacatttgggcatctatcagtccagtcatctgagcatttcatcaggcatgcaactatcaggtattcacacaggcacaccagtgtcagttacacacacagtacaggagtgcca

SEQ ID NO: 538339 - DNA, 159 bp, Homo sapiens
ggatgcgggggaactgtgttagtactgagacatcctgcgaataggcttccggctgtcaggcgtttaatggggtttagtagggtggcgttattttcgttaatgttagtaagggtggggaagcgaggttgactgttagggctgagaagaattattcgagtg

SEQ ID NO: 538340 - DNA, 358 bp, Homo sapiens
  misc_feature (27)..(27): n is a, c, g, or t
  misc_feature (47)..(47): n is a, c, g, or t
  misc_feature (61)..(61): n is a, c, g, or t
  misc_feature (89)..(89): n is a, c, g, or t
  misc_feature (111)..(111): n is a, c, g, or t
  misc_feature (126)..(126): n is a, c, g, or t
  misc_feature (139)..(140): n is a, c, g, or t
  misc_feature (142)..(142): n is a, c, g, or t
  misc_feature (163)..(163): n is a, c, g, or t
  misc_feature (186)..(186): n is a, c, g, or t
  misc_feature (217)..(217): n is a, c, g, or t
  misc_feature (229)..(229): n is a, c, g, or t
  misc_feature (245)..(245): n is a, c, g, or t
  misc_feature (252)..(252): n is a, c, g, or t
  misc_feature (269)..(269): n is a, c, g, or t
  misc_feature (282)..(282): n is a, c, g, or t
  misc_feature (286)..(287): n is a, c, g, or t
  misc_feature (310)..(310): n is a, c, g, or t
  misc_feature (327)..(327): n is a, c, g, or t
  misc_feature (342)..(342): n is a, c, g, or t
taggaaagtgaagctcaagggtaaccngtgaggctatgaaattgccngtgaattaagaccngggctagagtcaacagtccagaaccccnatccgtatgaacaggggcccgnttctggttgaaatcnaggttaggatgcnncngagaaaataaaagactgcacnttggagaggcaagcacgctatcngggttgttgttttgttttatgtcgtggtgcntaggtgaggacntagctgggtttattcnaagtggncgggtctgggctattcntgagaatgtcccntccnnttctgagaacaagtcagccccgnctacctgcctccacccnggagactgatgcacnagatctgtttgtgaaa

SEQ ID NO: 538341 - DNA, 549 bp, Homo sapiens
cggacgcgtggtcgaccacgcgtccgctcagcgatcgaccacgccgtccggactattactagatcgcgagcggacgccatttttttcttgcctcagacacacattgtcagtttcctcatcctctctctcgtagatagaatatacttatgtatttttggctgttccaatagttagtgtcgattctgttggacctttctggctacacttgagtgtcttacatgcatctgtactgtgagtgctacattaagttttataattagcccacaccgtgcacaaaagaggcagtgcttccttatgagcttcaagcgtgacgtcccggagaaagacactgattggcccagcttgggtcatgtggccatcctgcaatgaaaacgacaatgggctattatgatcatatgcccatccccgagggtgaatgtgacagtgcggtacatgtggtgacagctctatcgacaacaatgtgagatgtgaactacaggttgccaacggacggacgaatgtcggctaggtaacaaacatgctggataatgcctataatcccagcatcac

SEQ ID NO: 538342 - DNA, 578 bp, Homo sapiens
  misc_feature (66)..(66): n is a, c, g, or t
  misc_feature (87)..(87): n is a, c, g, or t
  misc_feature (89)..(89): n is a, c, g, or t
  misc_feature (150)..(150): n is a, c, g, or t
  misc_feature (198)..(198): n is a, c, g, or t
  misc_feature (205)..(205): n is a, c, g, or t
  misc_feature (226)..(226): n is a, c, g, or t
  misc_feature (252)..(252): n is a, c, g, or t
  misc_feature (271)..(271): n is a, c, g, or t
  misc_feature (275)..(275): n is a, c, g, or t
  misc_feature (281)..(281): n is a, c, g, or t
  misc_feature (287)..(287): n is a, c, g, or t
  misc_feature (291)..(291): n is a, c, g, or t
  misc_feature (340)..(341): n is a, c, g, or t
  misc_feature (362)..(362): n is a, c, g, or t
  misc_feature (365)..(365): n is a, c, g, or t
  misc_feature (370)..(370): n is a, c, g, or t
  misc_feature (384)..(384): n is a, c, g, or t
  misc_feature (393)..(393): n is a, c, g, or t
  misc_feature (402)..(403): n is a, c, g, or t
  misc_feature (421)..(421): n is a, c, g, or t
  misc_feature (424)..(424): n is a, c, g, or t
  misc_feature (428)..(428): n is a, c, g, or t
  misc_feature (442)..(442): n is a, c, g, or t
  misc_feature (474)..(474): n is a, c, g, or t
  misc_feature (525)..(525): n is a, c, g, or t
catgagcggcggtaggatggcgcaggttggagcgtggcgaacaggggccctgggcctggcgcagcngcagctgcccggcctcggacnangcctggaggccgccgcgagcccgctttccaccccgacctctgcccaggccgcacgccagcncaggctcgtgcccacccaccaagtaccagtgccgcaccagtggcttangcgtgcncctcacctggcgctgcgacanggactaggactgcagcgaaggcagcnatgaggaggagtgcaggantganccatgnacccanaaanggcaatgcccaccgccccctggcctcccctgcccctgcaccggcgtcannaactgcactgggggaactganaanaaacngcgcaactgcagcngcctggccngcctagcanncgagcaccgttgcacgcngancgangactgcattccacncacgtggcgctgcgacggccacccagactgtnccgactccagcgacgagctcggctgtggaaccaatgaaatcctcccggaanggatgccacaaccatggggccccctgtgaccctggagagtgtcacctctctca

SEQ ID NO: 538343 - DNA, 1616 bp, Homo sapiens
taaaaatgggagtctcactctgtggcccagtttgggagtggcaggggcgtgagatctcgggttcaccaaaattctctggcgtctcccagtgttcaaggcagatttctcctctcttacagctctcccggagtagctgggagattacagggctcttgtggccaataaggccacaggctataattttgtgggtatttttaaagatagagaagacggtggggtttatcaccactgtgttgtgcgcacagcgctgtgtgtctcttgagaacctcctgtgaccctcaaatgtgactcacattccacctctgcggccccaccaaaaggtgcgtgtggggtccccacctgtgcgcagtggagagctaccacaagtgaggcacacacgtgggcgctctgaggggggttataagggtctatccacaatctattcatctccccaattacacatccatctttggtgagcaccatcttttaaatgtgttcgagcgaaagcatctatacctcgtgcgggcctcctaccacataatcttccgctctctgtggtgcgtgcagttgtgcactatacacaaagtgtggggcgtgtggcgacaacagaccgcgcacaccagatcgctccgctgccgacacacatcccgtttctctccccaccttctcacgcgcgcatatatcaaacacacaggcgctatgaaacaacatctcagcagatacccgccaaattataagttgacactttcccctgttgtttaacacacccccccatgtgtcgacatacaatcacgcgttataacccacgaggtggcaagttacaaaacccccgaaggtgggcaccattccgcggcggatgacacacaacgacggaacaacaacctgtcaacttctcttcctgtcatgtagagtgatttgataatcagttactggcgcgcaagcgacatcgagtacgacatcctatgcaccacactcaccttttgtagtgcgagatcgccgcgacccgcgaccgaacgacgctagtgcgcgagaacgaaccgcctgaacacgaatgagaggagggcgaaagcaagcaacaacgactgtctccaccgcgaggccaaccctcacgaagcgggcgagagaacacacacgcagcacctgtgcccacccacccacggcggggcgcagtcacccacaggcgaaagcaaagaaccaccactacgagcggcagaccaacaccaacgacccccacccacacacaaaagacagtacagccggagccgaggagacaacaaacaacccgcggagcagacagcgacgcttcgacagcaccaacaaccagacgaacgccgcgtggttggcgcacaaacaaagatcagtgtggagcagacaccataacacagagattgggtgtaagacaacaaaccggggaagcggaacacacacgaacccgacgtggatgtgggcgcacacacacggctgaagtggtcgggcacgcacatgacacacaaactcatacagtaacgcaacgaccacctacaacaggacagagacagccgacgcggagggctcgccacgtacgccaggccacatccgagcccgcgcgaagatagacacaccagcagtcactccatagcacgagcaggcaggcgcaa

SEQ ID NO: 538344 - DNA, 553 bp, Homo sapiens
tgagctacttggatggctgaggtgggaggattgcttgagtccaggaggtctaggctgtagtgagctgtgttcaccccactgcactccagcctgggtaacatgagtgaaaccctgtctctacaaaaaatataaacattagctggacgtggtggcatgcacctgtagtcgcagctacttgggaggctgagctgggaggattgtttgagcctgggaggtgaaggttctagttagctgaaatcacaccactgtattccagcctggctgacagctagactgtctcagaaaaaaaaaaaaagcaaatgtgaactggaacactaattgaagagtttccctaccttgtgaatggggaatctgtttgtatttcctaccttgtcatatactgtactctgcagctgttaggatgtgagaaaatgcctgtggggacagtatgagcctggtgttgtacagggtatttatggatgtgtaggctaggaagatatgcaaccaagggattacagccattgcattctcttccctgtactttgtgatgagaaacaaataaattaattttaaa

SEQ ID NO: 538345 - DNA, 633 bp, Homo sapiens
  misc_feature (50)..(50): n is a, c, g, or t
  misc_feature (84)..(84): n is a, c, g, or t
  misc_feature (127)..(127): n is a, c, g, or t
  misc_feature (132)..(132): n is a, c, g, or t
  misc_feature (158)..(158): n is a, c, g, or t
atgatgtacttgtttgcaagagagtttcataaaatcattagtaaaaacancctgctacttcagttggaatattggcagcccggncgtgattgatggctcatgcctgtaactctgacactttgggagnccaangcaggtggattgcttgagctcgggantttgagaccagcctgggtaacatgagtgaaaccctgtctctacaaaaaatataaacattagctggacgtggtggcatgcacctgtagtcgcagctacttgggaggctgagctgggaggattgtttgagcctgggaggtgaaggttctagttagctgaaatcacaccactgtattccagcctggctgacagctagactgtctcagaaaaaaaaaaaaagcaaatgtgaactggaacactaattgaagagtttccctaccttgtgaatggggaatctgtttgtatttcctaccttgtcatatactgtactctgcagctgttaggatgtgagaaaatgcctgtggggacagtatgagcctggtgttgtacagggtatttatggatgtgtaggctaggaagatatgcaaccaagggattacagccattgcattctcttccctgtactttgtgatgagaaacaaataaattaattttaaa

SEQ ID NO: 538346 - DNA, 846 bp, Homo sapiens
gcagcttctgtactgccaggtccgggtcggcgctgcactgcggatgagaccggtgcgactcatgaaggtgttcgtcacccgcaggatacccgccgagggtagggtcgcgctcgcccgggcggcagactgtgaggtggagcagtgggactcggatgagcccatccctgccaaggagctagagcgaggtgtggcgggggcccacggcctgtctgcctcctctccgaaacacagtggacaagaggatcctgtgatgctgcaggggggccactctctacagtcgtcttcagcatcgatgttgtgggggtcgtacgaccagttgggtatggatgtacaatcaacgaatgcgtgggatcccgagttggtacaccccagatgtcctgacagataccaccgcgaactcgcaagtctccctgctacttacccacctgccgcggttgccggaggccatcgaggaagtgaagaatggtggctgacctcgtggaagccctctggctgtgtggctatggactcaacgcagagcactgtcggcatcatcgggctgggcgcataggccaggcattgctcggcgtctgaaaccattcggggtccacgagatttcctgtacacaagggcgccagctcaggcctgaggaagcaggcacgaattcacgggcagagttgggtctaccccctgaagcttggtgcccaaatctgttcaacgacaggccttggtctttaacctgaaccgtggatctgcacaggactcttccgaatatgaggaccggtgcgtcctaacatcagacgggcaccaaaccagcacctgtccggactgcaaggtacttgctgcgcgttcggccccactggttgc

SEQ ID NO: 538347 - DNA, 555 bp, Homo sapiens
  misc_feature (87)..(88): n is a, c, g, or t
  misc_feature (103)..(103): n is a, c, g, or t
  misc_feature (106)..(106): n is a, c, g, or t
  misc_feature (108)..(111): n is a, c, g, or t
  misc_feature (385)..(385): n is a, c, g, or t
  misc_feature (407)..(407): n is a, c, g, or t
  misc_feature (413)..(413): n is a, c, g, or t
  misc_feature (509)..(509): n is a, c, g, or t
gcttggccagccccattgaatttccctgtttcatagctaataccctcaaggctctctgtgacaaggtattcaagacgggggctagannttattcttggcatcntgngnnnntctcacttgtgatgttgcctcttatttcactgagtaattggaagcaaacaggacctccacctgctcccagaaccacaactttgctccctgcgaccttcctgtgctcctaacctaagtccaatccctctcctctgggtgggacatgtatcgaagaacgccctctggcagttgtgcgcattctctgctccccactaatatttccttcttgactgggttatttccagaagcgtgcaaacatcctctaccatctcccactgctaggtgggactcttgnactcactttccactccagctgncacccnatttctctttatctcttcatagcaaaactccttgaaaggattgtctatacttgctgcatccattcctcctagtctctgttgaactctgtccactgnagcttccctcctgaaacatgctcccaccccaggaacagttcctatc

SEQ ID NO: 538348 - DNA, 231 bp, Homo sapiens
ctcgatttgaacgatggtcacatcaccatgctctaggctgggcgagagagaccctgtttcagtcaacctgacccctctttaattcgcaaattgattgtaccatgacactctttttaatgtgattatgggtgcaagtaacatccacaaaaattagagatctaaggaaaacactaccctaatcaaaaggccacaaaatgtattcacagtaacagcttccacttactgggtttt

SEQ ID NO: 538349 - DNA, 813 bp, Homo sapiens
cagaatacaagtacagccccacatgcaggctgggccagtgatccccgccctccaggagtagcccaggcaaaggcctctccttgggaaagaagcacagtggtggaccccgcccagagaagcaggctggaacacaccaggcagagaacagacagcagacacgagagagtccatgatcctgcaggccctgcaactggactgtgttcttcctgtggtgccaacagaagaaacgggccagacatggagagggagactctgcggaaggccaccaggccacacagaggacagggagcttcccccaggcctggcactctactgctgcaggtgtagcctgggtggccccactgagcccccagcaccagagagcttggctgtgcaggtgcttcggggcgtggcagcagttcgtgcaaagagggtcccggtaccgagaccacctggctgacctgccggacggggaccctgaggaaatgcctggaacagtgggtgcggatgaagcagctccgggaatcagatggggcaaaggtgacccagctgtccctctgcggcagaaagcaggacgtgaggctgtgtacaccgcagggcctggagcctgtggctgggtgcagtgggccaggccaggggcagcagagccaggcgggtccctgcaggatgctgccggaatggcctctgtggcgtgtgtgggagaatagggtttcagggcagtggcgatccttttcccggcttgcggacgatgtgacgcgcttgatgtggctttggggcgtggccgttcctaatggcaacctcgttgggcctggaggcccactcttaaggcggccg

SEQ ID NO: 538350 - DNA, 228 bp, Homo sapiens
tagctctcgcacggcacaagagtagcttccttcaggtggtctcgctatcccggatcatgacggagcccagcatgtcggcgggagccagcagttggcgctcagcgtacaaccggctagatgccctaaaaaaaccactacctctgtactccagagagtccacgcgggcgacatagttacttgggatgtagcccacattccgggtggccagggatcgagccttccaccact

SEQ ID NO: 538351 - DNA, 122 bp, Homo sapiens
gaatttcattggactttcaggataatttctatgttggcaacttttcgttttccttaactcaccagtttagtttggcatgatttgattcctgtggttggtgatcccattctactcggatggtg

SEQ ID NO: 538352 - DNA, 103 bp, Homo sapiens
gagtcggtccaaccttgactctttgtctccataaactccagactttataaccaactacctacttaacatatcacttggggctaggcttggtggctcacaccca

SEQ ID NO: 538353 - DNA, 368 bp, Homo sapiens
tcaggcgggcttgggggatgactttgaaaaaaagtttaatgcgctgaaggttcccggcccaaaggataaaaatactccccagggggatcccgaaaaaaaaaaaaatgtgaaattttgtgctgagggggggtttttttcaaaggcccggattgtaaaaaatgaaaaaaaaatggaaaaaatgaaaaacttaattccctttgatcaaatgccccttgggggcttgaatgaagctttccccaaaaccaaattagccaagaaaagggttcccttttggcctccccacccaattgaaaatttataaaattgggtcccggaggaagttttggcccttgtattacccattttggccattaaaaataataatttta

SEQ ID NO: 538354 - DNA, 448 bp, Homo sapiens
gttagatctagaggatcccggatgctctctcgtgtgggggagtgcatcccgtctgggtgatgtcgatagatgtccactcaggaggctcattgcagaggggaaggcgtaagcatggatttacaaaagaggcaccggtccgggataccatgtggtctcgaattgtaccggagttcgagagtacgagtagggcttgatggggctcagggtcatggccgaggctctccagcctgtgtggatgaatgcactcgcagatctcatctctccgcggctccctccccagccggatgtccagccctgcccttgcactctagtctcatacgctatggctcacttggcatctcaaatgacagttgcccaaaacataattccagcttctccttccagattggtttcatctcccttcggtctcactgaaggacagccccacagagagagcgtcgggtacgga

SEQ ID NO: 538355 - DNA, 387 bp, Homo sapiens
tagcagcgcagcaacatcaatgaaaacctcctgaatccatctttggggctccaaggctggcagtgggcagtgggctctgtgatcgagtgatgaatccattcaagggaacacactggaccttgtccagctgaaacagaatgaggcagcttttagtgtggctgtgtgcaggttttccaacactggtgaagactggtatgtgctggtgggtgtggccaaggacctgatactaaacccccgatctgtggcagggggcttcgtctatacttacaagcttgtgaacaatggggaaaaactggagttttggcacaagactcctgtggaagaggtccctgctgctattgccccattccaggggagggtgttgattgatgtggctgcgctgctacg

SEQ ID NO: 538356 - DNA, 522 bp, Homo sapiens
  misc_feature (445)..(445): n is a, c, g, or t
aatttgccctgtaggccaataacttggcacgagggcgtcagtgaaatgcagtactccatctacatctcactcggaggctgggtcttcacgatgttgattggctcgctgatccctggagctggtgtagtagaaattctggtagtgtccctggtcctcttgatctgtgctagtctcccactaaggtatctaaagtgacccctacctaggtgacagtcagagtgtaggggactcttggggtatccctgtgtcctggtctattatcctagcttctttgtccttcagtattcccagcccagcctgccaataagagtacataattgtgtacacgtggcttttattcattgtatcttttttagattcttctatattgtactgattggggcaaaacatgcttttatcttctgccttttctattgccctgttacgtctcatctatacgtgtgtntgtgtgataggtgtatgaaccttcccattcatgcccgcctaccaactacaaacgtgtttttttcttctttgaaaaaa

SEQ ID NO: 538357 - DNA, 320 bp, Homo sapiens
agttcgactggagacgcctcacacagtctacgatcactgatcagcgaacattgtgagtctactaccaatgcggtatctgaatcggaacgtcttgttaatagcgccggtcacgtgtattaacgccgatacccttctaattcctctgcctacatcaatccatggccgtttgcctcaagatggtcatgaaatataaaaccagatcattcgctacttcaaactcttcaatggttacatatttcactcagagaaaagcgctaggtctaggaggccttatgtgatatgtaccccagccagctctctgacttctcagctcctacttt

SEQ ID NO: 538358 - DNA, 266 bp, Homo sapiens
agagagtcctttccccaactgaaagccttggcacctttgtcaaacatcaactgaccctaaatgtttgggtttattgctggattctccattgatctatatcttgattctcatgccagcacacactctactactgtagttttatagtaagttttaaaatggaaagtgtgaatcttccagttttgttccctttcaaaattattttggctattctggatcctttgtatttccatataaattttatgatcagattgataatttctgcaaaa

SEQ ID NO: 538359 - DNA, 413 bp, Homo sapiens
tcgaggtataccggctcacgctgtatcccagcacgtgtgggaggcgaggcaggtggattacctgaggtcaggagttcgagaccagcctggccaatatggtgaaaccccgggcctactaaaaatacaaaaaactagttgggtgtggtggcagacgatgcctgtaatcccagctactcgggagcctgaggcaggagaatcgcttgaacctgagaggcagatgttgcagtgagctgagattgcaccactgcactccagcctgggcaacaagagctaagctctgtctcaaaaaaaggacaaaaaaaaaaaaaggggaagaaattaattttaaggaagaaaaggcaattttctcacccttttagggggtagagaaccacgggtggtgagagagcgactctctgataatttataaaaga

SEQ ID NO: 538360 - DNA, 633 bp, Homo sapiens
gagaagtgcccgggtcctcgcaggaaataggcaaactcagcctgccagctgtgcacacatgcacttcaatgtatagttcctcggcgcgcctctgaccttttcccggagcactacaatcccagaagctatagcacaagggcattgaatcgccaggaaccccgagggagtgcgtggcttcagtgaccggaagaagcttcctgttgccaaaggtgacacgtcgtgcctgccagtggcagccatgctcaggagatgaatagaaatgacttgcatgcgagaggctgcagatatacgaaaaattctagagacggcttctgactcatagaccagggcataccttaccatgtaggcatcgataagaaagagctgagtggacaccatcaggcaacgagagttaccaattacaaggagaccgatacgagtagcagtaaacaaacacgtgtcagacaaacacctgcgccctccggactaacctcaaaaagcagccggtcagtacacactcgaaaccaactaatgcgatcgcaacacagactacagccaagaaaaggacagaacacgaaagacacgaaagggacgagcaatgaaataacaaacaggcacagaccacaaaagacacaaaaacgcaaacggacagcc

SEQ ID NO: 538361 - DNA, 620 bp, Homo sapiens
taggagtgacgtgtgagctgcctcgtgggcatgcgcatggagtggatggcgcatggcgcgggcctggtagcagatgtcctggttctactaccatgtacctgctggtcacggtcgctctacatgctgtagccctgggagctggacggtgttcaattccatgctggtttccattgtgagggatggcactatacacatggatacgtcttcatgctcccattcacatcattagcagattattgcactacttcgaaatctgtacaattgaccacacgatggcgacacaggagtcagaggattccattgggagaaagacccaaacctacgaggtcggaatgagaacatacaagatgtgataaagaaaaatggtttcatagcatgtcaagccataaccaaagcttacgtaaatacatacaacttcaatgatgtaagacacagcgaaaaaatcactcacttgagctcatggtgtatgctgctccatcttaatttatataaattggacaaagtagacaggctcattgatataagcaggatttatgatcatagtgtgtaacaattttgttaggttcactgaggggcacttatggactatcacgattattttcttatcaggcaactaggag

SEQ ID NO: 538362 - DNA, 301 bp, Homo sapiens
  misc_feature (24)..(24): n is a, c, g, or t
  misc_feature (59)..(59): n is a, c, g, or t
agccggaagaggagaccggttccngaggacttgagaaagaccccctccagggggcgccntggcaagtgcttgtgcccacgtccgcccaggacccagccgtgttgagtgaagctcttggggccagcgtcgtcctgaccgcacaggagagagctgaaggtgggtgcccaggccagggtgtgaactttctcccatggtttagtctctgacgcgcactgggccggaagttcaactgagtgcagtgcaggtggattccctcagcagcctgtgtgttgtgtgaaataaattggacttgaaacaaaaa

SEQ ID NO: 538363 - DNA, 165 bp, Homo sapiens
aacgagatccgatagtctcccatctgacaggtgtgagacaagatcccctcttgcaggcaaatgactgcctcattcacaaatctatgtcaacaggcggaactggatgtctacgatctgatgagacattcagacttaggaggcagacttcagactcgactaaaatac

SEQ ID NO: 538364 - DNA, 296 bp, Homo sapiens
  misc_feature (140)..(140): n is a, c, g, or t
tccccaaaaggggggggggggggggggggggggggttttttttaacaaaccctttttttttacccccccgatccccggggggccccccccccctttttttttcccccttttaaaaacccgggggggttccccccccccgnttttttttttgggggggggggggggtaacttttttcccccgggacccccttttcccctttggccttttttgggggcccttttaacccgtttttttccaaaaaacgggggggggcggggcggggttttccggggtttttttccccccccggccccca

SEQ ID NO: 538365 - DNA, 563 bp, Homo sapiens
accaagatgggatatactgcttttttcagatgagtgaggggagacgatttcctgagacatcaagatttttcttgatgttagaatgagattttttttttaatggtaaaattagttgacttgtaagaatgatactgtcatgagtttttgacctaaattcttggagcctgtcactgctgtcattggctaggataattgtcatagggatatgtgtaactttaaggcctttgatatgtattatcaggagcctgctccaatttgaattatgttttccctgccaagtgcagcttttcttggtacaaatttctacttgctgtttagatttttgagtaacagcagtgagaaagtaacaaaaacaagccgcaattgggaatcaggtcagtcctacaggtattgtgttactactttgtggactttgtcctcaaaaattgtgctgaagtcctatattgacctactttctagacattggttatccattcctgcatgatttttaaataatattttctgtgattgatgaataaactactcccctttttactagaacaaaatgttcaaaaatgaaaaaa

SEQ ID NO: 538366 - DNA, 1053 bp, Homo sapiens
gtggtgggtggtgtccctgggtgctcgttgccgtgttgtggtgtggcgctggtgcttttttgagttccggttttcccgtttagtgtgtcttctgatggtataccggtttcgggttatttctcgttctgtgcgtgtgatggtgtctccgtgagtgttacccctttgtctctttggaggcgtgtatttctggtgtaggatatgcccgttggggtgcttgttcatgccgggagagccgcccggcccttaacggcgctgcgccagtggggtggcgcttgcttcgctgctgcagcacccgtcgcctcgtacgcacaagcccaggaggctgcgtatagcacagcagccacctcggttacagccaccatccgctctgaatggcacgagtgacacctggtaccaggagctcaaggccatcattcgagagcagcagagcgcggcccatctggacggcggaagatcagctggatggctccttggaggacaacctagacctccctcaccacggcctggccgacagctgccgctgactctcagctgcgacagccgcgttaacacgcgactaccgagatcggatcggcgagggcggcgcgtatcaccggatggtcgagggctacacagacggcgtaggagggggccctaacgcggaatgtggatgatgagcccccgggctccaggccctggccacggtgccgtcggagacccgtgacaggacagactgagtcacgcagaggcccgagggagtcgtgggagaactctgcggcctcaatgcaggagggcccaaggtaggacagccgccacccaccagggaccagtggcgacaggacaagcaatgcgaacgcgtatgaacgggaagccactgaagaataaagtttagtgcgagtacatgatgcggagtcctccgatgaagacggctatgactggggtccggccactgacctgtgacctctcgaaggctgccagactggtccgtcctccttctccctcctggggctggacttcagtttcccatacagaacccacaaccgtaatatcctccgcctgtcttaatacagaatc

SEQ ID NO: 538367 - DNA, 641 bp, Homo sapiens
ccccgcatttttgtataatggcgattctcagcgaatttatttcccgttgtgcgcccctcttcccacaccagtcactcttctgcatgttccccccggatactcccgcaaacatttgttttcacccgcggcccgctgaacacaacctatcatttgtcaccccccctctttgaatagcaatatttttaaagaatatgtatccccctcctcccttatatgaagaaatggggcccgcagacaaggcgcccccgcgagacaataagtacactgtgggaagagggccgtgttgaaaacgagtgtcgttgacacacacccgcgaggtgtgttggttgaccgcgggtcctctccccatctggcgccggtctctttctaccagcaagtgcgaccacgacttctctagggatagattaataataattattgcgaccccacttttactattcttagaacagggcttatcccagcattacttgttcaagcccctctctaccccccttcttctatttgtcgtccccgagagtcatagacataatagaagaacacgtcttcttcgggtgggggctgtttaggaacagcgagccctgtgtactcctcctccctgacacccaaatattgatagggcggccccaacataatacgaaaaa

SEQ ID NO: 538368 - DNA, 153 bp, Homo sapiens
tcgctttggaatgcggcatatgaagacacctgctctagtatgacgctctgagctacaagcttccactgaaggggctgggaccctgacgagcacttctctatatggagatcatctgctccagaagccaaccgaggagctgcaggaagattcaca

SEQ ID NO: 538369 - DNA, 211 bp, Homo sapiens
gttacccgcagtctgtgatccatgactgggctacctcttcctacatgatgagccctgagcgcttcgcaagtggaatgtgacgtccctggagaccctgaaggctttgcttgccgtcaccaaagggcacgaaatgagtcctcaggtaggcacccatgatcgaccgcctttgtgaaggtgaaggggccacgctagacataagataccctaagac

SEQ ID NO: 538370 - DNA, 205 bp, Homo sapiens
gtgatgggaacatgcttgtgaactgcgtaacacatctactttgtgtatgtgtctgtttatgggggtggtttatcatttttgctggtccctagaccactttgtatgaccgattgcagtctgagcaggccaagggctgaacagctaatgtcaggaccctcagcggtggagcctactggggggaccagctgactcttggacaagtggc

SEQ ID NO: 538371 - DNA, 106 bp, Homo sapiens
atctagaggatcccaacaaactgaacggtaatgtacgcttcattcattgccccacaatcctaggcctacccgccgcagtactgatcattcggatgtccccctctat

SEQ ID NO: 538372 - DNA, 509 bp, Homo sapiens
tggtccgcaggctggagcggctcgaccacctggcagttgtgttccggcagaaggcctccatccacgaggggtggactgacgggaaggaagccatgctgaagcaccgagactacgagacggccacactatcggacatcaaagccctcattcgcaagcacgaggccttcgagagcgacctggctgcgcaccaggaccgcgtggagcagatcgccgccattgcccaggagctcaacgagctggattactacgactcccacgatgtcaacacccggtgccagaagatctgtgaccagtgggacgccctcggctctctgacacatagtcgcaggggagccctggagaaaacagagaagcagctggaggccatcgaccagctgcacctggaatacgccaagcgcgcggccctcttcaacaactggatggagagcgccatggaggacctccaggacatgctcatcgtccataccatcgaggagattgagggcctgatctcagcccatgaccagttc

SEQ ID NO: 538373 - DNA, 252 bp, Homo sapiens
agctcccaacaaagagtcttcaaaagattgttctagctttattactagaagcttctagtacttgagtgtctggtctaggagattgtgttggttgttcactgattcaatggtcttgttgggagcttaagctccagacagagaggtctctggataagctgtgctccctgacaatccctttcctttaatgggaaaaggggaacctggtcttaagatgcatacctaatatcagactttaatccttaaaagcaagat

SEQ ID NO: 538374 - DNA, 411 bp, Homo sapiens
tcttggcttgtaggccgagtggctttaccccttaagccccagccccagctcaagcagtgaatgaaccgctgtctttcagctttagaaaatgtagggaaatgaaacaagctctgaaccccatgtgatggtacttgcttcctttgcttagtatctcagtactcaggaggcagaggcaggaggatggccagaaattgaaggtggtttccaggccacctaaaactatatagtaagagcttgcctcaaataaaaaaaaaaaaaaaaaaaaaaagggaaagaaaaaaaaagaaaaaaccaggtgggtgttggtgcagttttaatcccagcactcgggaagtagaagcaggcctatgctgtgaggtggaagccagccagttctaggacagccaaggacacacagagaaacccgcctct

SEQ ID NO: 538375 - DNA, 132 bp, Homo sapiens
attttatttttttttaaaaccctggagcttctggttcctatcagttcctgttgttaatcgtaaaaccgttgtcccttcccccattcccggatccatcatgttctttttcttttaaaaatcaaaataaaggta

SEQ ID NO: 538376 - DNA, 791 bp, Homo sapiens
  misc_feature (307)..(307): n is a, c, g, or t
  misc_feature (707)..(707): n is a, c, g, or t
  misc_feature (723)..(723): n is a, c, g, or t
  misc_feature (729)..(729): n is a, c, g, or t
  misc_feature (731)..(731): n is a, c, g, or t
cgaccacgcgtcggtctttgagataattgtttttacctgtattgccctttatcttttttaggtaattcttgtactcctgctgtctacctctcctcacaccccagcaccccccattttttcaaaccttggtatctgtgggtgaacagtataatcttttcatctgcttttagaatgtgggatatttccagtacctacttttttttttttttttggctgaatccaaagatttttaaattaaaatatttttttttttataaagatcagaaagtgatattaagggagatacattgtttcttcctttaaaaantaaacgggaagttacttgggtaagtggtccatatttatgatgccatttttctaaacgtgcttcgggatggaagggtgtaaatttcaataacggggctacttagttatcagatattaatatcggagggtgagtggggggtatctatataaggggtagggtattacagaagataatgggctggatgtcctagaagttcttggatccagagggtgggtgcagctgaaagtaaccagatggtttgccagttacttgtttgcctgcccagttccccttttatattggcagaagctgtgagtttggtcccacaattaggtccctaggagcaaaacctcaggatggatttatggtttctcaacctccaaggcacactgttaataaccgacagggggtgtctctctcnttcaatatatggggtngaagantnaatttggagcatttttaattcccccagaatggcttaaccttggaaaggaatcagttcaca

SEQ ID NO: 538377 - DNA, 488 bp, Homo sapiens
gaggtaggacagcagatgatccaaacctctcgggcccacctcccagcctagggctctttccggggccacccgtccacctctcccatcaaattaaatcactttcctacacctgacagcagcccatggtcataaagcaagtaacaagccgaaggtcggtgtgggaggtggattggggaacacgggatgtccttaatggtggaaagaaccaggaaaactccatccagatgccagggagataccaggggtggccacgaggccaggtgacccaggaagaacttcgtctccttcaatcaccgggtccctttctggtggggcacggggtaggggcggagaaaatccagctggtactggctgatgacgcagaggtcaaggtggcttccggagcccaggtcgttgaagatgccagaggcgatgggttcgctcaccagattctgggcttcctcctcctgagaaccagaaggggggcaatacggtcccggggcaaacta

SEQ ID NO: 538378 - DNA, 178 bp, Homo sapiens
ggacttagcacacgccgaaagcccatacccccacgttagacgctcgaaatcccagtggagcgcagttgttgcgcaacaactctcgtccattcggatctgtgtggactctcggcgtgtgcatgcacacgccaagcatccatacacttcttgaagtcaagtcatatggacgaagttgttg

SEQ ID NO: 538379 - DNA, 199 bp, Homo sapiens
tcatggacacttaggtagcttacaaatcctgactattgtgaatagtgctgcaataaacataagagtgcagatattcctttaatatacttatttcctttcttttgggtatacaactagcaatgggattgctggatcatatagaagttccatttttagtttttgcagatcttactgagaattgtatctcaaaaatatagtc

SEQ ID NO: 538380 - DNA, 291 bp, Homo sapiens
  misc_feature (32)..(32): n is a, c, g, or t
gagcagcttcggacacaagcagcctgtcctgnctaagctttagccctgtcccacttcacgtggttctcagcgggctcgatggaatgtctgtagctcaccacaattctgcttccatttgtctttcaattcaacgtcagggtggggggagctggtgctgtgccaatcacagggagaagagcgtgagttcccacgtatataattccttggcgtgcgccttggataaagggttcacagctcctgtacacccctgtcagggcaggctcttttccattgccccgtggttcaaggccc

SEQ ID NO: 538381 - DNA, 194 bp, Homo sapiens
ggacggagggcctgctcatggtctgcatgttgtactgaataatgtcttctctaaaccaacgactttccacctcaatgctgaaccaaccagcattactacacctgaagagcaatgctgataatcactgccccttgagacagcagaatgccctttgcatgagagagactggctgggcggccagctggggaagcatt

SEQ ID NO: 538382 - DNA, 102 bp, Homo sapiens
acgtagcccagcgtaacgtagcttactgatgggcccggacgaggccctcaaaaccgtggaaatgatcagaccccacatatgcgacagacagagaatgaaaaa

SEQ ID NO: 538383 - DNA, 174 bp, Homo sapiens
ccgttactctgagactcctagacgaccgtttgactacgctcttgacataagactataggtgagacagcggctggggtagatggggctgaggcgctcaacgaaggatgtcacgggctccatatttctccatccagagctctggattttcgagacttcctgctcaagccagatttg

SEQ ID NO: 538384 - DNA, 558 bp, Homo sapiens
  misc_feature (147)..(147): n is a, c, g, or t
  misc_feature (149)..(149): n is a, c, g, or t
  misc_feature (234)..(234): n is a, c, g, or t
  misc_feature (361)..(361): n is a, c, g, or t
  misc_feature (430)..(432): n is a, c, g, or t
ctgctgggacttatggacgttcttctcaaccactgcacctggcctgaaatagttttaatgtgttgtatccttgtccccctctttgaaagcttatatcccaaaaacagaaatgaatcaaactcaagtcttgctttcaagtagctgaantncccaggcctgacttctcttgccagctcttttagtttgtgctttatgacagtgagctgtttgtattccttctacacctgtttcttnacctgcaagctaggcatgataaagtcatatttgtgtccttcctggcacagtgcctggcaatattgtgcccttgaatgtctgttgaatgaattattgaacaatgtgagacaaactctggaagaagttnggtccaagagacaaagcgtagtggacagaggttttggagcatcagacctgagcaagccagggggatccnnnataaggtgggctcttcatctaggaaggactgagctgccaaacaggttatggtcaagggtcagctggctgcaaggaggagaatgagacccagtagcagagcaagaattaacacaagattaaaatgcc

SEQ ID NO: 538385 - DNA, 172 bp, Homo sapiens
tgtggagtaatacgcgtcgttaagtagaggttaacgagggtgatgtggctatatggtgggtattataggcttttgttttttgtgaattcttcgcatcatgcccattttggcaataagccggttcgcgggggcaggcctcctctggagaggagggtggatcgaattcagggtg

SEQ ID NO: 538386 - DNA, 531 bp, Homo sapiens
agttgatttcagtgatgctcagtgtcgtggtcgggtttctttgaaatcttgatctgccacttgcacctaactgtagtacctatagggtaggttcctaacacattctgtggcctcaatttcaccattcttccaagtgggaataataatagtacctaccaccacaacagtatgaatgatgcatgtaactggttaaaagcagtggcacaggccaggtgtggaggctcatgcctgtaatcctagcacattgggaggccaaagcaggcagatcgcttgagcttacgagttcgagaccggcctgagcaacatgacaaaacccagtctctacataaaataccataaaaaaagggaaagctaggtgtggcagcgcatgcctttgatccccagctacttgggaggctgaggttagaggattgcttaagcccaggagcttcaggctgcagtgaaccagggttgcccattgcacctcagcctggacaacaaagcaggaccctaatcccccgaaaaaaaggcagtgcaggtagtacagtgctt

SEQ ID NO: 538387 - DNA, 177 bp, Homo sapiens
aggatcccccgtgatacgtcgcccggacggatgcgctgcaggtgcggtttcaacgggatgacgcccgcaatcccttcgcgcgtgttggcgatctggagcgccgccagctgtccgcactgcttggcgtcgacacatacgggtagtcgaggccgcgcaagcgaacggcgccgtcttcgt

SEQ ID NO: 538388 - DNA, 190 bp, Homo sapiens
  misc_feature (19)..(19): n is a, c, g, or t
  misc_feature (55)..(55): n is a, c, g, or t
  misc_feature (111)..(111): n is a, c, g, or t
  misc_feature (121)..(121): n is a, c, g, or t
aatacaataaaatgatacnggagattaaagatgaaatgaccgttttaggaaaaanccaagctgacctgatagagcagaaaaaaatcacttcaagaatttcagaatacaatnacaagtattnacagcagaatcaaccaagctgaggaaagaatctcagcttgaagaaaagttctctgacataactcagacc

SEQ ID NO: 538389 - DNA, 803 bp, Homo sapiens
ggaaaaaaaaaaaaacctctttgaaaagtaataattataacctaaatagtctaggaaaaaatgtcccagttaattggatcctgctatgtggtttaacccccaatatggtgtcattcatgggtcgtttggaaaaatcctaacggctttaaattatgctggtttaaccatctgctttggaggaacaatgtatttttttccctgggatatgatacttataaaatatcctatctggggctagagtgccaggaagctaccatgcttaggtaataaccccaattatctggctaataaacggcacctagaatttgaccccctgttgggcagaatatattgggattatttaaaccactaggggggaatttactttaacctctttaagggagttgacatttacaaccaattattacctgattaacttctttattacaacttattacgggtattaggaaataactctcaatattctcctctttttaacgctaataaagttaagtgcttcggaatttatcatgagaaaaagggttttcagcacattacttgaggcggcttaaacccccacggatctctcgtgatatatacattgtcgggttccccaactgccaaacgcatgattgtgatcgatagcatattggctggtccccaatgcccagggatatgacatggtgatatccctcaaattatggtgtacaatgctcggaacacatattggatcctataatgtgctccacgcagaagtgttaggggcggctaaaggtgaataagtcatcggaaatgatcgggtacaaccattaagtccgtaagat

SEQ ID NO: 538390 - DNA, 130 bp, Homo sapiens
ctgaggatacgacaacatagaatgaaatcccccaagatgcagctgctcattgtcagattattaatcaaccctgctgctgacctggaatctatcaactagtaagcattgattttaaaaataaataaggcat

SEQ ID NO: 538391 - DNA, 492 bp, Homo sapiens
cccacggggataacatcactcagatctgctccagcctggggccctcagaggctgccttctctccactgttctcaagtcctcacctcacaacttctctctacacagggcttggtggactccctctccgacctccgagacatatgcatagataaccccagactctgatagattccagctggagcacagggcttatcatccctaggactcccgtctctgatccatcaaaacctctccttcctcctcactgtctggcaatgcccagactctggtccgcgctgtggcctgtggatcctgggtgcggagtgggactggagcagccaccaagctgagcatgctggaaccatacccacaggcttcagcctcagtccaacagcagctcgtgaggctggacctccctctctgactcctctaaagcttttgcattccataaagcccctaggcaggcccatgccctgggatacttccaaaccgacacttgttctcctgagtccc

SEQ ID NO: 538392 - DNA, 285 bp, Homo sapiens
actgtactccagtccagggtgacggagcaaacctccatctcaaaaaaaaataaaaataaaaaataaaaaatgagagagagaatattctaaagcaaatgctattccaggccagagagagagagacagagaatattctaaagcaaatgctattccaggccaggtgtgttggctcacgcctataatcccagcactttaagagcctgtggcgggcggatcacctgaggtcaggagttctagaccagactggccaacatggtaaaagcccgtctccagaaaaatacaaaa

SEQ ID NO: 538393 - DNA, 285 bp, Homo sapiens
gactggtactagcagaacaagtatgactctgaccgagagggacgcgatgccacgggagatggaaccaaagagaaaccatatacaacaggtctacacggctttgatgacagtagggaacaagaaccatttcctaccatttacgtagcttcacaaacagaacatgagaggtggcctgttatttctacaaatcagagattgacagaaccattaaaacagatgtggcactacgggaaccaaactgaagacgtgacactccctgggacaaagacaacgacggcagacacg

SEQ ID NO: 538394 - DNA, 340 bp, Homo sapiens
aatacatctacaatatatcaagggcaatgtattagatatgtatcatttctcctgctcttcatttgctcgctcaagttttaacttttcctctagcacagcttcccttcaggttgaagaacttccattagtatttctttaagagcagagctcctgtaaatgaagcctcttggttttccatcacctgaaaatatctgtattcagctttcactcccaaagatatattttttctggatatacaattctgggtggatagttcttaatttcgtccagcattctaaagacggggtttcactgtcttcgtctttggccaccatggttgtgtatgagacatggacagtca

SEQ ID NO: 538395 - DNA, 147 bp, Homo sapiens
ggaaccagagaggaaccaagaagggaagaagaccagagcaagcaagcaagtggatttgcttccttgacgacgcagattgaagttcttcttcaacaacaaccttaagtttcttctttttattggattccagttctaagtcaagaccag

SEQ ID NO: 538396 - DNA, 423 bp, Homo sapiens
  misc_feature (32)..(32): n is a, c, g, or t
tggtatgaggtgttatttttttggaaattttngtgttatgagagttaagtggaggaagaagtgaatgtgtaggttgaagtgtaaaagaagaaagatgaggtagaggtttaagtaaattgttagtttgttgtattgtggaggttataggagtagaaatatggaatgttagatgttggggatgttggtataagttgtgggattgtatgttattgtttagagtttgttttaatggatttagaattttattgttttttgattgttgattatttttgagatttattttgtttataaataaaatgtttatgttggttttttgttttggatttgtgatattttggattatttttgtgtttatttgtggttgagtgtaataattatataataaattattttttttgttgttttagttgaagaattaaatta

SEQ ID NO: 538397 - DNA, 437 bp, Homo sapiens
  misc_feature (33)..(33): n is a, c, g, or t
  misc_feature (157)..(157): n is a, c, g, or t
  misc_feature (163)..(163): n is a, c, g, or t
  misc_feature (224)..(224): n is a, c, g, or t
  misc_feature (259)..(259): n is a, c, g, or t
  misc_feature (274)..(274): n is a, c, g, or t
  misc_feature (311)..(311): n is a, c, g, or t
  misc_feature (324)..(324): n is a, c, g, or t
  misc_feature (340)..(340): n is a, c, g, or t
  misc_feature (342)..(342): n is a, c, g, or t
  misc_feature (352)..(353): n is a, c, g, or t
  misc_feature (358)..(358): n is a, c, g, or t
ccctttttgaggtgtcagagcttgccaagtttnacaccgccttcagtaccgaactgctatacaagaacattataaaatacaaagtataaactacatgataatcctctttacagaattcagattagtgcattatcacaacattgctttaaaaagggangtgagnttactggcaaacctccaattgcttttttaatgaaggatgacacaaaatggcacgcaaggtnaacactaaattttgtcgggtgctcaaaaactgttnattgtgggaaagttnctttccaaaagtaattttgaccttaaaatattaaccnttattctttaagncataaaggatggtaantnatggcccccnnaaccnggtgatatggttaaggtaactagtttagtggggtaacaaactggggtcttaagaatccgtatcgcccttgcgttttggt

SEQ ID NO: 538398 - DNA, 145 bp, Homo sapiens
cgaaagccgatcatacactatctttcctagtgcttccctaactagctgtgactacaggcactgtgccaccacacctggctcattttttattttaattacttttgggaagaaacagggtccccaccatgttgtccggggatgggtc

SEQ ID NO: 538399 - DNA, 224 bp, Homo sapiens
gggaattgtgcccgtgaatttaacaaggattgatgggcattgccatcttgtctttttttttttaaacagagtctcactctgtcgccgaggctggagtgcagtggcacgatctcggctcactgcaacctctgtctcctgggttcacacgattctcctgcctcagcctcccgagtagctggtattataggcgcccaccaccacacccggctaatttgtgtcttttt

SEQ ID NO: 538400 - DNA, 196 bp, Homo sapiens
  misc_feature (164)..(164): n is a, c, g, or t
tgggcctgtcccaggacagccccggtctgtgatcgcctttggtgtgccctgggggcatgcgcgtgcagtgcgtgtgcatggccaggaatgggatactggcattcgaggtcacgcagtgcgtgggctttacacgcaggcgtcacggtccacccgtctcgactccngtgtgtctcgagcatgaggcttccggcgcctc

SEQ ID NO: 538401 - DNA, 183 bp, Homo sapiens
caatatcaaagacattctgcacagaaagaggaaaaaaatcctaaaatttatactggaaccacaataagaccaagaatagccaaacgcaatcctgagcaaacagcacatcaacagctggaggccatcaccattcacctgacttccacattcatctcacaacagtgcatcagtcaaacacaaaca

SEQ ID NO: 538402 - DNA, 319 bp, Homo sapiens
ccctgtgtgtgcacaataaggaagggtccccaggttgtagaagccccaagttgagaacaataatgaacaattattgtatgaacaattgttagagacagctaatcacaaacaacctgcgggcacaatgacctcattccacacgtagcacccttcagcaggaccctataaactttcctccagccctgcctctttgcaggtgccccttctctgctgagctgcccactgcaacatattttcacaatttctctaataaatctgcccttctttacctacaactatcttggtagatggctttaccacctgcaaaactgaccctagg

SEQ ID NO: 538403 - DNA, 340 bp, Homo sapiens
  misc_feature (22)..(23): n is a, c, g, or t
  misc_feature (25)..(25): n is a, c, g, or t
  misc_feature (94)..(94): n is a, c, g, or t
  misc_feature (129)..(130): n is a, c, g, or t
  misc_feature (163)..(163): n is a, c, g, or t
  misc_feature (181)..(181): n is a, c, g, or t
  misc_feature (290)..(290): n is a, c, g, or t
  misc_feature (325)..(325): n is a, c, g, or t
cgcaggagccgcagggccgtanngnccatggcgcccagcggatatggagtggtcttgaagccccacttccacaaggactggcagcggcgcgttngccacgtggttcaaccagccggcccgtaagatccnnatacgtaaggcccggcaagccaaggcgcgccgnattcgccccgtgccccgntgcgggtgcccatccggcccatcgtgcgctgccccacggttcggtaccacacgaaggtgcgcgccggccgggctttcagcctgggaggagctcagggtggccggcattnacaagaaggtggcccggaccatcggcatttctgtngatccgaggaggcgg

SEQ ID NO: 538404 - DNA, 165 bp, Homo sapiens
gtctcatccacctgaggatcgatcagtcgaattattttcagaggcacatttttcacgttataactgcatcttcattttagtcgtgcaaccctcttcacgtacagtcgactttccaacacctagctcgaacctcaataacgacagggtaccgacgctcgaaattcg

SEQ ID NO: 538405 - DNA, 238 bp, Homo sapiens
gttctcacaattctccgtgggactgggctgaggcaggggcttcgctctattctccctaaccagtacatgtcttccgtttcccccttggcacttagcagttatcccgccgcagctatgcctttctactccatccctcccttgtcccgtggctatatattgtgccttatttaatagctggcaaatatggacacttaaactatcagaagtgaaccacagtaaagattaaactgcagaaaag

SEQ ID NO: 538406 - DNA, 573 bp, Homo sapiens
  misc_feature (311)..(311): n is a, c, g, or t
tcatttcttcctaatctgatgatcttgattctttttgattaacatgaaaaatcctgtctgcttgttttgggaaaaaaaaatgctttttttctcttctagctctcctgtgtgacttttaggcatgtcatttcaccttgtctgggtgtcaggtcattcacctgtaaaatgagttggcttaaatatctccgagattccttggaaatttctactatttgcactatagtgaggattttaataatgacatgacttctcttttcattaattttgtccttcattctgaggtataaagatagtttaaagggtaagtttgnagatgggtaaatgtgcaatatttgttagcttctgtcctaagaatatttggattcatgactagagctagttgattctattaccttttgagtgagaaacgttagacagcatgattaagaatttagcaaatcctttctcatcaccataacttagctgagttgtaaggaaatccttttgagaatatggcattttgttttagtgattacaaccttgttaccagaatggagctttttacttgacaccattaaaaatatcagtatggac

SEQ ID NO: 538407 - DNA, 329 bp, Homo sapiens
  misc_feature (200)..(200): n is a, c, g, or t
  misc_feature (207)..(207): n is a, c, g, or t
  misc_feature (217)..(217): n is a, c, g, or t
  misc_feature (221)..(221): n is a, c, g, or t
  misc_feature (238)..(238): n is a, c, g, or t
cacactcccataaccttgcgtcccacttggaataatgcgcgataattgggtaattacttgggcgccgtatcctccattatcaaattcatacaacgtattattgcctgaagtcgtaattttttgtgctgtcatgattttggttaacacaatggtcatcgcttggtcatcgtcaacagttacaaacgccggccccaaaccgncaatggnatgttctggngccncagttgcctgttgccanggttggtgggccttgtaacgggttttgttgtgggttggttcatcagcaatcagcgcatagcgttggccatcaaaatcataggaattaaggt

SEQ ID NO: 538408 - DNA, 165 bp, Homo sapiens
  misc_feature (6)..(6): n is a, c, g, or t
  misc_feature (29)..(29): n is a, c, g, or t
  misc_feature (50)..(50): n is a, c, g, or t
ggggtncattcgcgtacgaggtgggatgncggaacctacagaccaggggnagtagtgggggagccggctccggtagatgtcctcgtccttctcgaggaacacgcagatgatcagccggtccacttgtcctgtgtgtccagccatctcgcagcgtggccagccgtt

SEQ ID NO: 538409 - DNA, 341 bp, Homo sapiens
cgccctgggggttttccggacccccgcggggtttggagccccccaaatatgggtgggttttggggtttttccccctaatcccccgggggggaaaacccttttttttttttcgccccggggttgggtttggcccccccggccccggggggcccatagaccccttccccggggttgaaggggccccggggaaaacccccggttgggtttttgggttgggttgggttggcctttgggttaacccggtttttagggggggcgggttttgggggttttggccaatcccccccccccaattttcctggggttttaaaaataaagggggtcccccctttttttttgga

SEQ ID NO: 538410 - DNA, 152 bp, Homo sapiens
aagacactatctttcacttgggagaagccttgagaagggccgtgatagacctggatgtcttcctaagcatgtacgtcttctgtccgtaacagtccagctgaggcactatgcaaaagcaggaagacttccggtctcagtaccttactgactct

SEQ ID NO: 538411 - DNA, 141 bp, Homo sapiens
aacaccagcttccagattcaagcgactctccggcctcagccacccgagcagctgggattacccgccaccacatctggttaaattttttggtatttttacgtagagctgagtttggctgtgtttaccggctgtggggtaccg

SEQ ID NO: 538412 - DNA, 329 bp, Homo sapiens
caattttaaaataagcaaataaataaggttctgtgtcaattaaataaaagttctctcaccatccagtcatcttaaccatatacgcccatgggtctcttatccacccatagacttagtggtggcagcagggttggtaggaagggagtggcaagggctctccactcaccggcccagaccccagattcttggcctcacagcatcagggtgtcagggctttcagctctgctcggtctccgtctcgactgaaacccatccccgtcttgcctggccgccgccgccggccgcagggcacgggtccggcgccagcgcggcggcctgttccgggcgtg

SEQ ID NO: 538413 - DNA, 197 bp, Homo sapiens
ggttatgtatggactgggatataatatcttcattaattatttttataatatatgacatttctgttgtaagtacataagtaaatgtgtgtgtatgcacacaatatatatgtgttataaaaatggattaatttatgatttcaaatatggagtatttattgagcatccattatagtccaaccatggttctaggattgggg

SEQ ID NO: 538414 - DNA, 526 bp, Homo sapiens
gaatatcgacaagatgaaagatcaagaaattggaaaactattgaaagatctcagctcaaagtttaaagaaatttaatgaaacccaagcagaataagtacaaagaagactacacacatgcatgttgatatagtttggatatgggtcctctgaaatctcatgttgaaatgtgatccccaatgttggaggtgtgacctagtgggagatgtttgggtcatgggagtggatccctcatgaatggcttggtgccatccccttcatgattagtgagtttttgctctatttgttcacgtaagaactggttgtttaaagagcctagcacctccttcctgcctccctcttgctctgtctcaccatgttgacatgcctgctctgcgttggccttccgctacaagtaaaatcttcctgagacttcaccagaagctgagctcatgtcggtgctatgctgtcagagcctgcagaaccatgagccaaataaaacacttttctttataaattctcatctcagatattcctttataaacaatg

SEQ ID NO: 538415 - DNA, 554 bp, Homo sapiens
  misc_feature (29)..(29): n is a, c, g, or t
  misc_feature (43)..(43): n is a, c, g, or t
  misc_feature (57)..(57): n is a, c, g, or t
  misc_feature (61)..(61): n is a, c, g, or t
  misc_feature (109)..(109): n is a, c, g, or t
  misc_feature (140)..(141): n is a, c, g, or t
  misc_feature (206)..(206): n is a, c, g, or t
  misc_feature (221)..(221): n is a, c, g, or t
  misc_feature (231)..(231): n is a, c, g, or t
  misc_feature (262)..(262): n is a, c, g, or t
  misc_feature (266)..(266): n is a, c, g, or t
ggaaagttcaccctggttagttcccaagnggatttcataactnggaggggaaacccntacnaaatgtataggagtgtggaaaagcctttccagccagagattcaaattntttgtttcaaacattcagagggatttcatanntggagaaaaacccctatggaatgtaagggaatgttagggaaagctttcagttcagaatgcacacntagttcaacatgtgngagttcatantggagagaaaccttacgaatgtaaggtatgncganaagccttcagccagtttgcctaccttgctcaacatcagagagttcacacgggagagaaaccctatgaatgtatcgaatgtgggaaagcatttagcaacagatcatccattgctcaacaccagagagttcatacaggagagaaaccctatggatgtaatgtctgtgggaaagcatttagccttcgtgcatactttactgtacatcagagaatacatactggagagagaccctatgaatgtaaggaatgtgggaaggcctttagccagtttctgttgcttttttccaaga

SEQ ID NO: 538416 - DNA, 223 bp, Homo sapiens
gcatccaacctccatctttgtctctccttctttgcgatttttgcatatagtctcctcagttgcttctctcacttttggcaagtcctaatatgttttcttaatttctgagtacatccttaatgtccctctcagaacatttttccagatttccctttggaggcttcccctgtatagcctaacctttcatagtgatggatacatattctttgggcacggaagatca

SEQ ID NO: 538417 - DNA, 361 bp, Homo sapiens
cgaggagccccaacgcgctgatagcctcccccttctccctcatttgtttagtaccatgagggactcatattcctaccgttttttttttggagagggagttcgctcttgttgcccaggctgaaatgcaagggcatgaccttggttaactgaaacctttgcctcccaagttaaaggggttctcctgcctgggcctcccgagtggctgagattacaggtatgcgctaccacgcccggctaattttgcattttggggggagacggggttcctccatgttggccagacgggccttgtaggagaaatagactccactaaaatattacagccaattggtaaaaataagacgagaaatcgcaacacctt

SEQ ID NO: 538418 - DNA, 234 bp, Homo sapiens
cgtattagcacaagtatccatattgaagatactgagagacaggtttaaggaagtgaggtttcgggctagagcttgtacaaagaaatgagggctatccctgaagccctgagggaggacagtccatgtgagttgttgtgactggagggtgtcagggtcagtccaggtgaaagcaaataggttttgggaatcagagtgtagggaacatggtacagaaggcatcctccatggtgctga

SEQ ID NO: 538419 - DNA, 576 bp, Homo sapiens
gccgcccgtccaagagtgggtctttactggattccgatgaagttttattggactgtttgtctttgttctcgtgcctcttgtattctagcatccgcccgttccccttatagcccagtagaccagctgaccccgtccgggagtgacagcgtcatccttggtgataccactacccgtggtgcccagtgatgaagaagatggacagcctcggcgggctgtggaccacgagaaagagggagtccagtatagctactccttattccacctcatgctctgcttggcttccctgtacatcactgatgaccctgacccactggtacaagccctgatgccaagtttcacgagcactgacccgccagtggcccgctgtgtgggtccagatcagctcccgctgggtctgcctcctgctttacgtctggacccttgtggctccaccttgtcctcaccccgtcgggagcttcacgctgaaacctctgagctgcccaggacaccccctggaactccccaaggtctccttccccgaaacccatataccttttaagtttgtttccactaaaatattaagtgaatgctttgcca

SEQ ID NO: 538420 - DNA, 209 bp, Homo sapiens
tgctgtatccttttggttggtttgttttctagaagtacgttcacgatgcttatggggaatgcaatgtatgatatagctagctctctcaccacttagctcactgtgaggataaaatatgcatgcttattgtaattaacctggtgctttgaacatcttttttaagggagaaaaatctcaacccacgttatgctcatccagacaagctgacc

SEQ ID NO: 538421 - DNA, 400 bp, Homo sapiens
  misc_feature (1)..(1): n is a, c, g, or t
  misc_feature (20)..(21): n is a, c, g, or t
  misc_feature (73)..(73): n is a, c, g, or t
naaaaaaaaaaaaaaaaaannaaaaacacactaagcaaaaacaaatcaaatcctatttgcagccgactccaanaggtcatcagccggctggataaacagatgacaaagttcacagcatataaggattaaaagcagatctgcacacgcagtgaaaatatcattgagggcaacaaaatgccattgtgaccttgactggaatgtgtccccattcctactctaccaaacgccccaccgcactctccgcacaaagaacaccccgcatcccctctccaccccgctcctctttgcaaccgtaccgcagccataaagatgaccccgatcctggcaatcacgagccagaaaccaccactgcgcaacaccaacaggcctaccccgccgaaaccacaccacatagcaacca

SEQ ID NO: 538422 - DNA, 440 bp, Homo sapiens
gacggctcaacggaactttatgtgggtgtgttaggtatggatttctctgttgatactgcgtgggatttattggggggggggtgtaaaaagtaaagtggaggttcctcctcaaagactttcctccccatctgattgggaataaatagtgacttctcttaaaaacataacttattcaaagacctgtactaacattcttaaatatctgctagctgtaataaagaaatcaatgtactttatgttcttagctcccacaatttaacctaaatattggcccgggcgtgcttatactggtccaaacaagcattaggtcatagcctgttcctcttccttatgggaaggtgtttttacctttttcaacattccacaagttacttcctccttccttggttctcctctgccttggcctcttttaaaaagttccgttgaagccgtcgggtacc

SEQ ID NO: 538423 - DNA, 1231 bp, Homo sapiens
ggaaacaatggttcatggcgataaacagctggctatttgtatctcaacaactcagattggtcacataaatgccacggcattccgaagtttcgatttcgattaacattgacaggcattactgtgtgtctcaattttttaacaaacctgaacactgtgacttactaggggtttcgtaactttagcacgaactcttacctgggtacgaacaccacttacgacctgacattatatgtacacttctctggacacggtctcaactcctgactatcaaacataactcattgaaactacaattccatttgtacaacagttggtacacgaacaggttactcgcagcattactattggtggatgctggcacccgtgcgacgttgagacaccacaatcaatcttgggccttctgccgtcgcatcggtcaatttccacacgctacatggctaggccggaaggtagcgggccactctaacagacaacttgcacctggttctggggctcgttggccacttttaacaaagtttccatgaagcaccaacattgtcccacaagggactaacctcctgacggacaacactcccgaagttccttggaaattgggaccaactgccttactggtcaggcgcaagaactaacctgcggcttaatagacgcccctttggcaacagcgttccaaaggtgcatcattactacatcaacaacgcaatcaccttgacaccccccttttttgcttaccagccaacgcatcgttcccactacttgtttgacccaattatgcacaactctggaggcatcacagctaacgtgcgacattctacaccttcagcacttgggtgcacccaccgtgcgaggttaaacggacaacaacaagcccggcgggcgtaccacggcaatggaccctcaatctgcgtcaccggcggctacaagcccctgtgacagaacaaatgggcaggagaccaggctcaggcagggacgcgaccactaatctgccccaaacactatgtgacgaggtcggcgcagacggaacacgtggaaccaccgagagttaaaagcgagatagccactgcgtgcccggacaaactggacccacaaggggaacacggaccactccgaacaagaagacacagacgacgcgcgtacgagccgcccaagaagcacggtacagccagcgacatgacgataccaccccataggaggggaccaagcgacgaaaggcaaatggccacaacaagaaacc

SEQ ID NO: 538424 - DNA, 932 bp, Homo sapiens
ctgcgcggttgttctctggacgcggcgtactttaatctccgtccgccttctctcctacctaatgtgcgtgccggcacccgatggaacgcatcagatggacattggacaccgaagcccccttgaggcccccaagaactactcttaatcgagttggtgacactacaaggccgacaaacgcattactcacctttacaggtggacatacactgactgaaacactgagcaccagtatatcattcaaagaaacgggtacagatcaagcgggcctggtgccaccaggatgagtttgcacattgggtggaacgccagatggcacatgacattaacgaagggcaagtcccaatctttacacaggtacacccacatttgggcaaacctatttttgccacacacactggtccttggttacaagacacaaaaggggtaataccccctttaggcagggagccatttggaaaattaaaccacccacaccacaaggtggcttcttaaacggcgcttcggacacggttgatgacgtacccaagcgaccccaaggatgtcaataattaacggctggggaacaaggacaacatttaggataacgaccttgttgagaagggaacaggatttgccaagaatgtccagcgcacagcgatttgcacccaaggtgacgggacgacaattgttgcaacacctccctaaagagatactactcgtgggcaacagacggcgctcttgacccccacataaaaggtctggccatagccaaacggaggtccccaccgaggaaagaagcgaggctataacaaacctttgtcttgggcctgacacttgacacgcaactggagttagacaccacattcaattgaccttggcaccgaatcgactgaaactggcagtacacggcaatggcattcaactgcacctgactagcacatcttcctgatcag

SEQ ID NO: 538425 - DNA, 305 bp, Homo sapiens
aatagctaggtagcacgcgagcccttgccaggtacgacacttagtaggatgccaaagtatttcgggccacgaggggaaaccacctccctattattaggtagttgttcctccagatcgaggactcgttgttggtggctcatttcatttcctcccctttggctcaaaacaagatgaaaaagcgaggtttgctacactaacagcagctgggaaagaagttatgcttgttggaattggtgacaaaatcagaggcatactttataggactcattctgaccaccttctcgtggcattcaaagaagtgggaa

SEQ ID NO: 538426 - DNA, 255 bp, Homo sapiens
ccactccaccttattaccagacaaccttagccaaaccatttacccaattaaggtttaaggcgttagaattgaaacctggcgcaataagtttagtaccgcaagggaaagatgaaaaattttaaccaagcataatttggcaaggcttaacccctatacctgctgcataatgaattaactggaaataactttgcaaggggagccaaagcttaagacccccgcaaccgaggcgagctccctcagaccgacttgaagggc

SEQ ID NO: 538427 - DNA, 409 bp, Homo sapiens
tacatctttatgcatagggtgtatgtaccaggcgacgctatttgtggtagctatagagtctattcttcatgctctggattactcgaacaatgggattatctttcttaaaaacctttggaaaacatgtcactatgtacgacaaatactcagttctattggtggtataaagttagtggtttgagagtatacttccagacttaaatactatgcatttcagtaacatatcttattgtattctgtgcctcattgtgtatcctgatagcaacataaactagagatactaaatgataaaataacatccctatattagcatctttcttttccttttgtgtttgtctaacattttacaatattttcaccaataaaatatggtattacagtttcatcattccttatctgacacccttat

SEQ ID NO: 538428 - DNA, 192 bp, Homo sapiens
ggtcaatccccagaccctatgttgagccaggcctctctcacctctcctactcacttaatgcccgcctgacagaaaccacggccacatttggttcttagaaaccccctgtgaggcgttctcatactctaatgagcaaccgcttccctattgatgtatttatttgtttgtgtgtttcaattggcccttatcgag

SEQ ID NO: 538429 - DNA, 862 bp, Homo sapiens
  misc_feature (82)..(82): n is a, c, g, or t
  misc_feature (90)..(90): n is a, c, g, or t
  misc_feature (97)..(97): n is a, c, g, or t
  misc_feature (100)..(100): n is a, c, g, or t
  misc_feature (103)..(103): n is a, c, g, or t
  misc_feature (141)..(141): n is a, c, g, or t
  misc_feature (166)..(166): n is a, c, g, or t
  misc_feature (172)..(172): n is a, c, g, or t
  misc_feature (183)..(183): n is a, c, g, or t
  misc_feature (194)..(194): n is a, c, g, or t
  misc_feature (208)..(208): n is a, c, g, or t
  misc_feature (210)..(210): n is a, c, g, or t
gtcctcccggggttgtagcggaggaggagcgggcgccatggcggttctactggagaccactttaggcgacgtcgtcatcganttgtaacngaagaanggncgngtgcctgcttgaatttcttgaaactgtgcaaaataaantattacaattattgccttattcacnatgtanagagggatttnatcatacaaantgggatcctacagngnactggccgtggaggaaaatcgtatctttggcaattgtatggtgatcaggcaagctttttgaggcagaaaaagtcccgagaattaagcacaagaagaacggccagtgtccatggtgaactaatggcagtgatcaacatggatctcagtttcttatcaccacaggagaaaatctagatatcttgatggtgtccactacggtgttggtgaggtgacagaaggcatggacataattaagaaacttaactgagacctttgttgacaaggactttgtaccatataaggatatcaggataatcatacggtgatttagatgatccatttgatggacctcctgattattatcctgatcggttaacagaacatacagggaacaatagataggtgtgaataggagcagatgagacatgatgatctcacatgaagaattagtgaggaagttgaaattaaggagaaaggaggtaaatcaggtatactttggcaggtggaacctactgatggaatttaatcgaaatgtgtgtttgtcgtgccggccaagtggtggaaaattataattggcaaagggatttcgaggagagacctgttataggtgaggaggggaataaggttttatacctttacggatagggcattgaatttaaatattaaaaagata

SEQ ID NO: 538430 - DNA, 604 bp, Homo sapiens
ggcctcctcatgggaatgtgtctgggggtcgtgtgtgccacaggggctgcagcgcagagtatgcagattgcctttgtgcccccggctccgcttcctcagtgccctgccggtgtcccttccctggctacccaatgctcaggcatccttgtgacctgtggttcttgggctggtgatggtgcacctgagcaacctgtgcacgggcagcaccatcctggtctcaactccacccaagactggaactccagcgaccccagctacctcccagtgacatgaccctgtctgaccactgccatgctgacctgacaggctccggcttgcccttggacacccacttggtccccttgcttctagtaattctacctctccaggactggcacactagcagccaacacctgactcctcctttgtcagtgacgatccctgactgtgctcaggccctgtcccccagtgcctgtactgtaattcatcccagcttggaggcaagggaggggttttagcttcattgtacctacagggcaggcagaacgcttgatgcccttcaacaacatgcttgcagccctgggggtgtggtgccctggagtgtgctctcctaccaggtgtacag

SEQ ID NO: 538431 - DNA, 227 bp, Homo sapiens
aggatatgcaggcacactgtaccctccctgccaacatgttccagccacacaaggctgtgacagtggacctgtgaaccattatatatccaaactataaagaaacactgctctctgagaaaagacactgcccagtgtgatgaagctccagcccctgttaggtccaaaacccagtccaaactcagtccctttagagagctgctgtgccttgtaagtgtctacctgtgcgt

SEQ ID NO: 538432 - DNA, 448 bp, Homo sapiens
gggctgttggagttgaaggatgtgtcctacaagctgtcttttgctgggtctgttggattattttatttgtattggataggtggtgaggcatagtggagccatgaggagttttaaaaatgagacattacttaacattcatcctgcaaaaataaacaattcagtagtttttagtatattaacaaacttatgcaaccatcattactatctaattccgaaacatttcatcaccccagaagtaaaccctctacccattagctgccactccctgccccatttctccttcccccttagtccctggcaactactgttctattttctgtatctatggatttgtctaatcctgacatttcatataatcatttttcttttcttttttttttggagacaggatctctctctgtcacccaggatggagtacagaggcacaattgcaactccaacagcctct

SEQ ID NO: 538433 - DNA, 403 bp, Homo sapiens
  misc_feature (45)..(45): n is a, c, g, or t
  misc_feature (60)..(60): n is a, c, g, or t
  misc_feature (65)..(65): n is a, c, g, or t
  misc_feature (68)..(68): n is a, c, g, or t
gttcggcacaggcctggagaccgccgggagcccgacttcctggcnctttgcctttgggangcggncanaggaacagcgccaacctctctccacaagccagggaccctacaacccaccgcctcaggccagaaccagcagctgatttagataccatcaagacacctaaaaccttatcatgagccagatgctgtggaagagattctgggagaatcctgaggaccccccagttgcagccatgtcaagactgatgcttgaggaggaccccaactgttcacgaggcaacacccgttcggaacacagccacctatttggggggaaagattcaaggaaggttgttcacagatgggtgggaaggaaaaccttgagggaaagcggggacaaccagttcacatttgagtatttt

SEQ ID NO: 538434 - DNA, 127 bp, Homo sapiens
  misc_feature (125)..(125): n is a, c, g, or t
attcggcactagggcaacctccacctcccagatgcaagcgattcttgtgcctcagcctcccgagtagctgggattaaaggcatgcgccaccacgcccaggagacagcttcccaaggctggaaagnaa

SEQ ID NO: 538435 - DNA, 1099 bp, Homo sapiens
aaaataaatgtgtatgtgtgtacatatatatacacacacatagggcatatattatgcattgtggtgaaaagaattggctagcataggggatttttctgaagcactgcaacaaagtagaaccgtatgcaagaatggcttcagttatcactttctgggtgtctgtatcctaagaatgtttctgaaaagatctaaagcctttggtatcccatatcccaaattcttatgagccactcacagcaggcagcatatgttgaaataagattattgactgggtacacaccgtgcattggccgtcaccagtgtactttatttgttgattaaagttgatctgacttctcagcctcattctggagctaacacaaaatgaaaggcatgaaatccatgaacacattgcttctcggcctttgggctaagatcaacgtgtagaaatccatgaacactaaaggacttcattgattttttcagagagtagaaaacaacttagttttgcttgttttcctgaatgcgtcataggcttgtgagtgagtttgtccattcaattgtgccttcttggtgttatgatgaagatgggggtactctaaggagatcaccagtcgtgtgaggatgcctttaaaaaactattgagcttcaatgggggaagaccaaaagggtcaaaggggccctgaaaagttaccatcggggggaagtcccgaaaagagatgcccggatgagacgctaagatgccaaagaggaaggcggcaaccccgggagagcacacccaagaaaagcataatgcgccaagacccaaagggacttcatccctgtctgcgcccagacacacacagatatcgacagaacaagccgcggggaggaggagcgaaaagaacggccccagtaggatccgcgggcacaacaagcggtacactccgcagcgagaacctagatcggaaaacaacaaacaatattaatgaacaggacggagcgataagagtgacaataacaaacggtgggagactagatattagagagattgatgagaggaaacaccaactcctctgcttctctgtttctcttccttctcctttgctcttagagaaacacagggaacaaacagaaaaaa

SEQ ID NO: 538436 - DNA, 184 bp, Homo sapiens
  misc_feature (107)..(107): n is a, c, g, or t
ctctatgaggatcccagatattccgggatctgagtagtatgaatcagtaccagagcttgaagaacagtgattccacccgaggcaaccacacaacaatgcccagctgnctggcaggcagcttgaaatcagatgatgaaccagtcagtaacagcaaaacagagtctggagtgaaagagaaggcacg

SEQ ID NO: 538437 - DNA, 508 bp, Homo sapiens
  misc_feature (315)..(318): n is a, c, g, or t
  misc_feature (341)..(343): n is a, c, g, or t
  misc_feature (359)..(359): n is a, c, g, or t
  misc_feature (373)..(374): n is a, c, g, or t
  misc_feature (380)..(380): n is a, c, g, or t
  misc_feature (382)..(382): n is a, c, g, or t
atatgtcattccatcagtgaaaaaatattttctcccagggataagaaaggtattctggtaatacattatcatcaatccttaaacagtaacagtcttggcacttatcacaaaaccgacccatttcttataaccagaaagattatcttagactgtccttcacattatactttacctactgccttgtaagaataagagttgctcactgtgtttacttgctgtcctccatattctccattgcaccattggtgtataacgttaagagtttcattgaatattattttaagtattacaaaaggcagcttgcttcttaatttnnnnccccccccccccctctttttttnnnaaaaaatttggggggncccccccaaatttnncccttntnttggggggggtttttgaagaaatttaattttttgatgtaaaaaggaactgttaaaaaagttggaagctttgcccctgtgtatatatatattttagcaataaagcagcatgggctgagaatgcaaaa

SEQ ID NO: 538438 - DNA, 228 bp, Homo sapiens
tgaggatgagctgcaaggagtgagaggggacaaattctcaccttgtaggagcctgcagggtgacgctgatactgagcacgtcccaggggcatgtattggcctgaaggtgcggtggggattgagggctggcgccagccttcctctgcagctgacctctgttgtgctccccttggacggctgagagccccagctgacatgtaaatacagttgttggcctctagcgacccg

SEQ ID NO: 538439 - DNA, 191 bp, Homo sapiens
tgcatcgtgatcaatagttcctccttgggtttgaagtcactgtgggcattgctgacagcgtgcaaccctttcacattatttaatgcgttagaattattatattctgtacattgttgctatctctaaagttgtacaatttatttttcgtcttttggacttaactcctaagatgactcagtattacctagttt

SEQ ID NO: 538440 - DNA, 113 bp, Homo sapiens
ttggttgctagtgattaaatgtctaagcgagggtagggaaggggaatggttgaacctctggagatcatatgtaaccaatcctgctcagatctgtctggggcagcggggtagca

SEQ ID NO: 538441 - DNA, 862 bp, Homo sapiens
agttcaagaccagcctgcccaacatggcaaacctctgtctctactaaaaatacaaaaattacaagagcatggtgacacacgcttgtaatcccagctaccggggtggctgaggcacaaaaatcatttgaacctgggaggcagaggttgcagtgagctgagatcacgccattgcactccagcctgggcaacagaacaagactctgtctaaaaaaaaaaaaaaaaatttagaaaactatttttcaaaaaggccaaaagttcaagggttaagcaaaatttgttaagtaggtcaaacgggaggtgcttcaacctttggattttagccccatatacctggttatttcccccaaagtgcctccctcaataaacgggcatctagtagtcttagacccttatcaaaacctggtaaaggaaacaagtggaatctcatactaaagtttaaataaacagctagtcttggagtgagatacacactcacaagaatgtcttaaagagataagctaccagtagaaagagatgtcttccgctatccacctcaggacctgaatagcctaaatataccatggtggtttgtccccggtggggcactgggaccaaagctggaaatcttcgaattagtcaggggcttcacaggagttccgggccgtcgaaagggcttatcccagccggactgtaatggacacattcttgaacgcatactatcgctaagggaacaggcccaaaatggaggcacttcggaagtcttagacactaaacacggggggggggaccgatccactgagggagaaagatggttgacggcatggcctaaaaagggggtcccgggaaaacaggatggggacacacaagcgttgatggaggctat

SEQ ID NO: 538442 - DNA, 623 bp, Homo sapiens
  misc_feature (337)..(337): n is a, c, g, or t
  misc_feature (456)..(456): n is a, c, g, or t
gtaagaaatcacagaatcatatgattctgcttttaccatgcccctggagcaatgtctgtgctagggaaacttcccgtcccatatcctgcctcagcccgccaaggtagccatcccatgtaacacactgtgtcctggtgctctctgccactggaagggcagagtagcctagtgtgtggccctgtccatctatcccagtcagggccattcccggacactccatgcttagtcactgcctgcacgaggtctgtgctgaggccttatcattcattcttatgctcttgaattgtctcatattgcgagctgaacatgctgcagtttctacattttagactcaaanacatgctctcccctatatcctggttctgagttagccttcctccatatcctattctaaacaacattttaagagacagtgtaggtgttccgttcatcctgtaactctagaacatgatcctnttttgaacacttcgagtcctaaggaaacgaggagtgcttgtcccctaagcagtgttgtaagtggcaacggcaggcctgtctgaacggacactttcctgcctaagggagagtggtattgtgcagactagacattctagtgctgctgacgattgactcattgggaaatc

SEQ ID NO: 538443 - DNA, 452 bp, Homo sapiens
aacgtcagactccttgtccaatcttcacggtgctttgtggggatctgtaggaggtgggacttctgtggggttaaggggatctccagagaagcgcgcacaagctgtccccttcccacatgtgccaatccatctcctacagccccctgactgatcgcctgctggctgggggcagctcccaggatatcctgccttccaactgtatctgaagcccctcctcctaacatggcgattccggaggtcaaggacttgggctctccccagggtctaacgggttaagggtgagccacatacacagtgccaagggggatgtcaagtggtgatgtcgttgtgctcccctcccccagagcgggtgggcggggggtgaatatggttggcctgcatcaggtggcctaatcactctgagtcacaggtgtgggatggagagtggggagaggcacttaatctgtaacccc

SEQ ID NO: 538444 - DNA, 743 bp, Homo sapiens
  misc_feature (502)..(502): n is a, c, g, or t
ccagcctgcgaattcccattggttgcagggtcctctgtgtgttcttgcccctcctgcttaatttaacccagtcccttctgcctccctccgacaacctctttcccatccgtagccttaaattcccgagctgcccgggcggatcgtagtgttgattggagggatgagaatacccgccgggtccgattggcactgtctccgcctgcgttctcggagtagcttccctgcgggtgggctggagttcggcggccggcgtagggcgcggcctgcagggcggtgggagcctccccggggctgctcgtgttgcagcttgggatgatactggcggaacgcaggacccaactcccaaacctgcggaccttgaccacggacgagccctgtcccagctccccacgtgcccaggggaccagagcaggcaggacgccttccaagtattcaagggccgtgggtttgcctaacgcttcgtccccttgtgttttcttgaaccaaccgttagcggaccagngtgtaccccttcagggaggcccacagttccggggctgggccgctcattgaatgcagtgattcaccacgtaagttttaattaaccaaacttgataaggtgctccggaggaggaaaaaattaacttgttgaaaagcggcaacttgaagggttctccccccaatctgcagttgagcccgggatccagaacagaacacaggccggccgccctgaagaaaacttccaagagcaagaagaaacaacg

SEQ ID NO: 538445 - DNA, 155 bp, Homo sapiens
ggggagaatagcgtgggtgatcctctgcttctccttgtgggagtaactgggactcctgttgtgtgcgtcttgctacggattctgctatcgactactgcttctgagatcgtgatcttccactaacttgtgacttctgatgcccgatcaacatttaa

SEQ ID NO: 538446 - DNA, 578 bp, Homo sapiens
  misc_feature (2)..(2): n is a, c, g, or t
  misc_feature (483)..(483): n is a, c, g, or t
anatgatactgagtggcagcacttcaactcatggtcttcacagcaagcttagggggcttctccaaagctggcttgggaaggttgtcaaaccttacaaaaacaagggggaacctttttccggaaaaatttttttgggaaaaaagtttttagagggcccccttggcgccccttggggttttaaaacccaaaaaccccccagaactttttttcccccgggggaaaacttttttttttttttttccccccccaagaggaaataaaaaaaccccccccccggggggaaaaaaatttggtttcttaaaaaagataaaaaaacaaaccggggaggggcccccccccatttaaaaaaaaactcccttttcccgggggggggggggccccccccccaaaatttttttttttttttggttttggggggggggggggtttttttttttggaagagagacaacaaactctccctttttgttgggccccccccccngggggggggggaagcgcccccccccccttgggggggggggggggggggggcacaccatttttttgttttgtttccccccccccccggcgcgggtg

SEQ ID NO: 538447 - DNA, 311 bp, Homo sapiens
cacaactagggtcagcttctgcaggtggtaagccatttaccaagatagttgtaggtaaagaagggcagatttattagagaaattgtgaaaatatgttgcagtgggcagctcagcagagaaggggctacccgcaaagaggcaagggctggaggaaagttttatagggtcctgctgaagggtgctacgtgtggaatgaggtcattgtgcccgcaggttgtttgtgattagctgtttctaacaattgttcatacaataattgttcattattgttctcaacttggggctctccccaacctggggacccttcctta

SEQ ID NO: 538448 - DNA, 452 bp, Homo sapiens
gagtggtggcaggctcctgtaatcccagctacttgggaggctgaggcaagagacccacttgaacccaggagttggaggttgcagtgagctgagattgcactactacactccagcatgggcgatggtgagtctccatctcaaaaaaaaaataaatagctggatgcaggccgggcgcggtggctcactcctgtaatcccagcactttgggaggccgaggcgggcagatcacctgaggtcgggagtttgagaccagcctggccaatatggtgaaaccccatctctactaaaaatacaaaaattaggcaggcgtggtggcaggcgcctgaaatctcagctacttcgggaggctgaggcaggagaatcgcttgaacctgggaggcagtttgcagtgagccgacatcgtgcaactgcactccagcctggcaacagagcgagacttcatctcaaaaaaa

SEQ ID NO: 538449 - DNA, 305 bp, Homo sapiens
cgtacatttaataaagctccaaaggtaatacagtactagatcagacacagatgccaaagtgcagagaacattctcagatggggcctgggatgcaggatgtgctcacgcctgtaatcccagcaccttgggaggacgaggaggtgcggatcacgagttcaggaagatcgagaccatcctggccaacacggtgaaaccccgtctctactaaaaatacaaaaaattagccaggtgtggtgacgggtgcctatagtcacagctactcaggaggctgaagccggagaatggcgtgaacccgggagatggag

SEQ ID NO: 538450 - DNA, 319 bp, Homo sapiens
gcctgactactttcaggcggacaaatggtcactgcgcctggtgggtggctcatgcctgtcatcccagcacttgggaggacaaggtgggtgtgatagcctggggtcgggagttcgagaccagccagaacaacatggtgaaaccccatctctactgaaaatacagaaatttgctgggcgtggtggtgcctgcctgtagtccagctgcttgggaggctgaggcaggaaaatcgcttgaacccgaaaggcggaggttgcagtgtgccgagattaagccactggactccagcctgggcaacaagagtgaagctctgtctgaagg

SEQ ID NO: 538451 - DNA, 155 bp, Homo sapiens
cggggagggtagggtgctggatgacaccatcagctcagtattcctttgcaatcaggaaggctgatgttccttttgaagaggagttcagaaaaaggatgggtattccttgtcaccggcttattttttttttccctttaaattaggatttctttcat

SEQ ID NO: 538452 - DNA, 672 bp, Homo sapiens
  misc_feature (272)..(272): n is a, c, g, or t
accaaagtgttttaacctacttatcccccgctataaggaaaaattttttccaggaattccagaaaaagtaaaaagtgaagggggttcaagtgggctttctgggccaataagggcccagaaactgttaaactcactcatttctgcatgggacctactttggtctgaataataatattaaaatatgtgttaaaacattcctacatcagaatttgcgcctgtgttttcttccccaagaaagctataaacagcgaaaattttgttgtaagcttccntgtgtcctctctccctctctcccttccccctcccctgaaactaaaaggaatgttaaaagcccacttttctgtgaccagcagaccttatctatggtcccaattccaattccttgtaaacacaatttgtaaaatcccgtgagatcctgtctcctttgccatcccgctgcaaggttataagtagagaaaacttaagttacaattccagttttcctcaagatctgagacatgttaattgtctttgtttctccctctggtaacatcttcccaccacacatatttcctgccttagagagtttaaaaggtgataaaaaaatctaacactggctaccccgctcgggaccccttccacgctgtgaaagctttgaactgtcactctgcttaataaagcctacagcttttt

SEQ ID NO: 538453 - DNA, 391 bp, Homo sapiens
  misc_feature (12)..(12): n is a, c, g, or t
  misc_feature (36)..(36): n is a, c, g, or t
  misc_feature (258)..(258): n is a, c, g, or t
  misc_feature (338)..(338): n is a, c, g, or t
gtttacagtggnatccatatgccatagttgccatanttttatttgggaaatgtattttgccttatgatatgccttacctatcctaaagaaagttacctggcccgggtgccagttgtcacgccctgtaatccctagcactttgggaggccgaggctggtggattgcctaagcctcaggagtttgagatcagcctgggcaacacggtgaaaccctgtctctactaaaatacaaaaaattagctggtcgtggtggcatgcncctgtagtaccagctacttgggaggctgaggcaggagaattgcttgaacctgggaggcagaggttgcagtgtgccaagantcgtgcccctgcactccagcctgggtaacaaagtcgagactctgtctgatgat

SEQ ID NO: 538454 - DNA, 934 bp, Homo sapiens
gcgcttaagatcttcatccctgaagatgctgtccaatgcgcgttgttgcggacgtgtgtccgggcgccttacctcgggttcggccgtcactgctctccaggagaatgctatcggagattcatactttcattgctagcaaggaaacgttccatgcactctaacactcatcttcaaaagactgcggactgcgtgagatgtccatctattcgttggaagaagcgtattcttaggcatgctgatacctcatgttgagtcttgaagaacctggcgcgtggtctttaagctcattgggatgatggttattcgacccgcgatacatggtgcgtgagcgaatgctccaagctagaacgaaatggtcagagcttctgctctcagggcttacagagacggcgtatgtccattcgcaaacatccggaaatccctgtagcacatggatacgggagggattggttcgcatggcttctgagcgacacatgccttaacgacagtgacagtgtaggaggggcaaacgcggaaggattcactcatggtgccacagcaaggaacgagaaagggatccacatactgatgagttggcctaaccgggctagcccccaagtgggcgtatgtttaccccttgtagacgccgcaccttggtaccacaccacacgtggcatgaaaagcagcaaaaacgcaagacaccgcgacaaagcacagacgaagatacagagagaaaagaaagcacagaatgagaagaccaagagcagttcccaccaacaagacacacaagagcggcgtcggagacgttagcgagacatgggacgaccgcaccggaagagaccacgggggccaccacaggaggaccggcgaaagacactccgagaactccccactcggaacagagctgacgacgacaaaaccatgacaggaagcacggacagggaatcccccaaac

SEQ ID NO: 538455 - DNA, 292 bp, Homo sapiens
  misc_feature (92)..(92): n is a, c, g, or t
  misc_feature (143)..(143): n is a, c, g, or t
gggcccggcattctggacttctcctatccctccacccagtcctcactcaggactttctcctatccctccacccagtcctcactcaggacctnctcctatcccttcacccagtccacactcaggaccttctcctatccctccanccagcactgactcaggactttctcctatccctccacccagcactgactcaggaccttctcctatccctccaccaagcactcactcaggaccttctcctatccctccatgcagtcctcactcaggaccttctccagaaggtccaggtatg

SEQ ID NO: 538456 - DNA, 531 bp, Homo sapiens
gtagtagattgatttacttgtaccggtgtagcagacgtaacgttggaggtggccagcggcactaaaggttctgagatacttttcatataaacttctccacttatcaggtctgctatcgcgatgcttagccacaattgccgcgtgcagcctgtactaaggctgtgatttggctattgctatttggcttttcgggaagaccaatggacatgcacgatttgccagtcttcgccaattttttgcaggaaggcagtttctgttccaaatatctgcatgtccttgccctttactttggctttggtctctgtttccgcccaaatcaccgccagattcccgtcgattcgttggctttgctgcaatatcgtacgtgtcgatgtcttggcaaaagtcatatcttccggcagatgatgtccggcatactctgtccgtgaacgctcaacataaccggactcatagatagtgatgtcaggtgcaagtagttcagtggctttcgctttatcacctgatgccaaggccgaagactcaggtggtgtg

SEQ ID NO: 538457 - DNA, 162 bp, Homo sapiens
  misc_feature (122)..(122): n is a, c, g, or t
tgtccaatgccacttccaatctagctctgccgttgctagtcctgtgtcctctacagtctcagttccattgccatcttcactccccatcgctgtccgcaccacacttcctgccccagcctcgnctccactcaccatccccatctgagcccgttgacaacagaa

SEQ ID NO: 538458 - DNA, 376 bp, Homo sapiens
gtcgatctacaggatcctctcgataggcaacatcaccctgataccaaaacctggcagagacacaacaaaaaaggaaacttcaggccaataaccttgataaacatcaacaaaatactagcaaatcaaatccagcagcacatcaacaagcttatccaccaggatcaagtaggcttcatccctgggatgcaaggttgactctgcatatgcaaatcaataaatgctattcatcacaacaaaattaaagacaaaaagcacatgattatcttaatagatgacgaaaaggttttcaataaaattcaacatcccttcacgttaaaaactctcaataaactaggtattgcaggaacatacctcaaaatattggccccttatcgag

SEQ ID NO: 538459 - DNA, 713 bp, Homo sapiens
gggacatactaggtgggaaagcggaaggaatgattctgggactaccatttacgttgtacggtcaggcacagagaatgaataactagcatattggattcgtgacttctgtctttcccgccgggcctcatttcgaacttgttactctctagcagcggaaggctagcctaatcagggatatgtccagttcaaaaatgtggaccgtaagtggcaccggtactccatggtcctgaggtctccacgacggatgacagctagcacaaggaaggggatgctttcggcatagtccagtgacaccatagaccgtgaggccttgacgtgagacactgatttcgtcgacgcagggcactaggctagcgaccgtggtgagcctggcatggccaactttacccaggagccccagtatatgcctgatcattgctgtcccagcagtggaagtatcctcatgtccatccatgaagcaggtctgattttgccccagcttcctgaatcaaggtggcggccaggggcctcgaatggggtctcgagttgtctccctgtgcgtcggtgctctctgctcgtgggcagaatcctttggttcccctttgctgcctgtacatggactgctgacggtcgcttgataggtagtactgtgggccgacactctgggagtcacgaaagtttgcagcccatctgctggagggtacttggcgcagtattgctatgaatggtgggga

SEQ ID NO: 538460 - DNA, 133 bp, Homo sapiens
agactatcctggctaacattgtgaaaccccgcctctactgaaagatgcaaaaaattagctgggcattgtggcgggtgcctgtggtcccagctgctcggtggactgagacaggagaatggtgtgaacccgggag

SEQ ID NO: 538461 - DNA, 532 bp, Homo sapiens
cgcacaggtagctgcatgtgggacgcagagctaccttagctctatcctcaggttctttgtccagtccctggccaacaagacctcctgactggctatgcgtatatacgctatcctcatcatccgtcttgttgtctcacgctgtggacaaatacttggagtctgtcgacagttaatacagtacttccttcctggattctggttggagacattctgttcagtcgcatcggagccactactgtcagagcaactggccgtggctttggaaggtgatgcagtacgtcaatctgggcagcctacgacacaccagcttcccgtggctgaagccatgctgacttgccggcattagttaacctgatgaagactcctatcagaagtttattcccttcattggcgtggtgaaggtgggtctggttgaagactctccctccacagcaggcgatggggacgattctcctgtggtcagccttactgtgccctccacatcaccaccctccagctcgggcctgagccgagacgccacggccacccctcc

SEQ ID NO: 538462 - DNA, 267 bp, Homo sapiens
ggaggatcccggtgcagcggggagattcaccagggacttgggctaacccgggagtacattgagataatcaccagcaggcattcaaggaaaaatcggcaggactttcttcaactcggttcgggctactcaggcaggggaggcaatttaggggtgaagggcctttattgatgggtccactccccatttaatgaataatatgtcttgtcgggtcaaggcttgcaacactaaacgggggtttgacagcccttaaccggggggtagagtgca

SEQ ID NO: 538463 - DNA, 314 bp, Homo sapiens
atccagacactcagagttcatcgtgaccgtgcgagagtggctccacactaggcttgatgaatatgccttccgtggcctgccacgttattggtgcgtgttggcacgggggacatgccgtgtacctcatgctgcccacggagtggggcttccatactgctcacccgtgactgacaggaacacagaggtgtccacatgctggaagcgcacagtagcctcacgctcccaagtgctgtcacagagcagcggcacggtccagtaggtccaggtcgtcgccctcgccgtcgttccccaaaggcactcacctcctggttgtg

SEQ ID NO: 538464 - DNA, 648 bp, Homo sapiens
  misc_feature (587)..(587): n is a, c, g, or t
  misc_feature (621)..(621): n is a, c, g, or t
catacacaataagcagtttaataggagcaggctgagaccacatttattttgttctcctaaaagcacctacgtcaaaatccacaacagtaagaagtgcgggtcttgataagtttttatataggtcagaataggaattgtgactaacaggaataaccaactgatgacatcggcactctattcttcatagtagtataatcggtctccgccctttcagatcttagaatctgccattctatgtcggaataaggtcgctttacaacccctaaagtaaaatatttacctggggggggcaaccaatttggcttcgttacagacactgcacactagaagaggatcgtttggtgccttgtgggtccccccggggcagtactgcaggctggatggaacttcggggcccaaatcatcgccagattatgacacacccggaaagtgacgcattccacacagagagaggggccccactccgcctcttatgccaagatttcctcagatcgtttaaccactttgaagggaaatgtgtacggtcaggtttgtggccctagagacttgaggagtatgtctagcgttactatctgcgctatgttggnctcgtctttataggcacctagtgagagtcaggcncgatgtgtaatagccagatatgaattg

SEQ ID NO: 538465 - DNA, 153 bp, Homo sapiens
attagataccccactatgcctagccctaaatctagatacctcccatcacacatgtatccgcctgagaactacgagcacaaacgcttaaaactctaaggacttggcggtgccgtcgacgcggccgcgaatttagtagtagtagtaggcggccgc

SEQ ID NO: 538466 - DNA, 539 bp, Homo sapiens
gagatagaatcttgctgtttctcccaggctggagtgcagtggcacgatcttggctcactgcaacctccgcctcccgggttcaggcaattctcctgctgcagccttccatgtagtcgcgattacagacacgaggtaccacgcctgactaatttttgtgtttttagtagagacaggatttcaccatgtaggccaggctggtctcgaactcctgacctcaggtgatccgcctgcttcggcctcccaaagtgctgggattacaggtgtgagccaccactctggcctctcttttattcttgatattagaaatttatgggttctctctctcatcagactagatagcacctgtgtcaaagatgtattgctctttcaaagaaataaacataaattgtagccttatctattttctattccattgactttgcttcttttctttataaaacttccttctatggttctgggcccaagtgctcacttctataattccagcacttttggaggccaaagtggacgaatgcttgaggccacaagttcgagaccaa

SEQ ID NO: 538467 - DNA, 185 bp, Homo sapiens
tgcctggccagtgtctgacctttattcccaggtgaggcgcggagagggcccgccagtgacccactccctcttggtgacccccccatctggagttaaggctccaagcagcaagtgacacaggagggtgcctggatccagcagcctgggcttggcggcgactcccccaaaaacaccccagctgggtg

SEQ ID NO: 538468 - DNA, 274 bp, Homo sapiens
  misc_feature (200)..(200): n is a, c, g, or t
  misc_feature (215)..(215): n is a, c, g, or t
tggaggtggagtcctggacactttcggctctggcagctgtgtcttgatctgagccccaagcatgaactggaggctctgcagcccttgggagatgggggctcagggaggaccccctgaagaacccctcttctatgtggctttggtggtattccacggctggtgctcaggaagcccctatcaagaagaagcgcccccctgtnaaggaggaggacctnaagggggcccgaggaaacctgaccaagaaccaggaaatcaagtccaagacctaccaggt

SEQ ID NO: 538469 - DNA, 430 bp, Homo sapiens
  misc_feature (302)..(302): n is a, c, g, or t
ttttttgagatggcgtgtagctttgtcacctaggttggagtgcaatggcgcgatctcggctcactgcaacctccacctccacctccagggttcaagcgatttacaggcgcccaccaccacgcccagctaatttttttatttttagtagagacagggtttcaccatgttggccaggctgatctcgaactcctaacctcaggtgatccacccgcctcggcctcccaaagtgctgggattacaggcttgagccaccacacctggcccagaacccatttctttataagcctctgcctatggcgcanagggcgggtgaaggggctctcgtggcctgaagctgtggaaagctgctctgacttacctgcagcagaggggagcagtaggcccagaaaacctttcctcaactcttcaactgcctcacggcaatggccca

SEQ ID NO: 538470 - DNA, 126 bp, Homo sapiens
ggattacagatgtgagccaccgtgcctggcctcaggtagacttttcaaaaacctagttggtttggtgtggtcaattctattgagttgtttgtggtttgaatttggtaaaattctacttatatctat

SEQ ID NO: 538471 - DNA, 220 bp, Homo sapiens
  misc_feature (2)..(2): n is a, c, g, or t
anatcgagccctcaacaatctacatccacagcacgtactgccatgtctctcctactatgaatgtgtgaaccccgtgattgcagtgctcatctcgctgtcctccggaatgcccaaccacagcgccagcatccagctttgtgtacagaaataacggatattgatcgaggattccgatcagaacttgaagtacctggggctgctggcaatgaccaagatcctg

SEQ ID NO: 538472 - DNA, 189 bp, Homo sapiens
cagcgtgtgccgctgcggagtcgtacgcggtctcgggcccagggcgactgcccaaatggcccggtacatacggcgccccgcgcgcgttgcgtgcgccttgacctggctggcgggcctggcccctccctgcctggagcaccgctgggcaagctcggggcatgacaacaaacacaatggccttcgcggccg

SEQ ID NO: 538473 - DNA, 255 bp, Homo sapiens
gaggatacacccaccgcagtggtactggtactacttaaactgagttgaaagaccaattaaggaattaaggaggctgggcatggtggcacattcctgtaatcccagcaggaagctgaggtgggaagattgcttgagaccaggagttcaagaccagcctgggaaacaaagcgagacccctgtctctacaaaacataagatactagctgagcacagtggcgtgtgccggtagtcaactgctcgggaggctgaggcgga

SEQ ID NO: 538474 - DNA, 172 bp, Homo sapiens
  misc_feature (149)..(149): n is a, c, g, or t
caggtactagcagtatggtcgcgtgtcggtctaatctcgatgcgcgagcggtatggcgagtcagccacattcaggctatgatcggggtgattgtaacactcttaggatcgattcatgcacgtctgtgttatataaacaacactttctgnggtctgatgagcgcaaactgggg

SEQ ID NO: 538475 - DNA, 311 bp, Homo sapiens
aaccatacttcgaattatggcaacattgtgggctgctcctgttcataatgggcttctgctttcgttcagtatgttactgagagaaatgccgggtgctgtcgcacggagaggatggcagaatgattgctggccaggtttcagatattaacctggctgcagcgccaaaagtgaaccgaggcaaagcaggtgtgaacagatctgcagcggagatgtacggctcctcttttgaccttggaactatgactttcaacggggactattatgatagggatgtacagttacccagacacgtgtacctcctatctcctcct

SEQ ID NO: 538476 - DNA, 910 bp, Homo sapiens
  misc_feature (908)..(908): n is a, c, g, or t
  misc_feature (910)..(910): n is a, c, g, or t
ggggacgtctccagccatgaaccggtttggtacccggttggtgtggagccagggggatcttcttcggtgccgccgaaggtcccggaggaggatgaaaagctcgaataaatagatatgtcatgatggataatatcactgaagttgactcgaaaggaacggtatgaagtagaatttccaagagctatttaggaagactcgtcgaggcagcatggtgtgcccagcatattcagggatgagaagtgcgatgggagataggttcccatgagaatgtctggttgggtaaggataggtctgaatctgtagaggaatgagtaatgcgtgtgggaagagaggtctgtagatggatgtgtatcactggccttgaaatctaggaaaacgacgtgaattcgaaaaggaattagtccctatgaatcgtccagcatctaagtgacaagaatatagatcaaatattttgcagtgttaaaaggaggagaagctttgagacaaaatgtaagggcagagctaaaacagtagcggtgtcaaagagacctagcagttaagctagaaaaataagattcagctaatttactagggtggtagtacattcattcattaggaagtaatcggtcaggtgactttcttgagaagaggctgagtgtgaggccagttgatacagagatgtaacatgtgtgaaggagatggtgatggggattcacaaagtggtggtgggattggttgttgacatctgggtgggtatgcaagtatcaaaggagataatgaatgtgacttcttaaagggacatgggggcaaaattaaggtgccgctgagaaaggtgaaaagggagtgaatcgtaatgcaagagtaaacaagagattgggcatgatattaaagaggagaaaattatttgttaactttgtgtatttttgctngn

SEQ ID NO: 538477 - DNA, 173 bp, Homo sapiens
ccctgagttatgctgtcctgtatctgctccacgtctgtcactgcgtgtctgcctggtcccttttcagagctttggcacaatcctttgagttttgctaggtcagatctactttctcccagatcaaggcaaaacctcagtcgctgcaacctccgcctccgggttcaagtgattct

SEQ ID NO: 538478 - DNA, 162 bp, Homo sapiens
ctcaagaaacactgggggctggcacaaactcttggtctcttcaacaggagaatttgactggtgtatctttgggttccatggttagggagacattcctgggcacagttgggtccgttagaactaaaagtagaattttttttttttttttttttttatattttt

SEQ ID NO: 538479 - DNA, 151 bp, Homo sapiens
cattcctgaatccagaggacgttcttgtaatgcggcaaagcctttaggagtcagttgtttccctatcctggaaactatctgtaaatttaaggcattctttgttttatgttctaagtgtactcgaagtggtatttgcacaacatgagcagta

SEQ ID NO: 538480 - DNA, 679 bp, Homo sapiens
  misc_feature (7)..(7): n is a, c, g, or t
  misc_feature (148)..(148): n is a, c, g, or t
  misc_feature (158)..(158): n is a, c, g, or t
  misc_feature (239)..(239): n is a, c, g, or t
  misc_feature (250)..(250): n is a, c, g, or t
  misc_feature (254)..(254): n is a, c, g, or t
  misc_feature (257)..(257): n is a, c, g, or t
  misc_feature (318)..(318): n is a, c, g, or t
cctgaanggacccaagagtgttggaaagagaatcccaatccccctaattggcccacccaaatgggtctgaatcctcagtttcctcagggcatagggcagtccccccatgtgccctttctgttatcattttcacaacgttgaaggtganacaaagcagnggtttaatccccagctgtaattaccaaagggaagcagttgaggctaatgtctatagctcagctggcttggctaagcgaaanggggggaaagnattncanagcttccacctaacaggccccactgtttctccacagaggtgtctgctttctggccagctcnccactcatcattggcaaatgaccaaccaaaccaaaattcaaatatatttttcaatacatttcttgtctttccctggctaagggaaatgaaatatatataatttcaacaggtactgacccattaattaatccccaaaataatccaatgcggtatttttgttgtttctgctctcacaacaaaaatatttattttgactactaacttttgggattacaacagttaatctggaaaaagaagagtggtttcccaaatgatagaacattaacttggaggtttcactttttctcttcatatgctttttaaatccttgggtcaatatgaagttttccctataacatttgagcaaatgtatcataaatta

SEQ ID NO: 538481 - DNA, 223 bp, Homo sapiens
tgatgctgcagacgtatccacccttccgcgactatctctagccaatgttagaaagggcaagaccttacatacatgaccaggatgtatgagaacatggttgttaccatttaatttcaggttctgtgtgcctcctgcagtccccaccggagaagtgactcctatttaacaggctgggcttgcccgtatcatatgagctggcagtctctgtacactcatcggcaaa

SEQ ID NO: 538482 - DNA, 184 bp, Homo sapiens
gagttattttgtaaaagagttaccagtcccagtgagacctgttgtattttgttaagttttgtctgtctagacctgctgtgtccaatatggtggccaccagccaggtgtggttatgttaaaaggtgacattaaattaaatgtgcttaggtataaaatacatcccaggatttgaagacttagtatg

SEQ ID NO: 538483 - DNA, 193 bp, Homo sapiens
accacgccaccggagaaggtgggcggatctctcacacctttctccagacctgcttctgtcactgtcacatgttgctctgttgctcttttattcacttgctctttttttccttcctcccttaccagaaagtcggctccttgacaacagagccacgtgcgttattcatctttgtacccttctccggtggcgtggt

SEQ ID NO: 538484 - DNA, 302 bp, Homo sapiens
  misc_feature (45)..(45): n is a, c, g, or t
ggccccaggagcctttggttcagtacacgacccagggtggttccncagcacagctgcttcctctccgctcctacgcatcccgtctggcgggacgagcagcgtctccgtccattcagcactctgatgacccccctccccgaggcctcccactgcccgggtcccaggacccttcccccttcacctggtgaccggaacactcctttcctggtatggaacgtcagctcccgtgcacacgatgataggtcttctccttggggcctcccggccatcaacactctgtaataaacctcgcaaaaacaaaa

SEQ ID NO: 538485 - DNA, 1734 bp, Homo sapiens
  misc_feature (1)..(1): n is a, c, g, or t
ngcaccaacacacagtgagtagtgtggggtcggaggtgccttgaatagaaaaattgattttgatcatgagggtcggggtccacctgacaaactacaagaaggagatgactcagtggtgagtgacgctatgcgtgcaggtctgcaatatgagtatgtgctttccttgtggatggactcgcagatacttcaggagagcggatcaacatcctaggaatgtagcatgggtggtccagagacccagttgtgggtgctcgcacacacactctgtctacagacagaaagagggaattctatccagacggagcgtcccaacttttggtgggagtggtgtcatcctggttgatggattatgtcgcggcgtttgtgcgccccgagctctggttttgtgttgtaggagggggggccgacgcagccctccccacgggagtgttgtagttgtgtagtagtctgcttctgtgttggtggtgagcacctacatacgttggttactgtcgctgttttgttcttcctcggcgtgcctccaccccacgaggagtgggtgtgtgctgcttctccttcgacgcatcgggaggtgctgccgcccagcgagggtgaaggtgacgcttcgcggggggcgcatcatctcctcgggggggggcggcgcccccacctcgtgtgtgtggtgtccgacgattgtgagtggccgctcggagtgggaccgcacaccgagctggtacgtctaccagctattaggtggggcgaccactcaatcacctcgaccagcgagtcgtcgtcgcccctcaaaaccacaccacgtgggtggtgaggtagagagccacctcttcgtgggcgacactctcatccttgtagctcttcatcgcgcagccactggtctgctctaccacgtgagggtatgactgcgactcgcggtgttcaacaccacggcgaacatacttctgtgttgctctggtggagaggagagagttgttgttgagaggagtgctgcccccctcgggagagaaaacgaccactctgttgctctccctacagcagcgccaactctggtgggccctccaccacagcagatgagagtagatgagagatgtgagagtataaatagtttgtgtactctctctggtgggctgtttcttgtgtgcgcacaggagcgctctcgcaacacactccgagcagctcttctgtgtgagggcccctctcatatgatagatattgtggacgccctctctgtgatgcgacacgacacacacccagcgccgcgcctccactgataagcgcgtctctgtgagcgccccgtgggcgcgctctggcggccccactgtggtgcgcctctctctcagagagaggagtccaccgcgcacactctctcccgccacacagttctctgtgtgaggggtgggaggagcccctctcgcgcacagtctgtccactcgcacgccacccgctctggcgccacacatatgtgttgtgtagagacactcgggagtggtgtgagagacacagtgttgatataagagagagaccgccacacacagcagagatatgtctgtggccatctgtggaacataatctcatactgcgcccacaccccaccccgaaaacctctcggcaggagagcgctgttttacatgagagggtatagctgtggtgcacaccacaccataagacgtttattgtttggtggttttataaggagataataataagttgtgactaccacatgttgttataatataaaag

SEQ ID NO: 538486 - DNA, 310 bp, Homo sapiens
ggggaggagggagggaaggcaggcacacgaagacacagtgtatgtcgggaagtgctcacaaaccgattgtctttccttcttgggttaaagaagaaaaagtttgtaatcaatatcctgctcatcggtaatcgtgtactagaagaaacttgattgttttcatctggcgtctcggaatcttctctctcatttcatatgcacagttgtatttgggtaatgctatgcgtcaccagaatgaacacgctgtaagtaaaaatcgattgtcaggaaggaaaaagtatgaacaagaggaagctccagaggcggatccatg

SEQ ID NO: 538487 - DNA, 222 bp, Homo sapiens
ggatacagatcggtgccaccactgcccagctaattaatgtatttttagtagagacagggtttcaccatgttggccaggctggtctagaactcctgacctcagaatgatcctccagactcagcctcccaaagtgctaggattacaggtgtcaaccaccatgccctgcccttctttttcttgtatttttttagatgtggtgtctctaaaaagccattgcggccg

SEQ ID NO: 538488 - DNA, 448 bp, Homo sapiens
  misc_feature (30)..(30): n is a, c, g, or t
ttcaaagatggtaaggagcttgccctcccntggccccccacctggtgactcgcccagcacccacctgtcctgcacctcctactgggactagtgaatgactgactgtgactcaatacaataaatgtgatccacaccaaaaaaaaaaaaaaaaataaaaaaaaaaaaaaaaaaaaaaaaaataagaggacacgatgagaaaagaccaacagagagacagaagactcatagctacaaaaaaacaccaagaaacacataaaagataacataataaaagcaactcgacaaagacagcagaaaagatccaataaacaagaacaatataaaagaagaacataagagaagagtggagattggataggaagagaagaaaaaataggagcgaggaaagcgaagattctatcgaggaggataaaaaaaatcatacaaaggaccaaaagagagaaaaaaa

SEQ ID NO: 538489 - DNA, 163 bp, Homo sapiens
tagtagagacctgaattttcaccttgtgggtcaggctagcctcgaactcttgacctcaggtgatccttgcgctttggtttcccaaagtgctgggattataggcctgagcccacgcgcccggttgaaattgcaatttttgaactctttaccaagatggcctaac

SEQ ID NO: 538490 - DNA, 1671 bp, Homo sapiens
actattttatcccatttaaaccaacacattatattacagcggtctacaagtgtgccaggcccgtggggaacaccgagccgtgaaaaagtgtaccagctcccttgcccctctcaaggaagcttcacagctcgtggggcgaacagacgatgtgttaacaccactgtgcagttatacaaccgcgcgagacgaataaaaggtggtggtgcgcacgagtgtctattacacaacaggtgccgtggtgcggcgcacaaacacagaagcagacccgaggtacacacactcaacaccgatgggccagggcgacatcagggacacagccattcaccacagaatctacgagctacaaaatacacaatcacgggtgcccatgaggaacagagatgccctgtgcaccacccacacgagagccggcacccactcaaacaatctctgtgtgaaactgtgcagtggtctccacctgtgagaagagccacctgatgggcgtatgtgcgacgcgagagaacacacagcgagccacaataactttctcggtgtctattctcactgatcagagagaaccatacaatatattccgcaacaaaccacgcatcatgtcgacaccacatgtgggcaggaaacacccaccgcgtggtgccccacgcgcacatgaggaggacgccccattgtggacaagagagtagaactaaaacagagagaacacagccttgggacgctccaccgcaactcatccaaaagagggggccccaacggatgaaaccaaagcaaaggacgcgacaccggctaataataaaccgacgacagaagcgtggactcctcaaagcgctgctcgcggcagaagggagacatactacctcctttatcgacaacccaaagaggaaagccgctctaggacgacacacctccgagcgacagaaccccaacaataaaccctggaggtcttaaggtcaatactaagacgttcctcaccccacttattaaacaccccctctctgtagataggagacggaacacattgtggtacagacaaactaaaaattatctacttggtaggacgaatacgaacacacgacaagtatactacaatcatagatggcaaagcatctggttggagtgccattcacgatcgctagtagggcaaagcggcgtcactactcacatatatccccacgcttacacattgatatacataacaccaccacaccaagttggtatagaaagcaacagactgcaaagtcatactcatctacgacaaagaccaccccactagagtggcagtactctacatatataacataaccacccaggcaggcgagtctactactgaccactacgacgtaggattctagacgaacatcgacggacggaccccaccaccaacagacaaccaaaatataaccctatcacaagagcggccaaccccacaccagcgcaaacggcgaacgccaacaggctccagcagaaccacacgagcgggagtatgacccccccaatacaaccagcctacaaagaggggaggcaattgaccccaccacacaagagaccagagagcccactcctacataacacacacccctagaaaaaacgaggaggagaaatatccacacaggaaaacccaaacaaacaacacagcagcagcggtaactacaacacacactacaccaacaggagtcc

SEQ ID NO: 538491 - DNA, 277 bp, Homo sapiens
cctctgtaagcctggcggcttctatacctgcagtgatcgttctgggggaggacatcgtttcgccacataccgtgggaaaactgcatgacaatagacaaactgtcctggggctctaggagggaagctggaatctctgactatcttcacaattgaagcaattggtgaagcaacttgtcagcagcccagtttcatgtggcagggacacatcttttgcatgatcattgggcacacattcatggcagggggctcctctcagcagtcgcactagcaggcatgc

SEQ ID NO: 538492 - DNA, 295 bp, Homo sapiens
  misc_feature (105)..(105): n is a, c, g, or t
gcgttattgtcgtcaatataagaattcgattgtatgaattgtctccttggcaatctcttagataagacgatgtctcttaaagacgccaaatccggtgtcaccgtngatctatcaataaagtacttacttccctgttccacatcgcctgaacatttgtaaacatgcaaatgctttaaatagtctttcacacattcatgtcccgctgttttaatgagagatttatccaacttgatggcaaaatcatcattcgcgctgttcatctccaactttaagaaattcttatctgtagagtgct

SEQ ID NO: 538493 - DNA, 119 bp, Homo sapiens
ctctagaggatctcccccataatctctggccaacaacaccaagtctacatgctatgccaccatagcactctgcatatacttccacaataattaccatatggtgggcacacattatggag

SEQ ID NO: 538494 - DNA, 902 bp, Homo sapiens
tacctctttaaggtgccgcagcgggtaggccttgaagcagaggctgttctccgcccaagcatccctgggagcccaggccctcccgagagcagagaatggaaggaaccaagttttgtcctggagtcctcgccctcttgcaggaagaggatgtgggatccctgtatcactcaagggatctctcgagataggtcatggggcagccagaagctagaaaacaactgaaaattctgatcaccatgttagccaacgcgttgaccccattgtgggtgaaccttgatcctacaagtggttcccattgtgactgagggccttgattccatgtggagttgaagcctgatcaatctaatgtgagtgagagcgtgagaatacaattctatgtgatggatgaacagcgtgaccacgatgtgaagtgacaacgttttgctcccatggtgatggacgggtgacctccatgttagagtgaagccggatcatcatgtgagttgaaggcttgatcatcatgtgagtgaagcctgatccatgtgagttgaaaccttgatccatgtgatgacggtgacccattgtgagtgaagcctgatcatcatgtgaactgaagggctgatcccatggtgattaggtggctaatcccacattgatgaagcctgattttccatggtgatgaagacttggtcccatgtgggtgaagcccttggtcccatgtgaggtaacgcctggatccatatgaggtgagggtggttaccctgtgataaagcctgactcactgtttcagcgctggcacatgtgggaactgacccttgagtgagccggtcttgagaagattgtaccttaagtggggagcgtgactggggggtacactgaggggagaacagatggcccggtttggaaagacccgcgatagagta

SEQ ID NO: 538495 - DNA, 121 bp, Homo sapiens
  misc_feature (6)..(6): n is a, c, g, or t
  misc_feature (22)..(22): n is a, c, g, or t
  misc_feature (83)..(84): n is a, c, g, or t
aatctntcaacgaggagatcgngttccttaagaaagtgcatgaagaggagatccgtgagttgcaggctcagcttcaggaacannaggtccaggtggagatggacatgtctaagccagacct

SEQ ID NO: 538496 - DNA, 115 bp, Homo sapiens
tcctagaggatccccgtctctccacactggcatggtgaaaaatagttttggaaaacatcagattataaaatcaagatatgtccggacgcggtggaacatgcctgtaatcccagca

SEQ ID NO: 538497 - DNA, 643 bp, Homo sapiens
ggcagttggttgaagtagcaagatgttggcctttctgggtttctcttttgctgtggcttcctcactgaccttggacttttataagtatgatacaaatctacacttgaataagtatgactgttactcatacttgaacttatctcattgcacctcttctcagcagctcttcatttgagaaaatattttttcagatcatagactaaaaaatcataccatcaaggtggcggcaccaggtgccaggaggaaaagggtacttgctgtgtatcctgggtcagtaatattgaaaactgtcttcttcagcttcctgtccttctatgtgttgtgtctcttgtgacagttgttttgtcttcaagccactgacttctggaatttgcagattttgcaatccatgcaaatgtgaagaaaagctctatgttactgaccattgttgttgttgtttatagtgcaaaataaaaatagcaaaaaggaaaaaagatcaatggaggccttttggtgcttaccacagactgtgctctttcactgactgaatagagagaggaggcagagtaaacctatcctatatacacctcagtccaagcctggtctgtattatgaatggggcaacatggaaaaagaaaataaaatcagcagaccacataaaaaa

SEQ ID NO: 538498 - DNA, 382 bp, Homo sapiens
  misc_feature (241)..(241): n is a, c, g, or t
  misc_feature (330)..(330): n is a, c, g, or t
  misc_feature (352)..(352): n is a, c, g, or t
  misc_feature (358)..(358): n is a, c, g, or t
ggtaaagtgtgggagaccgaggacacagtggagcccacgagcacgagctggaacccacgaggatggcctggaacccatgtcagtctctcaccacctccagcttcgatgatgtgggtgtcctgcagaagaagctggtgcccttcctcacagagttaaatatgcatctggcccagggaattagagaagctgaaaggatgatcctggggaaggtggagcagctgcaggcctggctgcaggctgnacttacttgcccacaccaacgaggtgatctaggcagatacatgggcaacgtgttgaacttgcaacaacgcctgggtgccccagccaaancctttccaagtgttaaaaacantgttgntgcttgttttcattttccgccttc

SEQ ID NO: 538499 - DNA, 437 bp, Homo sapiens
ggcagttggttgaagtagcaagatgttggcctttctgggtttctcttttgctgtggcttcctcactgaccttggacttttataagtatgatacaaatctacacttgaataagtatgactgttactcatacttgaacttatctcattgcacctcttctcagcagctcttcatttgagaaaatattttttcagatcatagactaaaaaatcataccatcaaggtggcggcaccaggtgccaggaggaaaagggtacttgctgtgtatcctgggtcagtaatattgaaaactgtcttcttcagcttcctgtccttctatagcttcttgttccgtgctttcccctctcagggcataatgcgccccacgcctttcctgacccctaagccgtgggtcgccctccattttataagtgagacaaggggctccccttctgctcggg

SEQ ID NO: 538500 - DNA, 456 bp, Homo sapiens
  misc_feature (25)..(25): n is a, c, g, or t
  misc_feature (366)..(366): n is a, c, g, or t
  misc_feature (416)..(416): n is a, c, g, or t
cttgactcactgcaatctccacctnccacaggttcaggcgattcccgtgcctcagcctcctgagtagctgggactacaggcacgcaccaccatgccaggctaatttttttgtattttagcagagacggggtttcaccatgttggccaggatggtctcgatctcctgacctcgtgatccacccgactcggcctcccaaagtgctgggattacaggtgtaagccaccgtgcccagccctaaacatcattcttgagagcattggggatatctcctgaaaaggtttatggaaaaagaagaatcttcatcttcagtggaaggaatacttcttcattttttaaaaaaagctttaaaacttttgaagttaggntttaactttaaatagtattttccccttttatcggcagaacctttttttangggaaggcaagctttaatgggctggataaattttaaaatt

SEQ ID NO: 538501 - DNA, 974 bp, Homo sapiens
cagtagcggcatgtgcctgtaaccccagccactcgggaggctgaggcaggagaatcacctgaactcgggaggcggaggttgcagcgagcagagatcgcgccactgcactccagcatggggacacgagctgaggctctgtcttaaaaaacaaacaaacaaactaaaaagtccacctggggcttccacttcctatctcagaagggaccgtaagaatgctataaagtgtggccgtggcacagtcgttcacgcttgtaatcccagcaccttggacaggccgaggcggaggggatcgcctgaggtcagaacgttcgagaccagcctggccaagcttggcagaaaccccatctctactaagaatacaaaaaccagctgggcatgctggcgcggagcctgcggatcaaagctactcgggaggcctaggcaggagacttgcctgaacccaggaggcagaggttgcagtgagccggagattcaggccatctgaacctcgaagccttgaggtgaccgaagagcgaaagtccagtcagagataatgaacacagaaagagaggggcgaaacagggctaaccgtctgggcacgagagagggaagactggaacacaagcagggagagacagcgggctagcaaacaacgtcgtgagacatccaaaagcccgggcatctggaagcacacgggaatacaaacaccgaataagacaaaggggcagcgcacacgaaagaagagaaaacgagcgagtaggtaacgggcgcaccgaaagtgggcaaagtgcggccaacacgacggcgggaaacaagcgcagtgagcacacacacactggggaatagacgagacgaacgaagcactcacataataagaaacagacggggacacatgggcagacacacgcaaggaacaaaaagggggaagaggcacaaagggaccccgggaggcaaaatgaaccacacaggggtgcgccaccacagggtgatagaaa

SEQ ID NO: 538502 - DNA, 198 bp, Homo sapiens
tagtagatgaaactgtgagaatgtgaatccggtctgtagatgagttaatcggtatggtatcaatgttcatttcctgtgtttcattaatcttagtattattatgttaaggtgataagattacaggaagctgggtgaagggtatatatggtaactctctgtgctatgtctgcaattttcctagtaaagtctaaatattat

SEQ ID NO: 538503 - DNA, 639 bp, Homo sapiens
gaatcaaacaagcgattagttgatgtttaatgccagtatcgagaggacggggggaggggatggcgcttggacggctgtcgatgtattagagccctggcaggtttatcgacaggcgcgtcctcactctctgctctgtgggttcagcagttgggttttctgctgcgggttttttgcccggcggcggtcgcctggcgctttgatcggtccgggttgggcggggtgacgctacttgctatcgagcctgccaggccgtcattcggcggggttgtcagctcctccctggcttgtaaccagtgcacgaaatcctgaccgccaggcttcccttgctgttcccaaatgcggtacgcggtgagtcggatcgtttcttcgtccattgtgaggctcccctattgaataaaaggtgctatgagtgaatgaagctgctcacgaagtccgccttgaccacgggaggttcgatcccatggatcaagccggcggtcagcgcttgttgcgggtcgagaatgcgtggcgcggcgatcaggtacttttcggtctccagtttttcgacagcatcggcggtgcgctcggccacgatgcgtgcgtacaactgcaagtcgtaatcgaggctcatcgcatattcggacatgcgcgagtggtcac

SEQ ID NO: 538504 - DNA, 419 bp, Homo sapiens
gaatggaaactagccactgcgcccgatctacaatattgttttctgtgtcccatccataccagattattgaaccctctgtgtgtatgtttttaaatcttgcatataattctacttgcttgacttacaagtcaacaattagctattgagttctttatagaagctggaagtattttgaaatctgagatctaattactggccgggtgtggtggctcatgcctgtaatcccaatattttgagaggccgaggtgggtggatcacctgaggatgcgagttcgggatcagcctggtcaacatggtgaaacaccgtctctactaaaaatacaattacctgcgtgtggcggcgagcacctgcaataccagctactcagaggctgaggcagtggaatggctataacctgcggcagatgttgcagtgagcc

SEQ ID NO: 538505 - DNA, 236 bp, Homo sapiens
tcattagcttttctccagtggaatccttctgtacatgatgaagccagagaaaagatgctgactcagaaaaagaagcctgaagaacagcacaataaaagtgttcatgttgctggcactgtcatggagtaaagccgtggctcagatacagacctttcatgtaagagaagaagaaaacgagtggcagacattaaagagatggtagaatctaggtgcaccattgcacgtttccgtgctag

SEQ ID NO: 538506 - DNA, 140 bp, Homo sapiens
gttgcgatccctatcgatcgctgatccagcagtattgctcatctctgtgatctggccactgcctgcattcataatcggaggggatgcaaagtctcaatgtaggctggtgaaatcaagatgccatctcctcacctcctgcg

SEQ ID NO: 538507 - DNA, 251 bp, Homo sapiens
gcggcaagtagcacagtgagctagagtgtcatgagatcagactgctaacgtcatgacctagagcgctgtctagggcaaataaaagacttacttaactgtactcggccacactgttactattgtctcatctctctctcactggttctcatttaaatcggggcatggctacgcccagcacctgcaagtttggtgagatgggtgactaaaacagatgcaacgtactggaaactgtgacatcattcccgatgatc

SEQ ID NO: 538508 - DNA, 142 bp, Homo sapiens
caccatgatctaatgaataataaatatagtgctattctatgtattaatatatcacaattaattcaattatacccccactgatggatgtttctctatgactccatctgtttatgctattgggagctgctttttcttagtattt

SEQ ID NO: 538509 - DNA, 124 bp, Homo sapiens
ttttttttcccccccctttccccccagggtttaaggtcatttgggccccgggttttttccgggggggcccccggttttttccccgggggtttttggctccaaattaaaagcccccggggcccca

SEQ ID NO: 538510 - DNA, 2070 bp, Homo sapiens
caccatgtctgtccgctactccagcagcagcaagcagttctcttcctcccgcagtggaggaggaggtggcggagggtcctccctaagaatatctagctccaaaggctccctcggcggaggatttagctcaggggggttcagcggcggctcttttagccgcgggagctctggtgggggctgctttgggggctcatcaggtggctatggaggattaggaggttttggtggaggtagctttcgtggaagctatggaagtagcagctttggtgggagttatggaggcagctttggagggggcagtttcggaggtggcagctttggtgggggcagctttggtggaggcggcttcggtggaggcggctttggaggaggctttggtggtggattcggaggagacggcggccttctctctggaaatgaaaaagtaaccatgcagaatctgaatgaccgcttggcctcctacctggacaaagttcgggctctggaagaatcaaactatgagctggaaggcaaaatcaaggagcggtatgaccagcatggcaactcacgtcagggggagcctcgtgactacagcaaatactacaaaaccatcgatgaccttaaaaatcagattctcaacctaacaacagataatgccaacatcctgcttcagatcgacaatgcaaggctggcagctgatgacttcaggctgaagtatgagaatgaggtagctctgcgccagagcgtggaggctgacatcaacggcctgcgtagggtgctggatgagctgaccctgacccaggccgacctagagatgcaaattgagagcctgactgaagagctggcctatctgaagaagaaccgcgaggaggaaatgaaacaccttcgaaatgtgtccaccggtgatgtgaatgtggaaatgaatgctgccccgggtgttgatctgactcaacttctgaataacatgagaaaccaatatgaacaacttgctgaacaaaaccgcaaagatgctgaagcctggttcaatgaaaagagcaaggaactgactacagaaattgataataacattgaacagatatccagctataaatctgagattactgaattgagacgtaatgtacaagctctggagatagaactacagtcccaactggccttgaaacaatccctggaagcctccttggcagaaacagaaggtcgctactgtgtgcagctctcacagattcaggcccagatatccgctctggaagaacagttgcaagagattcgagctgaaaccgagtgccagaatactgaataccaacaactcacggatattaagatccgactggagaatgaaattcaaacctaccgcagcctgctagaaggagagggaagctccggaggcggcggacgcggcggcggaagtttcggcggcggctacggaggcggaagctccggcggcggaagctccggcggcggctacgggggcggaagctccagcggcggccacggcggcagttccagcggcggctacggtggtggcagttccggcggcggcggcggcggctacgggggcggcagctccggcggcggcagcagctccggcggcggatacggcggcggcagcagctccggcggcggatacggcggcggcagctccagcggaggccacaagtcctcctcttccgggtccgtgggcgagtcttcatctaagggaccaagatactaacaaaaccagagtaatcaagacaattattgaagaggtggcgcccgacggtagagttctttcatctatggttgaatcagaaaccaagaaacactactattaaactgcatcaagaggaaagagtctcccttcacacagaccattatttacagatgcatggaaaacaaagtctccaagaaaacacttctgtcttgatggtctatggaaatagaccttgaaaataaggtgtctacaaggtgtttgtggtttctgtatttcttcttttcactttaccagaaagtgttctttaatggaaagaaaaacaactttctgttctcatttactaatgaatttcaataaactttcttactgatgcaaactaaaatataaaaaaaaacaaacaa

SEQ ID NO: 538511 - DNA, 1134 bp, Homo sapiens
cacctcttggatcaccacctgctccaccattatcggacctccgtgggcccatctacaggccttgctcctgagtacaccatcctaggagctcctccattcctgatatcacctggaatgtctggactccgagggctccgttaccgctcgacgtttaaccgtcctgggacactaccacctaggccgaccacctgggctctgtcacacaatctctaggcatacctccttggcagaaacagaaggtcgctactgtgtgcagctctcacagattcaggcccagatatccgctctggaagaacagttgcaagagattcgagctgaaaccgagtgccagaatactgaataccaacaactcacggatattaagatccgactggagaatgaaattcaaacctaccgcagcctgctagaaggagagggaagctccggaggcggcggacgcggcggcggaagtttcggcggcggctacggaggcggaagctccggcggcggaagctccggcggcggctacgggggcggaagctccagcggcggccacggcggcagttccagcggcggctacggtggtggcagttccggcggcggcggcggcggctacgggggcggcagctccggcggcggcagcagctccggcggcggatacggcggcggcagcagctccggcggcggatacggcggcggcagctccagcggaggccacaagtcctcctcttccgggtccgtgggcgagtcttcatctaagggaccaagatactaacaaaaccagagtaatcaagacaattattgaagaggtggcgcccgacggtagagttctttcatctatggttgaatcagaaaccaagaaacactactattaaactgcatcaagaggaaagagtctcccttcacacagaccattatttacagatgcatggaaaacaaagtctccaagaaaacacttctgtcttgatggtctatggaaatagaccttgaaaataaggtgtctacaaggtgtttgtggtttctgtatttcttcttttcactttaccagaaagtgttctttaatggaaagaaaaacaactttctgttctcatttactaatgaatttcaataaactttcttactgatgcaaactaaaatataaaaaaaaacaaacaa

SEQ ID NO: 538512 - DNA, 366 bp, Homo sapiens
  misc_feature (256)..(256): n is a, c, g, or t
  misc_feature (263)..(263): n is a, c, g, or t
  misc_feature (277)..(277): n is a, c, g, or t
  misc_feature (314)..(314): n is a, c, g, or t
  misc_feature (355)..(355): n is a, c, g, or t
gggaggctagaggcagtgtgaatcactcagaatccgggagcagaggttgcacccacccaagatcatgccaccatactacagactgtgtgacagagcgagactctgctcaaaacaacaacaaaaaaacaaactcaccatcgtacctgtgcttatgcaaggcctagcaggaacggaaatcggtttaacctttgtggacagaagttttaaaaatacatatgaaaattaaaagtatgctctgaaggaggactccacttcnggaaacntatctcaagagaanaactggccagcacaaagctgctggttacaatgggaangatgcagggacagctacaattgcaaaaataacctagacatncaccaaggagg

SEQ ID NO: 538513 - DNA, 1208 bp, Homo sapiens
cacctcttggatcaccacctgctccaccattatcggacctccgtgggcccatctacaggccttgctcctgagtacaccatcctaggagctcctccattcctgatatcacctggaatgtctggactccgagggctccgttaccgctcgacgtttaaccgtcctgggacactaccacctaggccgaccacctgggctctgtcacacaatctctaggcatacctccttggcagaaacagaaggtcgctactgtgtgcagctctcacagattcaggcccagatatccgctctggaagaacagttgcaagagattcgagctgaaaccgagtgccagaatactgaataccaacaactcacggatattaagatccgactggagaatgaaattcaaacctaccgcagcctgctagaaggagagggaagctccggaggcggcggacgcggcggcggaagtttcggcggcggctacggaggcggaagctccggcggcggaagctccggcggcggctacggcggcggccacggcggcagttccggcggcggctacggaggcggaagctccggcggcggaagctccggcggcggctacgggggcggaagctccagcggcggccacggcgggcggaagctccagcggcggccacggcggcagttccagcggcggctacggtggtggcagttccggcggcggcggcggcggctacgggggcggcagctccggcggcggcaggctccggcggcggatacggcggcggcagctccagcggaggccacaagtcctcctcttccgggtccgtgggcgagtcttcatctaagggaccaagatactaacaaaaccagagtaatcaagacaattattgaagaggtggcgcccgacggtagagttctttcatctatggttgaatcagaaaccaagaaacactactattaaactgcatcaagaggaaagagtctcccttcacacagaccattatttacagatgcatggaaaacaaagtctccaagaaaacacttctgtcttgatggtctatggaaatagaccttgaaaataaggtgtctacaaggtgtttgtggtttctgtatttcttcttttcactttaccagaaagtgttctttaatggaaagaaaaacaactttctgttctcatttactaatgaatttcaataaactttcttactgatgcaaactaaaatataaaaaaaaacaaacaa

SEQ ID NO: 538514 - DNA, 856 bp, Homo sapiens
tctctaataaccaccgctacaggactatagaagccaaattccaatgtgaaaatgcacctttcaattgcgcagacgaggtcataatggaggtgacagtcataaaagattttctagctctcagcagagctgtaaaccgggacccctcatccaggcagacagcacagaatctgaaaatctgcctatcaaaagcatcattcaagccacaaggctcttctgttcctggtagggggggggcaggaaaagaggagacaaagaaaaacgtttatgatctgaagatatggcccaaaatcacgcaccacgcaatttgttttctgaggaaaggaaagacctggtgcacctttatacaaagagcccatcattcatgcttgaatagggatatctggtcctgcccggcactaatttggtctctgctcttacatttggagcatttttagaacgatattaaaccatccggaagagtgatttcagggagctagaagtgacctggggttgtgaagctctataactacaaacatattgtggggtcttactggaactgtgcgcgagcagggcagagcagaggcgctttgtgttattgtgtgggaaggcataagcctatgatagacacgagagggcgggtcagagacggtaagggtgggcaggctggagatggaattctatgcccaatggagacgcgtccgccgtttgtggcgagcggaagcgctagatcgagctgggaatatttggtcagttgacgcggggggtggaggggaaggcgagtgagaggagaggtgagttcttatgtcgggaatggttgcgcgcgtgcaggggcgcgagaatacggctgcaggcctgcaggggattgggtgtgttgacg

SEQ ID NO: 538515 - DNA, 1177 bp, Homo sapiens
  misc_feature (680)..(680): n is a, c, g, or t
cacctcttggatcaccacctgctccaccattatcggacctccgtgggcccatctacaggccttgctcctgagtacaccatcctaggagctcctccattcctgatatcacctggaatgtctggactccgagggctccgttaccgctcgacgtttaaccgtcctgggacactaccacctaggccgaccacctgggctctgtcacacaatctctaggcatacctccttggcagaaacagaaggtcgctactgtgtgcagctctcacagattcaggcccagatatccgctctggaagaacagttgcaagagattcgagctgaaaccgagtgccagaatactgaataccaacaactcacggatattaagatccgactggagaatgaaattcaaacctaccgcagcctgctagaaggagagggaagctccggaggcggcggacgcggcggcggaagtttcggcggcggctacggaggcggaagctccggcggcggaagctccggcggcggctacgggggcggaagctccagcggcggccacggcggcagttccagcggcggctacggtggtggcagttccggcggcggcggcggcggctacgggggcggcagctccggcggcggcagcagctccggcggcggatacggcggcggcagcagctccggcggcggatacgcggcggagnagtccggcggggatacgctccggcggcggatacggcggcggcagctccagcggaggccacaagtcctcctcttccgggtccgtgggcgagtcttcatctaagggaccaagatactaacaaaaccagagtaatcaagacaattattgaagaggtggcgcccgacggtagagttctttcatctatggttgaatcagaaaccaagaaacactactattaaactgcatcaagaggaaagagtctcccttcacacagaccattatttacagatgcatggaaaacaaagtctccaagaaaacacttctgtcttgatggtctatggaaatagaccttgaaaataaggtgtctacaaggtgtttgtggtttctgtatttcttcttttcactttaccagaaagtgttctttaatggaaagaaaaacaactttctgttctcatttactaatgaatttcaataaactttcttactgatgcaaactaaaatataaaaaaaaacaaacaa

SEQ ID NO: 538516 - DNA, 118 bp, Homo sapiens
gctctagaggactccctccggggtcctcactggatctaacgcaattctctgcctcagtttcccaagctgggactacaggcatgtcgcacacacccggctactttttgtatttttagta

SEQ ID NO: 538517 - DNA, 124 bp, Homo sapiens
catccctgagaatcggaatggtttaaaaaacaacctgcccaatttctatttcttcaaaatgatcagcataagcccgcctccagaaatgtatacctcccttgaaactccgaaactgcatcagtca

SEQ ID NO: 538518 - DNA, 147 bp, Homo sapiens
atttaagttttttcattagtaccatattaccattttttatcaattagaaaatgttatttaacagctaaaattatctatacctatctttattaatcactattgttccagcagttttcatgtcaaattaataatctatagggagattgt

SEQ ID NO: 538519 - DNA, 431 bp, Homo sapiens
  misc_feature (411)..(411): n is a, c, g, or t
tggctcagcttggctgtgacgtccccacggacagagaaagggaggctgggtaaggaaccgggtccttcggggtagacctcggggagttcctccaggcgggcaggctcgggggaagggcattggaagaacatgacggggtccaagtggtccagaaggcccaacaggatatcagacggtaagaggcaaaaattaaatgaagtacaacggtcagaatagaagggaaaatctaacgggaacacttggtacggggttccataaggtaaattagtcattatgtgataagatgagctcgggacccaccagaaccatttatctacacttcactcagtcctcacagggctcggtgaggcaggaatggtaataacccgggtggggtatttatataaaaaggtctcccccatccggaatatnctggattcccggaagggagc

SEQ ID NO: 538520 - DNA, 842 bp, Homo sapiens
ggcgagagaggacccaggtgttctggcagtgggcgcctgtggggcacacgtctgggccagggtgcaggcggccatggctgggagactgttcgccccggcctgagtactcctatcttgtttctccagctgttcgtggagttggagatgtgcacctaaaggaggcgcatctgggtgacggacacatctggcatcttgaggccgctcggccatctgctctcgccaccgtggcgaccctgactcccatccacatgtgccttgagagtcgactcaacaagtaggggccccagggtctcgcagacagtatgggcagcgataaagaaagcccagaggccgactgccagaaacagttccaggcgtgcagtgagcgtcatccagaagcctggcccaagaacggttcttaccgaccctcctatgaagagatgctgttgattctacagttactaccaagcaggcacactcatggggcacctgcctggtcaccccggcccgtggttctgggacacccatgggacgatataagtgggacgcgctggaatcagtctggtgcaagatgagcagggtaggaggccatgtcgtgcctaacatcgactgaaatgaaactgtgtggcacagaaggtggctcgactacagttgcccctgggtgatggtggcctatgggacatgttgagcacgatcgagccccctgtaccaggtgatcgctgacaatgcccgacggcgccccagaaaaccgtccttgaagaagggtcaccaggtggatgcaagctggtcgtgatggagatgttggggctgttaaaagctcccagcttgccatgaacggaggaccagagccaagcccattacca

SEQ ID NO: 538521 - DNA, 252 bp, Homo sapiens
attgcgcggggacgggtacgtggtagtgacgaagcagtcgtcgtcgcagcacgcgtagcagagatgggcgcggcgccgtgatagagcaggaggggcgcagtattgcgacaggagacaggaatgtgaaggcccagtcacagactgaccgagtggaccctggtaccctgcgcggctactacaaccagagcgaggacggttctcacacccatccagaataaatgtatggctgcgacgtgtggccggacggtcccc

SEQ ID NO: 538522 - DNA, 326 bp, Homo sapiens
cccttaaaaaataaaacgggggaaaaaaaacaagacctgaaaatttttcccaacacaaaggggttttgggtttttaaaaaaaactttatggggggggaaagggaaccctccccaaataaccccttttttaaaaaaaaaacaagggaaattaggttcccgggggggggatttaaaaaaaaaaaaactttttttgggaattcttgtaaaaaaaaaagggttggggaaaagaacttttgttaggaaaaaggggggccccgcttttttttggggaagttgccccccaagggtcaaaaaatttttttttttggggaaaaaggggtttttta

SEQ ID NO: 538523 - DNA, 697 bp, Homo sapiens
gtgttctctagaaacttcttggggggccccaccggttaatccgccggccgtagtgtccaaagcggcccaccaggggtggcttctgggggttcacaaataatgacccctgacaattgctcccgcccgcccctccgtacgtggggacagaataagtcgcgttgattgttggccacaccaacgtggatgcgagcggacgttgtggtctctcttgtccacccacccacattggcgggccgcgccccggggcaaacttctgtttcgccgccctcaacagcgagccactaggttccacgcaccactgtggtggtctaaacatataatatgactcctctcctgagccagctccttgttacagcggtcctctgttttggcggagtagcagataatatgttggttctcacatcccgcgcgggacgcgcacgtcccgcaattggtgaggaacatcttgtaaaaaacatgacgtttcttcttattctctcaccagtttttctgcttgacgccgccactctcttttagaggattggacgattgttttcaccactctcttgtaatggcgcttctccgcgagagggtcgcccaaaaaaacaacgactgatgtgtggagagagtgcggccgcctcccttgtgacaatactatgacccgcgcggttatcccgacagcatctctttggaaaaacaaaatagacaaagaagaata

SEQ ID NO: 538524 - DNA, 228 bp, Homo sapiens
ctgtcggagctgcaggtggagcagacatccctggagcccctccaggagagcccccgtcacacaggtgtctggaagctccgggaggtagccaccgagggcattcgtgggcaccgcaaaatggtcctctacaacctgcgggcaaccaagaagccccaagatggtcaagagtcttgctcttttggaggaagattgaaccgatcaacttcctcaattgtcttggcctcaaaa

SEQ ID NO: 538525 - DNA, 378 bp, Homo sapiens
gtcgactctaagcgatcccccgtattcgatgtgttctggaatatggttggaccatgcaggcatgatgacataatatcttcatgcataggggtatggaaggactactcacaaccattctgaatgacaatacattgcatctacttttgtcgatatacaccaagcacttacaactcctatatagttcccataatggatcgtgatctcacaggtaagtgtagcctgggtttggcaaagttacgaaatcatgtggtctaaacttctcatttctcagatgaagtaactgaacaccaacaagaataatggctcttccaggtgtggtggtccatccctggaatcctacctactcacgaggctgagactgaaagatgtattgactcc

SEQ ID NO: 538526 - DNA, 197 bp, Homo sapiens
ccaactttagggcgagctgcagtctgtgcaggtcttcggacgcaagaagacagcgacagctgtggcgcactgcaaacgcgacaatggtctcatcaaggtgaacgggcggccccaactcagggacagccggagagaggcagagaggctggtgcggcaggcgggaggaggaggaggcaccggcagctcgcccctgagtt

SEQ ID NO: 538527 - DNA, 1417 bp, Homo sapiens
gggcagttctgtgctgtgtcccgcgggtctgtctcttgctttcaacagtgtttggactggacaccatgatcctggtgggatcgtcattccaagcctcctgtactgccctcctgatattcctctcctgcattgcaaaccctcctgtgtgaccaatcttctctgtgccatcatcctgcttcttgtgtgaccttgcctagcaacctgtttatttggtggttaaggctccattcattgcccaaccaaacgcatggagctcccgagcattctgtcgaggcaattatttgccacctgaacgttggaagggcaagcccggttctaaacatgccttggtcgaaattttgttacccttgcatggtggcctccatgacgacgcctagcctcatactctatgggggctttcctaattatgtccggacccggcggaatggattgttgggcctccttgggaaacgtgcctgttgcaagccacaacgatcctttcactggggaaaccctgtgagccgagaaggaatgaagagcggcggaaaggggtggctcacactgaagcactgtactacccctttgaagagaagttgactaacaaaagagccccaatggtcggattgtgtcagtgtgccccgggagcgagcaggcagtatcttttccccaatggggacacacttctcaacagggaacaaggccacagatgctgattgagacgacggaaattggaagggattggggcagggttaaaggaaacagcccacggggagagaactagtgcccgcattggtacaacgagtgcaggattaggcgccaaattaggtgccgcaccgtttggtaggctagaggaaaacatgaccatggtcccttgggaagagccagcccgaggtggtggcaccacgcagtattgttgtgggggctaggttcacgttgaccacacagtgtgaccctccgcgttgtgtggggatttacattgggcacccgccgggcagaatagagtgtgtcaagcgcagccgcgcgcaagagttactatcacgtggtgggatgagaaacgttatatcgacccattggtgcacagtggacaagcttaccagagtgattgttcgcgcggtataaggaaaattgtaacggttggaaaccagtgtgttggaaacagggcgccgtttagtaaagtatacaacagagcaaaacaggacaacagttggagagggatgagaacctaccatagccgctcatttgcacacggccaacagagagccatatccccacaccaggtagaccgtatggggagtgctaggggcgcccacgtcggtaataggtgacgatgtgtggtagatactatgtgtggtgtgaccaagaagaggagatcatacttatcacatcacccagactacgagcacaagatagcgtgcatctacaagagtagtacgttcaa

SEQ ID NO: 538528 - DNA, 170 bp, Homo sapiens
  misc_feature (2)..(2): n is a, c, g, or t
antacacagcgattgacatcctagacgtatcacccatttaaagagtgcagttttgcaaaccataaaaaagaataagatcatgtactttgcggggacatggatgaagctggaagccatcatcctcagcaaactaacacaagaacagaaaaccaaacaccgcgtgtattccg

SEQ ID NO: 538529 - DNA, 480 bp, Homo sapiens
gaccagccgacattgcggttagagtagcatgggcagcgtctggcctcggaagtaatgaacacttggattttgagtagcacgcccacatttctatcccagtctcttagtgataatgtttgtatgtacaccagtcctgactgccatgggtaataatgtacagcagcaactccgaaaatagcaaatttgattagaaaaggatccagatcaaagggtgccagtaagaaagttcagccacttccaatttctaccattatccgaggcccaacattggggggcttctggttcctgtgacagttaagcggggagagcaaaatttctcttcaacctatagcaactgtccccaatggaggcacaatatcttaaaatcagcaaaattgtacttttatctactaaaaagcttgaaaaagagtcatgaccatggatccaagaaatttcattctaaaaccaagccaggttttcttaaaaaagacaaagcagtag

SEQ ID NO: 538530 - DNA, 265 bp, Homo sapiens
  misc_feature (50)..(50): n is a, c, g, or t
  misc_feature (75)..(75): n is a, c, g, or t
  misc_feature (156)..(156): n is a, c, g, or t
agaagagctgccacttgcccctcgctctccaggtggactctgcggttttnaccccacggcacaaagtagccagantacaaaaacttcctgtttgccacccagaccttctccagctactgagaacttgttccggtgatggagcctcaaaggaatttntggattcctctcccacaagtgtccaggggcaggggtgctgtgagaatgtgcagttcacaaagggagtgagaatggcagtcaaaagatgtatagagttaagggaaagaag

SEQ ID NO: 538531 - DNA, 1404 bp, Homo sapiens
  misc_feature (631)..(631): n is a, c, g, or t
  misc_feature (1140)..(1140): n is a, c, g, or t
  misc_feature (1143)..(1143): n is a, c, g, or t
  misc_feature (1160)..(1160): n is a, c, g, or t
tgacagtcacaggttattaccgttgctataggacctctatgaaggcattccaaatacttgttgggggggcttgtatagtgccgtgcccggtatagatctagaattctgtgctgcggaactataataacgcttctagctccagacttcacactaaggaatgaacgtatgtaccttcattactctagtggggtctagtgactcttggctattagtgaatagtacttgggatgtatggatcgtagatcctttcacagtcctcatacgatcgtcaatagtactgcgtcttggagtcaagcgcgtcacgcctgatgagactctacctaagctggacttcgtggattgggcatcctctgttgagaactccatttcccaaggtggcctctgcttaggcgcccttgacacagtttgctctactcgcaataggccgctagcgcacgcctaggattctaaattatcagattcgaattgtgctatctaattggtcaacaagagtatgcctactagtagtcccccgttgacaaagtgggcttcattggttagttcccaaaaggaagagaaccaagattgaaacttgtacctaattagggagatcagtcggggggggtcctgggaagtccgataatacgttgcncacttgagaggtcatcgacttagcaaaccttttggggccagatgggatgaaccaccgtttctttcctctgtgaacccacgctttgtagcatccctctacatgattcgtttttgaaggtccttttaccctttttttggaccttggtgtaattatccgtaataaaggcctttccccgtttggccttgggttaccgggtggccgtacctcattgggaaatgggacaggttcccttaaacccctttcggtgacagttccgcggcccgttgtgtgaaccccggcgcactataatgttcactcgccgtatacgcaaccgctgttagttcaaagaatgcgccaagagagaaggttccggagggacagaccccccccatagggagtcacactccggcggaatatttggaggaccgaagatacaccacgccggggctgggcgtaacacaagcccggcgcccccagttgtatattttttgttttttctcggtttctttaatttaaattaatttacttanacnctcctactacctactcncagcggcgcgaacacgcccgcagaaccccaccgacccccgcgcggcgcacaccagacggcacacggcggccagcgcacgccgagcatcctacagcgcccgccagcggcacacagagccgcccccccaacgccgcgccgaccccgcccaacccaacacacaacggcaacacgcagcccacaggccgccagccccaggcccacccccgcgagccaagcgcacgtacaggaccccccccacgccagc

SEQ ID NO: 538532 - DNA, 188 bp, Homo sapiens
  misc_feature (163)..(163): n is a, c, g, or t
  misc_feature (172)..(172): n is a, c, g, or t
gatcctttgagcccagaagttggagaccagcctggacaacatgacaaaaccccatctctacagaaaatttaaaaattggccaggcgtggtcgcgcacgctgtagtcccagctattcaaaaggctgaggtgggaggattatgtccctggagcccaggaagtggnggttgcagngattgcatcactgcat

SEQ ID NO: 538533 - DNA, 391 bp, Homo sapiens
  misc_feature (241)..(241): n is a, c, g, or t
aaccattggtgtcttccgacacagctggcatgtccttctcaaacggctctctcctctgttctacctcaccagaagtcagagagaaaagcttctttgggggaaatccagaaagcacatgggccccatactccttccgaacctgctcgtacagccccagaacctgctgtgtagcgcaccccacagtccaggcctccattcacgtgaatgtatatagcccacgtaggcgaacccgccgctgtcnccgttgcggaactcgtgtttcggaatatggaaaagcgcatgttccttgcggcgcggcgcgcccgggctgcggtctgtgaggcccacagcgtctgtgcgcgctccccctcctgtgcacagagagtccgcacagcctcactccccattgtcg

SEQ ID NO: 538534 - DNA, 812 bp, Homo sapiens
  misc_feature (93)..(93): n is a, c, g, or t
cgcatttcgtggacgcgggtgagtgagagagttgttggtgtgggccggagaaaaggggaagatcatcggaggtgtggatttgagccgccgatnttttaacctagatctcgaaatgcatcgtgattcctgtcccatcggactgtacggtttatgtaggcaatctgtggaaacaatggcaacccagacggacatggaaacgggcttgtgctactatggaccactccgaagtgtgtgggtggtagaaaacccaccggctttgtttgtgtcgaatttgaagatccctgagatgcagttgatgcagtcggagagctagcatggaagacccactattgttggctgccgtgtacacgagtgccacctgtccgaatggtgcaaacaccgaagtcgcctcgtgcccacctccctctgtggggtcgtcgccctcgagatgatctcgtaggaggagtcctccacctcgtcgcagagtcaccatcatgtctcttctcaccaccctctgaattctgcatatacccaagtcatatttaagccctttacaggcgtccatgttgacccagcggcgccccaattacaagttggggcgggggtgtccgttccacattggagcccaagcgcttgggccaagtccgtcaggtttggacaccggccctttgtgggtccccggacgcattgctgtttctcttccggcaccttctcctccacaccttcaaccaaattccgggcggagccaacctcggacggccccaaattttcggggcaatcacgccacggcgtcattcaccactgcgctccacaactcaagcacgccctcggca

SEQ ID NO: 538535 - DNA, 231 bp, Homo sapiens
ctttaaataggaaaaaaaaatttttcccttataaaaaggcttccgttgtgatgaaaagtccttttggttgtcccaataaacttacccctccttccttttccagcccttttaagggttggctcccaaacttaaccctttgtttttgccaatcaaaaaaaccaaatgggcttgggccccgtgtgggtaacttccttttttttttgggccggtttataaattttttttttttta

SEQ ID NO: 538536 - DNA, 533 bp, Homo sapiens
  misc_feature (32)..(32): n is a, c, g, or t
  misc_feature (73)..(73): n is a, c, g, or t
  misc_feature (122)..(122): n is a, c, g, or t
  misc_feature (131)..(131): n is a, c, g, or t
  misc_feature (147)..(147): n is a, c, g, or t
  misc_feature (208)..(208): n is a, c, g, or t
  misc_feature (217)..(217): n is a, c, g, or t
ggccatgaaacgaggactctgactccggactntaaagataatccgtgtgtagtcactagttgtggtattgttncgtggcacagaactaaatatcccaaaatggtgatgaaaaagtgtattangtatgattnctttactaaataaaanacggcaaactatcttgattttagagtcaggatagtaactttcagcagaagagacgtgttanatggggaanaggagggcttctggggtacactatgctctgtgttttgatcgagactagtatgtgagtttgtttaatttgtgaaaacctttatttgtgtactgttttgtgtgtgtgtggtatatgcagttttaaaaactgatgccttttaaacacttactaatctgataatctgccgaaaaagaatatataacatatattcaaggggatggaaaattacttactgaacaataattttatttctcaagaacgctgaagattttgtttctctcttcaaaagatttaaaaaattttaactggcaaaacataatagtgactcttaaatgcc

SEQ ID NO: 538537 - DNA, 132 bp, Homo sapiens
gcgctagcagctggccaccaaggtggctcgtgaagagctgctcctggccaccggcggtgtaaagaagccccatcggtggcgggcctggtacagtggctctccgctgagattctgccgctaccatgaagtcca

SEQ ID NO: 538538 - DNA, 1091 bp, Homo sapiens
gggtatcaaccctcctgatctggacatcatgaataaacctccccggaacccaaaggaaccattgatcagacgggtggctactttttccgttacttggctattggctagttacgtacggcgttctgctaccgtgggtgctgctgcatggctggttcatatgctagctgacggtaggtccaagagtgtcctatctacacagctgagtacatattcctacagtgtacacagaggacaacccggactttcgaaggcgtggatcgtgcacatcttccgaatccccatacccgatgacaatggcgctactctagctatctagtaactatagaacatgtgtaacgccctcaacagcttgtccgaaaaccagtccttgctgcaggatagcacccacctgagagaaacatctaggctacgtgggactcaatactagacctgctccatgtcactccaatatcctgatcctctatgtcgaacccttgcccactcatcttccagaatcacacccgctgacacgtgaaccagtggccgcatagctgcctgcaacaatactcctgccccgtgaatctacatggaagacacgcctcaagatacgcgccccgccaccctacctgcacacctgcaacctcctggccgctacccagcctaccatacaaccaattctcgcacacaaacacttcacccgctagaacacgcaatacctgacctctgtacatacccaacccaacccacactctaccacccacccgctccatcaactgcacgatacgaccccatccaccacaccctcccaccacatcacacacaactcatcatacaccccactctcccgacacaaacacccaccctaccccactccacaccctcaacactcaccccttccacaccaccaatcacgcatccacaatatcacttaccactcacacaccacaaaacacaacacacaacaccagccacacaaaaaccacaactgccatccacacctcgacactcacctacaccatcctcacctacatccactatctcaccacatctaaccatacaccaacacacaccccactccacacaaattataaccagatctaccccccatcacc

SEQ ID NO: 538539 - DNA, 173 bp, Homo sapiens
ctagtgcgcgcatggtgcttggagcatagcgtgtctaaaagcctggataacggaacggtttggacggcaccagcctcttgaagccaggacaggcatagcatggcaaaagccactgagcagggacgtccgggtagcctgcagccacttgcctgctagcgggccacttcactcgc

SEQ ID NO: 538540 - DNA, 528 bp, Homo sapiens
agtgactaatcatactaatttttgttgtgatatggagctttttagatttttggtcagttcagagactggccgattctgcaggaaacagaacactggcaaagcatgggctttgagcactagtcccagttaatccactacatggaaactctacatggagccgtggtttaacacacacagaaataacacctatctcataacactgttatatccagcaatttaaactggttattttgagaaaggatcttgctctgtcactcagtctggactgcaatggcacaatcacagctcactgcagcctcagcgtcccaaactcaggtgatcctcccgcctcagcctcctgaatagctgggaccacaggcacgtaccaccatgcccagctaactttcaaattgtttttgtagagacagggtctcactatgttgtcgtccaggctagtctcaaactcctggcctcaagcaatcttctggctttggcttcccaaagtactgggattacaggcttgagccattacacctggccaaatacgtg

SEQ ID NO: 538541 - DNA, 192 bp, Homo sapiens
gggcaaaggcccccccctttttttttttcccatttttgataagggcggcccaataattttttttaagataccccaaaaattttggtttttggaaaaggttttaaaaaaaaaagttttggggggggggttggttttggggcccaaaaaggggttgggggctttttttaacccctttacctttggttggtttta

SEQ ID NO: 538542 - DNA, 133 bp, Homo sapiens
gactctgaggatcccgacgctcctctgtggggggagttgttcattcctcccggttaggcttggtggtctcgatggcatccaggagtgcatctattgacctttgtggtgatgtgtaacagcctcttaagggcag

SEQ ID NO: 538543 - DNA, 368 bp, Homo sapiens
gacatcacaggccgtaatagcgctgtctgtgtgtgagcccggcatcgctatcgcggtccacagtcaggatgtctccatcccacattgcccagctgagtggcggagttggtggatcggatattccttcctcatgcacatggtggcgggagacgaaggcggtgcgcactcactggtgtcaccgggcagctgtctagaggacttcctgcgccagcccattcatcgaatgcaatggaggccgggaaccttggccatactacggccaaacaagtacagcttcggagtgaccaccattccccgagcagcgcttccaggggctcgcccacggctgacatgcctcaaaggcccggtctcatcccgaacacacatca

SEQ ID NO: 538544 - DNA, 355 bp, Homo sapiens
cgggccttggctgcctggtcacggtggtctgggttgcgggggtgtaatgatcttccccatgatccatacccttataccaaccatacactgaggtgtagtaaggggagcgtaagcttcagctgcaagccaactgcgtggtggagtgcatgtctcgctcgtgtacgtactcgatgaaggcataaccagggggctatccagacctgttacggtaagaccatgtgtatacttaggataggtcggtacacctcaaaatctctcgggagcttggatacttgttgtgtcataattcactctcgccaggaagagagtctagaaggcattcccctaagcatagggatcattgtgagggtcccac

SEQ ID NO: 538545 - DNA, 167 bp, Homo sapiens
cctagttttacgaagttcaatagcaaagcttaaaagacaagtgaaattactttggtcacatgtaacccattgtatctaaaatattatttcaacataatcaacacaaaaagttattgcaagacactttactttctatttttagtgctattgaaacttctaaaactagg

SEQ ID NO: 538546 - DNA, 106 bp, Homo sapiens
tcagatcgacgcagtgacagagatatatgtacttctgataataatggaggtagcgcaatcgcgtaagctacgtatgccaactattctttaacatattcggatggtc

SEQ ID NO: 538547 - DNA, 550 bp, Homo sapiens
  misc_feature (174)..(174): n is a, c, g, or t
  misc_feature (363)..(363): n is a, c, g, or t
  misc_feature (409)..(409): n is a, c, g, or t
  misc_feature (429)..(429): n is a, c, g, or t
  misc_feature (451)..(451): n is a, c, g, or t
ctcacaacaggcacaggagctggtgtgctttccatcccttccgggctccctacccctcacttccaagggttctctctccggcttgcgcttagtgtcctacagggggtggtgaagcgatggagctcctcacgggactcgcctctctcctctcctccccccaggaggaactggaanggagggtaaaaagactaaaaggagggggaacagagttcacggtacaaattggacaacggtcaccaaaattcataaaaaacaatagtacggtgcctctttcttctcaaagaagggatgacacaaaactatgagagtgacaaaagggtgacaggtagcggggacctaggctatcttaccaggagggtggtntggcttatggtatatgggtgtatgtagggtaactatttggtacaanagaggacggtaactactatngaggtggtacagatggaaattnagtggttgcatgggctggcggaggaggggtggacttttatatatagatctacataagaagtgctacatgacaaaaaccacacctaaagaaattctaaga

SEQ ID NO: 538548 - DNA, 344 bp, Homo sapiens
ggtaacaggaaacccccccccagttgcccggttcggtggaggccattcttgggacaggtttttttgtcagtgaacaagggggtcattttgggaggggtcggcggtgttggcgcccgggtccctggtgccttgccctatttgggatagccagtcccctggaggggggcttgggccagaggagccaccaaaaacccaaccttttccttgagaaagccccctccttgttttaaaaaggggctccgtgaagtttttcccaaacccgcgctgcctccagtgcgttttgccctttttttcaggggggtaaatctgtaaaatcccattttctgtggcctgtttttcctgga

SEQ ID NO: 538549 - DNA, 110 bp, Homo sapiens
gatatttgcatgcaaggggtgactggaagggcctgaggattacagtagagcagattgaggtggtgccttctgctctatatagaaacagaaaaacattaaacacagtggga

SEQ ID NO: 538550 - DNA, 537 bp, Homo sapiens
  misc_feature (39)..(39): n is a, c, g, or t
  misc_feature (66)..(66): n is a, c, g, or t
  misc_feature (101)..(101): n is a, c, g, or t
  misc_feature (105)..(105): n is a, c, g, or t
  misc_feature (107)..(107): n is a, c, g, or t
  misc_feature (152)..(152): n is a, c, g, or t
  misc_feature (210)..(210): n is a, c, g, or t
  misc_feature (225)..(225): n is a, c, g, or t
  misc_feature (241)..(241): n is a, c, g, or t
  misc_feature (243)..(243): n is a, c, g, or t
  misc_feature (250)..(250): n is a, c, g, or t
  misc_feature (253)..(253): n is a, c, g, or t
  misc_feature (255)..(256): n is a, c, g, or t
  misc_feature (271)..(271): n is a, c, g, or t
  misc_feature (278)..(278): n is a, c, g, or t
  misc_feature (281)..(281): n is a, c, g, or t
  misc_feature (285)..(285): n is a, c, g, or t
  misc_feature (287)..(287): n is a, c, g, or t
  misc_feature (301)..(301): n is a, c, g, or t
  misc_feature (306)..(306): n is a, c, g, or t
  misc_feature (313)..(313): n is a, c, g, or t
  misc_feature (316)..(316): n is a, c, g, or t
  misc_feature (321)..(321): n is a, c, g, or t
  misc_feature (325)..(325): n is a, c, g, or t
  misc_feature (331)..(331): n is a, c, g, or t
  misc_feature (349)..(349): n is a, c, g, or t
  misc_feature (359)..(359): n is a, c, g, or t
  misc_feature (528)..(528): n is a, c, g, or t
tattctgtatgtgcctccctcatttctaatgatagtgcnaattgtgttaaataagccaaataaccnttgccctcactctatgaacatggggctatgggaanacantnctacaatctatcatcatttatttaggtttttaggctagccagctnttttttttcaaagctttcttttgtatttttagttcctattttaatcctaactttagtntactgtgtttgtganggtgtctgagtttttntntgagggntangnnaacagttcagttcanaaacacnganaatntnctttttttttttanttttntgttttnagngggcnttgngggacngggcagcgcttaagccanaccaaagtcnttggaacactgcagatttgctttagaggtagataaaacagaaatcatgcagttaagtcaattgagaaaaaaaaagggatttgttgtctttacagaacatcatgactaaaagttgatcctttgctcttggtgcacatttaagattttacctgttttgggaataccaagtnttcttgtct

SEQ ID NO: 538551 - DNA, 1035 bp, Homo sapiens
ggagagagagactagtctcgagtctttgtttgttttttaaggttggagggggaatgctgggagatggtaaggggtatggagacatatcatataagtaatgctagggtgaggggtaggaagtttcataggaggtgtatgagtgggtcgtagcggaatcgggggtatgcggtcgaattcataagaccagggacggtcacaagtagggtctgggggacaaaatatgtggtgctagagttcaggcgagagtgcgtcactatgtggttcctaggaagatggtcagtggcgagggtgtgatcactaacacgtgtcgggtatccggtatgacagaataggccgaggggcctgcggcgtatcgatgtgcgaaggccgcgagcactagtacggacctcccctttcggcacaaggtcgaagggggtcccggtgggctctctgccaagtggtgggagatcaacatccataatatatggccaagggtcatgagtggcagggagtcactcacgaggtgtgctcgtgtcaagtcacaacggcttccggagaggtctaacggacccacctatcttaacgcgaatcgtggataacgtacaaatgatcggccacccatgccactccatatctagatcacgcgtgcggtcctagctcgcgcccgcacgccgcacccggataccagggcgaaagttgccggccgcgaacgcgcaacacggaccccacgggcatgaacttccacggcacgacagaagcggtatgaacaaaaccacggagagttccatggcggcacgctcatccacgagcgttggacttgcgcagcgcgcccacaactccaccgaggcccgcaaccgacgcctgcaaggcacactgcactcggacggacagcgacgcgaccacgagccaccggaaatgacccatgcccgcaaggatcccacgccgccagcacaccccgcgacagcacccgatactccacaggtccaggacaaaacgcgccgacaacgaacacccgacgcatgcactacacccatctgcgtccacacgcgcacgacg

SEQ ID NO: 538552 - DNA, 375 bp, Homo sapiens
cggagaggcagcgcggttcctctgggtgcttccgcttcccttcttctgcttcttcagcctcttcgggcttctcggccgcgcgggaacccgagaacccagtgtatgacccacccctgaccccgctcgcgacatgtccaccccggctcggcggcgcctcatgcgggacttcaagaggttgcaggaggatcctccagccgcgagtcagcggggctccgtccgagaacaacataatggtgtggaacgcggtcatattcgggcctcaagggaccccgcttgaggatggaacatcttaacttacaatagaattcactgaagaatatccaataaaccacctacagttagatgtgtctctaagatgttccatccaaatgtcta

SEQ ID NO: 538553 - DNA, 300 bp, Homo sapiens
  misc_feature (38)..(38): n is a, c, g, or t
tttgcccccccccccccccggggggttttggccccccnttttggggctttttttttccccccccccgcccaaaattgggccctcccttttttcccccaagggccggccccccttttggggggggggggggttttccctttttttcccccttccttttagggggggggctttaatttttttgggcccccccccgggggggggcccttttttttttttcccccccctttgggggggaaaaaccccccttttcccggtttttgggggtttcccccgaaagggggggtttttccccccccccca

SEQ ID NO: 538554 - DNA, 331 bp, Homo sapiens
ccgtctgggcaaaaccactgacgcccagtacagccgccgcagagacgatggccagggtggatttcaataccttcattacaaacctccaattgctcttgttgtgtcggagctctaacctcagcgcacccttatgaggcgatatcgacccgtgttggttttttttggggccaagcagcatgaggtttttgcggtaattccagttgctttcccacgagcggcagtcactgatagtgttaccgccctgggagagttctgacatcgagctacacatagcaaggcgcgtaccagagtcttggccgagtggctgtaactgcgcttcgatggcaaaaga

SEQ ID NO: 538555 - DNA, 225 bp, Homo sapiens
gccaagcacagtcacctccagatcacagtggatgtatcccactttgctaatgactccagatacatgatatacttaacctgccacctgagggacaccctagctgagcaggacccagatgaactcaacaaggcctgatccttcagcaagccttccaacagctgggtcccagcggaaggcccggctgacatctgccaatgctgtaacaaagcgtgactgaggcactcc

SEQ ID NO: 538556 - DNA, 638 bp, Homo sapiens
caggagtatgtggacaagtttggaaaaagattctcgtgaaaactttaactatacggggggcacccagacgggagttgttaaacaaaaagaggggcctatttgcgccgccaaacaaactatcatgaggggcaagcctccccgcccgccagtagcatcaccacgcatgttccggagaagttttttctccacacccacggtggatttgttcgagtgagcatcttttgacgagaaagatacttctggatcctcaagttaaagtgagtagccactttattcacgccttcgagctcaagaaaagcactatttgttaaacttcttcttcagaatatatcattaaagcttggtccacatctcttgattctacaaacaccacgcgccgtgttctccttgtctataagagaccccccccctttccgtgttggtagagtcccacgacattatcaacacagtagttatgagattgtatattacccccttattatctctctacagacatatatattatgtaagactcttctctcactctctcttcttactaatcagatgtagtcgaatctttcttctctctctctccaccccgctcccatattcaacaaaaagaccgaatttaacattccacacaaaaaacaacaaatcaa

SEQ ID NO: 538557 - DNA, 929 bp, Homo sapiens
ggtaccactgtactccagcctgggcgacagagcaagactctgtctcaataaaaaaaaaaaattacaattaagaggtgtttactggatgattcttcccacttcatttgtgtttgtgtccagaaagttaaattaaagtgttcggcaagtttttccaagttaactatttggtttttgggggggtttttgtaagttagaagtctctggaagtctgtcacccaggcgtggagttcaggtggtacgcgcactcggtcgtgcgggtaattctggcgatctccaggcctccggcgagagaccttaggggcacacgggttgttacgcttacggggccgggtgggttatatcaaagggcactggcgctgtgttgtggttaccaacacatgtgcgtgcgatgttctgtagcggagcgtgcctatacataagggtgggtcacgcgaaaaacatattttaaggtcccaaagtgtatatggaccaccaagggggactaggtggatcatcatgagaactttccacagtgccggccgtaacaagtggaagttcctagacccaaacacgcggtagtattggcgctgtcaacccaaaccagggctgaccttggggagaaaaatccgcacgcgcgacatttcgcatggcgcgaaccgcggaaaccacccgatctaccgcccgttaccgatttgcaccgtgtcggcattatgaaaccaaggtatgtatgaacaggccagagggaaggttatactctcactctgaggaccatttcttctcccttcaaaaaatttatagacaacatttcagggacggttcacacatattttcaccccattaggaatagattgcatcacaacatacgtacaccagtcggtgtggaagatacttcaaacgccttcaagcagttgggcacactttttaggagcagacaaaaaggccaattgatg

SEQ ID NO: 538558 - DNA, 356 bp, Homo sapiens
agggagaaagtttgtgtgtgttgtagacagtgaagttgtggctcaaagcttttaatatgaatgttttattcaccttaatttctacattctacatttaccttgagcataatagttataaacaggcccggccaggcacggcagctcaaacctgtaatctcagcactttggaaggccaaggcgggcagatcacctgaggtcaggagttcgagaccagcctggccaacatggtgaaaaccccgtctctactaaaaatacacacattagccaggcatggtggcgcgtgcctgtaatcccagctattcgggaggctgaggcaggagaatcgcttgaacctgggaggcggactttgcagtggg

SEQ ID NO: 538559 - DNA, 400 bp, Homo sapiens
  misc_feature (11)..(11): n is a, c, g, or t
  misc_feature (112)..(112): n is a, c, g, or t
acaaagttgcnaaaaccaagcaatggggaaaggtctccctattcaataaatggtgctgggataactggttggccatatgcagaagatcgtaactggaccccttttactatgnacaaaaattaagatggtttaaagagttaaaacccaaaattataaaaatcctgaagataacttaggcaataccattctggacataggaactggcaaagatttcatgatgaagacaccaaaagcaattgtaacaaaagcaaaaatggacaaattggatttaagagctttttcatagcaaaataaacaacagggcagacaatctaccaaatgacagaaaatttttgcaaactatgcatctgacaaggggctaatatctagcatctataaggaatttaaacacagttacagg

SEQ ID NO: 538560 - DNA, 618 bp, Homo sapiens
ccttaagtatccaactatagctccacggccagaagataccagcagctctgcctttactgaaatttcagctggagaaaggtccacagcacaatgaggcttttcacaggcattgttttctgctccttggtcatgggagtcaccagtgaaagctggcgttcgtttttcaaggaggctctccaaggggttggggacatgggcagagcctattgggacataatgatatccaatcaccaaaattcaaacagatatctctatgctcggggaaactatgatgctgcccaaagaggacctgggggtgtctgggctgctaaactcatcagccgttccagggtctatcttcagggattaatagactactatttatttggaaacagcagcactgtattggaggactcgaagtccaacgagaaagctgaggaatggggccggagtggcaaagaccccgaccgcttcagacctgacggcctgcctaagaaatactgagcttcctgctcctctgctctcagggaaactgggctgtgagccacacacttctccccccagacagggacacagggtcactgagctttgtgtccccaggaactggtatagggcacctagaggtgttcaataaatgtt

SEQ ID NO: 538561 - DNA, 564 bp, Homo sapiens
ccttaagtatccaactatagctccacggccagaagataccagcagctctgcctttactgaaatttcagctggagaaaggtccacagcacaatgaggcttttcacaggcattgttttctgctccttggtcatgggagtcaccagtgaaagctggcgttcgtttttcaaggaggctctccaaggggttggggacatgggcagagcctattgggacataatgatatccaatcaccgacctgggggtgtctgggctgctaaactcatcagccgttccagggtctatcttcagggattaatagactactatttatttggaaacagcagcactgtattggaggactcgaagtccaacgagaaagctgaggaatggggccggagtggcaaagaccccgaccgcttcagacctgacggcctgcctaagaaatactgagcttcctgctcctctgctctcagggaaactgggctgtgagccacacacttctccccccagacagggacacagggtcactgagctttgtgtccccaggaactggtatagggcacctagaggtgttcaataaatgtt

SEQ ID NO: 538562 - DNA, 409 bp, Homo sapiens
aggatccccacattgttgcgatatatcttttggactttttgtgtttttttaatgagaattctgtatttcattacctaaagaacaatttgctaaacataataaatcactcactttgattatgtatagataacataggaagaacaatcacatcagtaagttatagttaatattaataggtaattttctgttggctcataatcaaatataccagcattcattatagcatttcagcattttccaaggtaccaagtgtacttatttatgttgttagttagtatatatgttagtatttttagataggaattacagctactagatagtttttcaaagaagtaccagacatctctgtatatatgctacataacgtatacaaatagggtagtaacatcttatcctagcaaatttatgg

SEQ ID NO: 538563 - DNA, 115 bp, Homo sapiens
aaaatagcatgatcagctcggtaccccgtatgcgggaacgggcgtgcacgttctgcatgtaacggtcgcgcgagaccttggccaggatcgaggcggccatgatctgcgcggtcga

SEQ ID NO: 538564 - DNA, 347 bp, Homo sapiens
agatgatgaaccatgtgtctgcgtgaatgcatatataatacatgatactgttgattgtaaggacctgaacctgaagtttgtgctgtaggtttatcgggactattaccttacgggtgatcctttctgaaggacatgtggcctgctgtgatggaatctgtgaagtttgacaaggaccatgatggactcattggtgcttactgtggagggctgtggctggcagctgtggctgtgaaggtccacaaggctgctctgtgtggggcacaggacattcaggataaggtttcttctatactcagacgcggccaagaagcctatgagagactgctgtggaatggccgctattacct

SEQ ID NO: 538565 - DNA, 328 bp, Homo sapiens
cgagagggtaccgggaagcaaggtagttcttgatactcgaaagtgtagtcggctccaggatgacatcgttctggaccacgatgctaccgttgagcaatctcgcggatgttcacccctctatactgaggaagatgtcgcccttcaaaacgacatccatccgattcttgaagagggtactgaagtcctggtattcctgggaggatgcgtcattcatcttttctgtgaaatttctgtaagtcactttcggtgtcatacctaaagtggcgttgagtttttccggggtttctacagggaaggattccagaggggacaagcactggtaaccaac

SEQ ID NO: 538566 - DNA, 125 bp, Homo sapiens
tgtcacacaaggcacacctacaccccttattcccattctagttattatcgaaaccatcagcctactcagtgcaaccaatagccctgggcgtacgcctaaccgctaacattactgcaagccaccta

SEQ ID NO: 538567 - DNA, 98 bp, Homo sapiens
ctataatggcagcaggttttggtatgtatttctttgatatattgtcactttggacaacaagtccgatttctgttaataaaacttgctcataaacccta

SEQ ID NO: 538568 - DNA, 195 bp, Homo sapiens
ggaagggttcattgagcagaggcaggcaagtgggtactgggcgaaaggggtcagggccggactatcggagaggagcatgagggggactctgtgttgaaaggggcaagacccggtgatagaagcttagtactttggctaaaaggtctcagcctagaatggtggtggggcaatgaggcatgataaggaaagagtgtg

SEQ ID NO: 538569 - DNA, 313 bp, Homo sapiens
  misc_feature (69)..(69): n is a, c, g, or t
gggtttaacctgcaattcctgcctgtgttgtatcctcacgctgacaggggctgctcagcagcagacagnccgggtaggtgtgtgtgcgcgtgtgtgcacgccattgcgtgcccctgtcccatgggggcgatgtccgagcatgctctgtggagttgatgcgtggccctggagtgtccggtgcttcagtgacccgagctgctgtgtgcgtggcctccgtccgcccagtcattctggcctgtctgtgactgctcagggggtttgggcagagtgggtggaaatgtcttgctgtacgagatccaggcttaggtccctt

SEQ ID NO: 538570 - DNA, 744 bp, Homo sapiens
  misc_feature (34)..(34): n is a, c, g, or t
  misc_feature (88)..(88): n is a, c, g, or t
  misc_feature (96)..(96): n is a, c, g, or t
  misc_feature (121)..(121): n is a, c, g, or t
  misc_feature (134)..(134): n is a, c, g, or t
  misc_feature (154)..(154): n is a, c, g, or t
  misc_feature (159)..(159): n is a, c, g, or t
  misc_feature (174)..(174): n is a, c, g, or t
  misc_feature (214)..(214): n is a, c, g, or t
  misc_feature (224)..(224): n is a, c, g, or t
  misc_feature (227)..(227): n is a, c, g, or t
  misc_feature (238)..(238): n is a, c, g, or t
  misc_feature (298)..(298): n is a, c, g, or t
  misc_feature (300)..(300): n is a, c, g, or t
  misc_feature (307)..(307): n is a, c, g, or t
  misc_feature (310)..(311): n is a, c, g, or t
  misc_feature (314)..(314): n is a, c, g, or t
  misc_feature (319)..(319): n is a, c, g, or t
  misc_feature (322)..(322): n is a, c, g, or t
  misc_feature (330)..(330): n is a, c, g, or t
  misc_feature (332)..(332): n is a, c, g, or t
  misc_feature (334)..(334): n is a, c, g, or t
  misc_feature (344)..(344): n is a, c, g, or t
  misc_feature (354)..(354): n is a, c, g, or t
  misc_feature (425)..(425): n is a, c, g, or t
  misc_feature (436)..(436): n is a, c, g, or t
  misc_feature (441)..(441): n is a, c, g, or t
  misc_feature (450)..(450): n is a, c, g, or t
  misc_feature (511)..(511): n is a, c, g, or t
  misc_feature (513)..(513): n is a, c, g, or t
  misc_feature (561)..(561): n is a, c, g, or t
  misc_feature (615)..(615): n is a, c, g, or t
  misc_feature (705)..(705): n is a, c, g, or t
attaaaaattaaagtattacaatatttacaaganggttggcaggggacacttactagtataaaaataatacaaatattgtattttccncttatctnccagtcaaaatggcaaacagttttntctttctgaagtntctagtcaataaccaaagangaggngcccctaataaagtnccttgccctgtatgccccactgtttatagctttagacccncaacattctnctncaagttcagcngccctctttcttgcctccttttctccagtttaaatgccaatttgttagctttcttctccncnctccgtnccnngcnccccnctnttatagcntncntccttgcccncttatctccnttgcctccatttttagaacgtggctgagttgatactttaggaagatcactgccattaatcatctgtatccnttcagtctgcnttgcngtcagtccntcctttggtaagacattgagaggtattcctgtcttagaagaaattcgaatttgtttgggcntnggttgacacttgacaagccgtggatggttatataaatttgagtatgtnccacaaatagattcacaatcccacttctctttggcttcttcaaggactacagtnatcatttcttcctcctcagactcatcaagctcattcattggcagggcttgatcctccaagggttcaagggtattcaattttacacaattntctgccttctctttatagtagttattcaaaacttcctgt

SEQ ID NO: 538571 - DNA, 703 bp, Homo sapiens
agaggaatgaccggggtgatctaagagaaagacacgctctaagagactacaggtaccgaagaggacctcctgtcagatcacaacgtgtagaagacagttcttgaagacgtgctgatgacaggaaagatgaccgagaggaagagcggtaccctccttgaaaagttcctaccgcagctctttcatgagaccgagaaagagaccgagaccttcaaagagaaggtgaaaaagagaaggcctaatggagagctgttaaagatagggaatctctccgtcgaactaaaaatgagactgatgaagatggttggaccacactatcgacgctaagactcagggtagtggatttaaactggtgtctaaattggtttgatcacattcaggttgattatacttgtgctttaccaatcgtaattggattctttatgtaggtccaccataacacattatgcatgaccctgttttaatcctatgtaatcaattggtcatgcaccatatccacaggatgcttgaagatccatgcctttttgatgcactaaggaatgtggataccatatcaatcattacatgcgaaaatgcacttctgatacttgaatctgataagtgaacctacaggtatcgagggacactttatgttgagtagaactggactcttttctgaattgcatatcagaatatatttgtacggaggttggtttggtttggacgg

SEQ ID NO: 538572 - DNA, 276 bp, Homo sapiens
  misc_feature (134)..(134): n is a, c, g, or t
  misc_feature (227)..(227): n is a, c, g, or t
caaggtggttgtgggtagcgtgtacagagacagagaggcaggcccacgaggagaggaggctgcagatagtagggtagggtgctaggctactagggggccttggggccagctgagaattgggctctgctcctccnggtgatggtggacggcttgagggggtgggatatggctgggacaatggtccagaaagatctgacctgggtggctgggctggggggtgaagaccnttttttttttttgggaaaaaaaatttgtggcttcgtgttgcccagagtt

SEQ ID NO: 538573 - DNA, 605 bp, Homo sapiens
  misc_feature (11)..(11): n is a, c, g, or t
  misc_feature (20)..(20): n is a, c, g, or t
  misc_feature (36)..(36): n is a, c, g, or t
  misc_feature (46)..(46): n is a, c, g, or t
  misc_feature (51)..(51): n is a, c, g, or t
  misc_feature (62)..(62): n is a, c, g, or t
  misc_feature (84)..(84): n is a, c, g, or t
  misc_feature (89)..(89): n is a, c, g, or t
  misc_feature (119)..(119): n is a, c, g, or t
  misc_feature (131)..(131): n is a, c, g, or t
  misc_feature (144)..(144): n is a, c, g, or t
  misc_feature (151)..(151): n is a, c, g, or t
  misc_feature (153)..(153): n is a, c, g, or t
  misc_feature (155)..(155): n is a, c, g, or t
  misc_feature (158)..(158): n is a, c, g, or t
  misc_feature (169)..(169): n is a, c, g, or t
  misc_feature (177)..(177): n is a, c, g, or t
  misc_feature (182)..(183): n is a, c, g, or t
  misc_feature (189)..(189): n is a, c, g, or t
  misc_feature (195)..(195): n is a, c, g, or t
  misc_feature (198)..(198): n is a, c, g, or t
  misc_feature (211)..(211): n is a, c, g, or t
  misc_feature (256)..(256): n is a, c, g, or t
  misc_feature (283)..(283): n is a, c, g, or t
  misc_feature (298)..(298): n is a, c, g, or t
  misc_feature (312)..(312): n is a, c, g, or t
  misc_feature (330)..(330): n is a, c, g, or t
  misc_feature (340)..(340): n is a, c, g, or t
  misc_feature (348)..(348): n is a, c, g, or t
  misc_feature (367)..(367): n is a, c, g, or t
  misc_feature (370)..(370): n is a, c, g, or t
  misc_feature (373)..(373): n is a, c, g, or t
  misc_feature (380)..(380): n is a, c, g, or t
  misc_feature (385)..(385): n is a, c, g, or t
  misc_feature (390)..(390): n is a, c, g, or t
  misc_feature (392)..(392): n is a, c, g, or t
  misc_feature (405)..(405): n is a, c, g, or t
  misc_feature (423)..(423): n is a, c, g, or t
  misc_feature (435)..(435): n is a, c, g, or t
  misc_feature (445)..(445): n is a, c, g, or t
  misc_feature (455)..(455): n is a, c, g, or t
  misc_feature (473)..(473): n is a, c, g, or t
  misc_feature (479)..(479): n is a, c, g, or t
  misc_feature (508)..(508): n is a, c, g, or t
  misc_feature (520)..(520): n is a, c, g, or t
  misc_feature (543)..(543): n is a, c, g, or t
  misc_feature (573)..(573): n is a, c, g, or t
tggctgtttgnggatttaanggcagggcattgaggntgggaggggncccanccggcgcgtcngcttttcttaaagcaaaaaggntgccnacggggggcacgggggggccatggagtgcngagttggggggncaggggacacccngggggcncnanatnttgctggtganaaggaatntcaannggcacngaggcnggngggcaaggccccnggcaaattcccccccgtgggtgcccccccccttccccccccctgnccccccccccccccccggccccccccnggagtgaaacccagnggccaaaaagcccngggacaaacgaatgggcncccccccccntccttctnttgggctggagtgagtggnggnggngactcanccccngggcncnggcagggtctggnggggccaggatggtctcnagtgcttggcanccgaggaatntagccgggcncgggtagtagccgccgcnaggggngggccagggtggccaaagcccggggccangaatttgcagcngaggtcaatggtcccggagtccncccccctcggggtcgggcggcgggaaaganggtggccgtggcgggggtggaggtgggtgccc

SEQ ID NO: 538574 - DNA, 269 bp, Homo sapiens
agggcatcctgcagagaacaaaacaagatcctgaggtgaatgggttgagacagctcatatagaaaatgaacataactgtacataatctagtactgttgggaggtgataccatgaaaaagaaaagcagaataaggcagaatgggatgtggatggaggaggcgtagcagaatattacaaacacagttggacagggcaggctcatagaagtgatagaacaatgacttggaagtgctaactttgtgcacatgagaagaaaacacatgttacct

SEQ ID NO: 538575 - DNA, 375 bp, Homo sapiens
ctgggcaaggaggagcaggccagagccttttttggttcctttttttgcccaagccggttttaaaagccaggcacaggttgccaaaaggtgacccgaaacaggaggaaactcagtgacctttgcctttcccacattcctccccgcgggggaggacctccccgcttttaaaagccccgggcacatgtgggggcccaaacgtgggggttggtgtggacggggggcagatttccgtggatgaactgggtttggacttttaaattcataaaaaatttgagggtttgggagtcccaaaccctcccctttcctcagggcactttagcatttgcccggggttttccccgggcagcccagcaataaatggggggattgggggga

SEQ ID NO: 538576 - DNA, 936 bp, Homo sapiens
gtgctcataatgcgagctgtacttgatgtctgagacacacgcagtacagctctatctaacggttctcgaaggtccttcatagttgataagctacactgatactggtacaccttaaagattttgtggtagaggtctacgatatgaggagagattgtactttatgttgcatgtgagtaggtatctgaggagtctgtgtgtttagtagtgtgtacgtactgggtgatatgatgacatgatcgtagtattggatcaagaacaattccaggcagaatagaatggaaagatgtgcggggtatagatactgactgaaatagcttcctcatgcgtcatgtgcatcctccatgccggtgcacaatgttggttgtttcgcagggaaacctagtgacatgggctgaataaagatagagtgcttcaacgtgtgcatgtcagagactagccgatgggtaagacgccgtttccagtcattgtgcctgtggtaggggtttactaacaagaaacgctaaccaactcgagatatcggatacggaccgctgcgttatgcttccgcgacctaaacagggtccggccaaagtctcggaacgaagagtgatggacaagtctagtgacccccgaggaggttgcaggaccagaatgaactatgaatacgaacgatggctcaaactaaaggttggattgccaggagtcatgcagattggggaaaaagagagaatatgaagaagggtctttgtcccagattgcgtaagtttgagttacctacttcccaatggaatgttctgtcggattaggaaaataggttatagaaaatgtctcgaaatgaaggtccgccaaagggtgttgaacattgtgaggaaaaaggcttctcatggtggaggctttcaattggttggaaagggcaaggtaggttgctttggaaaggaaggccgcacttgggaggaa

SEQ ID NO: 538577 - DNA, 498 bp, Homo sapiens
  misc_feature (309)..(309): n is a, c, g, or t
cgtttgcggtggtggtgcctgtagtctcagctcccgagcagtgggactacaggcgcccaccaccatgcccggataatttggtattaagtagagatggggttccaccatgttgccaggatgtctcaatctcctgacctcgtgatctgtctcgatctcctgacctcatgatctggcctgcctttgacctcccaaaagtgctgggattcacaggctttgagccactgtgctcggccactttttataaatttttaaactgtacaatgtggtatttacctataggagtaacttacaatggtcatattacaagtnatttttgagtataattaaaattcatttctaaactattaatattttttccaaatggtaatatattttcttgtgaacatttgtggcctgtctgcctgcaaacttgcagacttttgtgattcacatagagtcaaatatgtcatagtctaaagacaaatttaaggtgtaagaccaattatgggataagtgtgt

SEQ ID NO: 538578 - DNA, 774 bp, Homo sapiens
gcgcgcgcctttttatttcgttttcaaagcgccttcgctgctgatactcactgggcccggctgccggcccccgttctgccctgcaagcataataaaatggctaatcatggtgaatggtaatgcggtacagttaaaagaagaggaatgaaccaattggatacttccatgttgtaactcacacagaacatctacaaggacactgatatgaggcatggcctcccatcagaaggtggcatgaaatgacttgattgaacttattttcagacatggataggtagcttatgtcgatcttgatgaaagatgcaatatgatgctctcagggaatttaatgaagaaggagctctgtctgtactacagcatgttcaaggaaagtgacttatcacatgttcatgaacaaaagtgcatttctatgtcggagttatgaatgacctacaggcagagagagaaactgggtgagcaaggtgcaatgagtccacaaagggacctagatgaagcgaagatcaaggcctgcttgagagaacggttatactcggatgtaaccacaggacagaggaagaataggggtcctaccaacagaacagagagaactcgggccggcaaacgggaaatggaacggacggaatagcagaggcaacaaacaagggatcaatgcacgaagacaatggggcccctatgaaaaagccgacccaaggggaaaccgcaagtagggaccaggccggacaaaagagagataaactcggaaagactcagaacgtatgtgaactaacccagaag

SEQ ID NO: 538579 - DNA, 322 bp, Homo sapiens
  misc_feature (316)..(316): n is a, c, g, or t
caggctacacttgctgcaggagaaaaaggggcttattcacacagcacagtttgaaatcttacttgacacactctttgtctaatggagaaactgaaaatgtgtcatacagtcttcatacagcatatcccactggtttcatatttgtctcaatagtattaaaacatgtgggcaataattttatctagttaggatattcattgcgagtgtttataaaatgtggaaacatggtaaccagtctcgatttccaatgcacagggtaattagttgatatcaattatgcgtatatatcacgtagatgtgaggtaaacattcattnttaaaa

SEQ ID NO: 538580 - DNA, 407 bp, Homo sapiens
cagaatggatttgattgatttatttattaattagacagtgtcttgaaaaaaaaaaaaaaaaaaaatgacccacaaagaaggcagaaataaaggggattatggacccaaaaaagttatacaatatacaaaaaccaaatatgcaatagggcaaaattgttccctggtagggtaatcccttaaattgctattggctgaacctcccccaatcagacgccagaggctggcagaatgggtttggatggactttttttttttttaaggccagggtctggctctgtcccccaggtctggattgcagtgccacaaccaggcttcatggcccccttgacttccctggggctcaagggctccctccctgctctctatgtcagtttccgggtcccgagctcgatccgtacccatggcct

SEQ ID NO: 538581 - DNA, 992 bp, Homo sapiens
  misc_feature (188)..(188): n is a, c, g, or t
ggcagatgtctgcgagaagcctctatgtcgctgatggtgttctccactgctgaacttgttgactatgacagtatctaggcgcgagagttaagcgatgagttgtattaatggtggctgctggcaacaagcccgtgttcatccgcctgagcttgtggatcactggatcaatcgggaatgtagcgcaggcntgatcaagtaacgcatgtgacgacagctgtgcaacgatgctgtacctagttgagagcccagtcatgtaagcagcgcctgtacctgcttgattcttatcgctcgatgagtgagccagtctcagaacgaatcgtatgccacggtggtgcatacgtattactgcaggactcctgtggcccagaaatattgattctatgaaacgatgcagcacgaaaaatctttacctaagtggagtgattcttaacaaccaagtaaggccttcatgatgcgatcacgggattcaccgcgtcttctgtacctgtggaactgccatgttgcatggaactcccattgacggtgccagggtctgtgagaccatcgcactcgggtgaggcatctgaatagtatttaggtccggacgcgaagctctggaaagaactaaggactgggacaggtgcagtacagtgccgccgccacccggtcagttttgtgaaaccacgcattgggaggatgagccgcaggtacgcgcctagcgccctttccctttgatggctaagccccttttttaagcgccgtagatgatctgggcacagtggcacaatactaggttagcagacgcccagagcgatcgtaggatcgtgcgctctctgggcaattggtgctcaagacgttgggttacagtaggtgccgcgtttttctgagaggccaagtacagataatagaggacaccgcgtgaatggcatggccgggtgcccgttgagatactgcaatatgtcgccttcggcgacttgagtcgactaaaataggtatgccggcgttgaggaata

SEQ ID NO: 538582 - DNA, 397 bp, Homo sapiens
  misc_feature (1)..(1): n is a, c, g, or t
nggcctatgctctctgctcacacttgggcttgaataccacagagaaagaagcacagaggtcaatagtacaaggctgctctaggggacacctgtgagtgagccccacaattggagggagtcttccccaccccatggtcttcatgatgcttgtaatcacgtagcatgttatgttcagtgctgagtcagatgtcgggcattagctctgtggtcttccctgctgacaggattaatggattctcagaggtgatttgaagactcaacaactggaggacaaaacccaatttgaggtcagactgcagcgaagtttcctgcctgctgcagtggaagacgggcgtggcaatgccaagcgctacacagctatgggcacttggtgatctatgtgagcagtttaaacaca

SEQ ID NO: 538583 - DNA, 257 bp, Homo sapiens
cctgacgagcctagtggaggactcttttcctcttatgtgaagaaacataaacaatatttgggccgggttgggttggtttgcttggtttttcagacaggatttctgtctcccaggctggaatatagtggtaccatcaccgctcacggcaacctcaacctctgggactgaagcagatcctcccaccctagcctcctaagtagctgggatcacaggcacatgccaccatgtctgactcaatttaaaaaatgttgggcaga

SEQ ID NO: 538584 - DNA, 360 bp, Homo sapiens
cgtctgagcaagctgggacgggctttgtgaatggcacctctgcggaagtggtccgcagcgcatcgtagacctggccaccaggtgtacggccctggacatctctcgcgagctccgctgtcagtcatggctgcgtcagaaagatccttggcagtagttactacgagactggcagcatccggcctgtagtgatagggggctcaagcccatggtgacacccccaatgtggtggagaagattggggactacaaacgccagaaccctaccatgtttgccgtggaagctccggagagcgtctcctgactgcggggcgtctgtgaccatgacacgtgtgccccagtgtcagctccatttaaatagact

SEQ ID NO: 538585 - DNA, 105 bp, Homo sapiens
acaagctttgcgtgcacgagattgaagagttcaaatctgaccaagatgttgatgttggctaagagaattctctgctccccacctctaagttgcccgccactcgaa

SEQ ID NO: 538586 - DNA, 214 bp, Homo sapiens
ggcaccttgtggcgtgtcctggtgcccgcacggcgcggggctgccccccctgacctgccctgtcctcccggcgacgtgacaccgcggccgcagaccgacgacctcccgttggtcttgctgtgctggactgccgccccggccggggtggtcggcgccgacagcgggggccgcctctggccacccgcctcatcatgctggcagctgtggcggctgc

SEQ ID NO: 538587 - DNA, 90 bp, Homo sapiens
ctcggtcctctactcccgacacaaaatcattcaagaagaaatagataccagcctgagcaacatggcaaaatcccatctctacaaaacatc

SEQ ID NO: 538588 - DNA, 658 bp, Homo sapiens
gcacttcgccctccagctgctgcagctgcagcccgaccgcgagcgtgccaagcgtgttcagcagctagcggagcgggtggcggggcccccctcaggacaccacacagattcccctcttccggcggcctcgccctagtgggcggaccccaaggggaacaagactttgggcgcggccgtccaaattgtgtaattccctcccaatcatatgcttgaacccttgtgggcaaaaaggtttggccaagcaggatttactttttttccacaccaacaaccaggggaactttgggggagttacgggggggtttcggggtgggaaaaactgttggggcacgcggttggaacaacaccaaagagttcctgtgcaggtgggcggttgcgaatctttcaaacgtcgcgggttacatctaaatacagaacagtgttaaacgttagtgggggacctgtggagaaccaaatatacaaaggtggctgtgcagtatggtctgactttcacgagaaacagtggggcaacacgtggataacactctgggaaccagaaactcgcaattggaagaccaagattgtgtccaggtttgcgaaacgtgacatttgatactacctttctcaccaaaccacaggacagaaacggggtaaaactcaagtcttctaacaagaggga

SEQ ID NO: 538589 - DNA, 100 bp, Homo sapiens
ctctgacaggacagttttagcttcgggctttcagtattctgttatttgtctagttcttggtcagtgaaagaagtaaaatctgtatatatgtaactccaga

SEQ ID NO: 538590 - DNA, 1032 bp, Homo sapiens
gactaccctctcatcccagatggtaaactggtcttaaaccggaatccagtatacttacttagctgaggttgaacagatagcctatcgacccaagcaacgatgccacctggtcattgaggccagtccgtgacaaaatgctctcagggccgcctgtttatgcctatcctgacactcaccgccagtcgccgtgggacccaaattatcttcatatacctgtgaactgtcccataccgtgctcgagtggaccaacataccagcgtgacggcaccgatgtgcatgcaggacaactcagggctggtgctccaaattactaccccaacagcttatggtgctccggaacaacagcgcttctgaccctggagacacagcatccaactagttctggagaagtgcggagattcaacactgccaatgatgactaacgtctactcaggtgcgggccatctactgcgcacgtgctgaatgagcgacacagaggcaccacgtcagcagctgagaacactcgccgggcaacacatgacacgcatgcacaaactatcatccagcaagcacaagcggtcacgaactcactgaggtccaccctgactacgggagccaccatccaggctctactggaccagtacatgctcgcaaacctaagactgcgactcacaccgacgggccgaccggatccactcggcgccaaggggcaacaggcaaacactgtgaaggccagcgccccctgccctgcgccacgcacgcacaaccgtcacccgagatccccgcccatacggactcaccacccgccgcccaacacgatcaacgcaagcaaactgccccaaaacaaaagcacgcgcacaacccaccgcgtacaccaacagcaatcgccagggcaacagacgacacgacaagcgcaccgaaaaaaccagacagacccaacacaacacaccgcccaagataacacgcaaccaacgccaaaacccatgcgcaaaaggaaccacgccaacccagcgcaacccacacccccaacccgccacaaaacgaaagacgaac

SEQ ID NO: 538591 - DNA, 238 bp, Homo sapiens
aggtgatccacccacctcatcctcccaaagtgcgggattacaggcatgagctaccgcacctgccgagatgccggcattttaatttacagtcgttcttcactttggaaagcaactcccaagtggctcagcattcagtattgttcctaaaatgctcgctactcctgatcttcagctttaaaattactaagcagcattcccacaaaggcacatgacatttttattatatgccagcatgtgg

SEQ ID NO: 538592 - DNA, 966 bp, Homo sapiens
ggaagtcctgcgagcgacgcgcgggggcgggcgagaggaaacgcggcgccgggccgggccctggagatgggtccccggcgccggggcctgtgtgtgtcctcgtgctccttggtccccgcgtgctgtcggcgcccagggtttccgtatccaatgattatttgtacttccaagtgctgaggtcctggggacattccgatacatcttcaaagccaaaacttgccaagggaacttgggcgtgggtatcttccacaccaagggtatgacgcaaggattccacctttgttcccccccgtttgaaaccttcacaagaggccttgcgggggaaacctccagaccaagcgggttctcttcacatccaagggaccaaagattgggctctggctgcaagcacggggggggggcttggcatccctttcctctccaaagaactccggcgtgtgcccccagggaagccacggcgggcgggcggcggggtggatccaattcttcgttgacaaaccgcaaggtttggaccacttggaccaggcttccctcaccggtggaggattgatccagggacaggtaaccccaaggcgccacgagtgaaaatttccccaggcccttctttccgttgtctccgcgccggagaaggggttaacattgaatcgcgacagctcctcgtggaaccaggctatggcgctgtggcagtggggcccatcatttcacatcccaagtcaatgtcaaccaaggtatcgccaacttttggaggttggtggcaagcgcgctggaccttcttgttgaaaagcaagtttgcccaaattccaggacaataaaatggattcttgaagcgtggggaaggggaccccaggaattgggtcttggcatttgggagcagccgttggggccactgggccgcgttacgcaacaggttggcgttgctcgctgaaggagcacccatggtccctcccaggccaagggtgctcgtaa

SEQ ID NO: 538593 - DNA, 344 bp, Homo sapiens
  misc_feature (64)..(64): n is a, c, g, or t
  misc_feature (146)..(146): n is a, c, g, or t
  misc_feature (268)..(268): n is a, c, g, or t
agcgagctccgaccccgctgagcaatacctttatgtggctgacctgtcttggaaggacaagcgngttctgcgggaaatgtaccagatctacttctggaacattgcaccattgctgtcttctatgcccttcctgtggtgcagctggngatcacctaccagacggtggtgaatgtcacagggaatcaggacatctgctactacaacttcctctgcgcccacccactgggcaatctcagcgccttcaacaacatcctcagcaacctggggnacatcctgctggggctgcttttcctgctcatcatcctgcaacgggagatcaaccacaaccgggccctgctgcgcaa

SEQ ID NO: 538594 - DNA, 153 bp, Homo sapiens
  misc_feature (83)..(83): n is a, c, g, or t
  misc_feature (93)..(93): n is a, c, g, or t
ggagaggaggagtgagggggacccgcaccttttcggcaggaaatgtgcccagcagctctgggtcaaagcacggttgctataangctatctctngggatgcctctaggcccccgttccctcgtacacaccgtctgcggaaacagattacactgt

SEQ ID NO: 538595 - DNA, 400 bp, Homo sapiens
  misc_feature (16)..(16): n is a, c, g, or t
  misc_feature (60)..(60): n is a, c, g, or t
  misc_feature (73)..(73): n is a, c, g, or t
  misc_feature (151)..(151): n is a, c, g, or t
  misc_feature (172)..(172): n is a, c, g, or t
  misc_feature (189)..(189): n is a, c, g, or t
  misc_feature (271)..(271): n is a, c, g, or t
  misc_feature (348)..(348): n is a, c, g, or t
  misc_feature (376)..(376): n is a, c, g, or t
  misc_feature (393)..(393): n is a, c, g, or t
catgcccaggcacagncctagccactgtggcttcaagaagtacccctggaaacagttgcnccccttaagaagntccatagcctagttacaaaatacccattatgacagggcacagttgctcatgcctgtaatcccggcgctttgggaggcnaaggcgggtggtttgcttggncccgggagtttgagacnagcctgggcaacgtggtgaaatgccatctctactaaagacaaaaaaattggccggttatggtggtgcgtgcttataatcccngctatgcgggaggctggggcaggagaatcgcttgagcccaggagacagaggttgcagtgagccgagatgacaccacngcattccaggtctgggcgacacatgtgnggttctgtcccaaacantaaaaca

SEQ ID NO: 538596 - DNA, 205 bp, Homo sapiens
caccgtgggaactgtataacgtttcaaagccagtgctcagcttctctgctccgtactagcgtgcacaggtcttaactcagccgagatgcctgtactagtttttcgaccccagggtcaacctttctgagccacagcttcccgctgggaataatgatgcctgccctatctacctcacagacttgttatgaggatcaagtgagattaa

SEQ ID NO: 538597 - DNA, 150 bp, Homo sapiens
cgcgaaaacctaatccagcaggtttctgctctgacattctcttgtctgctattcccagagagaagtctcagaggggaggggagagcctgcatctgggtggccaacgggctgattacgggaatctgtgtccatatccacactgggcatgtt

SEQ ID NO: 538598 - DNA, 283 bp, Homo sapiens
gacatgatacaacttgagctcagtaccgtgacgggtcaagctcctgatcgggtctgctgagagctgccagctatcctgtgtgaaatttgcttgttcgcaaagctactagattgttcgattagtctttcgcccctatacccaggtcggacgaccgatttgcacgtcaggaccgctacggacctccaccagagtttcctctggcttcgccctgcccaggcatagttcaccatctttcgggtcctaacactgtgcgctcgtgctccacctccccgtcacgacttga

SEQ ID NO: 538599 - DNA, 913 bp, Homo sapiens
  misc_feature (267)..(267): n is a, c, g, or t
aggagaggaggagatgaaaaaaaaacaagagaaagaaagaaacgaacagcagcgaggatggtgcgagggctaaccggtgctccccggcgaggtgtccaccacgggcttcgggaggggatcacacaggtgcagagtcggggacccgtgcgccaagcccgaggaggcccggtccgccgtagggttcgcgcctccgcccactgcccgcggcccccgtggggccccacggtcaatggaacaggtcgcgtcgcgagaaaagtttgcgccctntttgtctgcaagctgccaggcgcccttcattctttacttctgctgcgccccctgcttgcaatggtcccccggccgcccccccttgtcggggctttctcgcgcttcccccggcctgggacgcttcccgttgttcgacattgaaggccccgccgcgcagcggcggggcttttgcctcagacccacggggcaccgaacagccttgctggccggttggtgccaccagagcgtaacccacggtttgccccacgacaggtctcggacggggcaacctcatctcttttccccccttggtccgcgccccccccccttggtaaccctcgtcgtgtcggaaacaacccgtctttcccacaatccttgttttacaaatgggcccattcaaatggtagatcgcatctcaataacacgcggtttgaagtaacacccccactgctcccttcgaccctcccgcaaacagtaagcaaataattcttctagtggcccaccacatcgtttataatttcagcgcgtcagccgccttttacagttataacgtatttgataaactaaacgccatccctttttcaagaagcaccaactcggcccccaaaacaatcttgccccaaacatcgggaccccctattaaacatttaaagcggcccacataaca

SEQ ID NO: 538600 - DNA, 412 bp, Homo sapiens
gaacgatatgcagaaaaatagtatcatatcattctactctttaatattcattcacctatttttgcttcacaacctacattatattactttctggttctagattacttttataaatattatacacgctatagcaatgttatgacctaactttttcacagccactatttagtgtaaagaaattattcatatcatcttattcattgtgattattattaccactatctgcactggtgctgtgggaatggaagtgaataagagctaccgtaaggctgtcatcttcttcctggctcaggcagcggaaagaagaaactctctgagataatgaatacgaatagaatggggttctaacaggtgttctaacagtgaaggagttcagaagagtgacgctgagtaggagtgatcaggaaagact

SEQ ID NO: 538601 - DNA, 917 bp, Homo sapiens
tatcccttacagtcctccatcttcaaggaagaagtagaacggcactagaaggtcttttaacacagcacgcctcatcaagctcaaccaccaacttaagaaaggactggaaatgcttgtaatcacttgtgcgcttctcagaattcaggcctgtcctcagaatgttacacagggtacagtccaatctgaagctcctgtatagacgctccgtttattattagggccccagtgtctcattcgagcatccagtaaccgaagctgtgagaaacgttgtgaccgcgcccaagagatgcttgtgcgatcgcctacgtatcttttggttgcatagtcataggtcactgatttcaaccgattcgtcaaactactcatacgacaccctgctcttgttgacactgccggtttacactgtggctccaagcgcatcacagcgtgatgtctcttggttggctgagtcctccgaagagctgtcacagctgctgaagtctctgtaacagtagaataaatagatgcgtttgctggcaggactatgctgaagtctccttaggcactctcataatcagatgtcctaaggtcctcccaattgctagagacctttgatacctgttgttgctccctgtctgttgattaccatttgagtctctcttaggttcatccaaaagcggtatccaggccatcagccaatcattctatacgacaaaggttactactaaaaaagacccgacaatatcaccccttaccacaagaactcccttcagcttaatctctcccaatctaggtgtcccaacggccgcccctaattcccggtttgaagcagccctgagaaaggatcgccattactctctacatacaacccccaaaattttcggcgccccaagcatttcaacactaatttgtgttcaattattcgtatgaatatagaa

SEQ ID NO: 538602 - DNA, 514 bp, Homo sapiens
  misc_feature (7)..(7): n is a, c, g, or t
  misc_feature (84)..(84): n is a, c, g, or t
  misc_feature (109)..(110): n is a, c, g, or t
  misc_feature (133)..(133): n is a, c, g, or t
  misc_feature (175)..(175): n is a, c, g, or t
  misc_feature (205)..(205): n is a, c, g, or t
  misc_feature (218)..(218): n is a, c, g, or t
  misc_feature (222)..(222): n is a, c, g, or t
  misc_feature (351)..(351): n is a, c, g, or t
  misc_feature (371)..(371): n is a, c, g, or t
  misc_feature (440)..(440): n is a, c, g, or t
  misc_feature (506)..(506): n is a, c, g, or t
ttaaggnagccctaaaatgtggactgggtttcctgttttagcactgccctgctagctcttcctgaaaaggcctataaataaacngggctggctgtccgctcgtcccacnnggagtccctgacgggcacacccnggagtcgctggggcgtacctcggtgggtgcacacatgtggcnggacaggaagaagccgtggcaggccctggnggaggctcttganattngggggctttgctgcttgacaaaggcgccccctaccatggcacccagagtccccctgccctaaagggatgttgaggatggggtagcagcccagtccgcccctaccccaggcccctcgatgccagttttancccggccacccaggagaacncaggggctccaggctgggattttctttcttcccgtaaattaccacaaagttaaggtcaggacttcagancccacagtttcaccctggcttacaggtggggaaaccgaggccctgaaaaaggatggaacagacgtngccactcc

SEQ ID NO: 538603 - DNA, 1013 bp, Homo sapiens
  misc_feature (175)..(175): n is a, c, g, or t
  misc_feature (267)..(267): n is a, c, g, or t
  misc_feature (297)..(297): n is a, c, g, or t
  misc_feature (582)..(582): n is a, c, g, or t
  misc_feature (1002)..(1002): n is a, c, g, or t
gagagagcgaggcgcgcggggcccacagcgccacccccgcccccgcccctaccgagcaaacatatggcacccaccgcagcccagcgcgcgtacgagccccgcagggcgcgccccccaccgccaaagccaggcgcgcgggggagccaaaaggaggcgaggagagaggagggcgcangcccgcccagcccagccctgcccagcccggcccggaggcagacgcgccggaaccgggacgcgaaaaaaaagcagagcggaggcatcgcgcanagagcccgcgcgccgcccgcaccgggggcngaaaccaggcggggggacacgagccaggcgccgccgccggagccagcggagccggggccagagccggagcgcgtccgcgaccacgcagccgccggccggccagcacccagggccctgcaagccaggacgggggagggggcagcgagacaagcacccggcccggaagcaccccagccgccgcggccccaaccggaggggcaccgaacacacccaagagcggcccaccaacccggaggagagcaggcaggaggacagcacggcccaggacagcgagggcaggagaancagcacaggggacgccccacagcagaccatgtgttcacgggatgcccgcacaaaacagctgaggcagctactggagaaggtgcagaacatgtctcaatccatagaggtcttggacaggcggacccagagagacttgcagtacgtggagaagatggagaaccaaatgaaaggactggagtccaagttcaaacaggtggaggagagtcataagcaacacctggccaggcagtttaaggcgataaaagcgaaaatggatgaacttaggcctttgatacctgtgttggaagagtacaaggccgatgccaaattggtattgcagtttaaagaggaggtccagaatctgacgtcagtgcttaacgagctgcaagaggaaattggcgcctatgactacgatgaacttcagagcagagtgtccaatcntgaagaaaggc

SEQ ID NO: 538604 - DNA, 217 bp, Homo sapiens
gtaaagactctgcagaataacattgagtttagtttggaatcacagcaaggactacacagggttggactatttcaccatcatactgaggagatactttcacaaccaaacacgtgaagattacgagtcggacattgactatcggccacaattctttgatgtttgaggtgtaggggcactagttttcatttatcctgaggcctaggactcaaaaatgtaa

SEQ ID NO: 538605 - DNA, 98 bp, Homo sapiens
ttttccatattgagaagactgtgccatattttttgaacttattttatttgttcccatgcccaggctttggtcattggtcatactgtatgttgtattta

SEQ ID NO: 538606 - DNA, 170 bp, Homo sapiens
cgggttcttactggtgatcacaacgggaactctgacaaagctgtgtttttgactagctattcctctctgggtcctgaacacaaacctttgatctgcagaggacattcttctggcggtgggggtcgggtctatctgtctcagaaaatcaaactacagaccatgcaaacttg

SEQ ID NO: 538607 - DNA, 758 bp, Homo sapiens
taaaaaggtgtgtgggccccccaattttaacccccgggccccccgcgggacacccggggtgggccctctgggggggcctctctctctctgtgtgtttttttttctctctttagaggagcccggtggtgtgggtggtcgcgccccccccctctcttataaaaagtgtggtagaaaccgtcccctccccccccctcttgtgtgtggtggacacacacacggcggtggcgccgtgtgtcgcccctctctctctctctcccactactcttctttgtgtgtgtgtgtaacacctcacacacactctctctctgtgtgggggtgctctttatcttctctcgcggccctctctcgcgacgaatctctccacaattatatatctctctcgtagtgggctctctcacacaaaacaaaaaacaaaaaaacctctcgtggtgtgcttctttatcggcgcgggggtgcgagagaaaaagattgtggtaaagagagagtggtggcccgcgtggcgccctctcgtgtgtgttctcccgcgcgcccccccttttctttgtggcacaaggtggtggagacacactcgcgcgccggggctcctccctaatagggagggcgccttgtatatattatatctcacacagaaacgcccgcgtgatgtacacccccccgtgtcttattaggcccctcttccttacaaaaaaaaccccttccaccacctccacccccctcccaacacaaccaccatacttacccatcctccctacctccca

SEQ ID NO: 538608 - DNA, 202 bp, Homo sapiens
tgatctagaggatcccatctacactagtagggtggcgggtgaacaccatgtagttgaagttgcctttcttatacaagtgggtgcctcccggtacatctcgtaccactatcctacacctagtgaaggcggctcacccaatggtgagtgagcagctccctggatggtgttcctacatggatagaaaccgtgaggcttcctctgt

SEQ ID NO: 538609 - DNA, 508 bp, Homo sapiens
agagataaaaaacaacaaccaaaagaggcgggggttggggctgggtacggggggggagctaggtactagggacaaggcaggggacagggtccaagaagcataggatgcttggcttacccttaaagagatgagacataagccacatggcttcctgtcccaatctgtccttccccaccaccacccacaacttacgtagggtgttttataataaataaccatagtgcggggagtgggaaaagttcggatctagaaacagcagaattcggagtgggcactaaatatatcccatatgatggtcgtggttcaggtcgtgtcaaagctacttacagagtgtggacgggtccaattccttctccacggagtctgcattcctcgccctccagcagctggcggtaaggggcgatctccaggtccagggccagttggtgtgtcatgagctctgggtactcacgcagcagccgggccatgtccggctgggccttctggagggcctcctccagctcggcca

SEQ ID NO: 538610 - DNA, 468 bp, Homo sapiens
aagaattgaagctcagacaaaatttttattgtgattttaacaaacctcgggtcctcccgcgggcctctgggataattttaagccaggtaacgacctgggcagggcagggaggcggaaaaaacctctgttattcacaagatgcgctgggatgggcctccaggaaagcttataaggaaaaccaatgggcccaacccccaccgggtgggaactgcatctacacctaacacgaaggaccagcatcagagttgcacaacattccaacaaaggctgaaatccagtagaaagaaagggcaatctccccaggacaggacccggaggtcaggtcaccgacactctaagggggcaggcttatcctgatgacaagagccatggacctaaccaggcgtatgaaaaccggaatggtgaacttaaatgctaaaccttaatggtgcagtaacagatggctacagcgcaaattaggaggccaaa

SEQ ID NO: 538611 - DNA, 444 bp, Homo sapiens
gtcacatactcgtcctgagccggcttcagctgtccgcgcataagtctcccggagccatggcctagtactcttatgtgaagtctagcaagctcgtgctcaagggaaccgagtaagaagaaaaagagcaaagataagaggagaaaaagagaagatgaagaaacccagcttgatacgttggatctggtgaacagtaacaaactttggtgaaatttcaggaccatagccattaaaatggatgagggacctatatacatgcactcgacaatggtctttttacctggggagctcacacaaagaagaatcgcctcaatctggctatggaaatatcttggtataattcagatgaactttttgggcattcagatgcatttggcccagacacatggcaccagtttttcaaagggaaaggctttttggctaaatagctctttttagatcaatagg

SEQ ID NO: 538612 - DNA, 243 bp, Homo sapiens
tggggggggggggttgggttgggcccccccgggcccccccccccccggggcccccaaaatggggggtttccctttttgggaagaaatttcccttccgccccctttcccaagggggggggggggtttggggcgggacccttgggggcggcccccccccggggcccccccccggggggaaaaaccccccccccccttccctttaaaatgggggggttttttaaaaaagttttacctcccggggga

SEQ ID NO: 538613 - DNA, 312 bp, Homo sapiens
  misc_feature (307)..(307): n is a, c, g, or t
tccaagggtgcacctgatttccatattggtccaaacacatgttttacaatttgtacagttaacacaattatcacagtggtcctgaggtgacgtatatccctcagcttacgaagataacaggattaagagattaaagtaaagacaggcataagaaattataaaagtattatttgggaactgataaatgtccatgaaatcttcacaatttatgttcctctgctgtgctccagccagtcccttcattcagggtccctgacttcccgcaatggatatgtctttgcctctaaaattttagtaaaggtttctnctgaa

SEQ ID NO: 538614 - DNA, 909 bp, Homo sapiens
  misc_feature (88)..(88): n is a, c, g, or t
  misc_feature (92)..(94): n is a, c, g, or t
  misc_feature (97)..(97): n is a, c, g, or t
  misc_feature (178)..(178): n is a, c, g, or t
ccagggagcaacatgagcaaaaataggagtgtgtcagagtttggtgtattagaggaactgccagttgttcatactggctaggcagggntcannnganggagaagggtgagagattgagctgggtggaggaggacatgaaggcctttgggtgccatgatgggaggtggtggaaggtttngacctgtccaccttcctgtttcctccttgaagctgaggcatacgtcagtgggatgctcttttgcctgggtatatttctctccttttacctgctgaccgtcctcctggcctgctgggagaactggaggcagaagaagaagacactgacatggtggacattgagcgagcctgcccagaaagcggtcaccctcgagtccatggctgattcttttcctggcagttccccttatgagggttacaacatatggctcctgtgagaatgtcactggatcgtagcgatggatctggatgacagcgctggacactggggaccatcatcgtatacggtagccagggaccgcgtccagttgaaccgtgtagggtactcggacaccagaactggaagtccagtgagactctgatgggaggaggatgactacgagcacaaggacgcgagactcgagataccgacaagcacagtcgaaccgacaaccagacaaagaacgactaaatgtggccagacacctggccacggaagggaccaagacggtgatacgatgcgcggaaacgaagcaggacaccaacaatcgtaggagcgcagggacacagaatgggcacaacgcaatacgagaagacagcaaaaaaagggaacgatacatgcgggcgacgcagacggaaaaggagcaacccagacccagaacaggcgggcagacgagggaagcgagggcaggccaggaagaatccggacgaaca

SEQ ID NO: 538615 - DNA, 142 bp, Homo sapiens
aggcaagcataaggaaagttacatcatcttggtcatcagttcaggtatatgtgaaaacgcacctgtaggcagagcctacacaagagttacatcacctagttgattactgcagagatatttcacaataccctgaactgaaatg

SEQ ID NO: 538616 - DNA, 823 bp, Homo sapiens
  misc_feature (88)..(88): n is a, c, g, or t
  misc_feature (92)..(94): n is a, c, g, or t
  misc_feature (97)..(97): n is a, c, g, or t
  misc_feature (178)..(178): n is a, c, g, or t
ccagggagcaacatgagcaaaaataggagtgtgtcagagtttggtgtattagaggaactgccagttgttcatactggctaggcagggntcannnganggagaagggtgagagattgagctgggtggaggaggacatgaaggcctttgggtgccatgatgggaggtggtggaaggtttngacctgtccaccttcctgtttcctccttgaagctgaggcatacgtcagtgggatgctcttttgcctgggtatatttctctccttttacctgctgaccgtcctcctggcctgctgggagaactggaggtaaagtggaactgctgggcctcccctggtctgggtggtttgggcaggtgtgtggggcagatcacctggcaggatctgagccagcctagggtaatctacaccatccatagcagatgatggtggggctgttagagtctgtggcccatgagcctctctagaaaccatcccctcccctcaaccttcttcccaagcagggagatcccatgttgctccccagcctgtgaggaaccctgggacaaagggtggaggacagggtcatagcgatgagagttgagcagagaggtagaaggaaagtcagccccatacagagtgatccttgtcctgtcccatctgggtggcctgtgggttctgtccatgcaggcagaagaagaagaccctgctggtggccattgaccgagcctgcccagaaagcggtacctccagggggcctgggtggggcgggcacagtgtgctttgtgttttggggggtggtggtggatggttccctagggggttggaggagaagggctgggggttctg

SEQ ID NO: 538617 - DNA, 256 bp, Homo sapiens
ctgtggaggcgcagtgcaagctgtcagtagatctaccattctggggtctgaaggatggtggcccatattctcacagtgtccatgaggcagtgccccagatagggactctgtagtgtgggctccaactccacatttctttaactgcactgcccatagcgagaggttctcacatgagagcccctacccctgctagcaaactgtctgcctgtaatatcgcaggcgttttcatacatcctcgtgaaatattgacttcttg

SEQ ID NO: 538618 - DNA, 408 bp, Homo sapiens
acagacctgttatcgacaagaccttgaatgaggctgactgtgccaccgtacctcctgctatccgctcctactgatgaaacctgacagctacaggaccagcttatgtgattatatagcatagcttacctgcgtttcccctcatacttgtcttggtaaaattctgctctcatgaacaaggagtcacttcatagattgtgatcaacagcttggtagtacttgctgtaagggattgagttgcgccagactttgtctctttattcttgtgcagtgataaaactggcataattcttaagtgaagtacaaatgagcaatcttttatttccaaataaaaccatgtagtagtgggattttagttctatctattgggtctgaaacagcaaatataatttttcttccgctgtctagctg

SEQ ID NO: 538619 - DNA, 279 bp, Homo sapiens
ggcggaagatggcggcgtccaagggaggttgagggctctgaggaggcgttgagaggtttccgtacagcctgtggggctggcttccttggcttttggggactcggcctcagcgtcaccctgagattccccccgagacacagtgcgctagtacggctgtccggaggtcagcctgatttcaacccaggtgcccctggcctggccagcagtgaatgtaggagatgaattgtgcaagtgactttctctcgactctgattttattaaatatttctccaccctgga

SEQ ID NO: 538620 - DNA, 1348 bp, Homo sapiens
  misc_feature (79)..(79): n is a, c, g, or t
  misc_feature (103)..(103): n is a, c, g, or t
  misc_feature (1106)..(1106): n is a, c, g, or t
gcccctggcctattgcacgtggctactgacagtgggattcccacgccaggatacccatcaagtactacgaccatgcacnctgaccacagttgtgcaacacatncattggacaaccccaccccagagaaacaaggatcagctgatccgggcagccgtgaagtttctggacaccgacaccatctgctacagggtggaggagcccgagacattagtggaacttcaaaggaatgagtgggatccaatcatcgaatgggctgagaaaagatacggcgtggagatcagctcctccaccagcataatgggacccagcatccctgccaaaactcgggaggtgctcgtcagccacctggcatcttacaacacatgggctttacaagggattgagtttgtagctgcccagctcaagtccatggtgctaaccttgggcctgattgacctgcgcctgacagtggagcaggccgtgctgctgtcacgcctggaggaggagtaccagatccagaagtggggcaacattgagtgggcccatgactatgagctgcaggagctgcgggcccgcaccgccgccggcaccctcttcatccatctctgctccgagagcaccacagtcaagcacaagctcctgaaggagtgaggcctgggcagagcacactcagcaggatagaggcagtgcagccacagctcccccggccttcagggctccccagcctgtggggctggcttccttggcttttggggactcggcctcagcgtcaccctgagattccccccgagacacagtgcgctagtacggctgtccggaggtcagcctgatttcaacccaggtgcccctggcctggccagcagtgaatgtaggagatgaattgtgcaagtgactttctctcgactctgattttattaaatatttctccaccctggaaaatgtgctgagccctgttttcacgtatgcctctgcacttctccattcttcctgttttgtctaggttccagagggttaaacagcttatctcccatggcgtgtttggatatctgctgcctgtggtcaggaaccttgcactggggaaacaatcatgtaatccacagacaactctatttgtgttcttcagccntcacctgaaggcttttttttggctggcttttaatcaaacaatcttttgaaacaattgtggtctaagctggttgtttctatttgttcctactgttctaaaacaaatgatttactctagaaagtagaaaatagaagttgtttctgggctaaaagcctggacaggcttgacaaggtcacctgatgtgcatgtttccgctcatctcccacccaggagtcctaagggtcctccagacaagaaccaca

SEQ ID NO: 538621 - DNA, 900 bp, Homo sapiens
ctgcacagaactagatactgcgagttgaattgtgctccttgccagtcgtcctcatcgcggggtccgtcttctctcctgctgctgtctgggaccttctgcgggcgatgagaagacagaaggggcccagagtcgaccgtcaaggtgtattgggacctacgaattggagatgaaggatgtaaggccgggtgatctgttggtctctctcgtgaacagactgtaccaaaaacagtggataaattttgtggccttagctacaggagataaaggatttggctacaaaaacagcaaattccgatctgtgtaatcaaatgacttcatgatccagggcggagacttcaccagggcagatggcacaggaccgcacagagcatctacggtgagctgcttcccctgatgagaacttcaaacgtgaagcactacgggcctggctgggtgagcatggccaacgcaggcaaagacaccaactggtcccagttcttcatcacgacagtcaagacagcctggctagatggcaacgcatgtggtgtatggcaaagttctagagggcatggacggtggtgcggaacggtggcagagcacccaaggacaaaacagccgagaataaacccctgaacacgcactgtgatcattcgcagaacctgcggcaagactccgagtgcacgcaaagccctttgccatcgcagaggagtatggcaaagggacatcatatctatagaggtgaccgactgtgcacggaccttgtaaatcccgcacacgggctctgagctgcaaatggccccaggtgctaggattctggtggagctggacccattacactcacattcacaggcccatagaactcactattagtaacaaatcctacaagcactgaccaataaacacactgtagactaacatatt

SEQ ID NO: 538622 - DNA, 643 bp, Homo sapiens
aggcagtcgcttcaagacttgtagagaacatgatcccaacgataagggttcaaactcccctccagggaatactccttctgaagtgactgcccatgaaaccagccctcatgctagctcatgtgcagagtgagccccccatcaggagtccactaccccgtaggccacacagcctgggcttccagctcacacctcgtcctcagccctctgcaggccaggtccctctcactcagcaccctcctccctccagccctcccagggacagaggagagacagcagagcttctcagtggtggcagcgtccccaggccacactctaagaaacggcctgtggccagcccgccgggtgttggaggagcactccacactcttcatggctaccatgtgcatggcccatgtggacctcctgagaactaggcgacatagagatgaggcagttttcccaggtttacagacaggataacagtcctacagagattaaatgcagttcagctgtgaagtgggaactggaatctaggagggctgtctgctagagaatttatagggctgtcgtgtacagcttcacaggttgcgtacggcacaactccaggagacacaattcattatagtctgggataggagtagagtcccttgaggctataatacag

SEQ ID NO: 538623 - DNA, 697 bp, Homo sapiens
gcacagcatagcaagactgcatctcgtacagagagtaaaaaaaattacccgagtgtggtgatgtgcatctgtgatctcagctacttgggaggctgaggtgagaggatcgctggagcttgggtgaggtgaggctgcagtgagtcctgatcatgctgctgcactcaatcttggacaacagagcagagacccgggtctcaaaaaaaaaaacaagatatatatagtagtatatatgtacattctaattgaggctgaaggtgcatcaaactgtggggtaaagatcagcgacgcgcaggctggggaaccttcacgggggacacaaccaaatcctgtggcacagagaagataagggagaagaccattgcaggacagtgggatacccaggcagtcgcaaacaagggaggggtgagaatacacacaagtcaccgttcaaaccaaagatgccccatctcccacgcggccagagggggatccaaatagggtctccaacgggacgtaagagtacgccacaatagattgggacactggagggaatccgatggggcacaagtgggcaccactggcgtgacggcacagggggaacagcacgcagcgccgcgaaaagcaactggggaacaaagttacaacgacagcaaacagggcgcatgccgcgtggcccgtacaaacgacagcaacaacagagaggaaaccaacaaagaca

SEQ ID NO: 538624 - DNA, 916 bp, Homo sapiens
  misc_feature (79)..(79): n is a, c, g, or t
  misc_feature (103)..(103): n is a, c, g, or t
gcccctggcctattgcacgtggctactgacagtgggattcccacgccaggatacccatcaagtactacgaccatgcacnctgaccacagttgtgcaacacatncattggacaaccccaccccagagaaacaaggatcagctgatccgggcagccgtgaagtttctggacaccgacaccatctgctacagggtggaggagcccgagacattagtggaacttcaaaggaatgagtgggatccaatcatcgaatgggctgagaaaagatacggcgtggagatcagctcctccaccagcataatgggacccagcatccctgccaaaactcgggaggtgctcgtcagccacctggcatcttacaacacatgggctttacaagggattgagtttgtagctgcccagctcaagtccatggtgctaaccttgggcctgattgacctgcgcctgacagtggagcaggccgtgctgctgtcacgcctggaggaggagtaccagatccagaagtggggcaacattgagtgggcccatgactatgagctgcaggagctgcgggcccgcaccgccgccggcaccctcttcatccatctctgctccgagagcaccacagtcaagcacaagctcctgaaggagtgaggcctgggcagagcacactcagcaggatagaggcagtgcagccacagctcccccggccttcagggctccccagcctgtggggctggcttccttggcttttggggactcggcctcagcgtcaccctgagattccccccgagacacagtgcgctagtacggctgtccggaggtcagcctgatttcaacccaggtgcccctggcctggccagcagtgaatgtaggagatgaattgtgcaagtgactttctctcgactctgattttattaaatatttctccaccctgga

SEQ ID NO: 538625 - DNA, 1497 bp, Homo sapiens
  misc_feature (1255)..(1255): n is a, c, g, or t
ctcttggtcaaacaaatggcacagcctgacctctagcttggtcccatcaggtctggcatctgtgccagcagctgcatctgtagccaggagctacagggtggaggagcccgagacattagtggaacttcaaaggaatgagtgggatccaatcatcgaatgggctgagaaaagatacggcgtggagatcagctcctccaccagcataatgggacccagcatccctgccaaaactcgggaggtgctcgtcagccacctggcatcttacaacacatgggctttacaaggtcctgtgagtggagaggcacagagtgttctgggctagctgagtgtggaggctgggtggctctgatgctagccaatcactctacgctctaggctcacacctttccacctccgacttcgccagcagaagtcttgagttcaatctcattgccctggcttgggtcacatgtccatccatgaaccaatcactagactgggtgcggaaagctctgatttgccaagttcgggtcatgtgtctcactagggattgagtttgtagctgcccagctcaagtccatggtgctaaccttgggcctgattgacctgcgcctgacagtggagcaggccgtgctgctgtcacgcctggaggaggagtaccagatccagaagtggggcaacattgagtgggcccatgactatgagctgcaggagctgcgggcccgcaccgccgccggcaccctcttcatccatctctgctccgagagcaccacagtcaagcacaagctcctgaaggagtgaggcctgggcagagcacactcagcaggatagaggcagtgcagccacagctcccccggccttcagggctccccagcctgtggggctggcttccttggcttttggggactcggcctcagcgtcaccctgagattccccccgagacacagtgcgctagtacggctgtccggaggtcagcctgatttcaacccaggtgcccctggcctggccagcagtgaatgtaggagatgaattgtgcaagtgactttctctcgactctgattttattaaatatttctccaccctggaaaatgtgctgagccctgttttcacgtatgcctctgcacttctccattcttcctgttttgtctaggttccagagggttaaacagcttatctcccatggcgtgtttggatatctgctgcctgtggtcaggaaccttgcactggggaaacaatcatgtaatccacagacaactctatttgtgttcttcagccntcacctgaaggcttttttttggctggcttttaatcaaacaatcttttgaaacaattgtggtctaagctggttgtttctatttgttcctactgttctaaaacaaatgatttactctagaaagtagaaaatagaagttgtttctgggctaaaagcctggacaggcttgacaaggtcacctgatgtgcatgtttccgctcatctcccacccaggagtcctaagggtcctccagacaagaaccaca

SEQ ID NO: 538626 - DNA, 133 bp, Homo sapiens
tagaaatacacaaaatagagttgagatgctggcttgtgttggacattgacacaggcagttaaaaatcttatctactctagggtgtttcaactgtcacttttgtttcagatctcttaagaatccgtatctctag

SEQ ID NO: 538627 - DNA, 764 bp, Homo sapiens
  misc_feature (79)..(79): n is a, c, g, or t
  misc_feature (103)..(103): n is a, c, g, or t
gcccctggcctattgcacgtggctactgacagtgggattcccacgccaggatacccatcaagtactacgaccatgcacnctgaccacagttgtgcaacacatncattggacaaccccaccccagagaaacaaggatcagctgatccgggcagccgtgaagtttctggacaccgacaccatctgctacagggtggaggagcccgagacattagtggaacttcaaaggaatgagtgggatccaatcatcgaatgggctgagaaaagatacggcgtggagatcagctcctccaccagcataatgggacccagcatccctgccaaaactcgggaggtgctcgtcagccacctggcatcttacaacacatgggctttacaaggtcctgtgagtggagaggcacagagtgttctgggctagctgagtgtggaggctgggtggctctgatgctagccaatcactctacgctctaggctcacacctttccacctccgacttcgccagcagaagtcttgagttcaatctcattgccctggcttgggtcacatgtccatccatgaaccaatcactagactgggtgcggaaagctctgatttgccaagttcgggtcatgtgtctcactaggtaagagcagaggaggatcacccccaggaagaccagagtgctctttcagaagagtgggacaatcgctggatggctctttgcaccactcactcctgttctctgctagggctgctgggactcacaaggggtaggttgtggcagctgc

SEQ ID NO: 538628 - DNA, 555 bp, Homo sapiens
tattatatatgactcccataagtttaacccttataacagcacttgaagataattctgcctaattctcacgtcattcttgggcaacaattatcaatactgattaaattttgaatttgtaaaatggtcaacccacatgtagatttcgttgccaagcacatgttaaagtatatatccctatatctaacacctgaatgtgtggtgggaaggggcaatgatcagtaaagtggcgttggttcaaatgtgtattgtgtcacataatgggcccttctccacggaagtttgcacaaaccctgtcagtaacccataatgcacaaaactgtgtttaccttgcaattaaaaccacagtgaaagtttgggttttccttttgtgctaatcaaatcaggtgtaaaatcagagcttcttatatattcctactgggataactgcatcttccactcagtcactactaaaaagcataggcttcagtttcgcaagaaattttttttattttcttcaatggttgtgcagataaggatccatttctgggataacaccggagatttaagtcatcttct

SEQ ID NO: 538629 - DNA, 104 bp, Homo sapiens
acgggctgcgactgaataagaggatcaaccctgataagggtgtggcctatgttagcggcggtgcaggcgaacatcctgatgggggacaagtccgagaacgtgca

SEQ ID NO: 538630 - DNA, 215 bp, Homo sapiens
  misc_feature (178)..(178): n is a, c, g, or t
acacaacaaatgagatattccatgctcatggataggaggatcaatatccgaaaatggcatactgccaagcaattcaagattcaatggcatcccatcaagctccatgactttcttcaaagattggaaaagctactttaagtcatggaccaaaaagcccaaattccaagcaatcttacgnaaagacaagctggggcatcacgctcctcctcaactat

SEQ ID NO: 538631 - DNA, 153 bp, Homo sapiens
ggatctcctatcgtagttcgctttgactggtgaagtctagcatgtactgtcggaggtagggtctgctccgaggtcgccccaaccgaaattttaatgcaggttggtagtataggacctgtgggtatgtaaggtactgtttgcattaataaatta

SEQ ID NO: 538632 - DNA, 214 bp, Homo sapiens
cacatcatacttatattatccttactactacctgtcattccttctactccccttatactccaacaccactaccctactactatctcccacctgaaacaagcttacattacttacaccgctttattccattcaccctcctctcccttggaagacagtccccgcttcccggcgctgtgcccaaattggccatttatcgaataattcactaaattag

SEQ ID NO: 538633 - DNA, 388 bp, Homo sapiens
gctcggtccctgtgggtggcaacaacaacagaacgaaacaaagcatgctcagctattgagacactgtcaagattacgttataccatccaaagtgcattattgtcacttttttcctgtcaagtatatagagacttctatatcataatcatccttttttaaaaaaaagaatttcaaaaaagatggatttgacacactcaccatttaatcatttccagtcataatatatatttggctgaaattatgtcacatggatgtaatatagggtttgtttgctgcttttgatggctacgtattcggagagagcaatcttgctgtgaaacagtgtggatgcaaattttataaggctgactcttactaaccatcatttccccctttgttagttgtatct

SEQ ID NO: 538634 - DNA, 146 bp, Homo sapiens
  misc_feature (1)..(1): n is a, c, g, or t
  misc_feature (14)..(14): n is a, c, g, or t
ncttctctaggagngtgggtttttaaaaacaacgaattactctggtgaaccatacgtgattaataaagatttcctttaaggcagaggctggtcgagatgctgcggttatcttctggcctcacgccactctccacgtccgggtaccg

SEQ ID NO: 538635 - DNA, 220 bp, Homo sapiens
aagcctccatttccttaaggaagggtttttgtctctctccctcccccacaccgtagcggcgcgcgagggcgcccgtgccgggcataccgtaggttttccaagagatagcttcaccaacattctccacctgattaggcaaaggatccgagtgatgagagccccaggcgccagcagtggcagttcagagtacggaccaagcgagggccaggcccgtgcagag

SEQ ID NO: 538636 - DNA, 123 bp, Homo sapiens
acacttccctcagtttactctttcactgcctcttcatcttccacgttactcttcttttgacacagatccaataatcttgtctgagggcagtcacacatattcagtgccatggagtaaatggca

SEQ ID NO: 538637 - DNA, 1341 bp, Homo sapiens
  misc_feature (382)..(382): n is a, c, g, or t
tccattaaggaaaacgatgaattacctgtggaggttgaggctctccaggttagggacagggccgtggtcgtgcatgaaggccacaggaagcaaagtggcccccagtccaccttatctgtcccgtgccagtgaagggccatatacacgtggggtggggaggtcctcaggaggggtgtcacactattagcctttaggcaaatagcaagctcttctccatatttcagctctcgtgctccagccttccaattgtgaggagggactaagtgggggttgaggcacagggttgtgggggtgtgaagtgtggccaccagaaccgccgggcaaagagtgtgaggcagctatccaatcttgtgttcgtgaaaggttaagcaattctatcccnctctcgaggttattaagagccttcctgtccttcgacaattcgactttgggttaacaccagtctctaggtgaacgaggcctgtgtgggccaagctgtgaaaaactgtgtgggcgaaaaaacctgtggaacggagtgtgcccaccggggaaagcctatctattccttagacttcgtggtcgctttccaaagtgcttgagaagtctcacattgtttcgccccaagggggcaattccctatcatccgtgagactcggcatagtgttgttgtgtgaacgccagggccaggcccgtgttgccatcagattttccttcaatcttctccagagtcggggataccgagccaacagagagccaatcttcaacaggggctctcagggagaaaaattctgccccagttactcgaggaccaggcacgctgggccagtgcagccatgtggtgtggctctcaattgaggaacccccaccgtgtaaagggtttaacaaacattgatggtcccaggggggaacccagaaacttttcctcttttcctcagaaggtggcgggttgaaataagccaaaaactttgaattcgcccagaggtcccctggtgagggccctctgaggatctggccaaaggcgtgggcccccaagtagaagttgtgtgaataaccaaagccaggggtgacggagagggaaaaaaacccgcaagggggacatccccaacgggcaacaatttcggtacacgagcataataagactgtctctgggaacacccacaaaacgctgatgtaccttaaccgaagacacgacgtaataatatagaatcaccacacagtcatgatgaagcccacgcagagaatatgcgcgaagagacagtccccgttggtagacccttacacaagatgagataacacatacaaaaagcgactccaactgtggtttattggtcgtgtcgtgcgttgttttacactcgcatgacc

SEQ ID NO: 538638 - DNA, 575 bp, Homo sapiens
  misc_feature (30)..(30): n is a, c, g, or t
  misc_feature (108)..(108): n is a, c, g, or t
  misc_feature (118)..(118): n is a, c, g, or t
  misc_feature (121)..(121): n is a, c, g, or t
  misc_feature (146)..(146): n is a, c, g, or t
  misc_feature (172)..(172): n is a, c, g, or t
  misc_feature (265)..(265): n is a, c, g, or t
  misc_feature (267)..(267): n is a, c, g, or t
  misc_feature (269)..(269): n is a, c, g, or t
  misc_feature (271)..(271): n is a, c, g, or t
  misc_feature (273)..(273): n is a, c, g, or t
  misc_feature (287)..(287): n is a, c, g, or t
  misc_feature (323)..(323): n is a, c, g, or t
  misc_feature (353)..(353): n is a, c, g, or t
attaggcaaggtactccttgctcgatcttnaacagtctccaaccctgttcactggacatatcacaagcacctcttgttttataggaatttgatagatggttcattccnttctgactanccnataagtgcatgctgttgccgcgacncctcattgcaacctggtcttagattnttcaaaatttctgatcctttgccacagcctctatcatcactcatcacgaagaagtcctcgatgatgcaactacacttgcctatccatggttcntnantntnttccgacatggcanaaccaacaatgctgtgtccttccggagtccagtgcncttcggcacttctgcaaccaggcagtggtnaaaggggtgctctccaaaaccatcttctagcagatctttttcagttaagattacttgttcttccatgtattcatatttagccagctccttgatcagccgcagtatgtcactgcagtcggcggcagtggctgggcggatcacgaatttagccattttcgtcttttgcttttcttccctttgcggaccaggcccctgtacttgaacagtaggaggagaggagga

SEQ ID NO: 538639 - DNA, 462 bp, Homo sapiens
atttatgcacgtgcttcatgatggactttaggtcagtctattaatgagctctctgcagatacacattcagtagcttatttggtgatgggatactgtatcatatgctcaatctgaaaaacttgaacacgggcaacatccataaagattataaaagcaaactaagttgtgaagctatagtacatgtaggcatatagttaagtatagcaattcaaactgacctgcatccatccaaaacaaattcctccttcaaccttatttttacttgaaatttgctagaagaaatagcaaaccgaaatttgttttatgcatgagttaataccactggctcagcaaatacaagttagtttgctttaagcaggtaactttttttgtaatggaagaaatgcactacaaagttaagacagatttttgctaagcgcaggaggccctttattattgctgcagaaaacaaaagcctggctt

SEQ ID NO: 538640 - DNA, 104 bp, Homo sapiens
gtgctctgcacagccagtgtggtggtggctgtatgcatgggccctctactatcttgcagatccatcctcagtgagctccggcagatcagccacacagagatgtg

SEQ ID NO: 538641 - DNA, 260 bp, Homo sapiens
cctgtcaccgcgaggtgttggtgggggacttgatgtcccccttcgacccgtcgggtttgggggctgaagacaagcctaagtctcttagatgattacctggaggtggcccacagcacttcaaacctcatgggttctccagacgacaaagctaacagcgggctcctaccgaatagagctagggctgtaagatagaggtataggtacaataccctacacaacaaacaagacaaaagagagatagcctaactacccggggacag

SEQ ID NO: 538642 - DNA, 191 bp, Homo sapiens
ggaaacctgtactattagcctagtcaacccaccgtgtcttcggcatagccgtcggcaggagccctttgccaggtcttcccttgagctgtttgcagacaaagtccccagaccggccgaaaattttcgtgctctgagcgctggagagacaggtataggtataaggttccctctttcacagagttattcccggg

SEQ ID NO: 538643 - DNA, 377 bp, Homo sapiens
gaatcatagaaggctcccccaccgtacaactatcctgatacgtgtggctattggtcacttcgtggctaaaggtaagaacgtgctatgatggaagacaagtctgtggactatggtgagtctgtgtaggccagcagcctctgatctgtgcagggtattaacgtgtcaggactgaatgtactgggatttctctagaggctggcaagaaccagttgttttgtcttgcgggtctagtcagggttggaaagtccaagccgtaggacccagttacctttcttagctgatgtctttggccagaacaccgtgggctgttacttgctttgagttggaagcggtttgcatttacgcctgtaaatgtattcattcttaatatatgtaag

SEQ ID NO: 538644 - DNA, 238 bp, Homo sapiens
cacacagagaccgaccaattggcacgcaggcaatcccagaggagagtgtcattcagacagaggaaagtctccgtacccctcatgccttgcaagatgagaaaaacttacccccactcgcgaacattgatctcagggacatgagaggaagaagtgggaaatttccgttcccattacccgcaagaacgtctgagccttcaatgttgaatcctttcattattcaacgtctttttatcttata

SEQ ID NO: 538645 - DNA, 848 bp, Homo sapiens
caattgttccgcaggacccgtggttcccgaagcgccggttcttgcgaagtgaggcccttgctcccggcagactcacggtccccggggcctagtccttcgggattctcccccggtgtatgctatggccacattccccgcgctcaatatatggacctgtgtgtcccccgggaatgtgcccgctgttactctcctctccgcgggtcccaacacagcttttttttcttgggccccacatttaaaaaacagccgcttgcgagactcctagaaatgtccttaataatggccccacccccgccgtttactctttcccacccctcaaatttcctctttttcaaggcggcacccagcttctttcttcggctccaaaaaacacgcctcctggacatattccacccagatctgggcaactccttccttccgccccaataaattactttttggggcgccacccaggaacccttcccaccacgtgttctctgtcaattttgtgaagaaaataacaccccaacaagctattaatcttcttaaccccaccacaaattacaacaagtgtcttccacagacacccctgccaactttatgaaacgtctgcccccaccccttcggacaccccaattatctacatcttgcgttttatacttaagccccacctcatctgtgcgtttacatagagcgccccgtacctggctatgacaactttttgagtatccaaaatcaacaaattcccccccacttttatcaccccctcctctacccctaggacttagcggatctactctatcgtgagacactgaaatcaccctttttcccccctttccccaaaaacccaattcccccccacaaaaaca

SEQ ID NO: 538646 - DNA, 147 bp, Homo sapiens
catagtcacgtagaacttacgaacttgtgaagatagtaagtgacgagggaaggattcatggttagatattagctagggtggcgcttcctattaggtgcataagtaggtacgacctagcagtaatgttagctagttaggcgtacggac

SEQ ID NO: 538647 - DNA, 305 bp, Homo sapiens
cgacttgtgcacatctgttcccatccgtactcagcctctcttgcccgatccccgacttttctactcgaggccaggtaaggcttccaagcgtgatggtgcggcacggtaacgagtcattgcctctcatgccacctggagatttggactacttcctcctcccaactgcgggttcccagaaaccctcgggtcccacgtggctagacttacatatattcaattcactcgtcaccagaacttcctaatgagacaatccacggtgcgccatcaattgaacacagtacaaggcagtagtacaggaaacctgg

SEQ ID NO: 538648 - DNA, 323 bp, Homo sapiens
tgatatagagtctcaccctgttgcccaggctggagtgcaatggtgcgatctcggttcactgcaacatccgcctccggggttcaaaagattctcctgcctcagcctcctgagtagctggggttacagccgcccgccaccacacccagctaatttttgtatttttagtagagacggggcttcaccatgttggccagcctggtcttgaaatcctgacctcgtgatccacccatctcggcctcccaaagtggtgggattacaggcatgagccaccgcgcccggcccaaatatagaaaatgttaaaatacgtcgacgcggccggaaat

SEQ ID NO: 538649 - DNA, 135 bp, Homo sapiens
gattcgtgccccgtacagctgagaatgtagaccagggtaggaagtgagaggagtaatatgcaatatgagagtaaggggaagtggtaaagtaggctgagagttgggagaggtcagatcatatggcacggaagatca

SEQ ID NO: 538650 - DNA, 310 bp, Homo sapiens
caccccagcactttgggaggccggggcggccagatccactggggtcgccagttcgagaccagcctgacccacatggagaaatgccgtctctactaacaatacaaaatcagctgggtgtggtggctcctccctgtaatcccagctactcaggaggctgaggcaggagaatcgcttgaacgcgggaggtggaggttgcggtgagccgagatgtgccactgcactccagcgtgggcaccaagagtgaaactccgtccgaagggaaaaaaaaaaattaattaagtgctgtattctgttatttttgcttcctacc

SEQ ID NO: 538651 - DNA, 371 bp, Homo sapiens
  misc_feature (228)..(228): n is a, c, g, or t
  misc_feature (318)..(318): n is a, c, g, or t
taatttgtagcaaaagctaaatgttataatacttcagaggagttattaataatttaatttattagctctagtcttctttagtctttctttcctccttctttgcttttctcctttgtgaagaaaatctcattacctacccataacccatatgaacatgagtgcaaacatttgcagtttcaactattggtgaatggactcgtataaaatataccaatacacaattttggncaggggggttgtttgtttgagacagggtcttgctctgtcatccagggatgtagtacagtcgcacagccatagcttactgtaacctcgganctctcctgggggcttcaagcgaggcttcctgccgcatcctcccaagtaggcta

SEQ ID NO: 538652 - DNA, 425 bp, Homo sapiens
gagcatttgtctggggctcctcgctgttgagtccaggttgcacattcgccccagccccttaagcctcgttattgtcacggacccgcagcgctcccgtgcgttattgccaccccgtcgctccttctcccgctcggccttctgctatggggggagaagttcgtcctcgtcctcgtctggttagtgtttagtattccgtttggggcccagaggaagacagtgaggttgggggaagagcgtgggccccccgacggcctcccagtgtgggtgcggtgtgcgtgtgccctgtacacatgtccgtcctgatggggtgagggtggggagttccgaggggtggttgcacacctggttccgcgcggggggccttcagctccttcttctcctcctccgagtggtcagccgctgacgtgttctcctcgtcctccttc

SEQ ID NO: 538653 - DNA, 82 bp, Homo sapiens
gtgatctggactgtcccgactgggtcctggcagaaatcagcacgctggccaagatgtcctctgtgaagttgcggctgctctg

SEQ ID NO: 538654 - DNA, 419 bp, Homo sapiens
  misc_feature (123)..(123): n is a, c, g, or t
  misc_feature (284)..(284): n is a, c, g, or t
ctcggggatgtccactggccataaccctctcctttgggcatgggataagctggcaatggatctcctaattaaataagcctcagtctccagactctaagccatcactccacattatgccctcgnggatgcggctactggagttcatttactggaaaatgggtatctttaatctatactcgtccacagtatcaaactaatttctgtcactggcccggtcactgtccagcactaaatccatggtcctactggtgaaacctgtttttggacaatctgtccatggccangatgccaaatggacaatctcctcttcctgggtggctggtcatgggcccatcacacacatgacgttctggccataagccccgagagtggtctgggctaggcgggtaccggatgcttcggaatcctgtaagctcatg

SEQ ID NO: 538655 - DNA, 397 bp, Homo sapiens
acctcgggcggcatacctggactctgtgagattacatttgaagtagttcttataattgtattatatatagtatagtcttttttttttcccagtcaggatcagattttctatcacagtacttttggtaagaaaataaaatatgactggggtcccatttagaaggactttggtttagttctcatctcctcaaaaaggttaagtttaagtatttagttaaaacatgtaaatgagttccttggtgaacggtcttggtttaagtaacttacacttggggcttgcaaaagcggctcttctgacccagcactaccaggtaacctttaaggggaaactgatcatgagattggatgacccaaatcctgaacaagaaaaggaacgattttgagaaggtccaggtttg

SEQ ID NO: 538656 - DNA, 1096 bp, Homo sapiens
gttttcctgcgcagtgagcctgcagggtctgtaggcagccatggctgcccagcctggaatggcatggtcttgaatgccccactttccacaatggacgtggcatgctgtgctgctgtggccactgtggttcaaccatgcctggccctgtaatgatcctgcagactgtaagtgccctgtgcaaatgccatatggctgctgcctgcatctgcccctgctgcccctgcgtctgggtcccatcctggcccatctgttgctgcttgcccctactgtgttctgtgtaccacaacgaagtggtgctgctgcctgtgctctgctgtgctttcaggcctttggatggaagctcatgtggtttggcctggcatttcacaatgacatgtgtgtgccctggaccatcggggcattctcttgttgcgctcctgagtggaggtgctggaacaaatgtccactgtgatgtcccttgcagaaccaaactgttgcatgcgggctttgacatggatgttacctggttccaaagatcttcagttcctacttccctcagtgaaatgcccttctgggccccccaagagaactggggaggaacagtttcctggcttagaatgacaccttgacaaccttggtccaaccccaaggtctttgaccctgggcacacaggtgtcaattgcccccggtcccgggcaaacccggtccctcattacagcgcaacgcgcaggcaaacagccttcgaggtccatcgcccgttgatgtgcacagcgcagagaggacactcttcccactcatgccctttccgccgtaacgctccttcccgggttcattcgcgccccctgtttgcccaacccgcacccgggcgtcctttccgggcgatttcactgggcgccacaacgcatcaggaatggcccaactgcgcacatggcccgggcagcgaatctctccttgaatatgtgtccggaccagcacctggacagcgacgcgtttcgatggcccctttccctttgggttcgacttttcgcgaattccctgtgtccgcggccaggtccatttgccttgatgtgctcccaccggtggtcgttggtaccggtggggcaccaactctgcggcc

SEQ ID NO: 538657 - DNA, 336 bp, Homo sapiens
caaaaagcttcttgcttatgtataaagctaaatgtgataatctcaaaaaacggttcaaaataataattactttccagtttaaaaactttaatcctaaattaaaaaaaaaaatctatacacaaaccacggattggcccagaccaaagaaagaaagaaaagaaagaaagaaagaaagaaagaaagaaagaaagaaagaaaaaagaatctcagcggtagggtaagcaggacccagaggagctgatatccacagtttcttacatggacaactctttcaggcattattccataaagtactttattttacaaccgtgctttccttataaaactaaatgtgcg

SEQ ID NO: 538658 - DNA, 544 bp, Homo sapiens
tagagatagtaaagacagggatttatcatgttgcccagactggacccgaacttctgggctcaagccacctgtctaccttggccactcaaatcactgggggtacacgtgggaatcactgggattacaggtgagaaccaacatgcctggccaacctctgatggttacaagttacccagcctaaggcatttgggaaaacagcctatggtcactaaaacacacacaaatactcgtagaggtaaagaagatatagctataaagctaggtgaccgacatgtgctatgagtatgaaacattatactaatgtcattatgactagaactgcctctgcccaaaagatacggagaagtgctcacctccagtagctaacagataatctgattgggaaattaagctgttacagacgtcatcaagttacaatgagatcattaccgggggccataatccatatgtgtactatgaaaaagggaaatttggatgctgagccagacaagcatacacgtaagaggatgttatgcatgcttgacaagatgaccaccatgctgag

SEQ ID NO: 538659 - DNA, 334 bp, Homo sapiens
aatgtcgaccctatgtgtgtcagtcacgtgtgagacaggtctctcgacagaccagcatcccatcaggtcagcttgaacaatactctcctggccactactgtgccttttaagtggggctatctatttatattcacgattggtatcgatatgtgtggatttgctcctgtcattctgttgttacactggttatacatgttgacttgttagtgtagtacgctttaaagttatactggtctgtctgtgtatgtgtgtacggatgccacacacaaaccccagagtcctgctctgtgtgtgtgtgtgtgtgtgtgtgtgtaggatgacacaaacaaacccc

SEQ ID NO: 538660 - DNA, 316 bp, Homo sapiens
aagtacatcatcactaccttctgaatctacatctaatgtgttatccttagctcctatcgttctctattatacacgtatccagcaaaatccatatcatcctttccagagctgaaacagttatcatcttcaaatgtgtcaatcagctcttcaaattcttcatcatccacgtcttctatactttcttcatctgcatcccgtattcgtatctctataacagcaacttttttataatacctgtggaaaaacacttcatccactggtatttggctttcttctttagcaaggaactccttactgttcacaggaagatgacgaa

SEQ ID NO: 538661 - DNA, 538 bp, Homo sapiens
tctttatttccaaagatttttgtttcattattttgggaaatgaaaatgcaggaaaatcaagacacagctaaaactctttatattacattttaccgaaaaaagaaatattataacccaactccaatgtgaggaatttctcattttccttcttggcttttgaagctactgaggtcatgtctctgatatcctccatcagagctctctgctggcaactgtacagatctagtctaggtgtacacaagggacaccacgctctcctggttttgctcactcctcattcaacaaccttgctcagtgtgactcattttctaaattttgtcttcctatcttctctcagcaaaatgtatcccagtaaagaaattttagacttggagtctaaagactagtagaatatgactcttaggaacggggcccccagagtccctaaacagatgcccctgaagataagtgcctgaggactgtcattgaaagcttttcaggctacctctgtgtccctgcaggataggatggggccaatcagtagagctcaggaggcaga

SEQ ID NO: 538662 - DNA, 449 bp, Homo sapiens
ttagaggatccccgcacccaggcgcacttctgacagcctggaacagtacccgtgtcaagccccagtgatggaacagtacatgccctggagcatgcatcccacactccaggtgagcatctgacagcctgaagcagcacccacaccaacaggtgaggcatctgacagcctggaacagcacccacacccccgggtgagcatctgacagcctggaacagctctcacaaacccaggtgaacatcttacagtctggaacagcaccctggacccccgatgtgagcatctgacagcctggagcagcaaccatcgacccctggtgagcatcctacagtctggaacagcaccgactgccccctggtgagcatccgacagactggagcagcatccataagccctggtgagcatcttatatcctggaacagcacccatacgcccagaattgcgcctgggtg

SEQ ID NO: 538663 - DNA, 119 bp, Homo sapiens
aggcagccatgctcgctcttctccgacgcctctatctcttcctatgagctgctccagaattatgcctattttactgtatccaagctggcccatctcagccattctgtatgagactccac

SEQ ID NO: 538664 - DNA, 352 bp, Homo sapiens
tgtgtatgtgaggagaagcaggtgaaagaggagcgctcagctggtcagacagtgcaggtctatagttctcatcgtgtaagctgagacagcgctgtgtggactgagatgcaggattcttcacactctcgttgtgacttcaagagctctgcatctctttctgcaaggcatctgaatgtgtctgccgtcctgttagcataatgtgaggaggtggagagacagcccacccccgtgtccaccgtgacccctgtccctacactgacctgtgttccgtccccgatcatctttcctgttccagagaagtgggctggatgtctccatctctgtctcaactacatggcacgcgacatcgcca

SEQ ID NO: 538665 - DNA, 1505 bp, Homo sapiens
cgggacgacgacgaactacgtctcgacgttttattatttattttatcggtttggttttcccggtaataaaaaaggaccccacaatataacagggtaggagaaccgggaccaaaacggagacccatcccccttagaggtcccacaccaagggagacacgagaacaacggaacacacgcctcacacgggcacacgggcggagcggcggaagcgaacataacagcggcacgcctcagcacacctcgagacaaacaaagaaggacgagcacggacccctcacaatacccccacgacactcaacgagggcaacacgtattagcgcgctcctactcacaagagtgttatcgacaacaagggcaacatgaggaacgaataataactattcacacctatacacaagagagcagcagcacacctcacacatagagcaaaccacaccccagggattatacacctctaaaatcccttaaatcgtacacatcccacaaaagagggacgaggccaagaagccaccgacaaaagggcaaacagaaaaagccggaacaaagaaaatagggggaaccaacacagtccacaaacaaaaaccaacaaacacaccaacgcaacgaagaggacaaccacccacaaccacccacaccagaacccccacgaggagaaacccacaacccggaacaagaaggaccaaagtgggatcacgagaataaaccacacaaaatgagagagggaaaacaacgggacccacaacagaagagacagggcgaaacaccaaacccaccaagaggaacagagcaaaaatccccacgcgaagagagcaacgcacaaaaccaaggagaacaacacaaaacatataagcgccacaacagagacacgcaaccactcacaaagaacaaccacaaagcaaaaagccaggacaaacagaacaaaaaaaccagacacccggacaaaaagcaaaacaagaccaaaaaccccccaacaagagatcacaacagggaacaagacaaaacgagagaacacggccacaaacaacacacgcaacaccccgaaacaagaaatgaataaaacacccagcgacggaacaatcacaccacgagaaacaccggcgaacacagggcaccagccacaccagcaccgcagagagacagaacacccacgtggcgccacaaaaagaaccaccggccaccaaccacccaggggccaaaggagggccaagggccgaccacgacacacaggacccctgcaaacagcgagcccccaaaccaccaaacagaccggcaggaacacccaagaggagagccagaagacaataactacaaagagcgccaagagacaaacagagaaactgtactcacgcagacgagcggaaaagaacaagaggaaacaagaagcagcacaacggaaatagagaagcaatcacagaacgcacacaccaagggacacaaagagacaggtgaaggccctatgcacaagcgcacagaacacacgggacggcccgcgccatcgatgccac

SEQ ID NO: 538666 - DNA, 752 bp, Homo sapiens
gcgggggaggagggaacagcggcgcagtaagactgcgcagatgaggaggtcgctgagagctgggacgaggcggcagacagcgggcaggaaatccaaatctcctcccaaagtgcccattgtgacttcaggacgatacgccttcccgcgggacccccatccaaagatccggcatacctcaagaggcccactcagcaaacggatgtggtcacgcaagacccaaatccacaccagacagggcccacaccaattccaggtcaacgtcccatagacaacaagagaaagaagcgccagaagttacacgcccagaagggcccccggaaagcacaggactccattgggagccaagccagcccaaagaccccacgcaagacaggcgcaccaaggggagaaaaacccaccaatcccctcccaaacaggagacccaaaacccccagagccactattcgcaccaaaagcaccagaacaagcactcaggcgtaggtggaaaggcccccaaatactaaactagctcaacctcccaggaacacgagcaccattacggggcgtatcccctcagcattacaagcatacatcaaaaaggggcccctttgccgaaaaaaccacagccaggacctagcaacatacacaccacctgccaaagagaccactacccaaacacacaccaacaatgccagagaccggagcaaaactgcgcatacgacgccgcaaccaaaccacggaccatatccgattgagaagaatccgaatacgcg

SEQ ID NO: 538667 - DNA, 650 bp, Homo sapiens
gccaagagggagcagtagccaacatgtcagggtgggagtcatattacaaaaccgagggccgactgagagaagcagaggaagaacaagaagagaagcattgtagagcaagtggagacgtatagagataattgcaggaacgcagactaggtttgacttttgtctggttgatgcctccaagggctactgtgttgaatcgtcagagctgagagatgagtgtgacacctgttttgacagtgagcgatccaggtgtactcgcaagagctgttgttacaatcgaggtgaacgtactctatgagagcccaggtgtactactggagaatcatctgtgggactagttcgggtggttcctaagtcgtgcttacctgagccaacagaccaaatgacatctctaagtgtacatgtgttatagagagattgagttagttacgggttcttttaacaaagggaaaggcttagggtaagtaagagtcgcgagggggtggccgaaaaaagcgggagaaatgtcctgagcaggcctatgggtaccccgagtctcttttacaggggtgtggcaagggcctagggggtcaccgaaagaaaagacggcttatctaccaaaaagaaaccattggcagtggggggcccaacgggagtccgttgaaccttacgtc

SEQ ID NO: 538668 - DNA, 150 bp, Homo sapiens
caacgcagcacaagttgctggatcatatagtaagagtatgtttagttttgtaagaaaccaccaaactatcttccaaagtgactataccatttgcattcccaccagcaatgaataagtgcaggtacacatccttgccagcatttgtttttg

SEQ ID NO: 538669 - DNA, 211 bp, Homo sapiens
tgtaaacgagagaggaaggatcgagaagcatacctggatggatggatgctgagcaggttgtgtagcccacaatgccctgtgagtgtgcacgagccatctacgcctacgccctgcaggtgttccccagacaagaaagagtgtgtgtgctgcgctgccgcgttacttcagagaagaaccatgtgcactcggtgagtccctgtgaagcactcct

SEQ ID NO: 538670 - DNA, 551 bp, Homo sapiens
gggtatgcagtgcattggttcatgcctgtaatcccagcactgtggaaggctgaggtggagcagatcacctgaggtcaggagttcgagatcagcctgactaacatggtagagaactccaagtctactaaagatagaagattagccaggtgtggctggtcatgcccgtgatggcagctactcgggaggttgaagcaggagaatcacttgaacccggaggcagaggttgcggtgagctgagatcgcgccattacactccagcctgggcaacaagagtgaaactctatctcaaaaaaaaaaaaaaaatttagggtatggttatttcacaaaactttaaaaccccattttttctaaatttcctttaaattctaaaaatctcttgtttcccattccatttcatttttttatgaggatgcaattactgaccaagagtattccaggttaagaaaggttagatccggtggacgttaacacaggcaaaaaattttttaccatttaggaaacaccactgcaaaacaattaggtagatcatcacgtgtatctccaggcattta

SEQ ID NO: 538671 - DNA, 1000 bp, Homo sapiens
gaagctcttgatgcgggcgggtgtagtaagcatggtccgaccagattctgtgcgcggctggtgactgccaagacatagccacaaatgtgcacagtttggctgacactacacagctttggaggcgaattagccacgaatactgactcttgagtcacattcttgctagccttcctggaagtatacacatatttggaggaacaagggaatgaataacaaacgtcagtctcgcataaccactcgtcctgtgacagactagcttgtctcacgcaatcatcgtgactggtaatgagggaggaggtctccagtacgtcgtcgagtgacagtagattgaatggagacttgattcttggatcgtgttaacgagtggttctctttggtggcttttgtccaaatccggtggatattgcatacttgattgtgttcctattgtccactagtagggaccaagatgggtgtcgcatatatgaagtaaacctatttgtcagacatgttgagaagatagatcagctgctgcgtccagatgtgtatcacgccgagcattccaaaactgtcatcagtcctgggtattgatatcactcctacagatatagtaatgggtagtgtccaggggactcaggatgatgaaatcgcccatctgtgttcttgaaggcctcaaaagtcgaattttcgtgcagaacttaccaggggtgcattaaaggaagccacgataggcgctgagagatgctcgctatgtggactagacaccaaatggtatcgttcatcattgcgtgttccgagactcatgcgttggccggtccagtgaacaaaacgcttggggatggagaaggcgatcccaggatttcacacatatgagtggaagtatgcccatgctggagaggaatgtccacaaggaagcggcagtccaccgtgtcgaaatccggaacggaagagaattgcgcaggaattggtccaaattaaaaggaagtcacgtccccacagggagcaatggcactataaacta

SEQ ID NO: 538672 - DNA, 264 bp, Homo sapiens
ggtcgacggtgtggtggcatgtacctgtggtcccctctacttgggaggctgaggtgggaggattgcttgagcctgggaggtggaggttgtagtgagctgagatcacatcactgcactccagccctgggcgacagagtgagactctgtttcgaaaaaataaaacgaaataaaaacttagctgtaagggtaaaaaattagaaactggctgggcacagtggctcatgcctgtaatcccagcactttgggaggctgaggcagtcgacg

SEQ ID NO: 538673 - DNA, 684 bp, Homo sapiens
  misc_feature (357)..(357): n is a, c, g, or t
  misc_feature (367)..(367): n is a, c, g, or t
  misc_feature (377)..(377): n is a, c, g, or t
  misc_feature (384)..(384): n is a, c, g, or t
  misc_feature (386)..(387): n is a, c, g, or t
  misc_feature (392)..(392): n is a, c, g, or t
  misc_feature (400)..(400): n is a, c, g, or t
  misc_feature (439)..(439): n is a, c, g, or t
  misc_feature (497)..(497): n is a, c, g, or t
  misc_feature (499)..(499): n is a, c, g, or t
  misc_feature (503)..(503): n is a, c, g, or t
  misc_feature (506)..(506): n is a, c, g, or t
  misc_feature (510)..(510): n is a, c, g, or t
  misc_feature (512)..(512): n is a, c, g, or t
  misc_feature (519)..(519): n is a, c, g, or t
  misc_feature (524)..(524): n is a, c, g, or t
  misc_feature (545)..(545): n is a, c, g, or t
  misc_feature (547)..(549): n is a, c, g, or t
  misc_feature (551)..(554): n is a, c, g, or t
  misc_feature (561)..(561): n is a, c, g, or t
  misc_feature (563)..(563): n is a, c, g, or t
  misc_feature (565)..(569): n is a, c, g, or t
  misc_feature (571)..(571): n is a, c, g, or t
  misc_feature (574)..(574): n is a, c, g, or t
  misc_feature (576)..(576): n is a, c, g, or t
agattcggaacgaggtaaaacccccgggggtaatggggggcagaaaccgtgaggctgctgccccgtttagtctgccttcacgggtacgtgtccccattccccgcagctccgtccctgacccacagtgggccaggccatcagaccgttccaggctaaccggcttccgcatgagccacgtactctgtatgtcagccgtataaccaagaggagcgatggggggtccaggccatggtgaccaaccgtttctcagcccacttcaatcgagggtgctccccaccgtgcaggcaggtaggcaacacctctatctgctaccatcagccccttccagagcccatctgccccgcccagccctgcccngcccagccanaccctgctcngccccancnnggggngccctgcncagggatgggctggcagggctgtacccagcctccctggnaagcagagactcaagaaacctctggggtcctgttttctggtcgtgtgatcccaggggngnacanggncccntngggtgtntgaanagaagggcatgggagggaggnannnannnntgcagtntnannnnncnggngnagcgggcagctgcccactcccaccccaccctgcaccgcgggctcctgagtcggcagattaagcattttataaattgtattttaaatacatgttttaaacttgtcaaaa

SEQ ID NO: 538674 - DNA, 279 bp, Homo sapiens
cgagatccgcaacggcgcgcgccgtacgatcaccagggtgtacttgcctggttacgtgctggtgcgatggacctcactgacgactcgtggggtatctgcgccacaccccgtcggtgaccgggttcgtcgggcaatccaccactccgatcccgttaacttttgatgaggtcatcaagatgttgacgccgtcggttctcgccagggttagtcgtgagaacgctgacaaggctccctcaccgaaggctaagccaaaggttgaggttgccgactacgaggtcg

SEQ ID NO: 538675 - DNA, 171 bp, Homo sapiens
ttttttcttggccctaggggctaggtggcttttatttcctctcttggtgttttttggggagggagctttcccaagcacatcaacctaaggaaggggtggttgcgcccccagcagcgaggggctggaactgctgatcattcggaaggaagggttcgttcttggtcgacgcgg

SEQ ID NO: 538676 - DNA, 348 bp, Homo sapiens
  misc_feature (192)..(192): n is a, c, g, or t
tgtagtaaatcatggatgtggtggctttccagttagaggctctgattaaacagtgctctcatgatggacgtcgtcagagcagcaaactgaagacactgagtaaaaaggctcttttaacctcttttctttgtcttaacattgattgatgatgggcaataggggccaacttgccagttcttcactggctccaanctttctttttcccttagacgacaggtttatacctgtctgtttgagaatagggtattttcctgttccttgattttgtgtgtctctctctaagctagagtagtttatttttgttcgcttctttttttttaaccacgaaattggaaaaatttagattaa

SEQ ID NO: 538677 - DNA, 1609 bp, Homo sapiens
tgggttgagcacaggttactttatggatggtacatgacaaggggcggctccctaggcccctcccctcttcaaggggtctactgtggcaacgtggtgaggaggggagattcaggtggtggggggggactgaggtttggcagggactccccagcaggtgagggtctctctcttcctcttgtgctctgtgctggggctggtggctccaggggttctatacctccttgtggaggccatgtgtgtgggccattgaggctccaccacccgtgtgtgtgctgatagccaaatctcgtggctcaataccaggaaattgagcttgacaaaggtggctcgtgtgagggcaagtgccagcccccaaggcgttcaagagggtggaggaagagtggggtgactacgcgtgagttgaaaatctcaggaggaagaacacaaccgtgggtgcctcaggtgttagccccgaggaagtgtccctttggagggggggtcccttcgcgaaagcgcccgctgtgtgcatataccacccaacacttatctttgagaagtgttcaaatcagatatatggggggcaaggggatttattctctatagaaagcggtacgaggtctacaagggtttcacaacacagtgttgacccacctgttgggccagggcgagggtgaaccagcggggaagtgtctcaatttggcccaagtgtgaacagcatttcccacaggatttaccacgcactacaaggggggaattagaacctttttgccccccaaaaaagacgccttatggagaatagggcctggccaaatgttaatagaagcagccaatgggggaaattaacatagctaccctatagtgaaagaaggcccccccaaggtgtgacccattacaaacgggcccaacaaagtatttcccccgcggagagaggtgcggccccacatccacaaacaaagatagtcacatacgcgagaggactgagcaccgagactggcaatggacgcacgatgttgaaaacacgtgtgttgtggcacaattagaagagtagtcaccactattgcaccaacgagaaaatcaacccacacaaggtttgtgtgctcgcatgggagaagtataaacacccttggtagcaccacgcgtggtgttgtgcacaaaccacacaaatttgatactgagtgtgctacccaacacaaaccagactactacaggaggagaagaaaaaaaccacacagaagaggcaggagagatgaccacacgtgaaaccaccacgaatcgatgtagtgatcaacaccgcccgaaggtgggcaacccgcggagagaacccaatcggcgacctatggacgaaagaggcaacaccacgaaagacagatgccaaccaccgccgaggagagagaccccatcaaaagacgtccggtgttggaaagcaccccacttaagagaaaccgggaaagagagacaaaaaaaaaaacaacaaaaagagataaagaacacaacgaagagaaaaacaaaacagtgggcgaaaaagatcgtccaagaaggaataagagcaaccaaccaaagagacagaggaagacaaaagaaacagcagaagacgacgaaaaccaccaaaacagagcaaaacgaaatacag

SEQ ID NO: 538678 - DNA, 236 bp, Homo sapiens
gacatgcgttgtcggctccctgaagctttccacagtatgagcagcggtcagaagacagtgttcataaagtagcgatcctccagggcatgggctgtcaaataagtcatctctgtggcagtgtttaagacaagcatcgaatgccacagtgagcgactgtctttcctcagagggttctcgaaggtcttgacagtatggtccacagtgcacaagtacagggccgagcgcgtaaatcacct

SEQ ID NO: 538679 - DNA, 583 bp, Homo sapiens
  misc_feature (374)..(374): n is a, c, g, or t
  misc_feature (378)..(378): n is a, c, g, or t
  misc_feature (380)..(380): n is a, c, g, or t
  misc_feature (454)..(454): n is a, c, g, or t
  misc_feature (463)..(464): n is a, c, g, or t
  misc_feature (471)..(471): n is a, c, g, or t
  misc_feature (492)..(493): n is a, c, g, or t
  misc_feature (496)..(497): n is a, c, g, or t
  misc_feature (499)..(499): n is a, c, g, or t
  misc_feature (502)..(502): n is a, c, g, or t
  misc_feature (508)..(508): n is a, c, g, or t
  misc_feature (510)..(510): n is a, c, g, or t
gagctccttctggccatgttatatgaaatgtaattcttattttataaataatgtgatgtaaatgtaactggtgccccctccccgatgtgactgagggtgagtgagtggtggcggggctgctccttcccacccctcagaacagctctgatcctcgttaatacctggctgcgtgtgcagctgaggagggagtgaacctcaagcctaaatacctgttaggattggagggtctgggtgggcctgggcctagcaatcaagcttctacctgtaccttatgtaaggtagaccctcctagctcaggtactgacactaggagcttctacctgtaccttatgtaaggtagaccctcctagtgtcagtacctgagctagtttacntagntncgcaggcaggacagccggtccgggaaccctgagtgagaatgagtgtggatgtgtacagtacacgcactggacgnagcgggagnntgggacnttccattacaaatagagatcnncannantgnagtctngntacaatggctattatgtaactagtgagccgtcgtttgacaatgcagtcgggatacactgccgtcgttacacgc

SEQ ID NO: 538680 - DNA, 1371 bp, Homo sapiens
cgcattccgttctacctttggtgtcgtgttttgtctttccctgtttgggtgtgcctcccttctcttgtcactctcttcgtttctcgtctcgttctttttagccgcctgcgtggtgttctcttgcacaatccttctgtgttcgttccctcggcccctctttttcaccccacatttgtgctccctttggtctgtgcatatcctattctcgtgtttgagatcctccccccgggcttctcgttttccattttgcggtcgtctctggttttggtcggtgtgtccccctttggtggtcctattgtctctagattgttggtcctgtcatcccctttgctgtatgatttctcgcccccagtcccccggcgaaaatcctctcgtggccaggtccacaggtagggccccacaaatcgccaggcgtcttcttcgcttgggtccgttatccacttcggtcccctgtgttaccctttctaccccccacgtacttgtctcggatagactcttcattggcgtccccgctatgacatgcccggtaccatgccttcctctgggcgactttcctcgcttcaggatcgggttcctctggatatccaagtccttcgagtccgtccgaggcctatcatggttcagtggccctgtatccttgccaaggttgtccactccacgaaagttcccgaggcacagtgacgtgtgtcgagtacatgacttgtccccgtacgagcctacacagagttccctctagatgatttctgtcagcgctccaagccggagttgccccctgcgcggtaccaaccactccctgctccggaagcattcgtggtgttcccggttttctagaacgatcccatcgtacagcgactgcccccatcagatgaatgaaactgggtacggacacgcatacaccataatcaaaagcagacgagaagccaagagactggagtgcgaatgaggagacagacggaagaagaaagagcaacggcggccctggtatggtacacaggaacaagaagcagctaaagccggcgcaagactgaagattcccccgcagtgagatgcttcttgtcacgcaagccgatcaccatactccaagtttgactgtctatgtaagcaatagcgatctgcccagcatcatgacagtggacgggcaaagagctcagctaagggcaagccaagaagctgaagaagctcttcgaggctcaggagaagctctcacaaggaatatctgcacgatggcccagaatggaagcttccagtgagggggcacaggactgactttttacaaccattgtggactagctggcctgctgtctgcctccaacgtgacaacctgtcccaagcgcatcctactcatttgtttacacgtcaccccttgggtcc

SEQ ID NO: 538681 - DNA, 566 bp, Homo sapiens
gaattatgtcataggctactatgcatcagaatcacatggagggctttctaaaacagactgctcagcccacccccagggtttctgagttcataggttataagaggtaagttgaacaattccccagatgatgctgatgctcctggtccacaatgtgagaaccactaagttggagtactgactcatagagataaaattctttgaaagaaatgtactgttttaagatactgtaaaatgtggaggcagggcaaacgtttataagggctgttatgtatgggatgtgtctttgacccaaatcgacggcctatagagaaatcgccatggggactttgcattaagttcaaagtacaatacgacctgggccctgttccgtatttagtcagtatgtgcacgtgggacactttagtgcaatatcgcctccttattgagacaagtttgaacatatggccttaagcctctgtttcacaggagaagtgaagttgtttgccattatattattttataatttggaatcatggcaagcagtcttagagcaaagttataattaaaaagttttgatcctagtcaaa

SEQ ID NO: 538682 - DNA, 421 bp, Homo sapiens
ggctcccggaggactgcaggcaggatgacgcaaatcacggtgattgtgaatggagttgttatggcctttggggcatcccatcccacccacgtcaacgtccacatccaccaggagtcagttttgacacaactgttgaaagctggaggttctctgagtttctttttcaccctggggacactgtgccttccacagtcagtattggttatgagcacttggctctaggggtgactcaaatattgttgggggttgtgagttgtgttcttggagtgtgtctaagcttggggccctggactgtgctgagtgcctcaggctgcgccttttgggcggggtctgtggtgatcgcagcaggagctggggccattgtccatggctttgctacagctatggctgctgttgtcctctgcgtgtagcttttctggtt

SEQ ID NO: 538683 - DNA, 474 bp, Homo sapiens
cgacctaggcgcacttctctagcgctgcctttgaaagagctgaaataatcccagcgagtggctgggtggagggtgtcataagatttggtctcccaggacagatattggacaactggcgaagagaccctgccttgagattcgagacgaggtgaaatacgagcatgagtgagggcagaccgtgaatcgagagagccttgcatgaggcaccggataagcagaggctgccgagaagatccaatagatctttcataaaagttctgtttacatggaagtctcttgctgctggcgctattgccattcagctgcaaaattccgtcatctatttggactattgatattgtacgattgtgctatgtgtggattccagcatagattattcattaatatacactatctgacaagctcaaagctaaacagaattgctgacttggagctcagaatgggggtggggctctccgtgtgactgtgagctca

SEQ ID NO: 538684 - DNA, 452 bp, Homo sapiens
  misc_feature (243)..(243): n is a, c, g, or t
  misc_feature (278)..(278): n is a, c, g, or t
gtttagaggagatcccagttggtagcctgcaaatacaggcatttattaaatttcatggagcgtgataaatgagaaaatactaatagggacatttttaggaatttttgaaagatagaaagcagatgagctcagaactgtggagaaacaagtcagccagaatgcctgctatcacctctgcaatgtatttgtcctggagagcccagccaatgtattataagaaacagaaatgggatatgcaaatantggaaaggcagagatacacttggattacttacgantgtcactaagaaaatcaaagggaattttattagtcaagagttttgattgccaacaaaagaaaccagccctaatgtaagtagaaaataaattacaaggatatgaagtctcttgtcatgtttacagaagattggaggacatggttgagaaaatgtcctgatgggtatgagctgaga

SEQ ID NO: 538685 - DNA, 930 bp, Homo sapiens
tggaatattcacttcggtttaaggggcttaaagccaaggaaaggacagttccgaattcaatagaaattattctggtgacaattcatattggtgggggttggagggggagggggacaaggcttgtaagaacccacacccgaactatgtacaaaaataaccttatacagcaacccccactctgcaaggatgatgcagtctctgcccagccaccggggcgggggggcacactggcaagacagggtaccggggggagccaaccagtatggggccccaaatgcaggtgggagatgtgacggagggcaccagtccggagggagagggcagctataaggaggccttgcaacggttgctgggccagagcgtgtgagagcatcagcagttatggtcacacacatatgtggcggggcagtacgcgcgggacgccaggatgggccaagcctcctctggaaagacacgccggaaacctccttcccagggacaaacctccaaggcgggtcaattgtgcgccgagaaatgtacaccagatatctacggtacagaatggtaagtgtccccggggtgtggcccaatccagtggggcgcacccacaacagaatcgagctctcgggagcgtgtgagactcccctgggagacaacaactgttgaggaccatcagacccacactgaggccgggatccggaaaaaaaggtgagcaaagagaattagaattgagccagcatcgaacgagtgattggaagaaaaacccaagagagtcccgcaataaaggatcaggggaacaagacccacgggacaaaagccatcaacaaaccccatacgaggcagcaggactgcgacaaactgaggagccccacatgcgccatcacagaacaacaggtcggcccacagccacagatgaaacataggcaggaaacatattaaaacagaaagagg

SEQ ID NO: 538686 - DNA, 1172 bp, Homo sapiens
ctagatcgcgagcgggccgccctattttttattttttttcgtgttcacatgaattaacttatgggatccaataattattcatctcactcatttttaagttttgtgctcagatgtggaagacactgtacagctttcctccatctttccagtggtcatctacatcgtggtgttaaaccagcattcttcttcgtacatcttctcataggtgtccgtggcattctctttcgatatactcgtggtgaatttcctcaacaagtggacgcgcattacgtgctcaagtttgtgggaatatactcgtgtgcccctatctcctcttgtggtgtgtcacaaattcttcacgatttaaaactccgttttaaagtgttcgtggtacaattaactcataaattcttctccaggtgcttatacacaagataaatttttcacacatttaccatttgacccaagtttaagtgcattcttcatataattcttttccacctctatacaataaaactttcaaaacatttctatatatatatagtggccaagaagatatcatcaaagaatgtgataagccggggcattccccacctggtcttcacaaaaaaagtggctttatacatatagcgtgggttctccaacacacaaaaacattttataccaatctaatgttacggcgggtgtgctaaaaacatgtccattccttataaaactcccaaataaatcctatccccttttcaacaaacagagaagagggccacattacagtgccccacgaaaagagccagttgtctctacaaagggcccattaagagaaccttaacacactattcttccgggaaagagaattatccctattaatctccacataactggtagcaccctctataacggctgggatcagcgcatatttgggtatcgcctctcaccgacacaaaaagagttgtttacacccacattgccccagacataccaaggtgtcgcccacacaagcgatgcaggaccaagtccttgcaacaaaagacaaacctaacaccacagccatgagcacaccagaggagggaccatcgggcacaacacaaacagaagcgaagcgacaacgcacggtcataataagggcctcatataaaacaaaaagaccccaaaaaatagccacacaccacgccacatcgggaagaacaacaacaaag

SEQ ID NO: 538687 - DNA, 401 bp, Homo sapiens
caggctggtttttgaactcctgtactccgtgatcccaaccggctcaggctcccaaagtgctgggattacaggcgtgagccaacgcgcccggcaagaatccaagttaaaacaggttaacactttcacctattaccatcaggttgcttatttaaggataatgtttctcataagtatgcatgtttactttatgtttccgtttactaaccccctaaggcagcaagagagcaggaagataagcaaaatagagatgtttttgacaacttggcactgagagactatcctaagggaataatctgaaatacataaaaacattttattcacaaaattggtcatcacagcattatttacaatactgaaaatctggaaatagcctaaatttctaacaattgaaagaaggtcag

SEQ ID NO: 538688 - DNA, 993 bp, Homo sapiens
ggggcgaaaaaaagttttttgccccctacagggcggttttgggacgccccatatttgtagactttaagagagggagagaggccccagcagtttctctgggaccacaactctttaaagagcgcttggaatggaagaaacgctctctcctcagggtgatgggctcgtcgtgagataaacactgcgcacattttttggcgcaaagaggtgctcaaatatagagagagagagaggagagggatttacatttctctgtggggagaaaaaagagagggtctcacacaagagaggtgccccccccaccctctgtgtgatgtgacaccacacaagagtgttcttgctgtctggagagggagaggtttaaaattttatgtgggaagtttttcccccggcacccctccgtctgtgtggaacacacacacttgtgagaggagagccctctgaggtgggcaccacgaaactattccccttgcccacgcggtcccacagtgatattctcaaagggtggcggagagacctctgtgaaaagttcttgagaataaagagaggcgtggaaataatctcacccttcctgtcccaggggcacaaattgtgtccacccccaaagccacatggtatgctcctcttttgagcatatctcacacgaatgttgcacaggaggaccacggtgtcttctcactgtgtgtgttgttctcagacacacccgtgcgcgagaggccccacatcacaaggggtggccctgcacactggaccaccaatgggctatttttgtgtagcccacgaaggttttcataatgcaccatggaggtgcaaaatggtcccccacgaggaagtgcacgacacaagttgaggactcctttcaaccttcaatgggggccctgctgtttgtccactccctggcactgatggcccggccagagtgtcgcccattttttgcaagttttggttttgggcccttttgggccccccataaaggggggggtttttttttgccca

SEQ ID NO: 538689 - DNA, 417 bp, Homo sapiens
  misc_feature (188)..(188): n is a, c, g, or t
tgccccgagtgtggtaagggcttcggttggagtgttaatctccgtgtccaccagagggtccacacggttgagaagccatacaaatgtggggagtgtggaaagggcttcaagtggagttgaaccttgacatgcatcagagggtgcacacaggagagaagccttatgagtgtaatgattgtggcaagccnttcagtcgggtctccaacctcattaagcaccacagggttcacacaggcgaaaagccatataaatgtggggagtgtggtaagtacttcagtcaggcctcaagtcttcaacttcatcagagtgtccatacaggcgagaagccatacaaatgtgatgtgtgtggtaaagtcttcagtcggttttcacaactacagtctcatcagagagttcacacgggagagaagccaatca

SEQ ID NO: 538690 - DNA, 236 bp, Homo sapiens
ggacggtactgacagagagactctttctttttacaaaaaaaaaaaaaaaaaaaaaatttaaaacagcctacccagttagctatacgccctatgtcctattcttgggtaggagggatagatttaatagtctagaaatagtctacttgcaattggggcataagacagaaaaatcagttaaaaggctgtcctttcctatggggttagcacccaacctgttttctgttacagcaggggtc

SEQ ID NO: 538691 - DNA, 241 bp, Homo sapiens
  misc_feature (97)..(97): n is a, c, g, or t
tgcgagatgagctcatggggaattagaagaactagaacaggaggaactagatcagaatttgctggaaatcagtggaccccgaaacagtccctctacncaatagtttcctctataagcctaccatcaaaaaccgcccagaagaaagaagaggaggacgacgacctgaaggaattggagaactgggctggatccctgtaatggggtccagcgctggctgggcccagacagattgcggtgtttg

SEQ ID NO: 538692 - DNA, 248 bp, Homo sapiens
tacactcatgacattaactgccattcttgtgagcgtgggcttctgagaaggataaatttggcccctaacttgtgtcccttgtcttgagtaccgcatggtatgacccagcaagaaggtcctcaccagatgccagcaccaggctcttggacttcccagcctccagaagtgtgagccaaatacatcttttattctttataaattacccagtctgtggtattctgtaatagcagccagaaaacaaactaaga

SEQ ID NO: 538693 - DNA, 162 bp, Homo sapiens
  misc_feature (52)..(52): n is a, c, g, or t
  misc_feature (123)..(124): n is a, c, g, or t
ttctatttggaacttgatagtggacttcacctcatccacttgccaccatgtnttcgtggtgtgtgagcagggaagggaactttcctgccttattaaaacctgggccgaggattcgtggaatcnntgcttgatcagagactctgagtgccaaagaacgcatca

SEQ ID NO: 538694 - DNA, 125 bp, Homo sapiens
tagaagagaagaagaaggaggttcctagctgtgccaagaaacccttaaagaaaaagcgaaggaatttcgcagagctgaagatcaagcgccttagaaagaagttttcccaaaagaatgcttcgaaa

SEQ ID NO: 538695 - DNA, 1761 bp, Homo sapiens
  misc_feature (1487)..(1487): n is a, c, g, or t
  misc_feature (1599)..(1599): n is a, c, g, or t
gccgaagaggagctgggggaggacggtggccctgtgaggctcgctcgcagcacaatggcggcggcggattgtccgcgtaggcctaggcgagctgcctgtcggcgagactatgccggggagggctcttgtcgcgcgtgctggggcggcctggtggcttgcgagccttctcctccgcgttccctgtgagaggcgggtcgctcgtggaccatgctgcctgtgggaggcagacatgccacgaacgagtcaggagagggcatctcaagcaggcgatcattcgtacttcacttcgcacacctaacaagtgcttgaagtcgcgtgagagtggaagaccaagggtcgaggctccggcggtggtacttgggctggagggagagtggggtccggatagcacacaggaaggaaatggggggacaaattagctacctagttcgacatagagacaagatacattgtgcaagaaagctagggtgcctaaacttccgacgctaaggtgtaaggccaatcaaaggaggtttggagtcccaatatggggtccgtggagtgatttggggatttgacattgggccaagggaggggcataataacagcttaaaactcgaattggtacttggtataccacaaagacttttttggtggcattaaattggaaaacgtttggaacacggtttgtgagatttaggccaattgacaacatgttttctttggcccttttgaaacaaaaatttgaaggtcgcaaaaggggcgttaaagtgggttgaggacaacaacgctgaagaggaaatttgacggggtgggcactttgtggagcattttcgagaagatttgaatgcacaaggacggtgctattttaatttgcccacttagaacagatgggctttttggcggagcgaaaactctatctgttggagggctgccgtagggatgggacccaccagaagaggcagaaagagttagcctgtgacccgtaataggggcggaatgagcgttcatatgattatccacccgtggatgggcaaaaagacttgggacacttgtttttttaagagcccgttagaacgatataacggtcgttttgaaatatgatgcccaaacacttgacgatgtaacggcgctcctatggaggtggtttgtaaacacaaatttagaggagactcatgagggtgtggataggcattaggccgcatcacacacaaatgatgctttcaggcactgaagaaaagaacacgacgcagggaaggtataaacgcagaagagagggcacattttaattcgctgttgggctttcacagactcattaagaagcgaacagcgttcaattggcgaacgacacttgtgtccttatgtaatgattagggataaagaaagttaggattatatgtcgcgacgcccggttcctaatagtttgtggaagggagcgaattaccccaatataggaggtgataagaaatcaacacggagctctaggggggtgattatttaggggtggngttggagaaattaattgtggtagggcgggataattaagaagttaataaagttaatgcccagaagacggacaagctttgtgtttattatacagcgagggacagaacaaaatgngagctcaaatttgtgggacaactctggtgttaagtaaggggcgtccacagagcaaaagaatggagttttttggtgtcccccccataggggatggatgtgtattcttggacaaagagtagtctgtgtaggagagcatttgcttctctattatatgttttacac

SEQ ID NO: 538696 - DNA, 148 bp, Homo sapiens
tacatgatacaattcagcttgtacccgccatttccgggggtgtgcccactggaggccgcaggaatcctcgggtcggtttcgcgaatcagcaccccgcgatccagcagcccctggccacacggctgtggcggtccgtgaagcgcccgaa

SEQ ID NO: 538697 - DNA, 441 bp, Homo sapiens
ctcggggtgtcaggtaccaaaatggttttgaagttagggagctgctttctctcttcattcctgtgggtgccccaattctccataatatttgcagctgagaagtatgtctttttattcatttttaaattttcatttaagtgacaatcagttgggagcaaattaaatcctcccttaaggtgaaaaaaaaaaaaacaaacaaaaaccaccaaaaaacagaaacctcaaaccacttctgagtgacttcagactatctttcggctcctgaatgctgctttggcatacggttactatggtaacacactaaaatgatgcctatcataaagtaaggatggcccaatcggttgacaatctaatctaatctaatctaatcaagatgacccaatctaatgaccgtatgggatggcaggtacttctgaagtcagttaatagtaatactttaaa

SEQ ID NO: 538698 - DNA, 247 bp, Homo sapiens
gagatcatgccattatactccaacctgggcaacaagaacaaaattccgtctcaaaaaaaaaaaaaaaatcccaaaaccttaaaaagtctaccttggggtgactagaaccttcaaaaattatgccacggaaatagtggcactgctcttactagtgtacctctcatcatggcagcttatctaagtacgccgattgggctggattatctttcccaaggacccatttgcatggaagctcccttaaggtctg

SEQ ID NO: 538699 - DNA, 143 bp, Homo sapiens
ctcgtatcatgtgtcactcctcacacagagagcttcaaagaggtgggcattgagttcatggatctgtatagccagctcgttccagtatatgatgttgagcccctaggagaagataacgtgatgcttaccttgggacccagtac

SEQ ID NO: 538700 - DNA, 1417 bp, Homo sapiens
tgcggtggctcacgcctgtaatcccagctctcagggaggctaagaggcgggaggatagcttgagcccaggagttcgagacctgcctgtggccaatatagcgagaacccgtactccagaaacaaggaaccaaaaaaaaacaaagatgacaaaaaaaaaaaaaaaaaaaaaacaaacacaccacactatttcgcggcgcacgatcctgcgacccacctcagagcaaacagcccctgcacaacagccactatatcagtctgataggcacactacggagggcccccacgagaatagagcatcaacctgtacaccacacacttgtgcacacagcacgaggtgcacccctcagagggcaaaccccggtgacactcaacaccacagggtagctggggataccaccacccacggcacgtcatacaacaacacacgcgcaccgtgggtcggcacacacaccaagaccgcgacgtacacagaaaacaaccaacacacaaagagaagaaggcacactacggagaggcaccaaccaacagagggggcacacctaacacaaaaccagaggaataccacacagccgcagacaccccaccgaacacacaacacaatagaaagcgacccacgccacacgaggagggagtacacacagcacaaacaaaaacaaaagaagacgcaaaaaacaatagcaacaaaccaacacgagcacgacaacaaaagacaaaaagacaaaagcacacaaagaacgaaagacgcaaagacaacaccagcaaagaccagaaaaagaaagcacaaaagcataaaaaacaaaaagaaaaaacaaaggaggcaaagcgaaagatcaaagagaagcggagccagtgagaagaagaaagacaaggccgataccgcacggaaaatacgcacgacagatcaaccagagaataagaacgagaccagaagagaacgaagcgactaaaatacgcgacaagagggagcagagagatcagcgctgacgcagaaacgagaacatagcagcaggcaacacggacgtagaagataggtgcacaacagagaaggaggcgcgcgaaagagggatgataggtgggagacgggcagcggagaggcgagtacgacgggtcgagcagcagaaagaaagaagccgggccacgcaggcaggcacaaggggaagagacggaaaggaggcgatcggcagagaaagacgaagcaccaaggaacgagtcaccagaaagagcgagcggcaagaggaaagtagcaacctcgacaataaaaatcgaagaacatgaccaggcagagcagaagaagtgtgagaggacaggaggagtagtaccgatgagcagccgacacagacgaggcagacagagcaagagatagtgagaaggcaagaccgagcgagagagctaaggaggagtaggagatatgaacagc

SEQ ID NO: 538701 - DNA, 160 bp, Homo sapiens
  misc_feature (65)..(65): n is a, c, g, or t
cccgataggggctttttaactatattgaacattttttcctttgcctttggccctatggatagttncgatgccagattagatttatagcagccccaagttggattaaatgatattttgcttcctggaaaactattataaaataaagtttgttttttttcta

SEQ ID NO: 538702 - DNA, 157 bp, Homo sapiens
cgcagaggacgccagaggacaaggaggctgggcactggctaaatatcacccgagagctgatcaaggctcggggcagggactgggaccccaggatgaagcccagcggagcagaaaagctctgtgcacaggatgcagcaatcaagataataaaaatcaa

SEQ ID NO: 538703 - DNA, 150 bp, Homo sapiens
tacgaggtttttttttacaacgcttataagtactttttattgcagacattttcacagacaacgttagtgaaatcgagacccccccccatggttaagacatacattcctatcttatccaaacattcaagtaaccctgtgcgttttcatgtc

SEQ ID NO: 538704 - DNA, 842 bp, Homo sapiens
  misc_feature (260)..(260): n is a, c, g, or t
  misc_feature (524)..(524): n is a, c, g, or t
  misc_feature (540)..(540): n is a, c, g, or t
  misc_feature (545)..(545): n is a, c, g, or t
  misc_feature (562)..(562): n is a, c, g, or t
  misc_feature (571)..(571): n is a, c, g, or t
  misc_feature (575)..(575): n is a, c, g, or t
  misc_feature (586)..(586): n is a, c, g, or t
  misc_feature (592)..(592): n is a, c, g, or t
  misc_feature (595)..(595): n is a, c, g, or t
  misc_feature (598)..(598): n is a, c, g, or t
  misc_feature (600)..(600): n is a, c, g, or t
  misc_feature (610)..(610): n is a, c, g, or t
  misc_feature (612)..(612): n is a, c, g, or t
  misc_feature (615)..(615): n is a, c, g, or t
  misc_feature (620)..(620): n is a, c, g, or t
  misc_feature (625)..(625): n is a, c, g, or t
  misc_feature (638)..(640): n is a, c, g, or t
  misc_feature (651)..(651): n is a, c, g, or t
  misc_feature (661)..(661): n is a, c, g, or t
  misc_feature (663)..(663): n is a, c, g, or t
  misc_feature (667)..(667): n is a, c, g, or t
  misc_feature (670)..(670): n is a, c, g, or t
  misc_feature (672)..(672): n is a, c, g, or t
  misc_feature (679)..(679): n is a, c, g, or t
  misc_feature (686)..(687): n is a, c, g, or t
  misc_feature (689)..(689): n is a, c, g, or t
  misc_feature (696)..(696): n is a, c, g, or t
  misc_feature (711)..(711): n is a, c, g, or t
  misc_feature (719)..(719): n is a, c, g, or t
  misc_feature (725)..(725): n is a, c, g, or t
  misc_feature (728)..(728): n is a, c, g, or t
  misc_feature (733)..(733): n is a, c, g, or t
  misc_feature (736)..(736): n is a, c, g, or t
  misc_feature (746)..(746): n is a, c, g, or t
  misc_feature (750)..(750): n is a, c, g, or t
  misc_feature (756)..(756): n is a, c, g, or t
  misc_feature (841)..(842): n is a, c, g, or t
ggacccagaccatcaggattctgatgctccaaggcatttgatggcgctggacgaagtggcacagtcagctttccctgggggccggtgtcatgtgtggctcttgggatcgagcgcatggcctggcatttcacgcattgctgccaccccagatccacctgtctccactttcacagcctccaagtctgtggctcttcccttctgtcctccgagggcttgccttctctcgtgtccagtgaggtgctcagtgatcggcttaactnagagaagcccgccccctccccttctccgtctgtcccaagagggtctgctctgagcctgcgttcctaggtggctcggcctcagctgcctgggttgtggccgccctagcatcctgtatgcccacagctactggaatccccgctgctgctccaggccaagcttctggttgattaatgagggcatggggtggtccctcaagaccttcccctaccttttgtggaaccagtgatgcctcaaagacagtgtcccctccacagctgggtgcncaggggcaggcgatcnctcangatagccggtgaacccngataccagnagcnctgggccttcntgaacnccntgncntccagccatntnatnggccngcctncttcctggacctnnnggcccccagcnccttccccananagcnccnanaagggtncccaagnntnaccccantccaggacctaggcnagcccctnagcctnatntgganccncgaagaccancccncccacntttggggcttatataaaactgaacggggccccaatcctggggggggggcccggtcctgtccggggtccaccacccttttggggann

SEQ ID NO: 538705 - DNA, 612 bp, Homo sapiens
  misc_feature (260)..(260): n is a, c, g, or t
  misc_feature (524)..(524): n is a, c, g, or t
  misc_feature (540)..(540): n is a, c, g, or t
  misc_feature (545)..(545): n is a, c, g, or t
ggacccagaccatcaggattctgatgctccaaggcatttgatggcgctggacgaagtggcacagtcagctttccctgggggccggtgtcatgtgtggctcttgggatcgagcgcatggcctggcatttcacgcattgctgccaccccagatccacctgtctccactttcacagcctccaagtctgtggctcttcccttctgtcctccgagggcttgccttctctcgtgtccagtgaggtgctcagtgatcggcttaactnagagaagcccgccccctccccttctccgtctgtcccaagagggtctgctctgagcctgcgttcctaggtggctcggcctcagctgcctgggttgtggccgccctagcatcctgtatgcccacagctactggaatccccgctgctgctccaggccaagcttctggttgattaatgagggcatggggtggtccctcaagaccttcccctaccttttgtggaaccagtgatgcctcaaagacagtgtcccctccacagctgggtgcncaggggcaggcgatcnctcangatagccggtgaaccactatcttcacgagccagacctaagttcagaacacggcactaagtgtcaagc

SEQ ID NO: 538706 - DNA, 250 bp, Homo sapiens
  misc_feature (42)..(42): n is a, c, g, or t
  misc_feature (70)..(70): n is a, c, g, or t
  misc_feature (97)..(97): n is a, c, g, or t
  misc_feature (244)..(244): n is a, c, g, or t
agaagcctgagtttaaggacttagcgagagtttgccactgtnaggaattcagactttggttctgcctctnactctgtgtccctgaatcagttacttnagttccctgttcctcactttgtccagttgagaggcagtggcagccgagaacagggacacttgtcttctccatccttcatcaggcctaatgtggaaaggaagctctagcctttcccttttcctgccccactcctaggaaaagtcactnttgaca

SEQ ID NO: 538707 - DNA, 403 bp, Homo sapiens
gagggtattggcgattactgaagtagttcagaataagataaaacttgtctgtctctcacactatacaccagcataaaaagcaaatgaatctacaacaattacaaaaaattagccaggtgtggtggtgggtgcctgtggtcccagctactcgggaggctgaggcgggagagtcgcttggacctgggaggtggaggttgcagtgagccatcgcaccactgcactccagcctgggcgacagagtgagaccccatctcaaaaaaatgataataattgattctaaactggggaatagagagattcccaatttaaaatcttcacagtggttctcaaacgttagccaacaccagaatcaatagggctagttaaaacagattgctatgatctctaccacggtgctataacg

SEQ ID NO: 538708 - DNA, 135 bp, Homo sapiens
  misc_feature (20)..(20): n is a, c, g, or t
  misc_feature (67)..(67): n is a, c, g, or t
  misc_feature (89)..(89): n is a, c, g, or t
acggccaggccactgcaacngtgagagacccggggagcccctctgctatctcagccaggtggaaggngagacccaggccccgagccttnacccagccatcctctcccggcctcccatcccaaagccctggcccct

SEQ ID NO: 538709 - DNA, 168 bp, Homo sapiens
gaggttatataatagtgttagacaccccaccttcagcttgtacctgaaagcttatctcgataataaagtaagttcacatgtaatttaggggaagtatgtcctgatgctaaaaggatactcaaacctgacatccccaaggaaaatcatgtattagtattgctaaatgaa

SEQ ID NO: 538710 - DNA, 278 bp, Homo sapiens
tcctataacctaatgcatacaacagctctgataactgtacggatattgcgttgaacagaatttgggatggggaaacagaggaagatgtgaactttcaaccctggttaccgtgtggcttggggccgattattaggtgaatttatctaattcatcttcaagcttgtctaagggccaactccacagcagaccccagcagtccgaggagggtccaccaaggaaactcggggaggggttggctcccagcgggacggcggaacagggccaagaaggggaaacgc

SEQ ID NO: 538711 - DNA, 295 bp, Homo sapiens
cataataaagctatgaaaagttcctttggagacatcacgacatccaacataagcaccgcaacccaaacaaaggagagaaaacactctctgagcactaactattcacacaagtagtactatagcaccacgaagattccatcaagttgctctaccttcaccttaggttggtggtcatgcgcctagaattaaaaaagcctataagcttacgaatctggcattttccaggtaatacttttttttaatatagccttatagaatatatgtaataatttttcctcttagcaaacagaataca

SEQ ID NO: 538712 - DNA, 808 bp, Homo sapiens
gcttatactataccacatggcaggttctagtgatgcaccactcgatctactatttatgcaaataattgagtctgcaattcaccgaattgcagtaggtgcacgacaggatgatccatcctatacaggcttgggcagaaccagtatgcacagtattattcagcatcagcgtatggagcgtatatgacatcgaataacacagccgatggcgcacacctcttcaaggctctacttatcagtcgcaggaatgctctcccaggactgactaaccaaccaggtacaggatcttcaaccaggagagttgctgataccatgcagagtccctccacacccagtcaaaagatctggatgagagaacctgtaggagttctgggtcaaagtccagaggaagaggccggaaaaataatccctccccgctcctgatagtgacctggagcgtgtgtgagtacttgggatttggatgaaagcacttcatcgtttggttcactcactgctcaccgggtcttgaatgcacagaagtatggaaggatccccgctcgatggctgtaagccttggagctccgcatggaagaaatgatttgttaatcttgcggatactcattgtttgttaatgatttagaggagtgtgatcaagttcatatagatgatgtgtcctctgatgataatgggcaggacttaagtacctacagttttgcaattgatggttccatgcagtggaagtagtgcaacctttgtgtgcaacggtgtaagagagggttgactggatgaaggaagtgggttttgtaagaaagttagcatcttaactaagaaa

SEQ ID NO: 538713 - DNA, 136 bp, Homo sapiens
  misc_feature (92)..(92): n is a, c, g, or t
agcaccctgcaggcttcagtgaccaaggaagaatcagagaaagagcaacccgcgtggagacaaagaagcagctgtgcccctatgctgcagtngggagagtgccgataccggggagacactgtgtgtatctcccacg

SEQ ID NO: 538714 - DNA, 966 bp, Homo sapiens
  misc_feature (1)..(1): n is a, c, g, or t
  misc_feature (64)..(64): n is a, c, g, or t
  misc_feature (183)..(183): n is a, c, g, or t
  misc_feature (220)..(220): n is a, c, g, or t
  misc_feature (263)..(263): n is a, c, g, or t
  misc_feature (273)..(273): n is a, c, g, or t
  misc_feature (315)..(315): n is a, c, g, or t
  misc_feature (318)..(318): n is a, c, g, or t
  misc_feature (324)..(324): n is a, c, g, or t
  misc_feature (441)..(441): n is a, c, g, or t
  misc_feature (460)..(460): n is a, c, g, or t
  misc_feature (684)..(684): n is a, c, g, or t
  misc_feature (713)..(713): n is a, c, g, or t
  misc_feature (822)..(822): n is a, c, g, or t
  misc_feature (881)..(881): n is a, c, g, or t
  misc_feature (951)..(951): n is a, c, g, or t
ngacagggtccactttgcttttctcaataaatatgccatcctgcccacctaagacttgaaaggnaattatctgggggtgggattctaacaccagggtccacgaaggtgattctaaacagagccgcagccccagcgcctggtcaggggcagtccgccccaggggccggtggggtcagtcctgcngtgggatgaggttttccagtccacctgcagagcgcanaggaaggcagccgactcccggtagcccgcgatgagccgccgcncggcgctganctccgtggggctgagccgagcggtgggcacgggcctcccggngcnggtgcnggagggggtgggcgtgggggtggtggagggggtagaggccccgcctttcatgccgaggtccgtgggcccattactgtggtttcctgtttggagggaggcagggggctgcaggttgcngcccaaggccccgtacccncggtaactgtagtggaggccgccgtgggcgtacacagggtcctgggagttggaggaggctggcagtgagtgggtggagtgggttagggctgcggagtcccgcgagttccgcctgtccagggctatgggctcatcctgtgaggactgggagacctctagacgcatccgcttggctgcctttcttgtctcgctctcacaggcagccgccaggatgttttctgccanggccgaggtcagaaggggtggcgtgggtntggtcatctccatgccgttcttcttcatgcgacggcagggcttgagggacgtgcggatgcgctttcgggcccgcccctggaactcagggaactgccggctgcaggactngatgatggcctggatcttctccttgggctgcttggagaagggcacatggcggtccaggntctcgtccacaaagagacgcacaaacatgttgaaggcctttagacgctcagggtccatgccttcagagtngtccatcttgtcatt

SEQ ID NO: 538715 - DNA, 1320 bp, Homo sapiens
  misc_feature (421)..(421): n is a, c, g, or t
  misc_feature (494)..(494): n is a, c, g, or t
cctcgcgtccgcactataggcgaaggacgctaagatatctaccaggcgttttgagaggagatacacagggcagctatcgagaatggagtttaaacacgcataggtcagagctccgtggccaagtgttggggcgccaggcattaagtggcctctaggagtgcgaagtcatcgtcgatgtaagttattgtcggacattgtattatgatcgactatagagcagcttcagtcacaatggactcacaatacccagacaaggaaatgcaaggactagagcaatagtaatgggcctgctcatttttctatggatcctaccagatgggccgtaccatatagatagtgacaatacatgtcgtaagagagatacatgggcgataagcaggatacttgtggttgggtgagatgttagcgtgtataccctatncaactgcgatcctttgtcgagaggacatatgtcttgctggggaaatagcgtatccgtcgacataatagcattngtgcgcttgattgctatatggtttattgatagccaaagctgtatatgaccaacgaaaagaatcaccgtaggaatagtgcacagagttggtatggtgtctaactctaagtagtctgggcaccctagtagagctaagacgtacctacttggatactagtggccaatggtatcctaatggctagagctcccaaaggatggccatttcacaaggaggataattatacaataggcttttaaaaaggcattgcatatgggtcccagccaagcatcgtgcacccaggaggcatcgctattcgggtgctatgtgattggcgtggagatacggtttaggttgggatccctttaagttagtggagtcgccttttgtaggttggatgcccctttgtgttggccttcatttctaggtgggccgcctaccttttggttaaggcttgccaatggcttcacatgggttaattccctctttggtggcttttaattctaaggcgcctattgtttctacagccgagggggtgcgccacttggattggggcgactcggctggggccaacctttttcatgtttaacttattttctctttagacggcttctttgcaactaacgcgcccttaggagttaaaagcgctacaaagtcgtcgcaaagggggtaaaatgagcagttcgtgacatgtggagccactagctgggggccaaagaaccgcttctatgatacaagagttattcttataagccgacttcgggggtgagacgcgagttgagacactacacgttatgccccagtatacgcgccgttgttgacaaagtattacacttctataacaccgacc

SEQ ID NO: 538716 - DNA, 1646 bp, Homo sapiens
ggatccagtgtctgacggtgcataataaacggcggctagatcctacatttactctgggagccatcggactggacacagttaacttactgggaattcagatgactgggggagaaatcgaggtccttcgactggtgaataggccaccagcgaaccaggtgatccacggagtgaccgtgcgattgagttcgggggctagtctcactcgagctgcatgtcaatgggacgatcagccgttgccggttacaaccatgcacctcagttgctgcgagtgacgtacagacggtacacaggtacgtttgtcgataacgtgggaccgttcaagccagaaagtgtcgtagcacagtcggtcccccggggagataacggcctgttgagtctgattgtgcgattaggcacacggagttgtccgtgcatgcaaaggtgtccaggaagtgaaagtgcatctctaggtggatctgaccaaaactccctgggtctacgaagctcccgcagagcttgctggcaatgtagcaaacgccctcgagacgtgcgtgaacaaaccgtggtgcgtcctagatttgcgtgggtggttggcttggggaatcgggggcgtaaacccgttttccctggagttcctcgcctaagtttgccacgagttcccctttggggggtccaacccgatccgcgccatggcagatggggacttggacagcgggcccacaatgccctaccctttcagggaggttgccaccaatacggggggagcgcccccacggaattgatagcctcggagccagcgttaggggccacccttagaactatacgcgccaaacagggagaaccgagggcggaccccctttaacccattgccggccttgcggattgtgtatggcatggaaacccggcctctagaaggcggagcactgtggattgcggggatccaacgcccaagagggtagcgtgtacacacgggacgggaatatagggccactcgaacacacgcggggcgttaaaccattgccgggtgtagagacaacaaccaaagattcgaggtctacccaacttcaaatggatggggactccatacgcacaagttgttgtccaggacacacaagagttccggttaccgtcagggccatggggtgtcgccttggcggatgccgccccaaggcagcttcagtttgaaaacccgaggtttattaagaccactttccacgaggttgaggccaatttgtggaacacatctcagattgagggtgggtcattgtgatttggggaacgccccttggaaatgttagacacccgggggaccaacagcacaagcaaaggtcacaaggaaatcaccaaaggaaatgtcacaaaccacgagcattgtcgacgccatgggctacacgacagagcccgtggacacctgggctatgggaaacacgaagacaaacagagctgtagggtcgagaggcacactaccccctagggtatagacctctccttggagcaaaggggaagtggggcacaaccacatcatacgaggaagggggagagccgccccacgcaccgcgatatcagaaaatgagaacaataccagaagccaaagacgaaaaagaaggaggggacaagatacgatagaggcaatacaaggggaaacggacaccacaggcgcgccagaa

SEQ ID NO: 538717 - DNA, 400 bp, Homo sapiens
tgagatggagtcttgcactccagcctgggcgacagagcgagactccttctcaaaaagaacaaaacaacaaaacaaacaaacaggattttcctaacctctttctgacctgatttaaggtctctctggtaactatcatagcctaaactgctgtattctgggacttaccattagagcttcccaaggcaatctggagaattaaaaaggaaagtaaagtgcttgtagtaactagaagaatctgtatatcaaaattccatttaactattaaaacttaaagtaaaattatggttacatgttcaaaattaaacctgaatacttcagtgaaaaaaataaacatttctttttgagggaatactttaggaaaggtttcttcttcagaagaaattatcaaaaacaaattctc

SEQ ID NO: 538718 - DNA, 137 bp, Homo sapiens
acctcaccttctcatcaagagggtctttggcttcaggatcaacccttccctcaccttctctcaccactctctagaagcttctttccggtaccttccttcagctttcttcttggctctcaacattctctggctatatt

SEQ ID NO: 538719 - DNA, 369 bp, Homo sapiens
gccgagtgcaccaacctggcaccagcagcgccgttggcccagaagccctaacagcgggcggaggccaagacgccatcaggctgggcctgggggaaaccacaactactgcaagaaacccaggaatcgaagactcaaagcccttggtgctacgtcttttaaggcgggggaagtacagctccagagttcttgcagcaccccctagcttgctctgagggacacagtgactgctactatagggacatgggtcacgcctaccgtgggcacgcacagcctacaccgagtcgggatgctcctgactacccgtgaattccatgatcctgatagggcacggttacacagcacagaacccagggccaggcctgggctagg

SEQ ID NO: 538720 - DNA, 326 bp, Homo sapiens
ctggccctctgtgcttccgactcgccgcttgcgagctggagggacagtcacctcgacctggtgggctgggtgggtctggctgtgctgtgggctgtgcctcactcctgcaagtgggcactcagcggggttggggtcacgaggctgaggtcggcttaaagcaggagtgggcagttggcacatcatgtttctcctgcatcagggctgtggcaggaatgccgggtgactaccgtagacacttgtcaaggttgaggttcagagaaaggtgtggggtatcccggaggtcaccacagtgtgccaggaggttcaggttggccttccagagcccg

SEQ ID NO: 538721 - DNA, 358 bp, Homo sapiens
  misc_feature (34)..(34): n is a, c, g, or t
  misc_feature (103)..(103): n is a, c, g, or t
  misc_feature (113)..(113): n is a, c, g, or t
  misc_feature (172)..(172): n is a, c, g, or t
ggtcgaccgaatttaaatttaccagctgtaacanaccatccagctcagagtctgttaaaacaaattgcaggccgggcgtggtggctcacacctgtaatcctancactttgggnggctgaggtgggcagatcacttgaggccaggagttcaagaccagcctggccaacatggngaaaccctgtctctactaaaaatacaaaaattagccgggtgtggtggtgggtgcctataataccagctactcaggaggctgaggcaggagttttgctcttttgcccaggctggagtgaagtggcatgatttcagctcactgcaacctccaccccccagggcccaagtgattctccgtcgacgcggc

SEQ ID NO: 538722 - DNA, 81 bp, Homo sapiens
  misc_feature (66)..(66): n is a, c, g, or t
  misc_feature (73)..(73): n is a, c, g, or t
tttaatatacaaacttttattcaaagttaattcaagaaagacatgttttggtcatttttaaagtgngattaantgaagatc

SEQ ID NO: 538723 - DNA, 120 bp, Homo sapiens
  misc_feature (9)..(9): n is a, c, g, or t
  misc_feature (45)..(45): n is a, c, g, or t
  misc_feature (76)..(76): n is a, c, g, or t
  misc_feature (86)..(86): n is a, c, g, or t
cattagacncctacactagagttagataacgttttctcacattgngtttagaagatctgccttgtcagggaagccnaggttttgtntgtgagagtttaaatctgatgtgaagctccaaaa

SEQ ID NO: 538724 - DNA, 890 bp, Homo sapiens
ggtgctctccgtattctttatgataatgaccagtcatcatgtgacaaactagaccacgtggattgatgaaccaactaatggaagtacccatgagacgatgactctagcgaggcgtcaactcaccaactcttgtgcatgtagatgtgtcttagtcgtccgtctagactggccaggttctgcccatctcaagctccatggtgcatgagaatccgtggcgtcgcagtctgggatctcaacgaagtgggtcgaccatatcaaaacgcgtgcatgtatgctgtgggccatataccacctgggagtgtgcgtggagtgtaggccatgtctcctcgatgacatagcggacagcattgttctctgtgaatctcagagaatacaaagaccagtcgaaagcatagtgcgatactacacctgtggatgatgatgcagagactatctacatgtgccagtgagtgcagaagcgcacctcagcatgtgagagcttgctcatgtgatgatcgcaggacattcgttcgaccccatatcgatgacagcgacacgcactctcttcagtctgttctccctgttaggctaggagaacaatgcgtaggtcgaacgcgctacttggaaaccctgtgctttaacttagccaatgcatgaaggaccaaacgcgaacaatttgtgcccacaacaaggcctatcgtgacacagtggttagaactgtcgtctcgcaggcattggactcctctcttgtgactttcttggagggcaagtgattggcccatgggccagtgtatcatgtgggattctcaaaacgaaaggggccaaacgatgcattataccgaacgacttagatatgggataggaggaccatccatcaaactgaccccttgatgctttcagggcccttaccc

SEQ ID NO: 538725 - DNA, 363 bp, Homo sapiens
  misc_feature (36)..(36): n is a, c, g, or t
  misc_feature (168)..(168): n is a, c, g, or t
  misc_feature (175)..(175): n is a, c, g, or t
  misc_feature (203)..(203): n is a, c, g, or t
ggtcgacttgaaaaactctccgccaagacgaagagnttttgactgttaaaattagaacttatttacctggtttagtagcaaccgtaatcttgccgtcgatgatttgcgtacgagctttttgtacggcttgcatgccttgcgggcccttagtgatggaaaccccatcgntctttanaccataaacgaggtgcttgccgccaggnaatttgcctttgtaagcattatcagcgatgctcttagtagcaacgttcaagccttttaagacagaagtcaaagtgaagttggctttagtgccacctttggcggtgtaattaccaagacttgcttgattaacgtcaacaccgattacccagaccttcgtcg

SEQ ID NO: 538726 - DNA, 483 bp, Homo sapiens
agctctaagatccgcgtggtctgcaatcaggtcacatctggaagacatcttagactctgaagtgatctcagcattaacttcgggctttcaattccttcaggtcttcaagctcaatctgagcatatatctattttgtgcagaaatgtcacattcgctttgacagggtcacatcaaatctggccctctccttgaggctggcatgctaaaatttggggcatttaatctttggatcttcaagtttcagtcaggaccctgcatttcaacatctggggcactgacatctacttttgggcctttcaggtccccttccagctttggcactgtcatatcatattctccctttactttaggacctttcatatgcaagtccacatcaggcatggagatcttgggggccttgatattcatctctggcatcttgaacttgggccctttcaactttccctctggtccttcaatgttaacatcagggccttcaacgtc

SEQ ID NO: 538727 - DNA, 398 bp, Homo sapiens
atatgtagatgcgtccagccatgcatgcgaccactagccatggcacacagtcccagtcccggataatcagctgggtctgtctggtatcagcagaggttctgccccagaagagttgctcgaagatgtcctcacagctgtcccaatgcatcatggcatagtgttcatactcatatgtcagggagttgccgtgtcactcttcctgactgggctggtactggaattggtacttacagtactgtttccccatgaagaagtatacccgctattgagcatatgtagctatgggcagggaggtgacaaggttgtatactcgttgtactggatgccatgggagccgtcaaagatatttatattgtaatcatggttcagggcaccatcctctaagcgccagatgtgac

SEQ ID NO: 538728 - DNA, 337 bp, Homo sapiens
  misc_feature (26)..(26): n is a, c, g, or t
  misc_feature (47)..(47): n is a, c, g, or t
  misc_feature (83)..(84): n is a, c, g, or t
  misc_feature (90)..(90): n is a, c, g, or t
  misc_feature (94)..(94): n is a, c, g, or t
  misc_feature (101)..(101): n is a, c, g, or t
  misc_feature (105)..(105): n is a, c, g, or t
  misc_feature (148)..(148): n is a, c, g, or t
  misc_feature (167)..(167): n is a, c, g, or t
  misc_feature (241)..(242): n is a, c, g, or t
  misc_feature (248)..(248): n is a, c, g, or t
  misc_feature (271)..(271): n is a, c, g, or t
  misc_feature (287)..(287): n is a, c, g, or t
ctgatcattcccagtgaccccttctnggtgccactactgaggaggantacttgcactttggggagaaggctgactctcagagnngaaggngggngtacatnaacncactactaaagcggaaggggctttatgtggaagaaaagattgnggagcatgcagaaaagcanaggacactcagcaaaaataagtagctacctactactggtggattcttttccttatagtgaatttaaaagtacannaggggntaatattgggaaatttctttttnccacattatctctgtntattcactttcaataaaggtgatccatataaatattttaaagaggatgtt

SEQ ID NO: 538729 - DNA, 170 bp, Homo sapiens
  misc_feature (39)..(39): n is a, c, g, or t
  misc_feature (48)..(48): n is a, c, g, or t
  misc_feature (102)..(102): n is a, c, g, or t
  misc_feature (120)..(120): n is a, c, g, or t
  misc_feature (129)..(131): n is a, c, g, or t
  misc_feature (134)..(134): n is a, c, g, or t
  misc_feature (137)..(138): n is a, c, g, or t
  misc_feature (142)..(142): n is a, c, g, or t
  misc_feature (145)..(146): n is a, c, g, or t
tgcaccttgatgctgtggtcgtatctagagtatccccgngcatacctngaccttctggcataccttgaccttctggcataccttgaccttctggcatacctngaccttctggcatacctngaccttctnnnatnccnnaagngtnnaggtatgccagatggcccaggtat

SEQ ID NO: 538730 - DNA, 371 bp, Homo sapiens
ccaccggcaggttgtactcacacttaactcatgttaagaagaagtgtcaaggattgttaaaacatattttgaactacaagtgcaaaatgtaccagaatatgtgagatgcagtaaaagcagtgtttagagggaaatttatatcattaaatgcatatattagaaaagaagaaccacttgaaaatcaatacactactatactctttttttagcaggatctaaagaaagaaagcaccattcaaccctgaagcaaatagaaaactgaacgctgtacacataaacctaagaaattgagcactgaagaaagaaggcattcaagatcaagatcacgttctaggaggaggaggactccctcatcttctagacacaggcgg

SEQ ID NO: 538731 - DNA, 380 bp, Homo sapiens
aaaaggaaaatttttccccccccccaaaaaaatttttggcccccccccccccccgcggtttttttaaaaatttggtgggggggaaggggcccaaaaacccaaacccccccccccccctttttggccccccccccccctttggtggggggtttaaaccccccccggggggaagggttttccccccccctaagggttttgttttttgggcccccccccccggttgtgtttgttttttataaaaattttggggggggggttttccccccccccgcggggcccccccccccccccccacgggagggttttttttttggggggggggccccccccccccccggggggttttttgtgtttggggggaaaaattttttttgggggta

SEQ ID NO: 538732 - DNA, 896 bp, Homo sapiens
  misc_feature (287)..(288): n is a, c, g, or t
agcgggagagcgaaagtaagtcagaacctcccaaggatggataagcaaaatggcgccggaggcccaagtggaggaggctggaactgacgccgtgatctggcttcaatggagcatgtgcgccatctggtgctcagagatgccgatcctgaccaggagcatatgatttatcctcgttggttgcacgagatcctcatgcaggcaataaagtgacgtaaatgagcgagagagcttcctgacaggggtcatgcgcaacaagccgtcgtcctgcattgtgccatcatccgagnngtctggaggagtacatgcgccgtccaggacaagtcgacattcagtggggttcaaggtagacatcgattgtggtgggattataagaacagagagctgctgtgctcggctgtaccctgtcatcaaaggcaaagattgaagctctggcctgtttgctccaaagtgactttgtactgtggatatcactaggaggccgcgagatgacggaagtgtggtggtgtggagcatagccaagagagatgccatactgtggcaggccgtgcagctcggcctcaagtgttggcaatgccaccaatgtgatcttctccaggtgccgggatgagatgtttatgactgccatggaagtgggacaattcgagtatgggaattggatcttccagattgaaaaatctgggcaacgtgagagccaaactgggacagttgagaagaatagtcatgagtattggagtggatgatgactgatagccttatgctagccttggaagcaagcaatggagatgtgctgaaaaatgaagcgccaggacgtaaacgtggtgacagatggttgggcctgcggaacggacaaattgcaggttggggagtgtcaggtatcatgtggctgaaaatggggg

SEQ ID NO: 538733 - DNA, 544 bp, Homo sapiens
  misc_feature (336)..(336): n is a, c, g, or t
  misc_feature (544)..(544): n is a, c, g, or t
gactgcagctgctgctgcctgctggttgccgcgtcttcccggaggcgactgctggaagctgcagggaacagctgcggtgctctgccatattgtgtcttccccggccggtccctcgcctcccggccgagctgacgatatacacttcagataactacaccgaggaaatgggctcaggggactatgactccatgaaggaaccctgtttccgtgaagaaaatgctaattcaattctcctgcccaccatctatccatcatcttcttaatggcatgtgggcaatggatggtcatcctggtcagggttaccagaagaaatgagaagcatgacggacaatacangctgcactgtcatggccgactcctcttgtcatcacgttccctctggggcattgatgccgtggcaaatggtatttgggaattcctatgcaaagcagtccatgtcatctacacagtcaaacttctgcagtgtctcatcctggccttcatcatctgggacgctaactgggccatgttccaggccaacaacatcagaggccaggctgttggn

SEQ ID NO: 538734 - DNA, 261 bp, Homo sapiens
ggcatacaaggtacagcagcagtatatgggcaagcatataaaattgagtatctctccaagccatgttagagcaaaagatgaaattccagaaaatagagataccatcaaaaaggggctgaaatacagggaagcacagcagcattgtccctcagatgtaatgcatacatatctgtgcaattacaggcgtccttgggcctctcccacatgtgctcgacagcaatgcaggcaggggcaactttccccagggaaaagctcccttta

SEQ ID NO: 538735 - DNA, 791 bp, Homo sapiens
agcggacggctcgcctcgagcttctgcaacgggtcctctctatctagctccagacttctcgcctgcgccccagtccccgtcgtcccgcgtcctagtccgaccatggccgggcccctgcgcgccacgtctgactccttgctggtcatcctggccggtggtccgtggaatgtgagccgccgacgggctggcgtccagtcccgggcgaagtcgcgcgcgccgtggtggtgacgtgtcccattggatgccaggcgtggaagacgcgagtgcctgtgcgggatgcacttggacttttgccgtcaggatgggtacaacgaaagccaagcgaacagacatgttaccaacagctcggcgctgctgaaaggctggtgcgtcgacccggcaagcagagtcgtagctgggggtgaactagatcttggaccagtggagctggtgccgaaacacagtgtaccaagaaccagtcccaattaggacaatgtgcacccttgtccatgacacaagccagcgatctgaacaaggggaaagcattctgcctcttaccagatctacgactgtgcctttggcagggggcacgattgaacctggtctgataatacaaccatggtcagggaaccgccgtaagagaggatctggtacccggggtctgtgccttgtgacgctaattaagacatacttaagtgcaaaactatcacaaaacacaacaagagtatccatgaaaaacagagaaaattgatggacagatgacaatagagagaatggatcaccagaagaagcatagaacaaggaaacaaaac

SEQ ID NO: 538736 - DNA, 615 bp, Homo sapiens
caccctaaccctggacaatgtgagtgttgagatagttattagaaatggatgatttaggccacgctgaggtcagcataaactaccatagtaacttgctgccaagaatccacggcctcagtaggaggtgccccggaacgagctacgtagaacttgtgatgagtgtacatgactatgctgagctatgtacaaggctcctgtggcagatgccatctctattgcccagtggaacactggatggtgatcccaacactctcgctcgtgcaacattcaaatgcgagctggttgtactccacagcatcatcttcattcaaagagtcaaagttgatgagctcaggccggaagacggtggatgatggcacacagggccaacccactgcgccaaggatgtggtcaggtacggagacgtagacatgctggtaagccctctgtatgctgctggaaccaggacatggagcttgctgaggcggatatctgactccttcctgtagagtttacagatatcctcaccgaacccagtctctcgagagggtagtgcaccagatacttagtgataacaaaatgcttacctgatgggggctgaaacagtgtagataagggtaaaggccccggggtacg

SEQ ID NO: 538737 - DNA, 1197 bp, Homo sapiens
cacaccgggctttccttaacctcgcgtgttcccttatgtattacccgtgcattccactgtatgtcactcgggatctctttcggtgcatctctattgtgcacacatattggttaatatgtcatctgttgtccctgatctataggccacttcccggctgggctctcacgtggcacttggctacaggttttgaactgccgtgtgctgctttccgaagtggccccatacctcttgtctacactttcaacgcatattgtcaacttctttcctctcccatctcgatcctgctctatagttcctagggcatcatcgctatggggcttgcactatgccacccgtcccaccgtggtcaattccaacaattgtggatggtcaatcctgtgcctactcttggttgctgcagctaatgagcctcggagacctaaggcccctagggcaccgtatccgcgagtgagcactatcacagatggtagacatcctcgtgaccgaggcatctgccacttgtctcagaagccagctatggctacagatctcgaggcggcatctcatagatgtcggacactgggggaccttggtgtctgcgcactacacgccaccgtagacctctccccatcatcgagcacagtcgtctccatctaaagtcccaggggtaacacaggtcccagatgacatccctttgaccacatcgctctaggacaactggcacccagagaaaaggactccgtcagtaaaaacatggccccgcatgctgcactctccctcgggacaaccaacgacgtcgtagtaactgcaccacccaccaccaagacacacacacacaaacagaaacagcaatcaaaacacgagaaagcagagaaatctaccaagaacagacgtctcaggactagaaccactgagtcttttggaggctcacaagcctgcaaagtgccacgcagagcccaccattgaggcttttgctagttggttctgttttgcgttttacagaccgtgtggggaatagcacaagtaatcccgccacgagggcccactagcatccactgattggaccttatggtcacccaactcaaggacagccactcaagaagtggctcggccaaagagaactgggcgcagtggctcatgcccataatcccagcactttgggagatggaggcgggaaatcatttgaggtcagaagttatacgccagcgggacacatag

SEQ ID NO: 538738 - DNA, 725 bp, Homo sapiens
tggtcaaccgtgagcatggtgtgatccatggatgccgaggaatgtgacgggctgggagtgtgtgtgcacctgccagggcgtcatgctgtgccgtgatcgggattgggatcgaggaggaagatcggaagcatacctggatggaggatgcttgagatgttgtgtagcccacaattgccctggagttgttgcactggagccatctactgcctactgccctgcatggtgttccccagcaagaagagtgttggttggctgcgcgccgcgtacttcgaggaagaaccatggcactctgggagtccctggaagcactcctgcagaagggctgtggccacctgcccaaagcagaggtgcttgtggctcatgggcgccaagtccaatgtgggctgtgcagggtgatgtgcctgcagcaaggagcatcctgggccctggccttccaggccaaaccccaacagtgaggagatctggctggccagccgtgaaatgctggagtccgagaatgatgagtacgagcggtggccctggaaggcttgcttgggccaagggcgctggaagcatttgcacccagctgtcccgggtgtcatgaacgtcctgtgaagctggagtgggtgcaagacaacattcaggacagccaagtatctgtgcgcatgaggcctgcggcgcctatgaggacttccccaactgtggctgatgagggtgcacatcgagtaggcacacggcacatcatg

SEQ ID NO: 538739 - DNA, 220 bp, Homo sapiens
cccccccttttgcccccggaattttaaaaggcccccggggtttgggtttttaaaaaaaaaaggttccccaaattccttttcccccccccccccccctttaaaaaggggggggggggggaaggggctttttttaccccaaaatttttttaaagcccgggggggcccttttttttttttttccccggggggccccccaaaaaaaattttttccctttgggga

SEQ ID NO: 538740 - DNA, 1102 bp, Homo sapiens
tccccccccccccctcccaccaacaatcgagagagcaggagagccagtgactcgcagggggggacgctaagcatcgtagaggttttatagctggatagtgtggttgtaggtgtatgtcgatgtactcagagcatatatcttttctggctttgggagatagtgtttttctcctcccggtgagtggtgcctgttctggagaaaagtttgctgcaccgtttgagagagtgttcgccgcctctcctttttatctcctcagatgggggcaactctttctggaaataaaatcgggggggttgttgcccggctaatattgttgtgtttgaaagatgtgtgggtcttaaaacaaataattttgccccgggtcttttcttttgaaacaaggggtgtttaacccccgacgtggggtgtttcaaaagctcccctgtgtaaatcccctgcccccccgggtgggaaccttgtcgccataaagttaacacgcgtctgtacacgccgcttttgtccttacccctcgtccgcatattgtgagagacaacctatatctggggagagttctgaaagggggcaagacccccttcttgggtgagaaatataaaaatcctgttgactactggtgagaaccctctgtgatagaccccactcggttcgctccgcgagagagggcccgtagaattaataacgagctcaatagagcagaatattgcgagtgaatctatacacatacacgatcagcacactcaacctctcttcgttaagagagtacaaagagcgcatagaacatgcttgaccaccgtgcgtaagttagggtggaccacgcagacgtgataataatgggccccctcgctctgggctaccccacaaggcaacaaggggcccaacatttctccctcccctctagaagtaaaaagtgtgagaaataagaggaaccaccacgagatatatgaaataagaatattattcccgaatctttcaagaagagaaaatgaacactcactgcgtttccacctattgtggcggacatacaaagaaagaagcagaaaaaacatatagacgcccccaactttgcggagtaaataaaagccgcctcgtcaatagtacagaaaat

SEQ ID NO: 538741 - DNA, 161 bp, Homo sapiens
tccccaaggcaacagggaagaccgtcagtttctcccaggcccacgtcaagcctggcataatgtcagaccctgcttgggatagggaatgtgaccaggggtgctcctgtggtcaccctgtcttggtgcatgattttggaagaataaaattgcctgtctcttta

SEQ ID NO: 538742 - DNA, 541 bp, Homo sapiens
gaggatcaccgacgtggttatacctacacccctgagctctcaggcctggcaccatgctgctgtcctcagagtgtcatcagtctcttctagcccatgtctcaggcccctggccagcttgctgctgtccctcagagtgtcatcttgtcgtcttctagcccacgggagggatgcaggtctccgttttctggaaaacgctcgtctccttctagggaagggggaattttgaggtagctactacagttgacatgttctgttctaattttagaactactctatgtcttagggatgttagtggcaggggtagtttcgacgtccagtgaaccggctgtcatctctagctcatgctgactttggcctttcatccattcctctcattcagaataaatttacccagctccctctgctacagagacaaacatggacttgatactctcttaactgaaatacaaatattcccaaagtcaatgctttagttggcccagtcttggtacctcagtgcctctccctactagtacagttgtgctggtctagtgaaagtacg

SEQ ID NO: 538743 - DNA, 426 bp, Homo sapiens
  misc_feature (297)..(297): n is a, c, g, or t
  misc_feature (404)..(404): n is a, c, g, or t
  misc_feature (410)..(410): n is a, c, g, or t
gggatttaatgtttaatggttacagagtctcaacttgagaaatgacaattgttctaaggatagatgctggcaatggttacataacagtgtgaatgtacttaatgctgctgaactgtgtacttaaaaatggctgagatggtagattttatgtacattgcagtggctcatgcctataaccccagcacttagagaggcagagatgggaggacagctcgagcccagggaactcaggaccagcctgggcagcaaagtgtggagaccccgttctccacaaaaggaaaacgttttgttgggaantttttttaaaaccatgttttttaaattttgaaaacaaaatcccaaaacaatgccaaaggcccacttttgaacacggcagcctgaggttctccattaggaaacccagnccgggnagtggctttattttcc

SEQ ID NO: 538744 - DNA, 161 bp, Homo sapiens
cactctagagttatccccggccactctagtgacagataacctcttaccaacaaccacaccccaggaagctcagcagtggttgcatcgaaatcgtttttctacgttgacaaggcttttcacaaacttctcaggggcagatttattgaaattaactagagtgg

SEQ ID NO: 538745 - DNA, 330 bp, Homo sapiens
tgacctggtctctagcactttgggaggtgggtggattgcttgagcccaggagtcaaaaccagccttgtgcaacatggtgaatggcaacatggtgaaatcccagctctacaaaaaataccaaaaaaaaaatttagccaggcatggtggcagcatgcctgtagtcccagctatttgggaggctgaggtgggaggatcacctgagcccaggaagggaggctgcagtgagtcgtgactgcaccactgtacttcaggccgtgggtgacgggatgagaccccgtctcaaaaaagcagagaaagctgaaagggttagagactcagcaaatgttacta

SEQ ID NO: 538746 - DNA, 127 bp, Homo sapiens
tacttctgttacatgttttctcgtacattctacttatgagacttatacgcaccaccctcaggacccaaatgccatttttctgtcccatatcttcctgtgatctgccatcagtggctcttttttcctg

SEQ ID NO: 538747 - DNA, 105 bp, Homo sapiens
agtccgttaggggctcctctttgcagagcacaggcagtaacctgaaactctgggtaggactagctattcctccgcccattggagacataaaagtagacctggact

SEQ ID NO: 538748 - DNA, 180 bp, Homo sapiens
caatttttttttcccccgggggggaaaaaaaaaaaagcccccccctttttgtaagggggggattttggccccccggggggccccctcccccgggtttttttaaaaattaaattagggggttccccccgtttttttttttagggggggggggttttaaccgggcccggtttccctttttta

SEQ ID NO: 538749 - DNA, 886 bp, Homo sapiens
  misc_feature (36)..(36): n is a, c, g, or t
  misc_feature (154)..(154): n is a, c, g, or t
  misc_feature (186)..(186): n is a, c, g, or t
  misc_feature (246)..(246): n is a, c, g, or t
  misc_feature (251)..(251): n is a, c, g, or t
  misc_feature (263)..(263): n is a, c, g, or t
  misc_feature (265)..(265): n is a, c, g, or t
  misc_feature (269)..(269): n is a, c, g, or t
  misc_feature (280)..(280): n is a, c, g, or t
  misc_feature (352)..(352): n is a, c, g, or t
  misc_feature (373)..(373): n is a, c, g, or t
  misc_feature (377)..(377): n is a, c, g, or t
  misc_feature (394)..(394): n is a, c, g, or t
  misc_feature (527)..(527): n is a, c, g, or t
  misc_feature (557)..(557): n is a, c, g, or t
  misc_feature (566)..(566): n is a, c, g, or t
  misc_feature (581)..(581): n is a, c, g, or t
  misc_feature (590)..(590): n is a, c, g, or t
  misc_feature (606)..(606): n is a, c, g, or t
  misc_feature (620)..(620): n is a, c, g, or t
  misc_feature (630)..(630): n is a, c, g, or t
  misc_feature (632)..(632): n is a, c, g, or t
  misc_feature (678)..(678): n is a, c, g, or t
  misc_feature (691)..(691): n is a, c, g, or t
  misc_feature (706)..(706): n is a, c, g, or t
  misc_feature (737)..(737): n is a, c, g, or t
  misc_feature (751)..(751): n is a, c, g, or t
  misc_feature (764)..(764): n is a, c, g, or t
  misc_feature (779)..(779): n is a, c, g, or t
  misc_feature (789)..(789): n is a, c, g, or t
  misc_feature (823)..(823): n is a, c, g, or t
  misc_feature (857)..(857): n is a, c, g, or t
aggtcacaggtcaagtcattcacaagtccccactangaggggtggcagggacagggctgggaggtgagctgcggcgctagtcaccaaagtggggggcccaagggaggagcaatgtcatcctttacccatctttggatggtctgtatggggcctnggaatgtggaccagccccgcctgggccccagngcagggcacgaagccccacaaaggtctcgtgctcgccacaggagcgtatgtggcaacagngccanaggcaggcccanangggngggtggacggnactgcagcgggctggcttcatggccttctatgtacggttcgtctgcggcccatccagctagatctcgtcatngtcgtcttcggtgggtgcttnaggnggtggctccgggcaggnggctggcgtcatcatgctcccatgaggtcactcgcagcgactgcgcgctctgtggtgctgggtcaccatggtctctttcccgcacaggaggcgcacggtggtggagcggttggggccctgccagcagcccgtncctttctcatacttcatggcactgaacttntcgtggtcngggccaatccatganccccaggtnccaaggctggtggganaccccccgagtttnggtttctgcnanacaagcttgaaggggcagaggcggtagacgtattcgttggtggtgngctcgtagcactngctgtacaggtaagnaaactccccgttggggccaaagtcaaaaganatctcttgctccangttcctgatggantcctccatgtccttnagcgaccgcncggcctcctcgaacttgttgcgggcctcctgggnagcatcgatgaaggcctgcgtctgctcgtcgtanggcggcattttgtcttcctcagcagggct

SEQ ID NO: 538750 - DNA, 919 bp, Homo sapiens
gtctcaaaaaaaaaaaaaagaaaaaaagaaaaaaaaattattacagcctgagctgaatcagtgtaacttccagggaggagcacttgaactaggcctacagaataaccaggatgaaatgaacttgtgagcccaagcttcagaaatgaaacaaaagtagctgaagtgttgtggaaccgtaccaatgaatgtggctattggtttggcttctaccaaacatggtgacctggggcaaagtcccttgacttctctgagtccatttcctctcctgtaaattagaatttgaataccaccaattacaccaggccattgtgaagaaaaataatattacttgattatgccttatcaactataaaacggtatctacactttacggtttataactagtatctccatgttatttctcactgaacacaactgattatttgcagagcaaattccttttaaaattccctgacctatggttagatgtgactaacttactttagaactttgacgacccctggttgtgtgagttctctcataaaatgttgccccggggcctgggacaaatatctggattcaccatacactttgcggactcactcactaactgaattttcacactgaataactgtcagctacaggttttccatgtttggtcattgcgcctgcctaaggagaccgatgttcaccccttgctgtgtcaccacatctgcggttttttaacctgcaggtcgctcacccagggaaatggaatatgcgctctaattaacatcttggggtagcccagatatattaatatcccaaaagcgctaatcaaaaagataaccggcgtctgacaacaacgggggcggacaatcacccgtaatataacagcgtggtcaaaaaatggcggccaaggggggagtgtgtacccactcatcgaatgtctaggaaaaga

SEQ ID NO: 538751 - DNA, 257 bp, Homo sapiens
  misc_feature (21)..(21): n is a, c, g, or t
  misc_feature (28)..(28): n is a, c, g, or t
  misc_feature (30)..(31): n is a, c, g, or t
  misc_feature (36)..(36): n is a, c, g, or t
  misc_feature (38)..(38): n is a, c, g, or t
  misc_feature (78)..(78): n is a, c, g, or t
  misc_feature (107)..(107): n is a, c, g, or t
  misc_feature (110)..(111): n is a, c, g, or t
  misc_feature (127)..(127): n is a, c, g, or t
  misc_feature (134)..(134): n is a, c, g, or t
  misc_feature (137)..(137): n is a, c, g, or t
  misc_feature (143)..(143): n is a, c, g, or t
  misc_feature (150)..(150): n is a, c, g, or t
  misc_feature (155)..(155): n is a, c, g, or t
cataggcactttcccttcctngattcangnnttggngnctccgttgacctatgtactgctataagttagtgtcctcangcaggaaggctcaagatctcctgtacgtngcnntgcagacaccccagtnccttcancancactgntccccangccancaccatttgggtggctgtttttaaaaagtaaagttcttagaggatcataggtcttggacactccatccttgccaaacctctacccagaagtgcgcctgggtg

SEQ ID NO: 538752 - DNA, 597 bp, Homo sapiens
gacattgacactttaattaacgccaacgtgtgatttatttatttttttaaaacatgtgctcaaaactgcggatggaggttgtttcacattttgatgaccttctgaaatagcggtaaggccacaccaaatccgagcatcaggcaagaacacataatatttttttaagaaaaaaagaaaaaaaacggtgggaacgaagaagggaatgagatgtacatttaaaactcattgcattaaataggagaggcttagtaggacatactgttgccgcaaacagcggcacacacagtcttacagtaattgtttttgaaaccagttaccactaatgtattaagccctgcagcgggtaccactgacttgtcctacgcataaaatgaacccggcgaagccagtgttgatactgttgtgaagaggttgaggagctcattttcaagacagcttagaccatatttagcagaatatctcgtttagaaaggcctggctgaagatagttttatgtggattgtctaacctataaaaataacagggttcctattagtccatctttaaaaggaaatagatgccgaataccatgattcggttaccaaatgtgggtatgac

SEQ ID NO: 538753 - DNA, 632 bp, Homo sapiens
  misc_feature (86)..(86): n is a, c, g, or t
  misc_feature (98)..(98): n is a, c, g, or t
  misc_feature (247)..(247): n is a, c, g, or t
  misc_feature (259)..(259): n is a, c, g, or t
agaactggcagcatggcatgatggaaatggaatagaatcaggaatggtttgtacctgtgtgtgtgtgacttgggtgttctgactcngcacatatttgngaggtagagaggggagaagagggttgccacattatgtaacagaaaggagcccactgcttaaacacttaccttgtgccagacattgcactaggactttattacctgcaacccatcctgcaaaactgtgaagatttgatatgatcattctnattttatggttnagaaacaagggttaaggacattaaaaatttactcaatgtttaaacatttgcctgtcttattctaaagccccttctcttttcacaatccctttaagaaatggacatccaatatttgagtggcagaggcaaaaacatggcctaccaaaaccattatgatagctttacaatatgcccaccaattttttgatagtccttctgccaaatggtgaatgctaattaccctcctacagaatgtgactcacttctaatgaataaaatatggcacacgtaaaagtgtgcgatttcagagactagggcataaagaccccatggtcttcttccctgctctctctctcctaggcactctctctgggtgaatccatttgacatgttg

SEQ ID NO: 538754 - DNA, 156 bp, Homo sapiens
aggatgaatcaggcaagaccacatttaatatcgtgtcagttatatgttatgtgtcattataaagactagcacatgtacaacatacatggctttgaatgacataagaatatataaaacagtaactgtatgtttatatatgtgtagtaattctgccca

SEQ ID NO: 538755 - DNA, 680 bp, Homo sapiens
  misc_feature (86)..(86): n is a, c, g, or t
  misc_feature (98)..(98): n is a, c, g, or t
  misc_feature (247)..(247): n is a, c, g, or t
  misc_feature (259)..(259): n is a, c, g, or t
agaactggcagcatggcatgatggaaatggaatagaatcaggaatggtttgtacctgtgtgtgtgtgacttgggtgttctgactcngcacatatttgngaggtagagaggggagaagagggttgccacattatgtaacagaaaggagcccactgcttaaacacttaccttgtgccagacattgcactaggactttattacctgcaacccatcctgcaaaactgtgaagatttgatatgatcattctnattttatggttnagaaacaagggttaaggacaaaaaaaaaaaaaaaaaaaaaaaaaaaaaaaaaaaaaaaaaaaaaaaaattaaaaatttactcaatgtttaaacatttgcctgtcttattctaaagccccttctcttttcacaatccctttaagaaatggacatccaatatttgagtggcagaggcaaaaacatggcctaccaaaaccattatgatagctttacaatatgcccaccaattttttgatagtccttctgccaaatggtgaatgctaattaccctcctacagaatgtgactcacttctaatgaataaaatatggcacacgtaaaagtgtgcgatttcagagactagggcataaagaccccatggtcttcttccctgctctctctctcctaggcactctctctgggtgaatccatttgacatgttg

SEQ ID NO: 538756 - DNA, 153 bp, Homo sapiens
aaataggggatgattttagcttgtcctaaatcttgctgtccacccttccaggaaaggggcattgttaatgaataaaacattttcaactccttttgaatttatcccccaaggaaccattttatccctgtaattaatcaggatggattttttgga

SEQ ID NO: 538757 - DNA, 945 bp, Homo sapiens
  misc_feature (123)..(123): n is a, c, g, or t
  misc_feature (135)..(135): n is a, c, g, or t
  misc_feature (286)..(286): n is a, c, g, or t
  misc_feature (290)..(290): n is a, c, g, or t
  misc_feature (349)..(349): n is a, c, g, or t
  misc_feature (364)..(364): n is a, c, g, or t
  misc_feature (370)..(370): n is a, c, g, or t
  misc_feature (583)..(583): n is a, c, g, or t
  misc_feature (913)..(913): n is a, c, g, or t
gcaaccgcgccggcaacgccaaaccgctcacgcggcgcgcaggcagggcagcaggctctcggctgcagcgcgggggggatcgaggatgccggcttaccaacataggggcagcactggggcctnccctactggctngcctggctgggtggttgggccaatagcccggagcaggcccaactaaaccatacccacaggtacggatagagctaggtacaactaatagtacaacaaacagagaataccacgaggcaggccgggcacaacttctacaacgtggacaagagcnactngaagaggcaaagaggaaccataacacatgggtgggcccaagccacacccagagagttangtttaccgaggaccngaagcngcctgcaagcttcgaagcacgggaacaatagagccacagtgtcccaccatcaaagagatcagagaccagggctcctgtggctcctgctgggccttcggggcggaggaagccaacactgaccggatctgcatcacacaccaatagcgcacgtcagcgtggaggtgtcggcggaggacctgctcacatgctgtggcagcatgtgtggggacggcngtaatggtggctatcctgctgaagcttggaacttctggacaagaaaaggcctggtttctggtggcctctatgaatcccatgtagggtgcagaccgtactccatccctccctgtgagcaccacgtcaacggctcccggcccccatgcacgggggagggagatacccccaagtgtagcaagatctgtgagcctggctacagcccgacctacaaacaggacaagcactacggatacaattcctacagcgtctccaatagcgagaaggacatcatggccgagatctacaaaaacggccccgtggagggagctttctctgtgtattcggacttcngctctacaagtcaggagtgtaccacacgtcac

SEQ ID NO: 538758 - DNA, 1056 bp, Homo sapiens
  misc_feature (99)..(99): n is a, c, g, or t
  misc_feature (800)..(800): n is a, c, g, or t
  misc_feature (905)..(905): n is a, c, g, or t
  misc_feature (971)..(971): n is a, c, g, or t
  misc_feature (990)..(990): n is a, c, g, or t
atgccattccacagccagatttgaccaagctgcaccagtgtggcaatgcaacagtctcattttcccatgacgcatggaaacaccggattcagtgcaggnttgggatgcatctgctcagactacttctcatgaactcaccattccaaacgatttgattggctgcataatcgggcgtcaaggcgccaaaatcaatgagatccgtcagatgtctggggcgcagatcaaaattgcgaacccagtggaaggatctactgataggcaggttaccatcactggatctgctgccagcattagcctggctcaatatctaatcaatgtcaggctttcctcggagacgggtggcatggggagcagctagaacaatgcagattcatccataatccctttctgctgttcaccaccacccatgatccatctgtgtagtttctgaacagtcagcgattccaggttttaaatagtttgtaaattttcagtttctacacactttatcatccactcgtgattttttaattaaagcgttttaattcctttctctgttcagctgttgatgctgagatccatatttagttttataagcttctccctggtttttttttttttttggttttttttttttggctcatgaatttttctgtttgtcatggaaatgtaagagtggaatattaatacatttcagtttagttctgtaatgtcaggaatttttcaaaaaaattaaaagatggactggagctttttctttgtgaatagaaactggatgccacagtgattcatgtgggttttatccctcttgtcttgcgtgntatttttgggaccttttatccctcaaaggacccttcttggggttttggaatgggaagccctttattccggtaaagagtgttttcttctattttaccactctccantcttttttgggggccctcgatcctatttttccctgacctccaggcttgggtgggcccttataaaantggtgcccaaaagattggnggttaagactttccgaggacttacctgtcctaggggagataggcaagcccttccactagggagggg

SEQ ID NO: 538759 - DNA, 393 bp, Homo sapiens
ctgaggagtagacatggattcattagccaaggctgttccagagcccttgaagaagtatactacatagtagagagctcggctgaaagactcggaactagaagccacttatgaatcagtgttgttccatcaactacaagaaataaagggagttcacgcaagatgaagctctccaaactgccaacaagaccctacgattactttgacctatcagggatgtgtcttcgtctcactgaagttcgagacgaaactacattttagtcgtccccacgaccgatcggggctgctcgtcgcctacccggaggaaaaaaacctgacagccatcatcaatctgctgagatttgtgaagaccactcaacgaagacagtcggctatgaatgaatcatccacagactg

SEQ ID NO: 538760 - DNA, 728 bp, Homo sapiens
  misc_feature (99)..(99): n is a, c, g, or t
atgccattccacagccagatttgaccaagctgcaccagtgtggcaatgcaacagtctcattttcccatgacgcatggaaacaccggattcagtgcaggnttgggatgcatctgctcagactacttctcatgaactcaccattccaaacgatttgattggctgcataatcgggcgtcaaggcgccaaaatcaatgagatccgtcagatgtctggggcgcagatcaaaattgcgaacccagtggaaggatctactgataggcaggttaccatcactggatctgctgccagcattagcctggctcaatatctaatcaatgtcaggctttcctcggagacgggtggcatggggagcagctagaacaatgcagattcatccataatccctttctgctgttcaccaccacccatgatccatctgtgtagtttctgaacagtcagcgattccaggttttaaatagtttgtaaattttcagtttctacacactttatcatccactcgtgattttttaattaaagcgttttaattcctttctctgttcagctgttgatgctgagatccatatttagttttataagcttctccctggtttttttttttttttggttttttttttttggctcatgaatttttctgtttgtcatggaaatgtaagagtggaatattaatacatttcagtttagttctgtaatgtcaggaatttttcaaaaaaattaaaagatggactgga

SEQ ID NO: 538761 - DNA, 112 bp, Homo sapiens
  misc_feature (10)..(10): n is a, c, g, or t
  misc_feature (20)..(20): n is a, c, g, or t
  misc_feature (32)..(32): n is a, c, g, or t
cggtaccganttggcgccanggtttcgtagcnggtacttggcgcaggcgatatcggtggtggtgtagagatagccgccatcctttttctggatgatgacgcccatcggatcg

SEQ ID NO: 538762 - DNA, 736 bp, Homo sapiens
ggctaggtacgaggcctgggtgttgaccctttgcccctgctgcgatgaccctgatcgcccttctgctgttcctgccaccgtctgctgctgctgctggacgtccccacggcggcggtgcaggcgtcccctctgcaagcgttcacgacttctttgggcacatgggccaccagttatagctacaagacaggcaatctatacctgcgggggccccttaagaagtccaatgcaccgcttagtctatgtggaccctcttactatgaagcactgtgcggtggctcgccgcatccttcctgatccgggcagctcttccctaacatggctgttggtctatggagtatcctcatactgtctacgctggctgcccatacggatacacgcagcatggaacaatacagtgtcagatgggcagagtgcgtgcatgcttcaacgcttgcctagcatgcgtagaatgcagtgagtgcaaattcaacaaggtggaggcctgcgtgttggatgaacttgacatggagctagccttcctgaccattgtctgcttggatagcagttttgagcgacatggagagcaagtctgccaatatgcctgctgactctacgccccagggtctgtcgccagaacactatcatggagctgtgcaatggtgggaccgcggtatgacagctcatgtcactgccgaaagcccagcggaccagatgctctccaggctacacacgagtatgtgcccagagtcaccgtcag

SEQ ID NO: 538763 - DNA, 801 bp, Homo sapiens
  misc_feature (99)..(99): n is a, c, g, or t
  misc_feature (754)..(754): n is a, c, g, or t
  misc_feature (758)..(758): n is a, c, g, or t
  misc_feature (781)..(781): n is a, c, g, or t
atgccattccacagccagatttgaccaagctgcaccagtgtggcaatgcaacagtctcattttcccatgacgcatggaaacaccggattcagtgcaggnttgggatgcatctgctcagactacttctcatgaactcaccattccaaacgatttgattggctgcataatcgggcgtcaaggcgccaaaatcaatgagatccgtcagatgtctggggcgcagatcaaaattgcgaacccagtggaaggatctactgataggcaggttaccatcactggatctgctgccagcattagcctggctcaatatctaatcaatgtcaggctttcctcggagacgggtggcatggggagcagctagaacaatgcagattcatccataatccctttctgctgttcaccaccacccatgatccatctgtgtagtttctgaacagtcagcgattccaggttttaaatagtttgtaaattttcagtttctacacactttatcatccactcgtgattttttaattaaagcgttttaattcctttctctgttcagctgttgatgctgagatccatatttagttttataagcttctccctggtttttttttttttttggttttttttttttggctcatgaatttttctgtttgtcatggaaatgtaagagtggaatattaatacatttcagtttagttctgtaatgtcaggaatttttcaaaaaaattaaaagatggactggagctttttctttgtgaatagaaactgnaaanaaaaaaaaaaaatggcctccttnggcctaatcggggtactttt

SEQ ID NO: 538764 - DNA, 1216 bp, Homo sapiens
  misc_feature (99)..(99): n is a, c, g, or t
  misc_feature (1061)..(1061): n is a, c, g, or t
  misc_feature (1127)..(1127): n is a, c, g, or t
atgccattccacagccagatttgaccaagctgcaccagtgtggcaatgcaacagtctcattttcccatgacgcatggaaacaccggattcagtgcaggnttgggatgcatctgctcagactacttctcatgaactcaccattccaaacgatttgattggctgcataatcgggcgtcaaggcgccaaaatcaatgagatccgtcagatgtctggggcgcagatcaaaattgcgaacccagtggaaggatctactgataggcaggttaccatcactggatctgctgccagcattagcctggctcaatatctaatcaatgtcaggctttcctcggagacgggtggcatggggagcagctagaacaatgcagattcatccataatccctttctgctgttcaccaccacccatgatccatctgtgtagtttctgaacagtcagcgattccaggttttaaatagtttgtaaattttcagtttctacacactttatcatccactcgtgattttttaattaaagcgttttaattcctttctctgttcagctgttgatgctgagatccatatttagttttataagcttctccctggtttttttttttttttggttttttttttttggctcatgaatttttctgtttgtcatggaaatgtaagagtggaatattaatacatttcagtttagttctgtaatgtcaggaatttttcaaaaaaattaaaagatggactggagctttttctttgtgaatagaaaaaaaagaaaagaacaaaaccaacgaataaaaaataaataaagagagataagatataaaaaaaacaacctaagagtacaagcgattcaatcattgcaagtgtcctccctagagaggtacggtatgcttatctagcttattccgaccgcgtatgctgccgttgcagacgtgcccgtcgcacacgctgctttgccgcgccggacgaggccctcgccaactttgtattcctcccgcccctcccataaacagaaagccctaaatagatcacgatatgctagacgatccacgagagaaaagctcctgccgctgttgnctagtttcgtccgcagttcctatttgtgcccagtcccgctcgagtatgtccgccgcctcaaccctnttccttggagctgagccagtatccccgcccgatgaacgctagactttggctggtgtcgcgtctagattcggctatttgctgagggacgg

SEQ ID NO: 538765 - DNA, 924 bp, Homo sapiens
tccgcttgctgtttgtgatgtggactaatactcgtctccgccggctcttttttgttggctctagatggctgggttcctcactctgtgtggcgccagaatcccccccggtctatcgtgctcctttttcccccggttctctgcgggtgtgaccctctcacatgttcccccgcacgtctgtgtaatcttggccccggtatattgtggctctttcgagagcgttgcccgacaaagtgttgttcccccctttctctagggaggggggtcaccctcttgtgtgtcttcatgtgtgcgtctgcgtcccccaccggggtggcggcggattttctttccaggagggttgttcgaacacccccccggcttgtgttgtgggggaggcgcggtctgataatcccatctcgaggggtgcgttcactaccacctcttgcgtggaacaaaatattgttgagtcccttctcctctttcttgggtgtagctccccacatttggcgcccctcgggtccatcatgatgctccccccctttgtggggtgctttcttctttggtgccacccttcctcgtctgatggcccggggtggacccccccactcaaagatgttggggtcgcaccctcgcccacttcgtgccaaggatggtggcgggcccccgaatttctgttttggtcggcgtattttttttgttggtgagacgacccccctggtggggcgttcattattatgttgtaacttaacgtcggcgtggtggaatttctctccctacgccgccgtgggggtggcttcttccctgtgtttcccagagtcccgctgacagatctcgttgggggtgtttctctttcctttctcttccttttttaaagggccccccaaccccccttatttttttttttttttcccctccttccaaaaaaaaaaattggggccccccaca

SEQ ID NO: 538766 - DNA, 779 bp, Homo sapiens
  misc_feature (99)..(99): n is a, c, g, or t
  misc_feature (732)..(732): n is a, c, g, or t
  misc_feature (736)..(736): n is a, c, g, or t
  misc_feature (759)..(759): n is a, c, g, or t
atgccattccacagccagatttgaccaagctgcaccagtgtggcaatgcaacagtctcattttcccatgacgcatggaaacaccggattcagtgcaggnttgggatgcatctgctcagactacttctcatgaactcaccattccaaacgatttgattggctgcataatcgggcgtcaaggcgccaaaatcaatgagatccgtcagatgtctggggcgcagatcaaaattgcgaacccagtggaaggatctactgataggcaggttaccatcactggatctgctgccagcattagcctggctcaatatctaatcaatgtcaggctttcctcggagacgggtggcatggggagcagctagaacaatgcagattcatccataatccctttctgctgttcaccaccacccatgatccatctgtgtagtttctgaacagtcagcgattccaggttttaaatagtttgtaaattttcagtttctacacactttatcatccactcgtgattttttaattaaagcgttttaattcctttctctgttcagctgttgatgctgagatccatatttagttttataagcttctccctggtttttttttttttttggttttttttttttggctcatgaatttttctgtttgtcatggaaatgtaagagtggaatattaatacatttcagtttagttctgtaatgtcaggaatttttcaaaaaaattaaaagatggactggactgnaaanaaaaaaaaaaaatggcctccttnggcctaatcggggtactttt

SEQ ID NO: 538767 - DNA, 507 bp, Homo sapiens
ttttcattgtaaaataccatcatcagtgagagtcttgagttcactaacatgtcaccttctggagagagagttaatggggggcatgaggatgatatttttttacatgtgttggtttctgattcaagtgacacggcaaaaaaaaaaaaaaaaacaaaaaaaaaaaaactggtctcggggccggcgccctcggcgccctctcggaaagggttttcttaagacaccatatccggttggggcgcgcggccgggcgcccaggttggggaaaggtgcgaccctgggcgcaaataacgcgtggttcccaacagggaagaccccggcgccattagactaggtggcttgggggttttcttcaacaaattaaaaaaaacgcgccggggggggcacaccggagcgggtctttggacacaatcccagaatggaggggctcaggagggccactaccggggctctactcaaccggggaggcccaaggagagccgagatttaaaatacgcgcgcggggggagc

SEQ ID NO: 538768 - DNA, 784 bp, Homo sapiens
  misc_feature (99)..(99): n is a, c, g, or t
atgccattccacagccagatttgaccaagctgcaccagtgtggcaatgcaacagtctcattttcccatgacgcatggaaacaccggattcagtgcaggnttgggatgcatctgctcagactacttctcatgaactcaccattccaaacgatttgattggctgcataatcgggcgtcaaggcgccaaaatcaatgagatccgtcagatgtctggggcgcagatcaaaattgcgaacccagtggaaggatctactgataggcaggttaccatcactggatctgctgccagcattagcctggctcaatatctaatcaatgtcaggctttcctcggagacgggtggcatggggagcagctagaacaatgcagattcatccataatccctttctgctgttcaccaccacccatgatccatctgtgtagtttctgaacagtcagcgattccaggttttaaatagtttgtaaattttcagtttctacacactttatcatccactcgtgattttttaattaaagcgttttaattcctttctctgccaagttttcctcctctgacacccatattcactcttaccagcctctccctggctctcagcccgccccccctcactcacccaccgctcccgctcctccatgccatgtctccagggtagggggcctgccccccccccccccccccccggcccgccccccccccgcgccactgccaaagcccagtccaccctacccgcccctccccccgcttcccccgcccccaccacccccacccgcccacccaccgccc

SEQ ID NO: 538769 - DNA, 412 bp, Homo sapiens
cacgaggcaggtagcacaggctggaacgcattcctttggaagaacgtctgctcagatggaccctgagatgtctccacggactttatttgggactttgtttggaaagaaagccgactgtaacttgggcagatgtcgacaaggaagaggggagagccagatgccaccatgccctctgcctctgcatatccgtgtgctctgtgtgttgtgtaggctcatctacagcttacctggcttggagttcaggtaatggtggccatcctgacattctctgttggagtttagagagatgtaagacgtccagttaatgtcttatttactttatgttgatcagtctttaatacatgtgctgaatcagaaaaacctaaataaaaataattttttaaaatgtaaaaaaaacccccccaattgagag

SEQ ID NO: 538770 - DNA, 244 bp, Homo sapiens
  misc_feature (3)..(3): n is a, c, g, or t
  misc_feature (43)..(43): n is a, c, g, or t
  misc_feature (45)..(45): n is a, c, g, or t
  misc_feature (53)..(53): n is a, c, g, or t
  misc_feature (60)..(60): n is a, c, g, or t
  misc_feature (62)..(62): n is a, c, g, or t
  misc_feature (70)..(71): n is a, c, g, or t
  misc_feature (82)..(82): n is a, c, g, or t
  misc_feature (94)..(94): n is a, c, g, or t
  misc_feature (101)..(104): n is a, c, g, or t
  misc_feature (119)..(120): n is a, c, g, or t
  misc_feature (138)..(138): n is a, c, g, or t
  misc_feature (147)..(147): n is a, c, g, or t
  misc_feature (154)..(154): n is a, c, g, or t
  misc_feature (164)..(164): n is a, c, g, or t
  misc_feature (182)..(182): n is a, c, g, or t
  misc_feature (197)..(197): n is a, c, g, or t
  misc_feature (200)..(200): n is a, c, g, or t
  misc_feature (202)..(202): n is a, c, g, or t
  misc_feature (213)..(213): n is a, c, g, or t
  misc_feature (215)..(215): n is a, c, g, or t
  misc_feature (228)..(228): n is a, c, g, or t
tcnctggcattaacatacccgagtgaacaaagcaccgaagatncnccgccggncctacananctcatggnnggattaaccgntacatgagctcnccctgcnnnnttgagatgatcttanngaaaaggaacagattgtncctaaaccngaagagnaggttgcccngaagaaaaagatatcccngaagaaactgaaganacntnaacttatgccncngagtaaattcagnttaaataaatgtaatt

SEQ ID NO: 538771 - DNA, 286 bp, Homo sapiens
  misc_feature (25)..(25): n is a, c, g, or t
  misc_feature (48)..(48): n is a, c, g, or t
  misc_feature (63)..(63): n is a, c, g, or t
  misc_feature (68)..(68): n is a, c, g, or t
  misc_feature (74)..(74): n is a, c, g, or t
  misc_feature (113)..(113): n is a, c, g, or t
  misc_feature (160)..(160): n is a, c, g, or t
  misc_feature (171)..(171): n is a, c, g, or t
  misc_feature (223)..(223): n is a, c, g, or t
  misc_feature (270)..(270): n is a, c, g, or t
  misc_feature (274)..(274): n is a, c, g, or t
gtggatttggaacaaccctcatggntaaggatttgggattggcccaanactttgctaccagcncaaanagcccnatcctttttggcagtttggcccctcagatttacaggatnatgtgtgcaaagggctactcaaaaaaagacttttcatccgtgttccngttcctacganaggaggagaccttttgagtgtgccctttggccccggaccctgttgggaaccnaactttgttttggagcctccttttagctccctccccaagtaaatggntttnatcaaaggtcca

SEQ ID NO: 538772 - DNA, 130 bp, Homo sapiens
agaggatcccggtcggccagggcaacgtttgtagacgtgagcgtcagtctcctggcagatgttctgctccactgtgtcacactcgggtaggaatgcctgaaccttttttaccaagcctttccttttcaat

SEQ ID NO: 538773 - DNA, 96 bp, Homo sapiens
gggtttttttgcccctttccccccccccaggaaaaaaaagttcggggttaacagggacaggggtttcccatcttttgaataaattttttcctttta

SEQ ID NO: 538774 - DNA, 111 bp, Homo sapiens
tcacatctgaaataccacattggtgatgacatcctgcttagcggaggcatcgggctccttgattgacactcaccacattgtttttcaagctgacttccagcttgtcacctt

SEQ ID NO: 538775 - DNA, 355 bp, Homo sapiens
tatccgggacgggcagacccacagagaacacctgtgagatgggatggcacctatttggagagcactggtatgaggggctgtgctgaggcgcccccagataggactctgggctcatacagatgccactatcattatctgccggggtgtcttcctcctttatgcacagagggatcatggcaacgtaagacagtgtagtctggcttcctatctccttcagatgatatccacttcactgcccagatctacactaaaggaatgatctggagtgaaggacaggacccctggggcccggggaagaggttgtaagaaggtaaagggagcaaactgatcggattttgagaacctaactgggaga

SEQ ID NO: 538776 - DNA, 84 bp, Homo sapiens
tcatggttggctatgtgagctgacgattggtgcgtgagccatgtgctctccagcctggtgtgacagtatgtgagactctacctc

SEQ ID NO: 538777 - DNA, 422 bp, Homo sapiens
taatcattaactatgacctccttagtaccagagaattgtccatacccagaatggggagatcaggtcgatacggccgaaaggtggtgcccattaactttgtaaagaatgacgacatcggaatcctcagagatatcgagcagtactattccactcagatggatgagatgccgatgaacgttgctgacctaatctgaagcagcagatcagtggaatgaggaagactgttcacctgctgggtactccggtttgaaagaattaagatccagattctacttaagggggttaatagggactttccttctcataaagggcctgccgactcccttcctttgaagaggatatggggattcggctctcttttctaatttacatgtaattactccatggtcctaagcctttttaattaaaaatttaaaacttca

SEQ ID NO: 538778 - DNA, 647 bp, Homo sapiens
  misc_feature (300)..(300): n is a, c, g, or t
tacctcaataaacgctgctggaacaactggacatcctcatgaaagagaataaatgtggaccagaccgtataccctccgcgaacataaattcaaaatgaatcacaggcctggcacggtggctcacgcctgtaatcccagctttcaaggaggcagaggcaggaggattgcttgagcccaggagctcgagacctgcctgggcaatatagtgagaccccgttctccacaaaaagtgggggaaaaaaaagacaaaatgaatcacagacccaaatgtaaaatgcaaaactatgcaactcctagacngtacacaggagaaaacttagatcacctggggtttggcagactgtttagatacaaaaccaaaggcacagcccatgagagaattgattaagatggacttcacgaaaataataactttgtgctttgtgagagacactgtcaagagaaggaaaggacagccggacgtggtggctcatgcctgtgagcccagcacttttggaagccatttggcgggatggatcccttgaggccaggtgtttgagaccagcctgagtaacaatagtgagaccccatctctacaaaaaatgtaaagattagccagggatagtggcacgcacctgtagtcctagctactccagaggctgaggcag

SEQ ID NO: 538779 - DNA, 141 bp, Homo sapiens
tcctgtatgtctcatattttaatcctttaaagagctctccattgtcatctttttccaatgttgtttagatttagtcaatctccttttcctttcacgtcatgacatttaattccagactaccgtcttcattctctcgaagag

SEQ ID NO: 538780 - DNA, 1222 bp, Homo sapiens
  misc_feature (230)..(230): n is a, c, g, or t
  misc_feature (732)..(732): n is a, c, g, or t
gttagatcaacctaatcagggtgcttgatgaccgttcaagtggtctcattagtagggtggcctaagagactcaagtcccccgaagtcacttgggacaaagactcccagtgagtccctataaggcgacagcaggttactacgctttacttgtcagtaaccacgaagacgtcgcaaggtctcctgctactttgacgataccacggacgatcttcatgagaatgtcagccttntcctgtggtaccccaacagtggcatgttcgcttacgcattccatgtgattgtgactcccgagcgaaacggcagtatttcacgctttggaggcttaactcgctggagattattcatgaccatacatttacataaacaaaacatattacaaagaatcacatgttgctattgagactgccgcttggggcactctctaataacatggacgtataggttaagaaggcgcatacaggtctaggggagttccccccgagagggcactgggcggagcgtaaggggggccacgcccctagtggcacgaggacctttgattgactcactcacgcgaaggaaccttagcgcggataattgacatcaatttgcggatggtgagatcttacgcgacgcgagttgaaagtaaagaagccccctggtgcgtgcgtgtacctcctagagagtctttgtgtagcccgtacaaagtattccccctacaatggttggaaggctctgcgatgaaggggacanttgcagctgagagctccttttttccgaactcgggagtaccccgtttaatgaagattctcatgagtttgtgtaacatttgattcacatcccgcggtccccatggggaggggtgggcacgaattaagaggttacccttaggttgcaatttcttataccctttcctttgcttactttaatctagggaaattaaacaattgcaagaattccttttggtttctcaccttgaagaaaagccacacggaaacagttgttctcctagaacttcgggcccaagacaatcaaccgacagaatttggatcgcacgggaggttgatgagttcctcacaggagccgtggaattggaccccccgtacccaaggtgtccaggtggccttattaggacttacttgtgggcacggtccccttcccacatcgagggttacacaacgcccacgggacacgcgacggaggtgtgagaggaccaaccgtggagtacacagccaataccgcc

SEQ ID NO: 538781 - DNA, 393 bp, Homo sapiens
ccgggggggcgcacggggcgaacggcggggagggcgggctgcggctccggcccccatggtggggtactgcaacggagcacagggttccaccctttcctttccacctggggtccccgcccccacggcagtgtttcaacggccatccccctcagggccgccgccgcggtggtttgtccccggctgtccccatccgggccggtacgcttgcttccgcacaggccaggcactttgtagttttcagtgctaccgcatcaacctgcaaatgcggctggggggggccgagggtcctggatccccccttttgggtacgtaaggcccttaaaccggactttgggccccgtcccatggccgcttttgagtatcttcccccccctatttaattacatccggtga

SEQ ID NO: 538782 - DNA, 1664 bp, Homo sapiens
  misc_feature (446)..(446): n is a, c, g, or t
  misc_feature (545)..(545): n is a, c, g, or t
cggggggttgtgtgcgcgttgtagcgccctgggggcgggcgtgggtagtagcgagtgtgtttgtccccccgagtgacggccagcgttgttgtggcgcccgccgagttggtgcgcgcgccgacttgtttgtgggtggcggaggcacttattgtgtagtccacacgtggtggtggttcttctctgatatatatcgcccggcgggtggtgggtgtgtctccgcctgcgtccggccatagttttttctctccgccgggtgttgtatgtatgctaccgtcaggaagtttttgtttctctcttccgacgcgtgctgctaccgttgctgagtcacgggtgggcgttgtcagtcgtaaaggtggtactgccccttctagtctctgcccttgtgttttatttgactggtggcgggaaggaccagtcctggtgctggtttggttattgttggcgcntgcgggctcagccggcatcgttgtttacgtagttctgagctgggtgaaggtgtcctagcctgcgcgcggagggcgcgacgcgcagacatggttctaccnacgacagaggggggggggggttagctaatgtagaggtaggccacgcgcttgtttgtcggccaccacgatgtttgctcactcggcggggatgttttcttcttcttgtaagtggaggagagtcatctctgtttgtgaaggcagctcgggacgcaacatcagatgttgtggttttactgacagtagttgtggggttgtggctacaccgcatcagagggattgtgctcctctgctggagtggtgatgtaagtaggatagtcactcccttcttgttggttgcagtggaagcgcttgtttacagactcttttgttttgtggggccgcctgtttagaagagatgttttttggtaggagatacctcgccgggggggagatcgtccccaccgtggtgggtgcgcggcgcagagagaggagcgactccaagacacgcggtttgtgctgttctctctgtggcgcacataatcgtcgtgtgtctgataagagagagagagtatgttttctctgtgggaaagatagagaggagggagaggtgaggagtttagtgggcgcccaccctcctctgtggtggtgggtggagggacattctactcgggcgcccactactgggggggcgcacgccactcccttgtgtttcgactcccgcgcgggcggggggtatggaggaaacccgcgtggaggtagtcgtcgcttcacatttgttctttcgccggggggtgtgtttgttctcgccgacacgtgttggttgtatgtttggtgcgcacaagatatgtagcgcgcgcgcacgcgtctcgacaatatagagcgcgcggcgttattttctgttgttgaagaggatttataataaataggttggtgtttgtgtaataactgtgaatgatatggtcgttgtgaatatgttgcaagatagaaattgattgttgtgacatgatgtttgtaatggttcggggtttaaagaaggagatgtgcagatgatgccgctgttactcttgtggggagaagattgttttattgtgtgggttttttgtggtaacaacagttttattgttttttaacttgtggaaaaatgaggggttttaatcccccccttgttttccccaaacccaaaaaaggggtaaaccccca

SEQ ID NO: 538783 - DNA, 86 bp, Homo sapiens
gccagcaccaaccagacatctatgtacctctgtgccagcagcctcaatgagcagttcttcgggccagggacacggctcaccgtgct

SEQ ID NO: 538784 - DNA, 976 bp, Homo sapiens
  misc_feature (29)..(29): n is a, c, g, or t
cgtgaacgggtaggcggtgcttgctgttntgcgatcatgcttcgtggcgttcgcgtgtgcacgctcgcttcagagctcttcgtacggcgccatttttatgtgagagatgctcatccggctgagagcgctttttcctgtcggggcgggggtcgactttcctggccgtgtgaaatgcctcgcttggaggacaggaacccttcaaggagatatcaggacttttgcccgcgccgtgaacatcaccgccctgcgcgccctgtcgtgtctccccccccttggagggagtaggtggcacagcttgtataaccctgcgtccgcccgtggtggctggacaccctcgcctcccctgggaagaactatctgaattggtgaccttccggcagaaaaatctgcacggcggcccggcattttccgtgcgttctctttaggtcccggcctgcgctttaacgaggcctctgggtcctgaaggggagccttctgcccccacgtgttgatggacctttttccccaagccggccagcactatgggcgcagcgctctgccgtcccaccacggacttttctgggaagaatgccccctgcgccttggcgcccccccacccccgggtgcacttcaatcgtgaaccgccatgctcaccagagaaattttggggggggaccacccacacgaacacgcgccctctgtgttgaaggcggaaaacccggggtccttcagacagccccccctcgggtctgtgtacccatgcccccgccgggagacctttttttgttctatcatgcccggcaaggagagtgcaccacgcccgtgtctctcctctctcagggagcagccgacttttctctgaggtacccgggttacattgccggaagactacggaggccgcgtttatatcagacttgcacggcgccccctgacgcttacttttatgaggaagtattccgtttcaaaaaaaaaaacccggttccccccccacaagaca

SEQ ID NO: 538785 - DNA, 84 bp, Homo sapiens
gccagcaccaaccagacatctatgtacctctgtgccagcagcctccttcagcaagcgggaaaggcagatacgcagtattttggc

SEQ ID NO: 538786 - DNA, 172 bp, Homo sapiens
tgctttaaataccaaacagtaaatcagaaagcttatattctatttaaaatatatataagacacacttatatgataagaaaacaagaccctcctaacatgtgacattaccgttcgtggcaatatgttctcaacctattcactctaccttttgaccttaagcatataagctcct

SEQ ID NO: 538787 - DNA, 385 bp, Homo sapiens
atacaaacagcccagaccatagaaaaaaactcattcataaatactacttcaccaaaattgaaaatacctgctctttgaaagacacaattaagaaaatgaataggtaagctgggtgtggtgctcatgcctgtaatcccagcactttgggaggctgaggtgggtggatcacttgaggtcaggaatttgagaccagcgtgccaacatggcaaaaccccgtctctacaaaaaaacacaaaaaattagccgggtgtggtggtgcatgcctgtaatcccagctacttgggaggctgaggcaggagaatctcttgaacccgggaggtggaggttgcagtgagctgagatcacaccactgctctccagcctggacggagtgagattctttctc

SEQ ID NO: 538788 - DNA, 87 bp, Homo sapiens
  misc_feature (45)..(45): n is a, c, g, or t
  misc_feature (53)..(53): n is a, c, g, or t
  misc_feature (55)..(55): n is a, c, g, or t
  misc_feature (58)..(59): n is a, c, g, or t
  misc_feature (61)..(62): n is a, c, g, or t
  misc_feature (65)..(65): n is a, c, g, or t
  misc_feature (70)..(70): n is a, c, g, or t
  misc_feature (73)..(73): n is a, c, g, or t
  misc_feature (76)..(78): n is a, c, g, or t
ggatttgctggtgcagtacaactaggcttaatagggacatgccantgcactcngnctnngnnacnagagnaanacnnngtccaaaaa

SEQ ID NO: 538789 - DNA, 430 bp, Homo sapiens
tgtgttagctgcagttgtcgtgaggctgctcttctggcctacgtaggccttgatcagccccaggcctatggcacaacttgctagggtcaggaggcccaggacccggggccccatgctgtggggcacaggtaggccttggtcagagagtctacaaacactgatgatgtatcgtggaggatgtggttagctgacgagacgggagcctgtgactttggccttgaaggggtagcccccgatgtggtaagggagccgacagatacttaatggagatcaggtagctgccaggtgccatgcggataataggtgacgcggtagcccctacagggcactcctggaaatccatcttcaccttggaggggctgtcaatggtacaccgacaggtcaccagttcccgcatttgctcgtgctcacgaaaactgcagctaacgca

SEQ ID NO: 538790 - DNA, 694 bp, Homo sapiens
catccccatctcatcacccagcccctgtataaggtggtactggaggccatggccgggacccccaaacagagttccccccaccactgagggcacccgagggctcctcagctgcctgcagatgtggcaagggccacgctgacgcttctcctggaccacctgcgcctcgtctcctccttccatgcctacaacgatgacccaagaattggcgtgtgcttcgggcctgtgcgtgctgccggcacgccaggcgcccacaaggctcgtgcccgcagctccggccaggccttgccagtgcagtggacttcaagcaccacatcgaggtgctggactacctgctgagtctaggccagatccccgctgcccgacaatctccagatgtcgcgccttattgcgaccaaagacaggcactctgcacctgccgtggcagacccgaagtggtgactcggccagcggtcgaggaggcccgaaagccccccgagcaacgctacgccggcgactggagcgttgcgggcggacttcctggcctgtgggggggattcctgtcgggccagataacgaacacgtgacgcgaagggcacggaggaccagacgcggaggcgggaccaggtcacggggcttccaagagaatgggggctaacccgccgaatcaagagttgagcgcaccggtggaagagccagacacaggtgctcacccacg

SEQ ID NO: 538791 - DNA, 321 bp, Homo sapiens
ctgctggctttggggtaggcttcgatcagcacggcgcaggtggcggtgaagggctgcaggtgctcgaccaggtcttcgtcgtagccgcccgggcgattggcgacggcggccatgccgaccaactggtcgccgcggaagagcggcaggcccatgaaggcatccagcggcgcatggccgggcggcaggccgccgcggcgcgggtcgtgggctggatcgttcgacagcaccgactgcccgccgttcaggacatggccgaacagcgtcttcaggtaacggaattcgaagccgccgatgacatagctccgatggcgtcggcgcgag

SEQ ID NO: 538792 - DNA, 140 bp, Homo sapiens
ttcatggaagggtttcgtggctaatcactcggggaaaacagaggcaggtggggggagggataccaagtaacaaacatgggggagtgtgaaggtcccgggtgcctcagccaggtctagcaattaacccagttaagtctccc

SEQ ID NO: 538793 - DNA, 412 bp, Homo sapiens
  misc_feature (346)..(346): n is a, c, g, or t
  misc_feature (367)..(367): n is a, c, g, or t
gatggagtcttgctctgttgcccagactggagtgcagtggcgtgatctcggctcactgcaagctctgcctcctgggttcacgccattctcctgcctcagcctcccaagtagctggggctacaggcacccaccaccacgcctggctaatttttttgtatttttagtagagatggggtttcaccgtgttagccaggatggtctcgatctcctgacctcatgatccgcctgcctcggcctcccaaagtgctaggattacaggcgtgacactcacgcccgggccccaaagttctaaagtaacattctattggctaaaagaaatcctaaacctacttatgtaacatttttntcttagttaaaaatgtggaantattattaaacctcaattttttaggagggctccaatttttttaaa

SEQ ID NO: 538794 - DNA, 269 bp, Homo sapiens
ctatgtattggggaagacagtgcagcacccaggctttaccagctgcgtatggcagacgaaggcggtctgaggtgtggagagtcgcatcacgaagatacatgtgtttgactgtttaatctgaaagtctacattttgtatgctttgtgtcggtgtgtaattttggtactctctggtggctagtttttgtcaaatcttttgcggaatattgcttaaatgttttgattttatgatagtgaagcttgtatacagtgtttggccaatcaacatag

SEQ ID NO: 538795 - DNA, 556 bp, Homo sapiens
catgaacgacaccgtaactatccgcactagaaagttcatgagcaaccgactacttcagaggaaacaaatggtcattgatgtccttcaccccgggaaggcgacagtgcctaagacagaaattcgtgaaaaactagctcgaaatgtagcaagaccacatccggatgtcatcttggtatttggattcagaactcgattttgtgtgtgtgagcataggactaaactggcttatggttcatgatttatgattcccttgtgattatgccataagaaaaattggaatcgccaaacatagactatgcaagacatgggcgtgttatgagaaagtaataaagagctcaagaaagcaaagtaaaggaaccagcatagaaacatggaatgtaagaaagtcagggggactgcaatggagccaggagtgttggatggctggtcaacaagagaagtgagctgcagattggatcacagtcgaaggagtaggaggtgctcgtacatgatgtgtagctgtgggacagctgtggcatttttcgcatgatcatgtaatagattagaaacttcatgt

SEQ ID NO: 538796 - DNA, 316 bp, Homo sapiens
  misc_feature (13)..(13): n is a, c, g, or t
tactcagtgatcncgtgtgcttcagtaatgcttcgctctcctctaacaggctgtggtctgatgttgagtcatgtggccccagtctatgcggaggtactccccggctaacctaagaagcagttgtattagtcctttttcatgctgctatgaagaaacaccaagactggtaatttctaaagaaaagaggtttaatagactcacagttcttcacagggcagcaggagagagaatgagtgttagcaggagaaatgctgggcacttataaagccatcagatctcacgagactcactcactatcatgagaacagcatggggg

SEQ ID NO: 538797 - DNA, 243 bp, Homo sapiens
ttccgcccgttcaggctccctttccacctctgactgcttgacgggacgtactccaccagagtggctgccgggcctccccagctcagacagtacacagctgatagccccaagactgccccttgtcctggggactctgctgccacactcagagagcctgtgtaggcttggagacctttctcatgtgtctccccctctctccctacacccaggcattcccaagccctccctgtggacctctggagt

SEQ ID NO: 538798 - DNA, 151 bp, Homo sapiens
ctagcctcgcgtgtgggtgggacacacgcatgcatcaacatgcgtggtaattcctttggtactttttagtagagacggggtttctccacgttggccaggctggtctcgaagctccgtgacctcaatgtgatccacccaccgtcggtctccc

SEQ ID NO: 538799 - DNA, 402 bp, Homo sapiens
cgaggtctgtgctaagatagttctgataacacagatgctgtatactgtcaagtgctgaatgccttttgcacttaagccagccttgtgtatgatgccagattgtacatgttgacgtttgacattctagcatgccatgacgtcaactccagctcccgatgtgtgcgtagctctatactagatgcaatatagggactttttatgcttagaagtacgagttcactgtcttgacatgcattgtctactttatcagagagtagaatctcatgctattagcattgcttactgcagaatggtcccaatgcacatgctgtttaacagcagggctatgttatgccaattaatgatgtctggaacttagtatctgctttcccaatgacactagtgctgaattgctattactgg

SEQ ID NO: 538800 - DNA, 275 bp, Homo sapiens
catcatgtacagagcgtctgttccagaaaatgaggacaatcacacagctgactgtgagactcctgtggctattgacttggaccttctagggcacatggagttaaccaagagagatcagaaactgtttcatgcagttaaagagaccttggtgagacacagcatttagagagaaaagccccagacacattcagagaaactaatgggatggaccctatttgcagactgcaacggagtacatgtaacaactgatctgccaattctattatggctttcac

SEQ ID NO: 538801 - DNA, 245 bp, Homo sapiens
cccgcgtgtgtctccatctgtatgcatcgacgcactcagggtgcgggcctggcgggttggatgcctacgcaactggtaaacctggcgttgagcgaacaaggcttggcgtggctggtgccgtcggtgatgacgctggtcgtggccgtggtgattgaccgtatgctgggcaagcgcagcgaagcgatcgcttaaaacctctgacttatacgctgcaattaaaaagccccggatcaaatgatccgggg

SEQ ID NO: 538802 - DNA, 1602 bp, Homo sapiens
  misc_feature (4)..(4): n is a, c, g, or t
  misc_feature (49)..(49): n is a, c, g, or t
  misc_feature (57)..(57): n is a, c, g, or t
cccngaatggtccattaggggaagttgcccacggctgcattcccggaangcggtctncccttgccttgcgagctctgggctggggctccctgtatgcatggtgtggggttggtgtgattagcttcgcagtctggaaagctttaggagttcacagtatgaacgactttcgaagtaaaatgcaatcaatatttccaacaattcccaagaactccgaatcggctgttgagtgggaggaaacattgaaatccaaatgagatgagcatggatgaatttcaaaatgcttgttacagaaaggggtggctctggagacaccatgacagcaaaaggactgggactgatttctcccaggaacatgggcagattgctgactgaaccagtgcactggatagcattcagcctcatcacaggagagtatgtgtgtgcgtgctgggggagggtaaagttttcccacagttaagaagactatttaaaaatagtaattacaggaataacttccttatgtggaggggaccccataggaaatgattctgtttgtaacagttgaagcaaatttcatactaaaaaagtttataataaaagtatgataagaaaatatttataaaacagaccccctaatagcaatagtactgcaatgtgtctaattaaaggagtttcaagagcctttcttgtcaatatatgacagaacttggaagtcttattctgattagccagactacaaagtgacagtcacctggtaagtcctgtatggtaggaagtgggtgtggctctcgggtcctaaatgtggtctgtgctttacagccatcacacacatgctagttatttacctgatgcccttgcttgaaggccctataaattcttatacttaaaacaaaaagccagtaatgagttgtgatcaccccaaaaggcacagttgggctaaaataatgatgatatcaggggtaaacatatttttttgagaagttggtctggatctctgaacactgacaatttgtcattttgtctcagttgtcaaagtaaaaaaagcccagttgtcatccgtcttcaatatttttaaccagaaagtcacctgagtacggagtcccaatataaagtatttgggaccacctccctaacaaagctgttagggtaaattctgtgtgcacgcccaactccctcctgtcttccacagtctcctacaaaaaaaacagatggagaataatgtctacatgcaattgtttttactgcaattgtattttaaaatattttcaagaagagaaatactttaatatgtcaatatgtccagagaaaaaacctgtagttaaatatcagttgtgcaatttcttcctacttgcctaggctctaattagtcagcaatcaggtttaataaaggacatttgaaatttctgttatcatgaaaccttttattctaagggagatttttaaatgaaatgacaagaacttaatgtaatacttttctctagaccatgttaccctgttaaaattgctgtattgttaatgaaacaggtgtaatcagcatctggaattcatatgtaatctgttagaacattccaagaactgcaaagcgacaagccacaggcacaaaacaaacgacgaacacaaaag

SEQ ID NO: 538803 - DNA, 309 bp, Homo sapiens
gactgcatctgtcctcttggaagagggaggtaggtagggaacaggtgggctgcttggtgaccatgccttaaaagtcaggtactggggctggcgggttctaatggtcgcgaggtgagaggtgcacctgtggcgaacacccttcactctcagtttgtcgggatagaggatatgagtctagccctgaggatgggatgtagactacaagggcaagagagtcagcttaaagaaatctgtagaactatctgccaggactgaggtgaccatagcggagagatgttggaggtattctgttgggaacaagattgcagt

SEQ ID NO: 538804 - DNA, 426 bp, Homo sapiens
gtgaaccataacgatactacactcaatactcatcattaataatcattatggctctagcaataaaactaggaatagccccctttcacttctgagtcccaaaagttaaccaaggaacccctctgacatccggcctgctatacttctcacatgacaaacactagcccccatctcaatcatataccaaaactctccctcactaaacgtaagcctactcctcactctctcaatctatatccatcatagcaggcagatgaggtggacataaaccaaacccagctacgcaaaaacttagcatactcctcaattacccacataggatgaataatagcagttcgtaccgtacaaacctacacataaccattcttaatattacctatttctattatcctaccgactaccgcattcctactactcaacttaaactcc

SEQ ID NO: 538805 - DNA, 425 bp, Homo sapiens
acgtgttgtctagcgatccaggggagtaggtgggtaacctggctatatgcttggtattgcagatggactatattatgtctagtgggaagctaacccagcagttgcttggtggcccttgtagttgtgtataggcgtgaggttgtgcatcttagcagcatgtgtcaagtgagcgtatggaccttgggacaaactccggagaacaattgcaggcgtttaaatgtggctgcctggagtttacactctggagaacttaaccctgtccatgcccactgtggaggctggaggcaccgtcctgggcacccaccacttccaagttgccttccttcatctggtctacgtggtggagtgaaggtcaatgggacggacttgcagctggaaggctgggggaatgttgaaaagcccactagcggtggccttgaggctca

SEQ ID NO: 538806 - DNA, 541 bp, Homo sapiens
  misc_feature (137)..(137): n is a, c, g, or t
gtctagtccgaccgccgtgtccgcggtcagaggtaggttccgtcctcgtgcgcggaaggtctcccgtgtcacgtttcgtatggggctcgtgttctggtgatgccctaagccgctcgtctagctgaggttccgccggntcgtggctgaccagtctgcagttaagcagcgtgtgttgcacagcggtgaactacgcagtcgccacctggttcaggtgggtgcgcggcaccacagtggcttttgtgcggccccaccctgcgggtcaaccacagcgacgcaccgtttgctgttcggaccctcgcttggaagcctgttacttcggccgcaccttacccctcttggggggggctacattgtcacccctgtaggagctgagcgacgagctcaggggatcaggccccagatacatcttcacagcagggccatgagatcagcgcgaacccataccagggacttgaatgcgcctcgaaatgggtacaaacccctgccctttggcgcccccccggggggccccctccccctggtttgcttcggattattttcc

SEQ ID NO: 538807 - DNA, 694 bp, Homo sapiens
gagtgcgagttgcagaagggggtgcttctcgtatcagtgcttcttcgtggcggaggaggaagtatgggtgtgcacctcagcactatcccaagactgctggtcaagcatgcgagttcctggggaaaaccccatgggtcacaaacgctcagaaatggattcctgcactgaaggcactagactgacgattgacaagctcctgctaggccagacaaactccggcaacacggaaagaaggaacgacgatgattgcaactatattacgaggatgtaagcttattctagtaaattgccactaaagcagcaaccgatgcaaaggactttaattaggacggggctttagggggggcctatggcacccgtaccgttgccaggcacgtatcacaagcagttgagcgggatagcctagtaactatcctacgtgtagtgtattatgagggggctgggctccggggccatccgttgtggatgatggactaggtagtgtggcccaggccttggtgatccgaagtggacttggggcgccaattaccgggagccatcagagccacgcaagggcagaagactggccagagccacgccaaagaagccgtccaaaggaaccatagcgcggggacaaccgcagaacacccaagggggaggctaagggaagcaagaggggcccagcgggaggaaggcccctaggtctgagaaccag

SEQ ID NO: 538808 - DNA, 496 bp, Homo sapiens
atatttcacacattattgattaaattgtttaactttttcaattttgttgcttgtgttccagagatatttaattccctttaaatgcctatatgatgctaaaatggataaaagtgttatactgaatgccagaatgtaaaaatttaggagtttctcccatcattttttttcaggttatttaaatttaatttacttttttttcctgacttcttttaattaagaagaggaggaaaggagggaattttccatgagtttgaatcctacaaatgccacaaacagcttctgaagctgaagccatgacaatgaacttccatgacacaaagaagatgaggaattggaagggaacagtgcaggagaaacacagtgacattgtgtcacagtaggtatttatgcctgctatcctcatccgagataaggtcaataacttctgctggtgaagcccaagtctgctgggggctcacagcagttccatgactgtgtctgcctggtgctaagatac

SEQ ID NO: 538809 - DNA, 412 bp, Homo sapiens
aggccaaagtcagtggaagggggatacgccctccaatcggggtatttccaggaaagtgttccaaagcagggcagcaagggcaggccctccagcctcagcagcccccttctgttgagcaaaacagattcgaggaaacccaaagttttcgcctgtgaagtcccccatcagggcctggggttggccgttcaaaaaagcttctacaggggagagtgttagagggggaagggcccccccctggtcctcagtttcagcctgaccccctcccatcctttggcctttgaccctttttccccagggggccaacccctattgggggcctccaggttattttttcccccccccccccccccccccttgggtttaattatggtaatgttgggggggaatgaaaaaaaaaagggaatttttgcca

SEQ ID NO: 538810 - DNA, 400 bp, Homo sapiens
tccaccgattcaagtacactcacacctcctcctccagcaggaagatgctataatcactaaagtgcgtctggtagctctcgtgcccagagtcgtcaggcccttctctggctgcggagccgtctcctcagtttggctgtactctcttggtctccagtctcccctgttgtcccaggtagagctggtgatcaatgcttatgttgcctcgatttctactctgtctctctataccatctgatctaccattgctcaccatcagatcaagctctgatttcacatcatgatgtaatcaccattggaagcttcactgttactaaattattaatttcttgcgtccagtgttctaatctctgaggctgcgcattattaagaaaatgacctctgctccgtttgcattgcagaa

SEQ ID NO: 538811 - DNA, 232 bp, Homo sapiens
tccttcggcgccgagcacagcgagtcattgccacatctgcctgtggagcataagacctgctctcccgcgtcctgagccaggccagcgccgacctggaggccaccctgtaggcacaaactaactgtcatgtcagtcagatcaacggggctgtctagagcactggattattgtgagaaacaggcagcaggactttgcggactgatctgcaataccagaataggtggacgcagct

SEQ ID NO: 538812 - DNA, 529 bp, Homo sapiens
aatattgggtgatagcgtcgagaagattagtcataaattcactgtaagatacagaacaaaattcacagttaggctagaatttagtagtatagaattttatgttggatccactgatacttttgtgaatgaggtgcgcttgaaataattgattcagcctaccaatgagctgatactttatctgtataaccaggagtctataggtttacaatgtatctagtaatcaattattcaccaataatttaggaaacagagatctacttgaaaataccatagatagatacccgttagcaggataattagaataagaagcgaatagcagctttgattgtccatttccatgaatgcgtacaagataaatctgtattttacagttaaaattggtacaaaaagtcaagccctgaagtagttttccccccaaaagttctgatgttaaaactttaaaaaacaaaaaaggagagaggtggggggtaaaaatatttttccttaaatggtggaaccccggcaccatttattttataactgaaagtta

SEQ ID NO: 538813 - DNA, 922 bp, Homo sapiens
  misc_feature (37)..(37): n is a, c, g, or t
  misc_feature (145)..(148): n is a, c, g, or t
  misc_feature (160)..(161): n is a, c, g, or t
  misc_feature (176)..(176): n is a, c, g, or t
  misc_feature (205)..(208): n is a, c, g, or t
  misc_feature (210)..(211): n is a, c, g, or t
  misc_feature (214)..(217): n is a, c, g, or t
  misc_feature (219)..(219): n is a, c, g, or t
  misc_feature (224)..(227): n is a, c, g, or t
  misc_feature (334)..(334): n is a, c, g, or t
  misc_feature (404)..(404): n is a, c, g, or t
  misc_feature (463)..(463): n is a, c, g, or t
  misc_feature (778)..(778): n is a, c, g, or t
  misc_feature (914)..(914): n is a, c, g, or t
tacattaaaaaaaaaaaatataaaaaaatataaaaantaaaataactaaaaaaaacatactaggattgacattctgtgtaactgctataaaccctttattaaacgctcctttacatttaatgcgccctatccccccccccccccnnnntaaatcttaaanntttttaaaaacaatncttaaatacaaatctgttaaagagggagnnnngnnggnnnngnttttnnnnttcttttatgcccaaagtccaatttgaggcagtttacattatggctaaatctttcagtctcaagactcagccaaggttgtgaggttgcatttgatcatgcatttganacaagttcataggtgattgctcaggacatttctgttagaaggaatcgttttccttacttttccttacgcncaagagttccgtagctgttcaagtttgtgtttcaactgttctcgtcgtttccgccacangtcctcttcagaaatgagcttttgctcctctgcttggacggacaggatgtatgctgtggcttttttaaggataactaccttgggggccttttcattgttttccaactccgggatctggtcacgcagggcaaaaaagctccgttttagctcgttcctcctctggcgctccaagacgttgtgtgttcgcctcttgaaattctcctcggtgtccgaggacctggggctggtgcattttcggttgttgctgatctgtctcaggactctgacactgtccaacttgaccctcttggcagcaggatagtccttccgagtggngggaggcgctgcgtagttgtgctgatgtgtggagacgtggcacctcttgaggaccagtgggctgtgaggaggtttgctgtggcctccagcagaaggtgatccagactctgaccttttgcaagagcctgctcttttncacagaaa

SEQ ID NO: 538814 - DNA, 997 bp, Homo sapiens
  misc_feature (333)..(333): n is a, c, g, or t
tgggctccagtgtcattggctggactaaaaccaccccggttgaactgttgtcctcctaattcctcgcaaatcgctgtgcaaggtgcctcaagtggccgtccccgttcccctttccaatcaatcgtgcggaacagcggaaggtcccgggcggtttcacgtgcgtgtcctcaacatcttcgatccgccaatctttgctcattattttctctttgtgaaaacatataaggtctctcctttgtgtgagaggccaaacagaagaggaacaccggggaacaccatcttataaaacacccccctattctctgtgtgggggagagatggccctttgtgtcnccccgagggcgcgcgcggccctcttttctctctcccagaagaaacaactaaaacagacaacacgacgtatatatatctcccgtttctctccctctataacacctctattatgttaataacgctctctcgcagagaaaatcttcgcccgacgagagaggggtcgtcttcttctctcttcttcacagcgctctctgcaggcgtgttgaggagccccctctcctttgttgtgcgaaccccgcgtcgctattcttcatcctagcggaggggcggggggcccaccctcatttggttgctgttcccccctcgtgcgccgcgccccctcctaatgatgatttgttgggcggtcggtgcgtgcgacgacccccacccaaacacatcttttctgtcgtgtggaggaggggggggggggagaaagaaaaaacaaccccccccccataatgaaaaaaaacaacccccccgctacaaataaacagggggctaggtaggagcagtgcgtctttgctccgcccgccccacatggggtggggggggtgaggctgtttggtgagccccccccccccccacaggtgggggtggggtggggggagaggagcagagcaaccacacaaccccccccgaggtggggctggggagcttaccacgatgagcaccagcccaccaacct

SEQ ID NO: 538815 - DNA, 304 bp, Homo sapiens
tgctgcaggttatctagaggatcccggtggacacggggtctcagttcgacagttgttccgggatgtgggaagagcaagagagaaatgatctaagtgatggacaaggaatcttgaaaagccagaccttcactgacttggctgacagtgacacacatttgtgctttactagtgacaagaacatgaatcttgtgacaaaggtataacaagccacgtggtcaaagaagtacctggcacagcaaaggccaaaagcagcatgcaaggctaagctgggcaacagtgggcagcatgaagcctggatgaatat

SEQ ID NO: 538816 - DNA, 235 bp, Homo sapiens
  misc_feature (88)..(88): n is a, c, g, or t
  misc_feature (95)..(96): n is a, c, g, or t
  misc_feature (125)..(125): n is a, c, g, or t
  misc_feature (158)..(158): n is a, c, g, or t
  misc_feature (222)..(222): n is a, c, g, or t
gtgtgacagacacccacagggctggactttgttcaatacaaactggcagagaaatttgtgatacaaggcgaggaggaagtggcctctnaccatgnngcagcattccccattgcagttgtggcatncgggatctgggagctccaccccagagtgggggncctcattcttgctcatatacataagaagtgtccttactctgttcctttctatcccacttttaangggggattggctt

SEQ ID NO: 538817 - DNA, 1044 bp, Homo sapiens
gtgggtgccacggccctgtgccgtggcgaaagatgccggcggatgccggaaacccgctcccggagacgcctgcctcgtcggatcccgcgcgcgggcgtggaccgggcggccggcagtcatgacccgtgtatcacttcggtgaatctgcttcgctcgttgcctagcttccccttacttcatcaccatacacagttggcagcggtcactgttgtagtatgcgtggaaggggcgctggggcggagaaggcgcgggagcccgggcccgacccgtacacctccacgacttcatccaggtccgcagttactaatcggccattctgggaaatgcgtccaggtcgtggagttcagcctactctctatagctcccagacttctgacaacggttgatgggccaccctgggaatggccacctgtgtttctgggacccctcagagtctcgtgccaagatcacacgggaccccagtcagccaaaaggtcataccatgaggccacgcgaggccagcccagaagcgaggccgagccataggacgcaccccccatgtatggtcccaacacgcctgtagtcacaagcgccatcatgcgcccttgcattgcccacccagcgcctgtgagcttgcctcatccaccaccacggcatcaacctccatcaagaccataccgtgcacacacgccaacgggccccgtagttacaccctcctatctccccaatcccgcgcaaccctttcccgttccgtgcacactcgttggcgctgaccgccttcggcgggctgcccctctatcgtcgcgagtggctcctcccagaccctctatctcacgtgtcaccccgtcctcctccgccctccgccacgcgtggtcccttcaaccgtcttccggcctcgacgacggctgcatggcgagacgccgcctgtttgcgagagcccccgcggtccttgctggaactacgtcctcgagatgggcttggccccttggggggaccccataaccggacggtctgcctccagcccgtggttgcccgctcttcggcactcctatagccgtttcccac

SEQ ID NO: 538818 - DNA, 1080 bp, Homo sapiens
gtcactggcttcaggctgacaggaggggaaacattcaatatacctctcttaagctcttactcttggcccacaagcacgccagattcccctatcttccaagagtttgctctgacgttgtttcccatttatatcagccccttctctgcccagctgctttaatgactatgccccctgtattgcttctaatcccttgctttatgtttcctctggctgtactttctaagcatttcatttaagctaataatactttgtgactggttaactttactgtgtccacttggctgggccacctgtgcccagactgtgctgggtgacacgtcatccctggactgctcctgtgcaatgtcgtccccggcatgcgcggttgcatattcagtgcactttcgcagttcaaggactgaccccttctcctccaatacatcgtggcgctggcgcccttggtccttaactccagcctccgaaggaacacttggaaaaacgaaaccacgacacttcctggaacccatcccacacagcacgcccacacggacagcgacccccttccttgcccccaccgccaccacccaccccccttctccccacacctctaactccccccacacacaccccccccccgctctcccgcacccccacgacccttgggacagcaccgtactgcgcgcctggggcccaaaattacccggccccctggcatgcgggatccacccccgggcccccacaacccctcatcaggggccagccaacgcgggccaccccggcaaggacacccctcggcgcccgaacatcggcggagacgtttccccacgatgcgccacacgcggcataccccgacgccggcacaccgcaacattcccggcaaaccccaaacaccccaaagctctcgccctatggcggccccccccataaccgccccccaaccccggacgggcccggcgacacaccaacacccccccgccgcgggcatccccatgcccgttcaccccctccaaccaccacgcggcctacccccagcgacaaccgacacgccacacaaccttctacaggcgcgcccccaaccgacgagccccggccatcacgggg

SEQ ID NO: 538819 - DNA, 1136 bp, Homo sapiens
  misc_feature (474)..(474): n is a, c, g, or t
  misc_feature (508)..(508): n is a, c, g, or t
ttgtggtgttttttcctcccttgttgccacacatctctttttaaggtttaccagggggccatattttttcttagaagaacgtgggggtcttctcacgctctctctccaaggtgttttacagaggattattgggtttatttggggggtgttttaaagaaaagaaaaaaaaagattttgtggaaagaaaccgtgtcccctatcccgggcctttcccctagtgttgggcaaaataaacacgtgttccgtgtttataatgtaggatcatatttttatttaaaaacctttttttccccccccttttccacccgccccctcttattctaggacctcgttttgtaaccaccgattttttgacacacggttataattgtcacacggatcccaaaattttggcctttttacaccaggataatttaggtaataaagaaactttgcctctagcccaggttttgccccagaaaagtccccagattnccttctgggatcccacccctggccttctcctggnaacttctgagacctgcttgtggaaggaattgcgccaatgagccttcacccttctggagagaattatagggttctattggcgcaagggaaaaagggtgtgtttcacccactgagtaaaccctatgtggccctcccactaagaaggggtctttgaaagaaatttccacgtccgagttttctttgtgtgtcacgcctgagctttcctctagctgagttgttccccaccttggcacccttctgccaccctcttggcacctagagatctccctcgaggacccccccttttcttcaaggctttctccctcccctaaccacgccggttcagggctttggagccaccttcttttgtgaaactcccacgattatttataagacgagaaagtacccagaccacgagaattctttctagcacctttgtaaaacaccacgtgaataacccttcttggagtatttttggctttatataaaaccaggtgttttaattgtaaagtataagtgccacttagaaaatgcaccacgggcatattctttgtttaagtagatttttcaatgttttacagaattacacttttccaaaaaaggtttttataatgaagttgtttattaaaaacttttgaatgatgtgttta

SEQ ID NO: 538820 - DNA, 424 bp, Homo sapiens
  misc_feature (424)..(424): n is a, c, g, or t
ggagccatgtggctccggccgtgcgcgggcctcggaccctcagagaggcgagggttcgaagggcacgagttcgaggcaacctggtccacatggtcgagacagacacaacacacgagagcacaaaattttgtggggcgcctgtcgaccctgggaaaggttctcacaaccattgtcggtggggcgcggggggccccagtacgggtttagtggcacatgggccacaagggcggttccacaggaactgcgggcacatggcaacggtgccggtgggattcctcacccgcaataaaaaacggccgggggggaaacgcgcgcgcgttcgtgaaaccaatcacagagggcgaggcacgagggcaacaaaaggggggctcatacacaggggcgtcccaggagggcggcaaatcaatgtacgccccgacgtgan

SEQ ID NO: 538821 - DNA, 438 bp, Homo sapiens
cgctagcggtcgcccttatatatttctatactagcttacctacttatacaggtaaaaataaatctataaatcttctaaaagtatgtaataatctatctaataaccctatctatctctattctttacttcgcctatcccgtacttctgtcttccagtaatccactatcaaacttctatctatctccaaatagtatcatacctaccactcccaattaatctttccattttcgtactagcgtatagtaaatgcgttaactaggctttaaatgacgcaattctccctgcgtcatggatttcaaggtcttttaatcacctatcggtttaatctctttttaaaagatcgccttcaaattattttaatcacctacaactatttaaactaaactaaaagctgtataagtcaccttcattataatctaaaaagcatagccctatact

SEQ ID NO: 538822 - DNA, 257 bp, Homo sapiens
  misc_feature (70)..(70): n is a, c, g, or t
  misc_feature (99)..(99): n is a, c, g, or t
  misc_feature (112)..(112): n is a, c, g, or t
  misc_feature (185)..(185): n is a, c, g, or t
  misc_feature (190)..(190): n is a, c, g, or t
ctttctccctggggttttcacaagaagcccaggggtcccgtatcaaggaagctgaaacaaggccacacanaagacggaactagtaacatgatccagagncgcgtggtaaggngaggagagaaggcctcaaactatgggcaatctgaacctccacaggtaggcatcgcgtcattcctgatagagcntgcgngagttttgtccagtgtgtccttatggaggtggagggactgctgggagggactctccccaaggcaggt

SEQ ID NO: 538823 - DNA, 135 bp, Homo sapiens
  misc_feature (19)..(19): n is a, c, g, or t
  misc_feature (37)..(37): n is a, c, g, or t
  misc_feature (107)..(107): n is a, c, g, or t
  misc_feature (129)..(129): n is a, c, g, or t
gcagtgaggtgtaatgcancttcatcactttattcanatcttcaaaatagtctttattctacatttttagttttctccttccacggtgttatgtgcaccacagtgtngagagagactttcttttctgancttcca

SEQ ID NO: 538824 - DNA, 704 bp, Homo sapiens
  misc_feature (158)..(158): n is a, c, g, or t
tgtaaagatctctctcccccgaggtgctggcacttggttcctttttaaccagagtgttaggaacccaaacctaaattttctggttggaccaatcaagagattaagttaactgctcatcaatgttgggtcctgggggtcccagtttgggttcgcaggtnatgtgcccctttctcgtcttgagcccagagtggaccaatcgaaagcctaagtgcctattaccctcgcttgtcctaggtccctgggtggacccatcaggaccccaagtgatagtggcccagtggtcttttagatcctcagtagaacagtccagaagccttagagccagtggccccttaataatctgggtctcacgggaccagctaggggtccaggtttcagtcagtaaataagagtggtccacgtcctaaaaacccctctcctttacaaagacttgtgatgctttgggggttttgtggccaagccccacccttttctggtcatggtacccgtacagcgtttatggccccagctcaaaggggggctttcgtgtccccctgtgcggtcagtgttttcagaaccccctctttcccgggcccacttggctatttacttatttatttattgtgtgccagtgatggtgggtgggggatgggccttcccccccccctccccccctgttgtgacctgtccttccgtacttaataaagtgggggtgggagtgttta

SEQ ID NO: 538825 - DNA, 860 bp, Homo sapiens
agagtccggttctgggacagctgggagacagtggtggtgactgaaataacttaccaaaggaaagctatttgcgaactatcttctccagcggagatggtcaagtgtgcttgtaacagagccagatctgttgccgtatctcccaggattgggctcttgaggttaaaagggttgtcattcccaaagccttattcgactgcagggatcatcaggtcggatgagtctcatgtggctgtgcacctccagatatatgctctcgatacagtgtggcctgatgaaacctagtgggacccttggacctcaagatcagaggttccagcttcctgggaagcataggtccggagtggtcagctcagtgggatctgcttcaggcagaagaaaagcctggtacataaaattggcctgatgtgctagtcggaacctttatcacagtgacaggacatgagttctgtgagggcccaatatgtgatgtgaatcccaggggacatgatgcaccggttgtaacatgaaattaccgtgcgaaacttagtttgaaagggcagagtagagtgtgcatgacagactgtcccgaattggtgcgaacgcttcgagtcctggtttccggaagtagttgtggcaaactatgtgcgcctgtgcccagacaactaagattgttgcgtgttggcttgggcagtctcactgcacgggacagtcccttcacaggtcccagggggcgagaatagccggctcggcggggtggggcgatatggcccactgtttgggttggcggtcacaccctttgacgtggcgcacccttgttcttgcgggcggcgccctgccacggggtctatcgcggtatacccctctgttggggcacttgtcct

SEQ ID NO: 538826 - DNA, 508 bp, Homo sapiens
  misc_feature (12)..(12): n is a, c, g, or t
  misc_feature (15)..(15): n is a, c, g, or t
  misc_feature (22)..(22): n is a, c, g, or t
  misc_feature (25)..(25): n is a, c, g, or t
  misc_feature (43)..(43): n is a, c, g, or t
  misc_feature (46)..(46): n is a, c, g, or t
  misc_feature (91)..(91): n is a, c, g, or t
  misc_feature (99)..(99): n is a, c, g, or t
  misc_feature (107)..(107): n is a, c, g, or t
  misc_feature (128)..(128): n is a, c, g, or t
  misc_feature (130)..(130): n is a, c, g, or t
  misc_feature (132)..(132): n is a, c, g, or t
  misc_feature (267)..(267): n is a, c, g, or t
  misc_feature (356)..(356): n is a, c, g, or t
  misc_feature (368)..(368): n is a, c, g, or t
  misc_feature (434)..(434): n is a, c, g, or t
  misc_feature (483)..(483): n is a, c, g, or t
  misc_feature (487)..(487): n is a, c, g, or t
ccgacatttcanaanactgtantangaatcacagacggcctcncanagtgctgggattacaggcatgagccaccgcgctatggacactgtntctgaganaatgagtnacagggcctttggtacctccncngnatctgctctgccccttgtacttctgctttcctgattgggtggggaagtttaggtgcccaggcacccaaggatcaaagcatcttatggactttaccatcctcctcttcagtgtgattagagaggcacagagcagcngtaaagccgttagtgctcccttcaccaccccttccatggctggctgtgccttctacgatgcacttcccaggaacgtgtccactgttccnttcagctgcttnaccgcaaatactcttgccagtttccctcggacttggaaagccgctgtccacgccttgcgcaaatanagctaaaatccattgtatcagtttcctgggatgctgtcagaaattaacntcancttgaaatggtcgccaatccg

SEQ ID NO: 538827 - DNA, 159 bp, Homo sapiens
atcctcctcctcctgcttatgggatgtgactaatgctgttacatccatccatacatgtgaaatactactcggcaacaaaaaaaagtgaactaccaatgcatacaacactgatgaaaattaaacaaaccaggagtgaggaggaattctgccgtggtacct

SEQ ID NO: 538828 - DNA, 1613 bp, Homo sapiens
tgatgaagaaggacgcgctgacgctgagcctgagtgagcaggtggcggcagcgctcaagcctgcggccgcgccgcctcctacccccctgcgcgccgacggcgcccccagcgcggcaccccccgacggcctgctcgcctctcccgacctggggctgctgaagctggcctcccccgagctcgagcgcctcatcatccagtccaacgggctggtcaccaccacgccgacgagctcacagttcctctaccccaaggtggcggccagcgaggagcaggagttcgccgagggcttcgtcaaggccctggaggatttacacaagcagaaccagctcggcgcgggcgcggccgctgccgccgccgccgccgccgccggggggccctcgggcacggccacgggctccgcgccccccggcgagctggccccggcggcggccgcgcccgaagcgcctgtctacgcgaacctgagcagctacgcgggcggcgccgggggcgcggggggcgccgcgacggtcgccttcgctgccgaacctgtgcccttcccgccgccgccacccccaggcgcgttggggccgccgcgcctggctgcgctcaaggacgagccacagacggtgcccgacgtgccgagcttcggcgagagcccgccgttgtcgcccatcgacatggacacgcaggagcgcatcaaggcggagcgcaagcggctgcgcaaccgcatcgccgcctccaagtgccgcaagcgcaagctggagcgcatctcgcgcctggaagagaaagtgaagaccctcaagagtcagaacacggagctggcgtccacggcgagcctgctgcgcgagcaggtggcgcagctcaagcagaaagtcctcagccacgtcaacagcggctgccagctgctgccccagcaccaggtgcccgcgtactgagtccgcgcgcggggcgcatgcgcggccaccctccccaaggggcgggctcgcgggggggtgtcgtgggcgccccggacttagagagggtgcggccctggggaccccccctccccgagtgtgcccaggaactcagagagggcgcggcccccggggattcccccccgagggtgcccaggactcggaaggggcgccccggactcgacaagctggaccccctgctcccgggggggcgagcgcatgacccccccgccctcgcgctgcctctttcccccgcgcggccgccccgtgttgcacaaacccgcgcgtctcggctgcccctttgtacaccgcgccgcggaagggggctccgaagggggcgcaagcctcaaaccctgcctttcctttacttttacttttttttttttttcctttggaagagagaagaacagagtgttcgattctgccctatttatgtttctactcgggaacaaacgttggttgtgtgtgtgtgtgttttcttgtgttggttttttaaagaaatgggaagaagaaaaaaaaattctccgcccctttcctcgatctcgctcccccttcggttctttcgaccggtcccccctcccttttttgttctgttttgttttgttttgctacgagtccacattcctgtttgtaatccttggttcgcccggttttctgttttcagtaaagtctcgttacgcc

SEQ ID NO: 538829 - DNA, 120 bp, Homo sapiens
gttagtcaagggcatccttctaccattgctctcagtgacgacgaagtgggattcctattcagataatccgttgctcctgttcactatcacactgctgctctagatactctgtatgggtct

SEQ ID NO: 538830 - DNA, 213 bp, Homo sapiens
tagagtgaaaagttaaatggtaggtactgggatagagatgaataggatatcgtgagcatagtgcaggtgcaacaggtggtgagctatgcagaatataatgagaacgatgggttaactgctggtgagggagaggaagtaggcctgtgctggggctgaggatgatggagatgtctcgggctgagccggaaattgctagccactcggagacacagc

SEQ ID NO: 538831 - DNA, 153 bp, Homo sapiens
agtgcataacgaatgtccagtgccatacacactgaagagtaaatagagtgcggcctttcccattacagggaactggtaagctggcatccaagagcgctaattaccagtgctctagatactacacacagatagcagtcatttaatgggaactga

SEQ ID NO: 538832 - DNA, 214 bp, Homo sapiens
tgaggtgtgggtggaagagcaagtttactctgtcgccaggctgagtgcatcatggctccatcttccaggtaatactcccacctgtctcctgaatagctgggactacaggcgtacgccaccatgcttggctaatttttgtaattttttgtagagaaagggttttgccatgttacccaggctggtctcaaattcctgggctgaagcaatcctcctg

SEQ ID NO: 538833 - DNA, 1307 bp, Homo sapiens
tggaaacaaagtctcgctcggtcacccagggctgggatgtacagggggctctattcttgggctcactggcggagtctccgcctcccgggtgttcaccgccatttctctctggctctcagctctggccaatgtgggctgggagatctggcaggcgcccgccaccacacccgggctaattttttgggatatttttaggataagaagcacgggggttccaccctggttgggccagggatgggctcttcgatcctcctgtgaccctctggtgatccaccttgcctctcgggccctcccaaggggcgggaatttccagggcgggtgacgccaccgggcgcccgggcctataaattggagatatttcttataacgcacaataaaagtgttacacggggggtgggcccatattttggcgcaatatttattttggaacaccttgtggacaggggaataactctggagaaccacggggttccgggagactgttcaatctggagaatctacggcgaggcattggggagatttaatctctccaaattctcttgggggaaaaatgtctggcgctataaactacgtgctcttgacttaacctctttgggcgtttcttaaacaccaacacacacacacaacaaaaaaacaaaaaacaaaaaacaaaaaactcccagaggaaggaaacaaaaaaagagacagcgaggggggacagaaacaaaaagagagacaaaacagaaaggccgccccaaccgggtcagcaaaaaaccatgagaagccttcagacaccccacattctcttgctgcacccccaccgggggcaagaacaaccgcaggcggggcccccccaatgaaggaggaggagacaaaaacaatacagaaaacagcgcgagttataccctctttaataaacatcttcaccagaacaacacacagccaacaacgaagacgacccagacgcaaacaatcacaggacgacaccaccacaacaactacatgtacacccaaaaaccatcacgagcacaacacaacaacgaatcacaaaaagaaacatcatcataaatatatatctctaaagaaaacaaatactatgactaaacacacaataacacaatcaataaatcaaaaaaataaaaacataaacaaaaaaataactaaaaaacaaacatcaaacccataccacactcacagaaataaaaaaaccatcagctacatcacacaacaacaacaacaaactacaccaaaacatcatgaacaacacataaaacacacataaaaaaaacatacacctcaacaccactacagcatgtactactaccccg

SEQ ID NO: 538834 - DNA, 580 bp, Homo sapiens
tcgcctcccttccaatcacccccacccccctcgccaacaatcgcgactaatattaacaaaccttaaacttttccccacagcctcgcacccccaacgagggcatctagcgggggacagcgagggtggggggcagggggtcgcgagaaaagccccggaaaggcactaaaatgccacttttgattctgccctcgctgacaacagccgcaaggaccctctccctgcccattgacgcggggctgtgagcgtctggggtcccagcaagtgaggagagaagaggttcggggggagggggaggaggaggaagatcagaaggcacccccagccacctccaccgcctaggcagcgacaaactccccgccccctccccccaaaaagtcgccaagctctcactcgtccagagtccgaggtaaacaacgagcaccacaatggcactaggactttgggggaaaagaaacccagaaaccccgacaaaactgatcaggagtttcccgaaatgaaagaggggggcgggcagcgtcctctagagtcgccctggctttcggctgggcccccgggcaggatagagggcggccgcaagctt

SEQ ID NO: 538835 - DNA, 151 bp, Homo sapiens
ttctcgaacacgctcgtggtcgttgttagcggtcccctctacctccccgatctgatgaccagcaggctgtccatcccaggacagtctcccttatactttcctaggtaaggcctttctctttgcgaacattgcttgccctgaagagggaggc

SEQ ID NO: 538836 - DNA, 798 bp, Homo sapiens
ggggttggggatgtaatgaaatacccccactgcgaggtaaaccaggtctgctgttaataaaaaatagcccccccttaaaggaaatcgcctcccccccggcaggggaaaagtggcttattctggggggagggaagggtttcctgtttagggacttggcagttcccccaaagaaaatttttggaggaaggttttcttattttttggtaaaattaaaaaggttggagggcctggccacgtcttttatgggaaaatgaaatttttgttcatataagacaagtgggaagccctaggcattaaaacgccgggcgggaagctttttcaggttcaaggtgggttaattttccagattgggggaaggggcgccggtaaaaggattagaggatctggtggccttggggggtttgaaagggttaaccggccaagcggtctatctaaggtagccaagtccttgtcattaagagggggcgcagggattataggctttagctaagggattggtaatgcctgaggggacttctttttgcaaggttcacttcctggcgttatcccctttgtagttattatggcagccaaaagcgggttcattcaaccaatagcagggagggtttgcctaacgggtatcatttccgaaggacacctattcatgcacgtaattggatgcgaccccctagcaagatctcgcattaacggtccctaaacacttatcatcttcgctgttgtaagtgaaacgagggatcctaggaatcgctgtcgccttaatgcaagcaaacgttttcactcttctagtaagcctctacc

SEQ ID NO: 538837 - DNA, 630 bp, Homo sapiens
  misc_feature (102)..(102): n is a, c, g, or t
cggggccgggtgtccccggtgtgtggcaggggtttggcgggttcctctcccccccggcgcggttgtagttttcggtttttctggcccggttataatcggcgnggggggtgcgcaaggggccgggggatccaaaaatggggggcgcccttgttttttttccccccccttgtagcggttgaatttggaccgctctggtgtgggcgcgggaaaatttttcccccaaggggccaaggccggtgggggggggttccccctcccattgggggattcccgggggggtgtcccaacgggggcacgaggggggggcccttccccctctccgggcccccttgggtggggaaaagaggttttgggaaaccccaacttttcggcgggggggttccccccccgggggggggggtgcccggccccaaaaggtttccccggggggggggttttaggggaaaggggccccccccggtccccgggtttaggggggccccccccccccctttggggtttgggcccttttttccagggggggccccccccattggggggcccccgggttttttttcccccccccccccccccccccttgggttttttttttgttttgggggggggggggggattaattaagggggtttt

SEQ ID NO: 538838 - DNA, 862 bp, Homo sapiens
  misc_feature (9)..(9): n is a, c, g, or t
  misc_feature (141)..(141): n is a, c, g, or t
  misc_feature (149)..(149): n is a, c, g, or t
  misc_feature (251)..(252): n is a, c, g, or t
  misc_feature (272)..(272): n is a, c, g, or t
  misc_feature (276)..(276): n is a, c, g, or t
  misc_feature (278)..(278): n is a, c, g, or t
  misc_feature (282)..(282): n is a, c, g, or t
  misc_feature (309)..(309): n is a, c, g, or t
  misc_feature (314)..(314): n is a, c, g, or t
  misc_feature (317)..(317): n is a, c, g, or t
  misc_feature (323)..(323): n is a, c, g, or t
  misc_feature (351)..(352): n is a, c, g, or t
  misc_feature (355)..(355): n is a, c, g, or t
  misc_feature (370)..(370): n is a, c, g, or t
  misc_feature (387)..(390): n is a, c, g, or t
  misc_feature (392)..(392): n is a, c, g, or t
  misc_feature (398)..(398): n is a, c, g, or t
  misc_feature (406)..(407): n is a, c, g, or t
  misc_feature (423)..(424): n is a, c, g, or t
  misc_feature (426)..(429): n is a, c, g, or t
  misc_feature (431)..(433): n is a, c, g, or t
  misc_feature (440)..(440): n is a, c, g, or t
  misc_feature (443)..(443): n is a, c, g, or t
  misc_feature (475)..(475): n is a, c, g, or t
  misc_feature (506)..(506): n is a, c, g, or t
  misc_feature (512)..(512): n is a, c, g, or t
  misc_feature (522)..(522): n is a, c, g, or t
  misc_feature (537)..(537): n is a, c, g, or t
  misc_feature (544)..(544): n is a, c, g, or t
  misc_feature (595)..(595): n is a, c, g, or t
  misc_feature (602)..(602): n is a, c, g, or t
  misc_feature (626)..(626): n is a, c, g, or t
  misc_feature (657)..(657): n is a, c, g, or t
  misc_feature (705)..(705): n is a, c, g, or t
  misc_feature (717)..(717): n is a, c, g, or t
  misc_feature (719)..(719): n is a, c, g, or t
  misc_feature (725)..(725): n is a, c, g, or t
  misc_feature (746)..(746): n is a, c, g, or t
  misc_feature (756)..(756): n is a, c, g, or t
  misc_feature (764)..(764): n is a, c, g, or t
  misc_feature (766)..(766): n is a, c, g, or t
  misc_feature (769)..(769): n is a, c, g, or t
  misc_feature (777)..(777): n is a, c, g, or t
  misc_feature (796)..(796): n is a, c, g, or t
  misc_feature (799)..(800): n is a, c, g, or t
  misc_feature (834)..(834): n is a, c, g, or t
tagaaactntcaatacagaaatactcctagcaaaccattgaaaagtggtgtttgtttgacaggaatttcacatcaggtccactaggacgtcggtccagccctgagtccccacccccaccccataacccccattcatgcgtnttacagtnggacaggcacactgtcatgaccaaaatcaccccaatacctggggctgatgtccagctgccagaagccatgggggcttctagcctgggctggaagccccaggnncccccctcttattgcttgantttncnagcnctccctcgctggcctcgcctgatctcncagangcnagcccnccccccgcccaccggcacaggtgccccnngcnccgtttcttcctctngggccctttgcttccannnntnttcctnggtcggannccccgcttctgccccnncnnnntnnncccccgnccngtatgaggctgtcctgctggttctagcccttnctccccctcctcagcaccctccttccctggnccatgnggctcccccnccccatcctcgttgntccaaanttatttcctgtcccagaatcaccagcttttggcagtttgggcaagtggagngtcggtnagaagaaacccccagtttttattnattaaaaacccatccacagtgctaacatggnaactgcagtgtgatctgtgatgtgatttttcaatcagggctctccctngaaatcgcctangnaagganatctaaggaaacacatcctgntgttaaactnggttcttncnagntcacttgntccctgtagttggaggggnatnnggtgtccgggctgggggtcggggagcattcatcnagtgcagatgaccctggttgttctccag

SEQ ID NO: 538839 - DNA, 951 bp, Homo sapiens
  misc_feature (3)..(3): n is a, c, g, or t
  misc_feature (14)..(14): n is a, c, g, or t
  misc_feature (24)..(24): n is a, c, g, or t
  misc_feature (84)..(84): n is a, c, g, or t
  misc_feature (214)..(214): n is a, c, g, or t
  misc_feature (236)..(236): n is a, c, g, or t
  misc_feature (294)..(294): n is a, c, g, or t
  misc_feature (307)..(307): n is a, c, g, or t
  misc_feature (313)..(313): n is a, c, g, or t
  misc_feature (315)..(316): n is a, c, g, or t
  misc_feature (321)..(321): n is a, c, g, or t
  misc_feature (325)..(325): n is a, c, g, or t
  misc_feature (341)..(341): n is a, c, g, or t
  misc_feature (356)..(356): n is a, c, g, or t
  misc_feature (360)..(360): n is a, c, g, or t
  misc_feature (365)..(365): n is a, c, g, or t
  misc_feature (377)..(377): n is a, c, g, or t
  misc_feature (387)..(387): n is a, c, g, or t
  misc_feature (392)..(392): n is a, c, g, or t
  misc_feature (398)..(398): n is a, c, g, or t
  misc_feature (407)..(407): n is a, c, g, or t
  misc_feature (419)..(419): n is a, c, g, or t
  misc_feature (425)..(425): n is a, c, g, or t
  misc_feature (433)..(433): n is a, c, g, or t
  misc_feature (435)..(435): n is a, c, g, or t
  misc_feature (442)..(442): n is a, c, g, or t
  misc_feature (477)..(477): n is a, c, g, or t
  misc_feature (536)..(536): n is a, c, g, or t
  misc_feature (547)..(547): n is a, c, g, or t
  misc_feature (559)..(559): n is a, c, g, or t
  misc_feature (563)..(563): n is a, c, g, or t
  misc_feature (565)..(565): n is a, c, g, or t
  misc_feature (593)..(593): n is a, c, g, or t
  misc_feature (596)..(596): n is a, c, g, or t
  misc_feature (598)..(598): n is a, c, g, or t
  misc_feature (601)..(601): n is a, c, g, or t
  misc_feature (612)..(612): n is a, c, g, or t
  misc_feature (614)..(614): n is a, c, g, or t
  misc_feature (623)..(623): n is a, c, g, or t
  misc_feature (642)..(642): n is a, c, g, or t
  misc_feature (651)..(651): n is a, c, g, or t
  misc_feature (653)..(653): n is a, c, g, or t
  misc_feature (655)..(655): n is a, c, g, or t
  misc_feature (674)..(674): n is a, c, g, or t
  misc_feature (689)..(689): n is a, c, g, or t
  misc_feature (694)..(694): n is a, c, g, or t
  misc_feature (697)..(697): n is a, c, g, or t
  misc_feature (948)..(948): n is a, c, g, or t
gangtttacaattnaatatttgancagaaaatctgtacacattatcatttacagcaattttacatggtaaattaactgattgtnttaaaatgttctttctaaatcgctccactctgctgccctaactcttggagtattctaaagagtctaactagtgctatttacaagtaccaaattaagaccatataacttacataaaactcattagtttaanagctcaatttaacaatgtctgncttcagaatgctgttatgacatattgataaaaggccaaaaattaagtttccataaagntattaaaggtgtntgggantnntttgntgcntataagagtagctggntctcaattggtcccntggnttacntggttaaatccnaaacagtccncctgncaagcnataactgangatgcctgtggnaaaccngttatgtngncgtgtcngcttaccctggggggcaacaggggttacgccattnggctcgctgggggggggcttcaggtgctttcttgggcttggctccctttgccatttagnacatgccaaanatactccctatncctnanattggtgtttcttgggggggtggggccnagntngtncggcctgggcngntgggctgcnaacgggggaaccgcccggnaccggtgcncncncctgcttggggcctggccngccttccgcctggtnggggnggngctgtttctcttcctggccgccagggggcagttagctcatggctgagaagtctctcaagggttcagttaaacaagcttccaaatcaaactcatcctccacttgactgtccatgtgtctcaccttggtgggtgtgccagagtacacatcaaagtcatcctgagagctggtctggggctcggagctgctttctgcagattcaaggtctacagggtgtttttcttgcaaatcacatccttcttccgctgggggntcc

SEQ ID NO: 538840 - DNA, 473 bp, Homo sapiens
gagctcggcacctggtgacccgtatccctttcagacagagaatcatgatagctatgttaaggacacttaaataactcaagctaacacagagaaggaattcagaattctatcagataatttaacaaagagattgaaataataaaaaagaacctagcagaaattctggagttgaaaatgcagttgaaagactgaagaatgtgtgttttttaatagctgaattgatcaagaagaagaaagaattggtgagcttcaagacaagctatttataagagacaaaataataaagaatgaaacatgcctagaagactctagaaaaatgcctcaaaagggcaaatctaagagttattgaccataaagaagtggtagagagaagtagaggtagaaagttttttcaaaaggaaagtaacagagaacttctgagacctagagagagatatcaatatctataactttctaagaaagttatggaactc

SEQ ID NO: 538841 - DNA, 1041 bp, Homo sapiens
  misc_feature (100)..(101): n is a, c, g, or t
  misc_feature (103)..(103): n is a, c, g, or t
agcggctcacccccaggtcctggggcagcacagggtcctccctggcccaggcgcccggtggccgagagcctgcccgcgagctcaacgctgctcaacggtnncngtccttggctgtggctcctgcgctctggctgagccatgttccttctcctcgccctcctcactgagcttggaagactgcaagcccacgaaggttctgaaggaatatttctgcatgtcacagttccacggaagattaagtcaaatgacagtgaagtttcagagaggaagatgatttacatcattacaattgatggacaaccttacactctacatctcggaaaacaatcattcttaccccagaactttttggtttatacatataatgaaactggatctttgcattctgtgtctccatattttatgatgcattgccattaccaaggatatgctgccgaatttccaaattcatttgtgacactcagtatatgttctggtctcaggggatttctccagtttgaaaatatcagttatggaattgaaccagtagaatcttcagcaagatttgagcatataatttatcaaatgaaaaataatgatccaaatgtatccattttagcagtaaattacagtcatatttggcagaaagaccagccctacaaagttcctttaaactcacaggtgactgtcatcattctgatgttatgacatactagaacattgcctgtgtagttttcttgtaaatcatgaaaggaatttagttagctgttgagtaggaatattaaattttatgtatttttctacctttaaataaaacattgaaacttcatctaaaatattcggaaagttacatatttcaagcttaatattttatgatgtattatgtaacattaatttttatatttttttcaaacaaaatgatactatttgaaaaagtttagaaatgcagaaagaacagagtcacttgttattctagtaccttggtaaattacgtttaatattttggtatatattctaactactacttgaacatatctttctaaaatgccagccatttgcatg

SEQ ID NO: 538842 - DNA, 128 bp, Homo sapiens
cacgagggggcccatacccggccgtcgccggcagacaagagtggacgggagcggcgggggcggcgcgcgcgcgcgtgtggtgtgcgtcggagggcggcggcggcggcgggggtgtgtggggtcctccc

SEQ ID NO: 538843 - DNA, 1075 bp, Homo sapiens
  misc_feature (100)..(101): n is a, c, g, or t
  misc_feature (103)..(103): n is a, c, g, or t
agcggctcacccccaggtcctggggcagcacagggtcctccctggcccaggcgcccggtggccgagagcctgcccgcgagctcaacgctgctcaacggtnncngtccttggctgtggctcctgcgctctggctgagccatgttccttctcctcgccctcctcactgagcttggaagactgcaagcccacgaaggttctgaaggaatatttctgcatgtcacagttccacggaagattaagtcaaatgacagtgaagtttcagagaggaaggtttttggggagcaggtggtatttggttacatgaatgatttacatcattacaattgatggacaaccttacactctacatctcggaaaacaatcattcttaccccagaactttttggtttatacatataatgaaactggatctttgcattctgtgtctccatattttatgatgcattgccattaccaaggatatgctgccgaatttccaaattcatttgtgacactcagtatatgttctggtctcaggggatttctccagtttgaaaatatcagttatggaattgaaccagtagaatcttcagcaagatttgagcatataatttatcaaatgaaaaataatgatccaaatgtatccattttagcagtaaattacagtcatatttggcagaaagaccagccctacaaagttcctttaaactcacaggtgactgtcatcattctgatgttatgacatactagaacattgcctgtgtagttttcttgtaaatcatgaaaggaatttagttagctgttgagtaggaatattaaattttatgtatttttctacctttaaataaaacattgaaacttcatctaaaatattcggaaagttacatatttcaagcttaatattttatgatgtattatgtaacattaatttttatatttttttcaaacaaaatgatactatttgaaaaagtttagaaatgcagaaagaacagagtcacttgttattctagtaccttggtaaattacgtttaatattttggtatatattctaactactacttgaacatatctttctaaaatgccagccatttgcatg

SEQ ID NO: 538844 - DNA, 832 bp, Homo sapiens
  misc_feature (45)..(45): n is a, c, g, or t
  misc_feature (48)..(48): n is a, c, g, or t
gcgggggagccagctccctgggaaagcagggttttggtttttttnacngaccttacttggtatgatttacatcattacaattgatggacaaccttacactctacatctcggaaaacaatcattcttaccccagaactttttggtttatacatataatgaaactggatctttgcattctgtgtctccatattttatgatgcattgccattaccaaggatatgctgccgaatttccaaattcatttgtgacactcagtatatgttctggtctcaggggatttctccagtttgaaaatatcagttatggaattgaaccagtagaatcttcagcaagatttgagcatataatttatcaaatgaaaaataatgatccaaatgtatccattttagcagtaaattacagtcatatttggcagaaagaccagccctacaaagttcctttaaactcacaggtgactgtcatcattctgatgttatgacatactagaacattgcctgtgtagttttcttgtaaatcatgaaaggaatttagttagctgttgagtaggaatattaaattttatgtatttttctacctttaaataaaacattgaaacttcatctaaaatattcggaaagttacatatttcaagcttaatattttatgatgtattatgtaacattaatttttatatttttttcaaacaaaatgatactatttgaaaaagtttagaaatgcagaaagaacagagtcacttgttattctagtaccttggtaaattacgtttaatattttggtatatattctaactactacttgaacatatctttctaaaatgccagccatttgcatg

SEQ ID NO: 538845 - DNA, 882 bp, Homo sapiens
ctttgccatgtgcaagttcctgcttcaccttctgccatgagtaaaaactctctgaggcctccccagaagccaagcagatgttggtcccatgcctgtagagcctgcagaacgatgatttacatcattacaattgatggacaaccttacactctacatctcggaaaacaatcattcttaccccagaactttttggtttatacatataatgaaactggatctttgcattctgtgtctccatattttatgatgcattgccattaccaaggatatgctgccgaatttccaaattcatttgtgacactcagtatatgttctggtctcaggggatttctccagtttgaaaatatcagttatggaattgaaccagtagaatcttcagcaagatttgagcatataatttatcaaatgaaaaataatgatccaaatgtatccattttagcagtaaattacagtcatatttggcagaaagaccagccctacaaagttcctttaaactcacaggtgactgtcatcattctgatgttatgacatactagaacattgcctgtgtagttttcttgtaaatcatgaaaggaatttagttagctgttgagtaggaatattaaattttatgtatttttctacctttaaataaaacattgaaacttcatctaaaatattcggaaagttacatatttcaagcttaatattttatgatgtattatgtaacattaatttttatatttttttcaaacaaaatgatactatttgaaaaagtttagaaatgcagaaagaacagagtcacttgttattctagtaccttggtaaattacgtttaatattttggtatatattctaactactacttgaacatatctttctaaaatgccagccatttgcatg

SEQ ID NO: 538846 - DNA, 425 bp, Homo sapiens
gtgcatcacggaattctggtccgttcatcattttcttcacgttccactgttctgcgccttcctcagtgctctcctctaaagccaagacccctttgtctcctaacttgagtgaatataactataggttatggtttacctttttatttactagaagcatctttttatataaaggcttaaatgtgatagtctattctatctatttttctccttttttgcttaatgctatattttctgtcctacacgtatttagcctaccatggcctactagaattctcttgccagtgtaaaattacctataagttttatagttttcgttttcacatttaggtctataattcatgtataattaatttctctgtgtcttatgtaagatagagattcagagtcttccccagtccacatgcagatagcctgttttttcaaca

SEQ ID NO: 538847 - DNA, 884 bp, Homo sapiens
  misc_feature (100)..(101): n is a, c, g, or t
  misc_feature (103)..(103): n is a, c, g, or t
agcggctcacccccaggtcctggggcagcacagggtcctccctggcccaggcgcccggtggccgagagcctgcccgcgagctcaacgctgctcaacggtnncngtccttggctgtggctcctgcgctctggctgagccatgttccttctcctcgccctcctcactgagcttggaagactgcaagcccacgaaggttctgaaggaatatttctgcatgtcacagttccacggaagattaagtcaaatgacagtgaagtttcagagaggaaggtttttggggagcaggtggtatttggttacatgaatgatttacatcattacaattgatggacaaccttacactctacatctcggaaaacaatcattcttaccccagaactttttggtttatacatataatgaaactggatctttgcattctgtgtctccatattttatgatgcattgccattaccaaggatatgctgccgaatttccaaattcatttgtgacactcagtatatgttctggtctcaggggatttctccagtttgaaaatatcagttatggaattgaaccagtagaatcttcagcaagatttgagcatataatttatcaaatgaaaaataatgatccaaatgtatccattttagcagtaaattacagtcatatttggcagaaagaccagccctacaaagttcctttaaactcacaggtgactgtcatcattctgatgttatgacatactagaacattgcctgtgtagttttcttgtaaatcatgaaaggaatttagttagctgttgagtaggaatattaaattttatgtatttttctacctttaaataaaacagagcgccgaatttctttttttaatttttttcttttttttctccttcctttttt

SEQ ID NO: 538848 - DNA, 418 bp, Homo sapiens
gtcgacgggacaccgaaccgatatgcctttgtacactgtcagcgctaccgaccttccgaccataaaatgctttgctcaactcttgcttgcgaggaggactgtggttctgaagtcaagtttccagtcttctgttgtagttgacagcactgatcagtaatgagcaacgtctttcttgtagaaacacaggcccctttcttcccatgtcaacacctgatctactcgatccccaggggagatggataaaatacgtcgtggtgatgagaccataacctcaatcacctgtgtatccattggggagtcaatacaagagtcaagttttcactaacttcccctctgatagcaatctgattcacctgctcaaacacttgcagtggacagtggatatcctatttgttgtcgtgcaaatcgaccttgacca

SEQ ID NO: 538849 - DNA, 322 bp, Homo sapiens
acaggccagccataacacctggcagatcttcctggagcccgcattttactggacatgtaaggggtagcgcggcttcaaggcaaccttttaattgatccttgcgaacagttatgtgtgaaatttactgccaatctgtactggagtcgactacaacatgtgtgaccgaaatagaatgccagggcgtgcacgttctaaggtaaagcttgggatgtcagacaaattttgcatcccactgagtgtcatttaagaccacatctccattcagctgcctcccattcccagaatctgcggtcacggtcttcggtggctgtcgggctcgggg

SEQ ID NO: 538850 - DNA, 807 bp, Homo sapiens
  misc_feature (1)..(1): n is a, c, g, or t
ntcgtctggaaactactctctaatcctccaccgctacactttttggggttacatgatgatttacatcattacaattgatggacaaccttacactctacatctcggaaaacaatcattcttaccccagaactttttggtttatacatataatgaaactggatctttgcattctgtgtctccatattttatgatgcattgccattaccaaggatatgctgccgaatttccaaattcatttgtgacactcagtatatgttctggtctcaggggatttctccagtttgaaaatatcagttatggaattgaaccagtagaatcttcagcaagatttgagcatataatttatcaaatgaaaaataatgatccaaatgtatccattttagcagtaaattacagtcatatttggcagaaagaccagccctacaaagttcctttaaacttctgatgttatgacatactagaacattgcctgtgtagttttcttgtaaatcatgaaaggaatttagttagctgttgagtaggaatattaaattttatgtatttttctacctttaaataaaacattgaaacttcatctaaaatattcggaaagttacatatttcaagcttaatattttatgatgtattatgtaacattaatttttatatttttttcaaacaaaatgatactatttgaaaaagtttagaaatgcagaaagaacagagtcacttgttattctagtaccttggtaaattacgtttaatattttggtatatattctaactactacttgaacatatctttctaaaatgccagccatttgcatg

SEQ ID NO: 538851 - DNA, 432 bp, Homo sapiens
  misc_feature (327)..(327): n is a, c, g, or t
  misc_feature (357)..(357): n is a, c, g, or t
  misc_feature (385)..(385): n is a, c, g, or t
  misc_feature (397)..(397): n is a, c, g, or t
  misc_feature (430)..(430): n is a, c, g, or t
gttctgatggagagatatttgaagttgatgtagaaattgccaaacaatctgtgactatcaagaccatgctggaagatttgggaatggatgatgaaggagatgatgatcctgttcctttaccaaatgttaatgcagcaattctaaagaaggtcattcagtggtgcacccaccacaaagatgaccctcctcctcctgaggatgatgaaaacaaagaaaagccggacagatgatattcctgtttgggaccaagaattcctgaaagttgaccaagggaacacttttttgaaccttattctggctgcaaactacttagacatcaaaggtttngcttgatgtcacatgcaagactgtggcccntatgatttaagggggaaaactcctgagnggatccgtaaanccttcaatttccaaaatggacttttcctgaagngg

SEQ ID NO: 538852 - DNA, 841 bp, Homo sapiens
ggtgtgtgtggacggaattcgggaccgactgacggcggccggcttcccggaactggaaggttacattgattacccacctagtacaacatcttacgggaagagcagtagtatttcctagaggaatatgaacgataacaggaaggtatcattggctctgaattaaatttgaacttgtcccgctgaatagcgtacaggttttggaacgctgaatcaaggtcatcagatgagttagaatccaataccagagtctcctggtacagtttgttcagaagtacgtgccatcccattgggacaggggcttgtagaatcagaatgctaaagatattactgtgcgttgtccctccttacccgtgagctgaagcctcagaatgcaggcggcgtaagtgttagcagatgatactacgaaatcattctaactcctccaaggaggtcccttcctcagctgtctggagaagccttcgggtgaatgtgggtccagacggcagaggagacgagagctcagactgtacagaaatccccggaagtcctgtcccacttcagaagtcttctagcttgtagacaagatctacagcgagtgatagcacttctatctatcttcttaaagctaaacaaagcaggtctgggctcttcagctgaagcacttagagtcggtccaggatgaggccagaagattcagggcattgattcctctccagtgagaagcacagacagcagcatacccatggtcctccgggtacaggagatgcgccacgcacagacgattggcagaaacagtgacaaccggcaaagaatggaacaacagcagccatggggaaaaaggccaaccaggacacggagaagg

SEQ ID NO: 538853 - DNA, 371 bp, Homo sapiens
acagaaatttcgtttagtaactctgtaaggtggggcattgggtacaccatcaattctcattttcagcaagcaagtaaactacccaggaccactcactttagcagtggtagagtaaatacagacatggagatctcataaatccggaagtctccaattaccagatcaaatagtcttgtggtagtaataagatttccatcattcagcagatctcataccacaaaggattaatttataagtcctcatacacttgtgattgtgcgttatattgatagccacagggagatcaaaatggtttttggttatggcagatgaaaaagtctaacattcagtgtgattatagttcagtgtaacttctccagtttaagtgtgac

SEQ ID NO: 538854 - DNA, 221 bp, Homo sapiens
gcacgactgacaagatccttttaggtcattgcaacgagaccgtggtttgtactcagttgccttgggacgcgcattggagggttttgagcaggcccgtgcaggatctaatgccttccagctcctgtgtggcggcgaggctgagagggtggaagcggtgtgagaccagttaagaagctatggccaaagccagatgggcactcatgggagactctaccagcatc

SEQ ID NO: 538855 - DNA, 157 bp, Homo sapiens
caggctctctggggaactacggctctctgggtctgtcctcagaacactgcgtcatatcgtaccctggtccctggctctctgaggccctctttttttttctggtttcggagacaaaatcttgctttggtcccccagcgctgaagtgatattgttgcaa

SEQ ID NO: 538856 - DNA, 290 bp, Homo sapiens
ggccctggttagaactagtgcctgtggcgctcatcagatggactggtttgaaaacccctgtctaaaaacactccgggcaggtgcagtggctcacacctgtaatcccagcactttgggaagctgaggtgtgtggatcacttgaggtcaggagttggagaccagtctagccaacatggtgaaaccctatctctactaaaagtacaaaaattggccgggcatggtggtgcacgcctgtagtcccagctgcttgggagtctgagacatgagaatcgcttgaagctgggaggcag

SEQ ID NO: 538857 - DNA, 205 bp, Homo sapiens
ctccactggtgccatcatgctcaatttctaactggatggttccctagaggtgcactgtccccaggggtgagtggatcttgtctagacccttggctggtgccattattctacattcattatgtctgggaggtagcggtatgttgaacagtataaatctagtttgcatcttgcttacatactaacatcagaattctaaggctggggc

SEQ ID NO: 538858 - DNA, 242 bp, Homo sapiens
  misc_feature (24)..(24): n is a, c, g, or t
  misc_feature (55)..(55): n is a, c, g, or t
  misc_feature (60)..(60): n is a, c, g, or t
  misc_feature (66)..(66): n is a, c, g, or t
  misc_feature (111)..(111): n is a, c, g, or t
  misc_feature (119)..(119): n is a, c, g, or t
  misc_feature (145)..(145): n is a, c, g, or t
  misc_feature (147)..(148): n is a, c, g, or t
  misc_feature (185)..(185): n is a, c, g, or t
  misc_feature (202)..(202): n is a, c, g, or t
  misc_feature (204)..(204): n is a, c, g, or t
  misc_feature (210)..(210): n is a, c, g, or t
  misc_feature (217)..(217): n is a, c, g, or t
  misc_feature (219)..(219): n is a, c, g, or t
  misc_feature (223)..(223): n is a, c, g, or t
  misc_feature (238)..(238): n is a, c, g, or t
aatgtactttatagagatggaggnaaaggtctaatactacatagccctaagtgtntctgncaatgntcaagtgtattttctgtaacagaaacatatttggaatgtttttcntttccccntataaattgtaattcctgaaatactncnnctttaaaaagtcccactgtcagattatattatctaanaattgaatattgtaaananacttgncttaccncncaanaaaagggtacttttntatt

SEQ ID NO: 538859 - DNA, 762 bp, Homo sapiens
  misc_feature (762)..(762): n is a, c, g, or t
gactgcgaggcaggcagtgatgctgcggcgttcgcatgtggctcctgcgaccgccaggcgctgtacagtggatgcgaataaccgtaaggtatgcagcagaagcggaacccacagttcacctgtggtgcattcctttatgatgaagacttatggatccattatatgagaaaggaaaaatgagcagaaactatgtatggatgtgcagtcacaccaagacagcaattttaggtaggcacttagggttatctttccagttcagcaggtgcaactctatggaagtagaatgcgagggagattttttcgccatgttgcgaggagaaagttgcgtcattaaaaaaaaattaccgtgctcagtggacacggaattaagaggtacacttttttaacgttgaaaaaaaaataaataacagagaaaaaaaaaaacattttttggtggggcgggctttgggagcctaagagaaaaacggttttttaaaagaaccccatctctgtgtgtgcgggaggacgggggcggccccatcggatgtgatacaggcgaaaccttggggcgcaaaagaggggggcgcccaaaaggagaacacccgggggcaaagcaacacagggggggggtttctcccaccaaaataaaaaaagcgccgcgggcggacaccccgagcgtgtgcttgggaccaatccccaggagggaggtccaggacgccacaacgcgggtctcaccaacgggagtgccaagggcggcagaaaattacgaggggcggagagggn

SEQ ID NO: 538860 - DNA, 306 bp, Homo sapiens
  misc_feature (286)..(286): n is a, c, g, or t
  misc_feature (291)..(291): n is a, c, g, or t
ttttgttcctagtgaagcaagtaagtcaattaaaggaatttagatttaaagcaaaagggtgacaggacaatttacattttaaaatagatcctcctggctcctctgcaaagaagcagtttgaaagggactaagctggaaaataagcagaaagacaatagtggttttaacaaagatgataattcaagagttaaaaagaattagagaatattactacacatatatgtatgtgtgtgtatatatatacacatacacagcaaattttaaataagtattttatatatatatntctcnctacctctccccctg

SEQ ID NO: 538861 - DNA, 98 bp, Homo sapiens
  misc_feature (62)..(62): n is a, c, g, or t
aggatttgatcaagaagaagtttttgagaagcctacacgtgaaacatgaccagggcatgagngcatgcattttacgacaagctggatgatgatggttt

SEQ ID NO: 538862 - DNA, 401 bp, Homo sapiens
tccctcaccagcatcccttaaaccaaagctaatccagaggtgaagaagctgcataagaaaagtttgaagctagcactatttggttcatgaggtttaaggaaagaagctgtctccataatatagatgtgcaaggtgaggtgaagcagcaggtgctgatataaaagtggaggcaagttatccagaagatctcactatgtccactgatgaaggtggctatactaaaacaacagattttctaagtagacgaaacagctttctgctggaaacagatgccatctaggactttcacagctatgagaagtcagtgcctggcttcaaagcaggctgggcacagtggctcacgcctgtagtcccagctactcgggaggctgaggctggtggaagggagggtaccgagctcg

SEQ ID NO: 538863 - DNA, 364 bp, Homo sapiens
gacgttgcacaggctggagtgcagtggtgagatcacaactcaccgtagcctcaacctccccaggctcaagcaatcctcccacctcagccttccaagtagctgggactacaggtgtgcaccaccacacccagctaatttttgtattttttgtggagacagggttttgccatgttgcccaagctggtctagatgaccctgggcttgagtcatccgcctgcctagtgctgggatgacaggtgtgagccactgcgcccagcctcccctctgagtttccatcattacattggcctatcggctgctggtggtagcaacctctgggaggcagaggttgcagtgagtagagatcacaccactgcgctccagc

SEQ ID NO: 538864 - DNA, 112 bp, Homo sapiens
actaccgaccttcaaaggcagcagccctgcctttaacagagccgaggctggaaggcagaaggcaagcttctctctttggcgctgtgtttctagtgcttcccacggtgtggag

SEQ ID NO: 538865 - DNA, 101 bp, Homo sapiens
tgggaaaaaatccctttgtattttctgtccagggcttcagatattttgcccgaattttaaaacatggcaataaatggctcgtgggctttggctccctggga

SEQ ID NO: 538866 - DNA, 684 bp, Homo sapiens
acaacatttaaccacgcgcagcacgacttttcccagcggggccacgaaaacgcgcaagggcgaccacaacaaccacacgcccgcagaccaccacccaccaaggcaccaaaaccacgaccgaccgaaacacaccaagcgcacaacagcgcacaacagaccaacagaaaaaaccaaacgaacccaaagggaccgacacgcagcaagaaaacgcaacacaagccgccaaaacaacgacacccacagcaaccacacccgcaaaggcacaacgaggaagaagcaaacccccgaccgccacacaccaacggcgcacacccgaaaaaagagaacaagcaagaaaaaatccagacaccggagatcccccagccgacaccgcagcacgaggcacacaacaagaccagcccgcaacagccccagtgccaacgccacagaacccaaaaagacgaccacccacgaaccaacaaaacgcaaagaccggaaaaaacgaccaacgacacacagaaacccaaaccacaccggcacgaaccaggcacaacgaaaaagccaacccagcggggaaaaataagcgccaaaacaggaaacccacccccaccacataacgaaacgaccaaagaagaagggcgaacatgaccgcacgacaacacccccagcaacaggacgcaacaacaagccgagtacaagaccccc

SEQ ID NO: 538867 - DNA, 92 bp, Homo sapiens
tgggggtatccctagttaaactttgggaagcccccttcaatgttttttggaccaaggcagggacaaataaaaaaataaaactttggaaagca

SEQ ID NO: 538868 - DNA, 977 bp, Homo sapiens
  misc_feature (30)..(30): n is a, c, g, or t
  misc_feature (76)..(76): n is a, c, g, or t
  misc_feature (79)..(79): n is a, c, g, or t
  misc_feature (85)..(85): n is a, c, g, or t
  misc_feature (93)..(93): n is a, c, g, or t
  misc_feature (97)..(97): n is a, c, g, or t
  misc_feature (162)..(162): n is a, c, g, or t
  misc_feature (188)..(188): n is a, c, g, or t
  misc_feature (215)..(215): n is a, c, g, or t
  misc_feature (232)..(233): n is a, c, g, or t
  misc_feature (241)..(242): n is a, c, g, or t
  misc_feature (257)..(257): n is a, c, g, or t
  misc_feature (261)..(261): n is a, c, g, or t
  misc_feature (335)..(335): n is a, c, g, or t
  misc_feature (355)..(355): n is a, c, g, or t
  misc_feature (377)..(377): n is a, c, g, or t
  misc_feature (423)..(423): n is a, c, g, or t
  misc_feature (430)..(430): n is a, c, g, or t
  misc_feature (441)..(441): n is a, c, g, or t
  misc_feature (498)..(498): n is a, c, g, or t
  misc_feature (586)..(586): n is a, c, g, or t
  misc_feature (634)..(634): n is a, c, g, or t
  misc_feature (682)..(682): n is a, c, g, or t
  misc_feature (696)..(696): n is a, c, g, or t
  misc_feature (765)..(765): n is a, c, g, or t
  misc_feature (826)..(826): n is a, c, g, or t
  misc_feature (911)..(911): n is a, c, g, or t
  misc_feature (976)..(976): n is a, c, g, or t
cggcctgagaggtctcttgtcgctgcaggngccttagcccagctgcgtgccttggcccatggcgcctactcttacngcnccggcnctggggcnggcnctgggcctgctgcaggcgcggcgctgccggaccagagcttcctgtggaacgttttccagagggtngataaagacaggagttgagttatatnagaaaccgagctttagcaagctctctncaacggcacgtggactnnctttaatnnagttactgttaggtngatnatattcatgtttgatcgtgagaacaaggccggcgtgaacttcagcgagttcacgggtgtttggaagttcattanggactggcagaacgtcttcngcacgttcgatcgggacaactncgggatgatcgataagaacgagctgaagcaggctctcttaggtttnggctacnggctctttgancagttccacgacatcctcattcgaaagtttgacagggagggacgggggcagattgcnttcgacgacttcatccagggctgcatcgtcctgcagaggttgatggatatattcagacgttacgacacggatcaggacggctggattnaggtgttgtacgaacagtacctgttcatggtcttcagtatcgtatgancctggcctcttgtgaagagcagcacaacatggaaagagccaaaatgtnacagttcctatctnttagggaatggagcacaggtgcagttagatgctgttcttcctttagattttgttacgtggggaccagcngttcatatgttgataagctgattaatggttttgcaactgttatagtagctgtttcgttctnatgcagacattggatttggtgactgtttcattgtgccaagaggtaaatgttatgtttcaggcattctgcttgcaaaaaatctatnatgttcttttctagatgtttcttgttctatagtgcaatgcttttattagcaataggatttaaaana

SEQ ID NO: 538869 - DNA, 238 bp, Homo sapiens
gttagcaagacgggagccagtgagagtcgagggagaggtgacctcatgcttgggctggcggcgcaggcctatgggactgccaggaggtggctggggtaacgctgtcttttctaacattcagcattggctcaggcgccaggtcagggctcacagactgttgctataaagggctgggtggctttcttccccacagctactcagcctaatgccattgcagagcacttgtagccatggacaa

SEQ ID NO: 538870 - DNA, 241 bp, Homo sapiens
tagaccggtctgggatccagacactgcgatgaatgcttctccacattatttacttcactcttcacgaccctctatggtgtattacactcctatttgacagatggagcaaaagctggaggctcagagaggttaatcatctgcctaaggccacacagcatggcaaatgtgcagaatcacagacttgaatccaggtccatctgtttcaagagttcatgcgtctagccagtatcctgtggggggt

SEQ ID NO: 538871 - DNA, 906 bp, Homo sapiens
cgcgctcggtctgtatccggttgttattgcaccgggtttctccgccccctgttttcgcctccctggggtttgccccttgtggtggcgcccccccgtagtggttcctcttgccgagaacacctgctctaggttggcagtttcctcccgctggggcctggcctccgcgtgcaaggtgttcgccggcatgtaacgcacaccaggtcggccgtcattacgccccgcactatgtgcctctgggccggggcacccaatttttccaagcgcgccggtatacatgcgggtggctatgtgcttccccgccatgttctcctgccgtcttgtgtgtccccgcctttttgttccccgccgtcaacgctgccccccggcataatttacggggggcgctaccccccctgcgcccttttggtcgccccgcggctctctgggataaaatgtgttcacgccgtcccccttgtggcagtagtcactcccgcgtgcggttttagcccccgcgggaagccgcccttctggttgttagggtttccctggcaggcctcaccacacctctcaaagtaggggtgatcttgaacgcctctccctcacacaacgggggggatcaccctcgaccacaattctcccgagcgtcgagtggtggttcccgaggcagagttagggtatgcgtggaagcacacttttcggaacggtcaaggtcccagccacccatggagaaggcgcccctttgtagcctgcgcccgacaggttgtttggcggcgccccaggtccgcgcctattcattaggggcgttcgcgcggaatgcgcttgaccgccgtcccccgcattatgcgcggcggttcttacactttctcctcgataccaaggcgctcgggccccaagggaaaaaaaatctttgaacccccacatatcaaa

SEQ ID NO: 538872 - DNA, 225 bp, Homo sapiens
  misc_feature (1)..(1): n is a, c, g, or t
ngactccgccttacaatttgaactagtgaaaaaagagtagaaatatagacgagcaggatcacgttaagagagtactcagaaaactctaggttacttgcagtcatgtgctgttctccagagtactagaatatcttttattggcaatttccaacaatactgttaaagacatattgtgctaattaagcttaacactagatgtgcttaccatggtatcttttcatatta

SEQ ID NO: 538873 - DNA, 166 bp, Homo sapiens
cccttagttccttctatattgtgtgtttgcataagatattattagacatgtgcacacattcatggttcaactcttattcatctcaggaaatcaggactatggtgaatacgaaatcattgactgacatctatacatctagacacgctacaggatggaattttggaaa

SEQ ID NO: 538874 - DNA, 362 bp, Homo sapiens
ggatttagaatagtccataaatttgagggttcgagaagattgactccaatgttggaagaagttctgctgtgggtagtcaatcaatgtgacaaacttcattgttgtcttattttaagaaattacagccaggcatggcgactcatgcctgtaatctcagcctcccgagtagctgggattacaggcacctgccaccacgcccagctaatttttgtatttttagtagagacgggatttcaccatgttggccaggctggtctcgaactcctgacctcaagttatccgcctgccttggcctcccgtgttgggattataggcgtgagccaccgcacccagccctcatgtgaactattttaacgtgtcct

SEQ ID NO: 538875 - DNA, 113 bp, Homo sapiens
tctagagtatcccccgccaagtgggattcactggcatctggtagaatatccttccttcccatactagagcttcacttttccagagctcatgagaaacggggtccctacaaccc

SEQ ID NO: 538876 - DNA, 482 bp, Homo sapiens
attcgcggccgcgtcgaccagaataaatcaaggaccatcaaccaaaatgggaggtccaggactcaggaggacttaccagtttcaccagaggagaagctagaacttggtgaggtttcactgggcccctgctagtaccttagctagggttttaggcaactccttcagggtcctgagtcttctctgtggccccacgtgtttgggcaccagattattgttgaagagtcaaacactgtaaaatatttgaagagatttattctgagccaaatacgagtgaccgtggcccgtggcacagccctcgggaggtcctgagaacatgtgcccaaggtgatcagggcacagcttggttttatacattttagggaggtatgagacttcgatcaaatacatttaagaaatacattggtttggttcagaaaggcaggacaactcaaaggcaggaggcggtgaaggggacagtaagggcagggaggtccttccaggct

SEQ ID NO: 538877 - DNA, 772 bp, Homo sapiens
  misc_feature (258)..(258): n is a, c, g, or t
  misc_feature (375)..(375): n is a, c, g, or t
cctacctggtcaagtcaatcggttagtgtcccacctcgctgatagactgactacgtcgatacgcgagagaagaggaccccttgatcgaggaatggtcgatctggacaggattctatttcggcacctatgaggatgaggtccgagagtggatcgatggccgatccggactgaacccggtcatccggttcgactgctccgagatcaccgcggacatcgagtccttcaattgggtgggtctcaatctgaccgacgacggcntctggttcgaggacaccaagtggttcatcgtggatcgcatcgactctctgtccgccgagaacttccggcagctgatcacgcatctccacgacatggagaccaagctggtcatcgccntcgtgcagcggaccctcaacgacaccatcaccaagcgatccgtccaggccatcggatcggacgctgagctgtatccccgccccatcccggcgatctcggaccacgatgacctcgtggagtgggtggtgggatggctggatcgccacgacgtcggcatccagcggaagacggtcaaccggatgattgaattcaccggcaacgtggatcagactccgctggtggagctgtgcgtgaccctggccagcggcttccgaggcaggaccgtctccgccgcggacgtcaaggctcagatgggcatcgacggcaagctggactcctaccacctgatgaccacgctccaggccggagacgcggagagcgccatcgacatcatccgtcgggctgacatcgaacacct

SEQ ID NO: 538878 - DNA, 162 bp, Homo sapiens
cggggctccgaacgtgtactttcaaagccactcctctctgtctgcccctcaaactggaaattccatgttactactccgcacaccttaggtttacttatttcatgttacagatttgtttgttataggctgggcacagctggctcacgcctcatcaccccagca

SEQ ID NO: 538879 - DNA, 803 bp, Homo sapiens
gtctgccgcgttgccactacctgtttcgcggcccacagagcacgtcctccatcagattggccggagccatgggtgtgagaagagacctaggtccaggtgatccagactaatccccgataaatcacccattgcttaaaaagcaggctcgaagatggtctatctgtttgttatcctcgccgacgctcctgtggattcaggatttcatgtctgtatacacaaaactctaatttagacgcgcctgtactatgtagctgagtagaaccaatggagcagcattgtccattctagctagagcactatagtgtctcatgcctcgataatgagagagaggagaagtgagtagcacagtggtcacccagatgtgaccccaacatagctggacatcgtctatgggactcccagagtttacaatgtcaggcaagactatcagtcacttggtgcaaggataaggtcctcctgtggtctcccaatgaccatgccgggatttcagccaaatgcttgaaaggtttgaggaatcggtgcttgcatgactccaatgagggcgttccctgatcctgcacttgtccacccagtcagcacctgcttccagggagcacctaggatcacacatccgggcctcctcactcctcctcctccatcacggcagagaatcagctcctttgaagacctttggctcctctcaatgcctgacaaggagcccagagactgatgcctccagcctcctctggggaggcagcaaaactcttgggaagcatgaggaaggacggataactgaatcttgacggcgaggggtgcaaccatct

SEQ ID NO: 538880 - DNA, 366 bp, Homo sapiens
tttttagaggcctcccggtgataactgttgcctgattggtatacaggaggaccagcaaaagggtgctcgccggtgatcagggtgatctgatctcgaaggcttgcttgaggatacgcacagtcatgagcttcttgccgttgtcgcggactgagcatcatcatggagataagagagtgcgctccacaatgggacactgaggcttttgcaggaagcgtgtggcggaataccgcccctgcactgtgaggcaggtacttggcatatttctccttcactgcaatgtaatcctgcagggaaatgtcaattgatcttgacatcatcggttgctccagttcccaaagagcttgatgtctggggtctctgccaccg

SEQ ID NO: 538881 - DNA, 949 bp, Homo sapiens
cttagcgtccccaactggaaggcatgacgcatatgaatgaattcgccatcgtggactgttaaggagcggcttgcccagtcttatccagcggttctatggaataactgctcttgtgcaatcggccgatatatttacatagataaaaggcaattatttacccacgggccatttctgagatcctgtcgtgttaggtgcacaccacatcccatcggtagtacattcttgcatcatctggtaattggcgtatccggcacgctctcgtgtctcgcgggaataatgcctcctctaagcacccagtagcgatgacggcacaggccgacgcggccccaggttaggtacatgtcgagccactcgggtgctatcaggctcgtcaaccttaagcgaaccataccctgtcgtgacaatcagagctcagagcgatgcgattacctaccacccaatgagcaaaaatggcccccggccgcgcaggagcctgaaggccggtgtgctcgcttcaaatcatgcactaaatctggcaggtgcgactcgagcgttcagtgtaactaaggagtcctgatctaactcatcgcagagtcaccacaatgctgaacgatgactgattacatactaacatttacaggtcccgacctcgggggcacaactccaactccagagaagcccacagcccagacaatatactacaacgccgaccacccagacgcgcgtggcgttcccaagccaaccacgactaacacacactcgccacaccaccgatcccacctcctacggccgaacaagccaggccaacctgcacactcattaacctgcagcaaacccggcgactagcaccccatgccacgacctaccaccgcggcacacggaagaccactccacaaatccaacccacactgcgtccccacaccagacaccctagccgacgaccacggcccccccccgcccccgcagcacc

SEQ ID NO: 538882 - DNA, 203 bp, Homo sapiens
gaatgccggaggcacaacgggtgggcgggcgggggctcaccagtatatagtgggcaggatatggagtgatacgttttcagacactctgtacgccaagaaagccgagcagtgaggccagcagtgggccagtcgacggaagacaagtcctcatccaaggacatgagctccccgacagaccgtcatcctgacggctattgtagcca

SEQ ID NO: 538883 - DNA, 214 bp, Homo sapiens
  misc_feature (9)..(9): n is a, c, g, or t
cgtccccgnggtatgtcttacggagagacactcggtgtggctgacacaagggctctggagtcagacggctgggagatgttgggcaggttcctcaacctctctgagcctcagtttctttacttaaaaaatgaggataatagtgaaatacacttttcaaaagtgaggaatgaggagttcccccgtggcgcagtaggttaaggatctggcattgtcg

SEQ ID NO: 538884 - DNA, 146 bp, Homo sapiens
acgtgcctgtggtagaagtggcatggcttgaatcttaagcgaaagcctatatcactgctcccgctcatcaggggattgccatcgctaggtttatatatagttgggttgttggtgtacatgagtgaggcaggagcccgaggaggtta

SEQ ID NO: 538885 - DNA, 777 bp, Homo sapiens
gaaaataattttttccccaacttatgttctcgtctatactttcctgtgttgactacaattgttaggtgacataatcttcccgtttagacatttaaaataataagtttaaaacaacgtctgaaaaactatttccatgtcctttatatagattattttgtttaagaatttattgtacttggggataaaggaaatacatccatgaactatgtcactaagagctatgtttgaggaagtaagtctttactatattgagttagggggtttgataactttaagtttcttaattttattttagtgattaagactggagaacagtggcatgatacgtttatccggcgttcttacaaaaaacaaccgatggacttgggtccagtctaatgcacgcctgctttataacaactggaagaccagattatatcattgtaactcagatgaccactaacgtaagcgacaaagtaatgtttcctgttttaacagtttggtttgcataagtcctcttatgtgaaagcatagaaataattcaagcagactttagtctgtaaatacccaattgaaaagtttaattcatctatgaaagaagagcacaggtgagagacattgagaagatagaattgacgaacttgattgagagctacatgtgcagagctatagaaagaataataaaagtctagggtttatcttgggcatatgaaagacacatgaaaagctagtgtcttgataaacgaaaaggtagctaaaaaaaatttttgggcaatgggctcgaaaaggttttaaaac

SEQ ID NO: 538886 - DNA, 102 bp, Homo sapiens
  misc_feature (99)..(99): n is a, c, g, or t
  misc_feature (101)..(101): n is a, c, g, or t
tgctgagcctcgagccaccgcgctcagtccaaaacttcttttttttttctagtgtgtttcttcctgcaatacatgtttctccctgaaatgtaaccattncnt

SEQ ID NO: 538887 - DNA, 265 bp, Homo sapiens
  misc_feature (241)..(241): n is a, c, g, or t
agagagagacacacacactctggagagagagccccagggtgtagggaggagagagagttaacaggagccggctttttgtcttttgggtctccctggacttaaggaaggggagaataggagcccagactaagattctcaaaatggtttattacccagactctttgtctgggtcagtcaggaaccatttccaacagggacatggagggaggcttctagggggacttcctgtcccaaggaggtnaacccagagcaccattagacaaac

SEQ ID NO: 538888 - DNA, 199 bp, Homo sapiens
  misc_feature (73)..(73): n is a, c, g, or t
  misc_feature (108)..(108): n is a, c, g, or t
  misc_feature (127)..(127): n is a, c, g, or t
acacggtaccccgtaggttgtgattcgcaacgcctttgcctgcttcgacgaggaagcctcaggtttcatccantgaggaccaccttccgggagcatgcataccaccantgggtaccgcattacagantgaggaagtggacgagatgtccgggaggcacccattgataagaaaggcaacttcaactacgtggagttcacc

SEQ ID NO: 538889 - DNA, 480 bp, Homo sapiens
aaaggggagggttgggggcttccaacaaatttggagatagagggggggaaaatgccaagtcccgatttttttttaactttgttcaaacaaaccgggttttgttcaaaaaataaaagaagattaaaattggaagaagttggtaaaaaggggaaagcccggggttcccggttgttgtcaaggggacgcgttcggggggggcccgaacccgttgtttggtccgaggtccgtttgtttgtccggggtttttaaagggaggggagggggttttgggaagggtttttgaagccgttgtcggtttaaagttttatttttagattaaaaaagaaaaaacggggagaaaaaaattccaaccccaacatttttattaaaggcaattttcttgtgccgaatttttgtagaccgggggattcattagttttaaaaggggcggaaacgcgggggaggttaaattttttggttctttaaggggggttaattttc

SEQ ID NO: 538890 - DNA, 102 bp, Homo sapiens
gaagacgtacggctgggacagacaggcgagtagtgccagcatcatggccagctgagagttcttttctctccccctcgctgtggagtacatggtaagaatctt

SEQ ID NO: 538891 - DNA, 303 bp, Homo sapiens
cacagaaaactagaatttcatttattttgtttttaaaatatatatgttgatttcttgtaacatccaataggaatgctaacagttcacttacagtggaagatactcgaaccgtgtagaggcaatttaggaacttgggggctactccataattccatatgctgcatcaagagttcccagcaggtactccaagctatgatttccaaaaccggaagttattaattctttaataacccctgaaagtcatgaacacatcagctagcaaaagaagtaacaagagtgattcttgctgctattactgctaaa

SEQ ID NO: 538892 - DNA, 329 bp, Homo sapiens
tctatccctgagatatcacatatagaaataaggatcgacataggtcagggatagaggtcacacctactatcccagcactttgggagaccaaggcaggtggatcacttgacagccaggagttcgagcccagcccggacaacctcgtagtaaaccccatctctactaaaaagacaagacttagccagacgtggtggtggacgcctgtagtcccagctactcgggaggctgaggcagtgagagtcacttgggctcgggtaggtggaggctgctagtgagcaagaggatcatgccattgcataccaacctgggtgacagagccagcttctgtc

SEQ ID NO: 538893 - DNA, 234 bp, Homo sapiens
ttgcctgtgtcgtgggatactatccctaatgaccttttaaggccgtcgtaggtatctgctttataataatgatgtaaatacctattctggagaccggtacacagggactgccctttaaatatttgccagattttgaataaatgattttattgtttactgaacatttcctgttattccatgttctgcgttgaatggctgctttagtgactgctcaatgccaagccccagctgcgg

SEQ ID NO: 538894 - DNA, 161 bp, Homo sapiens
gtaatgcgttcagcgacgccagagtctccaggcatcgggcttggattcccactccagcagtccagaggagctgcgcccactttatgcctgagaatactttcacagaatgatggccggttcactcccatgctcatcgcagatctcaaagaagttctcctcgg

SEQ ID NO: 538895 - DNA, 528 bp, Homo sapiens
  misc_feature (475)..(475): n is a, c, g, or t
tcggtacccatcagcacatggtgctcgacgtgcgatcgttcaccaagcagattcacaccaatccaagatcgctgtggcttgtgcacccgggaacacccgatccaactgcgctggcgacagcccccacagacggctgagcatcccgctgaacaggctgcggtaattgttgagcactgggtaatcgcgattctgcagcagctgcgcctgttcgaccgccagctgttcgccagcgatgcgaccgccgcgcaagccacctcccagcacccagtacgtggtgccgtgcccgtgatcggtgcccttgctgccgttctcgcggaaggtgcggccgaattcggagatgacgaccaccacggtgtcgttccaggccgggcccaacgcatcggcataggcagccagcccttcgccgagattgcgcaggtttgttggccaggccaccttccacgctaacctggttggcatgcgtgtcccaagccancgacatcgacgaaagcccaggcgatagcgctcgcgcatcaatgtggccatgcg

SEQ ID NO: 538896 - DNA, 251 bp, Homo sapiens
cgcactacttgtcccatgctactcaggaggctaaggtggcagggtcctttgagaccatggtcctttgagtcgaggctatagtatgccatgatctacgcctcttaatagacacgtgcattccaaactatgcaacataatggcagtcctgtctctaaaataaatcaagtacagtcagaaaatatttggctgggcgcagtgatcacacctgtaaccccagcactttggaaggctgaggcaggcggatcacctga

SEQ ID NO: 538897 - DNA, 261 bp, Homo sapiens
actgcctcgatggggcccaggcagagacttcacaggtcttcatggcttcccttcatgcactacacaccttccggtctgaattcctttgtctctgcgggttccatccatccctttttacaacctcggtcagagtaacagagcgtcctgcgggtgggatactcgggacacaaccgctgctcttggccttctgttttgagaaacgttgtcatcacgaattaaagagttcccctgctatggggaatgtgtagtctgcgttgtggc

SEQ ID NO: 538898 - DNA, 104 bp, Homo sapiens
ccgagccgacgcaaggccatagtgcgcgctacagcgcctcgcactgatcagattggagccctgcgttctatcgtgacgtgcaaagccgtcgccacatttcattg

SEQ ID NO: 538899 - DNA, 664 bp, Homo sapiens
  misc_feature (565)..(565): n is a, c, g, or t
tacaaaaaattagccaggcgtggtggtgggcgcctgtagtcccagctacttgggaggctggagcaggagaatggtgtgaacctggggggcggagcttggcgggaactcgagaggtgcaccagctgcaattccagccgtgggcgacagagcaagactctgtctcgaataagaaaaaatgaatagaggacacaaaaagaaacatgtgtgtgtcgggccgtgctgtgcgaccactagaaaaagagtatttgtagaaccaatttggtctggggggagcgcggggcgcccccgataggggtataaggtgaaacaacgtgggccacacggggtgggtcccccaaaggaaagaaacctggggacaaggaccaataggggggggtggggactcttctccaccccaaattaaaagacgcggccgggggggccaacacgaggggggttgctgagaccaaaaacccgaggagggaaggagcctcagaggaggggccagtaaaccgggcccctatacacacaagaggaggcgccccaaggagaagcgccgaagattattaaataataccgccgcggncgggggggggagcagaggcggacaacgagagacacgacaaaaaaaggggtgcacaacaggagaaccagcagatacaaaaatagaccgcacggggcgagg

SEQ ID NO: 538900 - DNA, 642 bp, Homo sapiens
gctcagaggatcccccaacgcgctcacaattgagtccgattattgaagtagaaaggcagatttaaaaacagatagactatgaggtgtgagtatgaaagcctttatgttttaattcagagggctgtcccatgctatagattctctctcctgtagtaactcttaccaaggaggaaaaatgtagaggcctgatagaagagaaaagataccttttaaccatcttagtccacctggctaaaaagattttataggtgtctttagctttacccccacctcagtgttcagctgggtcatttgaggccaggtgggaactgggaattaaatattgtattagtacagactcttgactagctccaggtaaggttgaacctttggctttaagcctcaagtactacattgttttcttccccgtgtgcataggtgctctcgccaacaaagtgaagaggaaagacacactggcaatgaagttgaaccacagacccagtgaaccagagttgaacctgaattcttggccttgtaaaagcaaggaggagtggaatgaaatacggcaccagattggaaacacactgatccggtaggcctttgcttagatttgcttgattgatttggttatgccagtatttgtgttagatgtcgtgagagggg

SEQ ID NO: 538901 - DNA, 2204 bp, Homo sapiens
  misc_feature (12)..(12): n is a, c, g, or t
  misc_feature (15)..(15): n is a, c, g, or t
  misc_feature (18)..(18): n is a, c, g, or t
  misc_feature (24)..(24): n is a, c, g, or t
  misc_feature (392)..(392): n is a, c, g, or t
  misc_feature (2019)..(2019): n is a, c, g, or t
  misc_feature (2098)..(2098): n is a, c, g, or t
  misc_feature (2109)..(2109): n is a, c, g, or t
  misc_feature (2142)..(2142): n is a, c, g, or t
  misc_feature (2195)..(2195): n is a, c, g, or t
ccgggggccagngcnggntgctgnctggcggccaacgggccaggtaggatttccgggagaggctgctgtggaggctgaggaggcggcggcggagatctggaaacagtatctcacctccctaaactggttaatagtggcatggaagatccatttgaggaagcagaccagcccactacagagccaggcatggtcctggacagtgtggaagcaggagacacaacacctcctaccaaaaggaagagcaagttctcaggctttggcaagatcttcaagccctggaaatggaggaaaaaaaaaagtagtgataaatttaaagagacttcagaagttttagaacggaaaatatctatgcgaaagccaagagaagagctggttaaaagaggggttctgtnggaagaccctgagcaaggtggtgaggatccaggaaagccaagcgatgccatgttaaagaatggccataccacccccatagggaatgccagatcatctagtccagtccaagtagaggaagagccagtaagattagcaagtcttaggaaagctattccagaagaggacctaaagaaacgactaggctcaactggaagccagcctaattctgaagcagagtctgttcctgagaatgtacccaaaccacctttacttcctcccaaaagacccttgtcctcttctcatgaagcaagtgaagggcaagcaaaggatgccacttcctctggcggcacggcaaggttcatcatctccacctccatcaccacagcacccgctgccaccactgctgccacaagccttgcaaagactgttaatctctctgtcaccccttccccagcacccaggactctgcctgctgctcctgccagcactaacactactgctaccccaagcctcactcatatggtccctgccaagcagccccctatccctccccctaaaccagctcacagaaatagcaaccctgtcattgctgaactgtcccaagcaataaacagtggtacattgttatcaaaaccgtccccacccttaccacctaagagaggcattccatcaacctcagtacccaccttggagtctgctgctgccatcaccacaaaaacaccaagtgatgaaagagagaagagcacgtgttctatgggctcggaactactaccaatgatctcacctcgctctccgtcccccccactgcctactcatatacctccagagcctccacgcacccctccattccctgctaagacttttcaagttgtgccagaaattgagtttccaccatccttagatctacaccaggagattccccagcaggaagatcagaaaaaggaagtccccaagaggatactggaccagaactttggggagccccatataccctctaggctgcctccactcccactgcatattcgaatccagcaggccctcaccagcccacttcccatgactcctattctggagggttctcacagagctcattcgttgctttttgaaaacagtgacagcttttctgaggacagcagtacgctgggtcggaccaggtctcttcccatcactattgaaatgctaaaagttccagacgatgaagaagaagaggagcaaacctgtccatccacattcagtgaagaaatgacacctacctcagtcattcctaaattaccacagtgtctacgggaggaagaagagaaggagagcgactctgattcagaaggtcccattcagtaccgagatgaagaagatgaagatgaaagctatcagagtgctctcgccaacaaagtgaagaggaaagacacactggcaatgaagttgaaccacagacccagtgaaccagagttgaacctgaattcttggccttgtaaaagcaaggaggagtggaatgaaatacggcaccagattggaaacacactgatccggcgactgagtcaaagaccaacaccagaagaactagaacaacgcaatatattgcaacctaaaaatgaagctgatcgtcaggcagaaaaaccgagaaaattaaccgtcggctcactagaaaanctcaagtcaaaggccaacttgtccgcttgaactccttgccaggaagattcctgaggtttaatgaatatgtagagggtanaggatgctcangattatgaccgggcgaagccgaacaaaaccctnggaccaaaacttgacccctgcttggacaagggttgccctttagggaaaaggantttaaattg

SEQ ID NO: 538902 - DNA, 2384 bp, Homo sapiens
  misc_feature (255)..(255): n is a, c, g, or t
  misc_feature (572)..(572): n is a, c, g, or t
  misc_feature (2199)..(2199): n is a, c, g, or t
  misc_feature (2278)..(2278): n is a, c, g, or t
  misc_feature (2289)..(2289): n is a, c, g, or t
  misc_feature (2322)..(2322): n is a, c, g, or t
  misc_feature (2375)..(2375): n is a, c, g, or t
ctcgtgtttcctgcacgccagctctacacagtgtgcattctggaatgacaggcattcctgtgtgaagagtgccagtgtgaagacagttttgtaagaactgcaagtgctcaggctgtatgggaaacagaaacttcagcagatgaactgaccttatgccatttcctgatgtttggcagtgacactgaaagaggaccgcatgtcccctctttatgtggatttatcttttatgaaaagtttgcttttgtccgggacagnttgttgtcgtgagatacatcagacaatataatcatgggacaagctgatgtctccagaccggtaaatccagatgcagttgaggaagcagaccagcccactacagagccaggcatggtcctggacagtgtggaagcaggagacacaacacctcctaccaaaaggaagagcaagttctcaggctttggcaagatcttcaagccctggaaatggaggaaaaaaaaaagtagtgataaatttaaagagacttcagaagttttagaacggaaaatatctatgcgaaagccaagagaagagctggttaaaagaggggttctgtnggaagaccctgagcaaggtggtgaggatccaggaaagccaagcgatgccatgttaaagaatggccataccacccccatagggaatgccagatcatctagtccagtccaagtagaggaagagccagtaagattagcaagtcttaggaaagctattccagaagaggacctaaagaaacgactaggctcaactggaagccagcctaattctgaagcagagtctgttcctgagaatgtacccaaaccacctttacttcctcccaaaagacccttgtcctcttctcatgaagcaagtgaagggcaagcaaaggatgccacttcctctggcggcacggcaaggttcatcatctccacctccatcaccacagcacccgctgccaccactgctgccacaagccttgcaaagactgttaatctctctgtcaccccttccccagcacccaggactctgcctgctgctcctgccagcactaacactactgctaccccaagcctcactcatatggtccctgccaagcagccccctatccctccccctaaaccagctcacagaaatagcaaccctgtcattgctgaactgtcccaagcaataaacagtggtacattgttatcaaaaccgtccccacccttaccacctaagagaggcattccatcaacctcagtacccaccttggagtctgctgctgccatcaccacaaaaacaccaagtgatgaaagagagaagagcacgtgttctatgggctcggaactactaccaatgatctcacctcgctctccgtcccccccactgcctactcatatacctccagagcctccacgcacccctccattccctgctaagacttttcaagttgtgccagaaattgagtttccaccatccttagatctacaccaggagattccccagcaggaagatcagaaaaaggaagtccccaagaggatactggaccagaactttggggagccccatataccctctaggctgcctccactcccactgcatattcgaatccagcaggccctcaccagcccacttcccatgactcctattctggagggttctcacagagctcattcgttgctttttgaaaacagtgacagcttttctgaggacagcagtacgctgggtcggaccaggtctcttcccatcactattgaaatgctaaaagttccagacgatgaagaagaagaggagcaaacctgtccatccacattcagtgaagaaatgacacctacctcagtcattcctaaattaccacagtgtctacgggaggaagaagagaaggagagcgactctgattcagaaggtcccattcagtaccgagatgaagaagatgaagatgaaagctatcagagtgctctcgccaacaaagtgaagaggaaagacacactggcaatgaagttgaaccacagacccagtgaaccagagttgaacctgaattcttggccttgtaaaagcaaggaggagtggaatgaaatacggcaccagattggaaacacactgatccggcgactgagtcaaagaccaacaccagaagaactagaacaacgcaatatattgcaacctaaaaatgaagctgatcgtcaggcagaaaaaccgagaaaattaaccgtcggctcactagaaaanctcaagtcaaaggccaacttgtccgcttgaactccttgccaggaagattcctgaggtttaatgaatatgtagagggtanaggatgctcangattatgaccgggcgaagccgaacaaaaccctnggaccaaaacttgacccctgcttggacaagggttgccctttagggaaaaggantttaaattg

SEQ ID NO: 538903 - DNA, 120 bp, Homo sapiens
agtgcagcagtgcagtcagtcagcaatgtttcagtgcagcctcagggtgtttgtgcagtgtccacattcagtgcgcatgcagtcaggggcacagggcagcctcactcatcagcttggggc

SEQ ID NO: 538904 - DNA, 157 bp, Homo sapiens
gggaacggacttccacgccgtctcgcaaggcgcggtgtcggtcactgccgttgcagtgtctgacctgactcgaacatcgcacgcatgccgctagtggtagacagatggatgggggcatggggggcgcagtcgtgagagcctgggtactcgagcctcg

SEQ ID NO: 538905 - DNA, 2232 bp, Homo sapiens
  misc_feature (12)..(12): n is a, c, g, or t
  misc_feature (15)..(15): n is a, c, g, or t
  misc_feature (18)..(18): n is a, c, g, or t
  misc_feature (24)..(24): n is a, c, g, or t
  misc_feature (420)..(420): n is a, c, g, or t
  misc_feature (2047)..(2047): n is a, c, g, or t
  misc_feature (2126)..(2126): n is a, c, g, or t
  misc_feature (2137)..(2137): n is a, c, g, or t
  misc_feature (2170)..(2170): n is a, c, g, or t
  misc_feature (2223)..(2223): n is a, c, g, or t
ccgggggccagngcnggntgctgnctggcggccaacgggccaggtaggatttccgggagaggctgctgtggaggctgaggaggcggcggcggagatctggaaacagtatctcacctccctaaactggttaatagtggcatggaagatccatttgacttctccagagaaccttggaacagttgaggaagcagaccagcccactacagagccaggcatggtcctggacagtgtggaagcaggagacacaacacctcctaccaaaaggaagagcaagttctcaggctttggcaagatcttcaagccctggaaatggaggaaaaaaaaaagtagtgataaatttaaagagacttcagaagttttagaacggaaaatatctatgcgaaagccaagagaagagctggttaaaagaggggttctgtnggaagaccctgagcaaggtggtgaggatccaggaaagccaagcgatgccatgttaaagaatggccataccacccccatagggaatgccagatcatctagtccagtccaagtagaggaagagccagtaagattagcaagtcttaggaaagctattccagaagaggacctaaagaaacgactaggctcaactggaagccagcctaattctgaagcagagtctgttcctgagaatgtacccaaaccacctttacttcctcccaaaagacccttgtcctcttctcatgaagcaagtgaagggcaagcaaaggatgccacttcctctggcggcacggcaaggttcatcatctccacctccatcaccacagcacccgctgccaccactgctgccacaagccttgcaaagactgttaatctctctgtcaccccttccccagcacccaggactctgcctgctgctcctgccagcactaacactactgctaccccaagcctcactcatatggtccctgccaagcagccccctatccctccccctaaaccagctcacagaaatagcaaccctgtcattgctgaactgtcccaagcaataaacagtggtacattgttatcaaaaccgtccccacccttaccacctaagagaggcattccatcaacctcagtacccaccttggagtctgctgctgccatcaccacaaaaacaccaagtgatgaaagagagaagagcacgtgttctatgggctcggaactactaccaatgatctcacctcgctctccgtcccccccactgcctactcatatacctccagagcctccacgcacccctccattccctgctaagacttttcaagttgtgccagaaattgagtttccaccatccttagatctacaccaggagattccccagcaggaagatcagaaaaaggaagtccccaagaggatactggaccagaactttggggagccccatataccctctaggctgcctccactcccactgcatattcgaatccagcaggccctcaccagcccacttcccatgactcctattctggagggttctcacagagctcattcgttgctttttgaaaacagtgacagcttttctgaggacagcagtacgctgggtcggaccaggtctcttcccatcactattgaaatgctaaaagttccagacgatgaagaagaagaggagcaaacctgtccatccacattcagtgaagaaatgacacctacctcagtcattcctaaattaccacagtgtctacgggaggaagaagagaaggagagcgactctgattcagaaggtcccattcagtaccgagatgaagaagatgaagatgaaagctatcagagtgctctcgccaacaaagtgaagaggaaagacacactggcaatgaagttgaaccacagacccagtgaaccagagttgaacctgaattcttggccttgtaaaagcaaggaggagtggaatgaaatacggcaccagattggaaacacactgatccggcgactgagtcaaagaccaacaccagaagaactagaacaacgcaatatattgcaacctaaaaatgaagctgatcgtcaggcagaaaaaccgagaaaattaaccgtcggctcactagaaaanctcaagtcaaaggccaacttgtccgcttgaactccttgccaggaagattcctgaggtttaatgaatatgtagagggtanaggatgctcangattatgaccgggcgaagccgaacaaaaccctnggaccaaaacttgacccctgcttggacaagggttgccctttagggaaaaggantttaaattg

SEQ ID NO: 538906 - DNA, 2216 bp, Homo sapiens
  misc_feature (12)..(12): n is a, c, g, or t
  misc_feature (15)..(15): n is a, c, g, or t
  misc_feature (18)..(18): n is a, c, g, or t
  misc_feature (24)..(24): n is a, c, g, or t
  misc_feature (392)..(392): n is a, c, g, or t
ccgggggccagngcnggntgctgnctggcggccaacgggccaggtaggatttccgggagaggctgctgtggaggctgaggaggcggcggcggagatctggaaacagtatctcacctccctaaactggttaatagtggcatggaagatccatttgaggaagcagaccagcccactacagagccaggcatggtcctggacagtgtggaagcaggagacacaacacctcctaccaaaaggaagagcaagttctcaggctttggcaagatcttcaagccctggaaatggaggaaaaaaaaaagtagtgataaatttaaagagacttcagaagttttagaacggaaaatatctatgcgaaagccaagagaagagctggttaaaagaggggttctgtnggaagaccctgagcaaggtggtgaggatccaggaaagccaagcgatgccatgttaaagaatggccataccacccccatagggaatgccagatcatctagtccagtccaagtagaggaagagccagtaagattagcaagtcttaggaaagctattccagaagaggacctaaagaaacgactaggctcaactggaagccagcctaattctgaagcagagtctgttcctgagaatgtacccaaaccacctttacttcctcccaaaagacccttgtcctcttctcatgaagcaagtgaagggcaagcaaaggatgccacttcctctggcggcacggcaaggttcatcatctccacctccatcaccacagcacccgctgccaccactgctgccacaagccttgcaaagactgttaatctctctgtcaccccttccccagcacccaggactctgcctgctgctcctgccagcactaacactactgctaccccaagcctcactcatatggtccctgccaagcagccccctatccctccccctaaaccagctcacagaaatagcaaccctgtcattgctgaactgtcccaagcaataaacagtggtacattgttatcaaaaccgtccccacccttaccacctaagagaggcattccatcaacctcagtacccaccttggagtctgctgctgccatcaccacaaaaacaccaagtgatgaaagagagaagagcacgtgttctatgggctcggaactactaccaatgatctcacctcgctctccgtcccccccactgcctactcatatacctccagagcctccacgcacccctccattccctgctaagacttttcaagttgtgccagaaattgagtttccaccatccttagatctacaccaggagattccccagcaggaagatcagaaaaaggaagtccccaagaggatactggaccagaactttggggagccccatataccctctaggctgcctccactcccactgcatattcgaatccagcaggccctcaccagcccacttcccatgactcctattctggagggttctcacagagctcattcgttgctttttgaaaacagtgacagcttttctgaggacagcagtacgctgggtcggaccaggtctcttcccatcactattgaaatgctaaaagttccagacgatgaagaagaagaggagcaaacctgtccatccacattcagtgaagaaatgacacctacctcagtcattcctaaattaccacagtgtctacgggaggaagaagagaaggagagcgactctgattcagaaggtcccattcagtaccgagatgaagaagatgaagatgaaagctatcagagtgctctcgccaacaaagtgaagaggaaagacacactggcaatgaagttgaaccacagacccagtgaaccagagttgaacctgaattcttggccttgtaaaagcaaggaggagtggaatgaaatacggcaccagattggaaacacactgatccggcgactgagtcaaagaccaacatgatgaaaccctgtctctgctggaaatacaaaaattagcctggcgtggtggcacgcatctgtaatcccagcactttgggaggccgaggtgggtggatcacctgaggtcaggagttcaagaccagcctggccaacatggtgaaaccccatctctactaaaaatacaaaaattagccaggtgtggtggcgcctggttgaggcatgagaatcgcttgaacccaggaggtggaggttgcagtgagccaagatcatgcctactgcactccagcctgggcaacaaagtgggactctgtctta

SEQ ID NO: 538907 - DNA, 197 bp, Homo sapiens
  misc_feature (128)..(128): n is a, c, g, or t
  misc_feature (138)..(138): n is a, c, g, or t
ttgtgggtaggacagacttagaggctgaggctggcatctgggggagccgcagcccctgggggtggcagggggcatctgtcaccaggaggaaggaagaggcggttctgtgcaggaaagggagcagctcngggggcacangcaggattcggcctagtgagctggaccattagcctcggagtgctgtccccagcatctcg

SEQ ID NO: 538908 - DNA, 2157 bp, Homo sapiens
  misc_feature (12)..(12): n is a, c, g, or t
  misc_feature (15)..(15): n is a, c, g, or t
  misc_feature (18)..(18): n is a, c, g, or t
  misc_feature (24)..(24): n is a, c, g, or t
  misc_feature (392)..(392): n is a, c, g, or t
ccgggggccagngcnggntgctgnctggcggccaacgggccaggtaggatttccgggagaggctgctgtggaggctgaggaggcggcggcggagatctggaaacagtatctcacctccctaaactggttaatagtggcatggaagatccatttgaggaagcagaccagcccactacagagccaggcatggtcctggacagtgtggaagcaggagacacaacacctcctaccaaaaggaagagcaagttctcaggctttggcaagatcttcaagccctggaaatggaggaaaaaaaaaagtagtgataaatttaaagagacttcagaagttttagaacggaaaatatctatgcgaaagccaagagaagagctggttaaaagaggggttctgtnggaagaccctgagcaaggtggtgaggatccaggaaagccaagcgatgccatgttaaagaatggccataccacccccatagggaatgccagatcatctagtccagtccaagtagaggaagagccagtaagattagcaagtcttaggaaagctattccagaagaggacctaaagaaacgactaggctcaactggaagccagcctaattctgaagcagagtctgttcctgagaatgtacccaaaccacctttacttcctcccaaaagacccttgtcctcttctcatgaagcaagtgaagggcaagcaaaggatgccacttcctctggcggcacggcaaggttcatcatctccacctccatcaccacagcacccgctgccaccactgctgccacaagccttgcaaagactgttaatctctctgtcaccccttccccagcacccaggactctgcctgctgctcctgccagcactaacactactgctaccccaagcctcactcatatggtccctgccaagcagccccctatccctccccctaaaccagctcacagaaatagcaaccctgtcattgctgaactgtcccaagcaataaacagtggtacattgttatcaaaaccgtccccacccttaccacctaagagaggcattccatcaacctcagtacccaccttggagtctgctgctgccatcaccacaaaaacaccaagtgatgaaagagagaagagcacgtgttctatgggctcggaactactaccaatgatctcacctcgctctccgtcccccccactgcctactcatatacctccagagcctccacgcacccctccattccctgctaagacttttcaagttgtgccagaaattgagtttccaccatccttagatctacaccaggagattccccagcaggaagatcagaaaaaggaagtccccaagaggatactggaccagaactttggggagccccatataccctctaggctgcctccactcccactgcatattcgaatccagcaggccctcaccagcccacttcccatgactcctattctggagggttctcacagagctcattcgttgctttttgaaaacagtgacagcttttctgaggacagcagtacgctgggtcggaccaggtctcttcccatcactattgaaatgctaaatgacacctacctcagtcattcctaaattaccacagtgtctacgggaggaagaagagaaggagagcgactctgattcagaaggtcccattcagtaccgagatgaagaagatgaagatgaaagctatcagagtgctctcgccaacaaagtgaagaggaaagacacactggcaatgaagttgaaccacagacccagtgaaccagagttgaacctgaattcttggccttgtaaaagcaaggaggagtggaatgaaatacggcaccagattggaaacacactgatccggcgactgagtcaaagaccaacatgatgaaaccctgtctctgctggaaatacaaaaattagcctggcgtggtggcacgcatctgtaatcccagcactttgggaggccgaggtgggtggatcacctgaggtcaggagttcaagaccagcctggccaacatggtgaaaccccatctctactaaaaatacaaaaattagccaggtgtggtggcgcctggttgaggcatgagaatcgcttgaacccaggaggtggaggttgcagtgagccaagatcatgcctactgcactccagcctgggcaacaaagtgggactctgtctta

SEQ ID NO: 538909 - DNA, 228 bp, Homo sapiens
  misc_feature (5)..(5): n is a, c, g, or t
  misc_feature (18)..(18): n is a, c, g, or t
  misc_feature (54)..(54): n is a, c, g, or t
cgggncttgaaacaaggngccgctctacaactggtttttttaggacttgtgagnacacagcaacggaatccatccacaaaggatgcagtccccaacttgttactgcgccttgaatagtcatgtgataatttactgaagaaatctagtgttactttaaatttttttcataaaagtttactaattaatgtaggttaacatttaatgttttatagcaaatacttcaaaaaa

SEQ ID NO: 538910 - DNA, 281 bp, Homo sapiens
cggccggaacctttggggccggcccctcccagggcccccgctccgtgggaaaaaacagctcctccctttccttgaaaactgggcgattttttaaaatagattaaacttccctggaaatgagtaacccggaagttcaggggagggggccgggtccttcccgggcctggggggttggagcccccccggtcccccacctgccccttaaaaaatgcaaatatttgttgtgccaaaaatcccaaaccttttcttttaaaatagttgccttttttggtcagcttcca

SEQ ID NO: 538911 - DNA, 321 bp, Homo sapiens
gataccaatggtgtaaaggcacctccaaaggcaggactggactaattccaagcaactatgtggctgagcaaggcagaatcctattgatcaatccattgcatgtaatccagcaaaatagaggctacttgcagctggttgagcagagtgtttggacaatcagagtgggctgttaactggctctagtacaaagctggcaatcactgtccttatactgggccttgccacgggggaccacaaagcatataggtggaaatgctgatttacatctagccaaaatattgtaacgtgaaccagccagcaacaatgttgggcagaatacag

SEQ ID NO: 538912 - DNA, 326 bp, Homo sapiens
aaaaacccccccgggggcaccaggtttttttttccccccttttttttccccccccggggcccctggggtttttgggggttaaaaaattcgggggtcccccttaaagggggaaacccccccccccttggggggggggggaggggggggttttttttttggggccccctttttttgggggcccccccccccttttttttacatttttgggggcccgggggggggcccccccccttgggcccccgggggggggggggcccccccccaggggggggggtttttttttttttttttccccaaaaaggggggggtttaagcgggggttttta

SEQ ID NO: 538913 - DNA, 935 bp, Homo sapiens
  misc_feature (303)..(303): n is a, c, g, or t
  misc_feature (495)..(495): n is a, c, g, or t
accccctccggcaagcgcaggaaaaaaaagaaagagagaaacacaaggttcgcgcgcgtacacacggacccgactacccgcacaaaaggggcttgggaagcttatacacccgcgccccgacacagccgctacagccaaggacaaccggtccgggccgggaccatccggccggctccggctggaggacacagcctgaatacgggaacagcagggcaacgatccgctgccacacgccagtgctggagcttccatcgcctaggtcgcggggccgcacggggcaaggcaagctcgggtgctggcccngctcctgatccccggcgccgcctgggccgccgcgggggccccattcttgcccagcgccaggcagagctccttaagcgctaggttctcccgcagcagctcctctggcggccctccagctcggccagcttctgccaacagccgcccaggtcctcgcgcacggcccgggatgcttgggtcccgaagagctgccancgtgcgtgcggcgccgctccgctggcgctccgagtccaggaagcagcagagggtgcgcagctcacggttctctgcctgcagacgccggttgagctgcttgagctcgcggatctcgcccaggtggccctgcagctgccgattcacctcctgcatgaggcggccgcagctgcaccagtgccgccaggcgcagcacagcacatcactcccgccagcaggcgcacgcactagccatcttccattgcactagcagcacagcacatcgtccatcagtcacgtcaagcatcactcacaggccagcacatgccatcaggcacatcacaatggctggtcaggcactctggagcatcagcaccagccacgccagcacagcaggcacacatggagccaccacgtcagggcccggcgcacactcaggctcagggctccaggctcacagcacc

SEQ ID NO: 538914 - DNA, 272 bp, Homo sapiens
ttttggtatggataatagagacggagttcaccaggtgggccaggctggtcacagactcctagcctcaagtgaccggtgcgccttggcctcccaaaatgcttagattacaggctaagccactgtgcccaacccaaatatagttttcttaagtttagtgttcgtacaatatatacttttttactattttactttcaagctgggtgtgtctttatatttctaagatgtttctggtaaacaaagtaacctgagattttggtgctctgtcttctaat

SEQ ID NO: 538915 - DNA, 1187 bp, Homo sapiens
  misc_feature (107)..(107): n is a, c, g, or t
  misc_feature (187)..(187): n is a, c, g, or t
  misc_feature (1187)..(1187): n is a, c, g, or t
cactactcgagcccacagagccgatctgtcgtgcacgacggattcctcgcttatatacgcgagtacccggtcatgcaagggcggtgcagccgaatggcagtgcaatnccgccagtgctgcgtgaatcagcagagtgcacacgggagaaccagagagttcagaatgatgtgtatggcaccgaatgaanataggtcagcagatttgcgttcacagtgactgtgctgcccagagtcggtgtagcggctgctgcactgcaggcagtgagtactggggttgacgccagagactacgtgagcatgcgttgttgcccgggcgtcacagggagtgttcctggaagatacgaattggccagtgggaggcaaggtataaccggggtgtttgacggatgaggtagatcagcgattcccgggtagcgtgggtgtgagcaccaaggtagaaccaggcatgcggtgatagttcgtccaagtctggcgcctgggggacatggtgaggcatggctgtgatggaaacgtagcgtgcaaagcgtttcttccgtggtggccagatgactatcaatggcattctatcccattacccggccgaggagacagatcatgctggtatcaagaagaccgggcgtgggtttggcatgccatcgatgatgctaacctccttgtaagcatgttatctaccggtctgctgaagctctatggccgggagcagacctattacctgaacctggatcgagctcttcctgcagagttcctatcagactgagatcgggcagacctggagctctcacagccccagggcaaggggatctggtcagatcactgaacagaggtacaaatctatggtcagtacaagacagtttctactcctttaacttctataggctggagcattactggcacgaatgatgggaaaagggcacgccatgcaggcagacaccggcgggcaaaggcgggagacactgagaatacgggaggacagctgaacccttggtagcccagtgtacggaaatttgggcggtgttcggaaaaaagtgtggtgtgggcaagtggggaggtacccaaaggtagatatgagaaatggggaaaaggtgagagcgaaaagcatagaggaagtaagattaagagaaagcagtctttaaacagccacatggggcacaagaaagggggaaaatataaggacatcgtgttttgtgn

SEQ ID NO: 538916 - DNA, 190 bp, Homo sapiens
ggactcccgactagccgacagggctggggtgtctgcggacaggtgttgctgatctgcgtggacgggtgtgatctgctgtggataggggtgtggatgatgctgcggtgaccttgttgtgatctgccatgacgtgagtgtgggcgatgctgcgtggacctgtgtgtggatgctgctgtcgggctagtcgggg

SEQ ID NO: 538917 - DNA, 833 bp, Homo sapiens
aacccgctctctcgggagcgatggattacacacaacacaaagatgttcccctcacaccaaatggggtggaagggggcgggagagaaggattgcaatagaccccgcctcccatgttgacacagtgccgtgtcccaacagaccagacatcgctacttggggggtcgcccacaagggcagatgcttgtgtctgtatagatgtctcatggacatattatattgagtatagagagacataacatagatgacgccgcgtgaataggccatatcagagggggtggtagacaaatacactcatccatttggtaggtaacatcacccgcgctgtgctgttagaagagaagagctcgtcccgtgggttgtattatattatacagacagaggaggtgagttagccgtcaatagatgtgttatggtctaagtaaatcttcttctaggcaggcttcacacgctgttctactaagacgctcccagtacaattctcactcagggggacgctcacactctagagagatgagcaatctgtgtggccccccacacacacactgtatgactgtatgcttggtggcaagacagagagataactctgtagttcctctttacttattgctccctctcaagagggtatctgtggtacacaggtgtctgtgtcgcccactccctcaggtcaaaacaacggtggggggttagtaaacgccttagtcaccggcacttcttttgtgctgaagttaggttcgtgtcccctatagggtctgtcctacaccaaggttttgcataagacgaggcaaaacaaaagaataacttagcagcaaccagcggcaagataaatgtcagag

SEQ ID NO: 538918 - DNA, 797 bp, Homo sapiens
ccgtgttcgttgttcaacgggttgtgataatatccgttgggggcgtgggagtggggggaagtcaaaaagggggaagcccgtgtgtttctggtattatgagtgggtagatactgagaatgggtcgtgtgctaactttttgagcaaactgtttgtttctgttgatctacattgtgttagtttggtgtggagcgcgcgttggtgtatgcagtttgatttgagagtggaattgccttgtgatacagtgttagtaacgggccatgaggattaatggtttcgctggtgtataacgatttgtatgttgtttggtgtgctgggtgtgtaaacataattgggtaaggtggtcttaattaacttgttgtactgtcattgattaattatttgcagtaaaagttttatatacaaccattgcatggtttggcttgttgatgtatccctgtgggtgaatattagctacttgttggggcccaaatgggagataatggctggcattgcactctcccgggtcttttccccttccctacgagctagaaacgtgtttatcagcaagtccgtgagtcaaactggctgccttttaaaaacccacaaaatgctgattcagttcaaaattaatgcaaatgtttcaaaaggtgggtttctgatatttgtaaatgtgtttcttgtattagagtaagagtgtattacccattaaagtcattagtataatattgctttgcataaagacatggtagacgaaactataatccagcatctgttagtgcattggaaaagactggcaaagtctggtggagtggttggaa

SEQ ID NO: 538919 - DNA, 88 bp, Homo sapiens
agccgcaggagtagccgccgccggagccgcgcgcagccatggccgagtaacccagcttggagaaccaccgcatcaagagcttcaagaa

SEQ ID NO: 538920 - DNA, 358 bp, Homo sapiens
gcacgagcccacagttgagttgggtttaaagaggcgagccctcctagagtttgcaaaaaagttgagtttgggttgggcacagtggttcacgcctgcaatcccaacactttgggaggccgaaatggggggatcacctgaggtcgggagtttgagcccagcccggccaacatggtgaaaccccgtttttactaaaaatacaaaaattagccaggcatggtggcaggcccctgtaatcccagctactcaggaggttgaggcaggagaatcgcttgaatccgggaggtggaggctcccgtgagccgagatcgtgccattgcactccagcttgggcaacaggagtgaaactttgtttcaacca

SEQ ID NO: 538921 - DNA, 1211 bp, Homo sapiens
ggtctcgagtttttttttgattatttgtaaaagtttttcatttttggaaatggggtttacacccgttgtcacccaggctggagtgcagtcgcacaatccgggctcacgggaacctcgcgcctcccgggttgacgccattctccaggacctaccgcctccggagtagctggggactacaggcccgtgcctctgcgcccagctaatttttggtatttttaagtaaaagacggggttaacaccggtgttacgccaggatggtctcagatctcctgacctcgtagatctggccctcctgggactccccaagtgtctgggattacaggcatgagctgccgcactcggcccaggtatcttatatttaaatagaacaagagacacgcgggaaggaaccacaggtccagtgtgaggacagggggtcatgggtagacacagaggtggactgggtctctacctcctacacatggggctacacaagggacacagaacaagattcaaaggcccttgcaacaaagagaagccagagtccccctaagaacccataggggaaggccgtagaggaaatccgggactctcaggcgacacacagagggcaagagtgggcaatccacaaggcgcacaaacaaagagcacgagtggccaccagagcatgtaacacagcgggtgaagacctccaaagcccgtgggacaacagggtggacacaaatcaagccttagaaagtaagcaccccaccaaattacacacaccgagagactcagtagaacctccccaataatcaacagggagaaaacgcaaaagattcccagaaggaaccccacaggaaacacacaaagggaggcaaaccgaggcacagcaacaggacatggcacacacagacaggaggggaaataggatggggacggggcacaacgcgagagtacacattcatcaaagaggcaaaacgggagacacaggaggcagccaagggcacaaggagacccccccaaaagcaaaaaaacgcacgcccatcataccctgcgggcgcgaaagacagtcttagcagccaagagggcgaggcggatccagaaaggtaccagcgccaacatcgcggagccccaaccacaagagagcagaacaaccataggcactggagcggccacgtaaaccagcacaagaaaggcggcatcaaagaggtggcgacaacctggcgcacaggggacccgggaaagacaca

SEQ ID NO: 538922 - DNA, 491 bp, Homo sapiens
  misc_feature (201)..(201): n is a, c, g, or t
  misc_feature (367)..(367): n is a, c, g, or t
  misc_feature (389)..(389): n is a, c, g, or t
  misc_feature (461)..(461): n is a, c, g, or t
  misc_feature (470)..(470): n is a, c, g, or t
tgcccatttatgagggctacgcgctgccgacgccatcatgcgcctggacctggcgggccgcgatctcaccgactacctgatgaagatcctcactgagcgtggctactccttcgtgaccacagctgagcgcgagatcgtgccgacatcaaggagaagctgtctacgtggccctggacttcgagaacgagatggcgacggcgncatcctcctcctccctggaaaagagctacgagctgccagacggcaggtcatcaccatcggcaacgagcgcttccgctgcccggagacgcctcttccagccctcctttcatcgggtatggagtcggcgggcattcacgagaccacctacaacagcatcatgaagtgngacatcgacatcaggaaggacntgtatgcaacaacgtcatgtcggggggcacacgatgtaccctgggatcgctgaccgcatgcagaaagagatnacgggctgnaaccagaccatgagtaagata

SEQ ID NO: 538923 - DNA, 252 bp, Homo sapiens
  misc_feature (221)..(221): n is a, c, g, or t
ggtgactctaaggatccccgaggcgggcagattgttgagtcaggagtcaagacctgcccgggcaacacattgagactctatctctacaagaaattaaaaattagccggacatggaagcatgcacctgcagtcccagctacctgggaggccaaagtgggagaatcacctgagcccaggaggcggaggccgcagtgagctgtgaccgtaccacgttactccancctgggcgacatagttggaactccaactctc

SEQ ID NO: 538924 - DNA, 340 bp, Homo sapiens
cagtcatgtcctacgtcctgcctcgcaatgagggagcatgtacccaggtacatccatgaactgcggcagttttgggacttattgctgtttcagctttaagggtgttgtgtttttggtttttaattaacaggcaacataaccaccagtgttagggattaatgtggggcaccttcttattgggatgtcactgtaattgcctacatttctttgctgtaatataactgcctaatgggtggtcaaccatttaatctgaatttggaaatctttctgggttccggataaattctccttcatatgggggttaatttagtaaatgttagtgggctctcctttattctct

SEQ ID NO: 538925 - DNA, 389 bp, Homo sapiens
  misc_feature (49)..(49): n is a, c, g, or t
  misc_feature (57)..(57): n is a, c, g, or t
  misc_feature (175)..(175): n is a, c, g, or t
caagcacaggcatcaagctgtactccattcaacaggacctgggctgtgntgcaagcntgggtgtcatctcagataaccttctggtgaccggcggccagggctgtgtctccttttgggacctaaactatggggacctgttacagacagtctacttgggcaagaacagtgaagcccnacctgcccggcagattttggtgttggacaatgctgccattgtctgcaactttggcagtgagctcagcctagtgtatgtgccctctgtgctggagaaactggactgaaggcaggtcaagtacgctattccctttcccccatcccaaggtggggcacaggggatagcaactctttggacctagactagaggcaatagctgactctgaactgttgtc

SEQ ID NO: 538926 - DNA, 159 bp, Homo sapiens
ttgtatgggcacagaaattcaagaccagtatggaccacagggtgagaccctgcctctggcaaaaatacaaaaattagctgggcatgatggtgcatgcctgtggttccagctacttgggaggctgagatggggggatcacgtgagcccaggagttcgagg

SEQ ID NO: 538927 - DNA, 733 bp, Homo sapiens
  misc_feature (1)..(1): n is a, c, g, or t
nagccttatgcgtccaagccgtgtccgcttttgaaaatcgcaccgacgtgtttatctcacattctcaccttctgggatttggcgctctttgctatctctccccccctatttctttggtcttttgtgccccctcccattccttgcgaatctgctttcaatacaccaacgagggtctcacagagtccccccctttccccgctcaaactcatctggcgcccccacagggggtcgtgtgaccctatcgagggtactccccacattcggcgcggcgtaatttttttccacagtctcctcaaaaaactcctccccccgtattgttcgctaaggacaccccggcgggccgctttgtgcattcccctgtgcacgggtcgccacatccggggttggtgtcctccccgtttgtgacgcgccccccctccccgcgtttattatgtgcacctcccccgaacactctttcgactcaagagaccgtgccccccaattagggtttataaccacgagacccaatattcccggacacgttttaacacccaacaccccatttctcccggacaacacaggaccccggggtgatatataccggtccaatagcctctttaaaacatttttggagacccaacacccccatgttcatcccccctcgtcactagaatttattcccccctaaaatccttttagaataggcgccctttttcccctcgccccccctttcccccctttgggcccaaaaaaa

SEQ ID NO: 538928 - DNA, 1739 bp, Homo sapiens
ttttctcctgattttcgtagctacgtgttgtattctgcttgtcttgggctctttacggttggtccgcctttttttgcttcgcgggctggttgttttttcacgccgggtgctgtttttttctcctccgtggatctgtgcgtcggggtggtggacgcgctctcctcctgtgttttttcatcgtggccgcccgagtggtgttggtgtcctcctctcctggctgctcggtggctctagatgatttccgcgagtggggttgcgccggggggtctctctccccccttcgtggtcttgtcactcctagttgttgcctcccttcttggtggggctttcctcctccccctcccgctttattttgcccgctccgctggggttgtacacacacaggggggtggtgtgccacgtcactctttggctcctcttaatagactcccctaccctctcgtgggggttctctactccgagggttgtttgttttcttctcctcccctcgctgcggtcgggggtgtgtccttcctctctcctcctgctgtgctgccttctctgccgtgggtttagtcaccatccacctcatgagcgggggtctcccctctcgttcgatgggggggggagccccgcccccatcaatactggtttcgtgggagggggttttttatcttttctccccctctggtgtcgtctctccttctttctgtggtggggggggtgtagaattttctctcctctgcgctctctctcctctactccgaccatcaggggggggtgatagttttttctccttgcgtggctctcgcatgagtgttgttttgcccccccgcctcggacgccagctggggggggcgccccccacatatcggtgcgcggagatgttgtttggcgtcgttgctacactagagtgcgctctcacagagagaggtggtctttgtttgcacgcgctttttgatacttggggcggcaacttcgctcgaacacacacgtttcttttcttgtggcccccatctctcacagagggtccctctgttttggtggtctcccctctcctcttttctcctctctggcggggtttgtgtccactctctctctctctgagagggtgtgcgcgtgcgcgcctctctctgtcgtttcttttgtgagagaaatctctctcagaggagttatatatctctcttccttctcttggggcgcctcgctcttgtgtctctctcacacgagagagattctctccccggggggggcgcgctccgcgcggggcgcgcacacacctcgtcgacacatggtgcgcgcataaacgcgcgtgtcgggcgcctctctcggccacacgtgggcactctctagatatcttttctctctcctctccgcagacccctcgggggggccccacagcgagtgggctccgcgcgagagggggtgtgtgagaggggtgtctcacactcggggccctacacagaagacacctatctatcttggcggaggcgcgcgcgagatatataagaactggcgcgcgcccacagagaaaaagagccggccacacaaaaccgggcgccttcggcggcgcgttatatattgggcgtttctttctcctcccttctcccccggagcccccaacctttctcctgctcccccccccccacctcctgttttttataggtgattttaaattattgtgctcggggttggggagagggaccccggggccctggggcccgggattttttttttataaaaaaattgggaaccaccca

SEQ ID NO: 538929 - DNA, 208 bp, Homo sapiens
tcttttgtgccccgtgccccttttaccatgtcccctcggaggcgctttccccgggcagggcgagagctggtctggggtcccgcctctgcccgggtcccgccgccgctatgggaggagggagccccctcccaacccgggctcgagcggcggcggcctcaggcgagaggtcatcatggaactaattcgctgaccgacccagcggccgcag

SEQ ID NO: 538930 - DNA, 982 bp, Homo sapiens
gaatccgcttccatccgtcgcgcagaccctgccggagccgctgtcgctatggatgatcgagagggatctggtgtaccaggcgaagatggacgagcaggcttgagcggatacagacgaagtggtggagttatttgaacaaagattgcatgggtagtggctgtgagcgctgacggttgaggaaacgatgacctcctatctgttggagtataagacctgtgagttgcagctatgacagagcctcctgtgagagtaagtcagggtagccggttgaggtcagtggaggcgaaagaatagaccttggccatggaagaaggatcgacgctagatggtgattcgggattatcggcacaatggtgttgagacctgaagctataagtgaatcttgtccgttgacgtttctgtgatggtacgtgcactgagacctactctctatgttccatggccagcataatcactggcgcggaggtccgaaccgattctcctgattataaaactgaaccgggtgactaccagcaggtgtcttggctcagatttgccacatgtaagactggagaggaggggaggctgcggagtaacagactaggggcctatgaatgctaggtaggtgagaatgtggccatgtaccaggaaactgtgccacccaatcggcattgctatacgacttgaagggtctttgctctcaaattttggccggtaatctaatacggaaaattctttttattcccccttgaagcgtggcctgcctggtttcgggtatagccagttttgtgcgtgcatggccccttcggcggaacctgggttaccgccgaggttggacaggaaacagctgttccagggaaccctttcaaactttatccacaccacggcgtggcacgggaatattcctgagcacatgtgcctcctcgaacaattctcggggggcccgtcggagaacacaagaaaaaaaagggcgggcggggcttggggcgcaaccaccacctga

SEQ ID NO: 538931 - DNA, 174 bp, Homo sapiens
gccccaaccaggggcctgggccagcttgcacgcctgaaagagactcggtcacggagccaatctgagttgactttgacgcaggaggcagttcgcaggacttctcgttctacggcctatggcgatcctactttgggttggtcacatgtgagatcatcccccactagcctggattcc

SEQ ID NO: 538932 - DNA, 203 bp, Homo sapiens
aggattggtttgtcagtgtccccatcgactctctggggctgatcacttagttttttggcctctcctgcagccgtcatactgttccaaatgtggcagcgggacagagtaccctcttcaggcccggtcatgatggaggtccagccacagggaccatgagctcagtggtctggaacaagctcactagatcgatcctccttgacctg

SEQ ID NO: 538933 - DNA, 488 bp, Homo sapiens
aaggttccagccagttccaagtgaagacaccacccctggacatcaagaagctacccttcctccactagatagagcagggtgagagttccatgatccccaataggtagggactatgccccaagccagcatgaagcagttacagaaaaaagaccatcggtccctctgcctcccataaagatttatggggatcacatctcttgaaggggcagatgaggcaggaaaatagggtctgaagtgtgaagatcgattcacacttcagctataacaggaaatatcctctccatagggtgtatgactatgtaacttgaatacttcatcctctccatttacataaggtgtatctgaagtaaccaatggaatcctctgggggtaaatgccccacaattctgtaacgggacctttgagcccctacgctccgcctgctcccacactgtggtgtgtatgttcattttcaataaatcccttcattccttccttaaaaaaaaaaa

SEQ ID NO: 538934 - DNA, 103 bp, Homo sapiens
atctctgggcaggacttctgggctggagctttttactcgcgggggtgatctttttggctggaactttagcagcagcagcagcagcagcaccacgaattcgccg

SEQ ID NO: 538935 - DNA, 303 bp, Homo sapiens
aataatgacggccacatagcaaggcatcttagaaaaagacacaagctggacactgtgggctatctagacctcgaactatactacaggactatgttaaccaaaacagcatggtgcataggcacaaaaacagggacataaaccaatagaacagaatagagaacccagaaataaagccacacagctatgattatctgatcatcaataaaacggacaaaaacgagcaatggggacaagactgtcctttacactaaatggtactgggataactaactagccatatgcacaagattgacactggacccc

SEQ ID NO: 538936 - DNA, 401 bp, Homo sapiens
  misc_feature (370)..(370): n is a, c, g, or t
  misc_feature (399)..(399): n is a, c, g, or t
ccagggagtttcagatgcctttgagaaatgaatgaagtagagagaaaataaaagaaaaaccagccaggcacagtggctcacgcctgtaatcccagcgctttgggaggctaaggcaggcagatcacttgagaccagcttgggcaacatggcaaagccccatctctacaaaaaacacaaaaattagctgggcattgtggcgcacacctgtattcccatctagtcaggaagctgagatggaagaattaattgagcccacgagttcaaggctgcagtgagtcgtgattgtgccactgcacttccagccggggtgacagaagagaccttgtctcgaaaagggatcttgaaaaacaatgggaaccatgcctttctnatttctaggaaagttattttttcaactgntt

SEQ ID NO: 538937 - DNA, 180 bp, Homo sapiens
ataagagacggaagaaaaagagacaaaacaaacaacacagacaaaaacaaaaagaagaagaaaaacacgagacaacacaaaaagaaaaagcaaagaaaaacaggagaacaaaagaaagaaacaaaaacaagaaaacaaaagctcacaaaagaggcgagggagaaggagagagggaagaga

SEQ ID NO: 538938 - DNA, 285 bp, Homo sapiens
tcctttttttgggggttttttccccccttgtgggtggccgaaaaaaaagggttttagggttatccccttttttttttgcccttaccccttttttcccccagaggggaggggggcccttggccccccctttaagggggggttttccttttttttttcccccccgggggaaagggccccgtttttttttaaagccgggggggcctattttgagggtgggggttgaaagcccctttttcccccccctccccccctgggcccttcccaattattccttttttgggccca

SEQ ID NO: 538939 - DNA, 155 bp, Homo sapiens
gtttaccaacctgggcagcaaatggagctattaatagacgtgtcctatgcgctgatatatcacaacccttacctcatcgtccacatagagaaacagtcacagattgctactcaccccacacccaggtcaagtccaatgctggtacgggatgctgt

SEQ ID NO: 538940 - DNA, 316 bp, Homo sapiens
tgcagacagacgggacttgaattactatcatccaattatttggagaggaagagtgtgtgtgtgtgtgtgtgtgtgtgtgtgtgtgtgtgtgtgtgtgtgttgggggctgtaaacatgctctaggtctaggagtgaaggcgagtgtgggttatccagaggaggaatgtgtacagaggcatgtgttctcttcgggatctgggtggctttgtggcatcagaacagtgtgtctggaagtatgagggagagggcgtacccttgcttctgatttgggccaggggatttgtgtgattttagacgtatatagagactaacatgt

SEQ ID NO: 538941 - DNA, 129 bp, Homo sapiens
cttgaccccacgccctagcctaatatagatcggctacggcgttattagattcgcttggcgcttggttggaaacgggtgtgaagcagccttctgatggatgtattttcgcgttgttgaataaggattcaa

SEQ ID NO: 538942 - DNA, 141 bp, Homo sapiens
attatgttggttgaatctagagtgatccccagtttacccacaaacaggtcattattaccctcactgtcaatccaacacagtgcattctcattagtgaaagtgttaaaaacaatgtaaaatgggggtacctgagctctgaat

SEQ ID NO: 538943 - DNA, 127 bp, Homo sapiens
aatcatatcactgatattgttacagactcctacgcaaaatcctttgcatgtgcagagaagtttgcagcagaaaaaacagcagcttcagcttctacattatcatgtgaatctaaactctagacgaata

SEQ ID NO: 538944 - DNA, 404 bp, Homo sapiens
aatagcatccacagtgcaggggattatagattaagccaccgtgcccggcccattcctgtctttttaatttaatctgctcgtccctgacatcgaagatggtcttgcttaacagcttccacttatgtctcggaatagacctttttctgcaggaagggtgtagttgattcaaccctcacccactcatgccaaccgtagtgagtgctgtgactgcagctgcactgtttatcctgcttttctgcaggctactttttccaggtgtaccagttccaaccgtgcacaaaccgtcacactttaaagtgcacaatttcttggctaagcctgtgaaactgtctggctgctggcctaactatgagcaaacacagctatttatacgacaacgatgaactctgggcaggcagcagagc

SEQ ID NO: 538945 - DNA, 1063 bp, Homo sapiens
  misc_feature (440)..(440): n is a, c, g, or t
tgggtttttatcccgcccaaaattttttatttccttcaaaaattttgattttcccccggggccccttttacccccagtcgcggtcttcgtgttgcggcccgcccagtctttggtgatttcttctcttctctcagcaagttgggggagagggggaataccttttccctgcgggaaagaagaaacattcacggtggttgtggtggccctctgtggcaataaaaacaaaatgtgttggcgaaaacgcccagagtgtggcaacactgtgtgtgtgcgccagtgtgggatgatttttcttcccgtgtgtgaacccccgcgtttaaaagagatcccgcgggggcgccctctctcctgtgtgtgggggtgatctccccccacaattctcttctcctgtgggtgttggccccctctccggttccccatatgccagcgggtgtccccgnggtgctcgacaacttgtgaagagaacaatcgaagaaaaatctgttggcgcacaggctcttctatataacctacacctcagagagaggggggactacattccccctttggagagagggggagactcggggggaaagcgagagaagtgggggcggggcacatattctgagaggctcccacaagatgagaggggagataccccttgtgtggtgcgcccccaaaaagagaaatctctttctcacaacctgtgtgggcgccacaacattgtggtcactgtggggggccccccctatgagggggtgataacacacagatgtgtttacaggagaaaacgggacaccctgtggtgggggtgtctcaataagaacttacagagggagaaaaatttcttctccccccgcggtttgtgtgcacacaaggcgtgtgatatagaaccatctcaatagagatctctcccccagggaggggggaggaggggctaattatactacggtgcggagcacctttgggcaaccagaagttttataaaaagaagaacgccgggctgtgattaggaaaaaaattttttcttttaaatctacatacaccctccggtggaagagggaggacaaatatataaaagttg

SEQ ID NO: 538946 - DNA, 775 bp, Homo sapiens
  misc_feature (2)..(2): n is a, c, g, or t
  misc_feature (70)..(70): n is a, c, g, or t
  misc_feature (72)..(72): n is a, c, g, or t
  misc_feature (93)..(93): n is a, c, g, or t
  misc_feature (96)..(96): n is a, c, g, or t
  misc_feature (100)..(100): n is a, c, g, or t
  misc_feature (114)..(114): n is a, c, g, or t
  misc_feature (129)..(130): n is a, c, g, or t
  misc_feature (137)..(137): n is a, c, g, or t
  misc_feature (158)..(158): n is a, c, g, or t
  misc_feature (160)..(160): n is a, c, g, or t
  misc_feature (162)..(162): n is a, c, g, or t
  misc_feature (214)..(214): n is a, c, g, or t
  misc_feature (225)..(225): n is a, c, g, or t
  misc_feature (229)..(230): n is a, c, g, or t
  misc_feature (235)..(235): n is a, c, g, or t
  misc_feature (244)..(244): n is a, c, g, or t
  misc_feature (247)..(247): n is a, c, g, or t
  misc_feature (252)..(252): n is a, c, g, or t
  misc_feature (256)..(256): n is a, c, g, or t
  misc_feature (258)..(258): n is a, c, g, or t
  misc_feature (262)..(262): n is a, c, g, or t
  misc_feature (285)..(285): n is a, c, g, or t
  misc_feature (300)..(300): n is a, c, g, or t
  misc_feature (302)..(302): n is a, c, g, or t
  misc_feature (310)..(310): n is a, c, g, or t
  misc_feature (313)..(313): n is a, c, g, or t
  misc_feature (367)..(367): n is a, c, g, or t
  misc_feature (401)..(401): n is a, c, g, or t
  misc_feature (421)..(422): n is a, c, g, or t
  misc_feature (432)..(432): n is a, c, g, or t
  misc_feature (434)..(434): n is a, c, g, or t
  misc_feature (445)..(445): n is a, c, g, or t
  misc_feature (458)..(458): n is a, c, g, or t
  misc_feature (493)..(493): n is a, c, g, or t
  misc_feature (500)..(500): n is a, c, g, or t
  misc_feature (544)..(544): n is a, c, g, or t
  misc_feature (554)..(554): n is a, c, g, or t
  misc_feature (603)..(603): n is a, c, g, or t
  misc_feature (688)..(688): n is a, c, g, or t
  misc_feature (697)..(697): n is a, c, g, or t
  misc_feature (743)..(743): n is a, c, g, or t
tnttctgctgtggtgtggcggtttccctttcctcgggggagtgttttccgtggtttgttgcccttgccantnacaaaaatgttggaaagtcgngtngcanagctgttgccattngcatctttcacgtgnnccacgtnaaaagatccagggtgcctttntntnttggtgttcacaccaattcttcctaggttagcacctccagtcaccattcacnggttaccagtntcgnncttgntgaaatcanttntcttnccantntccnattcaatctgaatggtattattnaccttgttggggggntnggggtagnggntggtgcgggcatcatgagttaccagatgagggattccttttgtgcccacaaagntctttctcactttgcacaacttgtactagaaaantacaagggttagccacattnnttccatcttncntgttctttttnaccctatacaggnaccatgggttccctaactgctgcagattaattgtnacgctgntcgttctttccaccctcaagtgtttgttgcataaagcccttctntaggctcgtnctcctaacatccaccattgccctccactcctccaatgtaaatgccactncagtttcccaggctctttaagccttatggggccctgggaattcttcccttcaactcaactttatcttaatggctccctgtacatnacgactgantattgtctcacaaacaagcaattacattaccagttcatccaatcancaaatacttcacatagcatttcaattttggat

SEQ ID NO: 538947 - DNA, 186 bp, Homo sapiens
acccggtgtcgtccactctgagctcaggtgatcaccttgcgctcgcccgtccaaagtgctgcaagttacaggcatgagccaccgtgcctggccgagacacattttaatagcatatatccagagagagaggacgtatttgtggaagatgttatgaaagcaagtaaagcacagtgatggccaacatgg

SEQ ID NO: 538948 - DNA, 1005 bp, Homo sapiens
tctcttcagttgtctgctactcagaggaaggggcggttggtgcggcctccattgttcgtgttttaaggcgccatgaggggtgacagaggccgtggtcgtggtgggcgctttggttccagaggaggcccaggaggagggttcaggccctttgtaccacatatcccatttgacttctatttgtgtgaaatggcctttccccgggtcaagccagcacctgatgaaacttccttcagtgaggccttgctgaagaggaatcaggacctggctcccaattctgctgaacaggcatctatcctttctctggtgacaaaaataaacaatgtgattgataatctgattgtggctccagggacatttgaagtgcaaattgaagaagttcgacaggtgggatcctataaaaaggggacaatgactacaggacacaatgtggctgacctggtggtgatactcaagattctgccaacgttggaagctgttgctgccctggggaacaaagtcgtggaaagcctaagagcacaggatccttctgaagttttaaccatgctgaccaacgaaactggctttgaaatcagttcttctgatgctacagtgaagattctcattacaacagtgccacccaatcttcgaaaactggatccagaactccatttggatatcaaagtattgcagagtgccttagcagccatccgacatgcccgctggttcgaggaaaatgcttctcagtccacagttaaagttctcatcagactactgaaggacttgagggatccgtttcctggctttgagccctcacaccctggatccttgactaataggccattatgctgtgaatgaacaaccccacagaagcctttggccctaaacgttgcataaaggcgctgcttgctgattctggctgcaggactgtccctgcaaggttcagtgggtataatgacccctgtgagagtggcactttagagtcacacagtcatgaccctagaacagcggacatggtctgctatacac

SEQ ID NO: 538949 - DNA, 196 bp, Homo sapiens
aagatactcactcttcagaatatgggataactcgtgttattgagatagagtaacgctctatgttgcccaggctaggagggccgtggcatgatctcggataactagcaacctccacctcggatcgctgcaaccttcaagtaattctcctgcctcagcctcccgagtagctgggaccacaggtgcccgccaccatgct

SEQ ID NO: 538950 - DNA, 842 bp, Homo sapiens
  misc_feature (762)..(762): n is a, c, g, or t
  misc_feature (769)..(769): n is a, c, g, or t
  misc_feature (799)..(799): n is a, c, g, or t
  misc_feature (828)..(828): n is a, c, g, or t
  misc_feature (838)..(838): n is a, c, g, or t
tctcttcagttgtctgctactcagaggaaggggcggttggtgcggcctccattgttcgtgttttaaggcgccatgaggggtgacagaggccgtggtcgtggtgggcgctttggttccagaggaggcccaggaggagggttcaggccctttgtaccacatatcccatttgacttctatttgtgtgaaatggcctttccccgggtcaagccagcacctgatgaaacttccttcagtgaggccttgctgaagaggaatcaggacctggctcccaattctgctgaacaggcatctatcctttctctggtgacaaaaataaacaatgtgattgataatctgattgtggctccagggacatttgaagtgcaaattgaagaagttcgacaggtgggatcctataaaaaggggacaatgactacaggacacaatgtggctgacctggtggtgatactcaagattctgccaacgttggaagctgttgctgccctggggaacaaagtcgtggaaagcctaagagcacaggatccttctgaagttttaaccatgctgaccaacgaaactggctttgaaatcagttcttctgatgctacagtgaagattctcattacaacagtgccacccaatcttcgaaaactggatccagaactccatttggatatcaaagtattgcagagtgccttagcagccatccgacatgcccgctggttcgaggaaaatgcttctcagtccacagttaaagttctcatcagactactggaaagggancctgaanggaattcggtttttccctgggctttttaanccccctcaaaaaaccctgggaattccttngaccctaacnaaag

SEQ ID NO: 538951 - DNA, 413 bp, Homo sapiens
tgcaaaagggctatgtcttagccctgtcataatccccacttttaaaggacaaataaaagatcttccctgacggagttaaccttcccaatcccactacagctacactttcccatgcaccttggcaaatgtgtaacaacttccatttctcagaagattgtggaaaagaaagaacgcactttcaaaataccacaccttttattcctgaccataagaacagttgagagaaacacgattcctccatcagttaagagtattttaacaggatcttacctttattttcatctgtctttacaacttggacaaaatctcttctaatgaccatatttgaatgcgggagcccgtttctctcggttttcatcaaagatccagaggttgacccgagcccgtgtgatggcggaaagtcagtgcgtatt

SEQ ID NO: 538952 - DNA, 484 bp, Homo sapiens
  misc_feature (19)..(19): n is a, c, g, or t
tgacgggcagtgaatcganctcggtaccagggttgcttggttccagaggaggcccaggaggagggttcaggccctttgtaccacatatcccatttgacttctatttgtgtgaaatggcctttccccgggtcaagccagcacctgatgaaacttccttcagtgaggccttgctgaagaggaatcaggacctggctcccaattctgctgaacaggcatctatcctttctctggtgacaaaaataaacaatgtgattgataatctgattgtggctccagggacatttgaagtgcaaattgaagaagttcgacaggtgggatcctataaaaaggggacaatgactacaggacacaatgtggctgacctggtggtgatactcaagattctgccaacgttggaagctgttgctgccctggggaacaaagtcgtggaaagcctaagagcacaggatccttctgaagttttaaccaagcaaccctggtacca

SEQ ID NO: 538953 - DNA, 235 bp, Homo sapiens
aaattcattccagcgtaagaatcttatttttaaactataagaattctaggctgggtgcagtggctcacgcctgtaatcctagcacttgggaggcctaggtgggtggatcacttgaggtcacaaattcaagaccagcctggccaacctggtgaaaccccgtctctactaaaagtacaaaaatcagctgagcatggtggtgggcgcctgtaatctcagctacgctggaatggaattg

SEQ ID NO: 538954 - DNA, 641 bp, Homo sapiens
tctcttcagttgtctgctactcagaggaaggggcggttggtgcggcctccattgttcgtgttttaaggcgccatgaggggtgacagaggccgtggtcgtggtgggcgctttggttccagaggaggcccaggaggagggttcaggccctttgtaccacatatcccatttgacttctatttgtgtgaaatggcctttccccgggtcaagccagcacctgatgaaacttccttcagtgaggccttgctgaagaggaatcaggacctggctcccaattctgctgaacaggcatctatcctttctctggtgacaaaaataaacaatgtgattgataatctgattgtggctccagggacatttgaagtgcaaattgaagaagttcgacaggtgggatcctataaaaaggggacaatgactacaggacacaatgtggctgacctggtggtgatactcaagattctgccaacgttggaagctgttgctgccctggggaacaaagtcgtggaaagcctaagagcacaggatccttctgaagttttgcatttgttgctgattctgtatttagtagccataggaaccaggtcttgtaattgtaagtacactttcaacaaaatcagatcagaccagatggaagagtaaatgca

SEQ ID NO: 538955 - DNA, 638 bp, Homo sapiens
tctcttcagttgtctgctactcagaggaaggggcggttggtgcggcctccattgttcgtgttttaaggcgccatgaggggtgacagaggccgtggtcgtggtgggcgctttggttccagaggaggcccaggaggagggttcaggccctttgtaccacatatcccatttgacttctatttgtgtgaaatggcctttccccgggtcaagccagcacctgatgaaacttccttcagtgaggccttgctgaagaggaatcaggacctggctcccaattctgctgaacaggcatctatcctttctctggtgacaaaaataaacaatgtgattgataatctgattgtggctccagggacatttgaagtgcaaattgaagaagttcgacaggtgggatcctataaaaaggggacaatgactacaggacacaatgtggctgacctggtggtgatactcaagattctgccaacgttggaagctgttgctgccctggggaacaaagttaaacaagcctccggaaactcttatcactactattgattactagtttccagcttggtggaccaagctgggtgatcccgtgccatctctgcacgtggccgtcgccttgcatgtatctgcctatacatggcagaaggactgaa

SEQ ID NO: 538956 - DNA, 209 bp, Homo sapiens
agcaccagtctgcatcatggtccaatgacccgctaaaagcctgtgaccgcatttacatgatgccctgaatcctctaccgaacagacacactgactgagtatgcctagtgggaggactacgtggcctgccgccataccaacacctacagcctgcccaaccaattctatgacacaggcttctttgtctacgataacgccgtcttctacaac

SEQ ID NO: 538957 - DNA, 951 bp, Homo sapiens
tctcttcagttgtctgctactcagaggaaggggcggttggtgcggcctccattgttcgtgttttaaggcgccatgaggggtgacagaggccgtggtcgtggtgggcgctttggttccagaggaggcccaggaggagggttcaggccctttgtaccacatatcccatttgacttctatttgtgtgaaatggcctttccccgggtcaagccagcacctgatgaaacttccttcagtgaggccttgctgaagaggaatcaggacctggctcccaattctgctgaacaggcatctatcctttctctggtgacaaaaataaacaatgtgattgataatctgattgtggctccagggacatttgaagtgcaaattgaagaagttcgacaggtgggatcctataagattctgccaacgttggaagctgttgctgccctggggaacaaagtcgtggaaagcctaagagcacaggatccttctgaagttttaaccatgctgaccaacgaaactggctttgaaatcagttcttctgatgctacagtgaagattctcattacaacagtgccacccaatcttcgaaaactggatccagaactccatttggatatcaaagtattgcagagtgccttagcagccatccgacatgcccgctggttcgaggaaaatgcttctcagtccacagttaaagttctcatcagactactgaaggacttgagggatccgtttcctggctttgagccctcacaccctggatccttgactaataggccattatgctgtgaatgaacaaccccacagaagcctttggccctaaacgttgcataaaggcgctgcttgctgattctggctgcaggactgtccctgcaaggttcagtgggtataatgacccctgtgagagtggcactttagagtcacacagtcatgaccctagaacagcggacatggtctgctatacac

SEQ ID NO: 538958 - DNA, 1004 bp, Homo sapiens
tagatcatccgattgacgcgcggcgcagtaggtaagtgagtatggtgataactgtgtcctaagagatcctggtcatgatagtgcttggatctcacgaataaaaaaacgcccgcggagccgatcgtgctgaatagttccagatgtactacctgaagtcctaatctggtagtctatcgagcagtgaggtccgaggtgcagcgtcgatatcatggatgacaacctccgctctctgatgaggccttgctgaagaggaatcaggacctggctcccaattctgctgaacaggcatctatcctttctctggtgacaaaaataaacaatgtgattgataatctgattgtggctccagggacatttgaagtgcaaattgaagaagttcgacaggtgggatcctataaaaaggggacaatgactacaggacacaatgtggctgacctggtggtgatactcaagattctgccaacgttggaagctgttgctgccctggggaacaaagtcgtggaaagcctaagagcacaggatccttctgaagttttaccatgctgacccaatgaaatgggtttgaaatcagttcttctgatgctacagtgaagattctcattacaacagtgccacccaatcttcgaaaactggatccagaactccatttggatatcaaagtattgcagagtgccttagcagccatccgacatgcccgctggttcgaggaaaatgcttctcagtccacagttaaagttctcatcagactactgaaggacttgagggatccgtttcctggctttgagccctcacaccctggatccttgactaataggccattatgctgtgaatgaacaaccccacagaagcctttggccctaaacgttgcataaaggcgctgcttgctgattctggctgcaggactgtccctgcaaggttcagtgggtataatgacccctgtgagagtggcactttagagtcacacagtcatgaccctagaacagcggacatggtctgctatacac

SEQ ID NO: 538959 - DNA, 712 bp, Homo sapiens
  misc_feature (129)..(129): n is a, c, g, or t
  misc_feature (180)..(180): n is a, c, g, or t
  misc_feature (186)..(186): n is a, c, g, or t
  misc_feature (192)..(192): n is a, c, g, or t
  misc_feature (195)..(195): n is a, c, g, or t
  misc_feature (200)..(200): n is a, c, g, or t
  misc_feature (209)..(209): n is a, c, g, or t
  misc_feature (221)..(221): n is a, c, g, or t
  misc_feature (226)..(226): n is a, c, g, or t
  misc_feature (237)..(237): n is a, c, g, or t
  misc_feature (240)..(240): n is a, c, g, or t
  misc_feature (246)..(246): n is a, c, g, or t
  misc_feature (249)..(249): n is a, c, g, or t
  misc_feature (259)..(259): n is a, c, g, or t
  misc_feature (262)..(262): n is a, c, g, or t
  misc_feature (266)..(266): n is a, c, g, or t
aaggaacgccacttcgtcactatctcctctccactggccactcagatccctcaggcggtgggggcggcgtacgcagccaagcgggccaatgccaacagggtcgtcatctgttacttcggcgagggggcngccagtgagggggacgcccatgccggcttcaacttcgctgccacacttgantgcccnatcatnttnttctncggaacaanggctacgccatntccancgcccaccttngancagttntgnggcgatggtnttntcancacgaggccccgggtatggcatcatgtcgatccgccgtggatggctaactgatgtgtttgccgtatagcaacgctcatcaaaggcaggcccgacggcggcgctgttggcagtagtaaccagaccctttctcatcgtaggccatgacctacaggatcgggcaccacagctaccagtgaccgacagttcagcgtaccgctcggtggatgaggtcacttactgggataaacaggaccaccccatctcccggctgcggcagctatctgctgagccaagggctggtgggatgaggagctaggaggaaggcctggagcgaagcagtcccgcaggaaggtgatggacggcctttgagcaggccgagcggaagcccaaaccgcaatcccaagctgctctgctcagcacgtgtatcaggagatgccgcccagtccgcaagcagcaggagtctctg

SEQ ID NO: 538960 - DNA, 704 bp, Homo sapiens
  misc_feature (28)..(28): n is a, c, g, or t
  misc_feature (74)..(75): n is a, c, g, or t
  misc_feature (146)..(146): n is a, c, g, or t
  misc_feature (209)..(209): n is a, c, g, or t
  misc_feature (217)..(218): n is a, c, g, or t
  misc_feature (272)..(273): n is a, c, g, or t
  misc_feature (283)..(283): n is a, c, g, or t
  misc_feature (287)..(288): n is a, c, g, or t
  misc_feature (293)..(293): n is a, c, g, or t
  misc_feature (297)..(297): n is a, c, g, or t
  misc_feature (301)..(301): n is a, c, g, or t
  misc_feature (311)..(311): n is a, c, g, or t
  misc_feature (320)..(320): n is a, c, g, or t
  misc_feature (325)..(325): n is a, c, g, or t
  misc_feature (371)..(371): n is a, c, g, or t
  misc_feature (378)..(378): n is a, c, g, or t
  misc_feature (409)..(411): n is a, c, g, or t
  misc_feature (447)..(447): n is a, c, g, or t
  misc_feature (510)..(510): n is a, c, g, or t
  misc_feature (541)..(541): n is a, c, g, or t
  misc_feature (558)..(558): n is a, c, g, or t
  misc_feature (632)..(633): n is a, c, g, or t
  misc_feature (640)..(640): n is a, c, g, or t
  misc_feature (678)..(678): n is a, c, g, or t
gccacaatcagaaagccacccattctgntgcttctcttggcttccccttgagaaggatgcctgaggcgggatgnncccccaaactccaggggacaactggggaagacatggggtatgcaaagagatatgatgtaaaccacgggacngggggagggtggggtggtgtggattccggggaagacacatacacacagactctcccgctcagnggctaagnncgggggcgtcaatctctgcccccaacagcagccacgagaacatcagggaaagannaggtgtccanaagnnttttnagtncttnctatcatgangcgtctgcngagangggctgggtcaaggtccctggactctgccttcagggcgcattatcnctgagcnaaggtggcttttttggtggccatcaactttnnntatttgctttctgtgttcacgtagccatcgcctttnttcttagagtgaatcaacttcccggctaccatcacttcaaagaacccggtggcctggggggtnccctcgccgcagatgtccaggcggccggggnactcatcttctaacttnttcttgagctgaagatacttggacttgtagcctcaagcgccacaataaacgattcgcgcacggcgagagccatnngctcggnggctgccacatccgctgaggagcggacgcccggggccncactaacctcccacctggacgcgcta

SEQ ID NO: 538961 - DNA, 262 bp, Homo sapiens
agggggaccccgggggccccctcgtgtgtaaggacgtacccccaggtattttttcctatggaaccaaaaaagggccccccccaggggtttacatcaaggtttcccccttcctgccctggataaaaagaccaatgaagcccctttacccccaggcatgagactacccttcctttgggcctgcccctttttgggccaaaggccaaaatcccccagggggggcccgtcggggttgccggcctgtaataaatggttttttggggta

SEQ ID NO: 538962 - DNA, 438 bp, Homo sapiens
  misc_feature (15)..(15): n is a, c, g, or t
cctcttagaggggantttgaagacccgggccccgaaggggtaaccccttttttccggggggggggggaaaaaatcagggccccccttggtattttcaaaaacccccggttttttttgggggaaaccataaaccccaagggggggggggtttttttggacccccggggggggggggggccccccaaaattattttttttaggggggggttaaaaagggaaaaaggtttccaaaggggggcattttttggggttttcccccggtctttaaaagggggtttgggttgtttcccccccccccccggggtttaaaccaaagggggggggggtttttttgggcttttctttttttttgggggggttttttttgggggggggggctgttttttaaaaaaaacctgtttgggggggggttttaaaaaaaaagggtttttaccccca

SEQ ID NO: 538963 - DNA, 1202 bp, Homo sapiens
gcggacgcgatgggtcgacacagtatttcctcacgcaagcaaccgcatccatactccttctaatagctatcctcttcaacaatatactctccggacaatgaaccataaccaatactaccaatcaatactcatcattaataatcataatggctatagcaataaaactaggaatagcccccatattcacttctgagtcccagaggttacccacaggcacccatcagacatccgagcctgactatctatctacacatgacaaaaactagaaaccacatctcaatcatataccaaatactctaccctcactaaacgtaagccttacatacctcactctctcaatcatatatccaagtcatagcaggcagattgaggtggactaaacacaaacccagactacgcaaaactctaagcaatacgtcctcaaattacccacataggatgaaataatagcagattctacacgtacacaccccataacataacccatactcaacttaaacatactaaataataatcctaactacataaccgaaatcacctactaactcaactaaaacaacaagcaaacacaaccactaacatacagaatacatcaacaacctgaacgacaaagactaaacactgaccgtagaaaccaccataaatagcaagtcgacacacatacactctacacattaggacggaacagaacacaccgactaaaccggacataagacacaaaaagagaccagacatacaaaaagagatgcaaaagaagaacagacgacagaggagaaacgggaagtgccgccacgacaagtccagtagaccagcagcagggaacacgcgtaaaagacgaagcagcgatcagagccgtacggcagtaagcaagtgccagccgagagccaccgcgagcggcacaagacgcaaaggcaggaaaagaacaagaggaggcaggaaacctaaacaaccaacccatacagatagcaaaggagaacgctgaccagaacaaacagaaacatacacacaagacgaaagaaacaaagaaaaaccaaaaaaagaggaaaaaaaacgaaaagaccaagacgggcaagaaagcgaacgagaaatgcaagagcccatctagccgcaaacgaaacgacgccgtagccagcaggaacacagaaagagaacaaaaagcctggaggacaaaacaacagcaagacgaaaaaacagaaaaaaat

SEQ ID NO: 538964 - DNA, 664 bp, Homo sapiens
ctgagagtctcgaggacaatggaaaaacactaatgggatggattgaccacaactgagggtccccaggacagaggtaaacactaatggggtggatagaccacacctcagggtctccaggacagaggtaaaaaccaattggatggatggatggaacctgagggtctccaggaacgaggtaaaacactgagaagatggatagatcacacctgagcatccccagtacaaaggaaaacactaataggattgaccatacctgaggatctccaataacagtagggaaacactataggggctggtatcgcccacacctgagagtccttaggacagaggtaaacactgaggggctggatgggccacacctgagggtcctcagtacagagcagcgaaggatggctgttgctgggataattccatatctttggagaacaagaattccaggtagttttcttcgctccaaacagcgtggttatgaactagctttccctccaggaggatttaaagcttcagataatatctgtagtaataaagaaaaacaggccaggtgccacggctcacacctgtagtcccagcactttgggaggccaaggtgggaggaccactgaggccaggagtctgagaccagcctggacaacgtagcgagagcccatctctgtaaataatttca

SEQ ID NO: 538965 - DNA, 139 bp, Homo sapiens
ggtgctctagagatccctagacagcggacccatttgaccaccagtgtgtcccccttgtcttgagcaggtaggacacgctgtagagccggctgccacgtgcttcaccaggatctcctcgcccgggggtcgggctgtctga

SEQ ID NO: 538966 - DNA, 489 bp, Homo sapiens
cccccgggttttcccttttatgtttccggtttgtattttgggggaaattgtgagggaaaaccattttcccccgggaaccagttttgcccttgtttcccccaagctgaaatttaccccccctaaaagggacaaaaagtgggggcccccccgggggggggcccgtttaaaaaaaaggggtccccccggggggaagaaattgggcaaaaaccccttttccccccggctttgggtttttagggcttttgttttccgccttttttcttttaaacccctcccccaaaggggaagcccttcccccgggtcccctcaaagtttttccggggcccttggccccggggtttaaaaaccaatttcccaaggccaaaaccgttttttcccccagggggggggggaaacaaaaaaacttggcccctttttggtaggggaaaaaaaatttgaaaggtttttaattattttgatgggggaaaaaaagcagggggaaatccccca

SEQ ID NO: 538967 - DNA, 141 bp, Homo sapiens
tctagaggatcccaccctggctcacgtaggctggggttttttatggttacccccgttctgcgtgggaacggggtgttccgcgtccgctttgcacacacatgaaacccgagcaaaggtcacatttccaattgggtaccggag

SEQ ID NO: 538968 - DNA, 182 bp, Homo sapiens
gcagtaccctgagtgatcctgaagcttgatcttaacattgccctgattgttacccggaggcccaggttaccaaaccggaaatgaattgtcccagacattccgaaaagttcgaaagaaacataccctagcctcaaactctccggttcaaccgatggttgcacaacaggttctatttattcctg

SEQ ID NO: 538969 - DNA, 192 bp, Homo sapiens
tggtggcgtctgtgttccacacaacccgctgggtgccccccttgtatcggggagctgtacgtggctgcgcaccacagaggagtgctctcagtgccagccacggtttcatgtggtacactgtgtccctgatgccctccggccacctggtatcctgcccctccccactgggacggaataaatgctctgcagagc

SEQ ID NO: 538970 - DNA, 1030 bp, Homo sapiens
ggcggtcctggggtagagtttgcaagacttactgactaggctagtcgagtaactattcgggtcatggcgtcaaactcaactaagatctttcctggcagatgccggctatggcgaacaggaactggatgccaactctgacccttatggaattggacaaaggcctaagatctggcaaacttggtgaacagtgtgaagcagattgttcgctttcccagacttatttcagaagtatccattccctattcttatcaattctgcattcctaacagttagctgatgttttcagagttggaaataatatcctgcaggctatgtgtacttcacagttacccaacaaacagtgagacacacattcggcagaagcatctcacacatgtggcatcgacatctcgtgcaagcagcacatccctcctgtgcattccatcagtcacatgcatcctgtggccaagagccatcaccctccggcatgtagcgaagtcatggcatcaatcaattcctgagaggaagaatgctcatcatagtattcgtcagagtttagattcacatgatcactgtagaagtcagacagctgcatggaggacgcgagaggccacaacacacacctgacgcaaggcaaacggcacaacggcgacggaaccccgcaacccacgcagtgaactgatccaggaaagagacaccacaacaccgaagcacaaaacgaaacccagacagacgcacaggaacaagaagaaagaggaaaccagcagccgcaagaaagaacacacagcgccacaccaaccgaccacaaaaggggcaagaggcgcagaccgacaccggaaaagacacgaagcagcaacaagagagaagaggagcaacgagagcggacgcaccgcggagagagaggaggagagagacgacaagacgacacagcgggacacagagacagggcaaggaggcacgagaaaaggagcacgacaacgccaggcgcacggccaggccagagggaaaccgcggaggcggggggaagagacgaaagaacaaagcgagagac

SEQ ID NO: 538971 - DNA, 227 bp, Homo sapiens
agcggcggtgctggtatttagagcgcagcggctgaccgggccggatcgccttcgcccgccgcccgcccgcaaacttcgtgcccggcccgtccctcgccccccgcctccgccaccgctcggccgagagtgcccctccccaccgaacatgtcgatccaaggcccgagtatcctgcgttgcctcggcggtcttcagcgccctgggcgctgctatggcaacagccaagagc

SEQ ID NO: 538972 - DNA, 385 bp, Homo sapiens
tccacgcggagagagatagtcgcgcgtgtgagagagagagagagagagagagagagatagagagagagagagagagagagagagagagagcgcgagagagagagagagactgattgtgctttaacacaccgcaattattgtctccaaactcttccggcctctccaattataattttcccatctatctatatatcttttccgatgttttttagacctatctctttagacacaattctgattttctagtcattccatctacagatctttcgcggccgaagtctctttaggttctgtgttcccttgccagagtgccttactccgtctctagcactggcgcggataccctgttcatttttctcttctcccctatattcccctccctctg

SEQ ID NO: 538973 - DNA, 890 bp, Homo sapiens
ggtcctcttcttcagcacatgccaaagctgttcctcacggactgtgagacaagagcatcttggatgtaggacaatggaatgagttagatgccttattggaggaactggaacgctccacccttcaggacagtgatgaatattccaacccagctcgctcttcccctggactcagcagtttccagaaaggcagacgtaaccttgattgagacttcggagatcctttctagttcaggatagacacaagtcccttggccggcgtcagctcgtgtaatactaaccaatatccaggagctcaatgtctacagtgagagcccaagagtccaacagtgaatcaccacgcatcgcttctaaaacgtcagcagctgctcagttgtgatgagctcatggctcacctgatcgtgagatgcatggccaaggttgcagtgagagcagatgctggcaacgaagcacttaccagtacaacgcaggatcacctaaggcctccctggactcaagtgcttggcgggtctggcgtcaggaattgcaggaccttggtgttgccacagtgcccaagggccattgtgcatcctgccagaaaccgattgctgggaaggtgatccatggctctagggcaatcatggatcctgtagcatttcgtctgtactcatgtgccaagaagaagatttggcttccagtcccttctttgagcggagtggctttggtctactggcgcaagagtaccaccaatttttttcttcccgctggcttactgaggctggccctgctgggtaagggctgtcgccatgggcccgactggccccagagcacttcttcggccccactgggggaggggtggggcccaggctcctcgaacgggcgggcgctggcgaaggtttctcccctccccctgg

SEQ ID NO: 538974 - DNA, 649 bp, Homo sapiens
  misc_feature (4)..(4): n is a, c, g, or t
  misc_feature (26)..(26): n is a, c, g, or t
  misc_feature (41)..(41): n is a, c, g, or t
  misc_feature (47)..(47): n is a, c, g, or t
  misc_feature (62)..(62): n is a, c, g, or t
  misc_feature (64)..(64): n is a, c, g, or t
  misc_feature (79)..(79): n is a, c, g, or t
  misc_feature (81)..(81): n is a, c, g, or t
  misc_feature (119)..(119): n is a, c, g, or t
  misc_feature (124)..(124): n is a, c, g, or t
  misc_feature (160)..(160): n is a, c, g, or t
  misc_feature (172)..(172): n is a, c, g, or t
  misc_feature (191)..(191): n is a, c, g, or t
  misc_feature (193)..(193): n is a, c, g, or t
  misc_feature (216)..(216): n is a, c, g, or t
  misc_feature (227)..(227): n is a, c, g, or t
  misc_feature (243)..(243): n is a, c, g, or t
  misc_feature (259)..(259): n is a, c, g, or t
  misc_feature (264)..(264): n is a, c, g, or t
  misc_feature (280)..(280): n is a, c, g, or t
  misc_feature (287)..(287): n is a, c, g, or t
  misc_feature (340)..(340): n is a, c, g, or t
  misc_feature (346)..(346): n is a, c, g, or t
  misc_feature (354)..(354): n is a, c, g, or t
  misc_feature (384)..(384): n is a, c, g, or t
  misc_feature (418)..(418): n is a, c, g, or t
  misc_feature (453)..(453): n is a, c, g, or t
  misc_feature (457)..(457): n is a, c, g, or t
  misc_feature (463)..(463): n is a, c, g, or t
  misc_feature (475)..(475): n is a, c, g, or t
  misc_feature (477)..(478): n is a, c, g, or t
  misc_feature (528)..(528): n is a, c, g, or t
  misc_feature (532)..(532): n is a, c, g, or t
  misc_feature (544)..(544): n is a, c, g, or t
  misc_feature (638)..(638): n is a, c, g, or t
taantaactatggtttaatttctcanacattcttgaataanaaaaanaaatccagggatgtntntttatgaaaagaaanantaaatgaagtaaaccaagaattgaccacttttaccccnctggnttctgatcccaaaaatttcactatggggtctttcanatttccaaaganatttctattctaatgccanantttcttgtcctggattacaaaantgatttaaggntttttattaaaaagtngtttcactcaaaaaanaaaanactttctactgtcccngaaaaanagccataacagggggatctatatcatttgtaaatttacattctgaatctaaanaaaccngttgaaanactagtggaaaaagagaaaaaaaaaaaagncaacaagttattcatgcctaaaaagaacaaaggntaacaggccttttgaattacaaagtaaagaatctncctnagaccncattgggggggngnncagccgggaaacttggctttggggggttgattggctatggccgtggtgcnaggnctggctacaacnctggctcagactccggctttctcttcatctttcaaagcttcttcgtaatgggttgggaaggccagggggtggtccatttaccttggccaaaaantccaggacttt

SEQ ID NO: 538975 - DNA, 133 bp, Homo sapiens
tcagctcgatgcataaaaaacacaggaatgtcgtgatgatcacgggaaggcatatctaaaggatttagtacaaagtgctaagtcaggtgtgaggcaaatctgatgggctccatttccaaagagaaatgaacag

SEQ ID NO: 538976 - DNA, 171 bp, Homo sapiens
  misc_feature (155)..(155): n is a, c, g, or t
acccaggctggagtgcagtagtgcaatctcatgtcactgccacctctgcttcctgggttcaagtgattcttgtgcctcagcctccctggtagctggattacaggcgcctgccatcacacctataatcatgctggccaggctggtctccatctttnggcctctagtgatcta

SEQ ID NO: 538977 - DNA, 512 bp, Homo sapiens
ggggccggcgcagtggtcacgcctgtaatcccagcactttgggaggctgaggcaggggatcacctgaggtcaggagtcgagaccagctgacaaatggagaaacccgtcttactaaaaatacaaaaaaaaattagctgggattacaggtgcctgccaccacacccagctaagtgttggtatcccaagtacgacgatggggttccaccatgttggccaggcagatctcaaactcttgacctcgtgatgcacccaacctcggcctcccaaaagtgcgtgggatcaacattgacgatgcagccaacagagcaccgtgcactggcggacgcaaatagagacacgcgacaaccaaaaatcccctcaatctactagcgggcaatacgaactcctctgtcaacgcagtaaggtcaaccactgggccccagaaagggcgtgaccaggaccccttaacacacgggctgaaccagatcgcagcgcaccatacccacacgccactggcgacactaccacaacaa

SEQ ID NO: 538978 - DNA, 678 bp, Homo sapiens
  misc_feature (59)..(59): n is a, c, g, or t
  misc_feature (63)..(63): n is a, c, g, or t
  misc_feature (66)..(66): n is a, c, g, or t
  misc_feature (73)..(73): n is a, c, g, or t
  misc_feature (83)..(83): n is a, c, g, or t
  misc_feature (89)..(89): n is a, c, g, or t
  misc_feature (132)..(132): n is a, c, g, or t
  misc_feature (144)..(145): n is a, c, g, or t
  misc_feature (152)..(152): n is a, c, g, or t
  misc_feature (154)..(154): n is a, c, g, or t
  misc_feature (158)..(160): n is a, c, g, or t
  misc_feature (246)..(246): n is a, c, g, or t
  misc_feature (362)..(362): n is a, c, g, or t
  misc_feature (383)..(383): n is a, c, g, or t
  misc_feature (397)..(397): n is a, c, g, or t
  misc_feature (486)..(486): n is a, c, g, or t
  misc_feature (495)..(495): n is a, c, g, or t
  misc_feature (498)..(498): n is a, c, g, or t
  misc_feature (529)..(529): n is a, c, g, or t
  misc_feature (547)..(548): n is a, c, g, or t
  misc_feature (553)..(553): n is a, c, g, or t
  misc_feature (569)..(569): n is a, c, g, or t
  misc_feature (610)..(610): n is a, c, g, or t
  misc_feature (653)..(653): n is a, c, g, or t
ttttttttttgtattccattcccccgtctataacccccttctctcctccggggaaagcnaganggngtatggngtgggttttnttgttnggttttgagaggccggggaggtgccgagctcggtgctggtctntttccaaatatnnatatgtntnttannnctggaaaatcctccagcacccaccacccaagcactctccgttttctgccggtgtttggagaggggcggggggcaggggcgccaggnaccggctggctgcggtctactgcatccgctgggtgtgcaccccgcgagcctcctgctgctcattgtagaagagatgacactcggggtccccccggatggtgggggctccctggatnagcttcccggtgttggggttnacactccagcactncccacgctgcccgttcagagacatcttgcactgtttgaggttgtacaggccatgcttgttacagttggggatgttcagggagtagaggngctccaganggncccgctcatccggaaggcgcatggaggaganccgctccaggacctggannagtanctgtaggcagggagtnctggcaagggggtggtcgcagcttcttgggctcctccaggnccaaggtgatgcttgccacccttgcccatctgccggtgctgcncagtgaccttctcccggaacacggc

SEQ ID NO: 538979 - DNA, 758 bp, Homo sapiens
agatacttctgagtcttaaaagcataataggccgggcgcggtggctcacgcctgtaatcccagcactttgggaggccgaggtgggtggatcacaaggtcaggagttcaagaccagcctggcccaaatggtgaaaccctgtctctactaagtatacaaaaattagctgggtgtggtggcgggcacctgtgatcccagctactcaggaggctgaggcaggagaatcgcttgagcctgggaggtggaggttgtggtgagccaatatcgtgccactgcactccagcctgggtgacagagtgggactccgtctcaaaaaaaaaaaaaagcttaataatttattacttcccaaatatttaaaatttggagtgccttggcagtggggatgggtccctaaaatggcgtatagaattaagggcacagaatggtgtgtaaggtcctgaatcgggctaaaatacaggggatgtatgtatgggaattatgaggcataagtagccagtatctatagtagaatctacaaggcctccttttggcaccggtagactagaatataccggttatgggttgccttggagtgtatatctctcaggggctagaggtgctggtctcaagcacaatccacgactagggttgaaccactcattgttcaaaatccatgggtgcggctccaatgtaaaatatcactaccatcagtccacaagcaaccattaggaaaatctacagggactgtcacttgacttttaagcagtataagaagtccaag

SEQ ID NO: 538980 - DNA, 624 bp, Homo sapiens
caagcttcccatccctcatattcagcgtccaccgcaggccgccactcgttatgcccgagcatcagagccgctgtgaattccagagagtcagcctggagattggcctgcgagccgcacggtgacctgattggtcgcgtgaggctgtgcgtctgctcgtaccgcgatgtctagccagtagacgctggctcgacatcaggatagagggcccggtaagcgatctcgccttcaagcaggatggggcatagaagattacactgacgatccagcaagagtgccaagatactgacgcccccgctgaccccagttgatccatcgatatggtcaccagagagcatgcaatacagcagtgccgtccccgagctaccctcaggcattcctaacgcgctcgaaagatcacgcctcaactcatcacaccgcccctggccattaaacgaacataggggtctcccctgccctcgccacatcgaaaggtcgcactactcccgcggacaactcccgactacacactcgttcctcactaccatcagctcgccccgcgcagccaggcctaaacatcgaaccacgtaccgctaaccacgacacacacccgagaggcatcctccactcgcctaccgaccccacccg

SEQ ID NO: 538981 - DNA, 533 bp, Homo sapiens
tggccaggctctctagctgtgggaaaaacaaacaaagggaacaagtaagagattggtaagatggagaaccctagaaaaggtattccctatacccctcaagggggcacagtagacaggtatgggggtgtacatcacggacgggccaagagcaggggggagatgctctagctttctccagtgtcacggcctcagggagcaggggacaagcacaagaagaaaaaaaggaccaccaggtttctttctttttccccttcgctcaatatcctagaatatatggatggaggacagtacgtgtaggggggtgacccgtgcagattggaccttggaactcaggggaatagcaggccccagggaggggacacttttcgtaggggcattccagggtagaggggccgatagtgatgcagcacaaagtgtaaaggggtggggcagtgtataatggagcgggtaggcatcggggggaattcttctcacaggcagacaggattggacgggcctaggggacggaaggagtaataaggaggacagaaggc

SEQ ID NO: 538982 - DNA, 405 bp, Homo sapiens
gataagttggcggctccttacgctgtggtgaccccagattaataaaggggctaatccgaaaaaaaagattgaatgaatgaatgaattgtttatatgttgggctcatatttttttgagatcctgtacttttaatacacgcaagcaaaaaaagagaacccttttcattccaatttttttttatttaatttaataaaatctaattaaatattaattgaaaaaatattacatatttccttcacttacgagagagacacacacattgtgtaaaatttttaaactgagtttccactcagaaattacaaaaagaattcaacaaacttcaacataaaacatgttccacatgttgtataaaaatgagccccctaaatgaaagatttaaagaaaaatagaaaatttaaacatgta

SEQ ID NO: 538983 - DNA, 724 bp, Homo sapiens
  misc_feature (38)..(38): n is a, c, g, or t
  misc_feature (61)..(62): n is a, c, g, or t
  misc_feature (66)..(66): n is a, c, g, or t
  misc_feature (68)..(68): n is a, c, g, or t
  misc_feature (75)..(75): n is a, c, g, or t
  misc_feature (85)..(85): n is a, c, g, or t
  misc_feature (87)..(87): n is a, c, g, or t
  misc_feature (128)..(128): n is a, c, g, or t
  misc_feature (140)..(140): n is a, c, g, or t
  misc_feature (146)..(146): n is a, c, g, or t
  misc_feature (158)..(158): n is a, c, g, or t
  misc_feature (167)..(167): n is a, c, g, or t
  misc_feature (184)..(184): n is a, c, g, or t
  misc_feature (195)..(195): n is a, c, g, or t
  misc_feature (201)..(201): n is a, c, g, or t
  misc_feature (246)..(246): n is a, c, g, or t
  misc_feature (251)..(251): n is a, c, g, or t
  misc_feature (266)..(266): n is a, c, g, or t
  misc_feature (281)..(281): n is a, c, g, or t
  misc_feature (305)..(305): n is a, c, g, or t
  misc_feature (329)..(329): n is a, c, g, or t
  misc_feature (415)..(415): n is a, c, g, or t
  misc_feature (597)..(597): n is a, c, g, or t
  misc_feature (601)..(601): n is a, c, g, or t
  misc_feature (644)..(644): n is a, c, g, or t
  misc_feature (652)..(652): n is a, c, g, or t
  misc_feature (668)..(668): n is a, c, g, or t
  misc_feature (714)..(714): n is a, c, g, or t
  misc_feature (718)..(718): n is a, c, g, or t
  misc_feature (721)..(721): n is a, c, g, or t
gccctgcggacagagaagagcctattggctgggttggnggcctggcaggctgcccctttcnncccngntacaggnccttgccggncnccacacaccagggggcaaagttctccccagccgcctcaggnggccccgctgcnaatccnctgtcttctgtnctgtctgtncctgggtcctgcctgcnccgtttctgcncaggcncctgaggggctgcctcaatggcccgctgggctcggggtgggtctngaggngggccttggcaaggntggcggggccgggcncccccagggacatgacacagtgcncacccttgcgcttggcccccgccnccttggtgctgtctttggaggctgttagcaggaccagtttggagaactttctgggcttcctgggggctgccgggatgacttctgtncctggcttgggggatggctcctggctggccttcacactctcaccctcctgctcgctgggctcgggcaggggcatcccgggacccagggcctgtccctcaggccacactcagcccccagcaggtggatttctcctactcccaggcaaggaacctggagtccagcggttccgtccttgcgtctnaacnagtactggcgctgccctggctgggtggggacagcgatgtgganatgttgtngatcccaccgtcactnaggactccttggcttctggcctcaagccggggtcacagcgcgacantgcncanaag

SEQ ID NO: 538984 - DNA, 365 bp, Homo sapiens
agagataacctactcagtgaactgcatggtgtctcctactataactttacacaagcacacacaagcgtgtaaagatggaaaggctacgcagacacaaccatgcacacacagatattataaaacagaaaaagtggaaatttaccaactagtcctcgcttggcaacgctttccccatcaacatgactagatacatatagaaaggagcttcattttaacatgcaccctaatcgagccagggatataggagaaacctctaatgcactttactttaaccacccccgcgaaggagaagggcctgtaggctgcctccgtacattcactctctgttttgttgttgtttaagagacagggtctggctgtgattg

SEQ ID NO: 538985 - DNA, 521 bp, Homo sapiens
  misc_feature (2)..(2): n is a, c, g, or t
  misc_feature (71)..(71): n is a, c, g, or t
  misc_feature (96)..(96): n is a, c, g, or t
  misc_feature (99)..(101): n is a, c, g, or t
  misc_feature (104)..(104): n is a, c, g, or t
  misc_feature (135)..(135): n is a, c, g, or t
  misc_feature (137)..(137): n is a, c, g, or t
  misc_feature (140)..(140): n is a, c, g, or t
  misc_feature (169)..(169): n is a, c, g, or t
  misc_feature (174)..(174): n is a, c, g, or t
  misc_feature (227)..(227): n is a, c, g, or t
  misc_feature (259)..(259): n is a, c, g, or t
  misc_feature (273)..(273): n is a, c, g, or t
  misc_feature (290)..(290): n is a, c, g, or t
  misc_feature (295)..(295): n is a, c, g, or t
  misc_feature (302)..(302): n is a, c, g, or t
  misc_feature (370)..(370): n is a, c, g, or t
  misc_feature (386)..(386): n is a, c, g, or t
  misc_feature (394)..(394): n is a, c, g, or t
  misc_feature (444)..(444): n is a, c, g, or t
  misc_feature (478)..(478): n is a, c, g, or t
  misc_feature (482)..(482): n is a, c, g, or t
gnggggtgatcttggttcactgcaacctttgcctcctaggttcaagtgattctcctgcctagttggccganatctcctcccagtgcacagggaggntgnnnagnattcccccagctttgctgtgtaggagcagtngnggnggaagaagggaaaggacccagtctgaggntcacnggtgccagcttcccgctctcgcagtgtctgatccacgtaaagccgggtctttnggggcacattgagtttcatggcctgggctggngggggaccactcanttcctccctctacaaanactgntgtacgnttcaggatcttgatgatcaggccaccacctcgagtggtcatgatgagggtgttgtcctcccgcccgtnccggccaaagcaaagnttggttantgcatccggggtgtggatgatattgagcagggccttgttacgataaatgnggacctctccattggtcagcccagccatgatggnctgnaggcccgggaatgctgctccaggaggttcatggtcagga

SEQ ID NO: 538986 - DNA, 492 bp, Homo sapiens
cgtgatgattgttgtgatgagtgagaagagattaaagaagataggttcaaaagatgaattgagtatgtggtgtaattaaaattatatgagaaaatgagaagatgagagtatagtaatggaatgccctatgatagttgaggtgaactcttgcaattgtgtgatcggtaggccccatcattcaaggtcattgagtcactcaagtggactatggatatacatgatataaagtactcctagagatcactggctctgttacgaattggaaaaagagcttctacttgggttgatctccgtgtacacacagttttattattcatagctcaaagtgtggatagataacgcccttgttgctccacctagttagttggattaaccacccagtgattatggacgcaatgccctgtggggatcacattatataatgtgacttgccgattcctgtagatccgtatttaccttgcatttgtcacactacgatgattacactatatg

SEQ ID NO: 538987 - DNA, 305 bp, Homo sapiens
gatgtgagagatagaacgtatgggtatactatccaagccggtaggttgtcagggcggtgtaccgactggggtaatagcaaaaggcaggtctgggtgcagtcacaagcgatggtggggaaatgtgtgtggcacaagtggacaggccactccctctaccaataaccatgttctatccccaagactgacagaagcgaagggtcttcactgggaacaggcacgggagccccagaatcaggatgggactcaggtggctgctattacccagaagaaatagaggagacattgttaccccatattttgccacg

SEQ ID NO: 538988 - DNA, 256 bp, Homo sapiens
atggggccctgcgagggggagccttcgcctctcctcctgtcctctaagaaaatggttgacccgcatggtgttgggaacctgagcctttctgacaccgtggcatgttgctagcgtatttttgtgcgtagctcctttgaaaagtggttaggtgctcaaggctagctgctacatatcctctccattcgacttaaaaaatgagagggtcagacttgacatggtgtttggacgccatgtaaaatcgaaggaagtcgacttg

SEQ ID NO: 538989 - DNA, 561 bp, Homo sapiens
acctgggagtagcttcctcagatctggaactgaacgccagtaggtgatgcagcagcccaaatgcccttctctgaggagaactgtgcgtgtttctcatagaacatttgaccgttgtcattaccgcgtttctagagtcgatgttgatgtacgcattgatatggaattgtgttgtgggacgacgtttacagaaagctgaagtcacgtgccctcagctgcagacactcatgcactgatgggaagagcagtgacctggctgtgcgtctgcacttagattctctgcctcttttcacatttctttaaactctgtttaaaacagcatgtggatgccatggagactggaagaccataccaacttggacgcgttaccatgagagcatatcctatccaaccgtactaacgtggacacccgacacctcccctcagaacttcaaaagggcaagatcttttttccttcacttattgctgaaaccaagagcacaattcccattgagaggaagatctctgtgctgtaaactaaaacaaattgtgcattccttccggggccatcgtctgccgcgggga

SEQ ID NO: 538990 - DNA, 534 bp, Homo sapiens
ttccgcgttcgccccccgcaggttcgccaccgccgttgagacttttttccgcccgcccgagcgccctcccgccgcatgcgcctatcgtctgccttcctaacctgctgtgctgtccctctagggggccaactcctcccccccgcgccccacggagctctccacgaagatttcttggaccacgcgctgggtatttcgagggcgcgacgacgcccgcggctccacacaggtttatccagtggagctgtgaatgggaaaaacaccttgtgaagaacgtctcttgccccgcgggttattggcccagacttgtcccagtgtacctcgcctgggtggggctgtttagaccctttcttgctgtcccccaggcgtcttgccagccccctgctgcctggttcttgccccctgctgccagccagaggagaagaaagatgagaagaaggaggagtctgtaagagtccagatgatgaccatgggatttggccctttttgattaaattcctgctcccctgccaatataagcccttttacaccatccca

SEQ ID NO: 538991 - DNA, 427 bp, Homo sapiens
tcgggagcggccatttgtgaccgggaattcggccgataacacaacgcacgcgatgacttgggaacagtacacttgacatagaggtggatgattgctttgcttctccagtgcaaggattttttgtacaacaacccttcctaaatatataatcgtgtaagaaaattatttttaataaaacactttcaaatgtacaggggggaattgcaccccacgggttccattgtgcttggtcggtgttacaagacttgttatccatttaaaaatggtagggaaattatatgccggtacacaccgctttttcaggttgtaacaacaaaaaaacatacattggggaaaggtttaagattatatagtacttaaatataggaaaatgcacactcatgtgattccctatgctaaaatacatttctggtctttcttctgtatt

SEQ ID NO: 538992 - DNA, 901 bp, Homo sapiens
  misc_feature (877)..(877): n is a, c, g, or t
ctgcaatctatctcctcgttctcattctgctttccttctggttgctcgcttcacctgatatcctgccctccacatccacctggcttcagctcttctctgcatttgccttcagtctcagggggtgattcagcaccttctagtctgggtttcattgtgtgcctctctgcctctacgattattatcctctaggcacttccaagtttttgtcctcttcctttgtggactttacagtactatttggtagtggtatttacttgtgtattttttctgttacatatcttttactataaataatttacagtagtttagatgtatataaggtcctaagtggttcgctatcaacttctaataacgtcttatcttagggtactacaattattgtgatgtgtcctgttgtaattagtagttctagcctttttatgctgctttgataggtagtttgttgtacctctatgatactagcctaagaatcctatagtttaccttcaagatgaatcctaggtgtatgtgattacttttgcattaaatctggcgcttacttctatggcccgacgtagcttatgtaagctaggtatactgaagtatatcccgccttatcttagtataggtagcttatgctgtactgggtatgtggtctatgtctaggcttcgtatcttaaggcagtagggtggagaatggaaaactgaagtcacctgtagataattttaataagattccaatgaccatattttgtgagatatggcacattattcacagaccatgatctttgtgaatttacatataatttccttaacaatgaacatgtaacttctctaccaagagtactctttactttgtaatcatatacaggtcacttattagatgatcaatccgggncaaaaacacattgtcggccgcccc

SEQ ID NO: 538993 - DNA, 433 bp, Homo sapiens
  misc_feature (165)..(165): n is a, c, g, or t
  misc_feature (200)..(200): n is a, c, g, or t
  misc_feature (215)..(215): n is a, c, g, or t
  misc_feature (228)..(229): n is a, c, g, or t
  misc_feature (235)..(235): n is a, c, g, or t
  misc_feature (244)..(244): n is a, c, g, or t
  misc_feature (272)..(272): n is a, c, g, or t
  misc_feature (287)..(287): n is a, c, g, or t
  misc_feature (299)..(299): n is a, c, g, or t
  misc_feature (305)..(305): n is a, c, g, or t
  misc_feature (308)..(308): n is a, c, g, or t
  misc_feature (329)..(329): n is a, c, g, or t
  misc_feature (346)..(346): n is a, c, g, or t
  misc_feature (348)..(348): n is a, c, g, or t
  misc_feature (362)..(362): n is a, c, g, or t
  misc_feature (364)..(364): n is a, c, g, or t
  misc_feature (369)..(369): n is a, c, g, or t
  misc_feature (384)..(384): n is a, c, g, or t
  misc_feature (388)..(388): n is a, c, g, or t
  misc_feature (394)..(394): n is a, c, g, or t
acaggctgtttgtgtgcgcgtcctgggcgcggaggggctttttcgacgctcgccggcggctcatgaaaaggctttgccccagcagctgcgacttttggtacgaattccccttccccacggtggccaccacccccccgccccccaggaccaaaaccagggtggtgnccgagggcaggaacgtgaccttcccctgcggccanaagatcctccccaanaaagggaaagtgnnctgggncaaggaccnggagcccctggagttttcctaccccggntacctggccctgggngaggggcccctnagcatnatngccaaccccgtcaatgagggnccctacccctgggtggngngcccccaacagggngngctgnccccctactcctggngagnccgtgngcgggggtgagcccggctgataaagccctttttttttta

SEQ ID NO: 538994 - DNA, 610 bp, Homo sapiens
gaggcccgtggggccgacaggatgggcaagtgtcgtggacctgtcgtactgctaggaagctcggtagtcaccgacgagaccataagtggcatgataaacagttataatgaaagctcatttgggcacagcgcctaaaggccgaaccctttttggcagtgtgcttctcatgcaaaacggaatctgtgctcggaaaacaaagtaggacgttgaaagcctacaactagccgatatactggcgcattatggagagtcgtcgtaatggggtccaggctgcatcacacgaattgcgcaggacacaatcaccaggccttttgtaccccagatgacaggtgagcgttgagcgtttgattggatggcaaaacttgatggcactgttctggttcgccttggatcttggtcgccacacaggtgtccatagcttgttaggctgatattcgctggatgtccgctctaaaggatgtgtcgcagttagccccttgttttctctttgtgggccctgatacggaaaggccaagaagggaaaagaacgaaggatcatcagaatcatgagatggtggatccacactgtagttatattcttttcatatgccatgttaataaatagatatat

SEQ ID NO: 538995 - DNA, 404 bp, Homo sapiens
caaatgcgaaaacttcatctctacagttcgtatctgctcacattaattggtcaatgtataaaaacttggaagactttctaaataaggaagaagaaaaagaaatctctaggagatcctgccaaaggcttttggaaagtagcataccttcgccgaagaaatggtgattcctgccaggggctgttagccaagaactgtgaaagagagagagaaaaaacctcaactgtgtatttggtcacggcggaaaatctgctcgcatcgaagcattcttctaagcgacttcgatgccaaggaagtagtgtacactgtgcacgcgctaaaccacacccagggtgaaacccacagttgcagagtctttaaccaatcaatggtaggtttaacatctgtgataggcagctttccttctt

SEQ ID NO: 538996 - DNA, 336 bp, Homo sapiens
  misc_feature (22)..(22): n is a, c, g, or t
  misc_feature (77)..(77): n is a, c, g, or t
acaaattactttaaatacctantagtctgtgcttgtgttattcctataggaactaccataaacttaggattcctgtnaagcggagcatggtgacttatgccctgtaacccccagcactttgagagggtaagataggaggatctccctaggccaggagtttgagaccagcctaggcaacatagcaagaacccattctctacaaaaaataaaaaattagctcagcatggtgatgcacgcctgtagtcctaacttctcaggaggtgggaagatcgcttcactccaggagttggagcctacagtgagctatgactgcaccgctgcacaccagcctgggtg

SEQ ID NO: 538997 - DNA, 110 bp, Homo sapiens
ttccggttccaaagaaaactaaaagcagtcaaatatccacttgcagatactacgaaaagagtgtttcaaaactcctctatgaaaaggtattttcaactttgtgagttgaa

SEQ ID NO: 538998 - DNA, 565 bp, Homo sapiens
  misc_feature (418)..(418): n is a, c, g, or t
aacgatgtctcagctattcaggagcgaggtggaagaatcacctgaacccaggaaggtcaaggctgcagcaagctgtgatagtgccactgcactccagcctggacaacagagcaagaccctgtctcaaaataagtacataggctgggcgaggtggctcatgcctgtaatcccagcactttgggaggtcgaggcgggcagatcatttggggtaaggagttcgagaccagtttggccaacacggtgaaaccccgtctctactaaaaatacaaaaaaaattagctgggtgtggtggcacatgcctgtaatcccagctacttggggaggctgaggcagaagaattacttgaacctgggagacagagatcgcgtcactgcactccagcctggttgacagtgcgagactctcaaaaaaaattggncaggcatagtggctcacgcctgtaatcctagcactttgggagggcgaggtgggtggatcacctgaggtcaggagttcgagaccaggctggccaacgtggggaaaccccgtgtctactaaaaaatacaaaaattaggtggggatggtg

SEQ ID NO: 538999 - DNA, 206 bp, Homo sapiens
tattttaaaatcctacagtttccttctatgatgatgctctgctcgaaatggttatttaattcttaaacctgtttgtaatacaggtttagaaaagaaccagaatagggctggagtgtgacttactgcttctactgcaactgctttaggaaatttacatataaagaaaactaacaggaaattgtgtagttgtataggccgggtaatgt

SEQ ID NO: 539000 - DNA, 170 bp, Homo sapiens
tttttttaaaaaaaaaaaacctttgtttctttttttcccccccctttttggcccggggattaaaagcccaaattttttaaaatttttcccctttttttcccaaaaaaaaaagtttttctttcgtttttttttttttaaaaccttttatctttaccccaaaaaatttttta

SEQ ID NO: 539001 - DNA, 166 bp, Homo sapiens
gttcagttgacgttgcaattggccccccgggttgaaggttggttaaggacacactggggcgcaggttccatggcaaccggtacagggaaagggctgctatacggttgacaacgaggtgcagccatcagggccggagacaattgtggtcatcatctacctcagccgt

SEQ ID NO: 539002 - DNA, 178 bp, Homo sapiens
gggggaaagggttcccccccccccccccaaattttttttggggtttaaaaacccaaaaaaagggattttttttccccccttttaaggttttaaccccccaaaaaaaggtttccccttaaaggggggggcttttaaaagggggccccccttttgggggttttccccaatttccccggga

SEQ ID NO: 539003 - DNA, 1193 bp, Homo sapiens
  misc_feature (326)..(326): n is a, c, g, or t
  misc_feature (335)..(335): n is a, c, g, or t
  misc_feature (1021)..(1021): n is a, c, g, or t
taaagggtggtgcacttttatccaacgggtctcaagtcagtgtacaggtaaccccgggttgcctccacccatctcccagggaaaccaaaagccttcatacttctcaaggtgtggggggcacaaaaagagggggagagggggggccacgaagaggcctcatcatctcaaatataaacacgaaattaaacaagagttattaggggcgaagatattaaaaaatatttggctattcactattatttatcaccacgaaagagcagaggcttaatcaaccctcccctgtgtgtgtgtggcacttgtgggaagagaggaactggggccaaatnctctccttntgagaagaagaacaggtgggggggcgcttattaagagaagtggcccagaggggaaatatctcgcgtgttgtcaaaccaaaagcggccatattctctcgaaatatatgtgcggggagatagtgaccatctatattctgaaaaaaacacaccaacacatatgtgggtgtcacaatactcaagaagagtctccctctgcgggggccccaacatgtgttggtgcacacactctgtggggggggggaaaaggtgtgccctccaggctctaacaaaaagcgccgagaagctgtgggcggtgttgtacacagcctttatacaggccggcgtggtccacccccgaagtgatctctttaatagaaaatgctccgccgtgagaagttcttccaaaaggccgacaagaagaagaagacagagagaacaaaagaaagaagaaacgaccagaatagagacgacgatgaagaactacagaccaaaaaaagaaataatacaccgacgccaatgattattattaaaagacgccccccgcatgatgttggaccacaataatccttcctacatacacattgactggtggtggggaggatagtactactggtcgtgggagaagacaaaaaatagtattagaggcggggtcatgtttgtgggggccgcacaccaacaaaacagcggggggggggtggctgtaatancagcggcggcaacacactaatataagaggcggtctcagtaatagtataggtctccgcgcggcatcctataaaaagcaacagactcatatatttgtgggggggggggggagtgagcaccaccaaactcgaagaagaagaggggcggcccccgcggagaagaaactcactcggg

SEQ ID NO: 539004 - DNA, 175 bp, Homo sapiens
  misc_feature (143)..(143): n is a, c, g, or t
agccacggtagatacatgaacgtctgggtaactctgggcttgggtctggtgacattcgggccagaaatccatgaaaactaccgcataaagggatagaagagagaagcaccggtgctgggggagtgggcattttagatggcccntcacagaatatggaagctatagcatcagctct

SEQ ID NO: 539005 - DNA, 410 bp, Homo sapiens
ggacagcacagaggaggtggacagcacagaggaggcacagggggtggacagcacaggggtggacagcacacgaggaggtggacaggacgcggagggaaggcaccacgggaagaaagggataaccctacaccccacgagccccacggctggacatgctgactgtcctctcccctccagcctttggccttggcttttttagcctatttacctgcacggctgagccacactctcttccctttccccagcatcactccccacaggaagagcccaatgttttccacccataatcctttttgccgacccctagttccctctgctcagcccagcttgttatcagctttcagggccctggttcaccattagaataaaaggtagtaattagaaaaaaacaaccaacggggcggccgaat

SEQ ID NO: 539006 - DNA, 246 bp, Homo sapiens
tacatggcaaaagatattatggcagcgtaatagagagtttaaaatacagataaataaagggtcaccatctcctctggcacaaggaacagctcactttttgccagatttcttaattccacctctgtccaaagtccccttccccgagggcttcgcttttagctcctcgagattcttctgctcctcttttcgtttctgcttgaacgccttatcttcctcttccatctccttcgacttgccatatgcaat

SEQ ID NO: 539007 - DNA, 759 bp, Homo sapiens
gcaagaggtcccctctgaagcacatgggaccaggacacccaggatggcagctcctgggggcagtgacgtagtcatgcgtccaagccctttattcaatccccccctcttgtgcattcctctttgtccatttattcaatctcttcttcttacattgcacctcaatatttgttcaacttatccgtcagtcctttcattctgtgaatttcttcaattcaacgccgccttccttcttgccatccaggagtccttcaggaccccccccttcttctttattcaacccccttcttcattcgagcccccattaccacctctttgttgctgcttgcagctgtcccttccttgggtaccctgctttcccaggcactaagcctgtggctaggtgggaagcactgccctcaggcatcttgggtcaggtaggctgcacttcaagtgacaaacggacttgctgctcctttgcagagtcactggaactggaggacccgtcttctgggctgggtgtgaccaagcaggatctgggcccaggtaagggccttgcagaggggcattttgtcaccagcagctcattcccagcagggccagcttctttgtgggcaggtgaaagaatgtgacccttggccactcttcaacattccggggtgtccattttacagaacgaacaggttgggggggctgtggggagttcactcctgatggtcattattggaccttagcacggggcagggagggtggccaagccctctgttttgaggtccagatggt

SEQ ID NO: 539008 - DNA, 154 bp, Homo sapiens
gggaggagaagcaggagctgtcgggaagatcagaagccagtcatggatgaccagcgcgaccttatctccaacaatgagcaactgcccatgctgggccgggaccctgaccccccggctcgtctcttaaagtcggtgctggagaggaatctgattc

SEQ ID NO: 539009 - DNA, 853 bp, Homo sapiens
  misc_feature (272)..(272): n is a, c, g, or t
gctctctccaggcgtcctcgtggaagtgacagtcgtctttaaaccctgcgtgggaatccctgacgcaccgccgttgatgcccagggaagacagggcgatcctggaagtccacatcatacttcgcttaagatcagtccaactagtggatgatgtatccgaaaatgttgtcagttgtgcggagcacgacaagtgtgcggctccgaagctatgatgcaagctagatccgcgatgtacccttcgcgaggaagagctgtaggtcgcatgatgggcanagaactagccgatgatgctgcaatggccgatccgagggcacctaggtaaaacaatgccaggctctggagaacactgctggcatcatattcgggggagaatgtggcgctttgtgttcaccaacggaggaccttcactgagatcagggacatgttgctggccaattaaggtgccagtgtgatgcccgtgctggtgccattggcccatgtgaagtcactgtgccagcccagaatcactggtctcgggccgaagaaggacctccttattccaggcttcaggtatcaacattaaaatctccaggggcaccattgacatcctgagtgatgtgcagttgatcacgactggagcacaagtgggagccagcgaagccacgcttgctgaacatgctcaacatctccccgttgttacctttgggagatggtacattccaggcaggttgttcgagaattgggcaggatctaacaacccctgaaagtgactgagattcacaggaggacactctgcatcacacgcttcctggaagggtgtccgagactgtgccaaagattggaaggagataggttagccaatgtgcatagtacca

SEQ ID NO: 539010 - DNA, 228 bp, Homo sapiens
  misc_feature (33)..(33): n is a, c, g, or t
  misc_feature (205)..(205): n is a, c, g, or t
  misc_feature (219)..(219): n is a, c, g, or t
aattcgcggccgcgtcgactacggctgcgagangacgacacacgggaggtaaagtccatggttccctggcccgtgctggaaaagtgagaggtcagactcctaaagtggcccaaggagaaagaaagaaagaagaaagaccagttcgggcttaaaccggccggattgcaattaacaacgggcggttttgttaaactttgttgcccancttttggcaaaganggggcccct

SEQ ID NO: 539011 - DNA, 1342 bp, Homo sapiens
gggaggagaagcaggagctgtcgggaagatcagaagccagtcatggatgaccagcgcgaccttatctccaacaatgagcaactgcccatgctgggccggcgccctggggccccggagagcaagtgcagccgcggagccctgtacacaggcttttccatcctggtgactctgctcctcgctggccaggccaccaccgcctacttcctgtaccagcagcagggccggctggacaaactgacagtcacctccccagaacctgcagctggagaacctgcgcatgaagcttcccaagcctcccaagcctgtgagcaagatgcgcatggccaccccgctgctgatgcaggcgctgcccatgggagccctgccccaggggcccatgcagaatgccaccaagtatggcaacatgacagaggaccatgtgatgcacctgctccagaatgctgaccccctgaaggtgtacccgccactgaaggggagcttcccggagaacctgagacaccttaagaacaccatggagaccatagactggaaggtctttgagagctggatgcaccattggctcctgtttgaaatgagcaggcactccttggagcaaaagcccactgacgctccaccgaaagagtcactggaactggaggacccgtcttctgggctgggtgtgaccaagcaggatctgggcccagtccccatgtgagagcagcagaggcggtcttcaacatcctgccagccccacacagctacagctttcttgctcccttcagcccccagccccttcccccatttgccccccctgtgacctcatcccctgagaccctggtgcctggcttctttcgtgcacccttggaccagaccaacccagtcgggacagccgattaccatgcagcaaggccctgctgccccatctccatctgtcaacaggggcgtgaggtccccggaagtggcccaaagctagacagatccccgttcctgacatcacagcagcctcccacacaaggctcccagacctaggctcactggacgagaatgggaaggcaccacgggaagaaagggataaccctacaccccacgagccccacggctggacatgctgactgtcctctcccctccagcctttggccttggcttttttagcctatttacctgcacggctgagccacactctcttccctttccccagcatcactccccacaggaagagcccaatgttttccacccataatcctttttgccgacccctagttccctctgctcagcccagcttgttatcagctttcagggccctggttcaccattagaataaaaggtagtaattagaaaaaaacaaccaacggggcggccgaat

SEQ ID NO: 539012 - DNA, 386 bp, Homo sapiens
  misc_feature (155)..(155): n is a, c, g, or t
agcccacccgccccagagactgcccaccatgggcctcccgtccgtccgcccgcccaccccgctgcctggcgggcagcccctgctggaccaagcccagaacgggcctccccgggggtccccggacgctggctcgggactgtcttcaaccctgcccntgcactttgggcacgggagagcgccacccgcccgcccccgccctcgctccgggtgcgtgaccggcccgccaccttgtacagaaccagcactcccagggcccgagcgcgtgccttccccgtgcggcccgtgcgcagccgcgctctgcccctccgtccccagggtgcaggcgcgcaccgcccaacccccacctcccggtgtatgcagtggtgatgcctaaaggaatgtcaagc

SEQ ID NO: 539013 - DNA, 1532 bp, Homo sapiens
  misc_feature (658)..(658): n is a, c, g, or t
  misc_feature (700)..(700): n is a, c, g, or t
gggaggagaagcaggagctgtcgggaagatcagaagccagtcatggatgaccagcgcgaccttatctccaacaatgagcaactgcccatgctgggccggcgccctggggccccggagagcaagtgcagccgcggagccctgtacacaggcttttccatcctggtgactctgctcctcgctggccaggccaccaccgcctacttcctgtaccagcagcagggccggctggacaaactgacagtcacctccccagaacctgcagctggagaacctgcgcatgaagcttcccaagcctcccaagcctgtgagcaagatgcgcatggccaccccgctgctgatgcaggcgctgcccatgggagccctgccccaggggcccatgcagaatgccaccaagtatggcaacatgacagaggaccatgtgatgcacctgctccagaatgctgaccccctgaaggtgtacccgccactgaaggggagcttcccggagaacctgagacaccttaagaacaccatggagaccatagactggaaggtctttgagagctggatgcaccattggctcctgtttgaaatgagcaggcactccttggagcaaaagcccactgacgctccaccgaaagtactgaccaagtgccaggaagaggtcagcacatcctgnctgtccaccgggttcattcaggccaagtgcgacgagaacggnaactatctgccactccagtgctatggggagcatcggctactgctggtgtgtcttccccaacggcacggaggtccccaacaccagaagccgcgggcaccataactgcagtgagtcactggaactggaggacccgtcttctgggctgggtgtgaccaagcaggatctgggcccagtccccatgtgagagcagcagaggcggtcttcaacatcctgccagccccacacagctacagctttcttgctcccttcagcccccagccccttcccccatttgccccccctgtgacctcatcccctgagaccctggtgcctggcttctttcgtgcacccttggaccagaccaacccagtcgggacagccgattaccatgcagcaaggccctgctgccccatctccatctgtcaacaggggcgtgaggtccccggaagtggcccaaagctagacagatccccgttcctgacatcacagcagcctcccacacaaggctcccagacctaggctcactggacgagaatgggaaggcaccacgggaagaaagggataaccctacaccccacgagccccacggctggacatgctgactgtcctctcccctccagcctttggccttggcttttttagcctatttacctgcacggctgagccacactctcttccctttccccagcatcactccccacaggaagagcccaatgttttccacccataatcctttttgccgacccctagttccctctgctcagcccagcttgttatcagctttcagggccctggttcaccattagaataaaaggtagtaattagaaaaaaacaaccaacggggcggccgaat

SEQ ID NO: 539014 - DNA, 362 bp, Homo sapiens
  misc_feature (101)..(101): n is a, c, g, or t
  misc_feature (283)..(283): n is a, c, g, or t
  misc_feature (305)..(305): n is a, c, g, or t
  misc_feature (343)..(343): n is a, c, g, or t
gcggcacggctctatctggcgcctgaccgcaagactggttcttccggcatctggtcgacctggccatcgtgctgctgccgctgatccggccgcttcgcctnctccgtctggtcgtgctggtgggcgcgctgcagaaggccctcggcaacgcatccgcggcaaggtgatcatctacaccatctccggtgccgtgctgttggtctacgtcggggcgctggcggtatacgaagccgaacgcggcgcgccggacggccacatcacgagctttcggcctcgcggtgtngttgggcgatgaccacgatcancaccgttcggttacggcgacatgtattcccgttaacancacggggccgagtcattgg

SEQ ID NO: 539015 - DNA, 129 bp, Homo sapiens
tcttatagtgtgtcattaggagctacgggttcaggcaccagaggaaggggtacatgagctgacatccatgagtatgaacccaattaatcttccggcaagcccatgcggtgggttgataatggtcctccc

SEQ ID NO: 539016 - DNA, 160 bp, Homo sapiens
cagtcttgaacttcttttaattgttttgctttgttttcttttcttgctgacttgaatgccttctcagcagcttcaacagtcttttgtgttttcttagcagcatatctcttgtgatcataatacttgattggcattggcatatgcttgacaaagttgagat

SEQ ID NO: 539017 - DNA, 815 bp, Homo sapiens
cgcctccccgtcagctccaggctcgcccttttctcctttcagtccaaaggcaccggggtctcccttggggccaggggtccttgaatgccgtcaaacccgggcgagcccttgcagcctggcaggcctgggtaccccatctcccccttcacgccgtccaccccgtcgatgccacgcttgcccttctctcccttgtagcccttgggtcccctggagcccttctccccacggctccctttttctcccttcattccctggtacccaacaggtccgaggtccccgggtcttccaggatctccggcttctcccttctctcctgggagccccggcttgcctcgttctccctcaaagccggggtcgccccggagccccggaggtcctcttgcaggctggcattcgaaggagcagcacacttgctccacgttatttttgatcatgtccacgatggtgtcgatggtctggctgatggcctcctctgcgtcgcggctctggccccagtcagccgccgtgaagttgcgccggtacgtgtggtccgtggcgatgatgctcagacgcggctccaggtggtcgggtgtgatggccaccgagaagactttgacgcccaggtgcttggcctcgttcacagcatcctccagccccccacagggttccttgtagccctccagggggtgcccgtcggtcaccacaatcaggtacttattctccttcaggtgggagccccccacgaggagctgctccagccccttcttgatagcgcagtcggtgtaggtgcccttcccaaagtacttgaccgcgtccacgctgcttttgagtgcgtc

SEQ ID NO: 539018 - DNA, 250 bp, Homo sapiens
tcaagcagtcgcgccagaaatcatagaagatttggtctactactctagtacagtagtatctctatagatgacctgtgtagaaaaagcaggaacagatgagaaaatgcttatgaaggtctctccgctgctcttggtgaagtcggtttaacttgaggagttttggacagtaacttcatggctaacaataaattactagcactcctttgtgaggttttgcaacaggataagacctcgtataaccatacatgaa

SEQ ID NO: 539019 - DNA, 264 bp, Homo sapiens
  misc_feature (6)..(6): n is a, c, g, or t
  misc_feature (176)..(177): n is a, c, g, or t
  misc_feature (255)..(255): n is a, c, g, or t
tgacgncatgattcagcgatagagccggaaaatacggggtcaaagccggtatcattaaccagagtcatcgtgacctgtactgcggctggatgatctcctgctactgcaactgccaggcgaccgcggctcccttcaggtagtctgttagtggtcaactaaaactggcctccgcgttnnagtttttccagtatcggttttctgattcgtttggtggtaacccaccattatattcgtgcggtcttagtgcgctgtaanatccaacgt

SEQ ID NO: 539020 - DNA, 248 bp, Homo sapiens
gacctagaggaccccgagtgtcttcagaacaatgtagccccgcagtcagtttttttaggagagatcttttcttttatgacctggcatcagtacctcttccaatagcttgatgtttcctatgaaaaaatgcaaacatcttaagagtggctgatctctaggatatgaggtatagaggtgctcctgtgaggaaagaggactgcactttctatcgttatccactgaaccaaccgagggctactttgaattta

SEQ ID NO: 539021 - DNA, 780 bp, Homo sapiens
  misc_feature (44)..(44): n is a, c, g, or t
  misc_feature (61)..(61): n is a, c, g, or t
  misc_feature (67)..(67): n is a, c, g, or t
  misc_feature (89)..(89): n is a, c, g, or t
  misc_feature (104)..(104): n is a, c, g, or t
  misc_feature (106)..(106): n is a, c, g, or t
  misc_feature (110)..(110): n is a, c, g, or t
  misc_feature (125)..(125): n is a, c, g, or t
  misc_feature (137)..(137): n is a, c, g, or t
  misc_feature (139)..(139): n is a, c, g, or t
  misc_feature (152)..(152): n is a, c, g, or t
  misc_feature (161)..(161): n is a, c, g, or t
  misc_feature (163)..(163): n is a, c, g, or t
  misc_feature (168)..(168): n is a, c, g, or t
  misc_feature (187)..(187): n is a, c, g, or t
  misc_feature (223)..(223): n is a, c, g, or t
  misc_feature (296)..(296): n is a, c, g, or t
  misc_feature (384)..(384): n is a, c, g, or t
  misc_feature (416)..(417): n is a, c, g, or t
  misc_feature (440)..(440): n is a, c, g, or t
  misc_feature (468)..(468): n is a, c, g, or t
  misc_feature (509)..(509): n is a, c, g, or t
  misc_feature (533)..(533): n is a, c, g, or t
  misc_feature (542)..(542): n is a, c, g, or t
  misc_feature (545)..(545): n is a, c, g, or t
  misc_feature (548)..(548): n is a, c, g, or t
  misc_feature (555)..(555): n is a, c, g, or t
  misc_feature (557)..(557): n is a, c, g, or t
  misc_feature (623)..(623): n is a, c, g, or t
  misc_feature (642)..(642): n is a, c, g, or t
  misc_feature (676)..(676): n is a, c, g, or t
  misc_feature (711)..(711): n is a, c, g, or t
  misc_feature (720)..(720): n is a, c, g, or t
  misc_feature (763)..(763): n is a, c, g, or t
tctgctacttctagtttcagctggcatgcgtgactgaagatctnccaataggtctgtggtnttcctngagcctcaatggtacagggtgntcgagaaggacagtntnactntgaagtgccagggancctactcccctnangacaattccacanagtggtttnanaatgngaacctcatctcaagccangcctcgagctacttcattgacgctgccacagtcgangatagtggagagtacaggtgccagacaaacctctccaccctcatgtgaccctggtgcatgctagaagtccatntcggcttggctgttgtctccaggcccctcggtgggtgttcaaggaggaagatccctattcacctgaggtttcacagctggaagaacantgctctgcataaggtcacatatttacagaatnncaaagacaggaagtattttcatnataattctgacttccacattccaaaagncatactcaaagatagcggctcctacttcttcagggggcttnttgggagtaaaaatgtgtcttcanagattgtgnacntcnccatcantnaaggtttggcagtgtcaaccatctcattattctctccacctgggtaccgaagtctctttctgcttngtgatggtactcctttttncagtggacacaggactatatttctctgtgaaganaaacatttgaagctcaacaagagactggtaggacnataaacttnaatggagataggaccctcaagacaaatgacccccatcccatanggagtaataagagcagt

SEQ ID NO: 539022 - DNA, 529 bp, Homo sapiens
gacacatttcttcttactggtggaaactttctgcacagtcctgaggcagcacagggcaacacacggacttctggttgctgctgctatttcaaacactgtcaaggacctccattataatcagccacctcctgctgaggacttctcccctcaaaccagcactcaattcatccagacaagacttttagctgagacatctgtggtctacaatggaatgaaaccagaatcaacaatctggttaaactgcacagcctgtctcatttatatatggttattttggtgcacatttgagctttctttgatttgcaaagtgaaaatgccaactttttgattattaatatatttcaattattttataataagaagaaattatgtatgtgctatttatgggctaataaaaatctcagctgaggtgaaaagatgagcaactggacagattaaactgaaactttctttttaaaaagtttaattgtatgtatttaagatgtacaacatgatatacatcgagataataaaatggttactgtaaaaa

SEQ ID NO: 539023 - DNA, 380 bp, Homo sapiens
ataagaagaagaatccgtcactgtgacctgaaggcatacctcggcggctatcaaaacggcgtgcgcgagcggcgcaaaggctcgaatgaggcgatggcgctgtgcgacagcctgaccggcaagaagcccggcgtcggttttgaaaatgcgcaggcgctcaagcggatacgcgagcagttttcaaaaatggttccggcccgcgggcaaggcgggcctggtgtgcaactgcgcctgattgagggcggcaagaaaggagcgaagtgattatggcaaaaaacgcggacatccgcgacaccaaggtgctgagggaggcgctggcgctggccgatctggtgctggatagcgccaaccccatcggcgagatcgtcggcccggcgggg

SEQ ID NO: 539024 - DNA, 855 bp, Homo sapiens
gcaccattgatgaagtatggatttcctttccccatgcttgttttgtcaggttgtcaaagatcagatagtggtagatgtgtggcatattctgaggcttctgttctgttccatggtctatgtatttttttggtaccagtaccatgatgttttggttactgtagccttgtagcatcgttgcagtcaggtagcatgatgtgtccagcttgttcttttgtttagtatgtctggtatgcgggctctttatggttccatatgaaatttaaagtagttttttctaattctgtgaagaaagtcaaggtagttgatgggaatagcattgaatctataaattaccttgggcagtatggccattttcatgatattcgttcttcctatccatgagcttggaatgtttctccatttgtttgtgtcctctcttatttccttgagcagtgttgtagttctagttgaagaggtcctacacatcccttgtgagttgtaattcctatgtattttattcactttgtagcaattgtgaatggtagttcactcatgattggtctctgttctcttatatggtggataggaatgctcgtgaattcctacacatgggtttggatcctgagacttggtggaggcgtatccagctcggagatctgctgagcagggggtcttccactatccatctggcctcgcaacggagacaatcgatcctcctgcatgggatacgttactaccctcggaggggggcgactccactcaggaacgggggccagagcacccccacggacgcgggaggggccggggagacccgaggaggagcggcctggcacaacgggggcacagcacccggggcgaacaaggcgcacaccacga

SEQ ID NO: 539025 - DNA, 241 bp, Homo sapiens
cacgaggcagatccataaaaacactccatgtcctgatgtgaccctggggacaaatccagggacataatatatccaggtccccattcaggagatccctctggggctggatctgaagaatcttcggatccccaaaacaatcatgagctttgacatcacatataagtctgaagttttttcaagatttgggatatacctatccacctggctaggattccacaccactagaatatgatattcaaat

SEQ ID NO: 539026 - DNA, 278 bp, Homo sapiens
tgaacattcgtgtctcgggtccaggaagaaattaagaggaactctgatgacctgagcagaagattgtgacagatgccctcaagagagaagacaggcaccagtccagtgcagagttttgtggacacaggcacagggggtggcgcgtgggacacacttagacacacagaacaccaacaccaaggtcgaagagacagagaagggggaggggaagaaggggagagaggatacaaggagagcacaaatacgagatacggggacggggggacactgaatgttca

SEQ ID NO: 539027 - DNA, 295 bp, Homo sapiens
  misc_feature (111)..(111): n is a, c, g, or t
taggcgacctaagacccactatcaagcaggctgtgtacaaactctcgcattgatgcttaaatgatttattctctttgttatgaacttagttggtggatatgaattctgtgntgaaatacttttctttaagaatgttgatattgtcctcactctcttcttgcttgtagggtttctgtagagagatctgctgttagtctgatgggcttccctttggtggataatgcgacttttccctctggctggccttaacattttttccttcatgtcatccttggtgcatctgaggatcatgtgt

SEQ ID NO: 539028 - DNA, 1183 bp, Homo sapiens
ggatatttgtgaagaacttcgcctgcgggagcttgaagaatggtcaaggccagagctgctcagatggcaaagaccatgcggtggtggtcggactgcactgccaactggagcagcacacaatggcagtcacagttcgagctgaaaggcaacaagtgccagagaggcaaggcaagaccaagtccagacaatacacaaactaggaagactgggcgaattgacaaacgaacattcgcaggttaccacttgagacaacagggacaccaggaagattgtggccaacctccaggaacgcgcagggccatttccggacaagccttacactgtgttaaccccaagggcatccttggaacgccttttccctgtgggctttccgggtaaggacacagaaaatttccctttgtccggcacaccattaccacggaaccccaaactcttccaaacttgggaccggttttccaacacacacttggcccctgacggttccttatttccagcaggaaggtaattctggggtaacaacacaatgaaccacacatttttgccttaacaaccccgcggccagggcacccaccaacgcctacacttacagcggaccaccaaagggctggtcgccctccaatccagaatttccctctttaacacacagttaccccgctggacggcacgcatgacaccgcccccaaacttcctacgcgaattcggattggcttcgcacttctcaattgcaaacacccaacgtgcggctgccctatccctggcaaaccaccgccggcttgcacaaacgccgcacacacacgctgcgtgccttggaagccaccttggcaccacgccacactcaaacaactcccttgcccccttttcgggccaaccacccttgcgcaccgtcttaactctctggcaaccctcttccatggcacctctttggccacacggacagcacacatcactgcggcaccttgcaaacgttccccccaaacgacaacaacctccccactaactggcgcaaacgcggcaacccacggacggaccacacaccgccgcgcccaccacggagctccgggcgcacaaaacccacagcgaccaccttccgaaaggaaaccacacctggtgacgctccgcggcgcatcctcgggtcccccatcggctcgcgacaacccgttgaccaccgcttatgccaaacccc

SEQ ID NO: 539029 - DNA, 392 bp, Homo sapiens
  misc_feature (269)..(269): n is a, c, g, or t
  misc_feature (280)..(280): n is a, c, g, or t
actaagtccaaaagaacacttgggcataatccaacagaacatgcacaagatctgtatattgaaaactgcaaaatgctaattaaaaaagacctaagtaatggagaggcagtatgctcacggattagaaaagacatattaaaaatatttgttctatccagactgttgatctgtatatttaatgtaattcctaaaacattcctggcaggattcttttggatatagacaagctgattctaaaatttatagggaaagttgaaattatttttttnaattaaaaatnaaatttctaggggaatgcaaaagaactaaaacggttaaacaattttgaaaagaataataaagttggaagaatcactcgatctaattttaacacttactgtacagtaatcaag

SEQ ID NO: 539030 - DNA, 193 bp, Homo sapiens
gcgtttcgagaatggccaacatctattaaaaccagtgagccatctttgagatctccatctcccgaacttccatatccaattatcagcaagtacgattaatgtaaactcctcaatatcccattaatacagttctctccatctccaccctcatccaagccatcaactgcttccacttataccactgcaacgtacc

SEQ ID NO: 539031 - DNA, 163 bp, Homo sapiens
acatgattgtccacgctcccggggcactggagagcagtcttctgagccaccttgttggatcccaaggacctggagccacgggctgcaacgtgcactcagggtactgtgtgtggcattactctggacagtagaagcccaagtatggagacggtggtgggtaccg

SEQ ID NO: 539032 - DNA, 406 bp, Homo sapiens
ttccggccgggcgcggtggttcatgcgtcatcccaactactttgggaggcgatgagtgggctgatctcgacgatattcgtgagctcgatgactagtcctgtctatacttggtgaaaccccatctctactaaaaatacaagaaattaaccaggcctgctggcaggcacctgtagtcccagctattcgggaggctaaggcaggagaatggcgtgaacccgggaggcataattttgcagtgagtcgagattgcaccattgtgacttccagcctgggtagacagagcaagactccgtctcaatagtaataatatcatttgggctgtccgtgtatgtctattaaaaagttgtgtgaggggaatattttgagttcaaggagagggattacagattggagtaggggaaacctt

SEQ ID NO: 539033 - DNA, 1187 bp, Homo sapiens
  misc_feature (523)..(523): n is a, c, g, or t
  misc_feature (930)..(930): n is a, c, g, or t
tgtatctttgatgcatgattcatactggaccaaatgaagtagtcctgttatccctcgtatcaaggtagatcgccagtgggggtcatgatcccatagtcacgcgctactcgttggaacattgaagcgagaccctagtagcaataacttagcgagcctatgtgtatgccatgtgtgtatttcatgcatgatagaatgaaagccagatagaattcgtgcatataggggcatcgaaaacatgttaaccgtcatgaatgatgtctgagtggaaatttggctactatttgtcacgatgattcgtgttgggcattcggactttgcatacgtacacagctatgccactatgagtgagatggacaaagcagcatggtgttacgcaacagatggttgaactcttctccgtgccgacgtgtgcgtctcctatctattagatctataggcggttgacttacatacgcgaaaggcaataaaaatatcataatgcgcgagaaaacgtcaagtgtactacaagccatgtgtgttggancacaataaggggcaaatggtgacgcgcgtttgtgaaaccgcccattctcctgaaagagtaaagcccccgtggtataaaacccaggtgggtaggacttgattgaacttgtccgtaaccatgtcagaagagggatacaaaaggaagattgaaggttgctatggcacatttcccaattatattccaatttgtcgttttcccttaaacagaacaagtcgttccccacaagtcacaccatcgtggaacatggattcccccatattagggttcacaaaatttccttccagaaggaccgagaaatatagccgttaaaggcacattgggtccattttggcgtcccaattgggtgtcacccgcatctgtgggcggcaattgaccaatcaatccaacagatcgcattgggggagtgnccaagtaaggggtgtgttacaaacttagtccacgcaatgtaattggtggggggccaaacactctgggtgggaccgagaacttattgtatctgggggagagtaacacccggcgtgcattaattaaacaaaccccaagcaccttgtgatatatcacgttgacaagggacgcaccaaattaatgagtgctcggtattgacggggcataacaacaagggtgacgacacacatcacaacgggcgtgagaacgaatattattc

SEQ ID NO: 539034 - DNA, 997 bp, Homo sapiens
ggctggccttgtggcttgggcagtgtccgcctgcatcctctttggtgaggcgcgctgagaccctgaccggccctcctgagaggatgccggtgcgtgcgcccgcggacgagggtatgcgagtgggtgggctgctgacggcctcggggtactgggtcccggtgagccgcgcctgccggggtaccctgggctaagcccgtggccggcagtctaactcttggtgatgttggcccccagggaccgcggtcggccagtgggccggtgtcgatcgccgttgtagcaggctggaagggcgcctgggtcttgtgttccagcagcgcagtgtgaacgtccctggtaagggcagctgggcggcgcttgggcggccagtcggtatttgcgctgatctggccatcggctacatcaaggggcatccgtcgaggagcatcaatccacgagccgggctcggatggaggcgccccctcggcaagagtggtcttcctgaggaatccgtatcggttttaaagaagcggatcggaagctgttcacttgacagacgagggcattcagaagagggccagtttggttgtatttgcggcaaagaaagggcacaggtacaaacatttgtgcaatgttgctcccttgtgggcaaccattgccgtgatgggtaccaaatcagtgtttgcttgccttgggaggacgaaaggcgtggagaccggttggtaaggatggcacagagacaattaatgggaaactactggcaaccgattatcttcccaacaaatcctgagacaatgaagaccctgttgtgaagagtgacactccggctccaagaaagttatctcctcagacacaagagctgggttgtgtggatggctgacgaggccacagtagagaaaccgacttgaaagagaggcagggcgtacacagaatatggggcagagcgacaatggtgccacaagtacggggtgcacataatcgtggcgggacacgctagagggaaacacagaatgagagcgaa

SEQ ID NO: 539035 - DNA, 131 bp, Homo sapiens
tatggcgtacccatggccagaatccacagacacacctaagcctgtggcactgggacaaatatagattttccatttgagaggcgacttcctgtgtcagtcgtgtatgaaggaggtggtgatggtggatagag

SEQ ID NO: 539036 - DNA, 534 bp, Homo sapiens
gctcgacctagactgtaagcgatgtgaagaaatgtcggtcgggtgccgtggctcatgcttgtaatccctgaactctgggaggtcaaggcaggaggatcacttgagtccaggagtttgaaactagcctgggcaacatggcaaaaccctgtctctacaaaaaatacaaaaattagccgggcgtggtggcatgtgcctgtagtcccagctacttgtggggctgaggtgggaagaacgctagagcctaggaagtcaaggctgcagtgagccatgatcatgccactgcactccaacccaggcaacagaccgagaacctgtctccaaaaaaaaaaggggaaatgttggataaacgtggtggctcatgcctgtaatcccagcgcattgggaggccaaggcagaagaattgcttgagtccaggagtttgagaccagccagggcaacatatagagaccctgtctctacaagaaaaatttaaagattagccagacatggtgacacacacctgtagttccagctactcggggggttgaggtggga

SEQ ID NO: 539037 - DNA, 897 bp, Homo sapiens
agcagtggctcacacctgtaatcccagcactttgggaggccgaggtcgggagttcaaggccagcctgaccaacatggagaaaccctgtctctactaaaaatacaaaattagccggggtggtggtgcatgcctggtaatcccagactactcgaggagagcgtggaggctaggagaatcgcgttggaaccgtgggagtcggaggttgctagtgagccgaatgcattgtgccattgcgactccagcctgggcgaagtaagagcagattattgccatctgctggaaaaagaggaagcgagcatagaaaaagaggttgtaatccaagctagtgtggatgatggtagaaggaaaatcatgcaggaggggatatcctacaaagaatctgtctattcgaacatggtgcacagtcctaaaattgagaccactcatctcagtccaagcgattatacaacgaatctattaggacagctacacacggaaaagagtaatgcgaacatgatttgatattcacgcattgacctaaattgtgcaagatcttgatagagttcactgaggagtcaggctagtagccttgaaaacaccatggagaggcattagtgatccagaatagaaagatcggtctggaagatgggtaattccagaaatgattttgaatgcatacatgtcatgatgctcctgtggaatttgacagtgaatctggatcaaagaggagaacatggaggtggtattgggaatgagggatgaagagttggggtaaagggcgggtaagattggaggacgttagtgaaaggtgtccgcgctacagggggaggtcaagttggaggtccgtagctggtgttagtaacaaatgggagggttgtgaaaaaaagggactgatacaaagagggggagagggaagag

SEQ ID NO: 539038 - DNA, 242 bp, Homo sapiens
tcagacaaaagtcctcacaaaagaaaaggaatgattccttttttctctcaagtttgttttttctccattttcctccccttttgtgggttgttcagatctctaggcctcaatcgttttcaagaggaaggagaaggcaccccacttatatggccgtaattatcagcattcattgcttacctggagaaaaagttcccatttcatttcctgatgatagggcatctttgcaatgcttcccaaatcca

SEQ ID NO: 539039 - DNA, 120 bp, Homo sapiens
tgatcctccatgatgctgattacatgtctcgatccacttaactatcttgtggctgtgacaaagtcacatggttcacacggcaggcatactccatctttttcagtgggggtgaattcaggt

SEQ ID NO: 539040 - DNA, 312 bp, Homo sapiens
gctcattactttagaatgacccccttgaaactctggcttttcctctgctctttcccagctctctcttaaaaaatattttccctcaaaagacattttgttcacagtttctggaaacgttggtactaaaatgttgagaacactgaaccatgtgtcggttatagcagctgggccagcaatgaggtagatgtgaggagagcagcgatggggatcctagcacgagcctcatcacgagcctcaccgcttacattgatttgttattcactggggcatgcggagctttctccaggagaagaaaaggattgttgtcgacgc

SEQ ID NO: 539041 - DNA, 1192 bp, Homo sapiens
  misc_feature (599)..(599): n is a, c, g, or t
cacccactccctcttagccaatattgtgcctatgccatagctagtctttgccgcctgcgaagcacggtgatgcctagaccctactagtctctaatctccaatcacatatggcctagactactgatacataacctaaaccctatctccacaatgctaagaagctaaatcgtcccgagcaaattgatattagctgaccagcgtgacgagtggacattgtccgaagacaaaccacataagtgttgaagtcgagcacgaacgcacccacaggccgtgagagttattaggcatcgatccctctactattgtcttggtaaccagagatcaagcaacaatccctaatttacgctggttcccctcgagagccctatttgccgtctcgtagcccgctcgttagacaaaggccctcgcattcgcgtaatagcttaagcttaacgcttgactttccatgaactccacctgcgaacaactacaattgggcaaagacgcatactgacccatcttttactcctacgttggaatcccaactttactccaattgaataattatagaacttcctaacgctgcttcttaaataacctaatagttccttcactctgancaacaaattcgtcccgttgaatttcatgaatccattttaccatcatgcaccatctaggtaaaccttaaattccaatatctcttaaattattctatttcgtttcgaaaaaatccgcaacactataattcactccagcctggtgagccctaattcaattccacacacagaataagaagggccaaccacaaggtccctaagaccatctggcgcatggtaggcgtgccacggccattcaattaacttgccgtgaattcctgaacggggcccgtaagattaggggcttcccttttttccccccttaagtttccacttcgggcatccattgacttttaaactacatctatccataaccaaaccccatagtgggtcgttccatcttacacaacgatttccttgaaccttaatcattctacgttcttgcaaactggacgcccaaattgaaatccgtatttcaaagagagttccccttgaagccccaaatagggggtttaattttatgcgagcctaaggcccttataacaccataataaagcttggttttaataatggtaaagaggaataacccttctttttaacggggatcttccccaaag

SEQ ID NO: 539042 - DNA, 287 bp, Homo sapiens
tcactacggtcacacacatccttcctagatagctcagacaccgttctcatattgaactacagtcacagggccggtaaacccaggtccctttgcaactttgtgcctggcctcactcctttccttacagatattcacataatgtctagaataatgaattcttcctgcaggaaaagtttagctaagaggagcatttgcagccaaaggcactatactgaacctgggagaccccattccctggaaaaacaccttccccttagattactgaaatgtcaatcaggatgtgtgcg

SEQ ID NO: 539043 - DNA, 571 bp, Homo sapiens
ccagcgtggcgctcagggaggggagttgctgaatgttctgtctgtaggtgccgactctcagctacctaggagaagatgccaacaggtatatatcactcactgagaatggttactatccagggcatatagagaattgcaaatcagtaagaaaaagaacccagctctcggggagagaactgggtgcagtcctatggctgctttctcgccttcagaggtgaggcaaacctctttttgtattgcccatgagacttccagaccttgtatggaactaaagacttaggctttcagctgggcacggtggctcatgcctgtaatcccagcactttgggaggccaacaggagcatagatgacttgaggccaggagcttgagtccagcctggacaacatggcgaaaccccatctctagaaaaaatacaaaaattagccagaggtggtggtgcacacctgtagtcccagctactcgggaagcttagatggaaggatcaactgagcccaggaggtggaggttgcagtgagccaagatcatgccactgcaccccagcctgggccaccaagtgagatcctgcttta

SEQ ID NO: 539044 - DNA, 164 bp, Homo sapiens
gatcattaattgcaagactctaatccctgtattatgtagtcaagagacagtcttgacatagaaaaactgtgagagagtaaaattacaccatgtagctaaagcgcacattaagaagcgtcagctcacacccatactaaaaatccaacataacgagcgtgcatggt

SEQ ID NO: 539045 - DNA, 318 bp, Homo sapiens
  misc_feature (17)..(17): n is a, c, g, or t
  misc_feature (84)..(85): n is a, c, g, or t
cccccccccttccaaanttggggtggggggttgcgtgggcggtttatataaacccgggtttttttggtacccggtggttttgtnnttggccccccctcccccgtgtgttggcccccctagataacccccggggccggtttcccgcctcggatttttccctgggcggggggcggtttccctttttccccggggcccgggttttccttttggcctttttggggtccccttttggcccagttttgcccaaaaacccggttgggcccgggtcgggttttccggggtttttttgccccccgggctcccgggggggggggttga

SEQ ID NO: 539046 - DNA, 177 bp, Homo sapiens
ctctagttgatcaactacgaggagtgatgtacgctatgatcagaaaactttgttctcagggtaaataactcatgattaaatactgcgaattctgagtcagtgccaagggatctgatagatgcacaggtaatcactggtgtcaatcactgatcacttgaggcaggaccgcgccagtgg

SEQ ID NO: 539047 - DNA, 974 bp, Homo sapiens
  misc_feature (974)..(974): n is a, c, g, or t
gagccatggtataaattaacaggttaagtgtcagtcatcagatcttccttctcttcctaaggatgcttgtgttgcctcaatctatcaatctatctttcttgttagggttgtttctctctctctctctctctctctctctctctccttcattagaagacatggtctagcccatgattgtcgtagatatagggcagggtttattcacagtatgtgatgatagcacactggagcctcaaacctcttaggctcaggcgatccttcaagcctcccggggagctgggaccacaggcacgtgccaacacacccagctctctttcttggtttttcatcatttcatgtatctatcaaagcccagttcatctcctcccccaaacacacacacacacacacacacacacaattaagttgctgcaaattcaagagcttagagagaataagcttcttggtggtgaaactacactctctcatgtgtgctccagttctaaaattaatctgtgtctggtctctgaagccctttcttgctctgtgcctttcagacacattcttaggtgctaacggacatgagctccgactctccaaaagtgagctccactttgtgtctgaagagcccctggagagtacacgctgctcaggtatcatgggcgtaatgatcacccaggctccagggagatctcagtggaatgatctaggtgtatgaaacagaggggacttcagtcttacaggcttggggaaattggactctgtgtttcgcagaaataatttacacgaagcttgatccctcaagtctccaaaaggctggcttaagtggcctaaaaggctgaagtgtcaaaagggttccctggtcttgaaaatcttaatctcgaccggccagcagtcagagggcctaaaaggttcgctcaaaattttgtaaaagggcaatcagccgaccttagcatataacgctgagtgtctctcgtattctcgtgttttcttgn

SEQ ID NO: 539048 - DNA, 132 bp, Homo sapiens
tgattcgaaaaggcctgttctccctgtcaccctgcagtgtaagctcacctccaactctcacacccttcacatacatgctaactggacaaagatatgggtgtggacattagattgccagtctgtaagaatgct

SEQ ID NO: 539049 - DNA, 227 bp, Homo sapiens
tagctatataggatggcaagggacttcctgtaacaacgcatctcatattctggcatgactattcaaaaaaacaacaatgtgcaatcaaagtcctcggacacattgtgaactttgtgggggtgctcgctccaacctgactgctgtcaccttacaccgttccagtttttaaatcctgagctcaagccatataaaaaaaacaaaacgcgcgaaaaacaaacaaagaaaac

SEQ ID NO: 539050 - DNA, 239 bp, Homo sapiens
cggcatggggtctgtatcatttgattgatgtgagagagagtgttcactgctcgtggtagagcctacactgtcataccccgcactgagttgactgacgtccccactacctcctctgccagtgctcttctctgagctgccgtaggacgtatgaccattccctgtagaagaaggaaagaacatcatccggtgtgttgccctccctgtgaaatccagacccagacgtcctgcggcggcaggag

SEQ ID NO: 539051 - DNA, 680 bp, Homo sapiens
  misc_feature (372)..(372): n is a, c, g, or t
  misc_feature (375)..(375): n is a, c, g, or t
  misc_feature (421)..(421): n is a, c, g, or t
  misc_feature (468)..(468): n is a, c, g, or t
  misc_feature (478)..(479): n is a, c, g, or t
  misc_feature (481)..(481): n is a, c, g, or t
  misc_feature (485)..(485): n is a, c, g, or t
  misc_feature (506)..(506): n is a, c, g, or t
  misc_feature (509)..(509): n is a, c, g, or t
  misc_feature (513)..(513): n is a, c, g, or t
  misc_feature (517)..(517): n is a, c, g, or t
  misc_feature (525)..(525): n is a, c, g, or t
  misc_feature (529)..(530): n is a, c, g, or t
  misc_feature (533)..(533): n is a, c, g, or t
  misc_feature (537)..(537): n is a, c, g, or t
  misc_feature (541)..(541): n is a, c, g, or t
  misc_feature (544)..(545): n is a, c, g, or t
  misc_feature (557)..(557): n is a, c, g, or t
  misc_feature (563)..(563): n is a, c, g, or t
  misc_feature (565)..(565): n is a, c, g, or t
  misc_feature (571)..(572): n is a, c, g, or t
  misc_feature (580)..(580): n is a, c, g, or t
  misc_feature (595)..(595): n is a, c, g, or t
  misc_feature (606)..(606): n is a, c, g, or t
  misc_feature (624)..(624): n is a, c, g, or t
  misc_feature (626)..(626): n is a, c, g, or t
tataaggctaggtacgaggcgggtggtgaatctggatcggaggcgagcacctatccgatgatctggagaggagcattgcaacgtagcagtcagcctaggacgatggctgaggttggttcaagtgtgtcatgctcgtcgaggttatcgagactcaggaagtccatatcacataagcgcaatgaagactgcgtggtgagagctgtcatcagagaaattcccaagacttctttcctgtgatcttcagcaaagcctccgagtacttgcagctggtctttggcatcgaggtggtggaagtggtccgcatcggccacttgtacatccttgtcacctgcctgggcctctcctacgatggcctgctgggcgacaatcagntcntgcccaagacaggcctcctgataatcgtcctggccataatcgcaanagagggcgactgtgcccctgaggagaaaatctgggaggagctgagtntgttggaggnntntgangggagggaggacagtgtcttngcncatnccangaagctgntcanncangatntggngcnngaaaactacctngagtancngcaggnncccggcantgatcctgcatgctncgagttcctgnggggtccaagggccctcntngaaaccagctatgtgaaagtcctgcaccatttgctaaagatcagtggagggcca

SEQ ID NO: 539052 - DNA, 681 bp, Homo sapiens
cccacacaataatctgctaggtctgtgcgctcggtgattaatttgtgactgatgtgctggcgaccagattgctatcagcgtgtcggagcgtgaagggcctggtggctggtaataacctgtgaggagcctcgtggcctggtgcctggccactgtgctggagctgacttgtggtgtgcagtgtagcctctgctgtgcttctgtgacctgcccaactctggtgtggtgtgatggcccaatgccaatgaatgttaggaaacaactgctgttttctgccccagcctgacgtgacctctgagaaggatgtgcaaacatgctctggctctagcaaacaggaaatgtttggcctgtgtggatgtatgcttgtcaactgtgcatgtgcatcgctggtggctagcaatgactgtacaacttacaagaagggccagacccataccttggaatgacttccatgcgagttcttgatgtgaatctcatgggcaccttcaatgtgatccgcctggttggctggtgagatgggccatgaatgaaccatgaccatgtggatggccaaccgtggggtcatcatcaacactgccagtgttggctgccttcgagggtcaggttggcacaagcttgcatactctgcttccaaggggggaatagtggcgcatgacactggccattgctcgggatctggctccc

SEQ ID NO: 539053 - DNA, 370 bp, Homo sapiens
  misc_feature (197)..(197): n is a, c, g, or t
  misc_feature (226)..(226): n is a, c, g, or t
  misc_feature (250)..(250): n is a, c, g, or t
  misc_feature (282)..(282): n is a, c, g, or t
  misc_feature (292)..(292): n is a, c, g, or t
  misc_feature (311)..(311): n is a, c, g, or t
  misc_feature (320)..(320): n is a, c, g, or t
gggtcttgaaaataattccatgcatgtgggactttcagaagctctccatgtctgtccagaagggccccccagtatattgtggctcgtgccgaattcggcacgagaaaccattggaaagggagagcattagtacaactccaaaatgtttcttagaaaaagctaaggataaacagaaaaaggtcactggtcataacagnaagaagaaagtagctcttgaagaccaaangttaaaaacagactttatctgtcnagaaatgtaatttatgatccagcatgaatgtnatttcatggnatctttgaggcttacagtnacctgtacnaaaccattgaaatcaactccagtccatgggactgggggattgatccttct

SEQ ID NO: 539054 - DNA, 413 bp, Homo sapiens
agcgggctgcgcacgggaccggcgtttgagtggcaagttgtttgttacagcgaacaccagcaacatccccctttcgcactcctctccctttctttcacctcacactgccacactacaatcatcaccactcgtcacctcaccatcaaccctccccgaatctctctcccctctcaacacttttccgtcccgcacatcactctccacccaacagcatctatatcccacaacatgatgtcattacccctccccccaacaatctcactcacttcaaacttttattttacctatatacttgctcctacctcatccaattatacaacccctccctactacgcccagcctcttcacctcacccctctcatctcagtcccatcctccacatatcacatacaccatcccgacacccctctcac

SEQ ID NO: 539055 - DNA, 233 bp, Homo sapiens
atcaaagacacacaacttcaatgagaacctttctttggattaattaattaatgatatggagccttgatctgtcactcaggctggagtgcagtgcactaattcagctcactaggaatgcatctttctcttctctttctccacctcccaggtttaagcacttctcctgcctcagcctcccgagtagctgggactgcaggcacaagccaccatgctgagctaatttttgtattttt

SEQ ID NO: 539056 - DNA, 431 bp, Homo sapiens
agaattttgattcccagagtaccacatcattaagttcacggtcccattttcaacaagaatcacaaggtatataaagaaacaagaaagtatggcccactcaaaaaaataaatcaacagaaactgtttctgaaaaaggcctcatgataaattcacctagacaaagacttaaaacaactgtgttaaagacattgaaagacctaaaggagtatgtggggaacatcaagacaaaatgtattaacaaaatggaaataacagtaaagagatagaaaacctgaaaagaaaatgaaaaggaattctggagctgaaaagtacagtaactaaaatgaaaaattcaatagagggtttcagaggcagatttggcaggcagaagaaggaatcagtgaaattgaagttaggacaattaaaattattgagtgtgaggaacagaaaga

SEQ ID NO: 539057 - DNA, 860 bp, Homo sapiens
ggttccttgtgtgagctgacgacactcgagagcgccaattttcctagatgtcgatttggtggttggaactgtggtttggaatccagagtagtcgcctcgtctagtatccaatgctccagcagccaactggtgaagaagaccatcgatttcttcgtactcagttgcatttgagagcttgtcaaaaaccagacacaattggagacacaggttcttctatcaaggccttgactggaatggcatagttttcagatatgaccacatgctttgaggaaatgaggctgatgtagcagagctgataaagacccccacagaaaggccagcctacctctggtgtggccagatgagtacatgaccgggaaagagtacgaagagagagaaatctgaacagctgggtgtccgggggagacaatcaatatgtcagcaggttccgtgagtgcccctcaagccacaaaaacagcaagtttattagtgctttcaaaggggagggagtgtatgggtcacagagatcacatgcttcacaaggcaataaaaatatcacaagggcaaatgggggccagacgcgagatcacagtgaccagggcaaaaattaaaattgcttaatgaagctcgtgagcacgcatgtcattgattaccatctcaaccaggaggcccggggtttggagagacggaaatacggtctgactaaaattacttacggcgggaattcctcatcctattaggcggggagttgacgggaaaacgtggtattacgtcccttttttgacggcttagaaagacattcagggggcatttagaaccacaccgggatcagttctcctccaggggggccggcggacaaatcaggaacattcccatggtgg

SEQ ID NO: 539058 - DNA, 120 bp, Homo sapiens
cctcctctgtgctagtccacctcctctgtgctgtccgcctcctactagtgcctcctctgtgctgactacctctgtgctagtccacctacctctgtgctagtccacctacctacctgtcca

SEQ ID NO: 539059 - DNA, 595 bp, Homo sapiens
  misc_feature (513)..(513): n is a, c, g, or t
ctgccttactttcatgtgcacccagaagtcactcgaagcaggctgtttcatattccatgtaattgcatggttttcagtgatttcttagtatagatttctatctttattgcattgtagtctaaggacatggtttgtataatttcagttttgaatgtcttaggattgttttatgcctgattgtgtggttaattttatagtatgtgccacatgtagatgagaaaaatgtatattctgctgttttggagtggagagttctgtagatatccattaggcccatttagttaagtgttgagttcagatcctgaatatctgtgtcagtcctctgcctcaatgatccaatactaacagtgtggtgtcaaagtctccccactattattgtggggtattctaagtctctttgtaggtctctaagaacctgctccatgaatctgggtgcttctgtgttgactgcatatatatttagggcagttaagtcctcttcttgaattgagctctttaccattatgtaatgcncttattgtcttaagtgatctttgtagtcttaaaggttgtattgtctgcaattatagcaaccaagttaccgatcacgggtacc

SEQ ID NO: 539060 - DNA, 360 bp, Homo sapiens
ggaggagtcaccagtaggcacataaaaaaatcatgaccggctgtgcacggaggctcacacccataatctcagaactttgggaggccgcggcgggtggcacacctgcaggtcaggagttcagcgaccagcctggcccatgtggtgaaacttctgctctactaacaatgcaaaaattagccgggtgtggtggcacatgactgtggtcccagctactcgggagactgaggcgggagaatcactcaaacctgggaggtggaggttgtagtgagctgagaatcgggccattgcactccagcctgggctacagagcgaaagtgtctcaaaaaataaatacataaatagagacagggtcttcctgtg

SEQ ID NO: 539061 - DNA, 320 bp, Homo sapiens
ttttctattttaagtagagatgggatttcaccaagtgggccaggctgatctcaaactcctgacctccagtgagccacctgccttggccttgtctgcttattttcatcaccactacggtggtttaaatgtgggtccccttcaaaactcatgtgggaacttaatcctcaaggtgacagtattttttggtttggtttggtttttggagacagagtcttgctgtgtcacccaggctggagtgcggtggcatgatcacggctcgctgcagtctcaacctccccaagctcgggtgatcctcctgtctcaccctcctgagtacctgg

SEQ ID NO: 539062 - DNA, 124 bp, Homo sapiens
gtccctaggtagcagaagcagctagaaaagctcagaaagaacgttaagaaaccgctagctttaaggataaaaaatctcttggacaaaaattaaaagaaatttctactaactttaagaacatcaa

SEQ ID NO: 539063 - DNA, 339 bp, Homo sapiens
ctctggaattgtatacctgctcagtgtctgaactccttccttttcactactaagcattctccatgaagccacacttcattttgtcattgtgaggttgatggacatctagggcaaatctaacttctaaagaccaattcttacgaggtgtcatggtcaagcagaggccatggccggcactggtctaggtggcccatggcccatttgggggccttggtgggcctcgaggaagggcaggtgctggtcagggagccgggtcgctaggcagcaggtgggtgtcaccccagtccacgctgctggggtgcctggcctgatgcaggctgtgcctgagggagcctcatg

SEQ ID NO: 539064 - DNA, 345 bp, Homo sapiens
ctctacacggtccccccccgagaagctgactcttgagaatctggaaaacacccacaaaggccttaatgacctcataggcctctcccaaacctgactacagaactggaatgagaggcctgggtctgtctcctgcctttaggcacgcctatcattttcttgtcaatctctttaattccttgctcacctttaaaggaagcatggagttctaatgctcccataaactatgtatgccggcaagacacttcacatactcccggtctcactttccccatctgttaaacagggtttggactaggttttccctgctattctgtgatctgcctcttgctgccattctttctcacc

SEQ ID NO: 539065 - DNA, 415 bp, Homo sapiens
agtgagtataaatagctcattgaatatcctttgattctgattgaagtataccctttagcatttccgggggacaggttggtatagatgaaattcctcccctttgtgtgtctgggaaagtctttatttctccttcatgatgaaggatatttccaccagatacgctactcaagggtaaagttcagcagtgtaaatatgtcatgccactctctcctgcacggtaaagtttccatggaaaagtctgctgtcagaggtattggagctccattatatgttatttgtttctgccttcttgatgcttttataatcctttctttatccttgacctttaaagtttgattattaaatgccttgaggtagtcttctttgggttaaatctgcttggttctataaccatctggtacgtggggtaggaggt

SEQ ID NO: 539066 - DNA, 1833 bp, Homo sapiens
  misc_feature (218)..(218): n is a, c, g, or t
  misc_feature (1609)..(1609): n is a, c, g, or t
  misc_feature (1641)..(1641): n is a, c, g, or t
  misc_feature (1692)..(1692): n is a, c, g, or t
cccggttgtcacagtcccctggtgacagctctgacctgcggtcggagactgctggcacgagctagcctatcaggtgtgaggcgttccagagaagcttatcgtagttggggacggcgaacaattgagagtggaatagccgtcggcccgtgcacacgtgcgtgcatgactaaatatcagttgcgttctctctaatagtcgggtgcactggatcgactcgntgagaggcgccatggtggcaaggttacacgtatgagacgcggaggaagaggcccgagagaagtctcgtagtcccatgagagccaggatgaatctatcgtagtgtgctacttgaaaccatggagtgagtgagaggagcacgaaatagccatcagagtcccctaaccgtagagagaacccgtgagctggcttcaactcacttgcacctgcaggctccagcgatgggagcacacgtggttaggcatggtaccccgtgaggcttgatccccgtggcgttcatcgaggctagaacacaggacacagatctgtcctagggagaacccgagatattggcgtgaggttccctttatacccttggcaagcagtgtacccatagagtcatagttacatattgtgaccgattcacatccctgtggcattaggactttgcacatttgattatgggcctttgtgtatcctgggaccatgtacggcgaaaccggacacaacacttcgtgggcttttggaggaaaccccaaaggcgaacaaggcggcaccaacacccagttttggacggtaccgaataccggaatttccgcaaacgcaattgccagcgaaagggggcaaggggcttacccatgtgggctcgcggaccttggcggtcggattcccacatttttctcccctttaccaaacaataaaagttctttgaaggccggaccctgttgtgggcaacttccgcggtttacacggaacggcagttttccaacaaggcaatacactaaaaccaatggggtcctttagtaggaatttggagccgaaaacgcccccatggagattagcgccgcgtttttgaggacaacgtacaaaggagaaatgttgcccccggagcccaacactctccgcatctacttcgagagggcaccaaaattccctcaaatagtgaggtggacattgcggcgccgagaggcaagagaacctccaacaaacggcactgttccccacgtttctacaaattacagcgggctagacagcgcgagaggccatatgaacaagctgccggtacatacaaccccaaaccgagagagagagcgctgggcggaaaaggaaaacataccggggaacgcgctggcaccagcggcgtgtgcctctcgtgcggctgacaacaccacgcgtcgggcggcaaaaggggcacagagtaacagccccgcgtcacgtacagtattaccgcgacgaaacctgccccacggcgggcgcccccgcaggtactaattttggccggtacaaactacgagagtctccataatcgatctcaagtaaaaacgggggcaaatcttcacgaagcgtattcggtgaggttacatccgctacacccacaaatataaatcaccctggagtgtgcggccccgcggangcgttttgttgatggagaccacacccgtgatncagattgtcgtcgcctcagccccacgggtcattcatcacgagggatgatgntactccctcgcggtggcgacccccacacgtggatgaacaaagcaagagtcagccgactacagtgcagaaaagaggcccacacaacgtatcgatacacaactgcatattcaagagacttacctgtagtatatatttgctaac

SEQ ID NO: 539067 - DNA, 80 bp, Homo sapiens
gtttggggcgggtccgaggccggaagtgcgtgggctgcgggctggccagcttagggttttcaggaaattggaagctgccg

SEQ ID NO: 539068 - DNA, 920 bp, Homo sapiens
ggttataacatcctactgtgctcaaaaagctggggtctctgtagtgtataaaacaaggttcctacccaagaggatgtacaccctcgctaataatatagcaaacaggcatgtgaaaccataagccatttattgaagtcacttaaaaagtggcaagaaatagcattaagtgggctaaagcaggcgttacacgaggggaaaattgtcgtaaaggatacatttgtatatatggacccgtgaatggagaataaaagtcctatataagttgctctgaaaggtgataaaggtattccaggcaggcaaactggtatatacagtatgcattcgagagatagaaatgtgctgagtcttatctgacacctagtagaagtaaaccagtttgtagactcatgtggagtattggaatggaagaggaaatctgagaggactcatccgatagggagtcagggaattaaccgagcccaggcttaaggagtttggaacagggaatccttaaagcatcttttcccagaaagcatattctgaggttaaatatgtgtcgcatataagaagggggatgggggagtctgaaatccggtaagctggagaaagattaggtgccagcaccttgaatatccgtgggtacattgcccagttgcccattcgcatatatagtgtcagaggtccgaaaacttgcatggactgggggccaacagaaatgcacctacagttcaactgtgacaacagtttagaacaccaactggaaaggattgaggggcatgatggggtcacacaaaaaaaaaaccacaacaactggggcgcgcccgaaaaacacacacgagcagcgcacagaataaagagcaacaacacagcgacgagagaggagcacaaaagggagcacaaaagcgcaaacagaaaacacaacgcaagaaacaaagaaaaaa

SEQ ID NO: 539069 - DNA, 550 bp, Homo sapiens
cggatgcagcacactcttacatcccaagtcacctccataaccagtcaaataaacgtactgtctttaataggatcttttcaggaacaccataacttatggtgctttttcaaggtgaaatcgtgctgttatacctaagatgtttccaatcgaggaacagcataagttcaaataagccaatgtgtgatggatttggcctaaagtagataaagcaaattccactaagtcctgtaagagggttgacttgaagaaccacttcttctagtcatatatagtagatatgatgattcagcagtcataatttaggaaggcaacagtatactatacatgtcattattttcctcttaagtttgcatttatagaagaaggtggtgggggacaatttaaacttgagttctcaagttctaccttaatgaaataaaacaccattggataagtagtggagatgctaatttataaaatattcaccttcatcaaatttctttcattatcaactttttcacggatagcttctaaaattactattcttttatgcggttaatcttatgagaaa

SEQ ID NO: 539070 - DNA, 200 bp, Homo sapiens
cccaaagggggggggggggggggtccccctttggtttcccattcaggggggggggggggggggatttttcccccccccttttaaattgggccccggggttaattttctttttcccatttttccccccggggggggggggggtttttttaggggggggtttctttattttttggggcccaattattggggggccctgggga

SEQ ID NO: 539071 - DNA, 261 bp, Homo sapiens
ggggggggggggggggtcccccccaaaacccttttttttttttaccccccccttttaagggggggggtttccggggggcccccccccttcggggcccccccccccccctttttttaaagggggggccccccccggggggcccggggggggtgccccgggtttttttttccctttgccaaggggggggggggttttttttttaattttaggccccccccccctttgggcccccccccaaaaaaaaagtttttttggggggga

SEQ ID NO: 539072 - DNA, 380 bp, Homo sapiens
  misc_feature (270)..(270): n is a, c, g, or t
  misc_feature (346)..(346): n is a, c, g, or t
  misc_feature (362)..(362): n is a, c, g, or t
tggagaaggcgtcttgctttgtcacccacgctggaatgcagtggcgggatctcagctcaccgcaacctccacctcctgggttcaagtgattttcctgcctcagcctcccaagtagctgggaatacaggcacgccaccatgcccagctaatttttgtattttcagtagaaacgggatttcaccacgttggccaggctggtctcgaactcctgaccgcaagtgatccacccgcctccgcctcccaaagtgctgggattacaggcgtgacacncgtggcccggcccaaaggggaaactcttgtggggaggagcagaggggctcacatctcccctctgattcccccatgncacattgccttatctnttccccatctagccaggg

SEQ ID NO: 539073 - DNA, 480 bp, Homo sapiens
ggccctcatgccatgtcacaatggcttgtttcatgtagcgctcaatagcctgcagcatggtgctatcagtgatctggcagagggctcgcacggccgggccccggtagttgtcttctctcccagtcatgtctttgttaggctgcagggaagaaggcattgtcagcatgcagagagcctgggcctgtttactcctctccagctcccaacaccacccttgcccagattactacacgagcctcctaaccagtgctctccctctattcctgcccctccaagcctaactccacacagctgctggagggagtttcataagactcaaaaccaaacaggtcatccccctgcttttgctaaaaagtttccatagcttcctactgccagtgacctgaatgtaactccttgaacttccctaactggctatgctcactcctctccagcctttgcatgtgctgtttcctcagcctgtagcattcctcacccctc

SEQ ID NO: 539074 - DNA, 207 bp, Homo sapiens
acttctagctcggtaccctaatctttatctaccgtcaggccacctatataatatgctcagggagtgtatgtaaaggtttttctgaagatacaaaggccaagatatccagtatgcctctctgaacctcatcaagttagaggcaagcatagggttcccttccataaatttttgctgaatcacttgggaccactggctccacgactaggg

SEQ ID NO: 539075 - DNA, 893 bp, Homo sapiens
cggagtggtgactgtttgttctccactgtatctctctaccacaggcgcctctctcgagagctcgtgacccgcgttctttgggaagccctggttccgtccacacggcaccgttgggcctcgcggggcgcatctcaaaaaatccgtgccatcacgggtcctttaaattccataccacgggggttctcaaccgaggctctccacaaggaaatgtgccgctcgaaaaccagcgcggcgtgaccccgtgttaaagtataaccgccgccctttcccgcaacaacggttagggggaaattctcccgggctgggtggcaccccaacggaccaccccgggtggtgatttccactcgaggcaagcaacattgtgattgtttcccccgctcaaggcagacccagcagaaatgtgtagtcgtagcccccagaccatgaatcccaccgtttgggaaacaaacagcgggtacctctctccccctgtctataacagtctggtaacgcagaaaaaccccttgagggacaattagcgtgaaacccgctcgtttcataacgcagttaatggacgtggcgaagttcctatccacaatcaaaaagcacgtccttttgcactcccacctaggtgccactcgattggagcgcaagacgggcctcctcgatcttccccaccagggaaaaaatatctggtgtgcgagggtacgaaagaacagatgcggtgtttccccccaggacctcacaaatatctgtgttcaaagacgagctccagcatgccagtcgctcttctttagagtccattccacgcttttcttcccccacaggtatgaacacccgctccggttggccccctgttattcatttcaggcgggctttttttaaataaacagggtttaccgcccacatgtcag

SEQ ID NO: 539076 - DNA, 356 bp, Homo sapiens
tcataggtcgcaggcaggctagtagcaatcagattagaacagagggtgaagactccaggaacatatctccggggaagaaaatgaagctgtgaaatacttgatatacttgacaactgtactagtcagaactgtgttcagcatatatatacacagaaatatctagcttaggtagctccactaacatgaaaagttgccccaaacgactttgtttttcagcatctgtccaccccgcagaatatagttttatccttatgcttgtaacatgactactgcacctctaatcatcacacatgcattctgggaaggaatcatgagaaagggcaaagggtaaaatatacatacctgcgaacctatga

SEQ ID NO: 539077 - DNA, 941 bp, Homo sapiens
gaggtcaccatgtcatcatttgatcaatcgcagcaatgcacagtagacaggatattgccttcgtctaccagagaaggaccaaaaaggaacttgcatcagcatctgaagttagacttatctggccacctggagacggtgattctgtggcctattgaaggacacctgcgtcagtgatgacgcttctgagtctacaagcttccatgaggggccgctgggaaccgacagtacggactctctcatgtgagatcatctgctccagaaccaaatcagtgagctgctaggaaattaatagagtctacaaggaaatgtactatgagtgatctggatgaatgacattatttcggacacatctggtgacttcccgtcaagcttgatcggttgtcccttggcctagggtagaaagaagccgaggatggatctgtcattgattcatgactgatgtgaccatgatgctcgggatctctatgacgctggagtgaaaacgccaaaggaacctggtgttcccaattgtgtctgcatcatgaccgagctgaagttgcccactccagaaagtctttgatcgcgtaccagaagttcaggctcttttcaccttgtctggaaaagcattccacgcatacgaggtttcgttgcagcctggaaaactggcttcctgtaaacctggcttatggcctttacggaaccagccgcctgtttttggctgattcggctgtattaatcccgtaacgtgaagcggtacgcaaaataggcgcgtaccgcaacatggttcccccggtaagggtgaactttgcacgcgtgctgtgtacgcaatagacggcggggtccgtcattatttccgcacacacagggcggttccgacacgccggcccggtgtggcacgagaccacggctgcttagaggctcctcctggttcaacgcacaccggcagtgatgaaagccacgac

SEQ ID NO: 539078 - DNA, 817 bp, Homo sapiens
aacaaatcaaggttctcttaattttttggcttatatacaatgaagtaaaaacttgataaacatggtttcaaattgaggaggagagtcttggatgtatgttttaatatgtataccttataattctgcctctagccaaatgctatgttgcaaaatgtggcatctgttagtttttatgtctgtgtcttcttgtttatatacctgggtaatttgtgttaccaaaaaaaaaaaaaaaaaaggaagttgtaatgtgtcagacacacaagaaaacgcaaactccaggtgtgtgtaagcttaaagttacaattccaaaggctcatttaccaacagacagggtttttttgtaatacttataaaaacattatatgctacattattcattggccatttccatattttgggggtttggctactcttatacaagggaattcacgggaaatgtcatccagccacttgatttggccattattatttctaaaaacggtttctaagatgacagttatcactatttggttatatctccatgctgacttttgaaagagggtactagtatccctctagccagatggcttagtttccgtgggtaatccaaaacaacggtggtcctaagggaatagtaaagctaggacctaatcaggaatcatagtttgcctgcatatatggtcaccaggtcgtgttgctttggtttcacagtgattgcttgaagagggctgcacaagaacttatgtgacatttccaggtgttgaactaaaacaccttcttggctagcgtaggagagaaccagaaacggagttaccacatcatggcgagtacaaaagac

SEQ ID NO: 539079 - DNA, 159 bp, Homo sapiens
cagccgggtacccttctattacgtagcgttgtttgaacctcgcattgcttgagcacgtatatcgggtccactgagtgctgcatttgacacctcgcaactttccatttgggctacgcgagaacttaacagagagtggttgtgcaggttccactatccaaa

SEQ ID NO: 539080 - DNA, 1074 bp, Homo sapiens
  misc_feature (739)..(739): n is a, c, g, or t
  misc_feature (1074)..(1074): n is a, c, g, or t
ggcctatggaatccctgtatcaaaagccccaaaactggggaagaaaaaacaaatgggcaatgcctggatcaaaggctgaagttcggggtgcatgaaacatggtcaggataagaatactgagaaacacactcacataataattaggggggacagcagggggcagtgttctgttagagtgcttagaggggacgcaaagcagggtggggaaactgcttcacatgtgaatgcctagctatactccatggctcccgttgcttgcttccgagaagcttgcagaataccatgcaaggtacgtcatggcatggtcccaagctactcagaggtgcaaagggttctccccattaacaggcatggagcatcccttttctcgcctgtcccagacatgggatcttctatcgtctgcaaaggcctccagggaatggacgcgttgttctcccaaccagcagttctcaggtctcaccattcaggacggtttggactctgaatatcgtaacatgccagccaggatggcagcatcagtgtcctcatgattctgctcctcgagtgagacgacgggagaaccggatgctagatcgacctccaaaggaattaaaggcccttcagagacttagggcctgcgtgtgggcctccccagcgcttctccaagtcatcagggacacagaagtttcttgagaaagcttggattagccagcaacttgatgtttaaacttgcagctatgcatctttgttggtagcaagngtgccccgtaggataaggcaagacctcctgccatggtggggatccatgagagcccacagactgaggcagaaggtcctgaaagagtccgaagagggcgtatcagcttcttgaaccctggtaactggaggcctacaagggttcgtgaaaccagccaagtctcaagcttgagaaggactgggcatgggattccaatcaattggggtccccttgactcctgtgccagaaacgttcgaagggactgaagcattagaaagctcctggcaggccaatttactccaaacaacacagttacattcattagaggcaagtgtcaaagctggaaatgtgtggaaaan

SEQ ID NO: 539081 - DNA, 482 bp, Homo sapiens
agacagagtttcgctcttgttgcccaggctggagtgcaatggctcaatctcggctcactgcaacctctgcctcctgggttcaagtgattctcctgcctcagcctccggagtagctgggattacaggcatgtaccaccatgcccagctaattttgtatttttagtagactagggtttctccatgttagtcaggctggtctcgaactcccgacctcaggtgatctgcccacctcggcctcccaaagtgctgggattacaggagtgagctaccaagctcagccagtgtttgtattttcagtggacaagttttttacttcctgggttaattttttcctaggtattttattcttttgtatcctatgggaaatggagttgttttcttaatttccttttcacgttgttcattgttagtgtatagaaatataactgaatttttgttgttgatgttgttgttttgagatggagtttcgccctttcacccag

SEQ ID NO: 539082 - DNA, 151 bp, Homo sapiens
  misc_feature (131)..(131): n is a, c, g, or t
ttgtgcatcctaagcgctcgaagtatcaaaataggaaaaaaaaaatcttggaaatagccaattaagttgaataaaaaaatccacacgaatgcggttgggtgtggggcaggaatccactcctatgtgcctgngtaatctggatcccgcgtcc

SEQ ID NO: 539083 - DNA, 625 bp, Homo sapiens
cggagagtagtccacaactgccaggggaactgaattattcagaggatgaactcacgtcaaatacgtgtggaaaagccaaattctttaattactcagagcttcattgtattacacaaatgggtaccagagacggaaaaaatgccacaagtgatgccttaacttcggtcttgacaaaaattaatcgaatagatatagtgacactgctagaaggaccaatcatcgattatggaaatatagcaggcaccagaagtttggcagatgagaacaatgttttccatgaccctgttgatgtcagaccaaatgtactgtcttccataggttatccttcccttcaagtggaacgggcaacccccacagggttgcactacacaccacctacccctttccagcaagatgattattgaagtgatatctctagcatagaatctccccttagaacccctagtagactgagtgatgggctagtgccttcccaggggaacatagagcattccgtagatagacctccagtcataactgcagaagacgcttccttagaagacagcaaactggaacactcagtgcctttacagaaatgcctaagcagtgatgtaaaaagacccgtggggaagttttctaataggaa

SEQ ID NO: 539084 - DNA, 143 bp, Homo sapiens
cggcagtgtcaacgacggcagtgttaacgacggcagtgtaaacgacggccagatgttaaacgacggccagatgttaaacagcacggcagtgttaaacgcacggcccagtgttaaacgacggcctcgtgttcaacgacggccag

SEQ ID NO: 539085 - DNA, 600 bp, Homo sapiens
ttttgttttgttttgagacggagtcaagactcagcccctaggctacagggctatggcacaaactccgctaactggaaggttgttgccccatctccaaagcattctcatgcctgaaactgcgacagctgcgacaacattgtgcatatcacaaaacctggcctgggacagagccgcgacctcaaactgccttgggaacccctgggggggccctggaagacctaaaagcatatgaccagtgaccttagacgcgagccttttaacaagtggggttgttttccttggtgcctttggcgagcaccatgcttgctgggtgccgttgccagacaacgagggcacgagccgccccagtgtcatccctttcctatgtaccatctgaatagatacattagcaccctaccggagacatgagtgcttatgaggcttgttgatcaggcctctttagggattgatctctattgcaatattatcacaatatgggatctgcaggcataacctaggaggaaccatgccatacagtgataaagagctgcaaggactcggtgcgaattgccaaaagacctagcgtgctgccccaaagttaagcctgacaaggccaccagg

SEQ ID NO: 539086 - DNA, 857 bp, Homo sapiens
gatttgggtggagtattatgtttatatattataatttagaaataccattttataattttactattccaggtgacataatgcatttaaatttgggatttgggtggagtatgatgttaactggagttgtattatgattccctcagaaaaatgacgcgtggctgatagttaaataagatgtttggcaggtttcctacatactttgtgctctgcctggagctgtatccagtatgatataagacagcaagtgtagtattccattactatgtggcttagggatatatttgtccctaaaatcaaccatgttagctgggattagactccctaacagtaccttcaactggaaaagtaacatttaaaaaatcctttgggtaattcacattacagcattctaaaagagcttaagatctggctgtattgttaatgcttctgttctattccagcaagcattaaggtaacccattgccaagatatcattcttgcaaaatatgctttcatatcacctgaacagtgcttaataaaacaagcaggtacttacacatcatacctgccacgaacgctctcaatcgcgcggtccaacacataccattgacataccacgaactggctgcccaaactgcacgcacaatactccatccaatcgtttctgtacgcatcgcattctaaaaactggaaatatacttcaatagacctattaaaacgttatcaacaacatcaaaccgtaccttcaatattacgtcaaactaacatacaagactaatcaacaacctaaactaatataaacacaatacagcaaaatacacatacacactcaaacaatctactcctcatattttacttcctccactctctacacatta

SEQ ID NO: 539087 - DNA, 1006 bp, Homo sapiens
cggacgcgtgggtcgacccacgcgtcggggcgcggtgcacagggtgccgctgaccgaggcgtgcaaatgactccagaattggaggcatgatgaagactctgctgctgtttgtggggctgctgctgacctggtgacgagtgggcaggtcctgggggaccagactggtctcagacaatgagctccaggaaatgtccaatcttgtaagtaagtacgtcagtaaggaaattcaacaatgctgttccacacggggtgaaacagtatataagactctcatagatgaaaacaatacgaagagcgcaagacattggttcagcaacctagaagaagccagagtaggacgaagaggaggatgccctaacatgagaccagggaatcgagtagaagcaagcttgatggagctcccgaggtagtgtgcacagtgaggacctatgcatggccctctgggaaggagtgtaagccctgcctgaagtgtgcgctgctgatagttctacagcgacgcgtttgcacaagtgtgcgtcaggcctggttggcccgccaagcttgaggagttcctgaatcagagtctcgcacttctacttctggatgcactggtgaccgtatcgaatccctgtgggatgaacgacccggtagaagacgcacatgcgtggatgtactgccggaacatttcagacggcgcgtccaagtatcatagacgactcttcaaggagaggttatctacccgggagcgccaggatacgttacagtaactgcgcttaacctgcccacggagctcaacttaattccaagtcccaatgtcgagatgatcgcctcctttcgagaacgagactacacgccagttcacccttcttaaatagaagggtctaggcggaacgtcaaaccggccagtcaccagaattcacagggcaatcctgttgtaaatgtcagatgatataaatgatatgatttggtgcacgcttctatgcgcaactagaggcaattcagtcactaaggtcacatactcaccaaa

SEQ ID NO: 539088 - DNA, 285 bp, Homo sapiens
accgtccgtcgcgacatcgtcgacgagggcgggatcagcaacttcacaggcagcgcgggatttgcctgacccgcacacccttcgcggtctcacggaagtgccagaactacctgatccgaagccagtcgaaggggtcgtctgcccaaaaacttccagtgaccgtcactgacgtcgaggggagcaaggtgacgatcaaaagcaccttgagaattctcgctcttgaactctacggcaccttgtcacgcaccctcattgaacttggattgggcgacaagatcggcgggc

SEQ ID NO: 539089 - DNA, 163 bp, Homo sapiens
ctcccatgaagcacaggtgtcagtttcgagaagctatgttagcagctttccaggcggccaggggagtccacggtgaaggtgccaaagactccccatttgatggttttcggtgagagagcaagaagttgagagatgtgatgggacatgggaacacattggagtg

SEQ ID NO: 539090 - DNA, 659 bp, Homo sapiens
ggaaagcagagactcatctcgaatttgaagtgaaagatcctgatctggagagcccaggggagatgacatgttagtgatgatccggatgctgtggagatgacatctgaccacctggtgcgcaaactggtccataaaggagtagtcctccagtgaaggtagggtttggagccttctcagagcactgcatgccaaagtgccgcatggctgcgaggacatagaatttcctgacatgttcatgatcggaaatctagatgtgtcgagcttggaaggacctgttgtgtgcccagtgcctggttctccgagcactcagctttctaggcttctctgcacccacaccaatccaaggccctgacctttggcacctgccatccgtgacaaactgggacagtccttgtgggctgcgtgagacaggaagtgggaaaactcgttgcctttgccatcccaagtgattcatgcggtgttgcagtggcagaagaggaatgctgccctcctccaagtaacaccgaagcaccacctggagagaccagaactgaggccggagctgagactagatcaccaggcaaggctgaagctgagtctgatgcattgcctgacgatactgtaattgagagtgaagcactgcccagtgatattgcagccgagggccagagccaagactg

SEQ ID NO: 539091 - DNA, 853 bp, Homo sapiens
  misc_feature (72)..(72): n is a, c, g, or t
  misc_feature (843)..(843): n is a, c, g, or t
ggcttgcccagtagaacagaccaatggcatctagactgatgatactaagtttagcagacactagtaagtggntgtatttaaccataatgatgaagcagacagatggaggcacagattttagtggcttgtggcaataaatagggcatggtgtgccttaggaaaagaatgtttataaagggaattataatgaaattaaaggaggcggcgtgaagaggaaataattctcttctatctaaatgatatacatatgatattcgagatttttataacagcagtggaaacacaacttctaggtagagtacgaaaagaggaaacgtttctaacgaccttataaaagattctgtgtgtgacaaatttatttgggtagcaacattctcaaagtggttacctgctatataagggtctgccataatagagtttgggcactattttgctaccaaagttgtgattcatacattctaaaaccattggtagttactgtgtcagggacttacgtgtgcaacactcattgtgccaggccaacatagattatcaacttttttttactatcagcatatctgggtatttctaaaaccattttacgatgactttacacgtattatttaggcaggtacccttatgaggttccaagtgggacaatttctggtaattagcgccttcactcgataccttggtccccgggttgtcaccatggtccttttgtgggcgcccttgaacccgaggtggtttccgacgcacttcccaacactggtcttagaccctacgctgggggaactctccctttctgggaacaggcgtgccataataacgggcacatcccattcttctggacggacggcgtcngtcaatgtgg

SEQ ID NO: 539092 - DNA, 415 bp, Homo sapiens
tgttcatccagtggttgtccatttagtatatgtataaaggtttcacttatattctcatggctcgatagctgatttccttttagtgctgaatattattccatggtctagatgtaccaaagcttacgtatccattcatctactgaaggacctcttggttgcttccaagttggggcaattacaaataaagctattacaaacatgggtggtgtgcatgtacgttttcaactcagttaggtaaataccaaggagctggcatagctggagtgcgtggtgcagacagtgtgtagtttggttagaatctgccaaactgtcttccacagtggccatcacattttcatttctaccagagccaggggcacttcactcatttatggatccttattcccaagaatagttacggagcatctacaatagg

SEQ ID NO: 539093 - DNA, 145 bp, Homo sapiens
attgctgtcccagttcttggtgaggccgaggtgggaggatcacttgaacccaggagttcgagaccatcatgagcaacatggcgagacttcatctctaaaacaaaacaaaatatctatcctccacaatgttttgaagcaaatagta

SEQ ID NO: 539094 - DNA, 349 bp, Homo sapiens
  misc_feature (341)..(343): n is a, c, g, or t
ccattgaattgggataaaaatgccttaaaaggctgggccccagtggctcccaccctgtagtccccagcactttgggaggcaaaggcgggaggatcacttgaggcccggactttgagacccagcccgggcaacataataagacttttctctactttaaattttttaaaaaattagttgggcatagtggcacttgcctgtagtctcagctacttaggaggctgaggtggcagaatagcttatgcctaggaggttgaggctgcagtgagctgtgattatgccattgcactccagcctgggtgacagagcaataccctgtctttaaaaataaaagctattacccnnntttaaa

SEQ ID NO: 539095 - DNA, 405 bp, Homo sapiens
gggcccttaaccctgagctcacagaaacatgtgttgtatggaatcaaggtttaacggctctagggctgtggaggatgtgccttgttaacaaaatgtttacaggcagtatgcttggtaaaattcatcgccagtctctatagaccaggggcacaatgcactgtggaaagccgcagggacctctgccctggaaagctgggtatggttcaaggtttctccccatgtgatagtctgaaatatggtctcatgggatgggaaagacctgaccatcccccagcccgacaccctgaagtatctgtgctgaggaggattagtaaaagaggaaaggctcttgcagttgagataagaggaaggccactgtctcctgccttgccccggaactgaatgtctcggtattatactcgattg

SEQ ID NO: 539096 - DNA, 127 bp, Homo sapiens
tgaagaacgtcactgggatgagggatgtcactgggactgacggaacgtcactgggactgaggacacgtcgactgggatgacggaacgtcactgggatgaggaacgtcactggagactgaggacacgt

SEQ ID NO: 539097 - DNA, 231 bp, Homo sapiens
  misc_feature (61)..(61): n is a, c, g, or t
gcctactactactaaattagcaggcggtcgacagccagcctgaccaacatggagaaaaccngtctctactaaaaatacaaaaatttagccgggcgtggtggtgcttgcctgtaatcccagcatcgggaggctgaggcagaattgttgaaccaggagtcaagttgcgataccgagacgtgcattgatccagcctggcaacgagtgaacactgtctcaaaaaaaaaagtcgac

SEQ ID NO: 539098 - DNA, 1109 bp, Homo sapiens
gggagcaatcatcggggtctccggcccgtcgactgcgctcgcatgatggcggatcgagccggtgcatttagcgctaaccgaagtttagggctggagtggaatgtctgaaatacgggttctgcgggatggacgagtcatgtggcttgtgctacgagagaaaataatagacgaggacgtggttccgtcgtcacctcgtcatacgggttcggaccggggcgagaatcacgaggacacgattgtggaccaagccgagactagatcctggtgatctcccttggggttctaggacataggaccgtacaaacaggcccaatgcgatagaactcacgccatggtagcataaccttgcggaccccagctctcagtaacgggctggggtgcaaaaggcaataaggttgggaaacaacactcttgggattggggctcggcagggcaaaaaacatgtcctagggaacccatagccttgatgacacggggaatgggaagccccctgccgccattggggtagcaccccgtgggacatggattgggaccatagtaggggacccggggccccacgggggccttacgcaacgtggcaaactggctcgcacacgggggcgggcatccccagggtgcatccctgaaaggcacacgggcaaaagaccgtctttcaccggaacaatctccgtcccacattggcacctctagagttccctttatgaattaatatacggggctattgcaaaagggcccacgccaattagggtttatgcgacatggggaggtatagacggggatgtaagtatcgtgtgccctgtgggatatagctattatgggcgttgtttacaaagacacacaggtgttcatgaaatcagtcaattgattgggcagaaaatgctaggaggaaaaaccattgccgccacccggcatggctccactccaacagggcccgcgccagaccacgcacaggccagcgcacggcgatggaaccctgtgcgggcacgccgaagaccctgcaccaacaaccgccgaaccacacccgaggcgccccgccaaacccggcccaaaaggcaacacgaccaggcagaggccccaacggaccagcacccccagggcgacccgggacg

SEQ ID NO: 539099 - DNA, 238 bp, Homo sapiens
ggtgacttagaggatttagtcggcgccctttttttccccgtcatgcaactcacagcttgctatatatcctctccctgtcctgcagaccggagtttagagatcaaggcatctcagggctgtgctccctctggaggctctaggggaggatccttcctgcctctcccagctcctgggggctccgggtgtccctgggcttgtagccgcaatcactccagatctcgtgcctccaatcatccac

SEQ ID NO: 539100 - DNA, 449 bp, Homo sapiens
acaccggatcaggtttgccatggccatctttttctttgagttttctctgctcatgggcaaagaaaaaacaaggggagagcttcgagcgggagtacacaatgggttttggttcttcaaaattgctgcccttattggaatcatggttggctctttctacatccctgggggctatttcagctcagtctggtttgttggtggcatgataggggccgccctcttcatcctcattcagctggtgctgctggtagattttgctcattcttggaatgaatcatgggtaaatcgaatggaagaaggaaacccaaggttgtggtatgctgctttactgtctttcacaagcgccttttatatcctgtcaatcatctgtgtcgggctgctctatacatattacaccaaaccagatggctgcacagaaaacaggttcttcatcagtattaacctgatccttt

SEQ ID NO: 539101 - DNA, 249 bp, Homo sapiens
tttttaaaacccccccccggcccaaaagttctgttcctagcaaggtagacttaatttttttgatatattcacatgctatagtttaggaatttctggagaatcaaagaactgccttcctaagaaagacatggatttcatgttaaagacagaaaaagatgatagttggccccatgtagctgcagattttgcaatcacagattgaaccaatcacagattgaaaatattcaaaaaaaagtataacaaaaaaaa

SEQ ID NO: 539102 - DNA, 977 bp, Homo sapiens
  misc_feature (1)..(1): n is a, c, g, or t
  misc_feature (132)..(132): n is a, c, g, or t
  misc_feature (748)..(748): n is a, c, g, or t
ncctttttgattgggcccaccttttctgggagcgccacgaattgccttagaggtatccgcctcctcccttggccgctgccgtgaaccccaacaattctctccgggggttaaccccccggtggtcgttgtaanggcaaccacggtggagcccggtggtctccgtgtccccgtcgccccccgccgtgtctcccttggcgcgccgacggcggttctctcggcgaatccccaccgccggtctttgtgcgcctttctcgctgcgtttgtgtctctagagccaggggagccccacacgccgtagtgtgacgtgtctctctgagcgaccgccacagcgccctccgtcttagccccttgcgttagtctcagcttgggccgcccagccggaccccctttctccgcgcacacttttgtcgagatatctgtaccacaggtgacctccgccctcatgtgtaaccacagcttgagcagtccccagccccggctttggtctcgcttctttttccccacggtgcccgcgttgggggagtgacgatctccggtcgagcccctacacatctgttccccacccagcgttctttggacccaatgcgggaacccgtgtttgaagatttgtgcggccgcgcccctgttcccacccccgagccagaaagcggcgttctcccccacaccggcagacaccctgcggcttactcatgagacaccggttaccagaggacccaatccatagcagccccaccatcatggccatacntacattaagagagaccccgcagatgtgcgccatattccagagccataggggattgatcggccgccagagttaagaacaccgctcccgaggccccccctttggggtctgggccctgccttaggccagcccccctctttggccccctcccctcaggccccgggcttggaatgaaaaggactctcaggtggtggggtggggaatgtgaataaacctgatttcttgcccggga

SEQ ID NO: 539103 - DNA, 753 bp, Homo sapiens
  misc_feature (294)..(294): n is a, c, g, or t
  misc_feature (296)..(296): n is a, c, g, or t
  misc_feature (317)..(317): n is a, c, g, or t
  misc_feature (412)..(412): n is a, c, g, or t
  misc_feature (568)..(570): n is a, c, g, or t
  misc_feature (572)..(573): n is a, c, g, or t
  misc_feature (576)..(576): n is a, c, g, or t
  misc_feature (582)..(582): n is a, c, g, or t
  misc_feature (589)..(591): n is a, c, g, or t
  misc_feature (597)..(599): n is a, c, g, or t
  misc_feature (607)..(607): n is a, c, g, or t
  misc_feature (614)..(614): n is a, c, g, or t
  misc_feature (617)..(617): n is a, c, g, or t
  misc_feature (620)..(620): n is a, c, g, or t
  misc_feature (625)..(625): n is a, c, g, or t
  misc_feature (628)..(628): n is a, c, g, or t
  misc_feature (648)..(648): n is a, c, g, or t
  misc_feature (650)..(650): n is a, c, g, or t
  misc_feature (664)..(664): n is a, c, g, or t
  misc_feature (671)..(672): n is a, c, g, or t
  misc_feature (676)..(677): n is a, c, g, or t
  misc_feature (682)..(682): n is a, c, g, or t
  misc_feature (698)..(698): n is a, c, g, or t
tgaccactcggtgaccgtcgatcgttttggtgatgatgaggcatttgaagaaaacgtacgcctggaaatggagcgcaaccacgaacgttatgtgttcctgaaatggggaaagcaagcgttcagtcggtttagcgtcgtgccgccaggcacaggcatttgccatcaggttaacctcgaatatctcggcaaagcagtgtggagtgaattgcaggacggtgaatggattgcttatccggatacactcgttggtactgactcgcacaccaccatgatcaacggccttggcgtgctggngntggggcgttggtgggatcgangcagaagccgcaatgttaggccagccggtttccatgcttatcccggatgtagtgggcttcaaacttaccggaaaattacgtgaaggtattaccgncacagacctggttctcactgttacccaaatgctgcgcaaacatggcgtggtggcgaaattcgtcgaattttactggtcggactggtctggatcccactaccgttggcggatcgcgccacattgccaataatggtcgccagaatatggtgccacctnnngnnctnctcccnaatcgannnctgtannncctcgatnacatgcngtntancgcgngcncagcgaacatcaggtcgagntnggcccgacaaaatnatgccannagcnncaggngcattgtggccgtaancccgggcgacagaaccacatctaaacaagcaccctacagacctggcattgaatgc

SEQ ID NO: 539104 - DNA, 397 bp, Homo sapiens
ctagagtttccccaccacctgcgtcatggtcagcatcgccagccacttgatcagatccattttggtgtcgcgcgtatgcaggctcacccgagccacccaagagggagcgcagcaaagcgcagatagcgcgcggcctttgccagcgtcacgatcaacaggaagctccagaagggttcgcgcataacaccggctaccacggtaagcggatcaccaatgatcggcacccagctgagcagcagtgaccagcgaccgaagcggtgataagcctgctgggtcttttccagtttgccttcgctgacgggaaaccagcgtttgtgccggtagtgctcgatagagcgacccagcagccagttcagcaccgagcccagcacattacccgtgggactcaggtggtgtg

SEQ ID NO: 539105 - DNA, 281 bp, Homo sapiens
cagtttacagtcagggattgaaggtgttgggttctactggatgaagggcttaaaatcttcacactactaatttgggatatgtgggtagatatttctaaacctcaatattctgtaaaatgggaaaaaacaaaaacatttaccttaccgcattgttcaaaggcttaacggaaataatccatgtccgatgcctaatggaaaacctggaaccaaataagttctcaattaactgtaactattaacttcttattatgcattggctgtccaagggaaactgcatttta

SEQ ID NO: 539106 - DNA, 258 bp, Homo sapiens
ggtcgacaatttggttttttttccttgctgatatgagttccctgtagattctggatattagtccttacattcattcttaattctattttctctcttcattcttgttttatggtccttatttgataaaatgctatactgcgctgagcatggtggctcacacctgtaatcccagcactttgggaggctgaagtgggccgatcacctgaggttgggagtttgataccagcctggccaacatggtgaaaccctgtctctacc

SEQ ID NO: 539107 - DNA, 335 bp, Homo sapiens
aactttggagtttttatggtagtaaaatgccggaaaaaaaattttgccttgaaagaatgtttaactgctttctataatgatccagccttttatgaagaatgccaaatggaatacctgaaggaaagggaagaattcagaaaaactggaattccttcaaaaaaaagggtacagaagcttcccacaagcatgtaggcagatactccaatggccttcagggactttaatattcatggaagtccttttatagtccttaaataatgggctcaagcatatatgtttgctttcccttaattatggaaatattaactttttttgaaataaaaattttttttcca

SEQ ID NO: 539108 - DNA, 422 bp, Homo sapiens
tactaagaatctctgaatttaggaacatagatgtaagcgcttgtatatctaggttttccagttcccagggccattaaacatttttttcctttcctttccttcttccaaaaaaattggtgattcccctgggtccctgtggtttaacctcacaaaaggtccatgatgacaccctgttacattgttttgtcgtagttaataccttgttatcctagttgctcagtccgtttttgtgagagattcagggatattaataaaactgtgctgctactgctactaacatcttgcataaaagccctattaattaaaatgtttattttgcatgtgatttgaacttgtaatttttattcaaagtttttcaacagagatccagaaaagaccctccttatatttttagttttgtgcattgcaacactttctagtaa

SEQ ID NO: 539109 - DNA, 219 bp, Homo sapiens
tgtaggaggagtagggggtgtggccataggcattgccagagtatgcacttcctgtgtggagtgcacagaggggagaggcctgtgaggtgaagggcatcaatgcagggcttgtggtgtgtgaaggtctgtagggctgtgcaatgggcaagctcagtgaatgtgggtggggatgacagttggagccacggtagtgagaatggatgctcagaaggtccgtct

SEQ ID NO: 539110 - DNA, 299 bp, Homo sapiens
ccttgaggccaccgtttgaagaaaataaactatgttaacaggaacatccagaatttgtaggctgagtggtgttgggggagggtaggatggagtcgggagactggaactccttggcacacacaacagagctatctctaaatgctattggtaacagctccacagacaggaggcctgcagatgccttcctcttgggggtaggaatgttcatttcagttagagaaacttgataggctcctattagtggccaacatagtagccagggctgatggtaggagaatatctggaggcggtatgaaata

SEQ ID NO: 539111 - DNA, 188 bp, Homo sapiens
tatagtgtgagcaaaggtcctcctctgtaaaagtgaattgcacgctcacttgaaactatcgttgagggactaaggtgtacaactcctggtgcttatgacagtatgagggctctagtgtagacagcgagctggcttgtgaaacttgtacgattccgtacactccgccctttcgtggcagttctgggtct

SEQ ID NO: 539112 - DNA, 310 bp, Homo sapiens
gtttggtttatttggctccctttaaaaaaaccccgtgggggaaggtcttttttttcccctcctttaaaaaaaaaccggattgcccttttggccagggaaaggttttttttgcccctgcccccgggtttgttttttaaagtacctggccccctaaaaatgccgttggttaccgggtgataaaataagcaggtttttttgtttttggtttttccggtgggggggggtctgtatttgtgtacatggtgtgtccttgcactcacacccaaggtggattaaaatacaggcctgcaaactggcctgcactttaaaa

SEQ ID NO: 539113 - DNA, 244 bp, Homo sapiens
cgacccacgcttaatggaatccccttaacgataagaagcagtgaataaataagactgcagaagataaactccctgaatgtgaagcagtatgtggaaagcccaagaatccggcaaacccagtgcagcagatcatgggcgaacacctgaatgtcaaagccagctttccctggcaggctaggctggtctaccaccacaatttcgcctcaggggtcacgttgataaatgagccgtggttgttgctcgc

SEQ ID NO: 539114 - DNA, 758 bp, Homo sapiens
  misc_feature (45)..(45): n is a, c, g, or t
  misc_feature (60)..(60): n is a, c, g, or t
  misc_feature (71)..(71): n is a, c, g, or t
  misc_feature (107)..(107): n is a, c, g, or t
  misc_feature (321)..(321): n is a, c, g, or t
  misc_feature (371)..(371): n is a, c, g, or t
  misc_feature (436)..(436): n is a, c, g, or t
  misc_feature (485)..(485): n is a, c, g, or t
gatctccctggcctccggtcccaacttcgcttctctgctgacccnctctcgtcgccgtgncgccgccgagngccaaaatgtctacaggtccaactgctgccactggnagtaatcgaagacttcagcagacacaaaatcaagtagatgaggtggtggacataatgcgagttaacgtggacaaggttctggaaagagaccagaagctctctgagttagacgaccgtgcagacgcactgcaggcaggcgcttctcaatttgaaacgagcgcagccgaagttgaagaggaaatattggtggacagaattgcaagatgtgggcaantcgggattactgttctggttatcttcatcatcatcatcatcgtgtgggtngtctcttcatgaagaaccagcggaactcaaaactgctgttcaagaaacctcttcaagactttggnacttagaacctgctatattatcaagcttacctactgttatctctaaaantttggtgtaactgtacacgtcgaatttctagggaaacgtgccttgggttttaatattgcactccaaattagaaggccgcgccgtccacattttgacacagtgccttaaccgatttaggtatggcctgatgaagaggcttcttagttccagaggctattatcctgatgtcatgttgcctaataattgcatacccccagtagttaccctgtcaattggcactatttcagaacccatttaaacttgggtaacagattccactatagctccagaaaa

SEQ ID NO: 539115 - DNA, 868 bp, Homo sapiens
caaccccaccagcgaacaggagagattaacaggaaacaacagcggcagagagaccatacagtgccggggcgctgtggtttccagacgtaaacaaggttgcgccccctaagcggtgtcggcacaccgcctgaaggcccagtttgcaagcacgggtctttctcacgcccccctcctcggctcatggcaggtcccgcaaattgctggcggtgcccaaccagggagtgtggtcccgcgagcccagggccgggtaaccagacaaagcaggaactactggggggagcccccagggtccacaaagggtgccaagttctctccgctggcggcaaaattttccgagcgaccccttctgagagtcgcccccgcggtccgtcatcaacctcgggggtccctaagccacacatcacccaaggggggcaccccccatctggacggccggctgatgaacataccatcaccaagggcggggtttggcggcacaccacaaagagaccgtgctgcttctggacgacaaaccgcctgtgtggcgcacatccatcgtgagcataaaacggcggccaacttcccaggggagcctgaagtccattcgaatgttccaaactctgtgcaacagcctctcaaaaggcggtaaataattccccgcgggcccacaaatagagcgtcgccccccgcgcgtggggagaaggcagcgaaaagcccaccccccttggtgcaaggcgcgatgatcttcgggctcacacggcggaggaggccccctcggcccaccggcgttcaattaaagaaaagaccacataccaagggggcgtccccaaaatattttttaccaccgggggggttaacaaaccggaaccagtttcccaataaaaaaaca

SEQ ID NO: 539116 - DNA, 736 bp, Homo sapiens
  misc_feature (45)..(45): n is a, c, g, or t
  misc_feature (60)..(60): n is a, c, g, or t
  misc_feature (71)..(71): n is a, c, g, or t
  misc_feature (107)..(107): n is a, c, g, or t
  misc_feature (321)..(321): n is a, c, g, or t
  misc_feature (371)..(371): n is a, c, g, or t
  misc_feature (436)..(436): n is a, c, g, or t
  misc_feature (485)..(485): n is a, c, g, or t
gatctccctggcctccggtcccaacttcgcttctctgctgacccnctctcgtcgccgtgncgccgccgagngccaaaatgtctacaggtccaactgctgccactggnagtaatcgaagacttcagcagacacaaaatcaagtagatgaggtggtggacataatgcgagttaacgtggacaaggttctggaaagagaccagaagctctctgagttagacgaccgtgcagacgcactgcaggcaggcgcttctcaatttgaaacgagcgcagccgaagttgaagaggaaatattggtggacagaattgcaagatgtgggcaantcgggattactgttctggttatcttcatcatcatcatcatcgtgtgggtngtctcttcatgaagaaccagcggaactcaaaactgctgttcaagaaacctcttcaagactttggnacttagaacctgctatattatcaagcttacctactgttatctctaaaantttggtcttgtgttgacatgtaaagttgcacagtttgctaggaagacgtgccttgtgttggtgtacatatgcgactccaaatgagaaggccgggcccgtccgacatttatgcacaggtgcctttagcagacttcacgtatgggctgactgaagaggcctgcttaagttccagagtgctataaatctagatgtaatgttcgtcactagattaattgccattactcccagttagttacccttgtccatttggg

SEQ ID NO: 539117 - DNA, 779 bp, Homo sapiens
gaagccctcccttattttaagtaagtgattaaatcttatgtgagttgccagttgtaatttttcaaaggaaaaatttgatggggtggaggaatgaatgccagataatctttctggaattccgagagaattccaaagagggttttttttttttttttaaaggacatctttggatacctttaaaagaaccacggtcaagtaatccttaaaagaatatctgggaaagggacaacagattttttccgggtgtgtaagcacataagtgacgttactttggccctaaccctagggatgattctttacccagtttaaagcccatcagggtattctaagggggtggaccccctccatcctcagagcgggtcgaacaattttaaatagacgggggactctatgaggggcagccggggcttttggactacagttggctattttcggggactcacatttagtacgggtcaatagattctatcttaataatcctgggacgaaaccgcttggtcagttgggaatttcggtagaccaatggttggttttcagacgccatgggttgcagaagggtggctccacgtggtgtgtgatataggcttcctggggctgggtgggggagacctccatcttccaggtggagcggtaagaccacggtttggggccattggcatgcccggtcttgcttccccaagttggtctttcacttttttcccggcgatgacttccgaccatacggggctagctagccagggttactcccgcggggggcctcgtacctgtctcgtctgtca

SEQ ID NO: 539118 - DNA, 880 bp, Homo sapiens
  misc_feature (1)..(1): n is a, c, g, or t
  misc_feature (3)..(3): n is a, c, g, or t
ncngaatatgaatttgaataaagtagcggaataagtagcagcaatctcgtcttgtccacaaatcaccgcgattcttgtgagacatatttccgtggcatggatattctctaatgggtgaggaccctccatcgcgcttgtggacttattgagcccctggaaatttccgatgagcacccgccgttttctgtgcctcctctgtggttactcgccccaggtctcggttgtattttagccctgcaagtgggttcaccgagggcccacctggagacgactctcacccaatttctaggctgtgcttcctcctttgccccccagcgggcttgctcccccgcataccgccctgtccggctccactgcacccaacaccccaagttaagtgtattcccccgcacgatatggcagagccgcaccatgctgtttgcaatttcccaccgaaccagaagtcctgtgcttgttcccccccagggtatcccgttgcccttccccaccagggaggtagataacctcggacccactaaattttaatatggaaggcaacacaaagagagggtcttagaaaagggggataaataaccacaacaccgccgcggaagcaggaccacatgcgtgcgccacccccccagccgaggggatgctagcaaggcgcctcagaagagccttgagcagtcatggtaactggtaaccgcccccgcatagcagtagaggaacacactcggaaagcagcctgcagggggcgctcagaaaacgcccaccaccggcctatcctgctatgctgactacccgccgcgtatctccgcaacggtgaactagcaacaaagggaaaaaaaccaatacaagatcaagagtaaaaacaaaaaaacataacggcccaacaaaaaca

SEQ ID NO: 539119 - DNA, 360 bp, Homo sapiens
atctacaggatctccgtagcagcgcagcacataatgaaaacttccttaatacatcttggagctccccagctggcatgggcagtgggctctgtgatccgagtgatgaatccccttcacaggaacaccactggaccttgtccagctggaacagaataaaggcagttttaagtgtggcttgtgtgcaggttttccaaacactgggtgaagactggtatagtgctggtgggtgtggcccaggaccagatactaaacccccgatctgtggcagggggcttcgtctatacttaccagcttgttgaccatggggaaaaactagagtttttgcacaagactcctgtggaagaggtccctgctgctatt

SEQ ID NO: 539120 - DNA, 640 bp, Homo sapiens
  misc_feature (35)..(35): n is a, c, g, or t
  misc_feature (63)..(63): n is a, c, g, or t
  misc_feature (128)..(128): n is a, c, g, or t
  misc_feature (136)..(136): n is a, c, g, or t
  misc_feature (148)..(148): n is a, c, g, or t
  misc_feature (182)..(182): n is a, c, g, or t
  misc_feature (226)..(227): n is a, c, g, or t
  misc_feature (229)..(229): n is a, c, g, or t
  misc_feature (234)..(234): n is a, c, g, or t
  misc_feature (284)..(284): n is a, c, g, or t
  misc_feature (306)..(306): n is a, c, g, or t
  misc_feature (309)..(309): n is a, c, g, or t
  misc_feature (311)..(312): n is a, c, g, or t
  misc_feature (322)..(322): n is a, c, g, or t
  misc_feature (343)..(343): n is a, c, g, or t
  misc_feature (346)..(346): n is a, c, g, or t
  misc_feature (362)..(364): n is a, c, g, or t
  misc_feature (383)..(383): n is a, c, g, or t
  misc_feature (558)..(558): n is a, c, g, or t
  misc_feature (634)..(634): n is a, c, g, or t
atgacgctggacaaacgagtcttgcacaaatgtancgacacatttccacagttaatcgtttanggttataaaagttaaaaagttctattagataagttttcataagcagttggatttctgaaaaatanagtaacanaattttattaantactaaaatttctttaaaactccctatcaatctnaagaacaaactaaaaacctgtttattacatgaatgctacttatnngnatttnaaatatgggttcacttcctattttcaacaagtctttggcttgtttatttnctaaattaacagaacgtggggngcngnnttttaagttngcaacttccttagggttactnggnagtagagtaattatgnnnaagggaacacttcaattantgtataaaagattgctttgcatactgattacttcttgaaccccaaaaagtgctgagtttagaggcaagggcccattttgtgcccattaaaagaaatatacaggggaatgtctgtctcatccctctaatcatatgtaataaaattatatcgctgtcaataacagcaaagataatgntatattaattttaacagcagtcagggcgcagcaaggcaaaggctgcttatacagaaaaacatacaaatatgtaggnagaact

SEQ ID NO: 539121 - DNA, 320 bp, Homo sapiens
  misc_feature (60)..(60): n is a, c, g, or t
  misc_feature (102)..(102): n is a, c, g, or t
  misc_feature (176)..(176): n is a, c, g, or t
ctatatatacacataacattttctttcttttcttgggtctcgctctgtcacccaggccanagtgcagtggatgacatgtagccccactctcctgggctcaancagtccttcctgcctcagcctcctgagtagctgggactacagacacatgccactgtgccttggctgattttttnaaaggcatggtggcgggcgcctgtggtcccagctgctcgggagggtgaggtaggagaatggcgtgaacccgggaggcagagcttgcagtgagccaagatcgcgccactgcactccagcctggacgacagagcgaactccgtctc

SEQ ID NO: 539122 - DNA, 355 bp, Homo sapiens
  misc_feature (321)..(322): n is a, c, g, or t
ctacattagtcaagttacgcttacaaagatacttaatatttttggatcatcctactccaaatgcacattactgaaattcccataaaatagaactgtcctgtttataactaagtatcaaatctccaggttgatctctaagatttcattaccaaatacctttttatattatacactatcaaaaccaaaaaattccattatcagctgcgaacaagcttaaagaacattccataaaataattgtgctcagtcagtccactcagaggtgccatgtaacttttaaaggcagagttggaaattatgtaaaatgggtcaggatagcaanntgctgaaccaggcttcagataatgttagagata

SEQ ID NO: 539123 - DNA, 930 bp, Homo sapiens
gtccaatgcgagctcgatgatcgaaatgacggcgcccgcccgtgagttgagccgcatggtaaagcgaggccgggctcagggggagggagtactgagagacggcggcagaggcgcggcccgggagcccactcgtcagggcctgtgagcagaccgcagggggcgagcggcccttcagctgggagtcctgggccaggcacgtggacgtgccggcgggcaggctgcgcagtgatgctattaccttcagcgctcccttgcttcagtactttttcttaaccggttgcagccctctttccatcggagcttcttccctggaaaacggggacagggttggaaaagcccggctgggggcctcagcgggacgaggaagccgcggggcttagacggggcaggccggagcgacgccagggacggcgacggggcaaaccctttccaccggcctccactggggaaacgcccgggcagggacgacgcgaagcaacaagccgagctggggccggacagagaccgggaccacgacgagggccgtcgcctttggtacaacgcatcttcccaaagggggcacacgagggacgaggtcactcagcaggattacagggacccttgagttacaaagcccaagtgttttacaccaacgggggccttgggggaacaccgagcccaggagaaagcaaaggttacagaggagacctatccttctaccccaccacgttttttccagttaaccgtgtgggcaccttttcccaaatagcaaacggggaggcgagtgacagacgtactagtggccagaagaacgagggtcacaccaaatatccccaacacgggggtaaacaccccacgaggggagcccaggggcgtatctgaccacaggacacccagttctcccccaggggtctcccgagcaccgcgagacagagccgagagagaacgccc

SEQ ID NO: 539124 - DNA, 116 bp, Homo sapiens
tatgcttgaggtttgagtttctccaacagtatacatggaaagctatgcttccacctggagcctgagtccaagcacacagccagtcctgcacacgctatctgtgcaaacagtgaatc

SEQ ID NO: 539125 - DNA, 826 bp, Homo sapiens
  misc_feature (433)..(433): n is a, c, g, or t
  misc_feature (460)..(460): n is a, c, g, or t
tctaatgctctgtgaggccaaacatttatgtctcagatggaaatttaaattaatatcattcaaaaggaaacaaaacaatgttgagttttaaaaatcaggatcgacttttttctccaagaaccatacatttatgggcaaatggtgtactttatcacttccgagcaaatactcagatttcaaaattactttaacagtcctggtacttaacaggctaacggtagataaacaccttaataatctcagttaactactgtatttcaaaacacatttaactgttttctaagtgcttggcattattcagttacaacctagaagagatttggagcctcatatttcttgtgatactgtgaaatagagggagctagaacaccttaactgtctctaactctgttaaacctgctgcaagagccataactttgaggcattttctaantgaactgtggggatccaggatttgtantttcttgatctaaactttatgctgcataaatcacttatcggaaatgcacatttcatagtgtgaagcactcatttctaaaccttattatctaaggtaatatatgcacctttcagagatttgtgttcgagtaagtaaagcatattagagtaattgtggggtgacagatttttaaaatagagtttagagtatttggggtttgtttgttacaaataatcagactatatatttaacatgcaaataactgacatatgttgcactgtttactaaggtataggtgtccatggggtcagaggcagcacacatccccaatttttgcttagggcccggggcggcccggctgggctgtttttcggcgggggccccctc

SEQ ID NO: 539126 - DNA, 261 bp, Homo sapiens
tgtctaagttacgatgtctcgtggttgcctcgaataggaggtgaaagtgatctggcgtacaggagcttgtaagccgaaaagggtgaggatcagcttctacagagaaggagcctcggtccatcacaagtcaccattaaatatataggggttggtctccgagggttaaccgttaagctcgaatatgttgaggaggtcatagaactggcctgttttttaaacgcttactgtaatcttctctgtctctttgagtgtggttccacg

SEQ ID NO: 539127 - DNA, 1115 bp, Homo sapiens
  misc_feature (67)..(67): n is a, c, g, or t
  misc_feature (726)..(726): n is a, c, g, or t
gcacgacccgtcgccaatagggccgtgatgatccgcggcactgagtgaacggcgccgagtcctctgntgtcgccagatgccagcactgtgccaatgcacctgataataggcggcgtgctggcgctctagcaacggctctgatgtggatatctccgcttgaatgctgggcaacggttggtactatcccacaagggctagtcagtcagagtgatcatacataccacacgatccgcggaccgactgcactgcacctctggcgcacaaaggctagaggtcgttccaggcgtatcccgtgtgagtctggctttagatgatagagcggaggacgagtgagccgtctgagcttcattgtccgcatctgacagactgcgaggcagttatcaactagcaatacggaccactgcttattgtgggtgaatatggcaggtcaacgagatgggacacaagcatgccaatcatgtgcgcgaacatcgtagcatcaccctgtgagtggtcacgcgagtgccctcgatgtggtcactaattgcggatagtcggctggcactccgtgagagggatgaagattccgagagagaacccggttggaataaagagtctaggtgtccagggggcatctagggaggcttatgctcacacgattactctacccactaatcgctgaggaccatagaacagaccgcgatgctgacagctggtccctcgcggtttacctaagatagggtcatntctctctcgagtgcaaatcaaggagtcgttgtgcgattggagttggctgtgatgtgagggctggtccgcatctttgacaccgtccctactttagcacgcgatttgttactggcctttaccgaaggatctccaggcggtgaggcgaccctggtgtcccacagagtgacgggagttgtcgttgcgcagatctcatgcgcgagtatccctatgggtgatgtggccctccatcaagtgtatggggatgccccttcatccatccctatagatccccttgctgtgctgtcaaacgatggggacttgggtgtccgccgcatggatgtctctcgccacctatttggggcggagaagcaaccttcatgggtgcgggccacaaaagttggttatggccc

SEQ ID NO: 539128 - DNA, 549 bp, Homo sapiens
agcagatagaatgcatgaaatcgttttcaagaccctggacatcagacaacaaagaacaataatctctgagagggaacgaagcaagccctataattaccccagcttactgtcttgaaagagtttctaggccatagctcaaggaagagaacagagaagagctctttagaatccttgagttaaggagatggcactgagagtcaggtgacaccaagggaactagacttcatagaacagagtacctgagtaaagagagctgcaaagagagagaaccccagatatctacagaatctaccccttgagtattctccagaatactaatcagcatgtacatgtgaggaaattatccaaagccaaattatcgagtcatctgaaaaggtaagacggaagtgtgtctggaactcacataggtccaggaatagtatctgttcccatcaaatatgctggagaaactcataattcacagggtattgtgaagagtactcaggaagaccttcccttaatagtagattatgattagcctagacggctccattctgccaaacaaattat

SEQ ID NO: 539129 - DNA, 157 bp, Homo sapiens
tagcgaagtaccctcggataagtgcccatcaggagttgaccttggccacatcaatgtcatacagcttcttcacagccgtgtttaatcttggtgcttgtgggcttatcggaggggcgatcctcataaagtctgatcctagcaatgcatgcaatgcttg

SEQ ID NO: 539130 - DNA, 876 bp, Homo sapiens
ggcaccaaattgcggatgacgccggtgcagcggggggtgccctggtgggccctggtggccctgggatggggaaccgctggtggcttccgcggaggtttcggcagctgtgcatactggtggcctgttggtcgctggccgtggactgtgtggcctggtggccgaggccagctgtgacgcatctgctggaggagcaaggccatgaggatcacgtgacgtggacttgccctgtcaaccacagttagggccgctatggtcaagggacatagaagatcaagtcccgtgtgaggacgatctatctcttctcccttgacgcgattacaggcaatcagggaggatccattggcatgtctttcctggggggcctacgtcgtcaaagggaatgcagcgttgtgtgacggatatagtgccgaggtgcagtcgaagcgataaccgctgtgcccggacccaagtcgacacacccaagcggttacaagagtggcaatactgctgggcatagatcgaggggcacctaccatagtaggaccaagcgattacggagtcccttgggcgcttgttacaaagataggctacgcaaagtgacgcggttggcgccagcccggctgcgattacggccgtatagtggcgaggccgacaagttccaacgtcgccttggcgtaccccgaaacgcccggtccttccgcaagttcagtgtatgccccacagcgggagtggagcgcagcccaggtacagtgacgcataaaccgttgcgtggcggggtaacacccgcacaccgcgacttctcagtggtcggaacgagggtcggcccgcgtaagcgcgacctttgagatcctgcccgaatttgtccaacaaatggggattggacaaccaagagtggac

SEQ ID NO: 539131 - DNA, 114 bp, Homo sapiens
caaagaccacatcatcgaaaccgcaaacatagtatacacaaacgcctgagctctatctagttatctcatcggctaacctcccggacaagcggcctaatagcactcggaataatt

SEQ ID NO: 539132 - DNA, 590 bp, Homo sapiens
attgatacgatcgagctcgtgacccggaagacacttacgtaccagagggctagccacggaacaactgaaaatacttctatatactcccacattgagtcatattattgggaagacccattacaagaacacatagttgaaggaatgtgattagtaaatgagtgaatggctgtccctcttcgtacctcccctattcaggtacaagcattggctatgagaaatagaagagaaagcatacgtaacaagcacatcctcaaataaccaggcttgtgaaaaaataagtccttagaaggacaaccggagagccacagatgtgagtgatcagaacagtgtgttggacatacctgaacatatgacctcaagtggctctccaatccttcctcatggcactgggcaagcacatgaataatgaccctacacaccacaggcgtgaatcaagcaaagaatatgtaataatggaaacattgcattattatcacagcagtagtagaacaatgatgatgctatcagcacttaggaaccaaggagacaaggaattagatggggtccccacacatggggatccaagacatttcttgaatgtaatgttcagc

SEQ ID NO: 539133 - DNA, 161 bp, Homo sapiens
cctctagaggatcaggtattgagtcgcgatatcatgtgccatatggcagatcgatcataagtatgtattggcatgtggaggtttgttgagggtgtgtggatggcatgtggctggtgtgtggatgatgcatgtagacgatgtgtggctggtgtgtggataat

SEQ ID NO: 539134 - DNA, 870 bp, Homo sapiens
taggaatttctgccccgcccccccccgcccctccgtggagggtgaaaggtgtccggtgtacccaaacggcaggggggggaacaaaagtgtctgcggtcaagcgagacaccaccacagcgacggagggtccccaccccaccaggcgaaggaggttaaccacaagcgaggcgccatggtactcctccgctgggatctttatataaaaaagccggcgttccccccccgccattggggtagaagcccccttctcaggaaactcctggttattacaaagacagaaccccttgtgctcacgaagaaggaacacaccacgcccattttggtgctacgctcccccccctctcttataaaacatagtctcctggagacacccctgtcctaacaacgtcaaaccttttacttattctccccccctttataaataagcaaatcttcgcgctcccttctcggttgcacccacacgcgaacgaaggtctctctcgccacaccctaaaatacccctccccccccttgtaattacttgtggacaaattcaaatcatcacctccgaaaaatctgtgttgacaacactccaataaaatctttcataagagaaacccgtgggaggagaacttctcttaaacgggaagcaaataagttaatctcttgtctcccccacccctatgtgtagtacaatccacgcattgtgaattaatggtgctctataaatttttgatataggatagttataaatgtctaaaacaccccgcgcattggataaaacacccttctcatcacagcgtctcccctttcagcgtatttttcaaaacagcgcccttttcttcaaacaccaaaaatttttcaaaaaacaacccctcccccaacaaaaca

SEQ ID NO: 539135 - DNA, 407 bp, Homo sapiens
gacgggtggccatgatacaagtggaactcatcaaataatttaaaccaggcgatacaacgctatttcccatctaaactcatttaagccttcacaatgtcgcaatggattcagttacttacaaacgatcccgggttgtcatacagatacttgttttttacacatacacgctgtgccatcccgttccttcactgccccaggtcaggtttcctgatagttggaccgacaagggagatagcattttacgaaatgcttccattcaaagacagacagtgagaacagaaagagagaccctgacggccaggaatctattaagacctggatgtgtgcgcaaatagggacgggggaaggcaggaactttgacaaggattaaacgtcttcctttagcgccgatgatcacgctcggggac

SEQ ID NO: 539136 - DNA, 183 bp, Homo sapiens
gctgaaagaggagcagaggaagcttcgggaggagcgccacacggaatacttgaagatgctggcaagagagagaagaggctctggaggaggcagaagagctggaccggttggtgacagcgaagacggagtcggtgcagtatgaccaccccaaccacacggtcaccgtgaccacaatcagtgacc

SEQ ID NO: 539137 - DNA, 112 bp, Homo sapiens
aagaaatctcctcttaggagatcatggtgtcacagtgtttggtcttttgttttgtttttaacaactgtctccctcatacacaaagtacaatatgagcctcatttatctcgca

SEQ ID NO: 539138 - DNA, 276 bp, Homo sapiens
ttgctgatgatacctacccccgatggtcactacagccagcctcctggactatcacacctgtaatcccagcactttgagaggctgaggcaggaggatcccttgagcccaggagtttgagaccagcctgggcaacatgacaaaaccccatctctccaaaattacaaaaattagccaggcatggtggtgcacacttgtagtcccagtaattagggggctgagacaggaggatcacttcagcctattgagtttgaggctgcagtgagctgtgattgcgcc

SEQ ID NO: 539139 - DNA, 181 bp, Homo sapiens
ctcggtcccccacgtgactattacgagcgttttagcctgctgagcgggcaaaatgcacgtagtctattgctcggtgcgcgcctggcgacggttcatgaagaacgcgacaaggccgcacgttttggccagcaactcgaacgactctatcccggtacgccggaatatcagcaatacctgtcgg

SEQ ID NO: 539140 - DNA, 179 bp, Homo sapiens
accacgggaatggtctctgacgagtctctagcagaccaccaatacgtacctccaggatccctgtgagcggcgcgggcttgcacagaggtgctagtagtagcgtggacgggaacagggcccggcacacggcgggtgcatgaagagcagacggagagaagccgacaacgcagctcttactc

SEQ ID NO: 539141 - DNA, 145 bp, Homo sapiens
cgggtggaccacttgaggtcaggaattcgaggccagcctggccaaaatggcgaaacccggtttctactataaatacaaaaatgaggtgggcgtggtggtgtatgcctctaatcacaggtactcgagaggctgaggaagagtgtgc

SEQ ID NO: 539142 - DNA, 878 bp, Homo sapiens
  misc_feature (364)..(364): n is a, c, g, or t
ctaggactggaggtgttccatgcaggcagctgccctcaaaaatggcaaggtagtaactcatgggggtagagttcttgcgagtcacagccatccgggaaaatctcatatcagcccttgaaggaagccaggaaagggactagcgtgcgtataaagttgatgggagcaagtttataggaaagacatcggctttcgtggcatagctttcctccagtcgaagcccaggtaagaacttctaagcataagttagctgttagtgccatgtcagaaactgcctaaatggctatgtagaacatttcattaaccctataagtcattcagtatcttgtctctctggtgggactgatacagtcttggtttgtattangtttgaatcagaaggtggttatagcaatatctcaaagttaaatggacaacaaacttcgatgatagcgtaagttaggaaagtttagcaaaatcacagtggtactgattttatttgtgtccgattgattgtagtcaatatggttgaattttttttaacagggtcttcctctctcgacccaagttctcatgcctcaggctcccaaatagctgggagctacaggtcagcaggcctacatacctggtaagtttttgtgtatttttgtggagatggggtttcaaccagtgttgccaaggcagtctgaaatcctggggctcaagtgatcctcttgttgtggcctcccaaaagtggctgggaataatagggcgtgagccgtgactgtggctgatactgatttttattcccttgggttatcacatacgtgttcgtatttggacaacactaagttcatggttttatcaaacgaactgaagatgaagaatacgggggtcattctaacctttggtaattgagtcta

SEQ ID NO: 539143 - DNA, 345 bp, Homo sapiens
  misc_feature (149)..(149): n is a, c, g, or t
  misc_feature (319)..(319): n is a, c, g, or t
ggagtcgcagcctccactcttgactgttactctattttgcctccttggggtacaaggtgaaaaaaccctcaaccctggtctggagggcctggaactccagctgacacccaccacagtgtgagtgatgaggaaaacacaaggcaactggntccagtggcaaatctgccattttaagggggatgattatcttgtcttttcttctctgaggaaagaggcttctaggaagctgtacctggtggctgtttgttcatgatgctactgtactgataaactcagaccttcctaggtgggcacgtaaggcctgcttatcccccagctnagggtgagcaaacctcctggtttgcc

SEQ ID NO: 539144 - DNA, 332 bp, Homo sapiens
tacttatttccggaatgtaagaagacagcagcagcccctgctagccaaaagtcatacaatcctgcctggagaatgtatactcctggaactagacaaagaataaagccttccaaactctaccatttaatttatatttaagagtttaattaaggccaggcgcggtgactcatgctgtaatcccagccctatgggaggtcgaggtgggcagatcgcttgggctcgggagttggaaaccagcctgggcaacatggcagaacaccatctttacagaaacaaaagccaggcatggtggtgcacgcttgtagtcccagctactcaggaggctgaggtgg

SEQ ID NO: 539145 - DNA, 142 bp, Homo sapiens
ctgctgtccgggttgcagtccgacgcagaacgggcgtctgtcgatggggcaacggccatgcctgccaacgcccgtcggatggggggaggatgagcgatgcagtgtattggcgggactcctcgatcgggccgtagcagcgatg

SEQ ID NO: 539146 - DNA, 545 bp, Homo sapiens
tctattgccatgtcttcccacagtggcatgtggaagaccagagtcgtgtcccagagacttatcttataccccgctagctgtcggtcgtcacatcagtggaagggtgatattatgacactgacactgctattttgaaacctgtgaggatggaaaggtgcaaaaatctatcaccagcaacagaaggtgcagactgtgctcgttggcggtaattttgtccatcaaatgcatatgtgtgaaaacattccctcctttggccctacaggtcagaatggcggccgtggagcatcgtcgtgcctcagaaattgaccctaccggccctacctcacagctgaaactttaaaaaacaggatgggccaccagccacctcctccaactcaacaacattctataattgataactccctgagcctcaagacaccttccgagcgtctgctctatccccttccaccctcagcggatgataatctcaagacacctcccgagtgtctgctcactccccttccaccctcagctctaccctcagcggatgataatctcaagacacc

SEQ ID NO: 539147 - DNA, 533 bp, Homo sapiens
  misc_feature (31)..(31): n is a, c, g, or t
  misc_feature (37)..(37): n is a, c, g, or t
  misc_feature (67)..(67): n is a, c, g, or t
  misc_feature (99)..(99): n is a, c, g, or t
  misc_feature (161)..(161): n is a, c, g, or t
  misc_feature (176)..(176): n is a, c, g, or t
  misc_feature (214)..(214): n is a, c, g, or t
agccagttaaacaactgccaagggtaacatngccggnactggcttccctggtccagtgccctccccnatgtgcatggggagaagacccattggtccccngctttcatgctgacttccttctccagcatgtgaaagggtcacggttgcatctgatgccagangcaagcactacttanacttacgctttgcagacgaattcaacaggttggtaganactttctacagtgaaagtccaggagacagaccgctggtgtccagcagattctgtgttaaaagatcatgtcattgcctgttacctggatgctccaaaatgccttcccttgcttttggcctcggctcacagacaggcctgccaggctttctatcttccctgcaatgtgactctatgcaaacaggaaaaatagcataccgaaatcaggttatagcttcaatagctgaagaaacatgaacatttccatttttaacattaactctctatcatcgtctatgagtaagttcttaccatgatttgttttcaaataaaatttatggga

SEQ ID NO: 539148 - DNA, 2187 bp, Homo sapiens
cagctggagctttgccgcatctgcgttgctgtgcccgcgctcttcgggcgaggaagtcccttctggtggagggagaaaagggttacatgagttagattaccatggcagctcgagccaggctctccacttccgtgagccttcctctaagtgagatcgggggggagataatgaaggccacaactcccaggaggctccacgccgggcggtcagggacgctcgcgaggacgcatgggcccccaggaatgggaactggttagatcccaggaactccgtgccggagacgggaagagaggatgcctagggccctaaatggaaaggccagagctggagacctagcacccagaagatgagaccgcaattcgagaatcaaagggccgggagcgatggtgagcgcctgtaatcccagcactttgggaggttgaagcgggaggatcctttgaggccaggagttccaggctgcagtgagccgtgatcgcaccactgcactccagcctgggcgacagagcgcacaggtgccagcaaggagcacaaataccagcatgcctggtcttccaagaattcggggaacccaggagctttggcctggagtgggatctagactacagatcccagcatgccctgtgagacacacacacacacacacacacacacgcctggagtgggatctagactacagatcccagcatgccctgtgacacacacacacacacacacacacacacgcctggagtgggatctagactacagatcccagcatgccctgtgactgacacacacacacacacacacacacacacacacacgcctggagtgggatctagactacagatcccagcatgccctgtgactctctcacacacacacacacacacacacgcctggagtgggatctagactacagatcccagcatgccctgtgactcacacacacacacacacacacacacacacacacacacacacacgcctggagtgggatctagactacagatcccagcatgccctgtgactcacacacacacacacacacacacacacacacgcctggagtgggatctagactacagatcccagcatgccctgtgactcacacacacacacacacacacacacacacacacacacacacacgcctggagtgggatctagactacagatcccagcatgccctgtgactcacacacacacacacacacacacacacacacgcctggagtgggatctagactacagatcccagcatgccctgtgactcacacacacacacacacacacacaccaggcgggggaagagctggggagtgggggcggggaagtcttgtgactacaaatcccagaatgctctggagctaggaaggaacaggacggctttggggaggggtcgtgggactccagatccgggcgtgccttgggacaaggcagggacagaccggcggggggcggcctggtacttcaggtcctggcacgctggggactggcgctcaccttaaaggagtccacaaactcgtcactcatcctccggagctcgcggccatagcgctgtgctgcccagaggttggggggcgccgagcgcgagcggccccgaaaggggctgggctcctcccccatcccttcgtcgtcctccgtccccgcggggtaggagctgtggcgactccggatctccacagccccagcgcctgcagagggtcagtgggtaggggggcgacgttaatctcagctcctctaagcccctggccctgcctgaaccctccccatcagctctgcaggcccactcgtgggtcttccaggggcgcatcacagcccacctctcagagccccagtcccttgtatgtgaatcgaggggaagctcaggggcctttggtgaagatttaggttaacttctcattaatcccacgaatccttaccgagtgccaataatgggtgaggccctgtgcctagcacaaaataagggcataagaaatactagttacatcacaaggtcaggagatcgagaccatcctggccaacatggtgaaaccctgtctctactcaaaacacaaaagttagctgggcatagtggcacgtgcctatggtcccagttactcgggaggctgaggcagaagaatcgtttggacccgggagggagaggtcgcagtgagccgagatcacgccactgcactccagcctgggcgacaggctttttttctc

SEQ ID NO: 539149 - DNA, 222 bp, Homo sapiens
atccccacctgtgtgctcatccccacctgtgtgctccaacactttgggaggccaaggtgggaggatcacctgaggtcaggagtttgagaccagcctggtagacattggtacttgggaggctgaggcaggagaatcacttgaactcaggaggcagaggttgcagtgagttgagatcgcaccactgcactccagcctgggcaactgagcaacactctgtctcat

SEQ ID NO: 539150 - DNA, 265 bp, Homo sapiens
cgtcgacacaggttgtctgctgtgtgtgcttgttgttgttgttatattgttatattgttgatgcagggtcttgctttgtagttctggctggcttcaacctcctaaagacccacctgtctctgcctcccaagtgctaggactaaaggcatgtgccaccacacacaaccctgggacagacattcagtatctgtacatgaatacccagggcagggctgaggatattgggtttgctctccagcaccacatatagcacagacgtcgacgc

SEQ ID NO: 539151 - DNA, 130 bp, Homo sapiens
attatctatcttcagcctatcaggatcacagatttaaggaagacttggatttgttgaatatgacaacgaaatctgtgtgtatcagattttatttgaagcattcatcagcagcctctcctctctgcgtatg

SEQ ID NO: 539152 - DNA, 124 bp, Homo sapiens
ggaattattgtatgaaatattacaaagcgtagactatgcattgttattcattataatattttttgctgtctttatgaggcgattatgacaggtttcaaccattaaaatatgttcttccttaaaa

SEQ ID NO: 539153 - DNA, 424 bp, Homo sapiens
ccggaaattcggccattatggccggggtttcaatttatgttccaaagggaaaaaaggggtgggaaaaaatattggatttgaaaattcaggaaagggtttaaaacccaaggatctccgggacttgtttaaacacaaccttgacctggggggaaaggaagggacctgaccccgatttaaacctggttcaggatgggaaccatctaaacctttttaagagggcaataacccccagggggcccaccagcctgggggcaaaattcaggggcccagcagggaccaaagtcagcagggattccagggtcaagcctgtcagttgtccaaagaagggcctggccattaatttaataatgggcatatgtggaggagccagcctttggagggcctttgtggaactgttcgttttctatatcaccaaagggatagc

SEQ ID NO: 539154 - DNA, 470 bp, Homo sapiens
gctcggtaccctgccatttactccatggccaggcatagctgatcaggccatgtgtatctccccattttactgttgcagcaatgctaggtataatagggacaaacctgtggagatgcccggtattccagcagctcaatccagtctgatttttgttttagctgcttccccctagtgttggggaaggggagttaggatgtataaattctcatgtctcttgaggtaaagagataaggctgttctattctttataaatatactgctgcaggatgtgtgatcctatcagccttactaaagaaaatgcatttctcaaatcttagagaatatttttgcatcataccttagagctataaaggggataaaatgaattaaaaggtaatgtgaaataatagagcctctagaatcccacactattttggctctgctactttgtagccatggagtaaatggcagggatcctctagacgacccac

SEQ ID NO: 539155 - DNA, 441 bp, Homo sapiens
ctgatttgagatctttcttggaggatgatggtggttgcttagatgataactatgaatatgataggctttgaagaagggaaagagttgatatgaaaccataaaggccgaaggaagagaaaaaggaagagacatcagtgattggtagtttataaagcacatctacattcatttattcaccaaaattaaagtatgttttaggaaatgcagcagtgaacaaacaaacatgctcttactttcatggtgcttaccttctacaggagaagagagatatctaaagaaatcataataagtcagatgataactcctgcgaaaaagcatgaatgaggatgaaggtaggaatatttggaggggatgtctcagcaggcctgtctgacaagctggtatgtagtagagacaggaatgaggtaaaggagcatgctcttgaggtatttagtggaggag

SEQ ID NO: 539156 - DNA, 463 bp, Homo sapiens
cacgaggttatctcatttaccagggtcaccttcgccccacttcccgcgcctgacgcgcaccttgcggtccaatccagagctccagcggctcgagtctcgccgtcttcttcgactggtggcgatccatgcgatggagcacattgtcgagaaaacgcactgcctcgacgatgaatggtcctttgttgagcatcacgcattcagcgcgctgcgccatggccgcatcggttacttccgcccggctgggtgctccttcttccaccatgccggccaagacctgggtcgcccagatgaccggcacatgggccgcctcgcagagccacaagatgttctcttggacttcgctgatccgctcgaaaccaagttcgaccgccagatctcctcgcgcgatcatgaccgccagtggctgttgcccggcgccatgcacgaccagatccggaaggttcctgacagcaagcgcggtttc

SEQ ID NO: 539157 - DNA, 204 bp, Homo sapiens
gtaggaatcgaagaagtacgtgccgtccttcgacatcgacaccgtatggtcggcgttctcgggcgtgagcagggtgagacccttgccgtcgaagcccaccttgtagaactgctggtaatacggatcgacgcccttctcgcggccgacgccacggaaccagatcgtcttcgacttcggatcgatgcgcagcacctcggtgacgtt

SEQ ID NO: 539158 - DNA, 870 bp, Homo sapiens
actagttctagatcgcgagggccgcccttttttcttgttgtatggttttatgacatgggatcgactgatggcttttaatttagagcacaaaaccaccgggaatctagcctgtggccaccccggaaatgacacgagtgctcacatgactctagacatcttggtggacaagtgacggcgagaaaaacaatgacttggcgccaattacacgactgcaatagcttagagctgccaacagggctccagtgacgctgtggcttctgtagaacgtcctaaggaagcggtacgaactccacggtcggtggggcgctaactagcagggacccctgcaagttgtcgtgtcgggggccctcagagctgcctgagctgacacgagggggatgggcgtctgtgtacgccaacgggtagaccgaagggcttgcctgcccacagtttacttggccacaggggtttctgaagttcctgccggcaaacttagaccttggctgcccagctcctcttcaattctgaggagctggtttgtactgggccaaggtgctcagaatcggcaaggggcaccagtcttgatctgcccgagtgcacagcccccaaaccaggtcagcgatgaaggtatctgaagatctcccccgaatgattgagacaccatgatgccccaaccatttggcctgtggccagcttgcacgcctgaagagactcggtcaacggagccaatcgtggttgactttgaaccaggaagcagttgcaggactttctcgtccacggccttggggaacctcttggggttggcactgttgagaaaatcccgcataccggatcccgcactggtgttaactttgcaaggtccaagacaccgggcaaaggatctcataaacc

SEQ ID NO: 539159 - DNA, 1381 bp, Homo sapiens
gaagggcgctgagaggcgagccgtgagcccagacgactagggagagtgagctcaccacgcgcagcgccagtgaccagcaagggtcccgaggagtgtacgttcatccatcggttgactctcttccggcagttacctgcgtgttgtccgcacttgtccagcccagagccctgatctattggatgctgctgtggctttctttgacggagacatgcccgccatgctgggtcctgggctgtcagaatggtactaggtggcagcctggtctatgtggtgaaccgtggttgacctgtctcgggcaaccaaccaccgtacgagtcatccctcacaatcgtgtgcattcgaatcgtactcccatccacggactgctgagttagcacatgatcgtgtgccataagggatatcattgtgggtaggtcaacgggaccacctcgtatttggaggagtcctttttcgaaacgtgaattttctggaaggggtcattacagtcgtgagtgctcacgggtgcttgcacgccatgggaaccaatggagacgcttgcaggtgcaagccgagtccctggttgaaccctgggtaaaggccctgttgaaagcggaggggtcttgggaaaagggtggtggagggggtccatcgccgaggttccacaccacgaagtaagacgcgactctcatcgaagtggtactctgttttggttcgctctgaatttgatggggatggggcttcgggggcgatactactcctaaacgggacctatggggaagccgtgggtttactgtttgggcaaggccggtgactcttcgtacggttttccgctagccggactccccttgggaagtggcgccgacggggccctatttgtggcccccattgggcaatttgcaaggggggccggaatgaggtccgctacaattgccctccgatctggggagcttcgccccttgtccacacctgtgtgccctttgtatatcttaagctagaaggcctgaggaaggttccccgctcgcggattggtgcgatgggcagggggggttctacctcccaaagaccgaaccttgggagggaagaggggcccctatggaggccccaagttggtccctttgctagcaagacccatttccgatttggcggggaaagcgggaaaccagaaccaagcgtccaattgacccacggagcaaaggaacaaccggctcgtggaccatccacaaccgggttttggttaaagagaagcgtgtcctccaatttacctctgtggggtcagagtttcccccgtgggggaacacaacaaggggggacaagtctgcggccgacggaaagtggcctttggactaagggttgcaataaacgctctccacagagccttgggaaaaacagcaaagggtggggg

SEQ ID NO: 539160 - DNA, 945 bp, Homo sapiens
  misc_feature (216)..(216): n is a, c, g, or t
  misc_feature (281)..(281): n is a, c, g, or t
  misc_feature (498)..(498): n is a, c, g, or t
  misc_feature (540)..(541): n is a, c, g, or t
  misc_feature (660)..(660): n is a, c, g, or t
  misc_feature (755)..(755): n is a, c, g, or t
ggtcttcatctcttgacaagtgtgggactggtgattcgtgactcgggtgtctgcttcgtgtcagattgcgccatccgtgaatcgcgctgatgcgcaggtatgctggtgaatgcattgtacgtctcacgtggcggcagcgcgtggctgctcatgatggtgcaagtcggccgtgctcggtgcaggctcctagcatggtgcgtggagacacccaccggncactcccagtgcctcgcatgtggtgcgacgaactgctcacagatgcatctaaacgaacgcgagtntgcgagggaccggccgtaattctgatcatgcgcctgttgcagacaacagggcctttggcgttttctcggtgggacggtaacagggggggcggcttcggtggcgaaaagaagcacctggtaagcgcaactggggcgggctcgggtgggtttcccggtgagcatccttctccggaggagaacaccgagtgaaagatgccgaggtttgcactttgaaaantgattttggacgagcttgggcagcgcatgaagcagtggccannggccttcgttccagccaccgcgtggagaagtcgaggcctttccaatcccaatgagaggccaaagggaacacccgaattggccttcgccgcaagggttaacttcaccttagcccccaganggcgtgctcaacgtaaacaaggcctatcctcctggcggtaatcgcgagacgggcgtcgacattttcgattcgcgtctcgcttcgggttagagaancgcccgcaatcttttgcggcaggaagggttactcgggacgtagagccctattgtgtgcaatccgcggggtgcggtttcacgggccctttgatttggtggttgctaccaaacaagggatttttagggattgcgtgtggaaacccttggcgtttgcttgggtgttttaaaccccttcccctgttgtcccctg

SEQ ID NO: 539161 - DNA, 125 bp, Homo sapiens
  misc_feature (12)..(12): n is a, c, g, or t
  misc_feature (14)..(14): n is a, c, g, or t
gagagagagagngngagagagaaaggaaggaaggaggaaggaaggaaggagaaagaaagaaagaaagaaagaaagaaagaaaaagaaagaaagaaagaaagaaagaaggaaagaaagaaagaaag

SEQ ID NO: 539162 - DNA, 141 bp, Homo sapiens
ccgtattcccagatgcactctgacctagctagtgcctggtgccagtgacctgggggagcctggtctgcatgccctcactggttccctaaaccttgtgtggctgtgattcatgtccccagtgtgtggactcagtgtaggagt

SEQ ID NO: 539163 - DNA, 260 bp, Homo sapiens
  misc_feature (43)..(43): n is a, c, g, or t
  misc_feature (51)..(51): n is a, c, g, or t
  misc_feature (147)..(147): n is a, c, g, or t
caacacacacggccccacccgcaggaacatgttcctaatattncttaacanataaagatactcagaagatgacggaagctgtgaagaacagcataattcagaatagaaaagcccaggccaggctcagcggctcacaactgtatcccnacctacttgggaggctgaggcatgagaatcacctgaacctgggtggtggaggttgcagtgagccgagatcacgccactgtactctagcctggctacagagtgagattcgtccc

SEQ ID NO: 539164 - DNA, 322 bp, Homo sapiens
agcgaaccgcttaccacctcgttttccagcaccagcttaacgttattgataatcatgaagaggctcccattgggtgcaggcggtcggcgacgtcattacgtacagcttcgtcatggaagatgcctacgatggctgcgccacgggttttggcttcgcgaatcagttccaccaccgcggcgctgtttttggcgtccagcgaggcggtaggttcgtcaagcagcagaatggggtagtcgacgataaagccgcgggcgatgttgacgcgctgctgttcgccaccggaaaatgtcgatggtgccaggtgccacaggcgttccggcac

SEQ ID NO: 539165 - DNA, 220 bp, Homo sapiens
aatataattagaaataaaccctataccaaacaacgactagaaccaatattttccaaaaaatattggcactggaagaatttttaccaaccatatatttataaaatgaattcaaatgtaacaaaaattatataactctctgttttctgattctctatcaaattaaaatccaattatttattgtagtttaaaataggccaatatctatagctgaaataatctg

SEQ ID NO: 539166 - DNA, 1690 bp, Homo sapiens
  misc_feature (519)..(519): n is a, c, g, or t
  misc_feature (881)..(881): n is a, c, g, or t
  misc_feature (1082)..(1082): n is a, c, g, or t
  misc_feature (1100)..(1100): n is a, c, g, or t
  misc_feature (1333)..(1333): n is a, c, g, or t
  misc_feature (1360)..(1360): n is a, c, g, or t
ttttgtgatgtccttttttcgtctttgtctgtatatattagtcggttgcgctattcgtctctctggcttactttgtctattctgcttctgtctgtgttagttttcgttgtttctgttgcgtttgggtgttgtttttgttgcttttgtttttttgttggattagtgatttttgtcgtttgcattctgcttatgtggtgtttcgtttgtgcgtcttggtcagtactacttggttatgtgtgtttttgttattttctgtgttgttgttcttctccggtctgcctggtctgatcttctcgttctatagcctaattgtactgtatgtgtatgtggtggttttatgatttgttgtgttgtttaattattgttgtattgtatgttatgattatgtttgtaggtgtgtgtatgtgttattgttatgagtgatatgttatgtatgacggaatggttgtttttttggtatgtgtgtaccttgtcgtagagttgatatatgtaggatgagtgacactgctaccaaatttnttattaaccgctggacccccggttgtaagggggttagtgcccaaataaacacaacagataacccgaattttttaaaaggggggaaccaacgccatttagttaggggaaccctttctggggaaaggggaagtgcgcccaaccacaagaggttggtggtgcatcccagaaaaaaatagcccacgggccccttgttagaaaaactcgctccgccccccacgcgtttaccttatttatacgcgcgggttctcttaaaaagggtaattctcgaagagccccctcgtgggttggcccgcaaaatttttgcgcccccacgaaagggtctttttttttttctacgcccaaagatgtctctcactgtaggngaagtagggtgcaaacacacattcttgagagagaatgctctgaggtggaaagcctcgtcacggagagacccccacacagagaggggttggccccccaagaattctctgctcgctctcacagagagatagactacacacaggagcagaaacccacagagaccctggttgagatggacactctgtgggagagagacactgtgnggccctgagatagtggcncacatcatggggagagttgtgtgcacacatcgtagacaacattgtgtgagaaaaataaaaaatgtgtgagaattcacgcgtgcacacgtatcacgtgggagaacgtgcgcacacacaaacgtggggccacactgtacacacacaaatgtgagacgcgcgccacatttttgtgtggtgagactttcacatgtgaggacacaccacgttatacgctgagaaatgaggccacaggntgtgaaacccactccacaaagagaatntggggtgagacaacacgctgagccacacacttgcgccacaagaatgggaggcgccccgcgaattctggcttgtgcggaaataattcttctttgacccagcaccacccctcgggagagaccacgtgaataaatgaaaagctataagcctccgggctaaatttccccactaagccgctggggtgaactttccctggtgcacccaaggcacgtgcacagcacatgttggggtttccccttacacttttctataaattgtaccccaaacaatccaacttaagattttttgaattggacccttcccttccaaataaagaaaatttgggaccccca

SEQ ID NO: 539167 - DNA, 137 bp, Homo sapiens
agagcattgggtcacgcatacttctgcctcatgtctctagtagctgggcccgccatacgcctgggtaattttttatatttttagtagagacggggtttcaccgtgatagccaggatggtctcgattctcagacgggt

SEQ ID NO: 539168 - DNA, 311 bp, Homo sapiens
gtggacagcccctgcccgtcgtggcggcaacgtgtgcatcaactcctttggcttcgggggctccaacgtgcacatcatcctgaggcccaacacgcagcgccccctgaccgccccacatgccaccctgccccgtctgctggggcagggagcacccctgatggccgtgcagaagctgctggatgcaggggctcgggctatagccaggacctggttttcctgagcatgctgacacgacgatcgtggttgtccccgccaccgcatgccttccgtggctacgctgtgctggggtggtgagcgcggtggcccagagg

SEQ ID NO: 539169 - DNA, 213 bp, Homo sapiens
  misc_feature (118)..(118): n is a, c, g, or t
cgatctatctacagcatactgatcactacttcgtactagttctcggacgatatctatgatcatatcaaggaatgatagcattgaggctcgtgtatctaacagcatactgatcatactncgcatagttctcggacgatatctatgatccaatatcaaaggaaatgtagcttgaaggactcggggatatctaacagcgaattacctgattcaact

SEQ ID NO: 539170 - DNA, 873 bp, Homo sapiens
cttgttctccccagccccttccatatcccttatcagaagtaaccattcttttagttgtttcttatggatatacctacatcttttaaaataataaatctatcctgcaattaaaaaaaatttttttgagaccctgtctcaaaactaataataataataataatcactatgaactcttgcatttttatttatttagtgtttcaaaataggttatagtcattaatgtttctaatgatcacattattttactcaggctctgtggaaaccctttaaactgactctaagtccattggatgtgtctctattagcctttgagcacattcttgccttctggaccaccaagatgtaccgggcttgtcttatattttccctgctgtatccctggaatcagccattcctcaaaggatctatggttttttgtttgtttgtttgtttgtttgtttggtttgagacgaagtctcgctctgtcacccaggctggagtgcaatggtgtgatctcagctcactgcaacctccacctcccaggttcaagtgattctcctgcctcagcctcctgagtagctgggattacaggtacatgacaccacacctggctaattttgtattttggtggagacggggtttcaccatgttggccaggctggtctcaaattcctgatcacatgatctgcccgcctcggcctcccaaagtgctgggattacagcgcgtgagccatcgtgcccctgccaatctctggtttcttatagtgggaaaaacgatttaagaaatcagaatccggccattaggttgttgtcaagaagcattttttgtggtagatattgtgagacggcattcgctcttgtcgcctaggtgggagtgccaatggggtgattcta

SEQ ID NO: 539171 - DNA, 292 bp, Homo sapiens
gcatggctgtaatggtgaaagtgttcgctgcagagatgctgaactttagggttggtaaagtggtcactggtccttggttggaaatatatcactcttcaataccagagatattgtttaccccgtaattctttaaggagaactgaagtttttttgtcatcttggcgtgtggggtgttctatggaaccaaccttttttcctttcctggcgaaggcagttccctttccccaaccaattggggcaaccttggttggcttggaggtttgggcggaggtttttccctgggttccatgga

SEQ ID NO: 539172 - DNA, 235 bp, Homo sapiens
  misc_feature (53)..(53): n is a, c, g, or t
  misc_feature (102)..(102): n is a, c, g, or t
  misc_feature (105)..(105): n is a, c, g, or t
  misc_feature (108)..(108): n is a, c, g, or t
  misc_feature (161)..(161): n is a, c, g, or t
  misc_feature (171)..(172): n is a, c, g, or t
  misc_feature (192)..(192): n is a, c, g, or t
  misc_feature (209)..(209): n is a, c, g, or t
ctagtgaaggcgttagaaaagttgctgcatggtactgtaattgagcatccggnatatggagaagtaattcagctacagggtgaccaacgcaagaacatatgncanttnctcgtagagattggactggctaaggacgatcagctgaaggttcatgggttttnagtgcttgtnnctcactgtagcttaagtgcnggatttccttgcaatgngtagaatttcccttctctcccttgtc

SEQ ID NO: 539173 - DNA, 655 bp, Homo sapiens
ggacatatgggcccttattcattcagatatactactcattgtcacgtcttcaaatatagtgcttacacttgattttaaatgttaaatttttattataatcttttctctaattttctgcctcctctccatacagagtagacaatatttgtaagatattgtcccacttttacgtccttgtctatataaacatctacttgtctgtataaacatctatatagatgtctattttaatatctactagtgggcatctcttacagtgttttgtaaaaattccatcagagagtctattacatggataggcttgatgctttgaaaataaatttaacactcttctgtctactgacttcccatccaccgagctatcacagtttttagctgttaatagcgtcaatacttgcagcatctctgataagaacaattctgcttcacctccctgaccagtaataagttttagttttagtaactgatgccttttacaaattgacttttgtatggtctcttagtattgtttctccaatgccaagattcacatagcagtcagattaaatttccttctactttgaccttcttaaataaataccttaaggatacggaactgcctataatatgacctctattcagcttagctttattatgataacttacattccttggg

SEQ ID NO: 539174 - DNA, 366 bp, Homo sapiens
ggtcatttgggtcccttttcccttggtccccccccttgggggaaaggaaggaagggcatgtttgggaccgggccttactggaaataagggttttaccccccttaccccccggcttcccccctccccccaaggtgaagtggggggggctgtggttagcgggcccccccagagctgcggggcccctgggggggtccgccccccctcccctcgtagggaagggggggggatttttttgtagtttttaattggggggggggggggggcgggggggttttttttaacctgtttctttttttgctggggggggggggtcccccccttttaatcagggggtttgtgtttttgtttaataaaaaaaattttgta

SEQ ID NO: 539175 - DNA, 150 bp, Homo sapiens
acacgttctccggcaccaagaaacgtgatcaatcatcacgtgattagttgtctgcttcgtatacgaataaacgtcagctgtccaaaccccgtcggtaatgtcacgcttatttttgcgcgcaaaaccaccgcacggtaaggcccaccggta

SEQ ID NO: 539176 - DNA, 127 bp, Homo sapiens
ggcaaattgtacattggattaaacctacaatacagatgtccctctggctttagtgaactcttttaacacgggatggtgataccaaactaattactacagaagtccaatcattcgtcgtgtgaataat

SEQ ID NO: 539177 - DNA, 104 bp, Homo sapiens
tattttttatagtcaggacctctgacataagcttggtattttctatttctgtattcttcaaatgtaccttataaagttaccttttcatccttctctgtctatca

SEQ ID NO: 539178 - DNA, 616 bp, Homo sapiens
  misc_feature (7)..(7): n is a, c, g, or t
agcctgnttgaaagcaccaggaagatttagaatattccataaacttgagttgacaaagcagcagggggtgaaagaaatgacaccaatgttgaaagcagttctactgtggataaaatggtattaaacagtaccgcatgctatatgaaaatctttcatgaaaggagagtcaatccatgtggcaaacttcatcatcttattttaagaaactgccaggttgggcaggcgcagtggctcatgcctgtaatctcaaaaaaaaaaaaaattgccaggttaccccaaccttcagcaaccaccacactaatgggtgagcagtcatccacatggaggcaagacactctaccagctaaaagataatgacttgctgaaggctcagatgattgttagtactttttagcaagaaagtgttttttatttaagatgtattcatggttttcttagacataatcctattgcacttaatagactacagcataatgtaaacataacttttattttattattattattatttttttggagacagactcttgctctgtcgtccaggctggagtggagtggcgtgatctcggttcattacaacctctgcctcctgagttcagcgatttactgctcagct

SEQ ID NO: 539179 - DNA, 398 bp, Homo sapiens
  misc_feature (208)..(208): n is a, c, g, or t
  misc_feature (267)..(267): n is a, c, g, or t
gatctagaggatcccgtgcgtacggacgcgggtcacctcaaaatagcgccatcgtccacccgcttgccatcgacacgctcggccatcaggtcattcggcgcttcttcctgcaagccgatccaggcttcgctggggtccgccttggggatcgggccggcgcaggccgacagtaaacagacaaagccaaggacgggaactaacaacagtngtttgagtgacatgacagggctccaaagggcatgaatgaaaagctcgtatccgatggcngacaagcttgatgagccgcccttcctggaacaaatgaatccctatgaaagtatcttcagcccttgactaaaacttccttcacctggctgaaaggtgcgtgttagggcgtccgtagcggccgggtaccgagc

SEQ ID NO: 539180 - DNA, 397 bp, Homo sapiens
ccctgggattaggatgcccccggaggaaaaaaaattggccccaggggaattttggccttaaaaaggaaaaaaacccggggaggaattaaaccctaaatgggccacttctggggtcccagttttcctggattttttaaagggcctctttcaggcccctaaaaacctggtagcctagtggttactaacccggaaataaggaggagccttttaggggccaagggtttaaaaaacaaaaccccctcctttttggagtggaaacgaggagggttaaacctcccttatggtccttacatgcaggagatcccaaaaaagtcagggtccattcccttaggaaaaaaacccaaaaaccttggtttttctccccttcattaggaaatggggcctaggaaaccctgga

SEQ ID NO: 539181 - DNA, 939 bp, Homo sapiens
  misc_feature (51)..(51): n is a, c, g, or t
tgttttccacccttcaaactatgtaacacgctggtcctttatcagcaaaantagggggtttgttcactcccgccaggttatgtatactttacaagcgggccccataattcccatcctttgtcgccataccagaaggcagaagttgtaatggttcctcccaaaaaacctttcttggtgttcgcatccatgataagtgtgcccctttgtgccgccaaacaagtgtgttttcccccgacgtgtgcctgtgcctgtgtaccaaaccccccaaacatcctggggcagaacgccaggccacttgtcaaacccagaggtcccctttccgtccctaatttatcgttgggtgggcaaccactttaaaccccctggtgtatttggatttgtgcgcccccctcaaaaccaccttctataatcattgcgccgggggaacaaaatttcttataaacgactgttttctttggtgaaaaaaaactgtgccacaataccgcgcggcttaccatttttaaatgttataggcgccacctttccacgacgtctatttccatactctcgaccatttggggactcaatacaatggtacaataatacgacggacataaccttgggaaaaaaaaacaattggtaatatatacccttggttcttgttctaaaaggaaagtccacaactttgttccaaaaataactaaaaactttttgggtaattggggcccccaccccaattagtgcgttccccgaagcccctgtataacatatgggagttaggacgaaacactttttgtgggataaaatgcttttctggcccaaacttgttaacaagaacacaactctctgggggcaaaaaagttaaaaagcccggaaaaaagatatttagggtacaaaggagtcccccgtctctgtgttttatccccgcccaaaacaaaaatttgaacaacccaacaagca

SEQ ID NO: 539182 - DNA, 706 bp, Homo sapiens
gctgcagctgccggacccaggtgcggaacgtgcgagggcccaggtggctgaaggggccgttaggaacatccaagcggtggggcacatggcagatccccgatctgagctggaccacccttctcctcttggcccgccccttcaactcgcctccgcttaggtctggattggcccgtcccctgatctgagcctggtccttcttcaggcactgacccttgacctccggtggctcccccatctctcaggcgcgagtggcgtacgggacgctggagtgtagcgggacattctagtaactcggtgggtccagaaggggatgcaggcctctgtggaccatcagcaagaaggacattatcaagcccggacaagaaaaaatccaagaagtcctctgagacagctgactttcaagaggcgccgagggtcatgcacgcgggaagtctatgccttggtctactctgacaagtaatggatgcagccccagctgctagcccagtgacactgtgccagggatagcgtacagttgaaggccaagttgggctccaagaatggtgcggtcttggagacgtggatgccattcagcaatgcgcggccgcaaggacggacgcacatgttcttccagtggcgacgtgcagctggaggagggcaaggactacccctttgccaggttcaataagactgtgcaggtgcctgtgtactcggagcaggagtacca

SEQ ID NO: 539183 - DNA, 146 bp, Homo sapiens
ccctagagcacttgatgtttgaaaatcggcttgaaggccattcttttcctgaccgaacggccgaaacagagaaagtgccctgcactgtattggctctcaggtttaacttgcacagagcaaaattttatatcaaaatctggttatca

SEQ ID NO: 539184 - DNA, 211 bp, Homo sapiens
atagaactgtaatcatcccaatttatcttcgaagggtgatcgaccatatttcattgtgatttctatcacccgacatgacttgctccgctagatttacactcacgcttctaatgaaagaggggcagtagtgactgactctgcccctagccaaacggcgacggactggaggtcacatcatcgtcgtctatcatcgcaggccttctacgatgag

SEQ ID NO: 539185 - DNA, 946 bp, Homo sapiens
gcccaggagtgagtagctgctttcggtccggcggacacaccggacagatagcacgtgctggacggcccaccagccctagccctccaactagtcagcctgcgcctggcgcctcccctctccaggtccatccgccatgatggccccatgctggcgccgtcgtgtctctgctggccctgagccaggccctgccacattagagcacgagaggctactgggagcttcacccatggacgactgggccatatacatgatgaacgatcgaggaagcatacgggcgctgacacgtcaggcgtcctggacccggactactgacacacccacctacagcgccatgtgtcctctcggctagcattgccacctgccgggtggccccacgctgctcccgaccctgggctctcgacagtctgatgccccaaaagacgatctcccactgacacccaacggctgcctagcgacccttgccagaacacaacggaaccaatctcccgagtcatccccatagggactgaccttccaacgcggcgtcctcccgccacccctcttacagaccccccatccgcaacccatgaccttgcacacgaaccaaagcactccttcccacacgaacccccaatgcaagccaacggcccctatccagaccccccacctagcccgacaaccaacccttccgctccaccgccttccataaccacctccttacacacatcgcacaccccaccccatgcaaatagcccccgacatcacccctccccccaatcccctataccgcccaaggcggcgatgcacgcccaatggctccctcgcagacatcccctacccgcacctccttcagcgcagccgacatccgacctcccccggcgccccaatcacacgaggcatacccgcgggctggtgtccccccaccacggggtgccccagcctggactgccccacatgacgaagcggc

SEQ ID NO: 539186 - DNA, 447 bp, Homo sapiens
ttcggtagaggattcctagttcctggggggctaattaaataaatcattaatactcttctaaaaaaaaaaaaaaaaaaaaaaaaaaaaaaaaaaaaaaaaaaaaaaaaaaaaaaaaaaaaaaaaaaaaaaaaaaaaaaaaaaaaaaaaaaaaaagaaacaaaaaaaaaaagaaacaaaattgggccgaataagccaaaaaggcctagtcgaaattccattaaaaatgaattggccatggatttaaaacgatgaaattgggaaaacccggagttaacaaaccttaaacgcctcacaataaatcccctctggccaatgttgcataggaccttatcgggacgtaacttagagcctttccaaaaagtttgttagccaaagaggggctaacgggaaatggcaagccgcgaaaaattctggcaaaaaacatgtgaagatatgggggaaaaaagc

SEQ ID NO: 539187 - DNA, 267 bp, Homo sapiens
atagcagcatgtcattatgaaactaacaggtttgtgtgtcacttcttttatactcaacttcttttttttattataaaaggtacacttctgtttatatttaaacaacaaagaacaaaagctactctacacacttaaaaatcttaattacaatattcctcaaatctatttcacctacattttaaaactactacatacagcaagccagacatgcagcagttaagaaatggaataacggtgcgggagacagacggggaccacgaaagaaaa

SEQ ID NO: 539188 - DNA, 102 bp, Homo sapiens
  misc_feature (33)..(33): n is a, c, g, or t
tcaaaatgatcactgagccaaaagggcactggnctatgcttttgcctggcaggtaaccaggacaagaggaaggaagtactcaagtcacttaatgaggaagct

SEQ ID NO: 539189 - DNA, 260 bp, Homo sapiens
gggacggacagtcactatgagaatcgtacgatgatggctgcaaatggagaactactttcactctttttcccccctctagagaatcaattgatcttttacttactcttggcaaaaaaagaaaaagaaaaaagtccttattcattctggttctatatagcaaaactggatgtccaaagtaccttctgtccacacacacaaaatctgcatgtattggtggggggtcctgtcccctaaagatcaagctcgtcgagctcgtcata

SEQ ID NO: 539190 - DNA, 162 bp, Homo sapiens
tgtgactctagacggatcccccacgtacttacttgatttttatttgctcttcaaactattacaacatttttgtcccttaataggtttttttgggcagataatgcgaggtccgtggtgttaccttttatatactcctattaccttatgtggtcgtcaaacatg

SEQ ID NO: 539191 - DNA, 237 bp, Homo sapiens
tacctacaggatctagaaaatagcctcaaaagggcaaatctaacaaaaaaaaaaaacgccgttaatctaatcaagcctatattaatttacaaaaaaaaaagggccagaaaaatattggggcttgcacaataagaaacatctgaactgtggtaacttctacagaaaaccctgttttcttcataaaaagggaaggaaggaaaggagaaatgtgaggataaaaaaatttttctaaatacc

SEQ ID NO: 539192 - DNA, 447 bp, Homo sapiens
gatcccctgtaacggcgtgattgcccttagttgatcactgtgaaaaaaccgtagtggggattgttcaagaagatcgtgtattacgcgtttcagaactattgactctgaagccgcactcatcatgatcttagagctaccttggaaagatcgccgtgaccagagtccaaatattccactaactcctgaacctgactacgagtcatttcctcttctgagcacatgattttcctagtgaaagccccctacctattatttgaaaatttgacagtttatacaaactgagccaagattattatcttcaaagggactcttgtacaattccactgaaagacttctaattcttgatgctcagagcagctaatgaagggagatgcctttgactctccagcgccaagaaggtgcctgcgtcagtagttattttgaacactccctccacaattacttcaa

SEQ ID NO: 539193 - DNA, 104 bp, Homo sapiens
gaattattagcccttaaaattgattgtgcttgagctgttatgcccataccctggctgtctgcctggcagtcgagatgtggacgggagctggagggggccgcgcg

SEQ ID NO: 539194 - DNA, 432 bp, Homo sapiens
ccgtcgcgatgtagctcatgcctctagcaataggataactttgcacgagtttaggcgtccaatcatagacaggctcacaggcagaaaaaaaacagagctgcagcaatggcaaacaatttacaaaagggaagtgctggacctatgaggctttatgtgggctcattacacttcaacataactgaagatatgcttcgcgggatctttgagccttttggaagaattgaaagtatccagctgatgatgtacagtgaaactggtcgagccaagctatatggatttattacattttctgactcagaatgtgccaaaaaggctttggaacaacttaatggatttgaactagcaggaagaccaatgaaagttgggcatgttactgaacgtactgatgctacgagagctagttcatttttggtaggtatgatgaaggacgca

SEQ ID NO: 539195 - DNA, 1041 bp, Homo sapiens
gtgcggccctcggcgaagttgtgtttggtgtgggttcttgtgcgtgtgttgttgtctcccccccgcgcctcgtccgtcgtgggtgttcgttcttttcactttggtttttatctggttgttgtgtcggtcgtttgggggtcgtgggttgtgcctctcgtgtgagaggggggtggtgttgttgtgtggccgctatggtgtgttgtgtttctcgtctcgctgctggcgtgtcgttagctcgcctctccttttttttttgtttgtggatggttttgctctctccccctccctcctcttgttgcttctgtgaagtccgcgctcgcggtgttcgtggtggaggtattctccccccactccgtggtggtgggcgcgctcgcatcggtgagcgtgccgcctggctctctgcgtcttggggctggtgtgctccactctgtggtgacacgcccacgcacgcactcacgcggcggttgtgttttctcactcgtgacgggtctcttgcgtgcgacacgctctcttgctctgtctcctcgctcttgcttcttctccgcgcgctcggtagcctctctctctctcctcgctgcgtggtctcctcccaccgccgcgcgtggtgcggcgtcgcgtcacggcggtgggcggttgtttcactctcacgggtgcggtgagtgcagcacccactcatgttggctctacactcattctcttgctgtcttgtggttatatacacccaccaccgtcaccacgcaatgaggaccccccccatcacacacacatataagaggagagggttgttttgtgcggtgagagaggacccacagagagagaagaggcctcgttttgccgtctccccccaccccccctgggtttttctctgcctccttatacctggtgtgtactcctgacccagcttgttctcgccgcccccagaagtgtggttgctgccgcccttcttttgttgttttttcttttttttttgggggggggttttgcacaccccccccctcacccacatcaggggccccccacaaaaaaatattttttttttta

SEQ ID NO: 539196 - DNA, 110 bp, Homo sapiens
  misc_feature (3)..(3): n is a, c, g, or t
gcntgaccctgcctggcacacatgtgcccagacggcaatgtcctgtgactatgccattgtgaatgcactacactgaatcccatgccagtgatgtgacttgtgccctgcct

SEQ ID NO: 539197 - DNA, 481 bp, Homo sapiens
  misc_feature (37)..(37): n is a, c, g, or t
  misc_feature (228)..(228): n is a, c, g, or t
atgggattgactttttaaatactgtatgaaataaggntccaaatatgcatatctaatttttgaatttttagcaaaatttcccaccaacatttattgaaaagttcatatttgctcacataacttgatttttttacctgtaacatatatgaaatgtccatgagcaattatctggcctctcttccatcttcagttaacttatttacttttctgtactatgatgtaaaaagnaagtttcacttccagtatggtacaaatattgttctaacttcttcatttatttaataatatcttagctattcttgactaatgtgttatttaaaactttgaatcatcttattaacttccacaagcaaataaatgtttagtctcttgttgacattgtaataagcctccagatcaatgtggggagaactaaatgtttgacaatattgagattccaatgcatgatcataatatgaatttcccacttattaatagcctt

SEQ ID NO: 539198 - DNA, 570 bp, Homo sapiens
gggagatcggcgagctgaagtgcagtgatggagggcatcaagattgagcaccagctggagctgggtaacttgcagtgccaagcatgacctggagaccgccatgcacgtgaagtgagaaggagtgccctgctgagagaagctgcagtgaggcccagtgaggagctggctgggcttgcagcggcactggcgggcccatgctggagtgtgcaagccagccagcacctggctggagcgtgcagtgaggcccaggaccagcgccggtgatgccgagctgcgtgtgcactgagctggaacaaactgtgactgtggagtacctggtggccagtgcgcagtgctatcgacgttcctcaagtgagcagatctcgctgtgccgagaacgacgatgttggactacgagctgtgctgcagcgggcagaagcccagtggcaaacaggaggtcgagagtttgcgggagaagctcctggtggctgagaacagactccaggcggtcgaggccctgtgctcctcccagcaaacccacatgatcgagtcgaatgacatttcagaggagacgatcaggacgacaggaac

SEQ ID NO: 539199 - DNA, 185 bp, Homo sapiens
agctggtcggtgtctccttctacccaccctcacactaagagaggttctgggggtcacattttttgttccactcagtcctctctcttggagtggtttggggcaatcctgatcatcgtctgtgttacatgtttccctgtcccccttccccagggtggtttggtgtaggtccttctcaaaacacactg

SEQ ID NO: 539200 - DNA, 255 bp, Homo sapiens
ctcatggagattttcagaggaggaaaccaaaggaccagcaaaaactagattcaatagcagacatgaaggcgtttgttgagaattatccacagttcaaggaaatgtctgggactgtttcaaggcatgtcacaatggtgggggacttctcgattggtcagtcacggatcttctgggggttcaggggtgaccagactcgcctctaaaatcccatctggtctctcggatataaaggctctcgccccaaggtacatattt

SEQ ID NO: 539201 - DNA, 1545 bp, Homo sapiens
caataggaactactggtttgctgtgtaaatgaactatgctcacaaaaaaaaaaaaaaaaaaaaaaaaaaaaaaaaaaaaaaaaaaaaaaaaaaaaaaaaaaaaaaaaaaaaaaaaaaaaaaaaaaaaaaaaaaaaaaaaaaaaaaaaaaaaaaaaaaaagagagagaggagggggcgggcgcgcgccgttgtcttgtcttctcttcgtgtggagggcgtcactgcacacgacgccaccccattcattttttgagcgcgagaggggcggggcagcatcattagtgggtgggtgattgtattatatatatatatagcgggagggtggggtggttttattgtatatataaaacaaatagaggagtgggggagagagaaagatgggaaggtcaggggagattatttgttaagagaaagaataatttttgttggggtgggggagagagaagaataggagggggagaaaatattaaatataaagatgagaaggtataatgagaggtgatgatgggtggagtggtttattttatattatttatgattgtgaggaggtggtgggaggagggggaggaaaaacaaatgtgattgaagtgagaggtaggagagagaaagataagagaagatgtgagaggagtagaagagagaaggagaagataatgagaagtattataattatttatattgtgagcgagggggggaatctgttgtgttgtttgtactattagagaagggagaaaggagaagagggaagaaaaggaggaagagaggaatgaacagaaagagaagaaaaagaaaaggagaggcggaggggcggaagcgacaggggacggcgcaggacggaacagggccgggagggagaaagaagagaaaagagaggagaagaggagaagagcgagagaaggagaagagaagggcagcaacagaaacaaagaaacacagacagagacgaacagacaacagaaacgaagagagagaaagcagagacggagaccggacgagagaaaggcgagcgagaggcaccaaagggagcgaggaggggggacagaggaacggaacgaagaaggagagagcaacgaggggaggacaaaggaggaggagagatagggagagaaggaggggggagaggagagaagcaaagagggagagagagagagagggaaggaaggggcgaggcggggagagagggagggaagaaagaggtggcgagagagaggaggagaggaagagaggagcagggaaagaaaacagaaaggacagaagaaagaaaagaaaagggagaaaaaaaagaagcagaaacaaggaaaggaaaaaagaacaggaagaagcagaaagcagacaaacgaagaagaaaaagggaacgaagcacagacggagagaaggggacgagagaaggagaggagagagtgagccgaaggcagacagacaacagaaaggggaggaagaaagagagggagaggggaaaagacagaaggagagagaagaggagcagggaggaagagcagcagaagacggatggaacggagacgcacgagaggagcgaagagacca

SEQ ID NO: 539202 - DNA, 365 bp, Homo sapiens
cacctctgacgagttccatcaccttgttccacaggtacaaattcataaactcctgaaaagtaaaaataaataatattgaagtgcctaactttaaaaaatttttaaattcaaaagtaaaaattaaggaaagagtagccacagaaaccttaaaggttgctttctgaatgcttacccatagagattatgaagaccttggtgcattgctattgatgtgagtgtaaattacatgtacataataaaaggaggtacagcggtattcagctgagttgtctcactatcaagggtactcgacactgagtgtttgagttccacacaacctcgaagtcctcccttattcacagtcatcctctcattcacaggggaca

SEQ ID NO: 539203 - DNA, 217 bp, Homo sapiens
agaaagcctgctctcttgcaaagacagcttttgatgaagccattgctgacttgatacattaagtgaagagtcatacaaagacagcacgctattattgcattaactgaggagacacttgacattgtggacatcggatacccaagggagacgagctgacgcaggagagggaggggaaaattaaccgcctcccaactcttgtctgcctcattctaaattt

SEQ ID NO: 539204 - DNA, 399 bp, Homo sapiens
  misc_feature (53)..(53): n is a, c, g, or t
  misc_feature (295)..(295): n is a, c, g, or t
  misc_feature (317)..(317): n is a, c, g, or t
aaaaaatgtgccggggcctacaaacaagaacctgacctgtggcaacaacaacngcccatattattcggatttagcccttaaggatgagccataaaccctatcctaaaaaaaagattggttaaaacatataaccccttctctggtgatttaattcccattccttaaaaatttattttcaaaaccctaataaatttttctgaatttcagctttttaatctaaaaaatgggtgagtcgaaaggagattgattgttagctatagaacttggtctccttccccacctttacatttagagnacaactaaaagtagtactaggnaaaatggtgagtagcctgtccccctaacaaaatgcatgatgtcctttaggtgctcttgagctgtttaaatgaaattcataca

SEQ ID NO: 539205 - DNA, 137 bp, Homo sapiens
ctcatatgcaatgaaacaatcatgtagtttatgaaactaactctgtgattaaatgtggaaagtatgtaaacaactatgtttatgttaaatatttataatgatgcattgtgaccctgaccaatgtgaaatagaatgtt

SEQ ID NO: 539206 - DNA, 500 bp, Homo sapiens
  misc_feature (397)..(397): n is a, c, g, or t
tttctttcgcccagcgctgccgttgttatgtagggccacatctgccagagcctggagtctgcgaaggccgggatccgcgttccccggacccaccagtgggtgctgtgcaaacccgagagaactgtgttgcaaattcgtgactggtcagcctcttgtgtggcagctgagtattggagccaggagcctgccatgaggttttgagaacagagtgctgttttagagctggcagcagcatctcagcccaagagaaggttatattcccagaggatgtcagtcccaaggaccagtagctgccatcagtttggattctgaaaactaactggcatcaacactgggtgtagaaacatgcttgccttatgtatcagaggacatgctcagcagacccaagagatatatntggcaactttttctagaaaaggcacattgggtatcattcattacattcttgagtttttttgggtttttttttttttttttggaaacagtcttgctgtattgcc

SEQ ID NO: 539207 - DNA, 284 bp, Homo sapiens
gcagtctgatggacagagcaggacttgttcgaggactcttgtagtgctttgatttgtttgtttctgaaaacactcacataccttaccaactgctgggagggtgggactgatccagttcgtttgctgaatgaatatttgtttaaatctgtacagtttcacgtgtttacttatacagagtgtacatactttgaaataattaatttaaaatgctttatattatttagctagaaattgctgtttttaataaataaatttttttaaaaaataaagatctttgcttccta

SEQ ID NO: 539208 - DNA, 208 bp, Homo sapiens
tatgggaagggggggaccctttggggggccccccggggcctggacctatgcaggggggccacgtcccccccccccttttttttttgggtccctgcccccctttgggggggtgtgggggtgttttaattttctttttgggaaaattgacaaaaaaaaaattggggggggggttttttactgcaataaaactgccccatttggccccccc

SEQ ID NO: 539209 - DNA, 113 bp, Homo sapiens
tagcacttgtcccgtccggagtcacatatgatgcgactagtgcgaaccgatcgcataggataagccagactctggctcaggatctccagctcatgctcccgagtagccggact

SEQ ID NO: 539210 - DNA, 107 bp, Homo sapiens
gaggctgggcccagattaagatgtcaataaacggtgacaactttcaaaaacatcaagtctgtgaccgaactcaacggcgacataatcaccaataccatgacattggg

SEQ ID NO: 539211 - DNA, 816 bp, Homo sapiens
tccacccgcgtgttcaaagggcctggttgccccttctgggtattcggaccgagagttggcgcgccaatatctggttctcaacttattgagacctagtggcgggccaattgttgccccgatgcgtttagtgctaatccccgttgctccagcctggcgttgtgccgctccccccgcgcccgattgtggtgccgccggagatcctgcgggcgacgacccaccaggttgtgtctatcctgccgcacccattgagccccatgggctcacgcttgttcttggcgcttcacacccttgtcaacggaatcgggttccattgtcccccccctcggaagccgctgggcgctccacagacgcccacaagacgtggtgtacgcctgcccgtctccgcgcacagagtgaggctgtccctcatcattcagacacacctcggcagacactccgagggggtgacagtcccctcgctcgacgcgccagccgtgccccccgcctgcttggaggggggaccacctgcgagccgaggcgtggacccctctcgctcctcggcggagcacatccttgggcccgcctgcacgccacgagagggcccggcgccccacatggtttgtggcaccggcgccgcctattcttctccacggccaccgactgttcacacgccggcgccatgacgcgatcacgcacgcgattttgctgcgggcagcatcggtggtctaggagcactgcctctggtggctcacgctcctcgggcgacgacgttgccctcctcgctcgacccctcgcgtcaaggagaaaaaaattagcactggcccccccacatagacg

SEQ ID NO: 539212 - DNA, 213 bp, Homo sapiens
agaccttggagagacaggttgcaggccagactcggagccggcgccacacccgccagagctctgagccccgaactgctccagggcctacaacggcagttttctacatgtcgtgaaatttttggatgccgtaagaaccatcacagacaaatggttggtgctgggaccatcatgtgacagatcgagacatgagagcattcaggaattgagcatgca

SEQ ID NO: 539213 - DNA, 580 bp, Homo sapiens
agaggtattctggtttaatctcagaaagagcaacccagaactgttctccctatttttgcttgtggcaaagttgtattaacaggtgctaaagtcagagcagaaatttatgagacctttgaaacatctgtccctattctaagggattcaggaagacgacggaaggctctcatggacccgtcctcccccgcccccttcttttttttttattaacaaacaaggttgttttgggacctttaaaagggggggttgtgaaaaaatggatgtttagttgcagggtgtggccccaggtgatgcccttttgtaagtgccccccgcgggaaaccgggaaggggcattatttgtgcatttagaaccccgggcagggtgactgtgagttggtcaaaccgggatgctatttgggaagcgctgcccatttatttatatgtggattttaaacccggctgttgtcaagttgggttgagggagaaaactttaagtgttaaaaccccctttataattgattggactttttaattttaaaggttttccccaaggaccccagtttttatatttttaccagaaaagtaaaaattttttttta

SEQ ID NO: 539214 - DNA, 383 bp, Homo sapiens
gtttcatctgtctcctcttatcactccagcctaggtgacagagtgagactccaactaaaagaaaataaataaataaatatataaatatataaataaataataaaagtaaactattgctgatgactccagggtcaatctggaaaaattaacagtattcctcaactccattactttctgcagaaagtaatggagttgaggaatactgttactttctgcagccaagcttgattccttgaattatagttttctaagaaaaaatagtttttaataatctaaggtaaatttgttgcaattattagcagcagcataataaggctttttgcgcaaatgaatgttattaggctagggttattccaaaaaaggaatgaaggcacaatttttgc

SEQ ID NO: 539215 - DNA, 445 bp, Homo sapiens
  misc_feature (26)..(27): n is a, c, g, or t
  misc_feature (146)..(146): n is a, c, g, or t
  misc_feature (149)..(149): n is a, c, g, or t
gaaatacccaactccaacctgctctnncctttctgtctcatctaagggggataaaccagtacaaaactcagaagcacttgtgagggtcacaatttcactgaaagactgagacatactcataagattatgtgatgtttcccctcccngcntatcttaccccagcactagagatcctgaatagttaggggagaatataactgaaagaactgtgtgtctcaaacttcaagaagtctctaggataacccaaaggcaacaagggagaccaaaacaagggcgctggagacattttagcctctgatactgacagctgcagcaaacagaaaacgcagcctaaccgcgggccagataaaaacctcacactaaaggcctaactatcagttccttttaaccagtgcatcatgtctcactttcaataaaatgttaccacacgttctagacacacaaa

SEQ ID NO: 539216 - DNA, 239 bp, Homo sapiens
ccatgtggtctgtagaacgtgccctgacacattgcgaggatccaccttcctcatcctcccaaaatgctttgattacatgcgtgagctattatgccctgcccagcctcccttttttaacctgtgaaagttttgtccagctacctcatttttaggctttgtttgcaggtagccactccagtcctgactttattattctccactctttcctagaacccactagaagctgatcccatgactaa

SEQ ID NO: 539217 - DNA, 117 bp, Homo sapiens
actgcgtatcaccacctgtcttccccatgctttcttctaaaaataagttggaattaattttagaagaaagcattaggggtaggcagggtggctcacgcccgtaatcccatcacttga

SEQ ID NO: 539218 - DNA, 652 bp, Homo sapiens
cccccagcaaaaggaaaaaaaccgccaaaaaaaagggaaaaaaccggtcctaaaaagtttcactggggaaaactcacttaagagtattttcaaaacatacaatttgcaaaaaacttggggagtattttgtgaagagctaaaatttttttaaattaaaaatcaagtgaaaacccaaaaactttaaaacacgatccgaatttgtgcaatttctaagtatcaaatttgttctcccttcatttaacaggtgttatcagtctctcctcctgtaagattctgtccttcccctaatgacaagccaatagttcttggtggggttgcatgtctcctagagccccaggacccctgtcatgtggggaaggggggagggcagaagggtgggcaaaaaccagggttgagggagggagttcaaagaaaaagtgaaaatatgggtttatataaacatatttaaaacagtttagcaaaagctttctcgttgaacagctttaaaaacaatgtgaatgaaatcttagcaacttggttagtaatctgaaaagtctattaatggatacttgaaattctgtttggataaaaatgcattttcccctttattttaacactgtgtaaaagaacattatgcatgtaagtggtttaaaaattaaatggtttaataccc

SEQ ID NO: 539219 - DNA, 250 bp, Homo sapiens
aaagacaaccagttctaagagcgagttttgccccgaggtgttgtcaccatttaccgagtgacgagcggcctgcctacaggcgtacaggccggcacagatctgatcctggccattcacgtgcctcaggacgtgccccttgtagttggtgggaatgccgcccatgttgtaatgcacggtggggaggacggggatcggctccttcgtgacgtccacgccagcgaagatcatgggtgtctctgaaatgccaggc

SEQ ID NO: 539220 - DNA, 314 bp, Homo sapiens
  misc_feature (97)..(97): n is a, c, g, or t
  misc_feature (167)..(167): n is a, c, g, or t
  misc_feature (204)..(204): n is a, c, g, or t
  misc_feature (212)..(212): n is a, c, g, or t
  misc_feature (237)..(237): n is a, c, g, or t
  misc_feature (276)..(276): n is a, c, g, or t
  misc_feature (281)..(281): n is a, c, g, or t
ttcggcacagcttggctcatctgcaacctccacctcctgggcttgagcgatcctactgcctcggccccccaagtagctgggaggacaggcgcacacngggcactcagctaatttttgtatttttcgtggagatagggtttcaccatgttgcccaatttggtctcganctcctgagctcaagtgatccgcccgaccttggccttnccaaagtnctgggattacaggcatgagccaccntgcctgggccagaaaatttgtaaacacacacaaactctnaagtnggcctaattccctctcaccaaaccaattcacaa

SEQ ID NO: 539221 - DNA, 119 bp, Homo sapiens
tatactagtctgcacggcggcttccttccttgttactgtccgatagtttaccacatctttgcttggaaaaccccttcgagaagcgccagaagaacatgtctgtacacctgtccccctga

SEQ ID NO: 539222 - DNA, 1018 bp, Homo sapiens
gaaagaattcacccaatgtttacatcaagaatttcggagaagacatggatgaatgagcgccttcaggactctcttggcaagtttgggcctgccttaagtgtgaaagtaatgactgatgaacacgtggaaaatccaaaggataggatctgtaagctttgaaaggcactgaagatgcacagaaagctgtggcaatgagatgaaccggacaaggagctcaatggaaaacaaatatatgtaggtcgagctcagaacacaacggtggaacggcagacggaacttacgcgcaaatttgaacagatgacacaagataggatcaccagataccagggtgtaaatctttatgtgaaaacatcttgatgatggtatggatgactgaacgatctccggaacaagagattatactccaatagaggatgcaagacaacaaaatgcaaacaggtcaactacaatggcaagaagacgagaacgacacaccaaaaggggaaaacgagaacaggacaatgaagacatacagaaacacagaaagacaagccaacaaacaagaccaaaaaacagaaaaagagaaacgggagagcaaaaagaaggagcacaaaaacaaaccaaaaaaaaaagaaaaacatcaaaaaacatcaaaagaaaaaaagaaaaaaaaaaaacaaagggaaaaaaacacacacaaaaaccacaaagaataatgacaagacaaaaatggaacaaagagaaaaaaagagagagaacaaaaaaacaaagaaaaagaaaagcaccataaaacaaaaaagaaaaacaaaacaaataaaagaaaaaaagcaagcgggcaagaaaaaaaacaaagaaagaacaacaaaaaacagtgaacatacaaaatccaaacaaaaacatagacaaaaaaaggaacaaaaataaaaagaaccaaaaaaaaacgacaagacaagtgatcaaaggaataccaaaacacaaaatagaatacaggagaaaaaaagacaccggacgaagaaaaacgaacccaagaaagacatac

SEQ ID NO: 539223 - DNA, 418 bp, Homo sapiens
tcctccccctttctctctaaggatgggccagaaggagaagctcctacccctggccctacggccgagcagacggctccatgctgggcctgaggcaccgctgtcccgcaggcgagtcctcacggagaagagtccgtgtcacctccatcatgcagctttgcttccgtcatggtagacctgcttccaaatgtccgagcgcgctagctagcgtgcccgctgggacagaaggtgatggagaatagcatgtgggacaccgcgacatcttgaacggcggcacttcacaattgatgagcttgtgagagttgggcgtccgtctggggcagagagggcaacgttgtggaagacgtgtagcttggcgtcgggagaagacaaggccatttcattcgtggggctcgaagggtcctcttcgaagttcccacga

SEQ ID NO: 539224 - DNA, 662 bp, Homo sapiens
gagttactgagtttatttattttgtttgtttattttttgagacagagtctcactctgttgcccaggatggagtgcaatggcgccatctcagctcactgcaacctccacttcttggattcaagtgattctcctgcctcagtctcccgagtagctgggattacagctgcccatcaccacacttagctaatttgttttttttttttttttttaatagagccggggtttcatcattttggcctggctggtctcgaactacagacctcaggtgatctgcctgcctcggccttccaagatgctgggattacaggcatgagccactgcacccggccggaattactgagtttagatcatacccatttactagacattctcatacatctctccagtgtggttttcttcatatattttcccatcacttctttttgaaagttcctattttgtaacatctttatcaacatttagtattttcagtctttgtaattgctgtaaatcccccaaatataaaatcgtatcttaatgtcgggtttatttgtccttctttgatgaccaataaagttaaacatctttttttacatttgttgaccatttaggccttttcttttctcagtgattgttcattatttttccctattgtcaatagaaagttgtatttaaaaaaaaaa

SEQ ID NO: 539225 - DNA, 140 bp, Homo sapiens
ccgaacatcctggaatagctgccaatctctattactaaataatttacagtatgataatgacatactgaaacatttatccagacgagtaatgcccttgtacgattcagtgactgcttgattaatgtgaaggttgagaggga

SEQ ID NO: 539226 - DNA, 847 bp, Homo sapiens
  misc_feature (98)..(98): n is a, c, g, or t
  misc_feature (126)..(126): n is a, c, g, or t
  misc_feature (181)..(181): n is a, c, g, or t
  misc_feature (230)..(230): n is a, c, g, or t
  misc_feature (244)..(244): n is a, c, g, or t
  misc_feature (251)..(251): n is a, c, g, or t
  misc_feature (298)..(298): n is a, c, g, or t
  misc_feature (304)..(304): n is a, c, g, or t
  misc_feature (316)..(316): n is a, c, g, or t
  misc_feature (319)..(319): n is a, c, g, or t
  misc_feature (324)..(324): n is a, c, g, or t
  misc_feature (335)..(335): n is a, c, g, or t
  misc_feature (342)..(342): n is a, c, g, or t
  misc_feature (347)..(348): n is a, c, g, or t
  misc_feature (363)..(364): n is a, c, g, or t
  misc_feature (378)..(378): n is a, c, g, or t
  misc_feature (451)..(452): n is a, c, g, or t
  misc_feature (467)..(467): n is a, c, g, or t
  misc_feature (485)..(485): n is a, c, g, or t
  misc_feature (497)..(497): n is a, c, g, or t
  misc_feature (505)..(505): n is a, c, g, or t
  misc_feature (517)..(517): n is a, c, g, or t
  misc_feature (521)..(521): n is a, c, g, or t
  misc_feature (531)..(531): n is a, c, g, or t
  misc_feature (591)..(591): n is a, c, g, or t
  misc_feature (606)..(606): n is a, c, g, or t
  misc_feature (642)..(642): n is a, c, g, or t
  misc_feature (644)..(644): n is a, c, g, or t
  misc_feature (651)..(651): n is a, c, g, or t
  misc_feature (847)..(847): n is a, c, g, or t
gactcagtgcctgagcccggccctgcagccccagccgcagtgtctgaaggccacctcccaaagggagcacgttgccttttcaaactcccgtgccgatntcctaagagcccctagtccaagcctctnagatgaagctgaggagccggcctaggatcccttcccagctctgaggacgggctgnagagctctgcaggtgtggattcaccttacgcccctacagcaggctcagnccttcccaccctgnccgatgnccagcagcacaacacggagtgagacaggatgccacggtgactgccgntccgtncgtgcacacacnagnggtgntcttctccccnttagacnccacnntgccaacccaagggnnaaagacagagaaancaggtccccttgcagatggctctcccatcttcctgcaagtcatctgtcacacacagtggcagcacatagcgtnnccttctttcagaaanattcctcttctggggctncagaaagctggnaaggccantagcagagcttnggtnatgccccagntgcttgggagctaacagctgacctttcgggaagcccacagacgctggaggaatctgagtntctccaaactgccgntccaccagtgcccttggacagccgtgcctgttcgcngntctcccntaagtctgattctcatcgaggcccctcgttctatgactgtgcttgcagaagagtaaacactctcggatgacgtgttctgggggagccgcgggaccctgtgaatgtcgatacgacgtggccattctttggcccagactacttgtacagcttacctgcaaggtggctacactgctgtctcaacctcccttgcattacn

SEQ ID NO: 539227 - DNA, 1020 bp, Homo sapiens
  misc_feature (472)..(472): n is a, c, g, or t
gagtggtgtggtcccactcagtcctcgcctccggtccagggtggtcttgcgaggagaggtccaaccgtgtgtcctttctccctccgttcccgggtttactgtgacccctagcttggggtattttttggcaaatgggctccatcccagagttttcttccagagattttgtggcggagatttctggtgcccagaatggcccccatgggagacacggtctcccttccccggtgtttttcctcccctctcccgcgccccttttcctccgcgtttttccccccttttgtggggttcgccccccgccgctccctgtgctgagagcaaactgttcgttgccgtgtgtggcgaaatgttcctccccctcctggttacgaacactcgttgatgtgggccccccctctttttttctactcttctggatactccccacctccttcttagtgttttccccgcgccgccccccctcgtggtgttnttggtagccttctctgagcgtatgccccccctctgtgggtccctcctttccttgtttctctgtatttgtagtaggacacccccctctctcgcgggggggtttccactccaccccgtggccccacaagaggctcctctctgtcgtgtgctaagggttccccaccattgtgctcccagagagagctctcccggaggcgctctatcaggcatctttttctcccttcattccctccgccccccccccccttcttatccacttgttggcgagagccgcgttctctcaggacagtgtttgttcttctctaagtggcccgcctttgagtgtgttgagtgagattgaaagcgtgtgtctttcttatcacccaatggtttcgtctcaccccttcccttcgcagggaaggggaattattttttttggcgcccccctgggttttttttttgcggcggggccccttttaattttatttttttaaacaacctttttttttggaccccctctcccccaaatttttccccggaatttggggcccccttaaaaatttaatggga

SEQ ID NO: 539228 - DNA, 369 bp, Homo sapiens
  misc_feature (345)..(345): n is a, c, g, or t
agtctcggagtttgagaccagcctggccagctgggaaaccccgtctgtacaaaaaatacaaaaagttagccaggcatggtggcatgcgcctatatcccagctactcgggaggcagagggagaagtgcttgaactctggaggctgaggttgcagtgagcctagatagtgccattgcactccagcctaggcaacgagggcgaaactctgtctcaaaaaaaaaaaatttagccgagttgtggtggcacattgccttgtagtcccagcttactcgagaaggctgaggcaagaagattcacattgaaccttggaagagcagggggttccaggtagaggcaaggatcacanccacttgcacttccagcctgtggg

SEQ ID NO: 539229 - DNA, 429 bp, Homo sapiens
tccaatcatctgcacgatttgcttcaatcacactaacattcatggaggagttaccatatgactgctgttacacttgccagctgtgagtctttgttagcttcaatgaaaattcagcttaatacatagacattcactgatgatcatgtcaggagccttgatcagaagactttcaatgtgtgttgctccacgtttgtagtaggcaagctatcaagtaaggctaagacagaagagtgtatctactgaagatgtgatctaagaattgccttctacagaggcgacttatattctgtagaaacctagctagccaccaaagatgttcacaataaaggatagcttatactagcaaataaacatgtataaaagggcttagccaattagagtaatattcatgagtacaagcataataggttacttgccttctccagataa

SEQ ID NO: 539230 - DNA, 153 bp, Homo sapiens
gatcattctatttgtcccgtctattgcatccccaccatccaaatatctcatcaataaccgatctaagcgccagcctaacaatatcaaccattgcccttccctctacacttatcatcttcaaaattctaattctactgatctactaggaatggg

SEQ ID NO: 539231 - DNA, 202 bp, Homo sapiens
gacggacccacagaagaccccaagtagccggagcaatactgagcaaagagaacagagctggaggcctcacactacctgatttaaaaatatactgcaaagcggccgggcgcgctggctcatgcctgtaatcccagcattttgggaggccgaggcgggtggatcacaaggtcaggagatcgagaccatgctggctaacatggtg

SEQ ID NO: 539232 - DNA, 976 bp, Homo sapiens
gactcttacgaagggacggggccccacgctgcgcaacgccgacggattttgctcatggcggatcgcagcagcaggactggcggtggtgggctggcgtccctggagtcaggcaggattccagtgcatgttccgggcggcggaccacgaggccctagcatgtgaatgcattcctgactattatgtggcatgcatacagcactggataacaagcatatgataaagctgtggacgttcgtttatagcatgctcgtcaaagaatggtgacatttgtgaaacttcgggtaaaccaaaaaccacacctaacaagcaaaacctgctaagcacagcaataacaagccaaaagcaagaatactgcagcttccttacaacagtggacaagttggggacaaatgttctgccatttggtcagcaagaacggttgcatttacccagctaccattgcttccaatatgatattcaagaggagaaacctgtgttgatggttataacactggatcatggaaatcagagaggagcaaaatctgtccgatctaatttacccaatctgtgaagtagctaataatatagaacagaatgcgtcaagagaatgacaatgaaagccaagtttcaacagatgaaagtgagaactccaggtctcctggaaataatcagataacatcaaggaccaaaatctgctccaatggacctcctttatgctccatgcagaagccccatgcagggccaagactgtgaccaggaaagcaaggtcaaaatcatggaccaacaacgaaacagaaaacagcacaacgacaataagaacaatgaggcatgatcccatagacgtccggagcgcgcaaaataaccgcagaaccacccataaggtacagaatcacagaagaaaaacaagggggaaagaatgataagaacagggacaagagaggaatacaccagcgcaagagatacaacgacggatagacgcagaagtgaggacgaaaga

SEQ ID NO: 539233 - DNA, 401 bp, Homo sapiens
agaaacaggcgggcccggtggctcactcctgtatcccagcactttgggaggttgaggtgggcggatcacctgaggtcaggagtttgagaccagcctggccaacgtggtgaaaccccatctctactaaaaaaaattacaaaaattagccgggagtggtggtgggcacctgtaatcccagttactcgggaggctgaggcaagagaatctcttgagctcaggaggcagaggttgcagtgagctgagattgcgccactgcactccagcctgggtgacagagggagactccgtcccaaaaaaataaaaaagaaataaaatcaaataaaattaatgacagcaacaaaatgacagcaatattaataagagccgctaagctttatcaacccttactgtggttcaggatg

SEQ ID NO: 539234 - DNA, 373 bp, Homo sapiens
cacaatttttccggcccccccgggggtggggggggtttccccccccaaaaaaaatggggggttaaaaccccccccccccccccggggttgtacccggggcctccccccctttttaaaggggcttttttgttttttccccccccctatttttggcccggggggcgcttccccgtttgggtttttaaggggggggccttttttttccccccccccaaggggggtttgcccccccctttttttaaagggattttttccccccctgggcccttgggggggggggggggtttggggtttcccccccgcggggggtttttttttgccccccgggggggggggggggggtgtttttttcccctttttcccccctttttta

SEQ ID NO: 539235 - DNA, 264 bp, Homo sapiens
ctgcaggggtgagggttttatccccagtctgaagatcttccgtatgccatgggtgtgaccataccaaaaaatactgttattctcttttttaaaaaactatgtggctgtatttcttcttttggtaggctgtggcacagttaattagcatgggaagtacccgtaatcagggttaccgaaaaagagtaataactattatactaacactactcacaaaggtaaccctagactccctactcgtactaatcgcattctgactaccccaac

SEQ ID NO: 539236 - DNA, 685 bp, Homo sapiens
  misc_feature (354)..(354): n is a, c, g, or t
agagaacaggacttacagggggcccagactcaaactatactacaagggctacagtaaccaaaacagcatggtactggtaccaaaacagagatatagatcaatggaacagaacagggccctcagaaataatgccacatatctacaactatctgatctttgacaaacctgagaaaaacaagcaatggggaaaagattccctatttaataaatggtgctgagaaaactggctagccatatgtacaaagctgaaacttgatcccttccttacaccttatacaaaaattaattcaagatggattaaagacttaaacgttagacctaaaaccataaaaaccctagaagaaaacctaggcnttaccattcaggacataggcgtgggccaggacttcatgtccaaaacaccaaaagcaatggcaacaaaagacaaaattgacaaatgggatctaattaaactaaagagcttctgcacagcaaaagaaactaccatcagagtgaacaggcaacctacaacatgggagaaaattttcgcaacctactcatctgacaaagggctaatatccagaatctacaatgaactcaaacaaatttacaagaaaaaaacaaacaaccccatcaaaaagcgggtggacatgaacagacacttctcaaaagaagacattatgccgcccaaaaaatgctgaaaagc

SEQ ID NO: 539237 - DNA, 267 bp, Homo sapiens
gtggtgtaccgtagcctcactggtccatctccgtctcctttgtcagcgcttcctcttccatcagctcctaagtgctgggcttccttactgctctttcctcatcctgtggccagaaagcaatcatttaggtccagcccaggttcagtgggttggggtcacaccaaggccttgaattggaaaagatgggcttcgttgaagggccatcttatgaaaggccctccctgtggtcttggttttctccatcccagggtaacaaccacaagaacg

SEQ ID NO: 539238 - DNA, 697 bp, Homo sapiens
ggcctttcaggcaggggtggcaaccaattatatctgaggaccaggagccattttggggcaccagagctagtgagctctccatctccaccgcagactgggtccagagcgccacatctcagcactcacctcatcaggctgacatcataaagcaaacttgggaacctggaagcactctggagaacctttccctgagacatggatctttggaggccgaatgctgtggtgccctcctgtcgtggcccagcgatgaggaggggaaagtaccctggggcatgggccttcagcttcatggcaaacactaacctacctctggctggagttactctcagtgccactataactgcgtcagctcactggactggaggctctttgacgaacgaaggggtatccctgaggcccgggaatccagtgagtacatcggtggatcatgtccttggagccgaaagcatttcagagtcctgaggccggcacttagtgacccagtgccttgacctctcatgcaactacggtgtatccgaggagctgacgatagccggtcgatctgcatgcgtgatagccggtgtcagacacataccttggaaggagtggtgacttccatgggctcatcctaaggataggtgccccccatgtgtgtattaccgaggccagaagagtctaggaacttggttgacgtgggctgttgcaaagaattgtgggc

SEQ ID NO: 539239 - DNA, 697 bp, Homo sapiens
  misc_feature (70)..(70): n is a, c, g, or t
  misc_feature (204)..(204): n is a, c, g, or t
agacaaggttgtccaagcaagatgaaggccctaagcatcgactcgttgtactttcctcgtgcctcctcantcttgggagaacggcaaagcagtcctgtgatggggacataaaatagtgtggatcacaaaatggccggattacctaagttgatattttacccatagtttccacagctggaacaaaaggggcctagcactcattcntggacacaatataaggcaatgctaacaaaactgaagtcacaaaggcaagttattttctaattccaatacaccatgatcatcgttagagtgccaatagatctatagagccatgtccctgaatactagtacagcgattatgcatttgaactgccactagcaatatagaacgacaatatatactcaacaatcgtacgatcggtaggctggacacgtcaaacacaactgactccattacacctaaagacatgtaaggcaagttagacctatgtaataaatcgataaaggtcattgttcaacaggggttacggtatacgaccgataaatggaggcaatagtcttcgtcgatgggaagcgaacgagaagagtctcttgctcaaaggatcgaggggatgtagtcccattctggcatacatggcgacacttatgccagtccaaataggtcaacacacatgtaagaacacggctgaaggggttcaggggactaggtaaagac

SEQ ID NO: 539240 - DNA, 562 bp, Homo sapiens
tatcgcttttgccaaatcccgtagattttgtgtttggttttcatttttttcaagaaattaaaaaaaatttaattaagtttctttattgacctattcgttgttcaggagcatgttgtttaatttccatgtatttgtgtgttttcagaggtttcccttgctactgatttctaggtttattctgttgtggtcagaaaagacagtttgccgtatgattttcgcttttttgaatttgttgaggcttgtttcgtggcattgtattgtctgtgtatttgattttaccagtagcttttatatttttaaatattttcttttttgtacattatttgtttttctttctgattgaagaacttatatcttacattcctgtaagatgagtctggtggtgataaattctctcaggttttgtttcttaggaaaaaaaaattctctctccattttatttgaagtatagctttgctagagacagtattcttgcatgtcagtgtttttgttttgttttgttttttatttttattttcatcactttgaaaatgttgtcgccctcccttctgtcgtcttctcg

SEQ ID NO: 539241 - DNA, 133 bp, Homo sapiens
tgattctagaggatcccgacagcacagaggaggcacagaggaggaactggtttgtatgttttgcttacccgcagtgctggcatggtcacagctgtccaaccatgatccattcacatgctctggcccctgtgcc

SEQ ID NO: 539242 - DNA, 383 bp, Homo sapiens
actttctttatcatttttgaacacttgttaacagattcgcacatagagggagagaaaaaaaaatggagtaacagtcaaaataataataatcagtatccaggccaggcgtggtggttcacgcctgtaatcctagcactttgggaggccgaggcggatggagcacctgaggtcaggagtttgagaccagcctggccaacatggtgaagccctgtctctactaaaagtgcaaaaattggctgggcgtggtggtgcatgcctgtaatcccagctactccaggggctgacacaggacaatcgcttgaacccaggaggcagaggttgtagtgagccgagatggcaaccctgcactccaacctgggtgacaagagcgaaactccatctca

SEQ ID NO: 539243 - DNA, 246 bp, Homo sapiens
tgcatgaactcaatgtgattcccctgccgttggcctatcgaaagtgctgggataacgggtgcatgatgtacctcacctagcaccgcagctcttgtttacatccataatgagcttgtggatctttataatatatattcaggtgtgtgtgtgtgtgtatgtgtgtctctgtatccatgtggtacatgctgtctgtttaagaagcgggcactctggctcctcacagagcatgaaaccgccgtgttacga

SEQ ID NO: 539244 - DNA, 201 bp, Homo sapiens
tatctgactggctaaggacgatcagctgaatgtacatgggttttatgtgcttgtggctcactgaagcttacgtgaggattcccttgcaatgagtagaatttcccttctactcccttgtcacaggtttaaaaacctcacaagctagtatactgtacccatttgcggtccgcttttaacttgaactagtgtaactccttcatg

SEQ ID NO: 539245 - DNA, 116 bp, Homo sapiens
agagcagaggcccacgaggcggtccgctggcaggctggtcctggagagcattctgcggacccggtcacgggcttggtgaggcatgcgaacatgtgggccttggggtgctctgcact

SEQ ID NO: 539246 - DNA, 355 bp, Homo sapiens
ccacattcacagccttggcgcctatagagagagctgtgagcacatcagtacctgccgtaacaccctatccgagaaacactgccaccttccgttccgatagcgtcgacaatttctgacataacttcaatagtgactggcctccaataaagttgtcgagccccatgatgccactccaagaccccattcaagccatgtttaacagcctcggtggaatcttcacctctcaaaatgcccttcgcaacattcggcagattatgccggtcagtccagccatttgatccttgccattgataacctcaggagagattgatagagtgctggtgtctgtatggcacatcctgagatgtggcgacag

SEQ ID NO: 539247 - DNA, 425 bp, Homo sapiens
gacatctgttcctccgaaggcaagccttctatccagaatgtctaaactagctatttatcaagccattttcattagtacttgataacagccacgagtcccaaaacttttagcaaataaaataggacattggcttgattgaccagagggacttcttacacattgttctttcgtcagaagccttttggatgaattacaatagctctgatgaaaataccaccccagcgtcagtccaataggtcagtgagcttcaacaggcatccatccctcccatgaagggactctggtgatgggaagtttctgtaatgacaggaaagcattgaccctcattgattgtcaactttggtattagccatgaaagacaggatgctcattgggtgttctgtaacgtgaggaatgctgcctataccctcccagaacgtctgacc

SEQ ID NO: 539248 - DNA, 151 bp, Homo sapiens
gatgtgaccgcggtctacagtgctgtctgcgtgatttctgttgtccgcgagctttgctgctgtgaggagacccagccctaggccacatactcctcgcagtcctgcagccctctgtaaactccctccctgtgccctgcccccccttgtccag

SEQ ID NO: 539249 - DNA, 290 bp, Homo sapiens
ggggtgtctggcatgtttctcctcctagctctatctactgcgcacacagctgcctgcctcgccagatgcaggtgggcgggcagccctccctggctgccaggaggtctgcatgcccacagtcctgccctgcctctcccctcaacccggcagtgcctgtagcactgaggagcacagggggtgcatggggggcttggagcagggcggcagcccactagcctggcgatcccatgtttgcacatcttctgcactgtccccttgcttggttggcagcgtgcaccagggggcatcct

SEQ ID NO: 539250 - DNA, 356 bp, Homo sapiens
  misc_feature (52)..(52): n is a, c, g, or t
gtagattttcacaagctgtcctgttcctcaaatcgctagctcactgacgagnttgcaagggcttgattcgagcacttccgaaggcgactgtgagccagagcacgacaccacggtaaccttccatgacagttgacgttcatgccaatggaatacggcacgtacgggagaaatcccagacagtggccgagacgatgtctgcctctggccgtcttgactggtcatgagcatgtcgcggttggcgggtgcaaaaatcacctataacgacgacgccggggaaaccggcagggtgacgatcgtgcgggagatgtcggtattgggagctcgggtagacgtcagtatttaccgccgtacccggg

SEQ ID NO: 539251 - DNA, 186 bp, Homo sapiens
gcggccgactactactactactgctcgaattcaagcttctaacgatgtacggggacatggcccgccttgtggccacccctcaccctgacaccgacgtgttggccacccctcaccctgacaccgacgtgtcctgtacatagattaggttttatattcctaataaagtatagcgggagaggcaaaaaa

SEQ ID NO: 539252 - DNA, 684 bp, Homo sapiens
  misc_feature (645)..(645): n is a, c, g, or t
cttccgctgaggtgattgcaggcctgctgcagagcctgggtggtcagaggccggtgctagaggcagatggacgcaaggcgtttgctgacagatgacggggtacaccggactaacactgcaggcgcccatgactcctactgctcctatacctccagtcaggctgtacggaaggctagccttgtgactgagaggcatcagactagctggcacaggtgcatgctggacagcaggcttactgctgtacgatacctagttggagcaaatagagtgccagcggaacaaggtaccctagggatagcagagcagtactattctagagtccatatcaacaataggtgttacgacctcgatgttggatcaggacatcccgaacgggcagacgctattaaaggctcgcttgttcaacgattaaagtgctacgtgatctgagttcagaccgaagtaatccaggtcggatactatctacttcacatgcctccctgtacgacaggacaggagtaatactgcctacttcacacagcgccttcctcgtacatgatatcagctcaacttagtattatacccacactcatgcaggaacagggtttaagactaaggctaacaactcgaggggggaactgcccagtacggcctatagtgagccgnattacagttcactgtccgccggtttcacgttctgctgtg

SEQ ID NO: 539253 - DNA, 427 bp, Homo sapiens
aaagcctaaacaggaacaacttcatcccagtgttgatgttggacccatagatggtgatggccaaggtttaaaaccccttattttccaaaactaaatctaaaaccccaagtaaaccccaatgctcaaagttagcaaaatttggagccattccggaattgcaaaaaaatgccttttcaccaaaatcaaaatgttttttttgtaaactaaatcccctaaacaaccgtgtttcctttgccgtaaacagtttttaaaaatccaatggaaaaaaccactgaagtcccaaaaaaaaaaaaagtaatttttaactattcccataaaactggaggaagaaagggagttttactaaaattccttttgtttgtttccaaatttccctaatggatatagggccaaaacccccattaaaaaggggaatgtggagggccta

SEQ ID NO: 539254 - DNA, 432 bp, Homo sapiens
  misc_feature (100)..(100): n is a, c, g, or t
ggatcccccccgttacccccgttcctagcatttttcctagacccgtaagataagctagtcctattattattatctactagttcattgctacttcgtgtcnatgcaagtattatcacaattagtattataccttgctagccatcttagggattcatagtacagaattgctagagtacaaaaagtctatcgttttatttatttatttatttatttatttacggacggggtctcatctctagtcatacccaggctggagtaccgtattataatcattgctcataggtaaagtactaacacctgagctcaagcaatcctcatacttaagcctctcaagttgcttggattacaggaaactatcatcattattttttttcattttttgtaccgataaggcctctccgtgttgccccagccgatctttaacttctatgc

SEQ ID NO: 539255 - DNA, 1224 bp, Homo sapiens
tggtaccggctcggaagtttcgggatatcgtcgacggagctgtaacaacgggctgtggcgcaggcgtcggtacgctgtcttccagatacaccaggcgctaaggtcgttggtgcgccgaggaaaccgatactggtataccggcgcgccggtcaggatcttcgctatatatagacgtcgaattactgaccggaagaatgtcacccatgcgggccagacactgaacttagtatcccgcgccaccgcttaaatcgggaggtgcaggcagggcgtaagtctagtattgagcgactgtgcgtacaagccataccaggaccagaaagcgaaccatacctgggcaccacataatcggatcgatacgaactttggtgtagtaatgacgtgttaacgacggtcagctgccgcagcgagaaagtgaaataacgcggtcgttgccgtaagggccgcgatcattaatgcgcaccacgatcattcagccgttagccaggttaagtgattctggcgtaactggggatcagcgaagcgcttggctgggcttgccgtacagctgtgtcgggatcgaatgctatacgccagaggccgtccaggttactagccagggttcggccattcactaacattgacgcccatacccgcctgggtaactcggagagcgggcatccctggaacgaaattaacggcagccttaaaaccgctcagcagcagggttaatcactgcatatggcagacgcgctacaagtgggctcaacaacgcagggttcacgcaccgctaaaattacaacaaatagggcccgacccattaccagccaagactactatcaccacatacccgtctagtatcatgcaccactcaaccgctaccacccattccctaaccaacttcctcacaccaactccaaatccccaaaccattactaacattttagaacccatataccacacatacgccaacactatcctaaaccacacccaccacacacacaccacacaacccagctttcatataaatataatacaaaaccccacggtccatacacgtcccccttactctcccaaccacccacaacacacacgcccacaccatatccacccattcactaacaaaacaactcattattctatcatcccaacacatctgaacaaaaaatcaataacaaccgaatctagataccattactcgcttatacaataaatacaaaacacttcaacctagtacatatatccaca

SEQ ID NO: 539256 - DNA, 684 bp, Homo sapiens
ttggccctgtcggcacaaatgtttcaccagtcggcatatgtccaaagcagcagccccccccccattttggccagccttggtgccctcctggtcctggtaaggcccccagcaaaattcagggggtacctaaacggattttctgtcttttggtgcaattctgtatgggcatgaaatgcaacctgcagtctccctcccaagcaggattccattgatggcagccccaataggctttgtgcacttttcacgtttctcaactattctctgtgcttcttgtgacagctgtgtccttcatgaaaggtctgcaaagcggataacatgttgatatcagcacctgcaataaaacagcatggctttgatgagataaggacggcacttatgatttgatcactagcccagatgtcattcatagcttctgacaactctgaatgtagctctttactcagtgtatttacctttgaattgggagagttaattcgaacagctgccacatccccttagactccatagttaatatgggttgtggtcagcaaagcagaagaccatgtaaaattgcggcatatataacctcgggagcggaggatcctgaagtcagaaaagcggctgaggatgccaatcgccggccaggccaccatcttagcttgaaaaggccagcagtggagagggcctttaacgggtccgccggag

SEQ ID NO: 539257 - DNA, 104 bp, Homo sapiens
gagcgtacacgaaattgaggactctgtgctggccaaagacacctttaccactcctggaccaccctacgccctggcagtggttgatgtgacaaaacgacatgttg

SEQ ID NO: 539258 - DNA, 285 bp, Homo sapiens
acagcaagagttaggggccttagggcactgggctgtggttccattagaagccgacgtctggccctggcccgttacttgcttctctagcctctctagggcggctccagtttggcacctgtgcgcccacccttgccacatcatgcgtgtcactgctaggcaaacacttccactcgctccatccttcgcatgttgtcccccgactaactgcaagctactctccaaggtcctgttgcgtaataggagccatacgctagtagtgtccaataaacaacgagcatggaagca

SEQ ID NO: 539259 - DNA, 150 bp, Homo sapiens
acagaaacatcatccagttttatggagtaattctttaacctcccaactattgcattgtcacagaatattcttctcttggatcactctattattacattaacagtaacagaagttaggagatggatatttatcacattattaccctggccc

SEQ ID NO: 539260 - DNA, 222 bp, Homo sapiens
ctcgacgattcaatccttcttcaggaactggaccttttgagaataaggcaactttagagattgaccctcaggacagacagctctgttactcagagataccttgtatagctctctagaatatagaatatccatagtatagatattttggagctccccatgatcctatgtaggcataaggtgtaggtagcggatgcgaagccgtcgcaggttcaactgcaggct

SEQ ID NO: 539261 - DNA, 338 bp, Homo sapiens
  misc_feature (30)..(30): n is a, c, g, or t
  misc_feature (76)..(76): n is a, c, g, or t
  misc_feature (199)..(199): n is a, c, g, or t
  misc_feature (209)..(209): n is a, c, g, or t
gactaaactctcagagtagtactaaactcngaaaactaaaggaaagaaataataaagattacatttaagattaacngagaataggaaaacagaagaatgaatgacccccaagtgttggctcctgtggtaagctcaacaaaattgacaaatttttcgcgactggacaagaaaaagagagaagactcatcttcccaatttnagggagaaangtgatgacattactgttatcacagaattaagagggattatagacatatactatgaacaattttagtcacaacagattagataattgagatgaaatgtcaccagcccctagagtgattgtaatgaactgc

SEQ ID NO: 539262 - DNA, 457 bp, Homo sapiens
  misc_feature (2)..(2): n is a, c, g, or t
  misc_feature (7)..(7): n is a, c, g, or t
  misc_feature (30)..(30): n is a, c, g, or t
  misc_feature (85)..(85): n is a, c, g, or t
  misc_feature (139)..(139): n is a, c, g, or t
  misc_feature (148)..(148): n is a, c, g, or t
  misc_feature (153)..(153): n is a, c, g, or t
  misc_feature (157)..(157): n is a, c, g, or t
  misc_feature (442)..(442): n is a, c, g, or t
cntcgcnagggtcggggactgctggcggtngcaggccgggcgtgggcgagacacgaacgggctgcctgcgggtgagagcgtcgantgtcaccatgggtgatcacgcttggagcttcctaaaggacttcctggccggggngtcgcgctnccgtnttcnaagaccgcggtcacccccatcgagagggtcaaactgctgctgcaggtccagcatgccagcaaaacagatcagtgctgagaacagtacaaagggatcattgattgtgtggtgagaatccctaaggagcaagggcttcctctccttctggaggggtaacctggccaacgtgattccgttacttccccacccaaagctctcaacttcgccttcaaggacaagtacaagcagctcttcttagggggtgtggatcggcataagcagttctggcgctactttgctggtaanctggcgtccggtggg

SEQ ID NO: 539263 - DNA, 149 bp, Homo sapiens
tgaacgacgactccaggcggtgaggacaggcctgggtgggagaggggatattgaggggagctctctccccattcttctgcccctctccacctgtacccttatactgcgttgagaactagacgttccacacatggcactaaggtaactgc

SEQ ID NO: 539264 - DNA, 156 bp, Homo sapiens
gctcaaaggtagagggagtttattagttaaccaaatatcgttaagaggaatttactaatactgttaactaccaaagattatttatataaatataaggcttatattttaggtaacacttatctctaatatttttactacacagagaatatacactag

SEQ ID NO: 539265 - DNA, 525 bp, Homo sapiens
ggagagagagagaactagtctcgagttgttttcttttattcttttataaccctttccttataaccatgcctgtgtggggcttgacagtgagggtaataatgacttgtggctctgatcgctaaatatgggcctgttacattggtccattcacagtagtatttaatctgcacccaggcttatgcggccggacactgttatcacatgttacttatcctaaacataagtcctcctatcagggtgatagaatctggcccaatgggccgtgtcgccggagtacgcacgcaaaactagtcaggcgaaactattgtaacaaacgataggctgagggccagttaaagaatcactaagaacacccaccatgtaacgtatcccacagggagacggagcctagaactatataaaaggaccccatcctatactgcacgtgatacacacatttctaactacatcccctacatataccaagagctgccaagcccccataccgacacacccaaaaataggcagtgttcatccctattgcta

SEQ ID NO: 539266 - DNA, 403 bp, Homo sapiens
acacagcccctgaccctatgttggtgtaccccccaattggaccatccccaagggaattttgatttaagtccccagatatgagcaattgaattgtatcttcttgttaaaacactcagcataaaaggctgaaatgggcggatggtgggaaacttgctcagccacaaatgttacactgttcttagaaacccagggaaccggcccttctgaaacggagctctgcgttctcttcagtatcattcggcaacgtccagtgacactgaaagatctcacccaaaataggattgtacggctttttggccaccgatcctctccttcctgcatggaaggccgagaggtaccatttcacaacctgaaccattcgatccctgggatccttctgatcactaatgctcacgaacaggtc

SEQ ID NO: 539267 - DNA, 196 bp, Homo sapiens
gatccaatcacaacccttatcatgtgaaatctttagtgttgtgagcccttaaaagggacagaaattgtgcactcggggagatcggattttaaggcagtagcttgcgatgctcccaggtgaataagagcccttctacaactcggtgtctgagacggttagtctgtggcttgccttgctacaagctgagattgcatca

SEQ ID NO: 539268 - DNA, 287 bp, Homo sapiens
  misc_feature (16)..(16): n is a, c, g, or t
  misc_feature (113)..(113): n is a, c, g, or t
  misc_feature (115)..(115): n is a, c, g, or t
  misc_feature (123)..(123): n is a, c, g, or t
  misc_feature (129)..(129): n is a, c, g, or t
gccttgcatgcctcantcaagaaaacctatatttctctctcattggttgatcaaccaatatttggtattcttctatttgcggggcttttcctgctgatgccttgactgttttntntttttttnctgtcntggaggtgtttggatttccatgattttgttttctgttagaccactgcctgtgtctcgtcttgtttctctttttggaagcaagacccagataccaacacaacgatatggccggagaccatatggtgttggtctcctttttgctggttttgatgttatgg

SEQ ID NO: 539269 - DNA, 420 bp, Homo sapiens
  misc_feature (93)..(93): n is a, c, g, or t
  misc_feature (162)..(162): n is a, c, g, or t
  misc_feature (282)..(282): n is a, c, g, or t
  misc_feature (379)..(379): n is a, c, g, or t
  misc_feature (384)..(384): n is a, c, g, or t
  misc_feature (418)..(418): n is a, c, g, or t
cattgcccaagatttatttcctactttctttcccaacccaaagaatgtgaccgcccccacacatacacacccatggaatactatgcaggcatnaaaaaggatgagttcatgtcctttgtagggacatggatgaagctggaaaccatcattctcagcaaactntcgcaaggacaaaaaaccaaacgccgcgtgttctcactcataggtgggaattgaacaatgagaacacttggacacaggaaggggaacatcacacatagggcttgttgtggggtggggggnggggggagggatagcattaggagatatacctaatgtaaataatgagttaatgggtgcagcacaccaacatggcacatgtatacatatgttacaatanctctntgttgtgcacatgaccatagaacttaaagtatantt

SEQ ID NO: 539270 - DNA, 950 bp, Homo sapiens
gcgagtgctgtgtgtcgtcgccctgccgcgattaatctttggtccccagccggcttgttttgggcccgcttttttcacaactataggtccttgccgtccgaatatccgggtttccctcttcgccggggtgccaccgcccaaaagtgggtccaaagccgtctcctccctattagccgttcccctcttgtgttcgcgcttatacccattttcctattgcgtcctgtgcccggatgcgcgcttgctgagcaacggcgccccgcgacggtgcgttatgtctctcacccttctcccccctccggggaattttgagcgccttcttggatgatttcctgcgcgcgcactctatccttggctggtcttttgccgcgctcccatgccctagacgatcccttctcaataacccaggcgggggctccgattccgccccctcccgcggaaatcccatcggcgcccccccaatgggcctgggacccttccgggttctcccggctttgccgcggcgcctaattttctcacgtctcctacaaaacagttcgcccccccgtatggtcgtcgtacggaccccggcggacctgctgacctcccttgaccgtgtgcacccctctgggttgtacctccccgcgttgtgacgcgcccccccttctggatttattattaccatccccagactcgtctttgcacatcaagagacgtgtcccccacccatatggcgctttataaaccagatacccattctcccggacacttttaacacccaccacctttctacaccgctacaccgacccggtgtataataccgcgctcatgctctctgaaatctgtggacgcccaacccccacatgttcaacccccctggtccctagaatttattcccccttaaaatcctttgaaataagggcccccttttttccccttagcccccccctttcccccctttgaggttaaaaaaa

SEQ ID NO: 539271 - DNA, 133 bp, Homo sapiens
accaggtcactagattcacacgggctatgcttatggggccttttacgacgaccaaccgcgagcgcgggcaggtacacagattcacacgggctatgcttatccatgcttctacgacggtcaaccgtgagcacag

SEQ ID NO: 539272 - DNA, 406 bp, Homo sapiens
aacggggtctaggggtccctggctgggtggcagacccgaagccagcgctgggaagggctgtcggatgcccgggtcagaggaaggggcaggtccaaggacacgcgggtcgtggtccatgggcaatgaaccgctcgccctctccggtgcctgcttcagttcttccgtttgcagaacagacgggaccatggccccttcccgtctgtcaccccggggtgcttgaagtctagaccccatcactggtccaatgcgctcttgagtagcctccttatcccaggcatgcccgtcccgtcggccaatgccagacctatgacctgctcgcgctgacgacacttgctagactcgggcatggtgagctcgccagacaatatctcgcgtcaccatcccccggccttcctgcgtggagtcg

SEQ ID NO: 539273 - DNA, 752 bp, Homo sapiens
  misc_feature (551)..(551): n is a, c, g, or t
tcccgccccatgcgccgcgccgagagtgtctcgacgccccccaccgaggtagtccaaaagtctcgtataacacatgagagggtgcccaccccggaagagttgtaaatctcggtgcccccacaattcttgccccctggcccccccccaagattctggcccccccctggggtctctgttctcccccacaaaaaaagatttgtggtggaatgacacacttgccacaagagccacacccggggtgagactcgcgagaagggcccctctgagagcgagttatccccgtggagaagctcgaggcccccctttcacggactcacgagccacggccccacgcagttttgagagagtggtggccctctttctcgggcctctctcgcccctcgagttcactccctcaatggcccctctctcgcgggacctccccacgaggaccacggaatgagaacccacggaaaacccactttgaacacaccacgctgtggagaataatcacctctttgaatgagggattgtcaaccacttggctcgaccacagaatgcggccccgagtnccttatgcccgaggagaactctctggaacccttaaagagatcctggggactgccccgtcacatgggctgtaaatgttgatggcccccactcctcactgacatcactcgatgacatccaccacgtggtgctgtggaaatgcccacgccacgttaagccccaagggaaacatttccataaaggatcatttcaccactggtgga

SEQ ID NO: 539274 - DNA, 563 bp, Homo sapiens
cccggtagcgtattttaagagtaacagaaaatgtcttttttagagggggagggagccgctgggtaatctttgtgaacaaatcttctctctttggtgctgttcgccggctagagaaggaagtgggtgggatggagatggctcacgaagggatgatctggagtctggcttggcatcctcttgggcatattctctgctcaggctcaaatgaccatactagcaaattctggactcgaaaccgaccaggtgatcaaatgcgagatcgatataatctaaaccttttacctggaatgtctgaagatggagtagaatatgatgacctcgaacctaatagcctggcagtaattccaggaatgggaataccagaacaactaaaattagctatggaacaaggaaccgatggggaacgatgaatcaaatgaacttgaaatgacaattccaggtttagataggggaatggaggaagtgatgcaaaaggatcagaaaaaaagtactcagaagaaagtaccttatgcaaaacccattcctgctcagttccagcaggctaggctgcgaaacaaagttcc

SEQ ID NO: 539275 - DNA, 365 bp, Homo sapiens
  misc_feature (49)..(49): n is a, c, g, or t
  misc_feature (82)..(82): n is a, c, g, or t
  misc_feature (125)..(125): n is a, c, g, or t
  misc_feature (197)..(197): n is a, c, g, or t
  misc_feature (231)..(231): n is a, c, g, or t
  misc_feature (242)..(242): n is a, c, g, or t
tttgagttttatttatttaaatagtagttggatgcttggcacgttgttntgtaataggaaacctttgctttattagtttttntgatttataagtgtaatattttagttaatgctttgggagaagntgccatgtaaaggtggacaccattttccagctttaggggatatgtttgtcccgggcaccggtggaaggaagntggctttttggattaaggcagcttggggggacantgcagtttggntacacacagagatttggcaccccttgggtggagtgtcccttgggggttttgggaaagcatggcaccctcagaccacacagtagccaagttttggagcaaataaaaggcctgtgttatttttta

SEQ ID NO: 539276 - DNA, 875 bp, Homo sapiens
tggtggcggcacatcacggaacgggacgtacgaccgacgcgggatggctttaactcactggatacggcgaatatttacgtggatatcgataataacagggataagcgtttccaccgggatgcttgggtctataacggaggcgtacaacatcgggatgtaacaatcgcgcggtccccccgtcaccgcctttcttgtcgcaaaatatgaccaccaaatccgtatacatacgtgtgcgacatggaaccatagtccatagaatccccgctcattgtttaactcggtgaactttcgttctactccccgagagaacgtcaatggctcctcgtctcgcttgggacactgctctcagcacgacttcttcagtgtggtctttgacccccctcgtgcactctcgaggcgtcatttcaggtgggccaatgtgaaccactcgctagtaaatactcaagttgagagttgtcaatctgaagttgtaaatggtgaaagggtccttgtatcgcctcaactgccggacccccacaagaagccacgtcttcggatcgaatgctcttgcgttgcccgcttagttagtggctcagctagtggctgtcacgctggtcgtcgtaactcaaagtgcgtacagcaggacccagcatagctcgtgggagtaacatgaagacgggccagagaagaggaatgaagcatgcgagtggacatcctgctaaagaccagccttcaccccctagctccagcctcagtcggggccctagacgatgttttctcgttatacaagaaccaggtccgagtgtggcctcctcattccttccggaagccaaactgctccgttattttttagagctgctgattgattaatccggagggggggctacatgcaggaa

SEQ ID NO: 539277 - DNA, 329 bp, Homo sapiens
gtgccctaatccagtctgattagtgggcttgtaaaatgtgaaaatttaggcggtgcacggtggctcgcgcctgtggtcccggcactttgtgaggccaaggtgggcagatcacaaggtcgggagttcgagaccagcctggccagcgtggtggaaccccgtctctgctgaaaatgcaaaggttggccgggtgtggtggtgtgtgcctgtggtcccagctgctcgggaggttcaggcaggagaattgcttgcgcctggagggtgggggttgcagtgggctgacattatgccactgctctctagcctgggcaacaagagtgaaactccgtctc

SEQ ID NO: 539278 - DNA, 284 bp, Homo sapiens
acccgtggccagagcatagctggctcatgtcctgtaatccaatcactttggcgggtccaaggcatgagactcaattgcaacctgggacgtagaggttgcagtgagccaatgattgcgccattgcactccagcctgagcaataagaggaaaactctgtctcaaacaaaacaaaacaacaaaacctcctatggtggcaaaggaaacaagcagggccaatgcccagtggagctttagtgtcctaatgtaagagatagctacaccaacatttgtttttagcaactata

SEQ ID NO: 539279 - DNA, 514 bp, Homo sapiens
  misc_feature (125)..(125): n is a, c, g, or t
gccataatggacggggattctgggaatgaggagttttgacgggctctttaaggacccttgaactgcccgggggtgtcagggggaaggaaggagagaaattgcggacctgcccatggccactaatnaaaaccctattaacaggcggtggggaaaaaacacacaattcctgctgacttcccttatggatctcaggttggctccttttaatgaactttaatgggaaagagagtacccctccacagaaaggctggaattcttgaattctttacctttccataactatattgaattctttttttaaaaaaataaaaacccaaattccgcctcactttgtttctaaaaaatgttcacaacaaaaacacgtttgggctggttttaaattcttgaaaaattcaaaagcctttcaaaaagttaacggggctaaaagctgggaacccgttgggagtccacaagggctgcataaaccgggttgccaaagaaaattggaaaaaaacccccaaaacaactttttaaa

SEQ ID NO: 539280 - DNA, 1515 bp, Homo sapiens
tcgacccatgcgtcgcggagacattgggattctcgatgggggccaaggagcccccctggtttagcagtattttaatccactcatagtatgttggaacgagagaacaggagacaaagtatctcatgtccgataactagttattccgtcatccccatccgcttcatagctataccacgtgtgtcccagctgacatgctggcccagatcttcgcagtcatccgagtacacacgtcgagctgcctactgaccaaccgccaacaatcggtggcaggtggactgctccagactggatctggagcgttgagaccagggccccatagtgtgccacgcaccttggtgtgcccccattgcctcgtgccaccgtctgcctcgccttgagcctcatcgatgtgcacccaaagcggggccgttcaaggtagctggcttcgtggctgggcgatgggcgctggcacagggcacccgcaggggaaacgcatggcaatggctgcaacaacacagaccgagaaaaccaccaacgcccggagccccatgagcgaagcacaccaaaaccgggacccagcgcgcgagaggccaatccagcacagcccaagaggaaccacctgcaccgagcatcccaacacacagccaagcccaagtagataagcccaatacaacacaggggagcacaaaacatacaccccacaaaacagagaacgaaggacggagcatacagccatatggcagaccaacacaaatcgcccacaaaaggagcgccaaaacaacaacacgccgcagaacaacacaacagcacaatcacccacttgagcccaaataggagagcacaacccaaacaaagcaccaccacacagggaaacacgagacaagcaaccccaacgaaaaaacgccatgaactggacgaacgcattgcaacacaccaacggaggaagcgccgcgaacaaacagcataccgcaccgactgcgaacaagcaaccgcaaccgaaccagacaagagcccacctagctcaacaaaccccgtggaccgtgaggacacccacaccacgcacgtcgacaaccacgtagactctcacggaccaggcatcaaaaccacagagcgtagacccacgaaggcgaacagaggacagaaatggacaacacacgggaagagaacacaacaaatctaaccgaaagggaaaagaccagaaacgcaacctaaggctacgagaaacaacgacacagaaccagaaagcgacacacaccacacaaaccagcaacaacacgacaaacaacgacaccacgaatgacacatcacaataccgccaagaccagcccacacatgaggaacaaacagccaatcgaaccgcgacgcaaccgaacgccacaagcgcacacgcaaacacacagaacaaacgaaacaacaccaaggcatcgagaagcggacgaccgaccacccgcgacacatgacacatccacataagagagaccatagagcacagaccgccatcacgaaaaccccacccaagcaaacagctgaaccacc

SEQ ID NO: 539281 - DNA, 962 bp, Homo sapiens
  misc_feature (549)..(549): n is a, c, g, or t
gaatcacaaggtataatactatgtcacaaggacgtcagaatgagtttaaggagatgtctcagaatcaccagtcaaagcattgaggagattactaaagacgttcaacagcgagctcagaactcaagttaacgagaatcaggtatgtcccctaggtcgagcacaatcattgttcaccagaccgtcaggggaagctgattatctcttgaacatgtacagagtgaggctgaggaccacatcactttggccatctgaggagggccactggcacagagagatactcaacggacgttaaatgcaagatctcactgggtctccagttggcctctaagcaagcaatctaaatggaagttgcaatgccatctgctgggaaggtagaggaaaccctatggagcctcacggacactcctcattggggtatctcaaatgagttcttcaaaaaaacgctacttagatggtgaccatggctgatactacctatggtaaaacataagtcgcggtcctaccatacagtcacaggggatgcgccgatattagtctcgaaacgacagncaaatctattgggcactaattgtccctcttgaatgctcaggaacgttggaccacatccgcgcgtacatcgagagtgtcctaccttggtgcgagcacaaaaatcgcgtgtaaccaggaaccagtatgaggagaattccaggtcactccctccacaaggcatggaaatcgtcacacccgcgttcacactgaatgttatggtgtagaaacaatgtcgaaacaaggacatggggtccttgtcaattacgtacaagacgcgcgttggatacacacccatcagaagaacggagttccggcccggtgtatcccatggtcctatttattgtccgcaaattagtttaccacatgtaaccccagtaagttctggtaccaattacttgttggggaaactccttgcgatgaacggcacacaatgg

SEQ ID NO: 539282 - DNA, 153 bp, Homo sapiens
agatgtctgcctacgcaggcttgtcggacatacttctggtgggcactgtgcggaaacttgaggatgaaatcagtgagtctgcatgcatcttgaaacggcatggcctgtctcctcacttcagtgcaatgtccactcgaccaaagccctattctg

SEQ ID NO: 539283 - DNA, 192 bp, Homo sapiens
agtgtgaaaggaaggggatcaggaagtgatatgggaagggaaatatctgtgggagggctgcccctctctctcacaattatggcgtaaatgattaggagcttctgcagacacatgcatgcccctaatctctgcatccagggaagcagaaactggcttatattcttttccactcccatcttcttggggatcctc

SEQ ID NO: 539284 - DNA, 986 bp, Homo sapiens
gaaaacaccccgtgcattcgtctctatgctccccggcctgcagccttagctaggggcactcttggccttgtgcttgtagaacctatgaccttattgcattcactgtctctaagcctctgatatcattgaggttgcatgctcatgattgcacaggcccggtaggagaaccaccgcaagcagatggagcgttgctatgctagtgagacaacaatgatgaccgaaggaaagcgtgaacatgggcgagagaagagaagatagacaccattacttgaaccggtgtagaaggaggagtctggattggacgtatggtcgtgagagacacgatctacggaaacactgcgtatgaccagctcacgccggatccttggaggaatctcgtatgccgttagccgctctgtaagcgttggaggcgaaggcatgcggacctgcgttcccacgtcccatggttgatggagctgtcctcatcggaagtccggttctattgagagcttgaaagtaccgccacatggaaggtctttgcttgttagccctcgccagggcaacgtattacaacgacgtctaggtgaatcagatcggctttgagattaccttgtgccatcaagcctttgacccaagcatccgaaatcctccaagatttggatgatgggtcgccgaatcccgataggaaaggacgaagtggaggccttgtcgttaatgtggcctcctgtcagtggcacccaacttcggatcatccgaagcagctcgagactagactagtgcttgagctggacttattgagccgaattgttgttctcgtgcaactggtttcgctgagaattgggatggatccctgagttgtggaccgggccaaattcccaaagcaaacttgttgccctgactccgtgtccatttcctctggcaatatcgcctgttatgcggtgaaagcctttcttgaacgttttgtgcaaattaccagggggtttggccatccccattgggatttgctg

SEQ ID NO: 539285 - DNA, 127 bp, Homo sapiens
tagactctagagcacccctagcgtctctaatatataggtaaagctctaagactcctgagccaactttatatgtaactaggctatacctaggctggggcttgaactactgtacatgaagccaaggagt

SEQ ID NO: 539286 - DNA, 381 bp, Homo sapiens
ttcctcacacaccgcagcaaagagaagactgaaagacaaacctgggtgcagccagagaggtccagatagatgagcttgtggcatccattccccaagttcagcctaaggactccacataccccagctgggtctcattgttccaaaactgcattaattaagattacccagacttgaatttcaaaggaatactttcattgttccatctgtaacacaaagtaattagagccagctaaatgtcaagatacatataattaccattataatcttactctacttttacaaagcaactaacctacacaaagcaagcccaggcagtataagaagccgagtaaatcataaccaaacaagtagagacccagagaaactccaacccgatcaaac

SEQ ID NO: 539287 - DNA, 455 bp, Homo sapiens
agttgattaacatgcacaaaacatcatttaaaaatactaatttgggagtggtatcaagaatagacagaagtaggctaggtgaggtggctcacatctgtaatcccagcatttttagaaggccaaggcaggatcgcttgagactaggagttcaggaccagcttgggcaatatagagagaccgtgtctcttaaaaaaataaaaattaaaaaaaggccaggtgtggtggcacacacctgtagtcctggaactttgggagtctgaggcaggaggatcacttgagcccaggaattcaagaccagcttgggcaacacagggagaccccatctctacaaaaaataaaaaaattagcccaggcatgatggctcacacctgtaatcccagcactttggaatactgaggtgggtggatcacttgaagtcaggagtttgagactggcttggcccaaatggcaaaacc

SEQ ID NO: 539288 - DNA, 959 bp, Homo sapiens
  misc_feature (294)..(295): n is a, c, g, or t
  misc_feature (313)..(314): n is a, c, g, or t
gcttccttcgggactccggatcgactctggagctccgggaatttccctggtcccggccgctccgggctttccagtctcaaccatgcataaaagagggttcggcgatcgttggtggagccactactagcccgggtcgcgagggcacgcgtcccctgacaactctcccgcttctcgcacagcttcccgacgcgtcatgctgagccccagtggccctagcgccagcgctcgtctcggcgccccgcagcgagagtccccaggcgtccttgacggcgctgtgcgcgtgtgctggcgtgnncctggcgtccgtcggtgnngtgccggcggcagagcgcagggctgcaagcgacagcacaggaaggcagatccggataggatcagcgtgaaatctagcgctcgcgcagtagctttgaacgaacaccttgcgatgggcaatttgcactcgtcaagacatcgatccaaaggttgttgaaatcgtaacggtacccgcctggagccccattttgccgcccaatatcggaacgctcaatagtccacagctcaaggaatgggaagaaacgcttgtcgtcaatccccgcagtcccccagtggttcagaaatatctagtcgaaataggatactgaatcgaactgggatgcacacaagtgaacaggatgagaagtagagaacgctctatcagcgtactcacttgacagcttcctgcacgggtggtccctgaccttaccagagctgaacattgaaaaacgcagaacagcagcttctctagggagcagctgtgagaaggacttacatgtgtttggactatttcttaccgaggagttctactaatgtatgtactttagttacggaaacgcgttgtagtatttaactatcttgaacatgctgttatctcagattgtgaactgtccgtacctcgaaacgtggctcagaaccctgattgcattaacctcgtgagtatcctg

SEQ ID NO: 539289 - DNA, 204 bp, Homo sapiens
tttgcaggcaggacactgcacttggtgaggtggcgcgtgtccagtttctggaggctggacagtgcgaggcgggagacccctaggaagccatctttgctcttggtcatggtctccgggagcagaggctgaatcgggcttctattggtgagcgtctcctcgcttatggtcacggcggcaatctccttccttcctctgtagcttggc

SEQ ID NO: 539290 - DNA, 167 bp, Homo sapiens
taaacttttcccccaaattccagcaaaaggcccttatcccccctttttataaaaacatttgtttctttaaccccgcctagggtttttgtaggcccagctttttaaaaacccccggaaccctttttatggggcccccggaaaaatgttttttaatatgttatccggga

SEQ ID NO: 539291 - DNA, 236 bp, Homo sapiens
ctggagcttattcttaacataagggttttcattaaatgttgctgaccatagctaggatcagagcatttctggacagccattattctgatactaagaatctaccttcttcccacccctccccaccccaatggaatcatggtgctagctggcccaagccaggtatgttttaagaggccaagggggaagaactgcttgagcctgcaagttcaagaccagcctggacaacatagcaagac

SEQ ID NO: 539292 - DNA, 227 bp, Homo sapiens
atgggggctccagagccttagcatgagcctgctgaagcctggataggaagctagggattttctcttcaatacgcagtaagttatcttgcccctgtggttgccttatctgtagctatggggcaaagacaataatgagagctttctcgagcggaggttgcagtgacgctagagattgagccattggcactcctagctctgggcacacaatgaacaaagacaccggtctc

SEQ ID NO: 539293 - DNA, 856 bp, Homo sapiens
gaggaatcagagatcattgatttcttcctgtggtggcctctctcaaggatgaggttctgaagattatgccattgtgcagaagcatacccgtgccggctcagcgcaccaggttcaaggcgattttgttgctatcgcgggactacaatggccacgatcggtctggagtgttcaggtgctccaagggaggtggccactcgctggatcctgtggggccactcatgctggccttaagctctccgatcgtccccgtgctggcagagtgctactggcgtggaacaggatcggttaagctcccaacactgttccttggaaggtgacaggaacgctgcgggtctgtgctggtacgcgctcatccctgcgcccaggggctgctggcactcgtctccgtgcgctgtgcctgagcaagctgctcatgattggctggatatctgatgaggtgctacacctcagtgccgtgggctgtactggcacgcatgggcagattcgtcaaggccaaggctttgatgccctttcgtaagacctacagcttacctgtacccccgcagctctggaaggagactagtagttcacagagtttccctatcgatggagttcactgaccaccgtcgtcaagaccacacacatgagttctccgtgcagctggacgtcaggctccagctgtgggtacagacatagggtttttattccggaagaattcctgtggactaaggcgtgttaaggaaaaaaaagatacctttttcggggggaaactattatccgggggcggcgaaagagttctggaaggggcaggtctaggtgccggagccgccttgtgtgacagggaattcggcccctatgaggcatttataaaccgttc

SEQ ID NO: 539294 - DNA, 409 bp, Homo sapiens
atgcttgtggtcgtctctgacggtcccccgagaccccatacagagtatctgcattgccttttctttgctatcttgccagcatctgttactttttgactttctgtattatatccattctgactggtgtgagacctatcttttaaagtggtagggaatgttagtgggagaatgaccccgtagggtaagctcatgtgctcagattataatacctcacctgttcacatagaggtttaaagcaaggtctgccaaactatcaagggaggctttgagcagttgtgaagtttgtgtgactctgaggtgactagaactagtagaataaatataataaaaccctgaaccttcacacatatattgagtaatatctcaagtcattctatttatgtactctgtatgggggatctcggggtac

SEQ ID NO: 539295 - DNA, 137 bp, Homo sapiens
ctcaaggatccgtctacgagtctgaccagctcggtacgcttatgggacagccaccttggactgtacagccaggatgatgagcgacatcgagtgccacacactcgtcgatgtgactcttgtgagtgatagcctgtatc

SEQ ID NO: 539296 - DNA, 382 bp, Homo sapiens
ttacacatgcagcattttccttataaaaaaggcaaacaagagtgacaactcatgctccaaatattaaaaaatatatttaaacagtatgatcaagaagatttgggccgtgagtggtagctcacatctgtaaccccaggattttgggaggctgaggtgagtggatcacgaggtcaggagatcgagaccatcctggctaacatggtgaaaccccaactctactaaaaatacaaacattagccaggcgtggtggcaaacacttgtagtcccagctactcgggaggctgaggcaggagaatggtgtgaacctgggatggggagcttgtagtgagccgagatcgcgccactgcactccaacctgggtgacagagcgagactccatctc

SEQ ID NO: 539297 - DNA, 433 bp, Homo sapiens
acagcttgctgatgcctgtctcgaattccatagacaaatatatctgtcaccatcttcctgttccttcttgctcaaattcccaaacattgctaaaggcaagttctcttcgggctgcagttgggcaggagctgttagaagtacataagtccggcagcactcatggaatctcgcttctggtgctgtgcctcaggcccaagcagaaggttgaaatgagtggccaaaggtcttcgcaggaaagtcttattgggtgggatgttcaataactgagccattgtttctacgttaaaacgaggctctagaaccatgagcccaccatggacaccactgcctctgagattgggcgcatattctgccaagtccacggagcgcagccactccatcactcgatggttagtccacttctgaacttctgatgggacgatggtattctcat

SEQ ID NO: 539298 - DNA, 1029 bp, Homo sapiens
  misc_feature (597)..(597): n is a, c, g, or t
  misc_feature (723)..(724): n is a, c, g, or t
  misc_feature (753)..(753): n is a, c, g, or t
  misc_feature (783)..(783): n is a, c, g, or t
  misc_feature (827)..(827): n is a, c, g, or t
  misc_feature (1029)..(1029): n is a, c, g, or t
gcataggggtccatacggcgatcgtactcggattcccgatcgataacttacagcgggaaactttcacatatgtccggtagcccttgaatgtcctgcaaattgaagggtaggaggagtgtcgctgtaacgcttccattgacttgccgaggacagcccaccgttagggctggcacccaagtcttgaacttccacgtatggtaacgagtgaccattctatagaagaaggatagaagttgatggcgatctagtattcatacaactctctacaggaggaccgtgggacgaaggcttcatgctgagcagtcttctgtggcagattagttgcgcaccttggaaaagcaccgtgctgtgatgctcaggttgttgatattactctccaagagaatttactaggcgcagaaggagctagtgcctgaaggttttgcatgcttgccatctcggatgccacgtcccaattctgctgggccggcttacagctacctgagatacccttcagctaagcctagtataccatgcgcgcagtgccttcctgggagagccagcgtgcctttcttgctggctgtagcttgagcccgcaaggggcttgagccagccagncgctcgtcagcggcagagacgatcttatcgttgaaccttaccatagccagttgccgcgtgtggtatacacacgagttcatccgtcgtgtctgcctagttgttggagcagttagcgcagtccgcganntgcaactagacatagcggaagcgtcagcntcgcagtaggggctttcagatcgctaggtngcgactcgcatcgcgctccaggcggacagtatcgtggctgacantagcagattgtgcagcgcaagtttcacccgctgaagacatccacattgggcacgtgtcagtgcccctgagtctgatacgtgtcgtacgagaagaatcctggaacgagagttgacaaccctgaagaagcatggctggctgcttggagaagcgcaagtggaccaacggaggacatttcaggggtggaaatggacttggtcccgn

SEQ ID NO: 539299 - DNA, 85 bp, Homo sapiens
gtgggcggacgcgtgggctttcctcagacccctttttgccgtgcaaagggaattcttgacattaaataaaaggtatccagattgc

SEQ ID NO: 539300 - DNA, 212 bp, Homo sapiens
gaggatcccgcaccaggcgcacttctggaggagcgcataagatcacagtatcatggtcctgaagtgcaggacgtagcgagaggatctttaaagcgagaggagtttgtcaaatactgctgagaaccagaagcatgagtacggtgggaaactgcccactgaatgacagcagcagagcactcagcaggcaccttggcagaagtgcgcctggtgtg

SEQ ID NO: 539301 - DNA, 679 bp, Homo sapiens
  misc_feature (37)..(37): n is a, c, g, or t
  misc_feature (48)..(48): n is a, c, g, or t
  misc_feature (74)..(74): n is a, c, g, or t
  misc_feature (140)..(146): n is a, c, g, or t
  misc_feature (149)..(149): n is a, c, g, or t
  misc_feature (163)..(163): n is a, c, g, or t
  misc_feature (171)..(172): n is a, c, g, or t
  misc_feature (226)..(226): n is a, c, g, or t
  misc_feature (228)..(228): n is a, c, g, or t
  misc_feature (324)..(324): n is a, c, g, or t
  misc_feature (387)..(387): n is a, c, g, or t
  misc_feature (402)..(402): n is a, c, g, or t
  misc_feature (459)..(459): n is a, c, g, or t
  misc_feature (497)..(497): n is a, c, g, or t
  misc_feature (532)..(532): n is a, c, g, or t
  misc_feature (544)..(544): n is a, c, g, or t
  misc_feature (548)..(548): n is a, c, g, or t
  misc_feature (570)..(571): n is a, c, g, or t
  misc_feature (576)..(576): n is a, c, g, or t
  misc_feature (581)..(581): n is a, c, g, or t
  misc_feature (598)..(598): n is a, c, g, or t
  misc_feature (607)..(607): n is a, c, g, or t
gggagagagcatcttgggggcgcaattccaagagcancgagggcagangttagagatggctgagagcccctaanctgaggcggcaccacaataggcagcaacaactgtgtgaaagctggatgaactggtcagtagcggannnnnnntgntggcacaaggttgntctctttnngaggggtcaaaccttggcttggatgagctcatgagaatacccagtgttcccaantngaggggggcagagcccaaagcccctttctctgcaggcctccttaaggagaaaaaggcactcagagaaaaaggcattcagggaaccccctggaaagntgtgccagaattagtccttaaggcacagctgaggcggacaaggcaccaaggcacaactggtgntgggagggcaggggnagcctccaagccaagtgccagggtcacaagaggatgcaggaccgcccacgcttgatnggcgtggggttgagcacagcccggacagcctcggcgancacttccttgacaccatcctgttgcagggctgagnattcgaggtagngcanaggtggatctgcttggccagtnnctggncctgntgcggtgtgatgggcgnctggccctnctccttgaggccgccgtaggtgtcaggctgggctctcaggtccttcttggtgcccaccagcaggatgggcac

SEQ ID NO: 539302 - DNA, 300 bp, Homo sapiens
aaagataaagcacgtgagatacacgctatgagcggtatatgagcgaccgtccccctgttctgatcaccaacgttggtcactctcttagtttgctaactagactgatccctcgctctgtgtgcagtatttgtgtcctgtcttggtcattacttttttctgtgttaaaactccatcacacctcacggctaccaaggttctggcttaagggattagaaatttggggcactttcccaatactaaaggactctccaaaagtccccattttgatgcctgtgcctattccagctgcggcggattcgg

SEQ ID NO: 539303 - DNA, 338 bp, Homo sapiens
ccgctttgtagcccctcctcatgctcttggaggcatagtatagtaacgagatactatgctgtgtctgtgatagcataaagttcgtcagacctccatggtccctcgtgatcccaaacgagtcacttcttaaattcacactttggcacttaacttcagtgtggatgacagaacgagaccctggcttaaaaaaaaaaaaaaaaaaagaaagccacacttaatcttttcagaaacctggtatagcacaggctggactttagggacttaaaatatgcactataattttgcgggccttatcactggtatttttggagtgattcagtatagggtcgttttcattg

SEQ ID NO: 539304 - DNA, 333 bp, Homo sapiens
ctagtgttgccgttcatgattcaagtatatcacgactgatatgttctcttttcggattcatataccaaacgaaaaaactgaagttataagggaggcaactatgtgctcagacagtctgtcaatgagccatctttttttctctccgttttctttaatccttttacaagctgtattgattacaaagttgaaaaagaaaaggaaaaggtcaagttagtgcggctgctgtcccaaaaaaggtcacgaggtcagagttgccagttctaatttcagattgaatccgaacctcctcccagaagtgtcaccaggtcgtcccggcagagtgttgcccatcct

SEQ ID NO: 539305 - DNA, 947 bp, Homo sapiens
gaggcattcctgaacactgcacaggttcgggccgagatttctcgctccgtggccttagctgtgtcgcgctactctctctttctggcctggaggctatccagcgtactccaaagattcaggtttactcacgtcatccagcagagaatggaaagtcaaatttcctgaattgctatgtgtctgggtttcatccatccgacattgaagttgacttactgaagaatggagagagaattgaaaaagtggagcattcagacttgtctttcagcaagcactggtctttctatctcttgtactacactgaattcacccccactgaaaaagatgagtatgcctgccgtgtgaaccatgtgactttgtcacagcccaagatagttaagtgggatcgaaacatgtaagcagcatcatggaggtttgaagatgccgcatttggattggatgaattccaaattctgcttgcttgctttttaatattgatatgcttatacacttacactttatgcacaaaatgtagggttataataatgttaacatggacatgatcttctttataattctactttgagtgctgtctccatgtttgatgtatctgagcaggttgctccacaggtagctctaggagggctggcaacttagaggtggggagcagagaattctcttatccaacatcaacatcttggtcagatttgaactcttcaatctcttgcactcaaagcttgttaagatagttaagcgtgcataagttaacttccaatttacatactctgcttagaatttgggggaaaatttagaaatataattgacaggattattggaaatttgttataatgaatgaaacattttgtcatataagattcatatttacttcttatacatttgataaagtaaggcatggttgtggttaatctggtttatttttgttccccaagttaaataaatcataaaacttg

SEQ ID NO: 539306 - DNA, 826 bp, Homo sapiens
aactaggctaaggtacgaggccgcggtgaatcggccgaggagtggggtccctgtctccagctgctcctggggagtagaagcaataatgtatttctaatttgtgggtcccacttcggctatgcgggtttctagggggtgggggcttgggaccaaagccttgccccgcccctatgccccttgggggtttggctgtgtaagggggtgaaggactgcccctccctttcgagacccctccttcctggtttctgttcctttttcctggcagtgaattatgcaaagggggccggcaaaggaagggtaggtgggggaaagccaggtggaagcttgaaagactgggggactgggcctgtaaggaaggagccatcccagtccccctccgccctgctcccggcgctgagtcatggggtcgtggagaagggggcggggtggcctgattggctcgcctgcccctgggggcagtagagggggcagtagagggggcagtagaggggccccgcccagctaggggagccgctccgttccactcccctccctagccctccctccccacgggcctgggcagggaatgtcttgttcccgcgtccctccccggggcagagggcagggctgggccgggcggcgtcctaccctcttctcctcctccccatctcctccccgccaggtgcgagccggagccgcgccaccgtgcgcccctgactcacgccgcccgggctggcgcacgaagggtgtgggacagggtaaggggttggagagcttgttggaaacgggagcgggcctttggggctgttgagtgggacccccccggcaggaggggggttacctttac

SEQ ID NO: 539307 - DNA, 991 bp, Homo sapiens
  misc_feature (952)..(952): n is a, c, g, or t
  misc_feature (961)..(961): n is a, c, g, or t
gaggcattcctgaacactgcacaggttcgggccgagatttctcgctccgtggccttagctgtgtcgcgctactctctctttctggcctggaggctatccagcgtactccaaagattcaggtttactcacgtcatccagcagagaatggaaagtcaaatttcctgaattgctatgtgtctgggtttcatccatccgacattgaagttgacttactgaagaatggagagagaattgaaaaagtggagcattcagacttgtctttcagcaagcactggtctttctatctcttgtactacactgaattcacccccactgaaaaagatgagtatgcctgccgtgtgaaccatgtgactttgtcacagcccaagatagttaagtgggatcgaaacatgtaagcagcatcatggaggtttgaagatgccgcatttggattggatgaattccaaattctgcttgcttgctttttaatattgatatgcttatacacttacactttatgcacaaaatgtagggttataataatgttaacatggacatgatcttctttataattctactttgagtgctgtctccatgtttgatgtatctgagcaggttgctccacaggtagctctaggagggctggcaacttagaggtggggagcagagaattctcttatccaacatcaacatcttggtcagatttgaactcttcaatctcttgcactcaaagcttgttaagatagttaagcgtgcataagttaacttccaatttacatactctgcttagaatttgggggaaaatttagaaatataattgacaggattattggaaatttgttataatgaatgaaacattttgtcatataagattcatatttacttcttatacatttgataaagtaaggcatggttgtggttaatctggtttatttttgttccccaagttaaataaatcataaaacttgaaaanccaaacacnttcccacctcccattttaccccctttactt

SEQ ID NO: 539308 - DNA, 171 bp, Homo sapiens
gaggatcccttcgattggcgggcacttagaggtggggagcagagaattctcttatccacatcacatcttggtcagatttgaactcttctatctcttgcactcaagcttgttaagatagttaagcgtgcataagtgcccgcctatcgaagggatcctctagagcgccgcgca

SEQ ID NO: 539309 - DNA, 177 bp, Homo sapiens
cttcatttagtttctaacggcatgacttgcaatggtcaatcagttagtttgagtcaatttcagctctttgtgccgtcgtgactacccaatacaaccactctcaaagcaggcaaccatgcacatgttcccagagcaccctgcacacagtttgtaagagtcaaggttggctacacagaa

SEQ ID NO: 539310 - DNA, 634 bp, Homo sapiens
agtattaccattatttaggagatttcacaggcctggcctttgacggtccttgacctggaaaaccccttccgctagattgtaagcagcatcatggaggtttgaagatgccgcatttggattggatgaattccaaattctgcttgcttgctttttaatattgatatgcttatacacttacactttatgcacaaaatgtagggttataataatgttaacatggacatgatcttctttataattctactttgagtgctgtctccatgtttgatgtatctgagcaggttgctccacaggtagctctaggagggctggcaacttagaggtggggagcagagaattctcttatccaacatcaacatcttggtcagatttgaactcttcaatctcttgcactcaaagcttgttaagatagttaagcgtgcataagttaacttccaatttacatactctgcttagaatttgggggaaaatttagaaatataattgacaggattattggaaatttgttataatgaatgaaacattttgtcatataagattcatatttacttcttatacatttgataaagtaaggcatggttgtggttaatctggtttatttttgttccccaagttaaataaatcataaaacttg

SEQ ID NO: 539311 - DNA, 1052 bp, Homo sapiens
gtagacgagtggggacatcctggcttcggagcgggagtgttcgttgatgccagcgagctaaaaagagaaattgaacagtagtgggtgatgttgagtaaaggcatagaagattttcattgatgtaacggttcgtctcccgagtgcctcaccgtatgtaatacatgggaggcatatgcactaagactgggcgatatttccatggtctctttgaggacggaagaaggggtcagcgcccctggcataactctttatcacagccgggcaactaaggaatcagaagtgccactgcatcctggtggcagaagcgtactagcacttgaatgagtacgttatttgtggagaaattacccaggaaagataataatttccgcggtgggaagcaacacacacgtgaattacttatgtccggggatttacgagtaacgtaaagggaatgcagaaagtggttcatgacgttatgaaggtacggcattaagttcttgcaggaataataagacgtaacatatatggaggatagaatacgtgttgggggcaacttgcacttgtagttatactgtagcagacaagaggagggataagatgatgctcattggacattggggaatgagtgggtggtagctcaaatcaccttataacaggtaagcaattcatctcaattacgaacaccagtggacaattttgcaaaattccgatggacagttgaatcttgaggcgagcaactaatttgcgacgggtagcggggccaagacacccctggaattattaagagaaagttaacaggaacgctgggagcctgatggttgggggttcacagcatatgaaaactacatatggctatccagagcattcatagtgtgcagaacttcttaggcgcttagttaaacttgctacgaatttcatcagagtcaagagattgggtgtcaatacagcacttgattagtcagaccccgccattgtgtaacagcggacctcctttcacagttgcacaggaaaccatttccggatgagtgtaacatgggtgaccaacctatacgagccgcacagagggactg

SEQ ID NO: 539312 - DNA, 1053 bp, Homo sapiens
  misc_feature (575)..(575): n is a, c, g, or t
  misc_feature (619)..(620): n is a, c, g, or t
  misc_feature (1014)..(1014): n is a, c, g, or t
  misc_feature (1023)..(1023): n is a, c, g, or t
gaggcattcctgaacactgcacaggttcgggccgagatttctcgctccgtggccttagctgtgtcgcgctactctctctttctggcctggaggctatccagcgtactccaaagattcaggtttactcacgtcatccagcagagaatggaaagtcaaatttcctgaattgctatgtgtctgggtttcatccatccgacattgaagttgacttactgaagaatggagagagaattgaaaaagtggagcattcagacttgtctttcagcaagcactggtctttctatctcttgtactacactgaattcacccccactgaaaaagatgagtatgcctgccgtgtgaaccatgtgactttgtcacagcccaagatagttaagtgggatcgaaacatgtaagcagcatcatggaggtttgaagatgccgcatttggattggatgaattccaaattctgcttgcttgctttttaatattgatatgcttatacacttacactttatgcacaaaatgtagggttataataatgttaacatgacaggggaaatttttcccccttttttttcccccctttcttttntaaattaaaaaattttttcccctttcaaaccccccttttctttnntgaagtgctgtctccatgtttgatgtatctgagcaggttgctccacaggtagctctaggagggctggcaacttagaggtggggagcagagaattctcttatccaacatcaacatcttggtcagatttgaactcttcaatctcttgcactcaaagcttgttaagatagttaagcgtgcataagttaacttccaatttacatactctgcttagaatttgggggaaaatttagaaatataattgacaggattattggaaatttgttataatgaatgaaacattttgtcatataagattcatatttacttcttatacatttgataaagtaaggcatggttgtggttaatctggtttatttttgttccccaagttaaataaatcataaaacttgaaaanccaaacacnttcccacctcccattttaccccctttactt

SEQ ID NO: 539313 - DNA, 507 bp, Homo sapiens
  misc_feature (28)..(29): n is a, c, g, or t
  misc_feature (50)..(50): n is a, c, g, or t
agagagctagcaccagggagactattannatgactaagagtttggtttgnagtatgctccttacccaggatccacataaaccaaacctcctaaaatcaaatagatacaagaatgagctcgataagagtctattcccttaactaggcagtttcttcattaatcagctacacctgaatctctataatacccgatgtttcctccataggccataagtgccagcagctgcacagatacttctctattcagccaattctatcataactttcacaagagaatttaaagtcttttgtgtaactgtagcctttatggtggaatttgctatagaacctatcatgagggatacatttctccttttacattgcttcttttactccaaacaatgggaaaaaggacctaacaaatgatgcctttctagaagagtgaaggccttctgacaatggttctctttaacctggtgatgtgggtgaagaagagtgaaccaatggtctgtttccaactgattacgag

SEQ ID NO: 539314 - DNA, 402 bp, Homo sapiens
  misc_feature (15)..(15): n is a, c, g, or t
  misc_feature (79)..(80): n is a, c, g, or t
tcaacttcttcctgnccccattcccattctctctccacccggagtggagagagaaaggaaagaatctgagcaacacttnngagacagaattaacaggatagagtgactggctggatgtgatggtgacagagggttttctggtgtggaggattcgatgctaccactaattgaggcaggacctccagcagagggggtgcagggcggaggagctgcagggaggaggtaacgagccagggtttattctttcctatacgccatcaggcagggaggggaataagggactagctaaaactgtaactgggggcaaagaactacaaatattgttagagagatgaatacaaggaaaagcttccttccttccttccttccttccttccttccttccctccttctctctccact

SEQ ID NO: 539315 - DNA, 900 bp, Homo sapiens
gaggcattcctgaacactgcacaggttcgggccgagatttctcgctccgtggccttagctgtgtcgcgctactctctctttctggcctggaggctatccagcgtactccaaagattcaggtttactcacgtcatccagcagagaatggaaagtcaaatttcctgaattgctatgtgtctgggtttcatccatccgacattgaagttgacttactgaagaatggagagagaattgaaaaagtggagcattcagacttgtctttcagcaagcactggtctttctatctcttgtactacactgaattcacccccactgaaaaagatgagtatgcctgccgtgtgaaccatgtgactttgtcacagcccaagatagttaagtgggatcgaaacatgtaagcagcatcatggaggtttgaagatgccgcatttggattggatgaattccaaattctgcttgcttgctttttaatattgatatgcttatacacttacactttatgcacaaaatgtagggttataataatgttaacatggacatgatcttctttataattctactttgagtgctgtctccatgtttgatgtatctgagcaggttgctccacaggtagctctaggagggctggcaacttagaggtggggagcagagaattctcttatccaacatcaacatcttggtcagatttgaactcttcaatctcttgcactcaaagcttgttaagatagttaagcgtgcataagttaacttccaatttacatactctgcttagaatttgggggaaaatttagaaatataattgacaggattattggaaatttgttatggtgtatgtaccattcagatgtagtagattcatatctacttgatattcattacatgtagtcaggtcacaagtcaggt

SEQ ID NO: 539316 - DNA, 352 bp, Homo sapiens
gctcgacacttcagaatacctaaaatctctctgaaacgaagacactctggccacttaaagtatctaatattgctcacgcctgtaatcccagcactttgggaggccaaggcggcagatcaccaggtcgagggactgagacaatcatggctaacacagtgaaaacccatctctcctaaaaatacaacaattagccaggcatggtggtgcacacctgtaatcccagctactcgggaggctgaggcaggagaatcacttgaacccgggagcggagattgcagtgagccgagatcgcaccactgcactccagcctggagacaaagcaagactttgtctcaaaaaaaaaaagtcgacg

SEQ ID NO: 539317 - DNA, 968 bp, Homo sapiens
gaggcattcctgaacactgcacaggttcgggccgagatttctcgctccgtggccttagctgtgtcgcgctactctctctttctggcctggaggctatccagcgtactccaaagattcaggtttactcacgtcatccagcagagaatggaaagtcaaatttcctgaattgctatgtgtctgggtttcatccatccgacattgaagttgacttactgaagaatggagagagaattgaaaaagtggagcattcagacttgtctttcagcaagcactggtctttctatctcttgtactacactgaattcacccccactgaaaaagatgagtatgcctgccgtgtgaaccatgtgactttgtcacagcccaagatagttaagtgggatcgaaacatgtaagcagcatcatggaggtttgaagatgccgcatttggattggatgaattccaaattctgcttgcttgctttttaatattgatatgcttatacacttacactttatgcacaaaatgtagggttataataatgttaacatggacatgatcttctttataattctactttgagtgctgtctccatgtttgatgtatctgagcaggttgctccacaggtagctctaggagggctggcaacttagaggtggggagcagagaattctcttatccaacatcaacatcttggtcagatttgaactcttcaatctcttgcactcaaagcttgttaagatagttaagcgtgcataagttaacttccaatttacatactctgcttagaatttacatactctgcttacgaatttgggggaaaatttagaaatataattgacaggattattggaaatttgttataatgaatgaaacattttgtcatataagattcatatttacttcttatacatttgataaagtaaggcatggttgtggttaatctggtttatttttgttccccaagttaaataaatcataaaacttg

SEQ ID NO: 539318 - DNA, 909 bp, Homo sapiens
  misc_feature (330)..(330): n is a, c, g, or t
gacgaccagcaatgtactatgtgactatcattgatgccccatgacacaaagactttatcaaaaacatgattacaggaacatctcaggctgactgtgctgtcctgtattgttgctgcatggtgttggtgaatatgaagctggtatctcctagaatgggcagacctcgagtagcatgcccttctgcggcttacgacaacttgggctgtggaagctaacctaattgtcgtctgttgaactaaaaagtggattccgactgagccaactccttacagcccagaagagcattatgaggaagattgcttacgtgaagtctagctcacattacattcnagtaataattgtgcgtacaaccccgactacagatagcatggtgtgccaggttatcctcgagcttaagagaattgggtgacgacatcggactaggacgccaaggtgcctaacagtgtcattgagttcaagggactggaaaggtcatcgcccgataaggatcgtcaattgccagtgcgatatccaacgtcattgtttatgaagtctctggtacttgttaatcctaccatccaatgtcgtccgaaactgacaagtccgccttggcgtccttgtcgcgtcttccaaggtattgtactactaagaatctagggtcgcgtaactcgggttacttgttgtccttgttgtggccgagtgttgagacctgggtgtgtcttcgagaaaccccgggtatgggtggggtccacactttaggctctcaagtgctaaccgtgtaagcaacggaaagttaataatcctcgtccgacaatagcgttcgcatggaaatgcttctgaagtgaagtcgtcttgccctgcggaacgaatgttggcgcttacaatgtcaaccactgtgttcttgttcaaggatgtcccgttccgtggcaa

SEQ ID NO: 539319 - DNA, 971 bp, Homo sapiens
  misc_feature (449)..(449): n is a, c, g, or t
  misc_feature (463)..(464): n is a, c, g, or t
  misc_feature (468)..(468): n is a, c, g, or t
  misc_feature (484)..(484): n is a, c, g, or t
  misc_feature (504)..(505): n is a, c, g, or t
  misc_feature (511)..(511): n is a, c, g, or t
  misc_feature (514)..(514): n is a, c, g, or t
  misc_feature (522)..(522): n is a, c, g, or t
  misc_feature (568)..(568): n is a, c, g, or t
  misc_feature (570)..(570): n is a, c, g, or t
  misc_feature (585)..(585): n is a, c, g, or t
  misc_feature (594)..(594): n is a, c, g, or t
  misc_feature (596)..(596): n is a, c, g, or t
  misc_feature (610)..(610): n is a, c, g, or t
  misc_feature (614)..(614): n is a, c, g, or t
  misc_feature (620)..(620): n is a, c, g, or t
  misc_feature (624)..(624): n is a, c, g, or t
  misc_feature (627)..(627): n is a, c, g, or t
  misc_feature (629)..(629): n is a, c, g, or t
  misc_feature (638)..(638): n is a, c, g, or t
  misc_feature (643)..(644): n is a, c, g, or t
  misc_feature (646)..(646): n is a, c, g, or t
  misc_feature (648)..(648): n is a, c, g, or t
  misc_feature (650)..(650): n is a, c, g, or t
  misc_feature (654)..(654): n is a, c, g, or t
  misc_feature (656)..(656): n is a, c, g, or t
  misc_feature (662)..(662): n is a, c, g, or t
  misc_feature (664)..(664): n is a, c, g, or t
  misc_feature (666)..(666): n is a, c, g, or t
  misc_feature (677)..(677): n is a, c, g, or t
  misc_feature (682)..(683): n is a, c, g, or t
gaggcattcctgaacactgcacaggttcgggccgagatttctcgctccgtggccttagctgtgtcgcgctactctctctttctggcctggaggctatccagcgtactccaaagattcaggtttactcacgtcatccagcagagaatggaaagtcaaatttcctgaattgctatgtgtctgggtttcatccatccgacattgaagttgacttactgaagaatggagagagaattgaaaaagtggagcattcagacttgtctttcagcaagcactggtctttctatctcttgtactacactgaattcacccccactgaaaaagatgagtatgcctgccgtgtgaaccatgtgactttgtcacagcccaagatagttaagtgggatcgaaacatgtaagcagcatcatggaggtttgaagatgccgcatttggattggatgaattccaaacnccgcccgcttgctnncccncatccctccgctcacnccccccccccccccgccccnncatgcnggncccccctnaccctcccccccgcccccccccccccttaccccccccccccccccncnccccccccccccccnccccccccncnccggttgccccccncggncgcccncgcngcncncgccacccncgagnngngncncccngnactccncncnccccccccccnccccnngccacatcaacatcttggtcagatttgaactcttcaatctcttgcactcaaagcttgttaagatagttaagcgtgcataagttaacttccaatttacatactctgcttagaatttgggggaaaatttagaaatataattgacaggattattggaaatttgttataatgaatgaaacattttgtcatataagattcatatttacttcttatacatttgataaagtaaggcatggttgtggttaatctggtttatttttgttccccaagttaaataaatcataaaacttg

SEQ ID NO: 539320 - DNA, 495 bp, Homo sapiens
  misc_feature (85)..(85): n is a, c, g, or t
actgatagcgagggataccagccagaagagggtctgaaagacaggcccatccccaggatgggaatgctgtgttcagacacacaanacaagagaaaccagactctggtcatggagcagtaccacggtgaaagacttttcccaccgacatggtcacatagccattctccttgaagtactgggggatggtggagaagtttccagcgtgcaccctccagtaggagttgaagtcgtacaggcgggtggtgtcaggtctcctgccagtgaggaaagaaacgcggctcggggcgcacactgctttgctgtttaggggagcagcaagccagaggtaatgcatcgcgcacagcaaaacatgtctgccatctcttaggtaaccaagcaaccgccctcccgaggctcctagcaaacagcttggtagctgagtcatgcagagctcaaaccagacactgggatttgggtgtcacctaggcaacagactggttccggtcgaacgggtac

SEQ ID NO: 539321 - DNA, 1043 bp, Homo sapiens
agaataacactaatggacatgtaaacacacatcgataaatacaatacaattagccctccaggaaactctgcaaggactctgcatttcatctggagaacaagtggactggaagagtacataatctatccccttcacatcaacacacaagcactgatatttctctgatatttgctgctacaacctccccagatgcagccacaacttactttgttgtttctttacactgaacacataccttagctgaccttgcttcctgaagtgcaaattgcacaaatgtaatctttgcaaaattcctcatattcctgaaacatttgctcaaacttcatcatttttgaagactctgatcaccctacaaatgctacagacatctaccaactcagcattctattcatttaattactccaatattgtcattgtttcaaatatccataaccttttaatgtattatataaattatttattattgtagaaaatgaaaattagctggacagcaaatatctacccagtcaaaaaagatttagataaattcagctggaaagttaacaggaaacacagttcttccaaggtttgtggccacttaaaagtggtaagataactgcttctttgattgactacctctttctttctttcctccttttttctttcctttcctttctcctttctatacattcatattctatctttcatatcctttctttcattacattcctatcctgtctatactataccgtcattacattatcattactcatacttctctatcatacatgtggcttttgaaattatgccgtagacaaaatacttcccttggctggataccggccttgaaaagaagaaaatttttaaacgtttaaatccaaatctcaaggggagatttaaaaaaaataaatcgtgtgtccaggaaaaaagacagacaggaagagatgaaacgactaaacagaagagagaacaagcaagaaatgagagaaggaaagaatataataaacacacaaagaatagccagtatcaataatttgatttttgtaatatatatagagacaaaa

SEQ ID NO: 539322 - DNA, 281 bp, Homo sapiens
caggggatggccactgtgaaggacgccttcccagcctgcccgttgccaatctgctgtgagagggggcctccctgccttgaggccttagccctggctctgcaattttcctccggggagaaaggacaatgcccctcccccgaactgggcccacaattcttcctttttccaagaacgaaggcttttggaccttcggaccccatcccactcacccaagtgtctttctgtgtctggggggaggagcggatgatatccgtgtggttccatctattattttcaagctc

SEQ ID NO: 539323 - DNA, 344 bp, Homo sapiens
caaggacttgctgtcgcccaggctggaatgtggtggcatggtcacagctcacgcatcctcgacctcctgggcccaagcgatcctcccatctcagcctccagaatagctgggacaacaggcaggcactaccacacccacctgattttattttaattttctgtagagacagggtgtcactatgttgcccagactagtctcaaactcctgggttcatgtgatcctccagcctcagcctcccaaagtgctgggattacaggcataagacaccatgcccatcccatgaattcttgtatatatgtaaaaacccttcaccactcaccttccttgacgtcgacgcggccgga

SEQ ID NO: 539324 - DNA, 602 bp, Homo sapiens
ggaccagacccgtgaagttcttctagctcctccaagtcccagttttatcccagtggaaccagctaaaagacaaggtcgtgcgtctgctccctgaagccctagtagtgctggagattggacaacgtcaaggtgaacaacatgttaaagggggaaaaggccgtcagggcctggaggtgtgctgtgcgccaacttcttgacagcaacgtctccaatctttgaagctcagcagcaccagtgcaatgaacgtggtcagcaacgctaagtgggctgggagcacacattggcaccggcaagtttccagcgacctcaatggggcagcaagccgtgtttgccgcgccacaggcagtgggttcgtaaatacagcgatcaggacacttccttcccagtttcgaactggcacttccaacgcggccctccttctgaacgcgcgcgccgtgtgtgcaaaacattttgtgggtccccactttggtgcttctaaagtgggcgccatttggacaccgttcacatgattatcacggccgcttttgtgggcaacgggggcacctgtgagctggcccgtgggctgcaaaatcgtcaagggtaacttctagttcaaggccaca

SEQ ID NO: 539325 - DNA, 760 bp, Homo sapiens
gacttgggcccccttgtgggccccctctcgctcctccctttaggcacctccctggggcccgcccagggtctccccccagttgtggactgcgtcataagtatcccagacctcggcttgcaggtatgtgttagactgaagataaagtaagtgctgtatgggctaacaggatctcctctgtgcagttctgccagcccaggacgcttgattccagcaggcggcctttacccgggcaggcccgaaagaattccactaatggtgcacaaactccgggcttcaattaaaccccataacggtccggttggacaaaagggcaggatggcgcgggcaaacgcacctgttggtgaacgggcccctccttggaagccggcacgggggccagagaaactctcaagaataacttggaccggtgcaaagaagcaccccaattttacccggtggcaacagcaagattgttgcctttctcatcgggaatccctagggagagacttcccctgggcaaaaaatttcccccctttcacggtggggcacatggaaaacaaggccccttaaagcgattttcccctgtgggcccatgggtaggaactcctggaaacggaaaggggcttggcagcaaatttcccggggtggacgcggaatttgcgaccacaccattttcggccacattcccatcgtggatgtgtcgcccttggttcaccaccaaagatatacctccgtggaatacaggtgggaccccctaggacagggcacaaacttaaattca

SEQ ID NO: 539326 - DNA, 1380 bp, Homo sapiens
tgggtaaagatgggggtctcactgtgttgcccaggctggtctcaaactccgtggccacaaggtgattcattccgtgaccttcagccttcccaaaagtgctgagattacaggcaatgtgagccacgtgtacccagccgtttcctatattaaaattcaaagagaaaatttctacacctttattccctcaaattaaacacatgttgcttacagttctatacgggtgcccttgtacaagaggtcataatagtgttaaaaagagatttcgtgaaatttatacgcgtgtagacatataaagatcgtgtgattacaatgtaaaaaagaggaactgaagagattagcaatttttctccgagttgggatatgggcgtcgtatgagactgtgttgagaaggttaaatacaaccgcgcttttaaagaggaaggcaaagcattcactgggcgtgtttaaaagcccaacagagtgttggccgtttaccaaagccgctcttttggggcgacagggaagtaatcatgtgatttactagagcgaagagtgttcccgaagacgagagggcaagaaacacattttgtgagagggtgtgccttcaatgttgaacagagtatacacgaggggacagatgggtgtgggtaataattattaccaatagacatttatggggggggacctagaaaaatgtgttgataaacaagagtgtgtgtttttatcaaacatgagggaaaggacaacgatgtacaggtgtttaactccacaagacgttgttggagagggatctactgttggggggatttgaaagattgtcgtttattagaccgcggaagaaggacaacatctttgtattgagacgaagaaacacatggaggttgcaaaaacttatgaaagactatcaagggggcagtagtaaatttgtgtgtagaagcaccacgaatcataacacagtattatttgtggtatagatcagctaagttgggtgtttataagaggtgtttgtcggagagaaaatattttacagaagatatgctagtagatattgataagtctgatgtgtgtgaattgtgtggggtcacttaaacacgacgattaagtaaccccagaaaagagccctccgagactagaatgatcagtgggtaggagcagcagacgccactcacagaaggcaggtacgtcatctgaagcggcagcagaggtaacaacaacgaccgattgtggcaccgaacgaccaagcgaaacgtaaaaagaggggggggggaggacacacaacacccccccagcaacatgacaattaggtagagacaaaacccgtgagtcacccaatatccgcgaacgaacaacagttgcaacatgaggcgacacagccagcaaagcagtcaccaccacgaaact

SEQ ID NO: 539327 - DNA, 719 bp, Homo sapiens
gtgcaatcgacaatgtgctaacctgcttttctctttttgtcaacgtttttgcattacaggctgcattcttgcccttactgctatagaaacaagaacaaaaggctgggcttcactacttgcacactttctaagcttttatacctcttactctctcttggcaatggctcagattctgcaactggacagctcacgaaccacaggctctgctgcttaagcggcttttaaacttgctgcactttcttaacccctacagctgacaatacacttacagatatcccctgtgttcacagctgtgacggggcctgttttactgtcactgttggcactaaattgtcccgtaaaagggaaagcgtttctaaaggtgtttcagcgcttgtgctgatacaaagtaagttattactttgcaccaggctggttctggccacctgaatttaatactgctatagccaagagaaaccaactcttattctttttggacaacactgttccacttacagttccttcattctctgttgacttcttttctattgcactttactgattccagtgcgctgggaacttgagacatttacttctgaaatagaataggtaacacctcagcgtactatagcaaaatcgcactcagcctcaaactgctggtgttttaaaaataacacatttttaaattcccctcttttaccagaacaactcaaccatcaccaccgctacattctttctgg

SEQ ID NO: 539328 - DNA, 120 bp, Homo sapiens
ttcgacggaagcagagaatgggcctcagaagcaatgtcccaaacttgtggttgggtcatcgtggaaaagaaacctcatataagaaaagatacttacatactggagagatggacttgatta

SEQ ID NO: 539329 - DNA, 888 bp, Homo sapiens
cgggggttgtggcccccgccccctccctatatgcaccctggaaccagcaagtcccagacaaggagacggaggaggaagtcatgggtacgcagcctccagttgtagcaggtttcactattcctatgctggggtacacagtgagagtactcactgtttcacttgtcttgctcttagattgggccatggctttcatcctgtgtcccctgacctgtccaggtgagtgtgagggcagcactgggaagctggagtgctgcttgtgcctcccttcccagtgggctgtgttgactgctgctccccacccctaccgatggtcccaggaagcagggagagttggggaaggcaagattggaaagacaggaagaccaaggcctcggcagaactctctgtcttctctccacttctggtcccctgtggtgatgtgcctgtaatcttgttctccacccaaaccccttcccacgacaaaaacaagactgcctccctctcttccgggagctggtgacagccttgggcctttcagtcccaaagcggccgatgggagtctccctccgactccagatatgaacagggcccaggcctggcgcgagtacggggccacgaggcgagcagatactctgaggcaagtgactagacaccacgccttccgtcagatattactgaacttgatattactctctatccatgcgcagatgataaaagcgaagtctggcattctacagcctcggacacattatgaatcggtctaaaggtgggacgttggcgtaatatcaccgaagcctggatgaaggtatagtatggacgcgtaaatactctatgatacatgaagtgccgtgtgtgtaccataaagtcgtatgaccttaatctactgacgtgtgcggataccagtggttt

SEQ ID NO: 539330 - DNA, 671 bp, Homo sapiens
  misc_feature (37)..(37): n is a, c, g, or t
  misc_feature (62)..(62): n is a, c, g, or t
  misc_feature (69)..(69): n is a, c, g, or t
  misc_feature (81)..(81): n is a, c, g, or t
  misc_feature (91)..(91): n is a, c, g, or t
  misc_feature (140)..(140): n is a, c, g, or t
  misc_feature (203)..(203): n is a, c, g, or t
  misc_feature (213)..(213): n is a, c, g, or t
  misc_feature (216)..(216): n is a, c, g, or t
  misc_feature (254)..(254): n is a, c, g, or t
  misc_feature (283)..(283): n is a, c, g, or t
  misc_feature (289)..(290): n is a, c, g, or t
  misc_feature (298)..(298): n is a, c, g, or t
  misc_feature (414)..(414): n is a, c, g, or t
  misc_feature (428)..(428): n is a, c, g, or t
  misc_feature (433)..(436): n is a, c, g, or t
  misc_feature (448)..(448): n is a, c, g, or t
  misc_feature (484)..(484): n is a, c, g, or t
  misc_feature (632)..(632): n is a, c, g, or t
gggggggggggggggttcaaggggcttttatgaaganctgccctctagtttctcatggcagnatttggnggttctgatcanagggttgggnatcttgatcaagagttcctccttgggtttgaagtcacagtgggcaaggntgacagcagcaaccctttcacatgatttaagcgttagaattatataattctgtacattggggnaatctcaaangtngtaaaattttttttgtcttttggcttaaccctagaganacagtagaccagtttcagcttacatttangatggnngggggggngaacaaaaaatttgacaggaattaaagtgctaagaacatcaccttagaatcaattccaaggacttacatgaagagaaaaccatcctcccatatgaaaatatttgcagtaggagaanacagtgcaataggntccannnnttgcttttaagncctttggtggggcagttactactgctttaaaagccnggttaaagtatactctaagcaaagatgaccgtagagcagctagcttccttttttataatcacagggaaagctctctccattgtccatcaaatcagctctagaaggtttttcttttttttctcaagtgccaaaggggaacactgatttnaagaacctccttttcccaagttttggcccaatttccttt

SEQ ID NO: 539331 - DNA, 362 bp, Homo sapiens
  misc_feature (75)..(75): n is a, c, g, or t
  misc_feature (94)..(94): n is a, c, g, or t
cgtgagccatctcccttattcactgccccctcatccttgtgccacttcccctttctaactagaaaaagtacaatncctagctgggcacagcggnctcatgcctgtaatcccagcactttgggaggctgaggtgggcggatcacctgagggtcgggagttgagaccagcctgaccaacgtggagaaaccctgtctctactaaaaaatacaaaaattagctgggcgtggtggcgcatgtttgtaatccagctaatccggaggctgaggtaggaggatctcttgaacctgggaggcggatattgtggtgagctgagattgcgccattgcactccagcctgggcaacaagagcgaaaccccacctc

SEQ ID NO: 539332 - DNA, 589 bp, Homo sapiens
tgagcgggggagtagcctggaaactctgaaagactgaccgactgactctgacgaggatccgggggctgagggcaagtgaggcggacggacatggagttggtgctgagctgctctacaacaagtctgagtacctcgagacggttgcgcgggtccgaggatatggtatcctcctctttccaagcctgcgctgccgtttgaggcctggtcggcgttcccaacctgggcccatagcccgacacaaccggatgatacctgtagggcattagatcgccggcattatctacgcgatgcccaccgatggtaacagactggctaccgctgtattactccgcgctatggacagatatgaggaccttttgtactttattcctgattttcatcatagtggcgtaaagtgccttcgcgaggataggacaagtcccatccgtgtaacatacgaaatacagacatcggaccttcgggtcccttttcaccactgcccatttggtactctgttaaccttgacgctaaaacaccgcaaacgggttcttttaacatctgacgaaggggagagggggagcggcacactctgacagccaaacactgaagg

SEQ ID NO: 539333 - DNA, 158 bp, Homo sapiens
gcaattttgcacaagagaaaaataaaaagatacaatgaatgtcatcattttatcattttattttcagttggcatgatgttggaatttttgttcattgtcatgaacattgtaacacaatcattgcacaagatacaagttgttttggtttttcacatcaa

SEQ ID NO: 539334 - DNA, 292 bp, Homo sapiens
  misc_feature (4)..(4): n is a, c, g, or t
cccngggcccccccccttttttttttttccccccccggggggggggccggtgtgggggggagaaaaaatttccccggggtttgttaaaaaccccccccccttttggccctttggtttttttttttggggaaaaccccacaccttttttcccccttgggggttttttcccccccccccccccgggggtttttttttttcccggggggcccggggggggggccccccccccccccccccccgggggttgaaaggggtttttttttttttttgggggaaaccccccccgggggga

SEQ ID NO: 539335 - DNA, 909 bp, Homo sapiens
gaggcgggagcccgcgtgccgaagccgggacccctcggtccgttcccccaggcccggcacggggtcggcgcccccccaggtagcctccagtccgaggggtgggtcccggaataccccccgaagctgccgcggcgcgggcatctctggcgcggggacgaaggaggtccagtgcacgggagaaggggcaagccggagcaggggcagggaacgagggttgggaaggccggaaggaaggggagagggaccaaggcgggggctaccagggacgaatggacaaaagggctttgagaggggaggacccaaaaagtccttataaaaagccaaagtctctaagctaggtggtgggtaattcgaaattaagattgggattgtgggtccaaagagaaagtggtacttgcccaaggtggtgtaggaatagttccaaagggtgtcgtaaagttttagcgggagaacttgggaggttcctatcccaattcaaagtcaatattgttcacaagaagtgtggagattaattccattacaagggacgacataggtggccaccgaatagaaggaagaatggctattgtgcgaacagacaacattaaatgaagtacattccaagtgcaatttccaacaaaattatgttggcaccctggcggaattatttgggaggcgcccctgacagggaataatccgggaaagccctaatcggcttgacacagcgtccgtggtgattggtggggccagtgggtgtcaccgccttggaaatataccggctggtcagagcctggcacccctggcgcaggaaacaatatacttcttaatacagagaacgggcaagtccttccctggtatcggccgggacacccggcgacgattctcctaataaactggaacgggtaaccccaaaggccaatgcctttccgc

SEQ ID NO: 539336 - DNA, 452 bp, Homo sapiens
aatggtgtagtctgctgtcgcctgacacacattttccttctggcatgatagtttgtttcgagatgataacactattggcagtgtgaaccttctggactactatgtatccattgaactctcaggagatatgtcccaagatgggaagctttacgcaagcgcttttccgatccatacagtcaccgaccgatgcacctgcgccacatacaatcctatgcggttttctactgtcatgtgcttcaggggtggatgtgcaagggagatatttcctgccctcttgccccaaatatttatctcgtgaagattctcaaggttcacgaaagtgcttcgagggaccgctccccataaggctgtgcgagtggtatgaccggaggggtatttcacacgtggcataggggggtgggggagtttggcgctgtgttcttccatgatgcctcctactgagtaccgtgcgt

SEQ ID NO: 539337 - DNA, 159 bp, Homo sapiens
  misc_feature (35)..(35): n is a, c, g, or t
  misc_feature (39)..(40): n is a, c, g, or t
  misc_feature (143)..(143): n is a, c, g, or t
cagaatcgtgtgagggtgggaatagtgttaatgtnattnnaagagaatgaagagaagtaagccgagggcgtgttgattgtgtagtaagggtgaggtgattttatcggaatgggaggtgattcctatccttcgacgccgatctnctctatccttcgcacg

SEQ ID NO: 539338 - DNA, 517 bp, Homo sapiens
  misc_feature (34)..(34): n is a, c, g, or t
  misc_feature (72)..(72): n is a, c, g, or t
  misc_feature (147)..(147): n is a, c, g, or t
  misc_feature (194)..(194): n is a, c, g, or t
  misc_feature (303)..(303): n is a, c, g, or t
  misc_feature (361)..(361): n is a, c, g, or t
  misc_feature (415)..(415): n is a, c, g, or t
  misc_feature (497)..(497): n is a, c, g, or t
gggcgggccttgctaatttgggcgtatttggggngtgtggcttctcctgtgatagcggcgtaaaggtcggtnaacggtttgcccttcgcctggcgctcttaagccactcctcccgtggtccgtgttggccttgggtccgcggccgcngggcccggggggccccacgggtgtgtgggttcggcgcctggggggcncccctaccctctgtgctgtgtgttcccatgactccagaaataattaatcgcaacttgcattattaagtccacaggcaagtttgaaatctaactagaaaaagtagcagcnaaggcaaaatacgcgggaatttgttagaaaagccacaagatttcttaaaatgcttccngttcaagtcagaattaaggtgacattaggtcccccagctttacagagttgtggntgttttgctgttgttctttcaaaaaagaagaatctgcaataaacatgttcatttgagaaaaatactgtgtttactttttgtngccctccccagttactttaa

SEQ ID NO: 539339 - DNA, 237 bp, Homo sapiens
ggtcccatgggtgcctgtggcgactggacgttcccccaagccacaggggtaaaaagattcatcccttgagaaactagcttgcgatcactggcaggacagggggtcattttgaagtcttaacagttgggcttgggaaatacaggggcttgacccccgggcttgtaaggttggctgttcccagatgcttggtattgaacgcagactccgtttccgcagacttgtaccgggcctcattta

SEQ ID NO: 539340 - DNA, 217 bp, Homo sapiens
  misc_feature (151)..(151): n is a, c, g, or t
tctagagatcccgtcgacggtaccaacacgatttgaatcatctattaactttttagataaccatttgactggttcgaaccagaagactggcttgggttacaataagacgattctgggaccaagtaggttgtaaaggccaaggtatgtttgnggctctctctctctctttctcttttttttttttgggagacagagttcggtctctcacccagggtgg

SEQ ID NO: 539341 - DNA, 163 bp, Homo sapiens
ccactgtacttgggagtgtccacctttacaatacacaagtacagtaacggtaactcgcactaagacaaagcatacttctgatagccattatatttctctaatgggacaaatttatagtttgcctttctgtcacacaaaacagcgaatgtacattatacaatag

SEQ ID NO: 539342 - DNA, 374 bp, Homo sapiens
  misc_feature (24)..(24): n is a, c, g, or t
  misc_feature (111)..(111): n is a, c, g, or t
  misc_feature (177)..(177): n is a, c, g, or t
aagatgccgatacttgatgacagnggcgttccgcatccggtgttggggattcagagtcaggcagactttcagaaagcggtattggaacccttgtatcaggcaatgggcatnaccagcgcagcgagcctcgacactcgcataacagaagtggaacgacgcttgcggagcatgacggtnaaggacaacctcgagatgcgcggctaccgtttcatcgagacggttcagtcgcacgcgccgctgcgcgacatgctggcgatggcaaacagcgggcctgacagcaatggctcacagttattcatcacgctggcagataccgaatggttgaccggccgacacagcgtgtaccggcacaagtgcgtgccggcatggaagtc

SEQ ID NO: 539343 - DNA, 459 bp, Homo sapiens
ttttattaagagttgactgatttgttacatttggtggtggagaatgtaaacattaggtggttggaaacacgggaaaagggggccgcttttttcaaggagaggcccttgaaacagctaccatcggggatactttatttaaaaccaaaggtgtgtggttttaaaaactaccggctttaaaatggcatatttttttaagactggggatcacaattacccacactgtggggcagtgaaacaaatccacctttttttgacagccggtttctgggggcaagaggttgtaaagacataaactggggtttccttacaatgcgggccggggctaaaaaagagggtgggggcgccctgggaaacatatttggggcgcaaaacacaaaccccccgcagaggttgaactaatgatcttcatttatgcccacgaatgagagtccctctcttctaaaaggacaagcttcatcc

SEQ ID NO: 539344 - DNA, 257 bp, Homo sapiens
gattatggtgactaggagatacaagcatgagactcagaagaattactagtttttcataaaatgattcattgggatatcattctaaagcagtgtattctataatttcagtaaatcataatttctcactaaaattgatatttttatagtaaaatccatctactcaaaacttaacactgaggtgaaacttaaactaacatgcctgtaaaggctcccttattatatagctaggtgtttaatttaccaggggtggatccatt

SEQ ID NO: 539345 - DNA, 153 bp, Homo sapiens
ctgaggtattcgatttgctggctcagaaaacttatcagcatttaactgttgtgcatcaatttgccaaagattttatgacttattctgtctgcacctaatgcttctgttacaggtcctcattaacctaggaaacttgtcgtgagcgtggtgctg

SEQ ID NO: 539346 - DNA, 143 bp, Homo sapiens
agatggacaactccgaggaacgcacccatccacccacaaccccagagcctcagagacctgccatgaacacatgaccacgcaccatccaggtaaagtgcttagaagagcgacagagaaacggtgcaaagatgagtgaacaagta

SEQ ID NO: 539347 - DNA, 298 bp, Homo sapiens
gacggggcgctatactgtggcctacacgcatatgccggccatcaccggggagcaattcagaagaacagccagtgtggcccagtagaactgaacgggtgggaccgtcaactccttcaccgaaacgaagcggacgcttcgggccaagcagggtggtaccgcgagccttaaaggcgcgtccctgcaccgtgttaagagtgaaggataattatggcgaagaagatttaccccaaggtcgacatgaccggcggctccacgctcccagatatggaagaggaagtccagaagtactgggtcgacg

SEQ ID NO: 539348 - DNA, 595 bp, Homo sapiens
gactatctcttttgcctaataaatacagagggctgtgtaaagctcagggcccttgttcactagagacaaggtgtcccctgacccttcttccaaacatattcttttgtctcttgtctttattcctgcattcatccccctttgttcagtccaccagggatcctggcaggctgcaagtggtgcctcgaacagcaacagaatctggtgctttacaagtggcgtccaaacacaggggcttcgaggatgtgaatgaagaatgtctgctagagcagaggaactgaaattgacaaggcgaatggggaccccgggatgagtctgctggcagcggatataaggtcagtgccctaaaaaggtactaggagcagtgctttaaagaagtactgggaatgggaagttttctgaatcagggtaacatggagcagaattgtctattgaaggaacaacattatgtgcagttgcttaaagtttcgcttgaaaccaaactggtgctcgggttctcagacattcattaagatgctacaggaggttattacgcataacccatggtttccacggcttatcaaaactcttgatgtggacgatgcgacagaccaggaga

SEQ ID NO: 539349 - DNA, 232 bp, Homo sapiens
tggtcagcgctggcccgaatttgcctcatctactttactccaaatacatgttagccaggtgaggtggatgcatgcctgtaatcccagctactcgggaggctgaggcaggagaattgtttgcactcgggaggcggaggtagcattgagccagattgtgccattgcactccaacctgagcgacaagagcgaaactccatctcctaaaaaacaaacaaccacacacaacaaaatt

SEQ ID NO: 539350 - DNA, 223 bp, Homo sapiens
ttcagctagctggatcactgcttggaagtgagcattattattgaataatgctatatatatgaaaaagaagctctataatgtgaaaagaagagagactcctccaaatgttacaatagggctatgacaactcaccgtgtgagcagagaccaaacttggttttctgaaatgacttaaaattgagtagttcccaccattaatttccattctacacaccacgtagcaa

SEQ ID NO: 539351 - DNA, 978 bp, Homo sapiens
  misc_feature (978)..(978): n is a, c, g, or t
aaaatcactgttaatagaacagacaacctgcagaataggagaatatatttgcaaactatgtatctgacaaattctcctatccagaatctataaggaattcaatcaaacaaatcaacaagcaaaaaacaaacaatcccattaaaaaatgagcaaacaacatgaacagacccttctcaaaggaagacttacatgtgaccaacaaacatgtaaaaccgtgctcaatatcactaatcattagggaatgcaaatcaaaaccacaatgagatatcatctctcatcagtcagaatggctattattacaaactcaaaagctaacagatgctggcgaggttgcagagaaaaaggaatgtctatacactgctgatggaaatacacattagttcagccatagtgaagagcagtctggaggtttctcaaagaacttaaaacagaactaccagtcaacccatcaataccatccttgggcatacccaaaagaataaaaaccattctaccacaaagacacatgcatgcatatgtaactctcagcactatacacaataacaaagacatggaactaaactagatgcccatcaatgctggattggataaagaaaatgtggtaccatacaccgtatggaacactacacaatatacaaaatgagataatggcttgcagcaacacaaatagagctggaggcattttcctaagcgaattaatgcagaaacagaaaacccagtacacatgttctcctgtagtaggagctaacatagtacccaggccaagaaagacatgatagggctattgaggtgcaatggcggaggggggtggaaatccctggtcatgtctaccggggcaaaacttatataaccggatgtttacatgttaggcttttccccaaaaagggaaaatttccaaaggtgtgagtaacacccgtaggtattcgggggggataaatctttaccacagaaaacgatgtggtcaacaccgaaggtccn

SEQ ID NO: 539352 - DNA, 898 bp, Homo sapiens
  misc_feature (371)..(371): n is a, c, g, or t
agcgggtggggcgccgggatcacgctggggaggcagaacgccaagtggggaacgcgtttcgctgtatcgtcttctgcagcgtggatggacgtccagacggctacctcctgcctgctgtaggagctggctgagcaggcggacctgggcgccggcggcggcaaggagcgcagcgctaggatcggctgtacgaccgtatcattagggtgcgtgcacagctccgggagtgccgcggtgagtgggcacggagcccaagctgccgacccgagccgactcgatcagggctcagccatgcgcccctccaagtctctgtgcgagtgacgcatggcaggtcagctccgtgagggtgttgcacggcatacttcctagatagngcgactaactcccgtccagatacacacttttccacttcttctgccgaattccctgcactttttgaagtgactccatcaggcacacttaacttcctgggacccttccattagagacgcctacctaatgaataatcctctagggatgcttgcccaagacaactccgcgcaatttctatcacgccgccccagaaactccagaacggcaatggtcgccggtctccacaaagtttagggcgcactcgataacgtatcacaatccccctggaccacagaactgctactacgaggcccctagcatttgcatgcacacgccgacccacactttccagcaagctagaattgtgccgctacacgcccgtatttggaccatatcacccttcttcacgcaattgcctaatttatgacgcgacagacagcacgctagctgatttaccagccttgggaatcaccccggctcccctttttacctaagctgagcttagatacgcggaccccatccgcaggggcagctcgcgcaagagtctcct

SEQ ID NO: 539353 - DNA, 156 bp, Homo sapiens
cagtttcagccctccattcgcatccagttcaaccctccaatcacatccagttcaacccaccagtcccgtccagttcagccctccaatcccgtccagttcaactctccactcccgtccagttcaagcctccactcccgtccagttcctggcctccca

SEQ ID NO: 539354 - DNA, 332 bp, Homo sapiens
ggggggagtttttttttttgggccccgggggttcttttttttcccgggggggggggggttttttggggcccccggttttctccccccccctcgtctttgggcgggcccccccgcttttttttcccccccccccccccccccccctggtttttcccccccctttttccccccccttttttttttgcttttttttgggggggccttttttttttggtgtgttggggggtccccctttttttttttttttttcgttccccccccggctttgttttttccggggggggcctttgggggtcccttcttgagagggtggggctggggcaaatttttta

SEQ ID NO: 539355 - DNA, 433 bp, Homo sapiens
tacttccacagggagtttattccaaaaataatcggggatgtgaaagaagatttagatgcccagaaatttcagctatctaaaattcatcatttacgttcatgcgaaaaataagctgcggtttcagaccatgaattttatatcattataactaggctcaaacacatctttattaatcaaaatagaaaccattacaatcaacacatttttaagttgtttatccctgtagtgtagaaatccatgctttaggattcgacgaactcttggaaagcattttctgcatcctgctagttgtggaagtgttttccctgcaaaaaggtgtcgcaatgcttgaagaagtcgtagtcaatggagagaggtcaagtgaatatggcggatgaggcaaaatgtcacagcccaatttgttcaacttttgaagcattggttgtgcaacatg

SEQ ID NO: 539356 - DNA, 439 bp, Homo sapiens
  misc_feature (12)..(12): n is a, c, g, or t
  misc_feature (35)..(35): n is a, c, g, or t
  misc_feature (104)..(104): n is a, c, g, or t
  misc_feature (129)..(129): n is a, c, g, or t
  misc_feature (180)..(180): n is a, c, g, or t
  misc_feature (183)..(183): n is a, c, g, or t
cagagggcaggnccttcgctcaaagacaaattggnaagaaactcactgggtcttgtcaaacatgtcactagagaaactggtaatcatgtggcaccccggcagcngtgccttaccgtgaaaaggtgcccngaggtaacatctaaaacgagatgtggttcttatgtttaacgaacgttctanccngccacgtgttatcattatagaatagttgccctttctaactactagcacagtttgagaatacgttaattgctatttactatttaaaaagttttactgaatcagtccataacattaagatgagccctaatatgtaagattttcctctggaatggatgtgagaaatgtaaattttataacagcagtatttatcctggtttaattctaatacgatgtcatgttaatttcatgttgtgattaataaaagcattttttctgc

SEQ ID NO: 539357 - DNA, 808 bp, Homo sapiens
  misc_feature (1)..(1): n is a, c, g, or t
  misc_feature (94)..(94): n is a, c, g, or t
  misc_feature (119)..(119): n is a, c, g, or t
  misc_feature (130)..(130): n is a, c, g, or t
  misc_feature (263)..(263): n is a, c, g, or t
  misc_feature (342)..(342): n is a, c, g, or t
  misc_feature (389)..(389): n is a, c, g, or t
  misc_feature (391)..(391): n is a, c, g, or t
  misc_feature (583)..(583): n is a, c, g, or t
  misc_feature (619)..(619): n is a, c, g, or t
  misc_feature (624)..(624): n is a, c, g, or t
  misc_feature (627)..(627): n is a, c, g, or t
  misc_feature (689)..(689): n is a, c, g, or t
  misc_feature (706)..(706): n is a, c, g, or t
  misc_feature (710)..(710): n is a, c, g, or t
  misc_feature (722)..(722): n is a, c, g, or t
  misc_feature (798)..(798): n is a, c, g, or t
nagaaaggaaaagaaagaaaagaaaagaaaagaaataataaataaaaaagaaagggaagaagaagttgataagagagaagggggaggaagaaanaaagaaaatagaaagagagaaaaanaatggaaaatnatgattataagaaaaaaaaagattaaatgaagaaagaagaggaatgggaaagggaaatgataatggaaaaggaatgggagaagaagaagagaaagaaattaaaggaatggtgtaaataaaaaataaggaaggnggggaaaaagatagagaaaatagaagaggaattaagggatggaatgaagataatgatgatgatggaggtaatataaggngaaagattggaaaagaaagagagaggaaagaagagagtgaaaaagananaaaaagtaaaaaaggaaatggatttaatagaaagaaaaggagtaaaaatggtgtaaataggagaagaagaaatagtggatgggaatgtgaagatgaaaatgggaatgatatggaaaataataatgagatttgaaataaaggaaatataagtggaagagaattaagaaaaggaagggatgataatgtggtgtnagagaaagaaagaaaattaaaaaaatgttaaaatanagaanttnaaaataagatggaaggatggaataggattatgtgatttgataaaaagaaaaaggaaagagangattgaataagggaagntgtngaaggatgatanaataaaaaatatgaataaggattttgaagtggaagagaagtaaatggaaataaaaaagatgatggatgaagaaganatagttggaa

SEQ ID NO: 539358 - DNA, 983 bp, Homo sapiens
  misc_feature (391)..(391): n is a, c, g, or t
actgcactccagtctggggtgatacagcaacactctgtgattgttccactgcactccagtctggggtgatacagcaacactctgtctctaaaaaaaaaaaaaaattaggctgaatgcagaggctcccacctgtgatcccagcatttggggaggccaaggggggaggatcacttgaagtcaggggttcaaccccaacctcggcaacagagcaagacccaggctctacaaaaatgaaaataaaagccagatgtggtgggcatgtgcctgtagtctcagctatttgaagctgaggcaggaggatggcttgagccaaggagtttggaggcctcagttaactaggatcatgccactgaactctatgcctgggcagacatgaagaccaatggttctntttagggccaaaccaaagagaacaaaatacgaagagagagacagagacgacgcctacacaagagaaagagatccacacaaccgaggggggggcgcgcaaagaggaccacgcgcccgtattacgagaacaaccccctgtgcgtcgccgtcgtgtcgccccacaacatgtggggggggggcggcgcggcgaccccccagatgtgtgggggcaggctgagagtaacactgtaagacaaccgcacccggaagggcgtcgcgagatgccgcatcttttaaaatacgcgcacgcgccagatagggggagaactcgtcccgtgtgggtccttccttgtgaggcgacccctccctattgtggtgacccccgtcgctttctcgaagcaccttctctgcatgctcgccttgtggtggccaccaaatatattgtttcatgtggtacgtcttcccaccctgggaggcctcactttggagaggcggccgctgctaatctactgtggtgtcagtctccgccgcccaccggagtttttccacgggggtggtgtctccgtggggtgtgggcccccctcttgggtttttgctcgagatgagtgtgaccc

SEQ ID NO: 539359 - DNA, 442 bp, Homo sapiens
gtgttctacagatttaagattgaacattcatcacaaaagaagacatagtactggtctgtaagcacaagacaatgtttcgagacatcatcagttaccaggaaagataacatttaagccacagagagagttaaggctctgctaccacggaggccaggccgaaaggccaagtggcgttttggcaggcgggcagcagggtggcactgctggcgagagtgcacatggtccagccactccagaaagcaggctggcagtttttatgaaattaaaaatttgctgccccatgccccagcaacctccctcctcagtgttcacccaggaaaaaggaaaacactcatgcttccacgcaaaccgacacagggactctcaccgctacagctgtgatctccacagactgggagcttccacgcagaccagcagcaggactctcaccgcttcagctgtg

SEQ ID NO: 539360 - DNA, 204 bp, Homo sapiens
gattggttccattacacatattaagtgattatttcagctaattaacatattaatcccctcaaatacataccacttctttgtggagagaatatttaaaatcctttttttttttttggcaatgaattctggcggtttggcccaggcggaagtgcagggttgtgatcaaggtccagggaaccctcgtgcctctccggggttcaagca

SEQ ID NO: 539361 - DNA, 224 bp, Homo sapiens
ccctttttcctgtaaaaattttttttattccccagttggctggggccccccccctttccatttcccttggggaccccgtgggtgggttcccctttttgtttcaccttttccccggggctttggggttttgtccccaagttttttttcccattttttggccttcccccccccccaaggtttttttttcccccaaccccaaataaattcccttgggttttggggga

SEQ ID NO: 539362 - DNA, 460 bp, Homo sapiens
tagggcaaaaccctgcagtattaaacactgaaataaatgtgagctatatgtacacttaagaaagattaataaaaataagtaagacaattaattacccaaatattctaattcagggtcactggtggccagtgtatcccagcagctcaggggcaagacagggacccagtcctggacaggatgccattccattgtggggtgcaatcacatacaccccaacactcacccggactgagaccatttagacacaccaattcacctaatgtgtacagttttgggatatgggaagaaactgtagtacctagagaaaacccacatagacatggggagaccatgcaaactccacacagacagtggcccctgctgggaatctatttttttttttggccatcaacattatagttaaacaatgtccttaaagatctgctgtacatttatttgggcccttatgaggggtacccga

SEQ ID NO: 539363 - DNA, 395 bp, Homo sapiens
atatctaattttattggtggttatagaaacaaatgctaagaggagaaacaaaacttccccatccacatacaacaatttaatagataaaagaacagttaaaataaatgaaaaacaaaacgtcgaaattctaaactttgtcatagcttcaaaacattaacctctgatacaatgagaaatcacattcagatctcaaactcttaaaaaaaagtatggctccttattaaaaaaatactgtatcccacttgaaatgaaaacacaggttgcctgctgatgacatggctggggctgtccctgcctcaggtgttaagcgtgccccctcccggggctggggagcagacataccctgccggcgagagcccacctacactcctccagggtgagacacgcgaggggac

SEQ ID NO: 539364 - DNA, 995 bp, Homo sapiens
ctactatattgcgtcggcgctgcgatatatccgcggttgctctctccccgcggggtttattatctttcgcgcggggacgcgtttttgtgccggcgctaagcaggggcttattctagcagctctggggcgacccccctcttttctgcacagcattcggggggctattttcttgtgtaccggcgcgctacccccttcccctccggggatttcttgctctgcgctggaccaaaagagggtaatttgctgacggcgttggttgcgtcgcaacagaccggcgccttggttagccggcgccgggtcaagtctggctgtaagtcgtgaccggccaagggaggagctccgcggtctgttgggacgtgctcattcagggttagcccccctcgttagcggagggagggtcttctatagcggccccaaccagatttgggggcgctcttaggctcctcgcccccccctctagttgttatgatgggtgttgtgcattttgctcccacgcctcctccgctcctgtgtgtagcctctcccaccgcatgcatcattattgtgtgggtcgcctctcgcccacccagcggggccgccatgtgtgttgtctccccctctcctctttagaggcgtcatcattctgttgggtggtaaagtcacatacagtcgtcgcaaacatattcttctctccccgcgaaatgtaccctgcgccagctctcatatgtttaaacaacgcgcggattctaagcaactgctataccgccccgcccatattttcttcacacgcctccgcacccacaccatttcttgttatttcgccccaccccttgctaatacacccacccactccggctacgtctcttattaacaggcgtagcgctataaaatacattacaacacgtattctccgcctcacatatatcctccccccctcttttaccctcacttaaaaacctctcggctcgtccccccccggtgtaaagtccccaaataaaaaaaaaaatcggaaagca

SEQ ID NO: 539365 - DNA, 687 bp, Homo sapiens
  misc_feature (5)..(5): n is a, c, g, or t
  misc_feature (88)..(89): n is a, c, g, or t
  misc_feature (204)..(204): n is a, c, g, or t
  misc_feature (241)..(241): n is a, c, g, or t
  misc_feature (276)..(276): n is a, c, g, or t
  misc_feature (280)..(280): n is a, c, g, or t
  misc_feature (289)..(289): n is a, c, g, or t
  misc_feature (320)..(320): n is a, c, g, or t
  misc_feature (322)..(322): n is a, c, g, or t
  misc_feature (324)..(326): n is a, c, g, or t
  misc_feature (329)..(329): n is a, c, g, or t
  misc_feature (335)..(336): n is a, c, g, or t
  misc_feature (339)..(339): n is a, c, g, or t
  misc_feature (342)..(343): n is a, c, g, or t
  misc_feature (361)..(361): n is a, c, g, or t
  misc_feature (369)..(370): n is a, c, g, or t
  misc_feature (376)..(376): n is a, c, g, or t
  misc_feature (390)..(390): n is a, c, g, or t
  misc_feature (399)..(400): n is a, c, g, or t
  misc_feature (415)..(415): n is a, c, g, or t
  misc_feature (420)..(421): n is a, c, g, or t
  misc_feature (423)..(424): n is a, c, g, or t
  misc_feature (427)..(427): n is a, c, g, or t
  misc_feature (429)..(429): n is a, c, g, or t
  misc_feature (434)..(434): n is a, c, g, or t
  misc_feature (438)..(440): n is a, c, g, or t
  misc_feature (442)..(443): n is a, c, g, or t
  misc_feature (449)..(449): n is a, c, g, or t
  misc_feature (476)..(476): n is a, c, g, or t
  misc_feature (490)..(490): n is a, c, g, or t
  misc_feature (515)..(515): n is a, c, g, or t
  misc_feature (524)..(524): n is a, c, g, or t
  misc_feature (598)..(598): n is a, c, g, or t
  misc_feature (610)..(610): n is a, c, g, or t
  misc_feature (623)..(623): n is a, c, g, or t
  misc_feature (682)..(682): n is a, c, g, or t
catcnataaattgtttttgaaagtcattaaaattatttaaataaactgtgatttggttatcagtggggtgctaagcagacattaaaannacaatatatgcgtatttatatatagttaaatataacagtgtaaataaatccacaatatattgttgactggaaagaaagtttaagtaatgtgtacaaaagaaaccacatttttggntcaaaataaaaagaaacaactgatgtacatacataancatgcccagtaaaatatttagaaggatatatagcnagtntctccaagncactatctctggctagtagaattcctaaacncntnnnggnatttgnntgnggnnaggggcatgcctgacttnggcactgnngggganagtaaagcgatctntggggaagnnactttgtgagagaangagannanntcncngaggnaggnnntnnaatggntccgatacctttcaatcagaaatttanttcaattatgggcnattgcccattggtgagaaagggganttaaaaaanaactcattggcttttatttttcttctaacgtgttccagaacacattcatgcttaaatttttatatttccctaantattaggtattntgaatttgtaatnttgttatcaggctcaattttcaagctgggtcttattaatttttagtatatgtgctgccnaggtg

SEQ ID NO: 539366 - DNA, 322 bp, Homo sapiens
cactgaatgaccgaggcgcctgtatcgcaggcaagccagctcccacatggaccgcgtccaggcaaagggcgctgtatttcatacgggacaaacaacaagggggcgaatcttcatccgccccctgtgtgtccgcttactcctgcggttcttcttcgtctgcggcagcgtcgagggttggctcgtcaacgttgtcatcgccagctgcgatcacctcgccttcaaattcctcaccttcgagctcttcaccttcgacttccgaaggctcctgcacacgctccaggccgaccagcttttcgtccttggccagcttgatcagggtcac

SEQ ID NO: 539367 - DNA, 1091 bp, Homo sapiens
gcaagttctcaccaggagtatgagtccatcgaggcctgggcagcagtgcacgtgggagaattgaaacctggaggtgaacaagcacacgaaccggtatgcgaatgtcatcggctacgaccactctcgagtcattgccttacgctctatcgatggcgtccccggcggagtgactacgatccaactgccaagctagcatcagatggctaccgaaagcagaatgcgctacatcgagcatggcaggtccccctgccccgaagaccatgggatgatgttctgggaggatggtgtgggaacagctgcaactgggctactgtgtgtcatgatgacacgagctggaggagaagtccctgggtacccaatgtgattcagtcactggccaggccgtgggtacctgaagacctgtggacttatgcagggtgacacctgtgggacaggggtggaactggcagatacacgtaggatcgcaagcttcctgcaccttccgacaacgaagttggctcccaagtgagaagaccgcgagctgcgtgtacgttcaccaggtcattgggctggccaagaaccatgggagtttccgtgaaagtaggctatggcccatacctggcctgtcctaacgacagggtcaaaggcttggaaccccctaagaagcatgggcccttgggtgggtcaccttgcaaccgcggggcgcaggggctgcccccggcttggttctccggggcttgatggccatgtcgtagcggacaacacacactaagaaagaggggaattgttgcgtcacgggacgtgcaatgcagcccacgaggacctcgtgggtggaaccgcgggaccaggcggcgacccacagaaagcgctagcggaggtgacacgccagggcgacacaggtaccgccgcgaggagggcaaacccgaaggggccaggccacacgggagaagtagcgccagccgaaacagcgggcaaccaacgccaggtcgggaaagcaccgccgacgagacaccgcggactcgccacaagcaggggtgccccagggagggcacaaacggaggaagcaggcaacacggagacgggcggagcacacacgcggacacaggcacaac

SEQ ID NO: 539368 - DNA, 445 bp, Homo sapiens
gcacgcgagcacggtgggagatgcctgagattgtaggctctcagcacatatttgttgctttttcctcccccctccccataccctccagtttgttgaaagtgatgcacatgaagagctcttgtttaatattccgcaaggatctccttgtggcctacactcaagctaaataggctgtacccaggtgcctcagaaggattcattcactggtgtcaagagcacacatttgcttctagaaatgggataaattactttggtgggtttgaggaggaaagcatcatatctttcttggtgccgactggaaacagatgtatttgtagaacaataactcggaaattgaggtagatttcttataattgtataatgctctaggtagacaggatcttagttatctagtacacggtgaccgatgagttaactggagcccatacacgggagggtcttgccc

SEQ ID NO: 539369 - DNA, 1097 bp, Homo sapiens
tggtgccgtttaccacctgggcttttaaccaattgcccgcattgcactagcccattgagaagccaccatgaaccaggttcccaacatgggtggaatgtagccttggtaccgccacaaggacgttggtttacgccttgtcgtgacgtctttgccaagattgcaaccaagttccaactccgacgaacttacccgtaaggttaccttggggttgtaaactcccaagggcgttttccccatccaccctgtccaagtgactcttatggggctccaaatggaacctacaatgggggctccctcctcccctagtgtaattgttcgcccttcccgctacttagaatagaaaccgtatcgagagcccttggtgcaatggtaattgccccttcggaatagagcgggcaacagccgttcaaaggacgtactgtcccagacgagcttcctacaagagctaagttccctggccagagcgctctatgcgtttgcctgcaactcgaaccccttactattgggggacggccaggcccctgtacgtgctatctgtaaatacgggcgtatgtaacattgcacgaaatacatgacgcgaggtctctagactcgggttcgcgcagacacatttcatttcgctccttaagccatttgctgggtttgcctctgcactggtccacacagctaccatgcgtagagactcgtccaattggtttacacctgaggccccgtgagcatcggagacacagtgagaagaggtgcaagacctgccctaaggtcgaagtgagagctattacgtggtcatgcgctgtctaggacctagcatgttcctcttcagcagcgtagacacccaacgtacctctgggctcatgacctccggtttgcacttcgtccctcccatgggacgaatgatgcctgaagggaacgggagtgaatatggtgtgcaagacaggaactcagggcctgattcaaccttcccttctccaggtggcctaaacaggagatagatagatagaagaagacaggctcgggctaagcggtaggatgcagtacaaccggcgctttagtcaaacagttgtgcccacctttggcaagatacggcccaggtgccaact

SEQ ID NO: 539370 - DNA, 225 bp, Homo sapiens
tgcctgccttcctcctccctcccgggtgggctgcccccttgcctgcctgcatgcagggttccagcaaagccagctttttcaaagccaggtggatcctgtttcggtcctgcctaggtgtgtgaccctgggggaatttacctttttcagcttttgcttccccctttattaaaatggggctgatgtcccagggttgtttttagatttaaaaatattaaaaaccgggga

SEQ ID NO: 539371 - DNA, 514 bp, Homo sapiens
ccccccggttttaatgggattccttttttgtttggagggaaaaggagggagggggggtttattatctttaatgcctttaaaaagggcccccttttgaagccttgggccctttcttttttctagggcggacccctcgaggctttttccttaaagggttggggggggaaaaaaaaaaattttaaggttgggcaggaggagttttttaaagaacccctggcccacaccctttctttttaaggaaagaacctttcgaggggttagggggggggtgttcccaaaaagtccctttttttttttaacccccccttttaaagggggggttttccggggtcccccccccctttcaggccctcccccctccccttttttaaaagggggccccccccttgggggttcagggtgggttgcccgggtttttttttcccttttgccaggggggtggggtttttttttttaatgttaattccttcccccttttcggccccctcccaaataaacactttttttaggggga

SEQ ID NO: 539372 - DNA, 368 bp, Homo sapiens
tatggaatagggaggcctgaagagaaaaagaggtggagaatagctggcctgtggagcagtcataacacatacagcatttgttgattaagttcaaggtcctatatgggtgtggtttgtctcacccaaaaacaattagaacagtaacaccaaagatcacagatcacagatcaccataacaaatataatgaaaataacacaactagacatgctttgagaattaccaaaatgtgattcagagacaaagtaagcatttgctactggaaaaatggtgctaacagacttgctttatgtaatgttgccaaaatgcttcaatttgtaaaaaacacaacatctgtggaatgcaataaagcaaaaaatactaaaacaaa

SEQ ID NO: 539373 - DNA, 668 bp, Homo sapiens
gggtatgttgaagataactaaggatttttctctttgggaggcatcaaaaggatggcagttggctttaatctttttatgttcattttctttaagtaggtgacctttctgcattaagaactgttttaatctttaactaccttttcttttctcctttggggagacagcatgacatgtcctgaaggtcaccttggcctttgaaaaaggtttgatgaaggaattcacaggtgactgccaggcctttgaaaagaatgggatctgttcacttctggcctttttggccgggacctcctgattggggttaagggggcaatttcccccatatcggatttagaatcactgagtttgcgctagatgaaattttgaaaattcctgcttgcttcattagactgatgaggtgcgttttcttcttcatatgaacagttagttaatatcagcaccgttttaactcagtgctcactacttaatttcccactgcaccacaagtgccttacctaaatgacctgaattttcctctcaaggttaagagtcctatctgccgtttccacggattttcctggacatgccatgttccggtcaataccctccagcgttgggaaatggccgtcactacgcgcaatcccaacttggggcaccgccttcattcacccccctttctttccttcggtcct

SEQ ID NO: 539374 - DNA, 293 bp, Homo sapiens
gtgtactgagatgaatcaggagtgcccataaattgatggcatagaaatacccaaacagttctgcgggtacaagtaagctggtcttcgccagaccttgctgatgtgcagagcttgcgagtaaagcattggttggtcccggaatcatcaagacagcaatcattgccaatacaaacagccaactctcaatcattgacatccaacaacagcattaaagatgcgcaatttagccgaaaaagagtggcttcctcaagtcaaagcggaaaaaaacacagaacccatgaggtagaaaagcg

SEQ ID NO: 539375 - DNA, 201 bp, Homo sapiens
ttttctctgatcgctcaaggcaggagttggagatcagcctggcatcatagtgagctcctggagaccctatctctacaaaaaaaaaaaaaaaaaatttagccagccaggggggaaagcccttgtagtcccaattaaccaattactcaggaggctgagggaggaggatcatggagcccaggagtttggaggcttgcagggagt

SEQ ID NO: 539376 - DNA, 140 bp, Homo sapiens
cacaggtgttatgatgctatatgaaacaagctcagtcaaagaactcaggaacacttaaaagttaagtcctttaagtcagattcagaaacaatctggcatacgaatcactctgaagtttctaactggtcatcctctgtata

SEQ ID NO: 539377 - DNA, 110 bp, Homo sapiens
ataggcctccgggttccttatttccggattttcccttggcgccggtgtgacggctcaggtgtatgccctcatcgagtaccttacccgtggtacctccgctgagtctcata

SEQ ID NO: 539378 - DNA, 95 bp, Homo sapiens
  misc_feature (34)..(34): n is a, c, g, or t
  misc_feature (89)..(89): n is a, c, g, or t
taaccaacccaaggagggtaagtgcacccagcanccacccagccatgtgatgggtggggtgcctctcattgggggcggccactaccacngccccg

SEQ ID NO: 539379 - DNA, 107 bp, Homo sapiens
taaaaagaaatagggcctttaatggaagagtttccccttgggtatataagtgagcaccgggggaaccttccaacacgagcaaaggggggccaggtatgaacacaggg

SEQ ID NO: 539380 - DNA, 159 bp, Homo sapiens
ttcccttacaaggagaccagtgtactattgaaccaacaggatatctatttttattatttagcatgagttaatcctacaaacacaaattaaatacctcttttataaaacatctttatccagtgttctcaattgcatggcagcatgcggatccactccatc

SEQ ID NO: 539381 - DNA, 134 bp, Homo sapiens
  misc_feature (47)..(48): n is a, c, g, or t
  misc_feature (80)..(81): n is a, c, g, or t
  misc_feature (91)..(91): n is a, c, g, or t
  misc_feature (97)..(97): n is a, c, g, or t
  misc_feature (110)..(112): n is a, c, g, or t
  misc_feature (114)..(116): n is a, c, g, or t
  misc_feature (119)..(119): n is a, c, g, or t
  misc_feature (123)..(124): n is a, c, g, or t
  misc_feature (130)..(130): n is a, c, g, or t
ggcccctttttccccggggggcccccccctttggggggcccccgggnnttttttccccccccccccccccccccccgggnnttttttttgntttggnggggggggggggnnntnnnaangggnntttttnccca

SEQ ID NO: 539382 - DNA, 1037 bp, Homo sapiens
agcggcctttccttaccttcaggtcaggagccggatccgcgtgtgtgtgtgtccgctcgccctctgctccgtaccggcggttgcccactgccctcctacggtgccaccatgggcctgactggacaactctggagcgacgttccgtcccaacgtgagatctgcaccaggcgccgttcctaccctgtggcgcgctcaggccacaggcggacgggacttactgccggagaagccaccatgcttcgcgtggttgggaacccgagtgatggagaatggggaactgctccgatgatcgcgcaagtgtctaggtgaaggtcgagcatgaatacgcctttagagagagagacaatgcaatagtcacttaatgaagtatggagatctggcgaatgcttggatgcacatgaccgcggcatgcatgaatggaaacaagccttcacgatgactgtgcctacgcgcgtacgcgacaagggctagcacaggcccgagaatttgcgcgcctggagaaaatgttcgggacaatggtaactaagcgtgacgcgatatggtgggactgcgggtgagacttgttgggcaacggtatagtcgtgccagtaacctacgaacctgcgtgtgatgatatcagggtaaggtcctctgtacatgatgagggatcggggttgtgtgcatcatgattgcatgaactaaacttctacgtggggaaagcttgggaaggacactataaaaggattgctgggaagcaccaaggttggttcctggacatagatgacatttagtaaaaatgttttgaaagtccgtaaggagtgatctgtacatcttggacgcgaaaaatatgcaataaacaatgaggtagtaaaaaggcgagtgcaacgaacatgcgacatcgttttcgagagtgaaattgacgatgggactgttgtctgtcgattaacatggagggtagatttcgggtatattttaagttgaacaccccaaaggaaaatttgacgtgggtttgtatgaaccttctacagaagaggcgtcgttgattggaacgggtgaat

SEQ ID NO: 539383 - DNA, 168 bp, Homo sapiens
tcacactggttgttgatataatccccttccaaagcgtgagccatcatatctggcctgtatattgaattttaaaaactcaacagaagtaggatgattaagagtagggcttccagtgaaagggattatatcaacaaccagtatgagggattatatcaacaaccagtgtga

SEQ ID NO: 539384 - DNA, 144 bp, Homo sapiens
tggacttcccgggggaagtgccctggagtaagctgccattcttctgtatcaatgttatcagttatgctttatactccagtcacctggttttgcatttgattcctagtctgtatcttgttttgtattttctccccggaagttcca

SEQ ID NO: 539385 - DNA, 875 bp, Homo sapiens
  misc_feature (133)..(133): n is a, c, g, or t
caacagagagatgtggaaagagctaaagaaaccaccctttgttcccaactccactttacccatacttttactgcaaccacaaacactgtcccttccggcgctccctcttcttacagcatggcacctctctganaaccaattatcgatattccacgctttttcagccctcagcgttaccaagcataaactactactgtatatactaacccttctattactctgctactactctttgtgcgcactaactaccattcagcgctgcgctgctgggctgactccactctataactctcgaaccctaggctatcatccctctcgcgtcttcccacagctcatgcttgagcgtgggcctccctggctatggtcacaacagccagcgctactaactgtaaccttcagccccagccctttgtacctaacgctcttgatagctggatatactctttctaagctctagccccaatactagggtaactggaacatttccctgccctctgggttcccccactcttctactcatccacgacagaccagctgcatacatccacctcaatgccaccaacctcctgcgccttcagctcaacgctgagcagctgtgcaacctgtgctgcgcccagacgagccctccacacccctcccctagggtgccagaggacgcccagggccctttactgtctaagcaattcattgcaccttgaacaaggcaaaccccttaatcctcgccaaagcgacgagtcaagcccagtcgattcatacccgggtcactccttggaatgggaatccccctttgacaaacttccacctccaagggcaagacccgctataaaactccaagcctcgcacgcctgcctgaaacagcaacctaacacccccat

SEQ ID NO: 539386 - DNA, 971 bp, Homo sapiens
ctttgacgaggatggagatggcacttatcaccaccaaggtagttgtggtgactagtgatgatgatccctgggtacagaatccccactgaagcagagctgcgtggatatgatcaatgaggtggatgcacgatgggaacgggaccattatgacttctcacggcagtttcctgtaccatgatggaccagaacacatgaaggactacagacagtgaggaggagatccgagtaggcgttccgtgtctttgacaaggatgggaatggctacatctagtgccgcagagtctgcgtcacgtaatgacgaacctgggggagaagctgaccgatgaggaggtggatgccgatgatcagggaggctgagatcgatggagatggccaggtcaattatggaagagttagtacagatgatagactgcaaagatgacatggccccctcggagcagattggtcgatgaccacgttcctacattgatctcgtactcattctcagcagacgcgcacgtctctcttcaacgatcccctggtgtaccccaggttactagtcaaaccaccaattgatagactgaggacatctgcataaaagcaacaaaagattagtaccacaagactggcttgatagcatctatatctccattcttcaccatgaagtctctctaccatgcacacatcatactacttccattatagcacctcgaccatctatacagtaccacgtcgtatccataggccttgactgacatacataacgttgaacgacacagttccccacaagcagtcgcacaatagggaaggaaagacttaatgacccgcttacgtccaagaaccaggaataggatacatccatttcaaatataggagtaggatatacctacaaggtattggtcactctcatataatgagatacgccgaaagtaggctagcaaagcagatacccgggggaccaagaatgaaaagggacaaaaaggtcctttaac

SEQ ID NO: 539387 - DNA, 135 bp, Homo sapiens
tggtgggtcgttctgtgggcgaaaaagcatcgctcactaccacaagctgggcatcgaaccgatgagcaagaccctggtgtctccgacagtctgacattgcccaaagccttggaaatattccgggcgttgcgcggt

SEQ ID NO: 539388 - DNA, 106 bp, Homo sapiens
  misc_feature (63)..(63): n is a, c, g, or t
  misc_feature (70)..(70): n is a, c, g, or t
ctagaggatccttttgggtgctttcatcataggctggagctgaggaggaaaaatgattcatgncctgganccatggaccccttgctgtttgcagccagtgacttgg

SEQ ID NO: 539389 - DNA, 168 bp, Homo sapiens
gcggccgactactactactactgctcgaattcaagcttctaacgatgtacggggacatgggggtggctggacaggcttgttggagtcgtataatgcaatgaataaaaacttacggctgccttaaatgcaaatgtcaagcccttaaataaaatttaacaaagtcaaaaa

SEQ ID NO: 539390 - DNA, 1003 bp, Homo sapiens
gtttgagatgtgcgtgctaccggcttaggagtgcataactgtcgttggtgtggatgtactgtcgtgagtttaaaggggatagactttgctgtagagtaccgggaccccttgatgtcctgactgatgatgtgcggaggagtgtcctcgatgttccttggcgaggcgggacaccacgtttatggtgcgaaaacctcatctccttgatttctatgtatgcaggcagaacacggtttatgccccgtgagactagttgcttgagcattcgattgtcaatataatactcaaaagaggatcctgctgggagagcatgcgattgctgcgcgagtgcaggtgctttggtgagctactctagagaaaggtactgtctcgatggtcacgtgttatgaatccttccggtggagtttctggcacaaggaagggctgtgcgtggcacgacttgcttgatgtctatttgcgaagccaatctacatatgtgaggtcagtatattagtccatgtgactttattatataaacccagatcacgaggctagtccttactcgggtagccaatggttgtcatccgtgcgttaatgagcactctggttatgaccaacttcctctcatggatgacttgtctatgttaatctgtctgagcaagttgctgctgttgttaaccactaaggatttgtctcgtgggcttattgtgagactaatgggccagtcccatgcatctatacataggtagctcactcaccggggtttgtgttcggtggtatgctgcttcggagaagctctgctccgtgctgtggcaacgcattgtcgtgttctcccatgggatggtgatgtgcgatctggacctttccggaggatcggtctccactttccactcactctccgtggtgttgttggcatctggcgcgccgggggactgtccgggggctggaggcccgcttactgttgtgttctctgtgttgccctgcgggggggtggggcctcgggcatgcatcttggaggggcccttcg

SEQ ID NO: 539391 - DNA, 245 bp, Homo sapiens
aggccgaggcgggtgcatcctttgagcccaggagtttgagaccagtctgagcaacatagcaagacctggtctgtacaaaaaattagccaggtatggtggcatgtgcctgtggtcacagctactctgggcactgagggggcaggatcacttgagcccaggcttgagcccagtgagctatgatggcaccactgactgcaccccagcctgggtgacagaatgagaccctgtcggtctcacgaattccg

SEQ ID NO: 539392 - DNA, 248 bp, Homo sapiens
agtatgggccagaaattatatctccctttggcgtggtggggtgagatgtacagctattattgagatatcattcctgtaccatacaattcacttaaagtgtacgagtcagcggttcttacgttctattcacaacaattgtgcaactatcacctgataaattttagaacttactctattccttcaaaaactcttatcttcacaaacaaccattagctgtcataccctgaaaatatctgtgcccattacaa

SEQ ID NO: 539393 - DNA, 936 bp, Homo sapiens
tcattttgtagtcggtggttttacatgtatttggtatttcatactatcagtttttaaattcttggcctttgatgttgatgaaatttcgggagtcataatgctttgccccctattgtctgtttgtagtcaattctcttgcaatatgctctgtaatccaaggtggggttacttggtcgtgtttccagcattcatcagtagcttatggtcagtgggcagtagtatttttaaattaggataactaagccttatgcatgtagaggcagatgctcagagaagttatcagggtagtctatcatgttttacaacagatttgtggaactcttctcatagcacattgtgttggtcagggcctagtctgctacaaagtgtgaatatgttttagtacttatactcatgtgtatgggcttatatactctcgagttggactgtatattgtgatctatattgtattcacaggttattttagtttctgttctgtggtaagtttaagcattccacaaagggtttttttgtagttttttttttcgcaccccatgctgcttgatttgctaaattcggtcacagtctgatacgatgacgctgttatatgtatgtcttttttttaatgtgctgtgtcaagattagtctactcataagccatcttggtaaatttccccaacagtgtgaagatagaattccttcagggtgatgccaggttctatttgggatttatatacaacctgcctttgggtggagaagccattgtcttcggaaaccttggctgtagatctgaagcgtgtatagtctactgttgtgactctgaagttcacctagttaaaagggacttacccatagccaaatcatggatatggttataaaagtgattgttggcacatcctatgcaatatatctagatagtgtatcatggtaccagataataacatagaggggatgaag

SEQ ID NO: 539394 - DNA, 438 bp, Homo sapiens
atcgcccaccactcaggcctggactaccagtcatagcctaagataagccattagcttaacaacaagctgatcaggacataggctgatctcttagcgatgaatctatcccccgtagggagtatcttggtattaatcatctgtctccacatggctatccctacactaatgaggcacactgacctatgcggtgactcacccggtacgccgactaactccagacattcgtagcaagcctagacagcttcatcgatacgacgtctgcatgctacttaggcacgccgccccgcgtttcacatctcagccagtgatcaaacctctccactaacaaggagacctccacgactccgggggaatccctctctagaagctcgaaccgtgcatgcgcagtgcaagcgtctggcacctggccgatcgcttcttacaaacgctctgctgacc

SEQ ID NO: 539395 - DNA, 127 bp, Homo sapiens
gaccagcaacaggctggggctaggcagctgacaggaccagagtcagggcaagggccagagcagtgcaaggccaggtagggcaggcatttcaggatcagggccagtggagaaccagggcaagttctca

SEQ ID NO: 539396 - DNA, 1324 bp, Homo sapiens
  misc_feature (885)..(885): n is a, c, g, or t
tcacggtttcagtttgccctgtgtgctgtatctctttaggtcggtgtgtgtggtctctttgtaattcgctattgtgtcatctcgttaaaggtcttcggctactggccattgtctttgtcagacgtaatgttgtcgcctttaatgtatctctgtcatgttttctaggcttcatagtgccgattcaacgcgactggctctgtctcatgccctaggaccgcttgcgggggtcggtgtatcaatagtggtccatgcatcctggataccggttcagtggtctattcttggggcagtgccgcaggtcatgaagaagtgtctggtcaggagtaccctagctgtgagtcgcattcttgtctgatgacgtcaacgtcctgtcgatggaactctgccgttccacgttttgcatcatgatcgctgacctgtgcactgctgcgtcgtctgctgcgggtacgtctgcgataatattgctgctctgattagtgtgagagtacgtggccatggatgtagggaaccgcctgtcagcagtcacttggtttatcatgatctcgacgtcaggttacttgtcatcttatgtctagacaactatgaacacgggactatcgggcatggtgccatgccgaggaactctgcattgctgtcgctcgtctgtctctcatatgacgatgtgctgtcactgggtctattgccaagtatatgtatgcataggtcctgagtctatggcatatgacatgtgtataactgagattccaggacggatctcgagaatgcgcgagtcttagtggagtcagactctctcaagaaggctacaggatatataagtagtagatacgataggatgatatgatgcaatagattgcatgaatgtaatatagctgcagtatcgcgtgnattgtcgagccccgatgcttattagttaaatatagtagacgtgtaccgagatcgaagctattctgtggtgagcacaaacgtctgccgcatggggacttgcactaccaatgtgttactctgtatcctcagatgcctctcgcgagacttgcgtatgtgttactgaagctctatgacgataagcatgaaatctccttatcttattgtgcacgatgcgtcggttgacactgaaagcgttatctctctctgtccatgtgtattattagaaatacgtaacgttctaaagagtctggcacaaagtggtgagtaaaattcctatatggtttgggagcaatactttctgcatagtggcctggtccaatggcctgtgtgttacaatgaaatgatcagctctcaagaatgagtcccttgtataacctccttttatacttctagactaacc

SEQ ID NO: 539397 - DNA, 464 bp, Homo sapiens
  misc_feature (114)..(114): n is a, c, g, or t
ttggaaatcctactgatttgaggaatcacttgtttagtaaagagagaaccggggtagtgagggtcaagacaaataaggtctgtccccatgctaaaatgctagtaatcacttctngatcctctgggcctagcacattaccaagcacatagtaagggctgagtaaatatttgtgaaatatataaatgaatagattttctgcccagcctcaagacctgctggaatacaacttgtatgcctaactccctttttttcccacccttcaagctaaacatttctgtgaccataaatgtgacttcagcattccttactgctgaatagatgagaaacatgtaccactgcagatgaatgaacacatggtctatccccacctgttctagttcatctctttaaatgctttccttactgttgaagggactgctatggtctgttaaaaaataataataataataaaataaaaaatttta

SEQ ID NO: 539398 - DNA, 124 bp, Homo sapiens
gctgcaccgttgttttgagctcggactgtcgagaagacgaggttcaggtaagcagctgttaaagcccagacacttgaggttcaaagccctttagtactttttaatgatcgttgactaaattcct

SEQ ID NO: 539399 - DNA, 401 bp, Homo sapiens
gaaattcatttccagatcctcaacttccagatgtactccacctgagaaagttcctggggttgaggctccaagccgactttttcttcataattgtagttctgctagtcttcataagaaaggccgggctgtggtcgtcgcgcctgtgatcccagcgctttggggggcggaggtgagtggatcacctgaggtcgggacttcaatgccagcctggccaacatggtgaagccctgtctctactaaaaatgcagaaattggtcgggcacagtgcacgtgccagtggtcgcagctgctggggaggctgaggcgggaggatcgcttgggccctggaggtggaggttgcggtgggccgagatcgcgccattgctctctagcctgggcaggagtgagatccgtctcagaga

SEQ ID NO: 539400 - DNA, 259 bp, Homo sapiens
agctagtatcggtcagagccagcaagagggtctggccagggcgaaggaatgacagtatgaccatagttttcaggatacagtgtcagaaggccagagcacacagacaaatttacgttgaccttccctgtctatgattggccaaccacccgcttaaggtcgcgtacgtacatggtgtggtgcaggtaaaccatttggagcatttcagcgagcgaagtaacgcccagagccggatgacggccgcgtttatgcagtacagccg

SEQ ID NO: 539401 - DNA, 471 bp, Homo sapiens
atagcctacaactgagctcaccacaggccctccccagctcaacccattaaagacccaggccctgtcaaaaaaaaaaaaaaaaaaaaaaaaaaaggaaaaaaaaaaaaaaaaaaaaaaaaaaaaaaaaggggggggcccccggggcccccgaaaaaaatcccaaaaaaacccgcgcgggggggcgcgcggggcccccaagagagagaagagggagaaagaggggccaaaagggggaccccaagggagaaacaccgcggggcgaacaacacacgggcggggggaacccacacacacacacaaaaacaacaccccgcgggggcaaacacgggcagggtttggcgaaaaagaccccagaagggggagtctggaggagggttattgtggggggactactttctaaaccgggcgccctcccacaacggaacggccggaatattaaacattattcgcccccccgccgcggggggttaa

SEQ ID NO: 539402 - DNA, 1067 bp, Homo sapiens
gggcgaaaaatgtcttaagcagtggggaacctgccatcctacccttgacccctcagcctgccacaggccccgtacacacacagcacacatcacatcgacagcacacactagcacacacagggatagtgcacacgcagagacatgaggaggagcaatagcatagtgcgtgcgccgtcagaggactacgtagattctttccacacgataatcggtacgagtgatgtatcacaaaggggaggatgattggcaccgaggccgatgagaaggaagcacgcggcattgatgcaagtagtagtggatgatagctgctgttcgacgagatggatccccaacgatgaagcgcagacgaagaaacaaaaaggacagcgcgtgaaggaatgcccacgcacgatcgatatacatacaaccaaacgagaagacagagggacgtccgacacaatagacacacaagggggagcgtgcatacaccaggttgagcaaaggtgaacgaaaagaatacaaccactacaaaagcaaaacagtaagcaggaacaaagaaaacgatccatagaaagcaacaacagagagagccacacgaccaaaaacaacgaacgaagtgagaaggacaccaaagcaatacgaagagcagaagaccgacgaactatccaaacatagacaagagcactagaaccacgcaccacggacacaataccatagaaagacgggcactaaggcaagatatgagcacgatagaacatccggagcacagactcacatagaccacagcgaagtgagaaggcaagcaacgaactcaacacacagagacaaaaccgcccaccatgctcaatccggagcaaccaatgcatcatgcgaaacaatgccataccaaccacacgccagcaccaaagcaagggggcgcaggagagggccccaggcggacagcaaccagaacatgcgacccgtgaccaccccacagacactagaacagactaggcaaacacccccagatgacaacacactccaacaagatgcgaacgactggggacacaagagcatagaagcgtgaggacaatgacaacacacaacac

SEQ ID NO: 539403 - DNA, 206 bp, Homo sapiens
gtgcatgccattacggggtcccagaccccggcagcgggtaccctgattgaccatgcatgggccggggcgcagagtgccatggggcgggcctctcttatacacagcagattcctccttatggacaacaaggcccccgggggtatggtcaacagggccagattccatattacaaccagcaaagtcttcaccctcagcagcagcagcca

SEQ ID NO: 539404 - DNA, 209 bp, Homo sapiens
ctcgtgggttcttcctcaggtaggcagctcctccttcaggccttcgatctggcatctccaggtcagtccgggccagggtcgagtcatccaacacccgggcgcaggccatggacggtcggcctccgcagtctggccgcggggccagttcggtgctcatacgttggtcctggaagtcatcgggctggccagcctgggctatggtcaatctg

SEQ ID NO: 539405 - DNA, 303 bp, Homo sapiens
gggtttcaaggggcttttcattgggtttttcagggaaattccccgaaatagaaaaaataaattgtccctttttttaatccccccctggggaagggaaactgtttaaagccagcaaaggggaaacattgtcccccccaagggaaaacccttttcccgaaactgttgtttaaaaaacagggggttccccctttttagaaaaatattttgttttttttattttttggggaaacaacgggttgtttttatatatgggggccttgtgaaattttttaatcaagtaaataaacatgtttgtccccccca

SEQ ID NO: 539406 - DNA, 610 bp, Homo sapiens
  misc_feature (39)..(39): n is a, c, g, or t
  misc_feature (43)..(44): n is a, c, g, or t
  misc_feature (81)..(81): n is a, c, g, or t
  misc_feature (96)..(96): n is a, c, g, or t
  misc_feature (102)..(102): n is a, c, g, or t
  misc_feature (182)..(182): n is a, c, g, or t
  misc_feature (184)..(184): n is a, c, g, or t
  misc_feature (196)..(196): n is a, c, g, or t
  misc_feature (203)..(203): n is a, c, g, or t
  misc_feature (222)..(222): n is a, c, g, or t
  misc_feature (609)..(609): n is a, c, g, or t
gcgcaaaatggcggcggcgatgaccttctgccggctgcntgannaccggtgtggcgaggcgtgcgctggatgcctgccccntggtgctgcccattngtgttntacggggtttgctgggtcatcagaccgaccacgggggacacgaaagggtccaactgccaaacccaccttgggcccccagngntttttaaatggncatttgnattacaaaacaagggaccnttaaacccaaggggggcacgggcacaacttttcccgcgggggcttttctgggcttaaaagggggaattcctgggccttcctaaggccaacaacaccggcaccggggggttgtgcaaaacccttgtgcacaaaccagaagccgcgttttttttgtgggccccccaaaatttttctgtggcaacacgttctttgtgtgcgaaatcttttaaacggggccccaaaccggacaaagggccccctaaagggggccccccccccctgtggggtgtttgggcagaaaaggggcccccggggacacacacggcggagggtctgtggggcgggcggccacacacgggccacaaacccattttttccccccagggggcagcggacggggattttcgng

SEQ ID NO: 539407 - DNA, 776 bp, Homo sapiens
tgcacacatcagaaagccaaagcgatcggtgctcccagatcccgcagcctctgtgtagtagagggggacggcatgatgaaagtcacctaggccggggcacccgcgagaaccctctgtgaccttccgtcggccctctctgctacacatcctcaagtgaccccgcacggcgagacgcgggtggcggcagggtcgtcccagcgggtgcggcaccgcggctccatgtccttggaaataacttaggcaaagttctaaaggtctcaaaaggagcaaagttaacaccgtggtaggacatacgtaacaagggttgttattcttgtctttccagccagtcctgctggtctcccatagagagaggtccttttcagttgagactctgcttaagagaagatccaaagttaaagctctggtggtcacgcgggaggggccgggcggcagagaaactacctctggacttaacttcttttaaggccacggtaggcaactttcttgagggatacggtggtaccctgacatccctgtggccttgcccgatgggctctgctggtcttctctgagtcacagctgcgcacgtgatgggggctggggccccaggcgtctagctctcccatgagggacagctgagcccccttgccttggctccaggttggtagaagcagccgaagggctcctgcaccgtggccaggcaccccctgggtcccccaggcctgcacgatgtttctatgaggggcagagctcctggtacatccatgtgtggctctgtccacccctgtgcagcc

SEQ ID NO: 539408 - DNA, 165 bp, Homo sapiens
aacaacttcgtccaccctgagctcgtccacccggacttgaataagtgtatggtccctcggcgtgtgcatgcacacgccgagggcccaaactacatcatgtggaggtctgtgtggacgaagttgttgcaggtcactatggagtctggatcttcggcgtgtgcagga

SEQ ID NO: 539409 - DNA, 270 bp, Homo sapiens
taaatggctccctttgtagaacttgaacccagtcggaaataggggtttttggtagaaaatatagttccttggttttatataatgataataaaatgtgtttgattagaatgaaatctccgagattttttttttttgttttgtctattccatttttttagaataggccctggcccatagaaaatactcaaatttttaaaaaataactaactaatagggcaagcatagtattttcccctaacaaaatgaataaatccaactgttttgatccca

SEQ ID NO: 539410 - DNA, 576 bp, Homo sapiens
  misc_feature (30)..(30): n is a, c, g, or t
  misc_feature (34)..(34): n is a, c, g, or t
  misc_feature (44)..(44): n is a, c, g, or t
  misc_feature (64)..(64): n is a, c, g, or t
  misc_feature (75)..(76): n is a, c, g, or t
attcggctcacggcgcgctgcgggcccgcnctgnaggactgtgnctgcgcgcaggacgagaacngcaagtccacnnagcgcgccattgagccgtgcctgccccggacgagcggcggcggcgcgggcggccccggcgcgggcggggtcatgggctgcaccgaggcccggcggcgctgcgaccgcgacagccgctgcaacctggcgctgagccgctacctgacctactgcggcaaagtcttcaacgggctgcgctgcacggacgaatgccgcaccgtcattgaggacatgctggctatgcccaaggcggcgctgctcaacgactgcgtgtgcgacggcctcgagcggcccatctgcgagtcggtcaaggagaacatggcccgcctgtgcttcggcgccgagctgggcaacggccccggcagcagcggctcggacgggggcctggacgactactacgatgaggactacgatgacgagcagcgcaccgggggcgcgggtggtgagcagccgctggacgacgacgacggcgtcccgcacccaccgcgcccgggcagcggcgctgctgcatcgggcggccgc

SEQ ID NO: 539411 - DNA, 125 bp, Homo sapiens
cggggggtttggctgatgacacttgtggcgccaacgcaagcagtcccgggactcgtgtcggatgccttcgagagtggtggctgacgccttctttagtgatgctctctgggaagctctcaatcccc

SEQ ID NO: 539412 - DNA, 333 bp, Homo sapiens
gctcgacaaatcaaaaggagtctgtgtgtggtggcgcgtgcctgtgatcccagcactttggaaggccaaggtggaaggactgtttgaagccaggtgtttgagaccagcctgggcaacacagtgagaccctatctcttcaaagaaaaaaaaaaaattagccgggcgtggtggcgggtgcctgtggcccttgctactgacagggctgaggcgggaggatgtcttgagcccaggagttgggctgcagtgagctgtgattgtaccactgcactccagcccaggcgacagagggtgaccctgtgtacaaacaaacaaaagaatagtattttgtgaccc

SEQ ID NO: 539413 - DNA, 149 bp, Homo sapiens
atattcactgcactttgattagtgattaacacgacgagaaaccattgttcctcctgagagaatactctggtcctcttggtgtctcctttccaagatcaccttcgtttcttcctgtcttaccgacttctcagcttgagtaaattaagccc

SEQ ID NO: 539414 - DNA, 127 bp, Homo sapiens
caacttaacactgtatatatggacaagtatcatatatctcattgaaaagtatagtagggctggaataccgtatacaatgcagatagagctagaaatgagaactctctaaatagtgaaggcctactta

SEQ ID NO: 539415 - DNA, 293 bp, Homo sapiens
cagaatagacccttgtggcaataacaaattattcgtaagatctaaggtcatgccagcgcaagtgttatgtcatgcactcctacacttaaagaataaactatgttctaactgccacaagattttctatttatttatttatttattttttagacagagtcttgctctgtctcccaggctggagtgcagtggcatgatcttggctcagctcactgcaacctccaactccctggttcaagggattctcctgcctcagcctgtctagtagctggaattacaggcatgcgctgccatgc

SEQ ID NO: 539416 - DNA, 850 bp, Homo sapiens
ggcggtgatgaattgggacgcaggcgcgagccaaggaccattccccctggaagacatgagaccataggggacctgttgggtgcctcaggataggcgctcccaaggtgtgattgaggcaggatgacctggacgtgtttgtacaccttgctcagtggcgtgaaccgggcatccatacgtgccatggccgagttatggctctcggcaatcttcatcttccagacatcatggtgctggtggtggctgcagagagtgtgtggggtgatgaagacaatcttccccttcattctgcaacacactccagccggttgcaaccagggttgtgcttatgaccaatttctttcccacatctccatgtgcggttgtggtccctgcagctcatcctagtttccaccccagctctctttggtggccaatgcacgttgctcaccagcacacatagagacggaaaatgctacggttgagggcatggggaccccttacactgtgggacggtgacgaggcccaggtcacttcggggacctgtggtggccctagttccatcaggggtgggtgtccggctgtggttgcggccgctacctgtttgtcttatctgctcaacactggctatgcagtggtgcggtggacaaaggcgcgttacccttgcccaaaaaggggaatggttggtccgccaacagaaaacggttcacgcttatagaacagccttggattggacaacccaagtgcggaggtggcacaaccgggcggccgagaccaggcgcaaacactccgaagaggtcgaccggtcatataaagaagaaacctggggaggctaaaatgcgccggggaacgcggaaacaccaagctcggttgg

SEQ ID NO: 539417 - DNA, 547 bp, Homo sapiens
tttactggtacgggagtggtgcgcctgtattaccatctacttgggaggccgaggcatgagaatggcttgaacctgggaggcggaggttgcagtgagccaagatcacaccactgcactccagcctgggtgacagagcaagactaaaacttaaaaaaaaaaaaatcccaaaataaaaaagtttttttaaaaaaagtgtgcgtatagtgctgtgcgcaagtggctcacgccttataatcccagcacttggggaggctgaggcaggaggatcacaaggtcaggagttcaataccagcctggccaacatggtgaaactacgtctgaaaaaaataaaaaaagttggaatttggatgggaaaaagtaacacttcataagggaacgttttagttggtatggatttcaatttggccaactttctagcatgtccaggattctcccagtagcttctcagacagcatatcagcttcggtaagctactattcagacaatggcttttcataatcagcaatcaaaatggtacttttctgtaaaagctgttacaatattcttg

SEQ ID NO: 539418 - DNA, 927 bp, Homo sapiens
gatcctgcgtgagttcaaggtcacggcatgcccgggatgggcagtcaaggacaatccgtgcagttccatgttcacatgactgtggccagatgcagggcagtgcccaagacaggcgacgggattcattgacttcatcgggcaggtgcataagaccaaggagcagtttggacaggatgcggcctatcacggctgctactgcagtgctggcgtggcgccgcaccggggtgtacatcacgtctgagcatcgtcctggagcgcatgcgctatgagggcgtggtcagacatgtcccagaccgtgaagaccctgcgtacacagcgtcctgccatggtgcagacaagagtgaccagtatcagctgtagctacctgtgcggacctaggtagtacctctggcacgcttttgaccactatgcaacgtatctaaccgtcccctctcctccgcacagacccacagccgtggggctccggaggggacccagctcctctgagccatagcggaccatcggtacagtcctcctacgcagatgctgtacactggcagaagccatcgtgcccacggggatcacagcgtctcaaggaacgtcgccataccaatcagagagccttagaacatcccttggagcaagctgggatggccccagccaggcatggcacctgatggcccttctgtccaccagagccacctgggagcccgcttcaagctctctgttgcgctccggattctcatgcttcttctcatgggctgggagataggcggcaaaagcttccgttctcacttccttaacctgggcttacacctgagggcattgtaggccacttccctctgattgtgccatcccgggaacgcgcatcttcagcaaggggcactcgaagggttggcgactctataccgtttgattcctagatcttgaaatttcactggtgaacca

SEQ ID NO: 539419 - DNA, 796 bp, Homo sapiens
gaccggggaagaatatacaatataccttatctctcttaccccattttactcaagtccatgccctatgggaaatatcctgctgcgtttatgtacttctcagtaaaacatgagtaagtgtcctattataagtgataggaaaggaaaagacttacatattgcagttttacaataagagaatgtgatactgcaacagccactgggcctaaagtaatcacattgatgaacatagcagataacactgaagacaaacaaaagcttaatattaacatcccaataatcatctgctttccagagaactaaaaactgacaagcacttgcagtgagttgaagataacttacaaacctgatgcagcatgagcacacttgtgtcatccaatttcagctggggccacacaacttcagtataagaggggataattaacaaaacaaaaaaggtatttctgttaaaggcagttagaagacatgaaaaacaagataataggccacagccatctttctttaacccatttcattaaaaaaactatgattggtatgtcttcttttgagaaacaactattccaggtcttttgcccatttttaatagagtcatacgtttcctggtggcttgggtgttatatatttgaatcttatccccttgtacaagtatggtttacaatatgtgtccaaccggggggtggcgtttggccaggtactattctttggtgggatagcttgtaataagcagcggctgggaatcgggatggcgtggggggaaacaccaaactggcagacacgttcgggtctcaatgtcgcgttt

SEQ ID NO: 539420 - DNA, 169 bp, Homo sapiens
cagctgaacagcaacatttggtggacgtaaactgggtcggtccatagttgtcatcatttgtttccttttctcttttttcctgatccccagctgcctgcaggctgggaaatacttgctgaaactgactattcactatggattccatctaccttgcccacacttgcttgtt

SEQ ID NO: 539421 - DNA, 383 bp, Homo sapiens
  misc_feature (178)..(178): n is a, c, g, or t
  misc_feature (233)..(233): n is a, c, g, or t
  misc_feature (290)..(290): n is a, c, g, or t
  misc_feature (354)..(354): n is a, c, g, or t
attcaacctagctcagacaaaaaggggattcttgaaaactatacagggatcctgacaggaaatgaaggacagttgggtcaccaggaaaggtagctggaagatccaatgtcagagctcctccctgtgccctactagggtgagaggaaggtgagggaggaaaggctggttgtccatctgnccctcccagcaccccagcttttcctgcataactcatgacctctcttccccacttngcttacacaagacagtggatttccatagtgcccacttggattcccatcccatgaggncctgcagctcagctcctctcaactggctcatgtctgtgtctcttggtcaaacaaatgggacagnctgagctctagcttggttccaccaggtct

SEQ ID NO: 539422 - DNA, 398 bp, Homo sapiens
tcacaatgctgttatcttttgtaaagtggacataagagtagttatattttttgaattagcgcaagtggtcaaacggtgtcaaaattgtcctcattcctcgattgtctcttttttaccatgtctcttgcccttcaaacagaggatacctggcgtccatatcagcccatgtgatgttgccattggctaggtcttggactatgctgggcagctcagagatctctgctcttatctgccgcattgagtcccggtccctcagatttgccgtgtggggggtcttgttcactgtgtcacagtccttgttgacacctgaagccacgccaatctcatcagtcctggcatagcgccttccgattgacccagaggaatcgtctactttgtgagatactccatgcttagtc

SEQ ID NO: 539423 - DNA, 817 bp, Homo sapiens
  misc_feature (646)..(646): n is a, c, g, or t
  misc_feature (722)..(722): n is a, c, g, or t
actgaagtgagcccagaaatgtatagtatgctatttagtgtaaaactcaccaataccagtgcctctgcttccaaggagatagacttattttagttaagggactactcattatctttctgatctttcccaggaaccaagagctggaaacgcttaagccacgtggcttggtgcttcaatgctgtggggcaaaagaacagatcttctgggactagaaaaaggaacagtgtgtcaggctggtgcggtggctcatgcctgtaatcccggcactttgggcgaggcgggtggatcacgagctcaggagatcgagaccatcctgctaacacggtgaaagcccatctctactaaaaatacaaaaaattagctgggcgtggtggcgggcgctgtagtcccagctactcgggaggctgagccaggagaatgggtgaacccgggaggcggagtttgcagtgagggagatggtgcatgaatcagctgagcaacagagtgagactgtcggaaaaaaaaaaaaaaaaaaaaaaaaaaaaatttgggggggcggagaaaaattttaaacccttttggtgggggccgggaccagatatggtaatgaaatggggcaaaactggcgccaaagaaccggccggcacgggtggttccactaaaaagngcggggcgcgggttcgcacaaccaaggttcgcgtcaggtccaaccggggcccggtgctacccccctccgcgggggnaaaagacagagaaaagcaaaggagaccaaagacacgacgacaaagaaccaacggagcagagcgaacgaaaaagagcacagaagagagcgcgacgc

SEQ ID NO: 539424 - DNA, 285 bp, Homo sapiens
cattgatacagagtacatgaagggaacacatggcagaagtgggggtgggagcaacccgtagctgggaagagctgagtctcagcaagtcacatcctttcagtggtcatgacatcactggctgctcccagggacacagtggccttacctgtctcacactgtggccagagccagacttggaggcaagctgtagaagtctctcagccatcagctgcccccatgctcccctgctgacatgcttcatcagcctgaggggttgctttcctgtggcctctgggtcaacattgt

SEQ ID NO: 539425 - DNA, 420 bp, Homo sapiens
attcgcgggcgcgtcgacagattgttgattcgacactgaacagtgggggccttgcgacaaccgccagaatgaaaaatgggcacccgatccgatcggcgtgcattttttctacagccctcccgttgctccgggagtggtacctgacgcttacgggttgacgctatctttgagcgacttgcccggtttgaatgcgacggtattgctggccttgatcttcaccggctcgcggtgttgcgggttcttgccggtacggcaccgcgatggcgctgcagaaaggtgccgaaacctaccagggtgacgctgtctttgcggtgagccgccggtgatttcttcgaggacggcgttgagcacgcggctggcctgttctttcgtgaggtccgctttttcagcaattgcagcggcgagttctggtttacgcat

SEQ ID NO: 539426 - DNA, 268 bp, Homo sapiens
tgctggggttgctgacatgagccaccgcacctggcctgacacaccattcagttttaatgaacttccaggtgctgtggtcacgcccctcttgtgtggcatgcaggttgggagagatgggttggaagatgactggatgggggcatggagctaggtgggaagaggaaaagtgtcttgaaggaagtaagtcccttcagataggggagggagaagctcgatcaatatgcagactttcacagtccttcagtcctggggataacacgttcgcgag

SEQ ID NO: 539427 - DNA, 342 bp, Homo sapiens
  misc_feature (267)..(267): n is a, c, g, or t
  misc_feature (290)..(290): n is a, c, g, or t
  misc_feature (297)..(297): n is a, c, g, or t
  misc_feature (331)..(331): n is a, c, g, or t
agagtttaaaaaaaaaaaaaaaaaagagtcagagtcagctggacgtggtagatcatgcctgtaatcccagcaagttaggaggctgaggcaggaggatcacttgagcccagaagttcgagaccagcctgggacaatgtggtgaggccccatctcttaaaaaaaaaaaccaaaaatttcttaattagccagatgtggtggcgtatgctgatggtcccagctcctaaggaggctgaggtgggaggatcgctttgagcccagggaggtttnaggctacagtgagtccatggttntgccatngcatttccagcctggggtggccagagcaagaccntgttttcccaa

SEQ ID NO: 539428 - DNA, 535 bp, Homo sapiens
caagcagttaatacagactcaaaaaagaaaaaaaaaaagaaaatcctacagtatgggacaatttagatgacccttgaggacattatgttaaggtgaaatacatcggtcacagaaggacaaatactgcttaatcctacttatatcaggtactaaagtagtcaaactcatagaatcagaaagcagaattgttgccaggagctaggtggaggggaaaattgaggaactgctaatcggtgagcatggttccaattatgcaagtataacactagttctagaagatctggtaaaactattgccccgtgtagttaacaattacgtgtcttggtgccctttaaaaattctgttaaggaggtagagctcagtgtaagtgtcttgcccacacacacacacagacacacacacacgatctttaaaaagtgtatgctctttaagaagaaaagtaaaatatctcaaaggacggtttcaccaccgtcctttatggaatcaatttttctacatttcagagcaagtgtagatactgagggacccctatttg

SEQ ID NO: 539429 - DNA, 535 bp, Homo sapiens
tagagatcatgtgactacactcagcaataatcactctcaagacagacttcaaaccccactgccatttctccattaagccagatgatcctgaggaccgaccactgcagaaagtcggctacaccttatttcagttgcaatgttggccacattaccatggcaacctggtcgaagcacccaccctccttttagttccagcatgtgctcctcagctggggacctgcatctctagtgagcagagagtatcacggtggttgctgttgcttgttccaaaagaagagctcggaaccctacagcagactgctgggtttccagcaggggagcaggaatgaacctatcttatactccatctggtttccatggtgacatcacagctgtgcccattgggacaaggtcctgtcacctgtcagcagaggcaggcacagtatttggttaagcctgagttttgggtaccttttgttactgttttcaaaaccctgacttgctcttatcttgatgtacaagtttcaataaagctttgtaaaaattaaataaaaaa

SEQ ID NO: 539430 - DNA, 150 bp, Homo sapiens
gccccaaatttttttttcccccccctcttgaaaaaaaatttttttgggttccccatccccccccccccaggtttttttccccggcccttaaaaagggggccccctttttttttaatttttttttttccccaaaaaaagttggggggccca

SEQ ID NO: 539431 - DNA, 529 bp, Homo sapiens
  misc_feature (12)..(12): n is a, c, g, or t
  misc_feature (24)..(24): n is a, c, g, or t
  misc_feature (90)..(90): n is a, c, g, or t
tataatatgttnattttagataangtgtttaaaagttgggaaagtatatatttttaattttttttaggtaggttggtttttatattattntagttaattgtggtttttaatttattgtataatgatatttatatttttttagttgtagtgaattgtgagtaaaagattttgaaagtaaaaagtattaattagtttaaaatgttatttttttggtttttattatataaaaattatgaagtattttttttatttgttaaattagattgtttttttttagtgatttatgtttatgaagagagttgagtttaataattttagtttttaaaagaaattatttaatgtaaaatattttatatgttatttagatattatgtatattttttagtttttattttgtatttttaatgtatatatttttgttttgtgtgatttgtatattttattggtttaaaaaataaatattgaaaggtttatgttaaatggaagatagaatataaaataaaatgttatttgtatattggtaaaaaaa

SEQ ID NO: 539432 - DNA, 105 bp, Homo sapiens
ccatcagccaacatattactcacaagaaatgcatgccaggaacttcaacctcacattccattttaatatgtgaagcaatcaggaatcatgacatgttaggttaag

SEQ ID NO: 539433 - DNA, 216 bp, Homo sapiens
cctctactgactttggttctgttcttaaagcagtctctccacatctctctgatgcactggtaactgccaaatctagatggatactcagttgtcctttgttctgaatgttttacatgatattatctcattgtggccgggcgcggtggtctcaggccttgtaatctcaagaactctggtgaggccgatggtgggcggatcgcctgacggtcaggatgt

SEQ ID NO: 539434 - DNA, 923 bp, Homo sapiens
  misc_feature (2)..(2): n is a, c, g, or t
  misc_feature (52)..(52): n is a, c, g, or t
  misc_feature (79)..(79): n is a, c, g, or t
  misc_feature (96)..(96): n is a, c, g, or t
  misc_feature (103)..(103): n is a, c, g, or t
  misc_feature (142)..(142): n is a, c, g, or t
  misc_feature (155)..(155): n is a, c, g, or t
  misc_feature (199)..(199): n is a, c, g, or t
  misc_feature (203)..(203): n is a, c, g, or t
  misc_feature (212)..(212): n is a, c, g, or t
  misc_feature (231)..(231): n is a, c, g, or t
  misc_feature (238)..(238): n is a, c, g, or t
  misc_feature (248)..(248): n is a, c, g, or t
  misc_feature (258)..(258): n is a, c, g, or t
  misc_feature (263)..(263): n is a, c, g, or t
  misc_feature (267)..(267): n is a, c, g, or t
  misc_feature (273)..(273): n is a, c, g, or t
  misc_feature (282)..(283): n is a, c, g, or t
  misc_feature (287)..(287): n is a, c, g, or t
  misc_feature (296)..(296): n is a, c, g, or t
  misc_feature (309)..(310): n is a, c, g, or t
  misc_feature (322)..(322): n is a, c, g, or t
  misc_feature (325)..(325): n is a, c, g, or t
  misc_feature (329)..(329): n is a, c, g, or t
  misc_feature (334)..(334): n is a, c, g, or t
  misc_feature (339)..(339): n is a, c, g, or t
  misc_feature (343)..(343): n is a, c, g, or t
  misc_feature (351)..(351): n is a, c, g, or t
  misc_feature (355)..(355): n is a, c, g, or t
  misc_feature (382)..(382): n is a, c, g, or t
  misc_feature (386)..(386): n is a, c, g, or t
  misc_feature (406)..(406): n is a, c, g, or t
  misc_feature (414)..(414): n is a, c, g, or t
  misc_feature (418)..(418): n is a, c, g, or t
  misc_feature (420)..(420): n is a, c, g, or t
  misc_feature (423)..(423): n is a, c, g, or t
  misc_feature (427)..(427): n is a, c, g, or t
  misc_feature (435)..(435): n is a, c, g, or t
  misc_feature (440)..(440): n is a, c, g, or t
  misc_feature (444)..(445): n is a, c, g, or t
  misc_feature (447)..(447): n is a, c, g, or t
  misc_feature (450)..(450): n is a, c, g, or t
  misc_feature (456)..(458): n is a, c, g, or t
  misc_feature (461)..(461): n is a, c, g, or t
  misc_feature (470)..(470): n is a, c, g, or t
  misc_feature (480)..(481): n is a, c, g, or t
  misc_feature (487)..(487): n is a, c, g, or t
  misc_feature (492)..(492): n is a, c, g, or t
  misc_feature (495)..(495): n is a, c, g, or t
  misc_feature (509)..(510): n is a, c, g, or t
  misc_feature (525)..(525): n is a, c, g, or t
  misc_feature (528)..(528): n is a, c, g, or t
  misc_feature (533)..(533): n is a, c, g, or t
  misc_feature (544)..(544): n is a, c, g, or t
  misc_feature (551)..(552): n is a, c, g, or t
  misc_feature (562)..(562): n is a, c, g, or t
  misc_feature (589)..(589): n is a, c, g, or t
  misc_feature (612)..(612): n is a, c, g, or t
  misc_feature (615)..(615): n is a, c, g, or t
  misc_feature (622)..(622): n is a, c, g, or t
  misc_feature (658)..(658): n is a, c, g, or t
  misc_feature (661)..(661): n is a, c, g, or t
  misc_feature (666)..(668): n is a, c, g, or t
  misc_feature (672)..(672): n is a, c, g, or t
  misc_feature (675)..(675): n is a, c, g, or t
  misc_feature (677)..(677): n is a, c, g, or t
  misc_feature (680)..(680): n is a, c, g, or t
  misc_feature (682)..(684): n is a, c, g, or t
  misc_feature (686)..(687): n is a, c, g, or t
  misc_feature (690)..(692): n is a, c, g, or t
  misc_feature (706)..(706): n is a, c, g, or t
  misc_feature (714)..(714): n is a, c, g, or t
  misc_feature (753)..(753): n is a, c, g, or t
  misc_feature (756)..(757): n is a, c, g, or t
  misc_feature (760)..(760): n is a, c, g, or t
  misc_feature (762)..(762): n is a, c, g, or t
  misc_feature (769)..(770): n is a, c, g, or t
  misc_feature (772)..(772): n is a, c, g, or t
  misc_feature (774)..(776): n is a, c, g, or t
  misc_feature (778)..(778): n is a, c, g, or t
  misc_feature (781)..(781): n is a, c, g, or t
  misc_feature (783)..(783): n is a, c, g, or t
  misc_feature (785)..(785): n is a, c, g, or t
  misc_feature (795)..(795): n is a, c, g, or t
  misc_feature (797)..(797): n is a, c, g, or t
  misc_feature (804)..(804): n is a, c, g, or t
  misc_feature (806)..(806): n is a, c, g, or t
  misc_feature (816)..(816): n is a, c, g, or t
  misc_feature (818)..(818): n is a, c, g, or t
  misc_feature (821)..(821): n is a, c, g, or t
  misc_feature (824)..(824): n is a, c, g, or t
  misc_feature (834)..(834): n is a, c, g, or t
  misc_feature (844)..(844): n is a, c, g, or t
  misc_feature (849)..(849): n is a, c, g, or t
  misc_feature (897)..(897): n is a, c, g, or t
antatgaacaaaacagaccccagatcagaggaagagatggctttcttgttanttctggagcagattcaagcagcaaatntttactgaacacttgcnatgtgcnggaaattgttctaggaactggagttacagcagttaaaanaataacatttgtnttttcataaatttatattctagagggagaagaagataataaganaatnagttatacngtgtcctaactattaaggngaaaatntagcagagtnagggggtggngagtnatgngggtgncattttagnnaggnggtcagggnagcctctcagggnnggtgacacctgngcngggncttgnataangtgngtcggggnaccngacatatacttgggagagagtgttctnggcngagggaacagcacatgcganggccctgnggcngngtntgtngctggggnggggngggnngngcngtagannntcngagaggtcnactctgtggnntccccngcccnggnatttggggctttgnngctctcttatgttcnganaggcnaatcatctccnggtccanngttgattaanattctttatttcacagtatttttgatnagaagtcttagaaatcatgattnatntggttanaaatcccatgagtttctctttgaatgaacctcttgnttncagtnnnatanaangnatntnnnannagnnncagtgggttgtaantgtgattnaacactgagtgctcgcttggaaaggaggtggagctcaanttnnaantnagagggnntntnnnantgntntnagggaaatgncnatgattnanttatgctgtntnaanaanaagtgcagcngggcgctgcnttccnagctggccaagcgctcctagggggatctccaccctcagaggcttaggnaaggggagtgtgacgagtcagggccc

SEQ ID NO: 539435 - DNA, 321 bp, Homo sapiens
aacttaaatgatttttggaaaaattaggatgtaaggataattcaaaggtgtccaaatgtaagccctttagaaggaatttttattatttaaattggtaaaacttaatccctggaaattccttttccctacccgatgttttctttcaactgagaagcctaaaacaaacaaaaaccttgtgtgttatcctgaaaaagttgactaaaaggatttgtttttatatggatagtaaaatgaatgtgacatgcccccattgtcctattataattttcaaataaggggaactaagcccctgtgtaataaaaattagtccttttttttcca

SEQ ID NO: 539436 - DNA, 80 bp, Homo sapiens
cccaggagttctaggccatagtgtgcaatgaagatgcctgtgtgaataacctctgtactctaccctgggcaacacagcaa

SEQ ID NO: 539437 - DNA, 586 bp, Homo sapiens
  misc_feature (8)..(8): n is a, c, g, or t
  misc_feature (437)..(437): n is a, c, g, or t
  misc_feature (462)..(462): n is a, c, g, or t
  misc_feature (490)..(490): n is a, c, g, or t
  misc_feature (503)..(503): n is a, c, g, or t
  misc_feature (512)..(512): n is a, c, g, or t
  misc_feature (515)..(515): n is a, c, g, or t
  misc_feature (518)..(518): n is a, c, g, or t
  misc_feature (532)..(532): n is a, c, g, or t
  misc_feature (567)..(567): n is a, c, g, or t
gaattcgncacgaggtcatgggcttttttcaaaactccagtagaaggtgcccagacttccatttatttggcctcttcacctgaggtagaaggagtgtcaggaagatactttggggattgtaaagaggaagaactgttgcccaaagctatggatgaatctgttgcaagaaaactctgggatatcagtgaagtgatggttggcctgctaaaataggaacaaggagtaaaagagctgtttataaaactgcatatcagttatatctgtgatcaggaatggtgtggattgagaacttgttacttgaagaaaaagaattttgatattggaatagcctgctaaggaggtacatgtgggtattttggagttacctggaaaaattattttttgggataagagaatttccagcaaaagatgttttaaaatatatattaggtaaagtntaaattgaataataagtccaattgncaaaataccaatttataattgtaaaaantataaccttgggncaaagcatnggntgnccatatttaaatantttggcaaggaattaaaggtgcctcaaaggtcctncccggaggagggttttccc

SEQ ID NO: 539438 - DNA, 384 bp, Homo sapiens
gtatccacgccccgcggactgctcttagcgttataagtcggttgctgcgcgcgtcacaccttgtaatccccgcactttggaaggccctggcgggctgatcactttaggttaggagttcacgaccagcctggcctacatggtcaatccccgtctctactaaatatacgtgacgttagccggcgctatggatggctgcatgcctcgtgactctccgccttcttggccaggccaaagcacgagaatcgctttaaccacgagatggacgcttcagtgaatgacgatcgtgccattctattccagccctcggctcagacagcacgactgtcattttctttggagactcctagattgactgtggttttcaactgaatatggcggatattt

SEQ ID NO: 539439 - DNA, 530 bp, Homo sapiens
ctcccgctgctgctgccgttgccgcctgagtcattgcctgcgcagctccggccgcctggctccccatactagtcgccgatatttggagttcgttacaacatggcaccgacgattgacaacctgcctagcggtagttcaacagacgagtgcaatgcgtctcagagaaaccgtgcaaggttaagagtgtgcaccagagtagaagccaaattctatgagcgcacagttcatgatcttgcaacaggacagtatgcgtgttctctatcagcctctatttgataagcggatttgaaattattaatgcaatttatgaaccgtacgggacagaagaatgtgaatggaaaccaagatgaatgaagatgaggcatttcggaggaattgaacagaaaaggccaatgattgcaagatgagaaaaaggatgaagaaaaagaagacccaaaggaattcctgaattctggttaactgtttcaagaatgttgactagctcagtgatatggttcaggaacacgatgaacctattctgaagcacttga

SEQ ID NO: 539440 - DNA, 430 bp, Homo sapiens
tgtagctttataatttagtttagtattctcactaggccagttttttaaagagacggagtctcactctgtcactcaggctagagtacagtggcgtgatcttggctcactggagcctctgacccctgggttcaagtgattctcctgcctcaacctccctagtagctgggattacaggtgcatgccaccactcccagctaattttttttgtattttttttgggtggagtttgagaccagcctggccaacatggtgaaaccctgtctctactaataatacaaaaattagttgagtgtggtggcacatacttgtaatcctagctactggggaggctgagtcacaagaatcgcttgaacctgggaggtggaggttgcaggcgagatcatgccactgcactccagcctgggcgacagagtgaaactgtgtctccaaa

SEQ ID NO: 539441 - DNA, 566 bp, Homo sapiens
  misc_feature (22)..(22): n is a, c, g, or t
  misc_feature (66)..(66): n is a, c, g, or t
  misc_feature (152)..(152): n is a, c, g, or t
  misc_feature (284)..(285): n is a, c, g, or t
  misc_feature (361)..(361): n is a, c, g, or t
  misc_feature (390)..(390): n is a, c, g, or t
  misc_feature (402)..(402): n is a, c, g, or t
  misc_feature (411)..(411): n is a, c, g, or t
  misc_feature (413)..(413): n is a, c, g, or t
  misc_feature (424)..(424): n is a, c, g, or t
  misc_feature (427)..(427): n is a, c, g, or t
  misc_feature (477)..(477): n is a, c, g, or t
  misc_feature (555)..(555): n is a, c, g, or t
ggggctgctttcttctttctgntttctttttggtgctgggtcctctctggctggtccttcctctgntgggggggggggggcctgggggggggccttgggtggggcggtgggcccggccctcggcgcggtccgccctttcttctttttcttgnggttgtttttggtgttttggtgctctttccctcccttttctgttgcgttcggggcgtttggggctcccgcctttggttttttgcctctgctttttgccgcgggctgcctttccccttttctctgcttctccnntttcttcctttttcctctgctcctccgcccccccttcccccctttcgtccctcgcccccccctcctcctcctcttncgctcccttttgctttttccatcgagcgnggttgggcatcngccccagcncnttctccccgcnttnttcgggggggggggtgggggggctatttttgggtctagtaccctatgtcnattttctctattccaggctagttttgccagcttgttcttcttgtttttgctgtttgcttgccttttttgagctaatgntgctgcgattg

SEQ ID NO: 539442 - DNA, 312 bp, Homo sapiens
gcacaacctagggtcagttttgcaggtggtaagccatttaccaagatagttgtaggtaaagaagggcagatttattagagaaattgtgaaaatatgttgcagtgggcagctcagcagagaaggggctacctgcaaagaggcaagggctggaggaaagttttatagggtcctgctgaagggtgctacgtgtggaatgaggtcattgtgcccgcaggttgtttgtgattagctgtttctaacaattgttcatacaataattgttcattattgttctcaacttggggctctccccaacctggggacccttcctta

SEQ ID NO: 539443 - DNA, 128 bp, Homo sapiens
cggtgggctcattaatggaaacaaatgccccataatgaggcaagatgttaatgatgggggaccttgtgaaagatgggaggggaaagggttatatgagaattctctatacttttggcccccctttctgt

SEQ ID NO: 539444 - DNA, 107 bp, Homo sapiens
ctatagtactcgatcgtaactagaaacagcaacgctgagatagggctagctcaaactagtaccgaagtaaaaagtaaagtatctaggcatctattgctcccagaagc

SEQ ID NO: 539445 - DNA, 343 bp, Homo sapiens
  misc_feature (26)..(26): n is a, c, g, or t
  misc_feature (36)..(36): n is a, c, g, or t
  misc_feature (119)..(119): n is a, c, g, or t
  misc_feature (177)..(177): n is a, c, g, or t
  misc_feature (213)..(213): n is a, c, g, or t
gggacaatttgatattaatatttaanacctctgcancttttccttaaaaaagaatatgggccagatacagtggctcacatttgtaatcccagcactttggggagccaagttagcagaancccttgagcacaggaatctgaaaccagcttgggcaacatagtgagatcccatctctanaaaaaacttaaaaattagccaggcatgatggcacantcctgtagtcctagctactcaggaggctaaggtaggaggattgcctgagcccaggagttcaaggctgcagtgagctaagaacgtgccagtacactccagcctgagccacaaagtgagaccctgtctcgca

SEQ ID NO: 539446 - DNA, 177 bp, Homo sapiens
acttcaccacgttgaaacgcactgtctgctctagtagtgctcgcactctcccactgtgacgatatcatcgatcttggacgatctcttaaccagggggacaggtgtacagacttgttcttatggcgcctctcaaatcggctgtacttgcggatgtagtgcacatagtacagcgtctga

SEQ ID NO: 539447 - DNA, 1382 bp, Homo sapiens
tggcatttacctgagagggccggcgtcttgaggtggtcagctgttcgtggtgggtcgcggactgcggatgcgccgccatgcgctgcccttgtgtgttccgctatctgggctgctcttggttctgcgtgcctctgacgggatggcttcagctgtggtacgcggcaccgagtgtctcctgaccgtgcacgagcgctgttcaagcaatgttggcttacgtcgagctccacaagatggtggaaagatttcttggactcagctctctgaatttgtcatcatacaatcagatcagtcttgtgctccctcagaagcatcgtgaaaagcctccttctggttccaaatggtgctttgaagaagagtctcacagccaagcaggtccaggcggatttcataactctgggtcttagtgaggagaaagccacttacttttctgaaaagtggaagcagaatgctcccacccttgctcgatgggccataggtcagactctgatgattaaccagctcatagatatggagtggaaatttggagtgacatctgggagcagcgaattggagaaagtgggaagtatatttttacaactaaagttggtggttaagaaaggaaatcaaaccgaaaatgtgtatatagaattaaccttgcctcagttctacagcttcctgcacgagatggagcgagtcagaaccagcatggagtgtttctgctgatttctgtccctgcatctcccctggccccgttccctgccctcctcccttccctgggtgactgctctgagaggcacttcactcacaggcctgtgggatgctccatggggccctgctggctccatggggcccaggtgcaaagggtttctgaaaaacagcaggattaagtactgaaagagcccaacacaattaccctgtaaactctctgttagggcaaccaccaccacctgtcttccaggacacatttttagatactctgacaggccactgcatctcagattcaggggagaaaataagttgtcacctccccttcaaagttccagagtaaacaaatggtgccatcattcaagataacatgctgatcaccctcctcccaaaaagcaagagcttgtttatggctgaggaatcggcggattgtctgaatgacacatatacagagcccccacggatttctgcacactctgggtctgtgctggtggaacattgccaatcagttcttaatgaggcacctgtgtgtaaatacatgcttggtcttctctgcagagaactgaggctaaactctgtccctacttctggttttgccctgtcatgtcgtaacgaggtgggccttttgaggccattttagtttgagttcgagccaaccacctctgttggttagatgatgaataaaaaggttctgaaga

SEQ ID NO: 539448 - DNA, 1051 bp, Homo sapiens
gcaggaagactggggtgatcggacgaggcgatgggcataggtcagactctgatgattaaccagctcatagagcaagggtgggagcattctgcttccacttttcagaaaagtaagtggctttctcccttgctcgatgggccataggtcagactctgatgattaaccagctcatagatatggagtggaaatttggagtgacatctgggagcagcgaattggagaaagtgggaagtatatttttacaactaaagttggtggttaagaaaggaaatcaaaccgaaaatgtgtatatagaattaaccttgcctcagttctacagcttcctgcacgagatggagcgagtcagaaccagcatggagtgtttctgctgatttctgtccctgcatctcccctggccccgttccctgccctcctcccttccctgggtgactgctctgagaggcacttcactcacaggcctgtgggatgctccatggggccctgctggctccatggggcccaggtgcaaagggtttctgaaaaacagcaggattaagtactgaaagagcccaacacaattaccctgtaaactctctgttagggcaaccaccaccacctgtcttccaggacacatttttagatactctgacaggccactgcatctcagattcaggggagaaaataagttgtcacctccccttcaaagttccagagtaaacaaatggtgccatcattcaagataacatgctgatcaccctcctcccaaaaagcaagagcttgtttatggctgaggaatcggcggattgtctgaatgacacatatacagagcccccacggatttctgcacactctgggtctgtgctggtggaacattgccaatcagttcttaatgaggcacctgtgtgtaaatacatgcttggtcttctctgcagagaactgaggctaaactctgtccctacttctggttttgccctgtcatgtcgtaacgaggtgggccttttgaggccattttagtttgagttcgagccaaccacctctgttggttagatgatgaataaaaaggttctgaaga

SEQ ID NO: 539449 - DNA, 897 bp, Homo sapiens
aataatagttgagaggaagaagtgagaggtcatgagagatggagatatcagataaatgtcagtctcaaatagtaattcgcattcttgttgtgaaatgatgtctctaagatattctgtgtgtgagggtcatagtagtaaaatgagttccctaagggctcgttcagggaagtatgctaagtcaatgcccaagtcacctgttgtttataacttcaccaataggaggatctcagtgcagagggtcgtgagcatatagaagatgcaccagtgagtttgggtcccaaagaagctgggatcttaaagacattgttggccaaggagatctgtggtgacaccattagcagtaagtggtgtatcatggattccatgggaccacctggataaggcaaagcgtaaaattccagagcgattgaataatctatggaaaaatcgaagaatctgcaggtaactggattggccgcgtaagatttacgccagacaccctgtgtttattgtcatcataatgaatccgtcgcgatgtggacattattggctgagagtcaatgtttaatctatttccagtatcgatgtttaggttgatctctcatggtactagtgtctacgattccagagattgggggaattgcttatcgctcttgaaaccacagttttagcccctgagatgttgaagggcttgcgggaatcatcaatccacgaatttttgaacggtccgaggttgttaaaattttgcgcacgaactttggtgcttgcccaataaatttttgtggcacaaggagcccagacaaggttggggctctcggaaatcaaaacttggggggggaaagaatagcgggcaaccgggaccgaggtgccaaaggggggaacgtgggttggcgcacacaccccgtcgacacaaaaggc

SEQ ID NO: 539450 - DNA, 1324 bp, Homo sapiens
  misc_feature (478)..(478): n is a, c, g, or t
atcaggcgaagactgtggccacttgagcctcttcacctttttgtgttctctgcaatcaggggctggtgacgctcaccacaaatcatgtcttctataaaaacagtcattgccagctgtggagtagctgttccactgcctttcctctcctgaaagatggcacaaggagtgttagaaagccactggcaggttggagcccccacagttgaagagccgttttgaaaaagggaaagggtgggaacggaatggctgggattgaagaagaaggttgacgagcaagaagctcttgccatagaagtcacattgaacatcccgaatgataccctttcatctctttgtgccatggagctgtgccatttgaacactcactccccttttttttcctttggagcagagaaccttctgcattcaagtctctcagttctttattatgatcagttacccatcaagagctgcttagatgtattaagccaaaaaaganaaaaaaaatcctccgggtggaaattaattttcttggatgattctgtggagttggaaacatttatctgaagctgaattttctctccccagaattaaccttgcctcagttctacagcttcctgcacgagatggagcgagtcagaaccagcatggagtgtttctgctgatttctgtccctgcatctcccctggccccgttccctgccctcctcccttccctgggtgactgctctgagaggcacttcactcacaggcctgtgggatgctccatggggccctgctggctccatggggcccaggtgcaaagggtttctgaaaaacagcaggattaagtactgaaagagcccaacacaattaccctgtaaactctctgttagggcaaccaccaccacctgtcttccaggacacatttttagatactctgacaggccactgcatctcagattcaggggagaaaataagttgtcacctccccttcaaagttccagagtaaacaaatggtgccatcattcaagataacatgctgatcaccctcctcccaaaaagcaagagcttgtttatggctgaggaatcggcggattgtctgaatgacacatatacagagcccccacggatttctgcacactctgggtctgtgctggtggaacattgccaatcagttcttaatgaggcacctgtgtgtaaatacatgcttggtcttctctgcagagaactgaggctaaactctgtccctacttctggttttgccctgtcatgtcgtaacgaggtgggccttttgaggccattttagtttgagttcgagccaaccacctctgttggttagatgatgaataaaaaggttctgaaga

SEQ ID NO: 539451 - DNA, 1596 bp, Homo sapiens
  misc_feature (1396)..(1396): n is a, c, g, or t
  misc_feature (1455)..(1455): n is a, c, g, or t
tggcatttacctgagagggccggcgtcttgaggtggtcagctgttcgtggtgggtcgcggactgcggatgcgccgccatgcgctgcccttgtgtgttccgctatctgggctgctcttggttctgcgtgcctctgacgggatggcttcagctgtggtacgcggcaccgagtgtctcctgaccgtgcacgagcgctgttcaagcaatgttggcttacgtcgagctccacaagatggtggaaagatttcttggactcagctctctgaatttgtcatcatacaatcagatcagtcttgtgctccctcagaagcatcgtgaaaagcctccttctggttccaaatggtgctttgaagaagagtctcacagccaagcaggtccaggcggatttcataactctgggtcttagtgaggagaaagccacttacttttctgaaaagtggaagcagaatgctcccacccttgctcgatgggccataggtcagactctgatgattaaccagctcatagatatggagtggaaatttggagtgacatctgggagcagcgaattggagaaagtgggaagtatatttttacaactaaagttggtggttaagaaaggaaatcaaaccgaaaatgtgtatatagaattaaccttgcctcagttctacagcttcctgcacgagatggagcgagtcagaaccagcatggagtgtttctgctgatttctgtccctgcatctcccctggccccgttccctgccctcctcccttccctgggtgactgctctgagaggcacttcactcacaggcctgtgggatgctccatggggccctgctggctccatggggcccaggtgcaaagggtttctgaaaaacagcaggattaagtactgaaagagcccaacacaattaccctgtaaactctctgttagggcaaccaccaccacctgtcttccaggacacatttttagatactctgacaggccactgcatctcagattcaggggagaaaataagttgtcacctccccttcaaagttccagagtaaacaaatggtgccatcattcaagataacatgctgatcaccctcctcccaaaaagcaagagcttgtttatggctgaggaatcggcggattgtctgaatgacacatatacagagcccccacggatttctgcacactctgggtctgtgctggtggaacattgccaatcagttcttaatgaggcacctgtgtgtaaatacatgcttggtcttctctgcagagaactgaggctaaactctgtccctacttctggttttgccctgtcatgtcgtaacgaggtgggccttttgaggccattttagtttgagttcgagccaaccacctctgttggttagatgatgaataaaaaggttctgaagaaaaaaaaaaaaaanaaataactatccatttttcaagataatataactatttctccatctccctttccattatnttagttttgtttataaaactgtttggcccctttgccccaattttttttaatttggacaactttttcttggcgcgccaatattgggcttccttggcaattcccccctttggggacgggttaaaaaaacacgggccgggtttt

SEQ ID NO: 539452 - DNA, 191 bp, Homo sapiens
  misc_feature (126)..(127): n is a, c, g, or t
ggctcagtgaagttagtggcctttgaagcaggtttgcggacaaatatggtacctggtattgcgcgtgcgactgtcgtcacagcacaagctgaagctatggttgccgctttccaagactttttggcnntaacccacaaatttctggtagtgctgaatctgatggtgatgacattaagtttgtcgtgaatggt

SEQ ID NO: 539453 - DNA, 1148 bp, Homo sapiens
tggcatttacctgagagggccggcgtcttgaggtggtcagctgttcgtggtgggtcgcggactgcggatgcgccgccatgcgctgcccttgtgtgttccgctatctgggctgctcttggttctgcgtgcctctgacgggatggcttcagctgtggtacgcggcaccgagtgtctcctgaccgtgcacgagcgctgttcaagcaatgttggcttacgtcgagctccacaagatggtggaaagatttcttggactcagctctctgaatttgtcatcatacaatcagatcagtcttgtgctccctcagaagcatcgtgaaaagcctccttctggttccaaatggtgctttgaagaagagtctcacagccaagcaggtccaggcggatttcataactctgggtcttagtgaggagaaagccacttacttttctgaaaagtggaagcagaatgctcccacccttgctcgatgggccataggtcagactctgatgattaaccagctcatagatatggagtggaaatttggagtgacatctgggagcagcgaattggagaaagtgggaagtatatttttacaactaaagttggtggttaagaaaggaaatcaaaccgaaaatgtgtatatagaattaaccttgcctcagttctacagcttcctgcacgagatggagcgagtcagaaccagcatggagtgtttctgctgatttctgtccctgcatctcccctggccccgttccctgccctcctcccttccctgggtgactgctctgagaggcacttcactcacaggcctgtgggatgctccatggggccctgctggctccatggggcccaggtgcaaagggtttctgaaaaacagcaggattaagtactgaaagagcccaacacaattaccctgtaaactctctgttagggcaaccaccaccacctgtcttccaggacacatttttagatactctgacaggccactgcatctcagattcaggggagaaaataagttgtcacctccccttcaaagttccagagtaaacaaatggtgccatcattcaagataacatgctgatcaccctcctcccgggatacagacccgggctggagtgcagcagcatgatctcagctcactgaaacctctgctcccaggcttaagcaa

SEQ ID NO: 539454 - DNA, 816 bp, Homo sapiens
tggcatttacctgagagggccggcgtcttgaggtggtcagctgttcgtggtgggtcgcggactgcggatgcgccgccatgcgctgcccttgtgtgttccgctatctgggctgctcttggttctgcgtgcctctgacgggatggcttcagctgtggtacgcggcaccgagtgtctcctgaccgtgcacgagcgctgttcaagcaatgttggcttacgtcgagctccacaagatggtggaaagatttcttggactcagctctctgaatttgtcatcatacaatcagatcagtcttgtgctccctcagaagcatcgtgaaaagcctccttctggttccaaatggtgctttgaagaagagtctcacagccaagcaggtccaggcggatttcataactctgggtcttagtgaggagaaagccacttacttttctgaaaagtggaagcagaatgctcccacccttgctcgatgggccataggtcagactctgatgattaaccagctcatagatatggagtggaaatttggagtgacatctgggagcagcgaattggagaaagtgggaagtatatttttacaactaaagttggtggttaagaaaggaaatcaaaccgaaaatgtgtatattcagttcttaatgaggcacctgtgtgtaaatacatgcttggtcttctctgcagagaactgaggctaaactctgtccctacttctggttttgccctgtcatgtcgtaacgaggtgggccttttgaggccattttagtttgagttcgagccaaccacctctgttggttagatgatgaataaaaaggttctgaaga

SEQ ID NO: 539455 - DNA, 196 bp, Homo sapiens
gaattgagctcgtaccggctgagggcgcgcggtgcagctgcgcgactgaccctgcgacgttctgcgtcggcaccgagaccgaccacgtggcgccatggcgttcggtctacaagctgcacgacctgtcgcccgcgccgctgaccttcgtgctgaccagcggcggccacaacgccggcatcgtcagtgaacccggcca

SEQ ID NO: 539456 - DNA, 1874 bp, Homo sapiens
  misc_feature (370)..(370): n is a, c, g, or t
  misc_feature (1408)..(1408): n is a, c, g, or t
  misc_feature (1640)..(1640): n is a, c, g, or t
tgggggtcccaaatttctttatttggaaggaatgggtccaaatcaaaaaatcttaaggggattgtttgggtcacaactttatagaaaagaggtaagaggaacaccccaaacagtgctgtgccacgtgccttgggtgtgcaccagggaaagttccacccccagcggcatagtgggagaaatatacgccccaagagctatagctttctcatttactcacgtggctctccacagggggtgtgtgtgcttgtgttacaaaagagagatatatatctccgcgcacaagcgcacaagatatctcgagagcgcgcgctctcacacatctctgtgtgacgcgacaaatgtgtgtgtgctcaccggtgtgtgctcaccncacaaatatctcttgtgagagagtggctgttcacaccctgtgtctctcactatctcagagagtgatagagtgtgtgtgtctctcacagagtgagaagacgtctcacacacacacaacagtagtggcgggcgcctccacaatatatgtgtgtcgtcaagagagtgccgccccgcagtgtgatgtgtgtgtcacagtgtctccgcagagatgagtgtgacactgtgatgtttctccacaaattttatattatttcttcccacaaagtatttatttatagtggcgcaccacaactctcccaaagttgttgagcctaatcatcagaaggaccccgcacgacgtacttctcctctcaccagaaggactcaactactctcaaccagaggagttcctgtgggggagtatcctccgtagtggagaaataatattcccctgttgaagaaggaagaggagacgaggaataattatcggggcgccacacaacacctcttcgtgtgtggggagagagtactctctaggcgagacggcctatactcccaacttcaaaagaagtagtctcctcttcccaaagaccagtagttgtggtcctccccccctcttcttcctcatctcctcatgtagtggagagcactatttgggtgtgcgacaacacgacacaggaggtttatttgttgggcgcacaaaagaggggtttctcttctcaaaaagaaggcccacaaaaaattataaatccgggcggggggcaccaccacaagctggtacagatgaataagaagcaccattttgtggtcccagccggagtggttcaacaccacgtgtaatagcagcagcgcgggcggttaaaaagaaggcctcccccaagggggttagtagcacatctcggggagcgaagtgtctaacgaacttggagcgagggaccccgctcatagaaagcacccccagggagaggggagggcaaatgtctcctttgggggcagcgcccaccccctttggcgtgaaatgtggttgggtgacaccgccaggggaaccaggcacataatntgggcggggggcaaaccacaatacaggaagagaagcaacgaggcaggaagaagaagaagcagcaaagagaacataggtcgaatgaattagtctacaaccgaggatcagcatagataaaaaacgaaagagggaagaagagggagcgcccgcttagtaggggtgacacagacacccgcgagagggtatcgcggcgagaacaaaacaagcggctagcacaccaggaaggaggggngccggagcacacaaatgtgagcagcgcgccacagaccccggaacgtcaggtggtggcaaacacatagcaacgccgaggagaactcaccgcaacaacagcacaacgtggttgaataacagtggagaaaccccccaggaaagacgaagctctaagcgaccaaggagccagacaaactatcgggccacagaagagtacatggaggtgagatacaagacagaacgggatgctgaagaa

SEQ ID NO: 539457 - DNA, 692 bp, Homo sapiens
  misc_feature (39)..(39): n is a, c, g, or t
  misc_feature (83)..(83): n is a, c, g, or t
  misc_feature (120)..(120): n is a, c, g, or t
  misc_feature (137)..(137): n is a, c, g, or t
  misc_feature (145)..(145): n is a, c, g, or t
  misc_feature (153)..(153): n is a, c, g, or t
  misc_feature (224)..(224): n is a, c, g, or t
  misc_feature (291)..(291): n is a, c, g, or t
  misc_feature (309)..(309): n is a, c, g, or t
  misc_feature (318)..(318): n is a, c, g, or t
  misc_feature (320)..(320): n is a, c, g, or t
  misc_feature (327)..(327): n is a, c, g, or t
  misc_feature (331)..(331): n is a, c, g, or t
  misc_feature (333)..(333): n is a, c, g, or t
  misc_feature (340)..(340): n is a, c, g, or t
  misc_feature (361)..(361): n is a, c, g, or t
  misc_feature (363)..(363): n is a, c, g, or t
  misc_feature (368)..(368): n is a, c, g, or t
  misc_feature (371)..(371): n is a, c, g, or t
  misc_feature (376)..(376): n is a, c, g, or t
  misc_feature (385)..(385): n is a, c, g, or t
  misc_feature (397)..(397): n is a, c, g, or t
  misc_feature (404)..(404): n is a, c, g, or t
  misc_feature (456)..(456): n is a, c, g, or t
  misc_feature (486)..(486): n is a, c, g, or t
  misc_feature (523)..(523): n is a, c, g, or t
  misc_feature (567)..(567): n is a, c, g, or t
  misc_feature (629)..(629): n is a, c, g, or t
gggagggatatttacagtgcatggtggtacggggacaancactttcctcgagagctctgagaactttgtgctttttttcttanttggtgccgagctacctggaaaggattttgtgtttancttctttagggaaaaangtattaancaaaacanaatccagcccaaattctcggctgaggatttcacgatatcaatccaaacatcacactatttaattccccaanaaaacattggaaaaaggactatcagtgctaacacatttacatataaaatttccacctaataggtaanagacgcctatgtaccaanttctaaaananttaaaanatananacacaanattggggtaaaataacaaaananaaaantanaaaanaataaaggnaaacctcctggnccacggncccttgttgccgcttacttgaagttggcataatctgagaatgcatcaaatanactcctgcaccaccttgtagcagaactcanacatgttccagtgtctggaccaagtgtggcctctgtngccgcagcctttgacagtctggaagacatccaaaatcccctctnctttcacacgctccaggacggtgctcagggcacagaaggtccccgtccttcctgccccggcnctgcagtgcacggtgatggggtggttccctgactgctgctgctgcttctgcacggcggcgatg

SEQ ID NO: 539458 - DNA, 2519 bp, Homo sapiens
aattggtaccaggagagcccagaagccacacagcatctctgcctctttgctctggctctcccaccctcttcccgtctttctctgcttccttgtcactgttactccaggagacgttcacttttcaccaacctttctccaagcatctccaagccactgactatatatattttgctacaagagacctagaagaggaaaaaaggcacgagacttttcaacacatcgtttaaaaaaatcatcaacgaatttcttgcaatgtttgagaacaattaaaaggaaaaagcgttttttaaaaaatctatcaactaagtgaacaatcattcatatcgtctacatcctgagatattattctactctatatctcctccgtccctcgctgcggacaccagcgagatgacagctgctttttcatttttgaatgtaataaatatttgctgcttttaatattttccggaatctcccctcgctattccttggaattttaactctaaagattggagaacagattatcaaaaagggcttttgcaagcctccaaaatgatgctgagtccggaccaagcagcagattcggaccatcccagctcggcgcactcggatccggagtccctgggcggcacggacaccaaggtgctcggcagcgtgtcggacctggagccggtggaggaggccgagggcgacggcaagggcggcagccgagccgcgctctacccgcacccgcagcagctgagccgcgaggagaagcgccgccgccggcgcgccacggccaagtaccgctcggcccacgccacccgcgagcgcatccgcgtggaagccttcaacttggccttcgccgagctccgcaaattgctgcccacgctgcccccggacaagaagctctccaagatcgagatcctgcgcctggccatctgctacatctcctatctcaaccacgtcctggacgtgtagggcggggtgcgccgcggggggccgcctgtcccgcgtccgcgaaacgctacggatccggacgggccgcgtcgctcgggtggcggaggctgcggtggcccagcgagacggccgcctcgagagacggccggggaagaagctcgctacctgttctctctggtcagcagggcgacgagggaaggtttccgacgcaggcaggtggggttgtctggcgagcccgggggctcgcaggggggattttccaggccaggagaacctcgtggagacacccgagatgagccacttctggggctccccaagggttgtggttttaacccactggagactttgagttctcctacattcatccgccacaaatcttaatgtgttgaaagaatgagggcagaagttcagagtatgcaggctcataactttaggctatctggaatttttctaatggacaaatcaccaaacactgggaaggaggagagaggagggatctctcccatagagatggaaggcacagaaaggtgcgactggaaactttcctttctgttgtgaaaataaagattatattagaatccaaataaaccctgaatatttagtaagtttaaaaagacaaattgagaacaagtagacacactgtgggaggatctgagcttggtgatattttatccccaagatatgacaccaagcagacaggaaaatccatatttaaatggaaactttaatatctgattacttttgcaggcgaagtgcccctttatatatccaaaaacatctatttgtgaccttaaacatgtggacccataggtgcagttagaaaaagacaacctatttttatttatgttagaaggagtagagtatttttttcaagacattttatttttcagagtggtgatacttttactttggatactctgtgccaatttatttatagtcaagtgtttacactttttcctgtggaataatttattgtctaactttttacgtgtttgttgagttatactgtggtctttctttctgctctaattatattgcacttgtataacaaatttcccacttctccctgtttctaaacatattttatatattaagatgtttgttcttgaaaggttcttttgttgtgagatcagcaacactagcacttcactattatagttttttaaaaagtgtattattcttatctgtagttatgtctgagaagtcctttacaagctgtttataaggagagtagcttctttgtgtgtgtgatgtttgtgcgtgtgatgaatttagcaaattaagttattttcctaaaaaaaaaaagaaaaaaagaattcagaactactttcctctgtgacaccaaaaagaaaagtctataacctgaaaatgtttcatgttctctgctgtgaaactcttaaaacaaggagtgtattttagagacaagggaaaaaaaccacatctgctatccaaagttttagtctttttcagggtttttttgtgtctctgttgctttatataatgcaatattttgtagtgaaaatagatataatctggtttctatctgacgagtttttcatatctcatgaatggtgcgctgttttgcatataaataaagg

SEQ ID NO: 539459 - DNA, 769 bp, Homo sapiens
gtacgtttaggaaatattgtcagtgcaattaaatggccgtgacacttgtacacaggtatcatatagaagcaaatccttaaagtatatgctacttgagttcacaaatagctgaacaacagaaaggtgtcattgttcgttgcctttctcacagtcgttgctggtgagaatcacgatgagcatagtactttatgagctaaacactatctgaaagttgtaagatagtatggtgtgcattattgttcttatgtcggcttaagaggataccacatagggagaaggttaatggtcacagctgcacgttcatgtagctttctaagctactcaatgtgattcttgtcctctttgctgttcttttgctcctcccccatggtggtccttcagagacgaaaaggaatgtagatagacatgaagtccctgcagatgtgtcctgacatttcaagggagggacagggtactaatgagtgccatcctggaaaggcaggctgtgtgagaaagaagaaatccaaataatgtggattcttaacaattacaaaatgacattcattctgcagttgttatgaaaggaaaatgtagtttggatacgaagctgattaaatcggatcaaggaaatattaggaatctacattgcaataataatccatgcattgtatggtatatgatttcatactattcccagctagttgtagaatgatgcattcccacaggatagcgtaactcagatggttgctgcttactgagtatctctactataggtagtatattgataaac

SEQ ID NO: 539460 - DNA, 720 bp, Homo sapiens
gaacggaaaatggcgcctcacggcccgggtagtcttacgaccctggtgccctggggtgccgcctgttcctcgctctgggcgtgaaaagggctctggcgctacccgagatatgcacccaatgtccaggtagcgtgcaaaattttgtcaaaagtggccttttatggtaaaacgcgacacgagagctaatgtctgcatgcccgttgctgcctgaatcagaagggcacccatctgtggggcctgcatctcccagaactgttctctggaggaccctggttcccaaacttttcatcaggcacatacccacgtggtcactcatagaacctggcaaggcaagacccctcaaaggttgacttggccaaacacctttcgcgtggctttaactcagctcacagactctgatactgccacaaacattgtcaagtctgtcctggaggaacattaagttgccgtgaatacatatcacctcttaatatagacaaccaaaatttggtccaaggggcacaacagaaccttttgcaatcaaccactgggtgacccagaaattgttgtcctgagacatggctcttgttgtacctgatggtccaggtcttccggcagggtggtgtgctgagggttccattgctaccagtgtatgcgccaggctcgttctcaacggtaatgtcctcgggatctgggagcaaccactcaaacgggtcaatcggttggggacaggggaaagca

SEQ ID NO: 539461 - DNA, 372 bp, Homo sapiens
tagagctcgctcgtggaatatcgatctcgtctctcaacgagaataaagccagaaactcgttgacaattcaaaacaacccagaaacgaaccaaaaacgcgaaactgggccaaagtgacgacgaccagtacgtaagaaataagtcttccttactagatccggtcatcgaccctcctcggcatgacccggcccggaagagttctccgcccttcctctcccggggcacgctcctgacctccaacacgcccgcaataccaccgagacacaacctatacattccataacctatccaccccaagggcataacccagcggcccccagcgcacctatgccgcgcaattgcgattatagctaaccccagtaccctgcctttg

SEQ ID NO: 539462 - DNA, 95 bp, Homo sapiens
gctccttctgttgcccaggctggagtgcagttagccgagattgcgtcacttcacgtcagccttgcctgacagagcgagacttcgccgtcataagc

SEQ ID NO: 539463 - DNA, 559 bp, Homo sapiens
  misc_feature (401)..(401): n is a, c, g, or t
ccccagagtctttttggcgggtcgagaaggggtgggattgtgtcagaccaacccgggggctttgtgtaaaggtttgctacgccaagggtgtgaccccggtatagggggccccttgtggccccctgcaattcgggggcctttgggctccccttcccggtggcccatgtggatggccaaccccccatgttttttggttttgcccggttggagctgttggggcccctgttgggaaaaaaggggttgggccctatcccccccccggtgaaggccgagtttttagtttgcccggggggggcattcttttggtttaaaaaaggcgggccttttgtttacccctgggttcccccttagggcatgggggccgggttttttttttttgaaagggggtttttttggggccngggggagtgttttttttttcccccccccccaggggggccgggaaggggtccccctttacccttggggccccctttttttttttgcctcccaggggccttttggggggccccctttttgttttcccccaaattaccccttttgccttcgggcaaaccca

SEQ ID NO: 539464 - DNA, 727 bp, Homo sapiens
cgtattcctgtggggggggagctcctaactcacgacgacttcataggctcatatccacgcatgctcacaattaactgccacttaacctcatagacccatacagccaggtgcagttgaccacatgctctggccctatatctcatcttgggtctgtggctatgagttattttgggcggaggatgtctatgatgagtacgacactgagtgccttcagtgtcaatactactctactacgatgatggcctgtcacaagatcattttcttcactctactatgctactcactgggaattttccgctgggagcaaggaactcgacagacactgatgatttggtctggagaattacatcttcagtaaaggcacttgatagagacgcttttgagacaatgactccgtagaataggactttcactgtgtccacgagcacatcctcatagtgcctattatcaaagctatatgcatgtacaccatccatcactaggcgaatcactccagctctttcctggtgatatataacctatgccacggcgacgaatcattgtactgactgaacaagggagacaaaacggctggaatatgacatacccacagtactgtcaacaggtcaaggataatgcattagggtgcctccttacattttgcaaactgtgcacaactgctaccatctatccaagagaggcctggttacctggtctcactatgcttttgagctggcggtcatcactg

SEQ ID NO: 539465 - DNA, 130 bp, Homo sapiens
cgacttatccccatgtacattttttttttctccacaaagagtcccttctctaatgtccccatctggatattaagtgcactttaaagaaaggggcaggttggattttcaacgaggtggagaagctcataag

SEQ ID NO: 539466 - DNA, 1099 bp, Homo sapiens
  misc_feature (1)..(1): n is a, c, g, or t
ngggcttacttgagcgtggcaggggtgttctgggattcctgcaagattggccatctggtcaactgcgggtggaaggtgaaagagacacccttgcttcacctggtaacaacgtctgttgtcgccaggctctggatcgcctcccctgtgacaagatgcttcctctctagataggtggccctcctttctggcctctaaccctgcttggtcgacccttttccttgcctcttggcccttgaatcaagatgtcgagcccttggggggcccgcgttttatagctcaccaagtctactgtcaagcgtggagatcctctgcgcagcctctcgaaccctcttaaagcgtgggacagggactatttcacgaggaaaggccgagtgtcatccgttgtgtccgaggtgtttcccccgtggaatgcacgaggttcctctggggctttaggcttaatcgcgccagatttcattactcgcaaaccagggacattacgaaaagccgaaaccgtactgatgacggggagtgactgccagatcttccattctcgttgacgtgctggtgtgtacctggccaccgttaagagtcatcatgctgagtgacaggtcgggggcttcgaggggaaaggacgatggggcatgacctcagtcaggcactgcgctgaatcttgcgagagcggtgccggacaccgctcgtcagcctgctatccatgctgcgctacgagttcttgttaccgccatccttccgctccctcccagccatccaccctgcaggtgcctccgaaattggtgcttcgagccctggcaccctgctgggtgaaacaggtccttcggtggtcagtgaagggactggaaagcagatgtgagcacccagggccgtgttctcccttgcttgggataaggtgcagaccatgtccattggttgccggtccacactcgtacacggaacttgaggtgctctgctcagagtagactatgtcccaagagccataagggagtggcaaataggggagggagaaagggtagttcaaagagtctgtcttgagatctgatatttgttccccctgttaacgctagctgtgccccctctggttattacttccctgaggacagga

SEQ ID NO: 539467 - DNA, 279 bp, Homo sapiens
ttagccctgtagactaagagaggtggagcttcctgtatcgctcacgttctaagcgggggcatcatttcctgctggatactcaggtccttcatacaacagtgaaccactagcctgcatacaattctctgctaaaatgccccaaagtagtctggacccatgaaaggcctctgcagacttagttttcccatgctattttctttctggggttatttttttgaaaccaattctcagttctgataccccaggttgaagatgtaggggatggggcacaacggcaca

SEQ ID NO: 539468 - DNA, 723 bp, Homo sapiens
  misc_feature (88)..(88): n is a, c, g, or t
  misc_feature (218)..(218): n is a, c, g, or t
  misc_feature (231)..(231): n is a, c, g, or t
  misc_feature (384)..(384): n is a, c, g, or t
  misc_feature (398)..(398): n is a, c, g, or t
gggggtgggccggggaatttggccgttggtaaattgaaaaatggccaacaatgggcaaattaccatcctaccatcaggagcgctttcntcaggtttccttcaaagcttctacgtcttgtagtaaaggcgacatcaaatcgagcttttaaagtagcaatgcttttcatcagaccatactgcttcaacacctttgcagtccttgagctttgcaatctgcnccacgactgagcncacagctcagctgctgccattaaccatcactgtttctccatccttcacacctcagatttcgagtaggccatagtaggcagtcaggcctggcatgccatctgtcatcagagcgacagtcagtggtattgtgtcaggacactctgtcagcagctnttccagatctgtcncatcagatatgacgtgcgttgtccagcctgcagcagtcagtacgatagttcctctgagtaggcctactgtattacgttcagcatctctcgtgtatggagacagtaattgtgacgatgtcagattctactagatgtatctgtaaggtcactgaaatgtcagtcaagatccatcgccgatttctaccgatggtattatcataacggagctagtcattgagactcataatttaatgaactatagaatgtgatgtctgcatattctaataggcaggctgatgcaatgctgctcaggctggtcatgaccgcctgaatcctagcaatccat

SEQ ID NO: 539469 - DNA, 204 bp, Homo sapiens
agcatgtgaccgtggaatcccatgatccagccctcggtgggtgcggtgacggcgaatgcccaggcggcgacgtacacgttcagtgtccatgaccgcttcagcgtggtcaccatgtcccccatcacggcgatggactgatcctggcggatggggccctcgggtccggtgtagaggagggagtcgggcagcgcggtgaccaactga

SEQ ID NO: 539470 - DNA, 344 bp, Homo sapiens
  misc_feature (332)..(332): n is a, c, g, or t
ggatgcagcaagtcaggactgggaagcatttgctgataaacgcagagattgcttagtgaaaaaatggaagcaaacctaaatatccaacaatatgggaatggtttaaaaaataaggagactggccaggtgcactggcttacgtgtgtaatcccagcactttgggaggccaaggtgggccaatcacttgagcccagaatttcgagaccagcctgggcaacatggagaaacccccaggtactcgggaggctgagttgggagaatcacctgagcctgggaagtcaaggctgcagtgacccacgattgcatgattgcaccactgcactccagcctgngtgacaggagtg

SEQ ID NO: 539471 - DNA, 290 bp, Homo sapiens
atacagtgaaagtgttaagacgggttcacataacccagtaatccaattaggtttggtcctagcctttctattagctctaagtaggatcacacatgacatgacatccccctttaccagtcgagttccaccgtctaaaatacaccagcgtatacaaagaggggcaagagacatacaagacagcgagagacaatagacagtctacaaaaaccgttttagacttagcccaacagcccccaacgggaaaaccagacagtgaattaaaacctttaagacattaaaacgaaaagttt

SEQ ID NO: 539472 - DNA, 212 bp, Homo sapiens
tcgtacatagagctgtcccttggtacaccataaatcttgacttaccaccctacatcagatggcatgaattgatgctcgacaaggcaccagttgtttaaatgttattctgaattctctgtaagaatatcataaatacattcgtgccatgttggaaatatttatgcatgctcgtgtatgataaaattgcctggcctactttgccccttatcgag

SEQ ID NO: 539473 - DNA, 998 bp, Homo sapiens
  misc_feature (82)..(82): n is a, c, g, or t
  misc_feature (369)..(369): n is a, c, g, or t
  misc_feature (492)..(492): n is a, c, g, or t
  misc_feature (646)..(646): n is a, c, g, or t
  misc_feature (651)..(651): n is a, c, g, or t
  misc_feature (689)..(690): n is a, c, g, or t
  misc_feature (760)..(760): n is a, c, g, or t
  misc_feature (868)..(869): n is a, c, g, or t
  misc_feature (906)..(907): n is a, c, g, or t
  misc_feature (958)..(958): n is a, c, g, or t
  misc_feature (990)..(990): n is a, c, g, or t
taggcatatgtttacatgagtggtcgcgtgcaggagtgctagctgagtcttctcgtcatgcaggcagctgattctttgtagnttagcgtgatgaaaattgggaaggttccctcaagtccaagtatgtctcgtggttcagagcctgtgttaaagcttttggacgacaatgggaacattgctgaagaactgagcattctcaaatggaacacagacgagtgtagaagaattcctgagtgataaggcgcaacgcatataagtcttggttaaattgtgccctattcttgttggaccttatcaagtgggagatttctccgccttacaaactcctttagttttgcctttgttccattgatcatttttttacttgtncaatttgaatttattttcagatgataagagcggcagtatggttcattgatctatgggggagtttgtcagggttagcagaggggcatttccatattaattctcataccatctagataagcgtgnccaccacatcacgtaatgctctagtatccgacctgtcttcgtattttttgcacacgcttatttgtgtgctagttttggtccatgctctatgtaactaggatagctcgttatcatattagatggttcgagacttagacaagtagagtgtactttngcccntccacgtcactttctccgtctttgaacgaagagtggtnncgagtatcttctttgtgtctaggacacttacacaagcgcggcagccagcgtggccatcggcgtaacggcnacagatgtgatgcgttgtaatttgccagtgttttgtgatgcttacgtttctgggtttcgattgtggctctcgagtccatcgcatcgagatgttattgagtatattatnntaaattactctgtatcacactcacgatggagtggaanncatctacgtgcctatagcgatctcactgctcatccggcttgcctgtctgtncctctttatcttgatcatatttaatcgatatnctttgatg

SEQ ID NO: 539474 - DNA, 359 bp, Homo sapiens
ccagatcaaatccccttgggggggtccccagggggacagggggcccccccccaatgtatcaatgggggatttataatcccttttgccctttggggggggaaggggtttcccataggggaagttggcccccccccgggggctttggaaatgttttttaaaaaacccaggggggccggttttgtttcagggcaattattttccccaattttttgtttgggggggggaacggggggcccggggtttggttttccttttaacggggggaatttttggtttcatcccccttttttttggtttccaaggccttttttaaggcaaatatgaggggggggccagaaataaattttttttcccatcca

SEQ ID NO: 539475 - DNA, 150 bp, Homo sapiens
cagagctcggtaccccgattgcggggacacttacgctctcaccatgcgacacacctgctccctcttcaccttccaccatcatagccaccatcaccctcgttaacctctacttctaccttcgcctaatctacttcaccctctacacccaag

SEQ ID NO: 539476 - DNA, 361 bp, Homo sapiens
gatcgtggatgtatacatctttccgtgggcccagagcccattgagcgtggtgcagcgagtacctggacgttgtggagagtacccgttcatgcctgcatactgggagtcggggcttccacctgtgccgcatggggctactcctccaccgctatcatccgtcatgtggtgcataacagtgaccagggccccagtcccctcgctggtcgtccaatggtaatcgaccctggactaccatgggactcctcggagtggacttcactgttcaaacaagcgatggcattcccggggcacttccctgtgcccatgtttgcagggatgctgcacccatggtcgggccgagtgcatcactgactgactcgtg

SEQ ID NO: 539477 - DNA, 571 bp, Homo sapiens
cagctattaccactagaacttcgatattagtcatgaaaaatgttattcacccatacacctggtcttatcacagagtactggaaattggtagcaagagaaagagcacagtcagaatgtagggggtaggcatccgtgggtacagctccattcatctccttagaaaccagtcctgatccaggaaaatgtctctccattacggttgctgctagctctaagtgcacatctatggccataacaggaaattatgtgggtaattcggccaagagttgcctgtgtggtcaaggatgccggtagcgccaggatagtcaagaccaggggaaagaatttcagctcctgaaagggaaatctactgtcattattgcaaccgaatgattcctgaaataagtatttccaccatatgggtcaatgttgtccaggactcaggagtttaagagacactttcctgttgggaatccagaaattcttccttcatctcctccaagtcaagctgctgaaaatcatacttccacgatggagaaagatgttcgtccaaagaaagaagtataaccgatttctcttcattctgaaattc

SEQ ID NO: 539478 - DNA, 92 bp, Homo sapiens
gtcaggaatttttcaaaaaaattaaaaaatgggctggagctttttttttgtgaataaaaactggatgccccagtgattcatgtgggttttta

SEQ ID NO: 539479 - DNA, 664 bp, Homo sapiens
ctggagggcaattgtacaatctcggctcattacaacctccacctcccgggttcaggcaattctcctgcctcagcttcccgagtagctgggactataggtgcgtgccaccatgcccagctaatattttttttttttttggtatttttagtagaggcagagtttccaccatgtgggccaggatgttctcgatctcctgaccttgtgatccgcccacctcggcctcccaagagtgctgggattcacaggtgtgagctaccgcaccctgccattataaactattctcttagcctcagtgggcatatgcaaagcctttaggctgaccccgtgatctccaaacgtgctcttcgtgaaacaagcattttcgtggtgaccgtgccccagtgttgattaacgtgagtttggtgcagataccgtgagtggtggctctaatggcctctcccattctacgtgctttgctcagacccagacgtgacgtgcccaggacccggtttggaggggggcgtgcattattgccacaccattacttctctcaatagaggtgctcctctcagtgagcctctctctctctctctctcattactgactacctcggtgtagaaccccctctattttttccccccagacctatccctgttcccccttgtgcctcttgtccccgggttgg

SEQ ID NO: 539480 - DNA, 272 bp, Homo sapiens
gcataggcggaggggcggcagggctgcctgtctccactgtttggcggtgtttacacgtgtcgctgtcaaaggcccgggtggagttgggtggtagcccttaatggtccccgggtcctgtaggtttcagctggcctggccccgccacccagcccacacccttcccctagggccctttcaccagtgtgagaataggcctggggaagtttgggcccgggaggcccccgacccccactgtccagcttttaataaacttttttttgagaatggttaca

SEQ ID NO: 539481 - DNA, 987 bp, Homo sapiens
  misc_feature (215)..(215): n is a, c, g, or t
aaaatcttagtacaactttgaatttggcccagtgaatcctctagatcccgttgttgatttaactgttagtcctaataggaagagttctttggtgactaggaaaataccttgtaaagagagtaacaccctttaatgaccacgagtagataggcctaattacagcaagagcacctggttcaaggcacaagactgtgtcatggctcatatatccactnacctatgaattcaccacaagtgtatatgcttgaactctcctcgacatcgccgaatgtggtacctacctactgatcatgcctgatataaagatctaaagtcggtatgagtaacatgcaagacttgctcctgtgtataagtgctgcgctcagtagttagtaacactggaatctgtgcatagttatactatgctccaatattctacaatcatgcaacaagtcaattatgtacccttcagttgttcatacgccagggcgttcatggcgattcttcatatacggaacggtgttactatagagtcagaaggtgcgtcggtaattgctttacgccgcctgtttggccatcatacgtcacctgctagcattaccgagtatgagagggaccgtcgtgccgatgtgacacatgtttgacgggcgggtaccctaccgttcaaaaggtcgcttaggtcacttgtgccttacataggggacctgtatgactggtccagaggtacagctgtctcctacgttcagcagtgaaatcgactgccgtgaaagggggcgtgaccagaaggagagagactaagggctgattatgcacggtctgacaagcgagggccaaattacaacggttatattcggtggcgcgcgggaaaaacacccgggaagggatccgcgggaggatacaggcaatgccgaaaccgggggcccttaataaagggggcggcacacagcagggaaacagggttctcacaaactacctctcgtcgcatatttctctgaataggaaaagaac

SEQ ID NO: 539482 - DNA, 721 bp, Homo sapiens
  misc_feature (200)..(200): n is a, c, g, or t
  misc_feature (210)..(210): n is a, c, g, or t
  misc_feature (280)..(280): n is a, c, g, or t
tccctgtggagcagggctaccctataggcatcgtgctcagaggagcagctcagaggcagttctgtagtcatattgatacccacttttaattatatgaaaattaaggggtggatcatgcagacatttctagaaaaggtgtgacaacttccgggtcatcgggtcattgtcatggaaagtggtggtaacttctgggtgttacnaacaatggcnccctggtcagtgtgtcttatgggaaagtgtttttgccccatccctgttttagttaatcatcaattaggtntggtgtccaagcctcacctccagaatccagtactgcctcctacctcattagaattgttttcactgtgtgtcaacatgatcattcctctgttttaacaagggaataaacttaatgaacttcaacttcaggggattttttttttaaatgcaatttgagggccgggcgcggtggctcacgcctgtaatcccagcactttgggaagccgaggcgggcggatcacgaggtcaggagatcgagaccatcctggctaacatggagaaaccccgtcgctactaaaaataaaaaaaattagcagggcgtggtggcgggcgcctgtagtcccagctactcgcgaggctgaggcaggagaatggcgtgaacctgggaggcggagcttgcagtgagccgagatcttgccactgcactccagcctgggcgacagagagagactacgtctcaaaa

SEQ ID NO: 539483 - DNA, 1339 bp, Homo sapiens
  misc_feature (76)..(76): n is a, c, g, or t
  misc_feature (107)..(107): n is a, c, g, or t
  misc_feature (109)..(109): n is a, c, g, or t
  misc_feature (140)..(140): n is a, c, g, or t
  misc_feature (143)..(144): n is a, c, g, or t
ggcggccgagcactggctacgtgcgactgtggggagcggcgcggtgctgggtgctgcggcggcgatgctggccgcngccggggggcgggttcccactgcagcaggancngtggttgctccgaggccagcggacctgcgangcnntctcctccttgggcactgtgtgggccgatggcccggccacatctgggtgtgccaatggcgggggttttgtggaatgcgagcagccgctggctggagtgcgcattctcgtggggtgcgaggacgcctccgagggcgtgcgcgtaggaaggagccggcggccgcggggggcagctgctggtgctgccggggaatggcccgggtcataacggcgctcactgcccatgacgatccccgatgtgtaatgcgacctgcacgctcatcgcaatcaaccccgaacccggtgttcccggcgctttatccaagatcactcggagggtccacacaccatacagaagtacgggtctgaagcttgcttgcccacaggcgacaggtccgctctcgaccaagcactctagtgtcgggccggtccttttcttacaggaggacgatgacagcgccatgacgtcgggatgcgtggccgaagagccttgtgaattgcaacattcttaccaagcaaggggggaacggtttggccccaacgatcccatggagcaatggccaaggaaaccctatgggggaaccaaaggctatggggcccatttgaatcggtccatcgggtgcaccacgagcaacagaaggtcgcattattcaagcgcaggaacaaggctgggcaagcggtgggaaggcccgcgaagtgcaaggcccgagacggcaggtggaaagggaaacgcacggggcaacaaagagacccccagggaaaggggaacgggtcacaacaagccggggtggacacagggaaaagggcaaacgggccgggagacgggcacggacaagcttggcacgcggggcccagggacaaaccacgagacgcggaaaccatgttggacaatctggcagaacgcccaaagccagccaggagaaagacatcacacagggcattaaatcggaaaccccacacggggccagcgaacggcgactagcgacagaagagcggtagtggacagcacaaggagaaagtaaacaaacacaacggggataacacgagggacaagaggacgagaggaagaacagagaagccaggcgaacaagtaggcaggaacagacggatcagcagagaacaccagccgcgcagaaaacaccacacgaggcacagtaaaaccgccacacacccgaccaaacgggagaaagagagcaggcgcgagagaacgtagagcac

SEQ ID NO: 539484 - DNA, 100 bp, Homo sapiens
atgacgcagtgtgtctataagaactctcctccttcttctgcttctcactacgcagcgtcagcgaaggctgtcgcatgattaccccaaacgatgaggttca

SEQ ID NO: 539485 - DNA, 318 bp, Homo sapiens
tttatagacaacctagggtcagtcttgcaggtgagaaagccatttaccaagatagttgtaggtaaagaagggcagatttattagagaaatgtgaaaatatgttgcagctgggcagctcagcagagaaggggctacctgcaaagaggcaagggctggaggaaagttttatagggtcctgctgaagggtgctacgtgtggaatgaggtcattgtgcccgcgggttgtttgtgattagctgtctctaacaattgttcatacaataattgttcattattgttctcaacttggggctctccccaacctggggacccttcctta

SEQ ID NO: 539486 - DNA, 136 bp, Homo sapiens
ctcacaggacctgactgctagttctgaggacactggtggtgtgctatgtgtggccatcctccatgtacctgtccctggtagctgctactgttatagacagcggacagacgctcacgcctaggggcatgtcctacac

SEQ ID NO: 539487 - DNA, 576 bp, Homo sapiens
  misc_feature (76)..(76): n is a, c, g, or t
  misc_feature (263)..(263): n is a, c, g, or t
ccagaccgtcttccttataactaagtcatacttcgacattctgcaatactttctctcctctcagcacaactaccgnagactgtatcacggggacgtgtgagtttttatagaaaaaacaaggtacatgtacattcaaaaactcccacttgtcatgtataggagtctgctgggttgtttgacagcctgactatgagcccataaataacagtccgtcattccccaaccccccgcacctacacacacagcttattttgggaaactcncccctccctgtgtgctctgcgcagagaaagcgataggcatcaagtcgtcctctgcccgcctcctggagagatggctgcgcgctcctgcccttcacacctctcgcgccaccctcatttctgacccactgaatgctcagctgtttggcatttcctttgaatgacccagcatcttcccttttgttgtcggaaatcagacatcactctctattgcttgtacacttaagactccccacattctgtttattatcctctcaactggttatttggcaaatgtgctcatttataaaagttccagctgtctttttaaagtttg

SEQ ID NO: 539488 - DNA, 367 bp, Homo sapiens
catatgaaccacaggtctcacgtcttcaaggaaatggctctcatacattttcaccaaaaaaatggagaaacagaagagagaatgaaaacctgtgtatatggtttgagccaggttcttgacagacattacctcatttaaccctaccatcccacgccccagccgccaggaaggttctctctctctaataggaagaaaatgaagcctggtggggtgactagccccaacagtgtgcagagaggaggtagcaatactgccaaccacatgactcaggtcttcctggtaagcctggacttggaccctgatccatcctcaggtagagggtcacagaggcaaagaagaccctggcctccacaatagaaggtccaga

SEQ ID NO: 539489 - DNA, 177 bp, Homo sapiens
ggccgaggcaggcagatcacgaggtcaggagatcgagaccatccttagctaccatcgcgcttaggcaggagcccacccctcaatatttgtcttatccccaatttctccctccatagaaagaaaagtaaacctaaaggccagaaatcccacccacacgagccacccagggcccacacg

SEQ ID NO: 539490 - DNA, 103 bp, Homo sapiens
  misc_feature (25)..(25): n is a, c, g, or t
catcgagccggtaccgaatctcganagtgtgcaaccctgaatatacagcactagtaatattcataaaagtaagtccttcagtgaccagaccattaaaaagtag

SEQ ID NO: 539491 - DNA, 284 bp, Homo sapiens
ctgacctcagacctcctgattagccgggatacaggcacgtgccaccacgcctggcacatttttgtattttttgtagagacggggtttcaccatgttggtcaggctgatctcgaactcctgacctcatgatctgcccaccttgggctcacaaagtgctgggattacaggcgcaagccaccgcaccatctctgtatacattcacagacgtgtgtgtgtgcatttgtgtgtgtgtgtgtatttttggtttgtttgttttaatagcaccaccttggattctgtgctta

SEQ ID NO: 539492 - DNA, 520 bp, Homo sapiens
tggggagtctgagcccaggactggcaacgatggcgaagagggcctccaggtagacaggagggtgcgcaggtcctggagggcaaagcactcctgtcccgctgctgtcacctgcctggaggagccgcccgcccctggaggtggaggggtggcctccccgccaccctcggctgcctaccgcgccctcccttcgggctccgggaggcgccccctcctaccgggcacacagtcccctgacaccctgaaaagggcgccggccccttctcgacacactcggcctgggtggcgggggcggcgtttctggcttcggtctgctggagcggaacgccccgggcctcggttcggggatgcaccgacccgccgggcagaggcagcgagccggggctgaatcactccgcgggggcaggggcggccccagaagagccgtcggcctcggaggctcccggcgccggcgttcccggccgaccccccccagacctccatccgcccgcggccccgctcggccgagaagggaggcggccgc

SEQ ID NO: 539493 - DNA, 408 bp, Homo sapiens
actttccagctatcgggggatgagaatccacccagcacaccagcgctcgctccaccctgtgcttcgtcaggacagctggtaaaaagtcacaaacaccggagggtagcaggcaggccagcgcactccggtttccacagcgagtctctgtcatgattcgtgacgtgtgtggatcaacggggcagtgaccacaacaaaaggaagtctcacttacgccccgggcctcggttcggggatgcaccgacccgccgggcagaggcagcgagccggggctgaatcactccgcgggggcaggggcggccccagaagagccgtcggcctcggaggctcccggcgccggcgttcccggccgaccccccccagacctccatccgcccgcggccccgctcggccgagaagggaggcggccgc

SEQ ID NO: 539494 - DNA, 736 bp, Homo sapiens
ccgtttgcaaccagaaatcgctgttaattggtggggtcagcactctcgaaatggcgtaaggtcaactcaatcaactcccagagcagtaacatcgcctctgccccctctgatatttaaaccgcttctgccccatcgcagagtgtgtcctattcacctggcggttttacggccagtacagagctagcgatagagtccgctgaggctacacgtgttggctactgagcatcctatcataatagttcgtcaagagtcatagtgcatgctatacaggagccgtacacaaccgctgcatgatcgaatcacacgtgtttggcaccggctcacatccggccacgcaagcagtgatatctctggcacctggccagcgttcggtctggcatcctctcttgctacagcagccagggcatctctcacatcagctgtactcatcccaggcatagcccttatgagcagaacagtgcgcaagcagtgcacacgtcgtaagcatcgccgcctcatcagatttcttgaccacaagagtgcttggattctcaatgtaaacacgggagttcatcgacccaggctctgtctggtcgggaacgttagtggccatagtgtccgatggtaaggtttcacgcaaagcccgcaaatggagctgaaggtccacaaagtctcccacggaggggagggagaacagatgcgagtctgagtctcctactggcgggatgtgcgtagagaactcgactgctgctgtagg

SEQ ID NO: 539495 - DNA, 193 bp, Homo sapiens
  misc_feature (31)..(31): n is a, c, g, or t
  misc_feature (69)..(69): n is a, c, g, or t
tggaggagggccagctcagttgccgaaactntggagtggcggctggctagaaattggtctgtagaaatnaccttgaaaatggagttctggccaggtgcggtggctcacgcctgtaatcccagcactttgggaggccgaggcaggcagatcacgaggtcaggagttcgagaccagcctggccaacatggcaaga

SEQ ID NO: 539496 - DNA, 726 bp, Homo sapiens
agataaattttttaacccactcaagcaactcatatatgaaatacaggtgtatcacctcatatattttgtataattttctgacatatgtgagaccagttgatgggtctccgtctgcagcatatgacaccagattctacagaggttaaactagagaaattacgacatcaacactctcattcaaaataagaactggggacatcaggcagagaaaccagatctctgattagtcagtccaacaaatgtactaaacagattaatagtaattctaacggtagggagaagtgtctgagacagtctcatcaatttagaggttattttaccaaggttgaggatgcaatgaaaaaagagactaggttgcagtagcatctgtgatctgtgttttccaagaggtgttgaaggttcaatatttaaagggggaagagcagcaggagagaaggaggaagaacaaaatagggagggtagggagtaaggtaagtgtcacttctgtgaggttgacagtactcactgaatccaatgttatatgtaaaggagggcgggcacagaagaaatagtggcttctgcattgcactatctgtttaggccaacaggcaaggagtttgtgtgaacaattctcacgtgtaactcttcttttaacatagtgagttggaagtcccaggactctattttgctttctcaggaccacatcaaggtaccttaagcacatgatcagctatttgaaaatctaac

SEQ ID NO: 539497 - DNA, 108 bp, Homo sapiens
  misc_feature (68)..(68): n is a, c, g, or t
ttcaagcttctaacagatgtacggtggacatgagagaaagctgctgccaagaaagactgaggcccctncccctgcccttctccccgaaataaagaacagcttgacaga

SEQ ID NO: 539498 - DNA, 1092 bp, Homo sapiens
cttgtgtcgtttggtgctcttgtcttttctgtgttcctttatcgttggtgtgttcttcttgctttcccccatctcgtgtgttactccctttggtccttgtgttctatcttctgttcttgctgctcccgttgtttctgtgttttgtgtcttcccttgtttccactttttgcatgttgattgtcttgctgtccatgtccctcctggtgtcattccttggtttctgcttttgggcttgtcttggtccgtgttctcaacctgtcctgtctccgtgtccttgtcctcacgttctgatgctcatgcaatgtacatgatgcttttatccgtgctgttgtgtctcaattgacattctgaccttctcttgccgctggtggcttcattcctggggctcttgttgacattggacaggtgtgtatagggtggctgtcttccccaagttagtgttatcatggtgtttagagtgttggttgtccccatgggctccaacttcatgtagcccccgatggcagtctccatccacttggtgtccaggacctgctgggcaacaggactgtagagggttggattggcacccagtgtctacagtgcctcggctactaacaacctgatcgtgggccaggtgtctgccctctgaaatctgcctgaagtcagtcagggtaggacaatgtctggaggctcacagcttttatagactaggggtcctccatacccctgggctacagaccggtacctgaatccgggcctacacagcaggtaggtgagcagcaggcgatcatagggaagcttctatcatgtatcatacagcctcccccccattgatcacctacagcagcctgagctccgcctcctgtcagatcagtggaggctggagattgtcataggagctggaaccctatggtgtactgcgcatgtgaggaggttgccgcgcttcttttgaaaacctaatgcctgatctctcgttgttgcaccatcacctccagataggactgtctagatgcagtaaaacaagtcaggctcccacggatcctacattactgtgagtgtgtatatttcactatatgatataaccgacggtattgcaataaataaccactc

SEQ ID NO: 539499 - DNA, 223 bp, Homo sapiens
tggttgatctagaggatcccaatcagtttacacaagtgtctttcttttcttttttttcaaagtcgaggcctcattcttgtcacctaggccggagtgcggtggcatgatcatagcttaccgtggcctcaaactcttgggctcaagtgatcctccctcctcagcctcccaagtagatagaactacaggtgtgagccactgcacctggcttatttttttttttttt

SEQ ID NO: 539500 - DNA, 662 bp, Homo sapiens
  misc_feature (18)..(18): n is a, c, g, or t
  misc_feature (232)..(232): n is a, c, g, or t
  misc_feature (234)..(234): n is a, c, g, or t
gtcgcgtgtactgcgacntaccatgctgtgtgtcattcacgcacaggaacaaagaacatgcaggaaagcgaccttcatacagcgatcatgcgaagcaagttggaacttgaatcaaatggcattgatctgggttccagttcaagcatggcgtttcatgtgggcaacacgatgacaagctgcccggcagtcatggtgttgccgagtttgccaggttggagtcatggccctcatnancagttactcaagccgattcacgctgaccccgttgcgcccgatacgacgtttgatgaactctggaaatgtacacagcaacactacggcctcacggcagccacagtgatcactgacgcggcgggcatacccataagcaaaattgtggtgggtgcttgggttcacgtcggctccagcaaaaccacgaacctggctagcctgatcggaatgcgctttttccctcgtacgttgatcaggcaacccaccatggacagaatggcaaaggcaacgtctggcacggtgcgggtatttggcatcatcgggcggggcatgcccttcgtcgctgccgggcttgcagtctttgacctggtcagtattggtaagtgtgcctatgaggcgacgaatggaaggtagcctggccagagccgacatcagcgaaaaagtgatcagct

SEQ ID NO: 539501 - DNA, 191 bp, Homo sapiens
acatccgacgaaaggggaaagagaaagaaccagggagaacaagcatctggaccgttgagtccccataaaggcggtgagagccggtgcagctactagacaatctggtaccacaggtcctgtaacaataagttaatcctcatcactggggagtttcgatcatctcccttcatacctcaaactggtggaattat

SEQ ID NO: 539502 - DNA, 107 bp, Homo sapiens
atcagccggtacctgctgtggggactggctggggcatggcaggcggctcggcttcccacccttctgttctgagatgggggtggtgggcagcatctccgctttggaaa

SEQ ID NO: 539503 - DNA, 973 bp, Homo sapiens
  misc_feature (18)..(18): n is a, c, g, or t
  misc_feature (130)..(130): n is a, c, g, or t
  misc_feature (437)..(437): n is a, c, g, or t
  misc_feature (439)..(439): n is a, c, g, or t
  misc_feature (464)..(465): n is a, c, g, or t
  misc_feature (467)..(467): n is a, c, g, or t
  misc_feature (470)..(471): n is a, c, g, or t
  misc_feature (476)..(476): n is a, c, g, or t
  misc_feature (480)..(480): n is a, c, g, or t
  misc_feature (483)..(483): n is a, c, g, or t
  misc_feature (497)..(497): n is a, c, g, or t
  misc_feature (501)..(502): n is a, c, g, or t
  misc_feature (504)..(504): n is a, c, g, or t
  misc_feature (513)..(514): n is a, c, g, or t
  misc_feature (565)..(565): n is a, c, g, or t
  misc_feature (574)..(574): n is a, c, g, or t
  misc_feature (585)..(585): n is a, c, g, or t
  misc_feature (623)..(623): n is a, c, g, or t
  misc_feature (644)..(644): n is a, c, g, or t
  misc_feature (705)..(705): n is a, c, g, or t
  misc_feature (964)..(964): n is a, c, g, or t
aagaaatgcagcaagagnaagaaatcccccgaaccagtcaggtttacttacgctggatgtttgagtgtgaagaaataccggcccaagtactgcggttcctgcgtggacggccgatgctgcacgccccagntgaccaggactgtgaagatgcggttccgctgcgaagatggggagacattttccaagaacgtcatgatgatccagtcctgcaaatgcaactacaactgcccgcatgccaatgaagcagcgtttcccttctacaggctgttcaatgacattcacaaatttagggactaaatgctacctgggtttccagggcacacctagacaaacaaggaagaagagtgtcagaatcagaatcatggagaaaatgggcggggctggtgtggcgtgatggcactcattgtagaaaggaacccttgctcattcttgaggancnttaaggtatttcgaaactgccaagnntnctnntccgnatgnacnctaatgcacccccnattnngnaatactttnnctcatagtattggagcaccatgttactgcttcattttggagcttgtggagntgatgactntctgttttcgntttgtaaattatttgctaagcatattttctctaggctnttttccttttggggttctacnagtcgtaaaagagataataagattagttggacagtttaaagcttttattcgtcctttgacnaaagtaaatgggagggcattccatcccttcctgaagggggacactccatgagtgtctgtgagaggcagctatctgcactctaaactgcaaacagaaatcaggtgttttaagactgaatgttttatttatcaaaatgtagcttttggggagggaggggaaatgtaatactggaataatttgtaaatgattttaattttatattcagtgaaaagattttatttatggaattaaccatttaataaagaaatatttacctaanaaaaaaatt

SEQ ID NO: 539504 - DNA, 626 bp, Homo sapiens
  misc_feature (144)..(144): n is a, c, g, or t
  misc_feature (153)..(153): n is a, c, g, or t
  misc_feature (164)..(164): n is a, c, g, or t
  misc_feature (202)..(202): n is a, c, g, or t
  misc_feature (223)..(223): n is a, c, g, or t
  misc_feature (284)..(284): n is a, c, g, or t
acggaagaccctggtagtgaccataaggtgttgaaactgccagggtgctgtgcggatggacactgaggcagccactgttggagaaatcgttgggtcatagtattggagcaccatgttactgcttcattttggagcttgtggagntgatgactntctgttttcgntttgtaaattatttgctaagcatattttctctaggctnttttccttttggggttctacnagtcgtaaaagagataataagattagttggacagtttaaagcttttattcgtcctttgacnaaagtaaatgggagggcattccatcccttcctgaagggggacactccatgagtgtctgtgagaggcagctatctgcactctaaactgcaaacagaaatcaggtgttttaagactgaatgttttatttatcaaaatgtagcttttggggagggaggggaaatgtaatactggaataatttgtaaatgattttaattttatattcagtgaaaagattttatttatggaattaacgagagagagagagagagagagagagagagagagagagagagagagagagagagagagagagagagagagagagagagagagagagctcgtgccagaattcctcagccacg

SEQ ID NO: 539505 - DNA, 1058 bp, Homo sapiens
  misc_feature (18)..(18): n is a, c, g, or t
  misc_feature (130)..(130): n is a, c, g, or t
  misc_feature (437)..(437): n is a, c, g, or t
  misc_feature (439)..(439): n is a, c, g, or t
  misc_feature (464)..(465): n is a, c, g, or t
  misc_feature (467)..(467): n is a, c, g, or t
  misc_feature (470)..(471): n is a, c, g, or t
  misc_feature (476)..(476): n is a, c, g, or t
  misc_feature (480)..(480): n is a, c, g, or t
  misc_feature (483)..(483): n is a, c, g, or t
  misc_feature (497)..(497): n is a, c, g, or t
  misc_feature (501)..(502): n is a, c, g, or t
  misc_feature (504)..(504): n is a, c, g, or t
  misc_feature (513)..(514): n is a, c, g, or t
  misc_feature (565)..(565): n is a, c, g, or t
  misc_feature (574)..(574): n is a, c, g, or t
  misc_feature (585)..(585): n is a, c, g, or t
  misc_feature (623)..(623): n is a, c, g, or t
  misc_feature (644)..(644): n is a, c, g, or t
  misc_feature (705)..(705): n is a, c, g, or t
aagaaatgcagcaagagnaagaaatcccccgaaccagtcaggtttacttacgctggatgtttgagtgtgaagaaataccggcccaagtactgcggttcctgcgtggacggccgatgctgcacgccccagntgaccaggactgtgaagatgcggttccgctgcgaagatggggagacattttccaagaacgtcatgatgatccagtcctgcaaatgcaactacaactgcccgcatgccaatgaagcagcgtttcccttctacaggctgttcaatgacattcacaaatttagggactaaatgctacctgggtttccagggcacacctagacaaacaaggaagaagagtgtcagaatcagaatcatggagaaaatgggcggggctggtgtggcgtgatggcactcattgtagaaaggaacccttgctcattcttgaggancnttaaggtatttcgaaactgccaagnntnctnntccgnatgnacnctaatgcacccccnattnngnaatactttnnctcatagtattggagcaccatgttactgcttcattttggagcttgtggagntgatgactntctgttttcgntttgtaaattatttgctaagcatattttctctaggctnttttccttttggggttctacnagtcgtaaaagagataataagattagttggacagtttaaagcttttattcgtcctttgacnaaagtaaatgggagggcattccatcccttcctgaagggggacactccatgagtgtctgtgagaggcagctatctgcactctaaactgcaaacagaaatcaggtgttttaagactgaatgttttatttatcaaaatgtagcttttgggcatgaaaggctggacatgattcatgtcgaggccttcatgcccaaggccaagacatcatgggcacttagacacgtgcaaatatgcagagacgtgcgagtggcttccgtgaaccaagctgcggctgtggagaccacccaccaccacagatgtttctgttccggtgtgacctgaccccctggcatgaaggcactgacatgaagggtctt

SEQ ID NO: 539506 - DNA, 103 bp, Homo sapiens
gttttcgaagggagtgatgttcaaaagccgctcttctccgtaagggagtgtcgctcagaatctagtttcttcagaggaaagatgtaagctggctctgggtccc

SEQ ID NO: 539507 - DNA, 500 bp, Homo sapiens
gtgtatgtgttatatcatgagagtatgcttggggaagcatggagagtgatatgatggttgccatattatgtcagtatagactattgactagatattatttgttttgggtgtggagaaaatttgcgaggatagggtctcaagatataatgctttttatagtcgtgcaggtcttaagagatgatgtgtccagaggaacggatgaatcctgcttggaagcatggtgggattgccatttggaaggaggtgtttgcatggaagcatgtccttgtctgggagctgctcgtggagcttaagggttgtaggttgtatgtctgatcggctctcggcctaatcttgtggcttccaggaggaagaggagagatcaagctggctgtctgatgggcatggctttattctggaatggtgaagccaatggagagggtcctgcagatggacggcagttggtgtgctataaatgaccgggtagggtctggtccattgaggctgtagagtttgagggg

SEQ ID NO: 539508 - DNA, 120 bp, Homo sapiens
ccaaccactcacttactacagcaacttagctaacattaccaataagtatagcgatagaattgaaacctgccgcataatatagtacccagcaaagatggaaaattataaccagcataatat

SEQ ID NO: 539509 - DNA, 397 bp, Homo sapiens
tcggcacgagatgggatgttcctgctgggttaggccgcgattctgtgccttgtatgggcctctgtgctatgtcagactctcctctgatcctcaagccctacctgtggagacactccactcctagaggcaggctcagggtctgggatttccctgcgaggagctcagacaccactgtgccatggtgacacaagccaaggcagacattggcccttccttgtcccagaccccagagggctggccttgggttcgtcagaatgggccgaggacgttggctgttgaatcctcctctggctgggagtggctctgtgtggaccacggccttactgggccattctttttttgacgcagacaatctgtgaccactttctcccacagatgcctcctgcgtggattctgg

SEQ ID NO: 539510 - DNA, 405 bp, Homo sapiens
aggtccatgtcaaaataaagctgagtaaagttgtccaaacaaactcaccagacaggttacataagatagtgtaccacaacaaatataaatatatgaacaaaacacatcatctcctcctatggatctcacacagaaattaaagtctccaaatacagacaaatactatccatatctccagactattctccagattcacgagtcccagccaggtcggcccatccacactccccaatgaagtctggtcctttcttcagtagttgctgcatggagtcgtcttccagaattaatgcagctccttcagcacctccagagctggagagctccaactgtgagtctcatgtgtcacacacagacccaaagttccagggagctatcaggtcacacaagaaatagcaaagcacctca

SEQ ID NO: 539511 - DNA, 231 bp, Homo sapiens
gggggggcccccccccccccccccctttttggttgcccccaaggttggggagggggccctttttagggggggccttggggaaaggggaccccctttggggttccccctcccccccccccccccgggggggtttttttttggggggccccccctgccccccccccccggacaaaaaaaatttttttttttttttttttgggcccaaaaaaaccccccccgggttttccccca

SEQ ID NO: 539512 - DNA, 941 bp, Homo sapiens
  misc_feature (806)..(806): n is a, c, g, or t
  misc_feature (941)..(941): n is a, c, g, or t
cgacctctccactcccgtgatccctcggtggtcgccccccgggccccgtcgcctgtcaccatctgaagaatgtgtacttctccctccagaaatatccagttaaaaaacgggtgaaaatacatcccaccacagtcgatgcgtgaactatacattctcattataccccagtcctggctgatgataggatctcgaacaaatcacctgtaggctatgcggaattcttatgcgcggaaatatccaaagaaaaggtctcgctcgattgaaaccgcacaaaaaacgcgtgagctttcttttgtaaccatggcatacctctacctccaccaacagcaagacccaatcgaccaattgagatacggacaattaacatgcgcttctccccaaagaaacattctctccaatcccctaactaacgtggtatagatgctgctctcgcgatctgcccatcggctcatcggactgtaataactacttatctgctcacgctctagctctagatcaggtctaaagttttccatcctcgtagaaactgaccctactaacccgcttttattattcatggccctaatacgcgggctactcacgtgctctctcctatccagcgctggtccctcttccggtacccccacggcctctcctatttccctacctcttaatattccagagtgtttgacattcgccctctcctaaccccttgtatatctacccaacatcccctcccattgatactacccccgcgcgcggcccccgcaagccggtacaccgctcttggactgagggcgagtcagccatcaatgagaagaccccanagcacactatttatatgcgccctactgcaagatgtttctcgttcattcctccccaccctgaagccccaccccccgtcttggccccagatccgctgttctcgcccgcacttcctgttctttcctgcccctatcccn

SEQ ID NO: 539513 - DNA, 383 bp, Homo sapiens
tactcaggtggctgaggcaggagaatggctttaacccgggaggcggaggttgcagtgagccaagatcaggcccctgccctccagcctggatgacgggatgagactctgtctcaaaaaaacgaaaccaaaattttttaagagaaatgtcctttggttttggttttgagacagggtctccctcttttgccccccctagagtgcagtagggtcccggctccctgaagtctctacctaccgggtcaattgatcttccccccccagcctcccaaatagctgggagaaatgtcctgtttttaatgaatttgtcttcccttttgtcttggttgttttaaaatctagtggtctaataaatttggatgatatcttttggctttccattttga

SEQ ID NO: 539514 - DNA, 579 bp, Homo sapiens
gaccctttagaaaataccaactgtgagaaggatttaattgcctaatgttaaaaacctatcatctaaattactttcagagaggatttgttagatctcggttggaaatgttttaattgaatatttaatcataatcagacttcgtatgaactaagctgcatttcaatcagtttaaaacaccttctcagttaccttcttcagattcaacagcaagctaatactgtttcgagatcagacaggaaaatattctcgtcggcggcatgtgcactttggtgttaaggcagtttacccatctttggctgatcgtggggacaagtgcaaacttccagtagaatcccggtctttcttcatccaagtgcttgcaggggcagccttgtagtctgcaaagaaccatgcagaaaccaaagagcttgctttatttggtctctggtaattccttagggtctgtgatatatgccaggacagtctgatttgacaacctaactatgcttactaattctcccattattccctcaaaattgtcgatatcacagcgccacttggcctaacatttcgaaaagtaaggacaaaataataacccag

SEQ ID NO: 539515 - DNA, 503 bp, Homo sapiens
cagttgctaaaccaaatcaactcccttcaccccatctggcagtatggctctctgggaactcagattgatcttgcgtgcctgtttcctattgagttgggggaccacagtggccgttcctgcttcaatcccttcagtaagtagcagggagcatttcctaggctgggtcctaatggcacctaatggtcacaaggccaggccccccaccctcctgaagctaacagggtaatgggggagacaccactaagtacacatccattcctgtgaactgtggggaggcctgccatggagaagcatagggagccaggccagtgtagagaaaggcacaacatccaccagccttagggatccaagagcaaagtcattcctgagaaagtgacattgagcagagttctcaggatggatttgcttggctgaaggcagatgggaaaatcccaggtacaaggaaaagcaccgacaaaggccctagacaagtgaagactcagagaagggaaggagaccatcaa

SEQ ID NO: 539516 - DNA, 117 bp, Homo sapiens
gcaccccgtagtatgtttacgtctggaactaaatcttaaatgatgagatttttctacttggaaaaggatttttcaaatgaaacattgaattgctttgaactataaatccctttcttt

SEQ ID NO: 539517 - DNA, 829 bp, Homo sapiens
ggttttgtggaaaacccacatgctcctcagaaagatgatgcctctggctgatcacacactacaaccggacccgacagcaggatagagatgctggggcttcaagaataagcaccagcagtagaagccagaagaggaagatctcagcaaatgaaagtgctccagtttcagtcacgaaactgcccagaatgcaattgccctcgcgacttctagacctaatcatgagagctagatacaaaatccctcactttaaggagagttatctatcgatggctaccaacgtgcggagaactgtgtggcgatcggaccaattgaggtgaaatctggaggagcaggtagaacccttgggcaccaggatcaccctcctacatcactagatgcctcagtatatgaccagagacctcctcaagctctgagacttgcatgtgtggaaactcccagagctagaaatttgaactgggaatggcagtcctcggggtgcaatgttcaagcacactggaagggctgcgtgaaagacatccgggaactggttgaccaaaaattcctttcacactgggcgacagattccaatcctggacagacggagagactacaggagtttagccagaagatggaccagatcatcgaaggttacatgaaggccacgtttattatggatgatccagcaggaaacagtttacttgcagaatgtgtatgcgcctgaagatgatcctgagatgaaacgtggggcgttaacaaagcggactttgaccaaaatgaggagctagggctccatgactgaagacagagggcttgaaggagctggtcgaagggcgggtggtccaggcactcg

SEQ ID NO: 539518 - DNA, 277 bp, Homo sapiens
ggtcgacaccgaacggatagctgtttactgactttcgccacgctcacgggcaatggcgcggtaccaatgtccgtgcggtagaagcagcctttccagtcgatcttcgccgccagcttgtaagcctgttgctgggcggcatctacgctactgcccatggcggttgcgcacaatacgcgaccaccggcggtgacgaccttgccatccttgagcgcggtgcccgcgtggaacaccttgccttccagcgtacgagccgcatccagaccttcaatcagtcgac

SEQ ID NO: 539519 - DNA, 146 bp, Homo sapiens
  misc_feature (11)..(11): n is a, c, g, or t
  misc_feature (140)..(140): n is a, c, g, or t
  misc_feature (145)..(145): n is a, c, g, or t
agggggctaanggttgggggcaggaggcattgctgatgatcttgaggctgttgtcatacttttcacggttcacacccacgacgacacggggactcagcagaggggcaagacacgacctttagtttcccccttgcgataancttcnc

SEQ ID NO: 539520 - DNA, 494 bp, Homo sapiens
ggtgtttaaaaagaaagaaaagttgttttatctaaccctgtaagtagttgtcatattctggagaatttaatagttttagagttaagatatctcctctctttggttagggaagaagaaagcccttcgccattgttgtaatcctcccccgcctttaaggtttagctccacatcatgcttctcttgagaattctatttggtagttccacttacagaaactgattagtttgtcagtttgcagatagatttagcacagtactcatcccccggatagattgagatgttctttcacatcatatgatctgtggcactgtaagacactgctcttggcacctgtttaatcagttttatttccgttcagtataagtgacctaagttattttgctgtcccgtttttgtaaatcaaatgcaatcaccaaaaaggattctgacagtaggttttttgtacatatgtatatatgttgtccaaataaaaataataaatgataaaaaaaaaa

SEQ ID NO: 539521 - DNA, 266 bp, Homo sapiens
tgagataaccatagattcacaggcagttataagaaattatacagagtgatcctatgtgctccttaccaaatttgctccttaccaaatttcccccaatgggaacatgtggcatcactactgtacaatatcacaaccagaatactaacattgatgaaatgaagacatagaatatttccatcaccacaaggatcattcatgtagcccttttgagggctcactcccttcccttcttcaaccccttcttaacacctggaaaataataatct

SEQ ID NO: 539522 - DNA, 181 bp, Homo sapiens
ggaatttgaggttgcagtgagctgtgattgcaccactgcactgcagcctgggcagcagagtaagacccgtctcaaaaaaaaaaacccaaaaaattaagtgagggcggtaaggttgtcttgtttcaggagagggatcagcatgtatgagagcatgagataacattgtgcagttcaggaactg

SEQ ID NO: 539523 - DNA, 243 bp, Homo sapiens
  misc_feature (86)..(86): n is a, c, g, or t
  misc_feature (104)..(104): n is a, c, g, or t
  misc_feature (146)..(146): n is a, c, g, or t
  misc_feature (221)..(222): n is a, c, g, or t
ggtttggatttgtgtccctgctcaaatctcatgtggaattgtaatcctcgatgttggagaaggggcctggtggaaatgtgactggntcatggaggcagattttntccttgctgttcttgtgatagtaagtgagttctcatgagatntggttgtctaaaagtgcatggcacttcaccctgttctctgttttcctcctgctctggccatataggatgtgccannttcccctttgccttccactat

SEQ ID NO: 539524 - DNA, 228 bp, Homo sapiens
taccgatgcttaggcatggggtctgtagacacaacttgcggtacctctcctctccagcccttctcctgtgtgctgcctcctgtctgccgcaccatgaccacctccatccgccagttcacctcctccagctccatcaagggctcctccggcctggggggcggctcgtcccgcacctcctgccggctgtctggcggcctgggtgccggctcctgcaggctgggatctgct

SEQ ID NO: 539525 - DNA, 491 bp, Homo sapiens
cattcctggttaaatagaaatagaatagattggaattgctaaaatataatgtagaaacaataacaaatattatctcgagcagtgaaacaatggaacaatttaatttaaaattaaggactagcagaaactcccgctatcattgttggtacttagtactatctcagttagaccaaagtctagaaaataaaataagagctggtaaagctactgtaagagaaaataagatttaaaacataataaaattattttttcttaatgctatgttagatgtctacaacatctaaaaattctaaaaaattgataacatttctttaaaaaatgtcttcgatctgaggataagtataaaactgttcttttccttctttcttttttgttttgttctttagcaaagtaccatgaatggtaatggagaaaaaaaaatccctttcataatgacaaaaaagttgatcaaaatcaggtgtgtaaatttaacaaaataatcacatgatcta

SEQ ID NO: 539526 - DNA, 845 bp, Homo sapiens
agcggatcatgtcacaagtcaagggtaacatcaagaaaaaaagcaatgaatgagtttgccgacgttcccctgtgttgagtagaattatttgctggcactattgagttgcctagtcaaatcccactgctgccagtaaggggcatacatggctgctggcaacttcatatatacattttcgtttgtttgcttgtccttccttctaatggttaattcctctgcagagctaaaattctgttgtcataccagtgaataaaaatgtctgaaattaacagtaaaatgtgttagcataatgaataactttgacaataaaaagtgtatctacaggttaaatgtagtctatattgcgaagtacatctgttgtaaatatcagccatcaagtgaaacataaatgtaatttccagacaattgtagttggtatttgtggatgcaaggagcttcaatacttgagtgatctcaaatgccttgcgttatgggtaactaagtgtttagcttcattcttccgtttgattctctcaatgaatctatagttatacatggggacacagagccttgtggggatggcgacagggcaagtgatttgctaatcgactggtggctagctgaaatgagtgtgcctgtgactctttacacatcctatgtttggccagagcagcagccgtcctttacttactttatgaaatctgggactgtggtatgcttgcttcaagctgaacaagaaggacaggaagtttaccgcattaagctaagcccccatatctactgaaatttacctcttcttcaacactgttactatacggactgcatcacatttcagtattcgatatcctgattgcataacttataaa

SEQ ID NO: 539527 - DNA, 254 bp, Homo sapiens
gaccccacctagcaaagacacacagagcaccaagttcatgccagccaccatgctcagcccaacaacacaccttatatatacctgtttttttctgtgctccaagaacttgacctgttttaactcctttaatcctcagaacaacctcttgaggtgaccactgttactatttccattgtacagattggggagatggggtacaaatgctgtccaaggctacatagccaacaaatagggcagccaggatgtaaacccag

SEQ ID NO: 539528 - DNA, 204 bp, Homo sapiens
cactttgcttagaagaggactctcctagcggcagagggtgggaggggcttgcatcacgccttggagctggttgctgcggtcatcagtatggctgcttgttcacgaagcgggacaacatggttaaggcagcgaggggcttgtcagtcagaaccatgttgccgatgacccttgatcgtgagaaatgcgatgtgcgagacctcattc

SEQ ID NO: 539529 - DNA, 118 bp, Homo sapiens
  misc_feature (43)..(43): n is a, c, g, or t
tctctgctgctccctcttcattcgatgggatgtcaggcttcancccaaagaggcttcattatatgcttcttctctgtgtgctggtgaacccacgagtctaggagcttcttgctgtagt

SEQ ID NO: 539530 - DNA, 418 bp, Homo sapiens
gattcgcatttcccaggatggtgtcagttttgaatgttgttctctttcaggcaggcatggtgaatctgcgttcagacaacacgatcactctgtcacgctcctgagcgtgaactgttggagcagtcactctgcgtcatcacccaaggctactccctagctcctgcaactgcgaactccactctccatacttctctccaactgctctcggctagactccgccacttcccccgcgcatctgacaagagttctccaagagcccccacttctcaggcggcaacaggcgcaggtacctggcgcagcccttatcctactcctcataaatcaatctgagttttatgggtgctttttctgaggaaggagcgatccaaagctatgtagcgcccacaaacctctctactaatatttttggcaggctgct

SEQ ID NO: 539531 - DNA, 434 bp, Homo sapiens
gtccggactaactaacaggcaaagcttaaaatttgctggtactttaacttgcagagaaatttaactgcttccctcaacctcctgcccatatcagaatagaggcctttgtatgctagagtttccaataccaaataatggcaacaataataaatagtgacaacattttacattatatattactttaagttatagcaaagcaaattttgagtagggctctctccccaccagcaagattcttgggatcttatcgtttgtggggaggaatctggaaactgtattataatagacacccttttatctgatattattgaattgttagtagggtaactattaacaattaattgaaaagtcagttaatacaaagattcataaaatgatatgttttatattttattaaaatgtgtaacctgtgagtataaggccagtacgcgtat

SEQ ID NO: 539532 - DNA, 164 bp, Homo sapiens
atacaggatggtcatctcatgtctctgcacaacaggaactgttcagcaggctgatgcctaagatctaagcgttacctggctacagacagaagatgccagatgacacttaaggcctacttgtgatcatataaatgatgcactaaccgacctattagaactggctt

SEQ ID NO: 539533 - DNA, 171 bp, Homo sapiens
agaacctggagatgcatgagcacacacacatgcgcacagtacacacaaatgcacacacacagatgcaggttacacacgaatgcacacacatgcacacacagatgcacagtatacactgaatgcacagacagtcacaaacatagagtgcagggtacacactgaatacacaca

SEQ ID NO: 539534 - DNA, 242 bp, Homo sapiens
gcaattcgcccaggactggaatttgccccagggagggttcagatgaagcctgcatacccggggctggttgtcagaacgtgtagttgattgcaaacaggcccaagcctgcggtttcgcgccttaccagcgggttgtcgctggccttgacagcgaattgagtcagcgtcaggctggccagcgttgaccagtgcgcgtcgaaggtgtgctgccagttcagggcagcggagtaggcatagatcccg

SEQ ID NO: 539535 - DNA, 225 bp, Homo sapiens
cacgagcgcccacgtgtaaattcatatagaattttgcggtctgagcacggtggctaatgcctgtatcccagcactttgggaggccgagtcaggatgatcacctgaggtcacgagttcaagaccaacctggccaacatggtgaaactccctctcctctaaaaatgcaaaaattacccaggtatggttggcacacgtctgtaatcccagctactttgggcgctcttg

SEQ ID NO: 539536 - DNA, 256 bp, Homo sapiens
acgtctcaccacccatctgtttctctatagcatgaaagagaggtgctaccatggattactataacaagcaattatcagatgactgtttgggtgcttggactggcttggaatagtatctgcccctactattgactcttcatagttattccagttataaaggagactgatcggaccatgtttctctctgcgagtctcttggggaggttgggctggtaaatatttgcaaggtcatcccgcccgacgccgggcccccgta

SEQ ID NO: 539537 - DNA, 396 bp, Homo sapiens
tcatctaagactagaacttgaaaatggactgactacattgggaaatagcctgctgcgacaggcattgtcatggaagttacctgggttgcgagttgtgtcagacacattcagttctgggagcagcatggcagcaacattcgattcatgggctgtccaagaagagtccgtataatcttgccctatgtctttagattaacctggcttggttggcaggtactacaggcatgtgtaacttagcggatacacacttaactaaagtggttacttctgtactaactatcctgggcgtcaagtcctctactctgctcatctccaagggttctgggcacatagagtagatatgactggccctgcccatgtggctggatgcgcaatgttgggcaacattatgctggg

SEQ ID NO: 539538 - DNA, 266 bp, Homo sapiens
ggggggccccttttttttacccgggaatccccttttttttttggcccccccaagggaaagcccccccctcccgggttttttttttaatttgggggggggggggccggtttttctttttttaaacccccccgtttgggggtttccgggggaccccccccccttttttttttttttttttgggggggggggggggcctttggtttttttttttttggggggggtttttcccccctgtttcccccaaaattttttttggggctttttta

SEQ ID NO: 539539 - DNA, 182 bp, Homo sapiens
tgccggcctcccaaagtactaggattaaaggtgtcaccccaagcacctggctactcttcactaaaaaaattgtttcctctgttgtacagagcttttttaacttgatgtcatcccatccgtcctcttttctttggttgcctgtgtttgtggtcgacgcggccgcgaatttaagtagtagtaga

SEQ ID NO: 539540 - DNA, 510 bp, Homo sapiens
  misc_feature (34)..(34): n is a, c, g, or t
agaacgccgggggcattggaggggtggcattcgnaatccttgctgatggggatgagcgataaaaactagcactcaaaaaccagcaaaaatcccgagaactgacttccagaaacttcagacgtcactctcgtccctgccttacatggattccaatcgggagtcaccgtaagactggaacggctcttgtccgctcgttcccacgctctgcgtgggaacgcatcccgtgacgctccgcgtcaccactgcgcaagacttgagccctgcatcgtcagttggacgcagagcgtccgaggcggcattcccacgcggagcgtgggaacgatcatcaacatggaggtcaggccaatccggcctcgaccaacaacgcctccaaccccatcaaatccggcaccctggccacatgctcccccacctgcaccgccgccagttccagcgggcacaacggcacgtccacataactcagctggctatcgagcttgtacgaacgcggaatcccgactcaggtggtgt

SEQ ID NO: 539541 - DNA, 200 bp, Homo sapiens
ttgagagttatagaggactaagcatagatggggtatctaatacccagaacgggtctatagctatagtagtagtacagacatgtaaaagccactttcgtagatctatttagtagtcaactggagtattttacaactcaggtgagtattagctaaattggggagggggtgatctaaaacactctttacgccggcttctattg

SEQ ID NO: 539542 - DNA, 999 bp, Homo sapiens
aaaatcgtctaacaacctggtcgtctgccggtgggtaggcgcgaagggcgttatcgtgggtgataatgatggatgggtggcggggcgctcgggcgtcgggtggtagtggctgccgtgcgacaggtgcgctcttgggcacctctgtgctgctcgggccggcttgtgtgtatccgaaagtgtcgcagggatctcttcggaaggtttgaggattatattttaggtttgcgggcgttcatatagcggtagttattcggggctgctcccgccgttgttatgtacgtggcctgcgtgcgcgtgggcatggcattacgtggtgttggccgcttccaggtcagtcgacgtgtgctgggtggggggaacgcgcccgggtgagcggtggcagaggggccccgagcggtcactaggttggcgctgggggaagaatcggccaaggggggaagctggtgagtgccgcggaggccgagagctcttgcgcaagcagattgtgcccccggcgagtggagcattgtacaagacgcgccccgcttgcaggccccctaggggcgcccgctggccgagggggggaagcaaaaagcgctgcggggacattgtgaataagtaagcgaaacactgggcaagggaccagaaaataagacattgtcggtgaatcatgagggcaagggagcccttgcgagctgcttttcggaaatctgccctaggggctgcgtctctcatgtagagggcacagcggtgtggccgccgaggaaatttggattgctccttcagtgctgtcccacccggtggttgtgctgtggagcgttgcacacgcccctcatagggatatgtgtacgggtcgttgtaagacaactgcgtgatcgcctactgaagcaattaggtcccgaaacaagtggatgtaatctgtagtcttatcttgcgccccaatgggcgatattcttcaaatcgaaaagcattctttctgaaaaaaatttgctataaaaaaaataaaaaaatcaaaacgga

SEQ ID NO: 539543 - DNA, 430 bp, Homo sapiens
tgccgggtcgactctaaggacccgctgatcgcttagtattacgtgagggaatgaaacttgcatacacacgaggactcataaaattcatgttacatagcagctttattcgtaataaccccaatttggaaacatcccaatggccctccccagggggatggattgacacactgaagtatacccatactctggaatactactcagtagtaaccaagaaccacattactgacaatacaacacagggtgaatttcaaaatactacgctaaggtgaaagatattagctacataaggtaacatactgtgtgattccatttatatgaaatagttctacagggcaaactacagtgacagaaagcagattggtgttcgccaggatccatgcatgggagagaggactggctggagaccgaaggaccttttggggcttaaagc

SEQ ID NO: 539544 - DNA, 234 bp, Homo sapiens
acatgggctcattatatctagggattataccttatctaaggctcaactacgatcaacagatatctaaggctcataaggctgatgccactcaccccatgtgtcagccttacttccatggccttatacccacgagctagtcatatgtcaagatcctaccttgccttgcccccaaggcggggtgtccataagagcaggtggagatggtacaaagaacgagaagatctcattcatatg

SEQ ID NO: 539545 - DNA, 122 bp, Homo sapiens
agagcttgaaataaatagagcatccagacaccctcatggacagctgcatctatgataaatatccacactatggacagaaagatggaagcaaaccaccagacttaagccacatataccagtgg

SEQ ID NO: 539546 - DNA, 645 bp, Homo sapiens
cctggctccacctctaccggacagatctcactgcgctgttcagtctctggtaccatacctatggcctggatccgacctgtccttgcagcccggtgcccatttcactgtctcagcctcagcgatgagaccttatgagggtcatgtagctacgctcgcctcaagactatcgatataccaggctaggtagggctgtgaggaatgcattaagaggcatcggtagtttctgacaacctggctgagcaaagctggaatcagatcctgtgtgcctcgctgagaacgtggccggtccgctgatctactggcctggagcttatcaaatgtcgatgcacaatgactgaaagtgattgactcctatatcgcacagagagtctagttggccaggacagtgatgcctgcagagagagctttcgattggtgaccagagacatgttcgacacggacatagaaaccgctgtctgtgtacatgggattcagtctattactcttgactaccctaagatggaatactgtcattgagagatgatggaaggggcttgtgacggggaaggccttgcccagtatatctgtgagaatcatgattcgagctccagtgtacttgacggatgctgtgacttgtgttggaatatacccagctgttgtcgctgg

SEQ ID NO: 539547 - DNA, 184 bp, Homo sapiens
atttcaagttctttgcctgcagaatggtcaggaatagagcccatcttccaggtgaaccacagccccatcatgtcaacaggtttagacgcaatgacattggagaggcttgacctgctgaaaggtgaagaaggaaagtgcttcctagagatagagttagtaaagagagcttaaatcagatgatgtc

SEQ ID NO: 539548 - DNA, 195 bp, Homo sapiens
ttatatacagagtactagaaataataacatatagaaacagtagatatcataaaatagaacataaaatcacatcatacataggctgatagcccaaagcatcaccattacaagtccatgaatgttaaaatgtacaggtgggatagtgaagatatactgacaatcgaaaagttcttctgagaaattacgccttagaaa

SEQ ID NO: 539549 - DNA, 301 bp, Homo sapiens
  misc_feature (78)..(78): n is a, c, g, or t
tattagcaggcattttagcaggttctattgattgggtatcgtgtgacgcggtgtgtgtagaaatatgacaacctgggnttagtatagactagttaaactttcgttatgctaaaggtaatcatgctgttcccgtggggtgtgctaggtaagcgtctgagctgcatagtgagtgttgatgtgtgtcccttttgatcgtggtgatatagagggtgaactcactggaacggggatgtttgcttgtgtactcttactaagagctaatagaaaggctaggaccaaaacctatagctgcgtaaaagtg

SEQ ID NO: 539550 - DNA, 476 bp, Homo sapiens
tgtagctaacttttcctgtagagagacatacttcgggctctgtggtctgggtggtctttgtttcaatgactcaaccttgcatctgtagcctgaaagcagccacagatcagatgtgaaggaatgggcatggctatgtgccaaaaaagctgtatttacaaagacaggcagacagcttcaacctgcaagccaaagtttgccaacccctgctttagactaatgaagaaaaaagaaggtgaaatggatttggacaaccttgcttaaactcccaaggaccctagtgatcttgggcgatggctgtttgaagaactgaagatgccatatgaatgctaccatactcaaagtactaccatactaccatagtcaaagcagacaggaagaaatctttgaatttcaaattatgtttcagctttgttcttttttttaataccatattacaagcttcaaactattcttttaattatatgatttttaaagtt

SEQ ID NO: 539551 - DNA, 131 bp, Homo sapiens
gagcggtccttttgtctgttggtctcctggactaaagaaggaagattagaggcccaagcctatgatcctcaaaatggttaataccagacctctctgtctggtcagtcagaccattccaccaggcaatgaag

SEQ ID NO: 539552 - DNA, 99 bp, Homo sapiens
gtcgacatcgtgggctctgactgagcccatgtatccaatgacgcctcaagaggagcggcacgccatcacgacgcacatcactgaagaagcatccttaga

SEQ ID NO: 539553 - DNA, 988 bp, Homo sapiens
accgctgcataatgttaagctgcattgtgaccaaggtgtgtgtagctactcctgttcattggaaggcagagccatagctatatccaggtgcatatggtgctgcagtagagtatacttgctcacacaagtacgatgaaaaatgactattggatttgtatccagtttcttcaaggtactggtgtcaagattggagaagtctgaattcagtaggtgaagcgacttacgatgagatgagagtggtgtctgaacaacgagtgagaaggtaagtttcgtcgggagggagtgagtatagaaggcatgaaggggatcgagataattcttgtggtaaagctggcataataatgaattgctaaaagcgttgcatgtttgtaactttgagggtacacatgtgggtggtttataaagttacagcaattgaagtcgtagtgcccatggattcgaaaggtctgtttgggaaaagcgtgggagtgtagacgagctttttatatagaacaaaagtagatcggtaaggtgcgggtattacattgcgtgcgagaagggataatggggtgaaactaaagaagggtctaacataaagccgacgatatgtggtaacctagatgttgtaatttgacatctagggcttgaaatgtgtattgcaagagttaggatgattatggaaaggaaaagattggtccctcgaggatgtatacaaagtggggccgaatgagtcctagatttctggaagtgatgttattgatgcaccagagggtataggatcgggaaagcctggagggaatagttttgtaagattgcacgtttgggtaagatggtgtttggaaatgtggtcactgaagtgtggggggttagaagaatggaatgaggtgcgggttggctgtcacagttgctgagacacgagggtataaataacttacccgggctgtataaaaagggggcggcaaccagagtttgggctttaaaaaatgtgggatatatttcaccagagata

SEQ ID NO: 539554 - DNA, 168 bp, Homo sapiens
aactagtctcaggcttcacatcgatacgcgcagcccttcgcctattcttcatagccgaatacacaacattattataataacaccgtcaccactacaatcttcctagggacaacatatgacggactctccctgaactctacacaacatattttgtcaccagaccctact

SEQ ID NO: 539555 - DNA, 173 bp, Homo sapiens
tcgcatcatatgaaacaaaaaaaatattaatagtccattaaacttcacaaaaactaagagaaacacaagacaaaaatccaacaagcaataaaaactgtacaatattaggtccagtcttttatatctgaaaaactgtgtaaccttacaacaaacaagttattatatcgatataa

SEQ ID NO: 539556 - DNA, 541 bp, Homo sapiens
  misc_feature (498)..(498): n is a, c, g, or t
tggagacgggggtctcactctggtccccagggtgggagtacagtgggtggcaatcatgggctaatcggcagccggctaactccggggctcaggtgctcttcccacctcagtctctggagtagctggggactacaggtgcaaaccattacacccagttaattttggtattttttaatagagacaggttcaccatgtggcccaggtgggtctcttgagctcaagcgatctggccgcctccgcctcccaaagtgctaggataataaggcgtgagccaccatgcctggggcccttcgtctctaaattcatttcttcaccggtaaaactggggataagggcaccacttgctttactcagcgtgaggtgggactgtgcacagtcacgtgggagacggagcgggagaggcctagcagtggtggcgtcccccaggtgctccttgaaccacggggcgctctttcccggggcccagagggcgcggccttccatctgggtagctttggnctctgaacaccaggccatggggcagaggtcaggccagtgaccc

SEQ ID NO: 539557 - DNA, 131 bp, Homo sapiens
gatcccaacacaggcatgctcataaggaaaggttacaaaaagtaaaaggaactcggcaaatcttaccccgctgtctacaaaaacatcacctctagcatcacagtattagaggcaccgctgcccagtgacac

SEQ ID NO: 539558 - DNA, 232 bp, Homo sapiens
  misc_feature (43)..(43): n is a, c, g, or t
  misc_feature (186)..(186): n is a, c, g, or t
aaaaaaaaaaaaaagcctcataatgttttaccaagctgggttnacataatcttttcccccactagacaatgtgtttttcaagaacaggaactttattttattcatctttctatcctgaacacaaattaggcactaaataattcattttttaacaaatgaattttttggcctccactttaaggtttnaattttccccttcggtcccacagtttttgtttagaatcctaattta

SEQ ID NO: 539559 - DNA, 693 bp, Homo sapiens
ttggtggatggatctgtgtgttgagagcaatcgccatttgctactatgtgagcaatgaggagctgcggggaaagtctccagaggcagcagcccaaggtggtgcgtgggtgagctttgctgaattccgtatatacgtgccacccacagcacaagatacctgggtgttcccccaagctttggtgcatcatgcaaccaagaaaaaagggccactgagactgcaaaggaggaaagtgaggcgaaatcctgggggctgctggtactgcctaacctagaaacgacgaggacttttctggttgggcgaatcggagttgacattggctgacacttacagtatgtctgcacccctgtttgtggctctatatagcaggttctagaagccctctttccggcagcctttcaccaattaccaacacgctgttcctcacctgattaatccagacccagttccgggctgctggggaacgcgaactgtttgccaagatggcccagttgatgttacacgttggagagaccaactaaaggagaacacggaagaggagggttcggcaagagaacagcccagcgacggagagaaaagactggctgccctgacgggcatggagtacaggggtctgacacgacggcttgtaagcagacgggggaaaccgaacagacacctcgtcgctcgagtagagcagaagagcaaaagagcaa

SEQ ID NO: 539560 - DNA, 104 bp, Homo sapiens
tccgaggattacttgtggaggctgaagagacggtgaccatcgtccctggccccagatatcaaaagcaccttttctagcacctcgtagtcccccagtatctctcg

SEQ ID NO: 539561 - DNA, 1221 bp, Homo sapiens
  misc_feature (853)..(853): n is a, c, g, or t
tccacgcaagatgtgtttgctggttcttcacaggagatgattttgtctcgttgtggcggcaaccgattgctgtctggttgggggtgggcacgccgccccgtcaggtggggccgcctgcctcccctctttggtgagagccacactggcggggtctgcccacccgtcttgcacacggtgcgtgttatagttcccctcgtggaacactccgctccccgcggtggccgcgcatattagaggggtgctccccgccggttttttgtggacccccccgtgtttacattctggggtttttgcccacccaccacgggtctacaacaccacagttggagcacaagggcacacaagttttttctcctcgagtagccttcgaaaacgtagtgcgaaaaatgcatttgtgagttgctccccccccttttcgtgggctatagaaaaagagctcggggagaaagagttgcgccccctctgaaattttctctggtgaaagattctctcgggtgggagatagcttcgcccccctcgtgggtgtggaataatagggtttctccctcgcgcccagagcccccctaatcgggttgttgggggagagggctttttttctccggaccgttataccccccccctctctgggggttccgcgctcctgtggctcggttttcggctcggataatagtggtcccgcgcacccgctgtgtcccgcgttggggggttttcactccacacaagccacgcttggacacaacagagaaggtctctcgctcggagagactcggccccaaagtgtgcacccacacagttctcgtccccccgcagagaggctctcacacagcacgcggctcataaatggagagaagtntattgcctctcttatattcctcgtccacccccacctcttcttataatccacgctgggtggagaagaaccgcgtgttcacgagacctcttttgtttttcacaattggccacatcttataggtattatgatatgtataaagagactcggtgtatatgagtaatacccactagcactcgttaaaccccttcacgaaaggagaaggaggaatgttttgtggagcccctcttggtttttttttttgcgtgtggcacacttttatagttatattatgtttttcaaaatcacgtaactttttataatgggaaccacaccttggccccaaatttgtccccgaattttgagaccccctttaaaaacgtttaatgaga

SEQ ID NO: 539562 - DNA, 901 bp, Homo sapiens
cgagggccggcctgactgagttcagtctcacgcactagtactcagtgcagccaaacgccgtgccgctcccagacggggaaatgacctaaaactaccaactacagaaacccacactctagaccgaaaccgcgcggtgcacttgacgggtgggcttgagcctcacggggaaagcgaggcagaggtgctgaaaagggtcgtccaaagctgagttcatgtagccacacgcacagtggagcagaacacacaagcctgaccgccaaatgcccatgcacacacacatgccacaccggcgctgatgctcgagtgtgctgcaccacgaacgtgtggggacgctaacacaacttcaggcacggaaggcagaacgggaatctcacgatgcagacgaggcacaagcggaggcagcataaccaggaaggacaatagaagggaaagcgcggaaaccagtagactagatggcctatgtatgaataaagacaacctcggaatgagacaatcaattagggaaacgccagtgcactaaaagcgggatagccaaccagactctaaaacataactactccaattaaaaacatcatcatacataccctcacacacattataaccaaacacaaacaaaagatacagacaatacccaatcctacaatctaaaataaatcctcataactcctctaaatccaccacacaatacaaataaacaacacttatagataaagacaatacaaacacctaacattatacttaataaatcacaaacaaccattgattacactacaataaaagtaaagaactaataccctatataccacgtctaacaatacatcagatattaaatctcacaaaaacatcataactccataacatcccttactagtagatcaatattcaataacctaatacaccg

SEQ ID NO: 539563 - DNA, 515 bp, Homo sapiens
tagcgttcagaggatccgcgtaatccgtacactggctaattgtttaaattccaatagtttgtgtgtggattcctgaaattttttatacacaaaattacattatcggcaagtagagatagttttacttctttccaatctggatcccttctattttgttttcttgcctaattgctgtggctaggacttccagtattatgttgaaaaggagtggtgagagaggtcatccttatcttgtgccagttttcaagggaagggcttgcagcttttgcccattcagtatgatgttgggtgtagttttgtcatagatgggtcttgttattttgatgtatgttccttggattcctagtttgttgggagtttttaacagaagggatgctgaattttgttataagccttttctgtgtctattgagatgatcatgtggttttggtttttagttctgtttatgtaataaatcacatatattgatttgtgtacgttgaaccagctttgcatcccaggaataaagcctactg

SEQ ID NO: 539564 - DNA, 415 bp, Homo sapiens
cgacgagtgttcaaaggatgataaataggtgccaagatggagcactcaagtgtgatgagtgccctcaccgtggaatggagtgagaagctttctgacctcataaactgaaggctatcttcagtcatagtaattatatatattacgtagcattaatccgtcatataaccccagagaggtaaattacgtataacttatcgcttcatatgtaggtcgacacacgttgcagacacagcaagaatcaacaaaactcttccacggatcaaccacgtaaaaggcagaccttgcgattcgaaccaggcaacctggctcacatatcagttttaattactacactctgtactttccaagatttgtaaacagtttgacaatgcatgccgatttaaaactatgaagaaacaaacacaatttttcacaa

SEQ ID NO: 539565 - DNA, 158 bp, Homo sapiens
cccaaccattaggtcgactccacgatgcatggatttcacatccaagcagatgtatagaatatattagaaaaacaagaatttgcatctgtactgcacatgcacagacttttttttattgtcatgattccctaaagaatatcgtacatcaggccgtgcac

SEQ ID NO: 539566 - DNA, 569 bp, Homo sapiens
  misc_feature (46)..(46): n is a, c, g, or t
  misc_feature (167)..(167): n is a, c, g, or t
  misc_feature (178)..(178): n is a, c, g, or t
  misc_feature (185)..(185): n is a, c, g, or t
  misc_feature (190)..(190): n is a, c, g, or t
  misc_feature (211)..(212): n is a, c, g, or t
  misc_feature (451)..(451): n is a, c, g, or t
  misc_feature (481)..(481): n is a, c, g, or t
  misc_feature (549)..(550): n is a, c, g, or t
  misc_feature (569)..(569): n is a, c, g, or t
gcatttgcttttgtgttcttggtcatgaagtctttgcctaagccangcgtctagacgggtttttccaatgttatcttctagaacttttatggtttcgaggtcactagatttatgtccttgatccatcttgagttgatttttgtgtacagctgagagttgaggatccnagtttcacttntctcccnccccncccggggccaattgtggcttnngccaattatcccagcaccatttgttgaatagggtttaccttcttcactttatgtctcaggtgggcttctgtctgcaacaattccagcttggcgccctttaactacggcggttacttttgaacgctttcatactctctcatagggggtttacttcctaagtttcctggatatccccaatttggggatcgcttactcgttggaccctttaagtttctcgtctcacttaattccacgcttancgcagtgggcttaatttcttctggcgcggnactcattgcgcccctttattagcttattagctcttcgcacacattccagcgctaacttggttcattgnncctccaagcacttctcgcn

SEQ ID NO: 539567 - DNA, 2829 bp, Homo sapiens
ttctatgtaagagcaagcgagttccacagcgcggggaggccagtggagaggagcgcggccttgcctggctcatgtcctgtttccagcttgccctgaaaacgaattactaaatccatggaggaagagcttggggcctgcctggtcctcggccacggtggggctggggcctgtgactgcgtgtgcagagggtccgcgcccagggcccgggaaaggggctgcgctgccccgagcgagtccccgggcgcccccagcctgctgcagccacctcgggctccacatttcggccccttctcctctccgctgctctgggctcagccaccaagctccacgctgtgggcagaatccactggggcgcaggaaacctcagcttccgcagcccacctggccttcgcagtcttcctctccagggttttatttcaacatggccttttctgctgcgactcagctgtggtaggggccaagtttgggtgtgtgaggccagggaggtgcgttgtgttctcgcggaagagagagacgcagcgagggagcccgggcacacggacccagctcaccaaccgcagccaaaccaccaattctgtcccgtggcccttggtgaccggtgacagggagggaaggaaacgtggccagcttccgccagaccacaggcgaacacaggtggggcggcccactggcttgggcctaggagctgcaggagcaggggccacggtccagcctgacgcccctctcttggggcaggaagttccctctgtctgccatgagcaggggcacttgggagggcccagcataggacctcaggagctcccggagcagcctcagcagccgcaacccctcgaccttgtccagcatcacgccccggtgccagggagacagaccgaagaatcccaccactgtgcaggagaggaagcctactttaattctgttcttgaagtaatggcaggtgaagattcgtatgtcataattaattcctcacttcttaggaatcgcagcgattagctctgtcattcctttgttatcagagagaactgtgagtcctgttattctcactgcttcgccatctgtgagcatgcgcagccctcggctaagttttctaaaaggaacatcacagcgacttccctgacctcagccaggacaaaagcagggagaagaggaatgaaaagcacaggaaaacaggccagggagttcatggatggaaatggcatcacaggcaacagccactcacgaagatggacgaggacccaagagagaaccagcgctgctctacacctgcctgtcagtttgtagtggagaggggcactgtccgccgagcctccatccgtggaaacgctcctcttcgagcccggccattgctctggctgggcctggtgaggaatggccgtcatcacggacagtggcctttcctagccctgaccctgcagagtgcctctggagcgcatagtgctggcggacaggaagtcagcagatcgaagacagggtcccggcttcacggtgggtgagccgtgtgatgtttgggcaagtccctcagtctctccactgagctgggtgtgaacgtggtgctctgtggcagtggcacgtgatgactcctgcatggagttctcgtctcagcaggggcagtgccttgcaccccgattttcaagcagcaacctgagagtcctgggaggcccgtcttttcccctcggtctttctgttggccccaccactcacatatttcaggcctcaccaagtcctgttaatcccatttccaaaaaatgcctggaagcttctactcctggctctgcagcctccacctttctctgagctctgcggacgcttcctcacatcagccctggatgactccaggagcctccaaagggagcccctgcttcctgttcccctcccctgcgacctgctgcccatgtgctcccaaggggctcgttcctccgtgtggatgggatcgtgttcctgctcccctgccccacaacccactgcccgtgtgcacccgaggggcatgtttttctgtgtgagtgggatcatgagcctctttccttggtagatgttctctttgcgctggaatgaaacctcagctcccctgtgacaggaagctccccatgggccagtgctgggttttggtctgtcggcatgtgctctccacccagagaagactcacagctggctgctcctctcacccctgaggcttcacagtaaacatcgactcacaggaggggaccacgtgattcccaccgcgtgtcctgttccctccacggagcatgagcttgaccatggtacaaagcaccgcacagctgctttaaccctgggagagaagtgtctttatgagattctctgtgtccccagggaatgctgccttctcctgtgaagcagtcagtgggccaggcccagtccttaaagatgcagagaacccaacaggcccctcttctgctcacagcttcaccttatgttatgcaaaatccccacaccactagagcatgctggcactgggtcatgggcgcctgcacttcccgcaagcttgtgactcggggtgcgatacctcagcccgtttccaagcagccccatgagatcagggcttattgtgtttgctccatgtatcatgagggtgcatcctgagaaggagagactcgcaggtgggtgcaaatgatttgcagtcacagaggagccaagagctcctgacgggactaatgaaagcatgcctcactttagccctgggccaggttcacgcctcaccttagccctgggcgggttcacgcctcaccttagccctgggccaggctgctgtgtgccatgtgctgtttcttcatcggggggtttgggtacagaaatactaaaaatgaatcttgg

SEQ ID NO: 539568 - DNA, 914 bp, Homo sapiens
cgcggtggttcacgcctgcaatcccaacactttgggaggctaatgcaggcggatcacgaggtcaggagatcgacaccatcctggctaacacggtgaaaccccgtctctactaaaaatacaaaaaattagccaggcgtggtggcaggcacctgtagtctcagctactcgggaggctgaggcaggagaatggtgtgaacccaggaggcggaggttgcagtgagccgagactgcgccactgcactccagcctgggcaacagagcgagactccatctcaaaaaaaaaaaaaaaaaaggaaaagaaaagaaagaaattgagcacggtgaaagggtttcccccagtctctgacacagcacagtttgacgaaacagaaaagggggggcacgagaagactaggggaaagataggacttgagacaggtcaccagtgggttcctttcccagatgatgctcaattaccggaataagggccgcccccaggcaaaatgtaaccgaagcctgaataattttgagacccaaacacagaaatacaacaaaaaacatttttgctgcccacacggccccgaaagagtgtctgaacaccaccttgtgttgggcgcagcccccagctggtctagtgacacggggcacatagcggggtgccacgggaacactgggccaaccatgcgtgtggtgtctccccaatataacagcgcgcgggcgcaccggcgtgttaacaacccacagagggagttgggaggagctcggatcttcaccggggcacgcgactcgatacatgcgcccccgcgggagacatcatacaacaaacagcaacaccacgcaaggcgacggacgccgacagaggacagcacatcacagacaattgacgagaccgatgacaagacaaggagaagccgcgcgagcaacgcgagaacacg

SEQ ID NO: 539569 - DNA, 255 bp, Homo sapiens
ctacacctctgtaacacgagaatttatgcattacagtacacagtaacactcttatatttaccactctaaatgaaaggttcaggccgtgagcacagtggctcatgcctgtaatcccagcactttgggagggcgaggtgggcagatcacttgcagtgctagcaagttcaagcacagcctggccacacatggtgcaagcccgtctctacaaaaaacattacaaaaattagctgctattgaaacttctaaacactaggg

SEQ ID NO: 539570 - DNA, 300 bp, Homo sapiens
  misc_feature (18)..(18): n is a, c, g, or t
  misc_feature (94)..(94): n is a, c, g, or t
  misc_feature (157)..(157): n is a, c, g, or t
  misc_feature (185)..(185): n is a, c, g, or t
cagatcatggcacctctnttttcagaggagaaagagaacagtgcagatgcctggccaaggacacacagcaatcagaggcaggctggcttctttnccccggtcccgccacccggcgacacctgtcagcccccttgcaaactctgtgctccttgagggngggggggggggggggggcggggtgggtntggaccccgttacaagggattcctataaatggcgtggagaggattaataatgtatttataacacattttggtggtagtcgaaaatgatctataaaatgtgcagtaaatgttttat

SEQ ID NO: 539571 - DNA, 357 bp, Homo sapiens
gccccagtcagtggcttgtagcagacttaaacatccctgcctgatggatctgaagagagcagcagaactcccagtgcagcgtaccagctctggtaaggctcagtctgtctcctcaagtgggtccctgacccctgtgtgtactgactaggagacacctcccagatggggccgacagacacctcatacaggagagctctggctggcatctggcaggtgctccgctgggtcgcagcttccagaggaaacaacaggcagcaatcattgctgctctgcagcctccgctggtgatacccagacaaacagggtcgggagttaacacatccactcaaagaccccactggaaggtcaccaacatca

SEQ ID NO: 539572 - DNA, 939 bp, Homo sapiens
ggtctacctcaaggtcttactgtcacgcactatcccttcgtgagggcgagtgccagtggtcaggatgtggccgcgtatgcttctccttcttcaagacctcctttccatgacctgtcagtctccctcaagccccgaggtagctctgtcattcccatgaaggctgcggtccctccccttcccgtcattctgtgtgagagacctggacccaccaggcgagctttcccatcaagttctcagtcatgctggactgtgcagttcttgtgcgccctaacaatcaagctgtgtcctcaataggctctcatggcagggtgagggtctgcctcttcccgctgcgccccgtgaccattacctggtaggtgagcaacctgcgctgggccctggtacctgtgggactagacgggcaagaaacgttaccgacacgttgggtggttcgttgtgcatccgttgccatccgtcccgtggctgtctgctgcgacgcgaggtcggtcgaatgggttgctcactttcacgcgtggttgaccccgctgtactgatctgcacgtgcacggacctccgcgtagacccaccctctcctcccgtggtgacgttcgatacctgggcagccgtccgctgcgtcggagttcatggcggaggcgaaggaccacctgttgttctcgggatcgacagctgcttattctactgtacaatgcaagtcgtatggtcctctgtcactcaaggcgcagctaggtgatcgtcccttacattatcacagtttgacagccgcaggaactacatgcatatctgtatagtcttttcttcggatggcacactgtatccccagctaggtctggttcactcagccgatggaggcaacgagtcgaaaaggcctgaacgcaggccagtcgggctataagagaactataggtcccgtcctatcattgacgtttggattcgaaaagc

SEQ ID NO: 539573 - DNA, 425 bp, Homo sapiens
  misc_feature (4)..(4): n is a, c, g, or t
  misc_feature (6)..(6): n is a, c, g, or t
  misc_feature (8)..(8): n is a, c, g, or t
  misc_feature (11)..(11): n is a, c, g, or t
  misc_feature (22)..(22): n is a, c, g, or t
  misc_feature (24)..(24): n is a, c, g, or t
  misc_feature (27)..(27): n is a, c, g, or t
  misc_feature (31)..(31): n is a, c, g, or t
  misc_feature (41)..(41): n is a, c, g, or t
  misc_feature (49)..(49): n is a, c, g, or t
  misc_feature (60)..(60): n is a, c, g, or t
  misc_feature (70)..(70): n is a, c, g, or t
  misc_feature (106)..(106): n is a, c, g, or t
  misc_feature (126)..(127): n is a, c, g, or t
  misc_feature (129)..(129): n is a, c, g, or t
  misc_feature (134)..(134): n is a, c, g, or t
  misc_feature (136)..(136): n is a, c, g, or t
  misc_feature (140)..(140): n is a, c, g, or t
  misc_feature (144)..(144): n is a, c, g, or t
  misc_feature (151)..(151): n is a, c, g, or t
  misc_feature (153)..(153): n is a, c, g, or t
  misc_feature (179)..(179): n is a, c, g, or t
  misc_feature (185)..(185): n is a, c, g, or t
  misc_feature (190)..(191): n is a, c, g, or t
  misc_feature (193)..(193): n is a, c, g, or t
  misc_feature (195)..(195): n is a, c, g, or t
  misc_feature (205)..(205): n is a, c, g, or t
  misc_feature (212)..(212): n is a, c, g, or t
  misc_feature (218)..(218): n is a, c, g, or t
  misc_feature (221)..(221): n is a, c, g, or t
  misc_feature (229)..(229): n is a, c, g, or t
  misc_feature (231)..(231): n is a, c, g, or t
  misc_feature (236)..(236): n is a, c, g, or t
  misc_feature (255)..(255): n is a, c, g, or t
  misc_feature (270)..(270): n is a, c, g, or t
  misc_feature (281)..(281): n is a, c, g, or t
  misc_feature (318)..(318): n is a, c, g, or t
  misc_feature (324)..(324): n is a, c, g, or t
  misc_feature (327)..(327): n is a, c, g, or t
  misc_feature (348)..(348): n is a, c, g, or t
  misc_feature (423)..(423): n is a, c, g, or t
tatnananatnattttatttananaantgantttcttagtnaccttgantaaaaaaaaangaaaaagatntggtttaaagacctttcaaaaaaaaattttaaaaantttaaaaaatgaaaaattannanttaanantcantaanacttaananttagtaacttctgcatttacgtgtanaaaaantccannanancaaaaaaggntgggganttttanaantcaggaananaaaantaggttattggtcaagganaaattggtcaagganaaattccccancactgggtcagctgtttaaacctggagttcttacccncctganaanaaacctgttgcagcaattcanacttactgtgtaggcatttttaaaaatttgagaaagtttattcttatttctgcatttagtaaaaatataattaanca

SEQ ID NO: 539574 - DNA, 1298 bp, Homo sapiens
  misc_feature (1298)..(1298): n is a, c, g, or t
atgcataaatatggcgtgtggagtcatgtttctcgccgtcccggggagcgataaatgcctcagtttataacacttatcacgtgagcctatctgtaatgttatgtcgaatgtctgccatgatgtgctgaccaaagcacctaatgtgcatgagtgttagtgtagtgaatgggttacggacacgtctcactcgtatatcagtcaagacatctcgacagcagccctgttagcgcgtgttgcagtgcccttagtattgaattgaaacaatccacttttctagtagcttgtggattgtactaactgatacaccaggtgaagagacgatccgttgctattagtgtagactagctgagtgatggtcgacctttgttgtccccgattgcacttcgtaatcttgggaccggaccggtacagacgtgcgttactagtcagaactttgagagtaattcttttcacatggactttttttgcaatgaggccgtatagccttcgctcgtcattgatgccgacgtaggacggttaactggcgctaggtttgtcacctcgggttgaacacgacgtttgaatcatatttcacttattccacctacgtgggaaccgttgaggaggagtttccctaaggaaacattggcaacccctaattacgcgcattccgaaaaggcaataccttttaaacattcgcagagcgcgacatgagcgcctccggaagcaatagggcccccccttttcgtcgcgttgggaacataacggccgagaggtaatattgcccccaggacatcgttcgaggtaaaacaaacgcggtggccaattaagagggttaagcggcattccgcggtgaaatgattaaggtgcactcgcattgagtgagggtcttgccgaattttgccccgtatatttaccgtggcacttgcgttggggaggtggtggacaaaagggtctttggcaataggtgggtattggcgcttagggaagcttcaatgggccattgtacgaacttggacacgggtttccagggtcctaatacgtaaagaaggcaaggaactttttaggcttcccattaaggatgccgctcgaaggaagcaaggaaaagactcccattcgcgagagttagagaaagaccctcttggtgggcaaggaatgcgcagccttgatccttatgttctggaggcacgttgcgctactctctgcgcgcaaacgcgcttcatggaaggacggaagacaagcgcagttttgcggaataggaacacccgcacgggggtagcgtttgcggagattcacgccgagcttcgatcgacgccatn

SEQ ID NO: 539575 - DNA, 695 bp, Homo sapiens
gcctgcaggcccctggctgccctgccacgggccacggacaccttcgaggcggctcctgacatgtgccctgcccacctgagcccgaacttcctccgggcagcaccacgaattcctctaccgacctcttctccgagcgactacgcgtgggcaatgaactagcaagaagctcagtgccgaagtactgtgctatcgtgagacctgcgggcgcctgcggtggccgtccaatgtggcgtcgctttgcagacaccggaattgattcgcgcccctgaaacgcaaacaggacccagccaggaccagcccagcacagcaagagaacccagcgccgaaggcagcaacacggcgcaagaacaccgaaggagcatacacaagcccgacagaccaggacgcgcgccacgacccgccaacagagacacagagagcacaacgagaagccaaccacgcagggaaagcaacacacagacaaggccgaaagagccacgagagcacgagaaacaaaaaccacaccggcaacaacgccgactagcccggcacccaaacaaccaacagcggcataacacaagagggcggagagaccccgaaacacggaacaacgccgacccacacagcagaaggccacacaataacaaaagatgcacacaaaaacacagcacacaagaaccaccaaaccagaggcagccgccacgcaaacccgcccc

SEQ ID NO: 539576 - DNA, 182 bp, Homo sapiens
ccaacaactctgataggtttcctcccgtagcaacactcttagacagtttaacgtacagtattgtgctatcctactcaattgcaataatgaaatataggaacaaacaggacggactggcagtttaaacgagtaacgggagggcattttacaaacttcagggaggtaccagaactcggaatgcg

SEQ ID NO: 539577 - DNA, 327 bp, Homo sapiens
gttctttgctgggacttacacggtgtgacggactgccctggcacaacttgcttttagatataagcctgtttttgtagtatgatcatagattagatgataaggtaaatataccgaaggctgaaccagcgaaggcttagctgctcatgttaactaagaagccatttatggaatataaattgttctcatagttggtcaggttaacaagtttcgcttttcaaaaaatacacatctggatgattctatccttttcctggaattattagttctgtgtagtatatctccactggggcaattttatattccttccgacccatccccaggtaacat

SEQ ID NO: 539578 - DNA, 360 bp, Homo sapiens
ttcccccaatgacttatcttggcaccttggccaatactcagttgtgcatatttgtgtgggcccgcaattcgtgttccacgtgatctaaagtgtatatcctttgaccaatactccaaattgtggacttcggaagctatccagcaagtcttgaactcagaaaggttgattcctccatggtgcacttctttctcaaaatggttttggccactttaatcccttggccttttcatataggttttaaaataatactcgtgctatgcgcaaaatctcgtgctgggattttgacagcaagtgcatcaaccgtgaatcactatgtgaggagaggtggcactcgtgcagtatgcggcgagagctcgtgcc

SEQ ID NO: 539579 - DNA, 464 bp, Homo sapiens
ctgcatgcatcccaactagagtcttccttccacattgcagaaccaagcacagtcctggggctttgcagtgcttagctgggctgagctgtgactgagttgcacagtgggtgctccctaagtctgtaagtgactaaaacgatctcgatcttccctgtgacttccaggtgagggaggaaaggcaaaagtcatgtgctcaggccccggtggatccactgccaggtttctgcacagactcagtgatctgcaggtgcccagatcattgctatggagggtttcgctcatggacctgggtccccaacactctgccagctgaccatgcccctagtccgagctgagcatccccagcaaaagctcaggagtccaagcacacacagccttcaacagctcagaaataactttccgaatgggttttagaaaataacacgagaatgtcttaaggaacagaggaacctcctttttttttt

SEQ ID NO: 539580 - DNA, 766 bp, Homo sapiens
gcctgtgtgcattcacagctgggtcttcccaaggatgctgttctcaggagtggtgggtccccagcccctcttcacactgggtatgatggaggtgtgggcgggctcgtccaggccgatcaaggcacagagtgagcagcggaggctgtggtggggaatggactctcgtgggatcctcttgcagaggatgccccaggccttgaaaccctctagtgatccacagttgtgtggagactgcactctcccagccctgtccttgaactgagagtccagcattttttcagtgtggcccctgttttggtggctcaccccagcagggaggaggcatccgaatccacatgggacggcacgttgccatggttatgcatattgcgtgccgtggatcaatggggccgtggcactggtcctaggatggaagcccccaagaagggcaggggttctgtctgtctgtcagtgaatcatgtgaaggtgtttgccaaaggcagttttacgcaaaaaaaaaagaataaatataatataaataaaaaaatatgtgtggggcgggcttgggacgcttagagaaaagattttataaacccatttgttgttggcgggcggggcccgataggtttgttatgtgtacacttgggaaaaggtggtcccaaaggagactgtggacaagaacagtggggtgggtttctcacaattaaaaagcagcggggagacgggggtgttttgacaaattcgaggtggttggggcgactagggcttatacagggatcaaggagtg

SEQ ID NO: 539581 - DNA, 1540 bp, Homo sapiens
gaccgcagacggacagcgccaagtgaagcctcgctatccccatccgcggacgaccagggcccgagaccgagagtagacagttagtagctacccgcccagaaactagacacaatgtgcgacgatatacgagaccaccgccctcgatgtgcgacaatggcatccgagcactggatgaaagccggactatcgaccgagcggactgacgccccatagggccgagattcaccgtacacatcgatggggcacgcacacaccgaaacacccagggacgaacatgcgaaacggataaaggcgtacagacacagaatatccctacgctgcgctgcgcacgacgcgacatcagaaggcaaggacgcaggctataccttgcacccccatgacacgataccacctactcagacgccaacacggcactccatcacacaaacatgagactgacacacctcggccgcaccaggatccctgagcaccacaacaaccattactacacaaaaccggcaagccttatcgcccgtaggacacacaccagcacagctacacagaccaatccacaccactcagaaccagatagcaaagcagactaacacgataggacaccacgccaacacagacatacaccacacaccacactccataatccaatcccactaactccaaacatccacgacacacaccaacattacacaacacaaaccaacccataaacaaaccagcaccatccactgcaacaccctgctaaaacataccaacaacaatcaaaaataacatacacaccctcttacattccccaacatcaacccgagtccaaacacacagaaaacacaataaccccatatatatagtcatacccaacatagaacaacaaaccacctgaacccaacgaacacaatacaacaacatcaaaacagacactcacaaacacacatacaccaacaccaacaaaacatcacaaaatacaactactcacacacacttcaacctcccaccacccaccacgactctcatcacaatcaaaacatataaactcacatcaatcaacataaacacatctccgcacatcaccacaacaacaacatcaccccgtccatccactcacgccaatctgcccacacagacactaactcaactaccacaactcatatcacacacctcccacacacacacacaaaccacaaccaaatcaaacaaccaacatccacccgctcacccgatctcacctccacacgccactccacactacacccaactgccaaacaccatccctaaccatcacacactcctactcacacaagcaaacaaaccttcacccaaactcacaacacacacaacaactctaacccaccacacatcacacaccacccacatctactaccaactccaactacacacccaacaaaacaacaacaaacaacataccgcacacaccaacccagccaacactccatacccacaacacacccacaaataccacacagtccctacacactatcccaacacaacaatacacaaactccatacaatcaccacacaactaattacc

SEQ ID NO: 539582 - DNA, 740 bp, Homo sapiens
  misc_feature (1)..(1): n is a, c, g, or t
  misc_feature (98)..(98): n is a, c, g, or t
nccagctctgatgaaccctactagtattttcagtgagctagattgcgcatacttcttactccacgaaattttaggtacattgataagccatgtagatntgttgtcctctgctaagcaccaaaagttagatatctgctcgcattgattctgtacacacattaagtcatcctttggaatttaggtctctggcaggtatctgtgcattcatagaactcatataggtcccagaatctcttttaacggatttttattagtttaaaggtaaatacatctatctgaatctacatgtctcttgttttatttctctctaatcttgaaaacagtacatctgcagatactgtgaggcacaaattatcgtgtcaacctactgttactatggttatatcctcccacttcatacattaccaagagtcgatcagtgatttaaaatttttaatttccatagttaagatttcctgcataatataggatatatagttaagttaacatactaacatttctcctttggaggaagttttaatctacttcagtatgcatattattatcaagatactttcatatacaggatagcctaattttatttgtttaaatatgcttaatatgccccagatttcaaatgcatccagtcagtaatatcactgtctgtatgtgaagcacatgttcccatggttcatatgttaaaatgtcaataagcttgcattaagccgggtgctttgtaagtggattggttcataaataac

SEQ ID NO: 539583 - DNA, 104 bp, Homo sapiens
agttctaataccgatttacaattacattgaactagaggatcccctcactggaggtgaagagacttggcttcatatgggattgtatctgtgggacttgatatgta

SEQ ID NO: 539584 - DNA, 399 bp, Homo sapiens
cagaattacttgttcttgaagagagggtacctcagcacagagaaggaacataggtctttctctgtgacttgataggattctgtttccttattaataaattgagaatggcaataagaatggctagtatttgtcaaccatgtactgctgaccaggcactgttcagatgtggctcacctatattaagtaatttaatcttcaaaacagctctttgaggtaggtactgtcatatataatgtgtatatatatacttttatatatgtgtaaatattaaatatatatgttcacataaatataaattatatatccttattttacagatgagaaaactgaggggttaagacacttgcccatgttcacacagttactcagtcttgcttgaagcctgagctcttaacaatg

SEQ ID NO: 539585 - DNA, 258 bp, Homo sapiens
gagggtggagaacgggtttgagtataatcagttgggaccagtgcaggcggccgagcacagtgagtctgagggcggggtgtgcgcggtgcgtcaggagaggagcgccctgggtgccctagggctgcgactggacgcgcgggctttgcagcgagcacccttatcgggctgtcgcctgacagaatacctctaaaaggcctagctaaataaacctgtaagccccagcattttgagagaaaggtaggggtgtgtatattataa

SEQ ID NO: 539586 - DNA, 208 bp, Homo sapiens
tcagttcgggctttacggcgccgcctcctggggttggtccccggttcgttatggccgtcgccggtaacggtgcgggatctggaggccgaacaacgcgattggtacccgagcctggcaaccatgcaggagtcgctgcgggtgaagcagctggccgaagagcagaagcgtcgggagagggagcagcacatcgcgtagcgcattgtccata

SEQ ID NO: 539587 - DNA, 344 bp, Homo sapiens
ttttttttgagacagtctcgttgtgtcacccaggctggagtgcaatggtgtaatcttggttcactgtaacctctgtctcacagatttaagagattcttgtgcctcagcctcccgagtagctggaactccaggcacgtgccaccatgcccagctaatttttgtatttttagcagagatgggatttcgccatgttggccaggctggtcttgaactcctgatctcaggtattctgcccaccttggcctcccaatgtttaggattacaggcgtgacgagccacctccagtctcattatacaacattcttcaatcattcacgcacacacacacacacgtgcacacacac

SEQ ID NO: 539588 - DNA, 144 bp, Homo sapiens
tttaaatagtataaaagaaaacttgtgatctatatattaatgtatcaccttcattgtacatttagcaggatatgcatcacaattatattataataattgcaccagtgaaacaataaagatgctattgaaacttctaaaactagg

SEQ ID NO: 539589 - DNA, 900 bp, Homo sapiens
ttcttggagaggttcttggagagattctgggagccaaacactccattgggatcctagctgttttagagaacaacttgtaatggagccttcatctcttgagctgccggctgacacagtgcagcgcattggggtgaactcaaaatgccacccaagggatgagagggtggctctccgcctagatgaggaacgatacgctgaggcacttcagggagtgcttttatattcccaaaataccaggatctgcctccagtggatttatcattagtgaatacagatgaaaatgccatctattcttgggaaattctcttggcttcaaccaaaaaaaatggttaacaaccatatctttgaagaaggaactagattagtgggccaaaatagcaggcctatggttccatgaaaggtggggaagcgtcccttggattacaggagatgagagtatggtaggccttatgaaggaccattgtacggagccaatgcgaacgaaatagccctaatgaatgtttgactgtaaatttacatcttctaaggtaatcaatttaaagccttacggcaaaagggattataaaatttcttcttaaaggcaaagccttccctccctgaatcctatggctatgagtcgccaaatacaactacaggactaccattgacgaccgaggcggagacacgcccggagcggcagaacctaccaacagaggatccgtacgcctggcaggagacacaactggagacggtaaggggggtaaacacaacgaaacatacagcacaaaacgcagcgagggaactgacagcacccgccccaaggacacaccgagaagcagagcgcacagaagagaaggcggaacacaaagcagccgggagcgacagcaacaccagcgcacacacacaccaagaggtgaaacg

SEQ ID NO: 539590 - DNA, 476 bp, Homo sapiens
acacgtggaaaccgctatctatgtatgtgtacgtacgcatacgcacaacacacactcacgtgcatccatgtgcacgcttactaacccagtgtacataaacactattctctatatgtacaatcacgtgcacactcactagagtacgtgcacccacgtgcacgaatcactaaacctcacgtgtaaatatacactaacactcgtgcaaacatgtgcacgctaaacaatctatatgtatattaatgcatacacaaatccacacgtgcacaatcgtgcacactagcatctacgtgcaccccgtgcacaatcaagtcataccgtacacttacgtgcacgctaaccatctacgtgcagctacgtgcacacaacccattatacatgtgcattcacgtgcacactaactatctccgtgtacactcgtgtgtgttccaattcacgcgtgcacctacatgcaccaaatcactacgcataacaccaaa

SEQ ID NO: 539591 - DNA, 135 bp, Homo sapiens
accgaccaggcatgggaagataaggggttatcaaggagtgatgacgacttagtaccttaggcacccctccatttagagggggtgaagtttaggaggagccaaaaaaggcgcctgacaagggtagcccttaaactg

SEQ ID NO: 539592 - DNA, 601 bp, Homo sapiens
  misc_feature (480)..(480): n is a, c, g, or t
tgggaggctgaggcgggaaaattgcttgaacctgggatgtggagatagtagtgagctgagattgcaccactgcactccagcctgggtgacagggcaagactctgtctcaataaaaaaagacaactactccttgatggtggctctccctgtcaaaaccacatgtgctctgtagcatctttggttgtggtggtcctgttttcctaggaactttgttaatgtgctgtgaaagattgaaaatttcagtacgtagtgtctatgatataaaattgttcattgatggtacttacgtaacaggttatccacatttgaagacactggcatttgatatcttaaggaaatttggccttcaaatttcaagcggcaaagtcatgagaatatctgtttttaacgcttacaatacatggctttttagatttttggtacaaaattgtgtacaaattgtgtgcaaaattgtgaaatgtctgtgtacgtactgatccncaacacaaccaataaaatctcaattagagagaattgcttgatccaacctgccctggcctcttggcagcttgccagtgacagccccctgccactgcagttgcttcctctcctcatgccactc

SEQ ID NO: 539593 - DNA, 376 bp, Homo sapiens
acaacaggctttggtatcaggttgaatggccatactgcccaaggtgatttacagattcaatgtcattcccatcaaactaccaatgactttcttcacagatttgggaaaaactactttaaagttcatatgggaccaaaaaagagcccgcattgccaagacaatcttaaggcaaaagaacaaagcttgaggcatcacactacctctacttcaaactgtactacaaggctacagtaaccacaacagcgtggtactagtatcccaacagagatatagaccactggagcaaaaccgagccttcagagataataccacatatctacaaccatctgatctttgacaaacctgacaaaaacaagagattggggaaggggtgccc

SEQ ID NO: 539594 - DNA, 713 bp, Homo sapiens
tggctgctgtaggacggttgctccgagcgtcggttgccctgacatgtgatgtgccattccttgagggcatttctgccatctgcagccctcaggcctggctgcatgtggaagaacgatgcttgacgaaatttattggtgttctgggttccagtcaatgcaaaattattcatgcaccgagttcctcattgccaatgcaccctgcttgtcacccatgcatgcaccctaattttacagggtacatgccggtatgtcaatgggacgatgttcaaatgaccttaagccttggattgacctttaacaggggcgcacaatatttgaggtgggcttattccttcgtaatcctttgtgggcattttcaaccattacgggtggtggtccataacaggaaaacttgggtcgggctcttcaacggtggacaaaaaggcttacacggacattgttcaccggattggtggaaacctggttggcaaggtttggtaccggcaaggttccttccaggctggggattttccccaaagctctattacggccccactccttgggaccctgggaacttacacaatttaccaactacaaagggacaaacggacacttggggatggaggattccgggggaggcccaaccactttggaaaaccaatttccggccaaacttccgtatggttccaaggaacccttataaacccttaaatgtgcagggaattttatccccg

SEQ ID NO: 539595 - DNA, 183 bp, Homo sapiens
  misc_feature (3)..(4): n is a, c, g, or t
ctnnatacacaacgccagttaagttttgcattatcagtagagacggggttcaccatgttggccaggctagtttcgaactcctgacctcaagtgatccacctgcttcggcctctgaaagtgctgggattacaggcgtgagacactgcgcccagccttcaatcccctgtgaatttctttattggt

SEQ ID NO: 539596 - DNA, 209 bp, Homo sapiens
ggaacttctgaaggtccataagaaagaaggtaccctcttttgtagaaaagacattctcttcaaaattaccaccactttgggaggctgggggattaaagagagtataaaaagagtgaggaagatggggggcgggacgcaactctgtccagctgcgagaaaccgatcaacctcacagcaaggtgtgatggctctgatgcaagcaacatacc

SEQ ID NO: 539597 - DNA, 410 bp, Homo sapiens
  misc_feature (84)..(84): n is a, c, g, or t
  misc_feature (134)..(134): n is a, c, g, or t
  misc_feature (404)..(404): n is a, c, g, or t
cccactgcaaaaactggcatccttcgctccctcattattttctctttggtgtatcgatacagcataaagaaagctgggccaggnaaaaataacagcaatcaaggaaaaggggaaaatcagcaattttctgaaanagatgccctttccggcggcaaagggcatcatggtaaatcagttatagttaatcttaaaagcaccactgtatcgaggggccagcctcgatggggggtgcctggattggacgaaagttcagccgtataggttttttcgtagaccaacatgtcacttgtgaaatcggcgtattcagcatatttattgaggtattaggccgaggcgttttaatcagtaacgtagcttcagacccttaccatcacaatgcttttcttcttcaccacggttttcgntaaagg

SEQ ID NO: 539598 - DNA, 797 bp, Homo sapiens
  misc_feature (250)..(250): n is a, c, g, or t
gcacgtactaattgtcgtggttgatcaacgagcggggggctgttcgtatcattggttcgtttctagtcagcagcaggcgtggcgcacattgaacgatagtgttttggtcgatactgcgccaccgcggattagtgtcgcactatccctgccctgtgtccttattgctggcgttagagaagaactctcacagagtgtgtcgtctaggtaaagctagcccgtcgttctacagcatgaacaagtatttagtctntttgtcgtgcgtgagacgctaccagcacatgggaaggaacaacagtgttcgagtgtgctcggtctcgttactagagagataaatgatattgtgcgcacatttacatggcgaggatatagcgttacatatttacaagatatctgcattatctgctgttttcgcggcaccccgcaccttcgcatttttagtggccgcccctctctctctagaatgtatatctcgccgctactgtcttcactatagctcacctctcttatataccgatatagccgtggataaatatccgacactactcactcgctcctctcgaaactcttcctcgtgtatatatcactctctcattcgactagtctctatatcttttgcccagttgttccctttaatgtggcggaccaccgtggtgcccgctgcgtgtaggaggtgtcccctttctctctttctatcgccccgtgtatagtcctctacgagctcctccataaaggcccaacgtatggaagtcagcggcggccacccctcttgtggcggaacaaaataacagaacaaacaa

SEQ ID NO: 539599 - DNA, 402 bp, Homo sapiens
gtaacatagtacttgcggtccatatgccagcgagctcaagacccaagaagagccatttttcagttggcgtctgaaagcagaaaaacttatgtcccagcccaaagcaggagttcccccgttacttgagagaagaataagccctgttggttacattcagtgccttcaacacgactggaatggggtccacccacattacgggtggagtttgttctgccactgtgcagttatcattctgggatgggggtaccttactctcccaatgagaaattctaaatttcctcttttgagcctggtgcctccaccttctcagaactgcatagggcgtgagcttggtgggtgatgtgacctccagaacagactgtgagcagattttgtgctttaatcctgatttccaccttgcca

SEQ ID NO: 539600 - DNA, 258 bp, Homo sapiens
cgtcgggctgttaacctacattggttacccactacatttcctcattataatcagatgctattttatccacttcttggctttatatttttctatcttctatacttctccaatcacttgtcttagcttgtatttccttttctatctgacactcttgacaatattttcattttctatcttgtttctatcttccaattttcttctcacagtttgtcacattttagcccttagcttttagtttcctagctggtgtaaccactg

SEQ ID NO: 539601 - DNA, 179 bp, Homo sapiens
ttccaagcactggggatacagagaacgaacaacacacggttcttgccctcatggagctctcagtttggtgggggagacagacacgcaagcaatcgcaaacgcagtgtgtatggggatacatggccccagcctgccttgtctcaaagaagatctagggtcatccaatacagtgtggttgt

SEQ ID NO: 539602 - DNA, 939 bp, Homo sapiens
gcccgtttgaccttgtctatccccttcaccatcaatgaagggcgagatcacagggggaggttcggagtgccctcagtgcaaggctggggcagcaccaccatcactgacagtaaagacggcaacgtgatcgtgcggtatgcacccagtctgaggcgtggactgcaccgagaatggacactccgctatgacaacatgcacatccccaggaagccccttgccagttactatgtggattatccgtcaagctgtgtggccatgtgcatcgtgcctatgggcctggcctcgatgccatgtgagtaagtgaacaagcctgtccacgcttcaccgttcagacagcaaggatgcaagagaggggggcctgtctctggccattgagggacccgtccaaagcagaatatcatgctgcactgagaaccaggatgggactatgcagtcgtgttcctacctgaccatgtgcgtgccggggggacctacagtcgattctagatctaagtacaatgaacagcacgtcccaggcggccccttcactgctcgggtcacaggtgacgactccatgcgtatgtcccacctaaaggtcgggtctgctgccgacatccccatcgaacatctcagagacggatctcagggctgctgacggcactgtggtcccgccctcgggccgggaggagccctgtgtgcgtgaagcggctgcgtaattggccacgctggggattttcatttcgtgcccatggagacggggggagccctggttgcatgtgacagaagaattggaccagcctcggtggtccgtcaggccccatccggggttgatccgccaggtgggaaattggggatgcacgtcgggttcggggtctctgggcaaggcttccagaaagggcacctttgagcctgggaattaacatggtgcccgggcggtatgtgggcacattgatgaggcca

SEQ ID NO: 539603 - DNA, 194 bp, Homo sapiens
  misc_feature (28)..(28): n is a, c, g, or t
gggagggtttggttaatgttggggtttnaatttaaacccttgattaagcagggggcagggctcctgtgttccaggaggccccctgctattcagtgattttgttctgtactaaaaattttatcagcattgatgtgtcataaaggaatgacaggctttggtgtgatggttgagattaaatttagccttacctgtta

SEQ ID NO: 539604 - DNA, 95 bp, Homo sapiens
  misc_feature (19)..(19): n is a, c, g, or t
  misc_feature (54)..(54): n is a, c, g, or t
ggttgagtagcatcatcanagagaagtgaacatcacacccaacttccttatgcnttccagtggctaaaccacttaacctactctgggtgttacct

SEQ ID NO: 539605 - DNA, 825 bp, Homo sapiens
ctatcaggattttagcagcaatgctgggaaatgacaggaaaatgacaggaatgaatctcaccagattttttatgtactcagcagagccttgaggttcacggtgtttattgttccaatcaagtgaagatatctcctacttctcctactggaacatctcaggcttctgcagttgatagaacagagattgcctgtgatagtttcagttctgttagctttgtatctatttgagacaacataaaaaaccatcatttaaatgatcccgttggttcagcggctctccattaactgactgagtgaacagtgcctatctgtatattggactaaaccttttcctaaggctatctctcatggttcctatgttttttttgtcataattaaaagcaagaaccatctggatcacctaacagtcagaggtcagtatctcagcgtgtgaccattatagcaggaacatacagagagaacctcttccacttggttatcatttctcgtaccaacagtaagaatgcatggtgtcaccagaagttgaagatcgggttgaggatgggggctacgcgtcgatgacactatggccccaacatcgcgggacctgctgtggcgcggattccttaggaacgctgttctagccggccccctctccagggtcggcgtggcgggcattatttcctagttcttctgtgtaccctgaggtgccagcgcggggagttgaggagggggtcagggggttaaggattggaacttctggacgttcttgggccttcctagggggagtcttacttgtgtcgcggatttcccaagcaatgggagttggttaataccagtcttaca

SEQ ID NO: 539606 - DNA, 772 bp, Homo sapiens
cacatcagcagcccccgctgcccgtagcgggaagatgactggcagatgaggatggatgtggagtcccatcggctgaggcggtctgggtatgcggatgtgcacatgcctgtcaagcccgtccggtgcaaggcggctagtgtggctagataaggtgcgaacgagggtggctgtaacgagaagtgagagtaagtggcgcacgcgctggggaccgggatggaacgtggtgctctcccaaatggagccttgaaccatagagttctcttactggaaccatcaagcctctaatacggccccagacctttcgtgtgagaagtgctggttggtggagagaataaacgagctcttttgcgcagccgcagaatcagtacgggcgaaaggggtagtagagatgttgctgattgcgatgactggagatgacagtttgtatccagtactttgactgataaaggtacaggtgcagctttctctaaagctagtcctctggtccagcagattatcgctgagggattggtctcatgtctgggagacacttaggttgttttaggatagcgacggtcacggtgaactaaaaaaagttgtcacgtatcttttcctgcatgatcccctttgattgaatatctacttgttgcaaaccctgtagacagctttgtccagaagcaagggcagatccagggggtgaagaaatccaagactgctgaaatttcctgactttctgttgaatgggacacagtatacaagaaaacctaaaaaaaccaggcctagcgatgtgcat

SEQ ID NO: 539607 - DNA, 350 bp, Homo sapiens
tctggtctctcacgtctcaggagaagtttaaggaaacttattcacagatgtaggttgtatagtgtagtagtatgggatattaaggaattctcacctgtctacctttctcacttaatacaggaagtcaactcattaaactgagtgagaattgagaaggattatctgaatattcagaccactttttctattgtctgaatatttttatccatgttactatcatttttattcctaagtatgtactttgtcgatttatcattaatctcatattttaaaactcattttttgaccctcttgcatttggtgttccagatgttttggatgctgcccatttaatgtcctgcaaattttgg

SEQ ID NO: 539608 - DNA, 1019 bp, Homo sapiens
tacgtatggcttatcacgaacttgttttggtttcgtcatatattcttgccttcacaaagttttacactcattcaaacgtgaagattagaacataaatttctagaaaatagtagaactagtacttgacttactgtccctgtacatagaactctccagtaggacgtcaattctgcggcacaatcactcacatatgagcatttactaatctgtagtttatatttatactcttacacaatttactagcaccttctctactgtgagctacccatttacatactgcaatatgtacaccacacgccactttccacttctttatagatccagccatcttatatctggctattattccacgaccacacgcgtgcacagttgcgattatattaatctcacggaatctataggctcaaatactctaacacataagtccacacctttaccttcctgcccccatatacatattacataacatcaacattacatgcagcacatctttatggcacccgattatctcgcactccttacctttcgtatgctacacaacttaggcccccttgggatccccatcccattttatcaccctcgatatctcgaaaggttcaaatctcctggtgccgcgcacatctctggctcatcactcttggttatctacagcaacaccgaaggcggtgtctggcagacgaatcgaacacatgtccaggacgaaatattatgggatcaccatcaaacgcgtttcccaatttcacctgcacttatctcactctacacaacttccaaacacactccattacacaaactaatcctaccctcaaccggactcgacttaaaatttcctacacttaacaccctccttacaatattcctccccgcacaaacaccacaccatactatatgactcacaacataatcttacccacacacaacacattcatctggtctacatactttcacctttctcctcaatcgcccctcacttcacatcaacattttgtattgtactactttcactcacttaataacac

SEQ ID NO: 539609 - DNA, 310 bp, Homo sapiens
tcgggcatgatgaggatcggcaaattctggttgtatcttttatttttgagatggaacgattaggatttgatgatgaattaaatatcgggtctgaggtcaagggaggaaccagagataaatactatggcaaaatagaagaacccctgccctccctactcctcttctcataacggaaaaattgacacaagatattggaaattcactgagtgtggtgactcatgcctgtaatctcagctacttgggaggctgaggtgggaggatcaattgaggccatgagtttgagatcagcctgagcaaccaagcaacccct

SEQ ID NO: 539610 - DNA, 275 bp, Homo sapiens
  misc_feature (88)..(88): n is a, c, g, or t
  misc_feature (95)..(95): n is a, c, g, or t
  misc_feature (229)..(229): n is a, c, g, or t
tgggactacaagtgtgcccccccatgcctggctaattttttgaatttttgtagtgatgggatctcgctttgttgcccagggtggtttngaatttntggcctcaagggatcctcccacctcgacctcccaaagtgttgggattacaggtgtgagccccctcgcctgggcccccttttccatatgcctccaaaaacatgtccctggaaagtagcctgctccccccctgtcnctggatgtcatggggccaataaaatttcctgcaattgtgtttttca

SEQ ID NO: 539611 - DNA, 494 bp, Homo sapiens
gccacgctgactggtcacagaggagaaggtagaagatctgattcagatcccgatgtgaacctgcataaggaaaacactaatttatgttacaaaatgacatgacatattatggtttcaaattctattaaaccaccaaggaaatgcgcggtcacccctgtgtgggcgtcatttggaagacaagattgtatctctggatgaagaagatatttgacttcgttgtaattcccaaaactcagcaagtcatagaacaccacaattacatgtattgatcctaaccacaaatatccgatatttgtggttctggcaatgatgtggaacgttggataactagttggaggtacagaagactaaagaggataaataaatgacggaaattattggtaacccaagtttattttacgacgcccatctctttaatttctggtggtgcagaagttataaggtaaagcttgagacgatgagggtgtccacgtaggccagaacctcatatatcg

SEQ ID NO: 539612 - DNA, 339 bp, Homo sapiens
ccttagcatatcaacaagtactatagatctacatatagcaaggcatggagtgcggagtgcagggacaaaatgtgacaggcatgtaattcttctgctcttatcaatatcttataaatttcctgctcagaattataatagaaaagtccagaatcaggatgctagcaatacactcattacaggcagccctctgaacatatctcctatacaaggatgtacccatgtaagagaaaatcaaaccactaagttaaaaaaaacattacgcatccctgttatcgggacaagaatgcagaaaaatagcctctgcactaatgaagaagatctgaccgatgtacatcagcc

SEQ ID NO: 539613 - DNA, 172 bp, Homo sapiens
gggcgcggaaaacctagtgggcgcggaaaacctagtgggcgcggaaaacctagtgggcgcggaaaacctagtgggcgcaggaaaacctagtgcgttagaagtcggatgcggtggctcacacctgtaatcccagcacttgaggcaccaggcaggcggatcactggagttagga

SEQ ID NO: 539614 - DNA, 291 bp, Homo sapiens
gggtgagtcgcgtgatccttctgatcaggaggtccctggtggatacatggctacgcggtgctcggcaactaaggccttgtggatgttcaaggtgatgtgctccgattgggcagcagccttccttggcagccggagagttgcatatgggtactggggtacccggtcgacctcatcttcgtgaaaggatctgctgtagtccctctggcgctcatatccatagtgggctgaggaccggtaggacgggttgacacaatcagtttaaatgctgcaagcacactgttagtttccggc

SEQ ID NO: 539615 - DNA, 166 bp, Homo sapiens
gggcgcggaaaacctagtgggcgcggaaaacctagtgggcgcggaaaacctagtgggcgcggaaaacctagtggtggctctgagaaggggaggacccctgggcctttgattccatctccttgctcttttttctttcgtttttacgagacagaggtcctggctattt

SEQ ID NO: 539616 - DNA, 360 bp, Homo sapiens
tccgtgagcctgtgcaccggtcctaccggggctaaaacttaattaattaccatacaaaggtctgaccagacctagtagaaactcccttcaggacaggacaatagatggttccttccgggcgattgaggtaaaaagacacaatgggtattcagtgagtgataaggaaattcttgtagaagcagagttaggaaaattgcctaataattgcgctgctcaaacgtgcaagctgtttgcactcatccaaaccttaaagtacttacagaatcaggaaggagccatctatatcaatactaagttaatatggactgaacaaggtcttattaatagcaaacaataattgaaatcccaaacttacaaggg

SEQ ID NO: 539617 - DNA, 530 bp, Homo sapiens
ctgtgaaacggtatacattctggacaagggatgatactagggagtactgccagaggacagtgttgtgtctgtggagcctggcgctgcgtgtgggaagctgtagattcctagactgacgcctggtatggtggtactgccaggtaatgccgatgtgtgcgttagagcctggtcggctgtgggaggtggtggattctacactgacgcctgagcttgtcgtgctggcaggtgacagtgctgtgtccggtgatctggggctactgtagaagagtggtacatttctcactcaggcctgctgtagtggtactgccaggtaacgctgttgtttccgtagagcctgacctgatgggtgacattgtaggttctccaacaagtactgaggttgcagagcgggtcgggcagagtgctgttccagttgcacctgggctgctgtggactgtagtagatacctcactaaggactggcgtgttggtgctggcaggtgcaactgtagagtgagtcgagcctggttggctacgggaggtggtggattt

SEQ ID NO: 539618 - DNA, 404 bp, Homo sapiens
cacaccacattaacacaaaggcaatcttctggctcggactgttctttactactgttcttaaagaacacgttcattcgctgcagctaactagcctccatcttctacaccaaatactattccatgccctggaagtgtacgcaataactctcccaggtagcaccttataccgcttaacagcctttacaatctccaatctgaaggtgccacagtcccagaaatgtacacacttaggaacacaaaactgtacctacctgatgaagccatctatgtccatggaacgggcccgtttgtcactaaaccctgtgctggttaggactgcctcgtatttctatctgctctgctgaaatcttccggtactatctatccatataagattcagaataaatgaacgacatatctttaaa

SEQ ID NO: 539619 - DNA, 624 bp, Homo sapiens
acccacgcgtcgcccacgcgtcgcgctgcgcggggccggccgcgcagactttctcccgacccctccccgaccccacggcagagcccggcggctgtaatggttccatgggcgggggtggggtggttgccccaagacccatccttcagtgcgagttaactcattcgactgaccagtatcatgtgatgcaccgtactatgtgcgcaggctcaattgctcgagtccgcacaggacgcgcagccaccatgctgaggaggctgtgtatcgcaggacacgggcgtccaaccaggcttggcgtgggccaagggcaagacacggccagatgccagagacgaccaaggtccgctaagggttcgacatgccgccgctaacatatccttcctcgcacgcgtcaaaacaggtcgcctgcttgtggcatcaacgtgggcgtcatacctgttagagcttacggccctttggactctcagcgtgagcggggacacgatccaggggctcctgggacccccacacaggttggcccactggctctgagtcctacggggcaagcacacagtctgccatgtgccacgccaggggcgcaagagccaatggctggcagaacgaaggggtgcccagcgtgaagcccta

SEQ ID NO: 539620 - DNA, 420 bp, Homo sapiens
tgcagagacctcatagcagtgttgggagaattctgtgtgagggacaaaaaattcagaccctcatagtcaatgttctggaattctatgtgagggataaacattcataacagagcgggagtgtactgggttccccatcgaagaacacacatgattgaaacccttgtagcagtgttctggaatcctatgtgaggaacaaacattcagacccccgtgttagtgttctggaatcctatgtgagtgacaaacattcaaacaacagcgggagtgttctggaatcctgtgttatgggcaaacattcagaacctcgttgtagtgttctggaattctgcatgagggagaaatgctcggaacccagcagcagtgttctggaattctatgtgacagacatacatgtagacaccagcagcagtgttctggaat

SEQ ID NO: 539621 - DNA, 952 bp, Homo sapiens
gatttttttcgagttaagaacccggagccgaaacaccggtagtagcggggaggtgggtactacacaatcgtctccagccttggtcctgagtggactgtcctgcaggaccatgccccgtaaaggcactcagccctctactgcccggcgcatagagggaagggccgcacgcgcctgtccctctgagaggacgtcgagatagcgaccgcggtactccttgaggccgactgccctgccggtagggaggaggctcatagccatccgggggggtaaagtactcgcaaagtggaggaaccttttgctaaattcactagtgttatcgacagtaggttttgtgggacacgaggatttcttacctaccccccggggctccagaattggacccaggtggaagtagagaggcttccatgcgtgtttatgaatagacttcccttttgtgtcaacacccagaatcttccaaattcacttattgctgggggacaaaaatcctgagaaccctgttccaataaaggccgctgatcccttgttttactcgggcgcccaaggggggtggttgcacaactccgatggtattggctctactgctatagggtgtctggctactcgggccacaagaatttggttttaaagaacctccaggtatttaactacttaattctggtatggaccacagggaccttcagacgtgtcctgtagaaggttcatgtaccaaggcttatgaaaaaggagggatgataatgaaggcatcctaaaggatcttgtatccagaaggcggagagaatatattctggcttcaattggggggaaggaataagggtgggaatcttggagccgattgtggccacaaattaataggggaggaccagtgtgttacagcgagtcatggtgtgattgaacatgggggggcacaacaggggtaaagaaatcgttgtggttctttttagtttctttcgat

SEQ ID NO: 539622 - DNA, 387 bp, Homo sapiens
tagaggcccctgatacaccctatacacctatgcagctgcctcagctcccagtactaggattacaggcataagccagcacaacggcgcaaattttctaggaaaagtagatcttttgtttactttcttaaccacaaaatagtaaccagtggggcggtggtatatgcctataccacccatttgacggctttctggggatgggggcaggccggggaaacaggtccttggctcagggcttgttggccaaatgtcacgagaattcccaatgcccgggcactagcagaacacaggtccaccgcagtaatttgtcctggtcggagcagaaggtcggctttcaggcagtaacagattggtctttcctgggtttcacgccggaaaaagcacaatcag

SEQ ID NO: 539623 - DNA, 745 bp, Homo sapiens
  misc_feature (14)..(14): n is a, c, g, or t
  misc_feature (18)..(18): n is a, c, g, or t
cgttgattgccacntctngggaagcgcttgattgccttctagcgaagcgcgccattgcgttgtggccgggaaaacggttatgatgggctacaatgctgacttcggtacacacgaaattgaggaagattattgatgacatatgcaaaggctaactcgacagattgcagtgacttatagaatcaggcaaaagcatggctaagactaacttaagactcagtaatttcatgaaagccatattcataaggcccaagcggtaaccagctttatagtagcacgttgcaatcatagattgcagcagtgaaggcacggactccgtagccacggaaaacttgggcttatcaaatgcgacaagctcacgaaacaccatctgtccttggaaaggaacgcttattctcacagaatgaccgtgtgagccactaacgccagcatatttatacatcggtcgaagattggatgacgaccaggagatcattgtcattgccacaatcgcttaatggggagtcgaatgaagtctaatggccgggggttcaaagctatgtggatgtaaaaaccctggggtccccaattaaaacactttgcagaacaccccgttttagccagttgtagaattggccaaattgtcccaccggggcgattttaacaaattgggcaatcgagcttaagagggaattttacagtaaaagttcggggaaaaaccggttaaattggaaaaccgggtttttcaaaaaaaaggcgggacgttttt

SEQ ID NO: 539624 - DNA, 947 bp, Homo sapiens
tgatctgcctctcaactgccctaagtcctagctaagtatcagggaaaaaaaaaaaaaaaaaagcctaacaaaggggataagactagggctgcaagtagtgaggatttggttggatacctctgcggggatgtgtgcttcccatatctggccttcaggaataacactgtgcctttcccccaggaatatgggctctgtctacccagtgctccagttcccggtaaactggctctggaccattggtgggacaaggggcagggtctccatattttggatcatccctttctcccagtgaaatccaaatagcccttacctagagtctagggcacaaagacttcgggggaagatacactggagatggacctgaggagacatctacacacaccagtggaagttgccccagggctgtttccccttcctaagtctgggcatcctctgggaagggatggggtgggtgctccaatctcgggtgcctaaaaacccaagtttatttctctctaaacactggcaataaccagtccacaccactgtggcctttaaaaacctcttaataatctcatgcggggtggtctcgatacaatccatttatcacagggctgtgtgcgtaaatgctttaaatgctctctcatttgtcttccccataaccccatctaggtatgtattgagctaacctggtcctaagtaaggtatcctgtcctgtggtttccatattgatattctccaacatgggtcttggggtgggacttttttttcatgtgggctttggaaagatatagtaaatgtgtagtagccctggaaccatagaggtttcttagcacaaacaaaaaggggggtcaaaatcaccagggcgatagacacgttaaaggcaagagtaaaagacgaggaaaagagaagaggattgagatgtatgacaacacagaatatgcatggtatagtgaaaaaggatttat

SEQ ID NO: 539625 - DNA, 159 bp, Homo sapiens
ctggcccgtgttttacactggccgtggttttacacttggccgttgttttacactctcctgttattttaatctttctttctttttccacttcttttttttattttatatttttcctttttttctatctcctcttattcattctctattttgaatttacag

SEQ ID NO: 539626 - DNA, 851 bp, Homo sapiens
  misc_feature (493)..(493): n is a, c, g, or t
caaacctttatatttttagtagagatggggttttgctttgttggccaaactggctaacatggtgaaaccccatctctactaaaaaatacaaaaaattagctgggcatgggggcgggcacctgtagtcccagccacttgggaggctgaggcaggagaatggcgtgaacctgggaggcggagcttgcaatgagccaagatcgcgccactgcgctccagcctgggtgacagagcgagactccatctcaaaaacaataaataaaaaataataataacaataataaagtataatataaacagccctgtatttaagcttatagactcactacaatcgactcaatgagactattcaaatcttgttgttcagaaatctacctctgtcaaataattgatttgttttcagaaatgctttacataggccaggcgcagtggttcacgcctgtaatcccagcactttcggggaccgaggttggcagatcacctgaggtcaggagtntgagaccagcctgaccaacaaggtgaaaccccgtctctactaaaaatacaaaaaattagctgggcatggtggtgcgcacctgcaatcccaagctacttgcaaagttgaggcaggagaatcacttgtacccggaggcagaagccttgcagtgagcttagatggtgccctgcgctcagcctggggaacagagccagactcgtctccaaaaacaaaaaaaaaaaaattttgggccccggcccaaaactttaacacttttggggccggcccaagtataaacggcacacaggcgcccagaaagcggcaaaggggttcccaaaaaccggcccggttaaccagggtggacagtaaagagaaccca

SEQ ID NO: 539627 - DNA, 790 bp, Homo sapiens
ggcctcgcctactgtcaccaccgcaaggatcctgtaccgggacctgaagcccctagaacctgctacatcatcgacgagggggtgagctgaatgctggccgactattggactaggtcaggtccttagtacatgtgcccacaaagacttatctccaactgatgtgtgtgttgacccatgttggtacatttgccccactcatactagtgctagcaggagagtccatcattaagtacatccatcctcactcatttgattactagtaggggcatgtggagcttgctattatcaatatatcttacgtaaaggatcacagtggtaagagtctccttctatctcactgggcatcaaattatgttcaattggatgagtagcatagatcactctatcaatactttatcagctcttcacttctgggaaccaccttaatatgtaagaagattgttagtgacccgactgttgcaccatgagcataactacatagaaatttcactgttatcttatcaagatatatacacctatgatatatcttacctagaaaaacacgctacatcatatcatctcagccacaagagatatggaatacaggactagagtattcctaacataccaatgaattctgtacctgcatccctagtagtagaatacccactatttcagcataggcaaagccagaaggaataggactgatgatcaatccttatttacctggtcaactgaggacaagcaagttgtagcaccaaaataatacataacaacatgcccttccacaaatctatctctagttaatgag

SEQ ID NO: 539628 - DNA, 305 bp, Homo sapiens
gcaccttccaagacggtgtttctgttccccgatgcatatcaggatatggtcggtcccaattgctcttgtgtacaggtggttcggggcccattgaaagtgttgtgaagggcctcagctttaatgcaattggggattatctcctgagctcctccgatgatcagtactgggctttctctgacatccagacagggcgtgtgctcaccaaggtgacagatgagacctctggctgctctctcacctgtgcacagttccaccctgacggactcatctttggaacaggaaccatggactctcagatcaagatc

SEQ ID NO: 539629 - DNA, 201 bp, Homo sapiens
aggttacacttgctgcattttagaatcccaggtcggagttgctttataacatagcttattttagccgggcacggtggctcacgcctatatcccagcactttgggaggcccaggtaggtggatctcctgaggtcaggagttccagaccagcctgaccaacatggtgaaatcctgtctctaccagaaatacaaaaattagccg

SEQ ID NO: 539630 - DNA, 240 bp, Homo sapiens
aaatgtgaacactcacttgaatattttcattttttttttaagttccttcttggtaaatatcctatttgtggggtaagatttactatatcttagtttaaattctgctgtgtagactttggcagctgcctctatggtgacgaaacaagctttttttttttatttttttttttccttaaaaccgggaactttggggtttccccacggcatcatcttttggcctttttctttaattaaagcgtg

SEQ ID NO: 539631 - DNA, 296 bp, Homo sapiens
aaaattttaaataaaccggggaatttgggccaaaaatgtttttgccttttggttgatttttttttccaagccgaccggtaaagggaaacaattatttatctgttggcccagattggattatgattttaatgtttgaaaaattgccccgggttggttttcccaaatgggggggaaaaaatattttctgttcccaggaaaagaaaatatggggtcatttaaacaggaaaaaaaccctttggggaaggttatttttggtttggcaaaggatccatttaactatatgggttttttttcca

SEQ ID NO: 539632 - DNA, 97 bp, Homo sapiens
atgaatcacttgagcctgggaggtggacggttgccgtgagccgaacgaaattgatgccacttcaccccagcctgggcgaaagagtgaaattccattc

SEQ ID NO: 539633 - DNA, 343 bp, Homo sapiens
  misc_feature (277)..(277): n is a, c, g, or t
agcccggctactggacttctcgtgtctgtctctgctgtacgaggtgttttttacatttaagaaaaaaaaaaaaagaaaaaaagatggtttaaaaaaaaaaggaatccataccatgatgcgtttaaaaaccaccgacagccctgtggttgggcaagaaaggcaggagttatgtttgcaggtccatccgggccttgagcagtgggttcacccaccgggccttgaaagaggtgagctgggcctctctgggtcccctagggatcttagggggcccaggcanagaactctagacagagcttaggggggccgtagatgtgattcgcagctccctggaggtgggcctggc

SEQ ID NO: 539634 - DNA, 452 bp, Homo sapiens
agcggggacagaagggaaaaggccccgcgcgtctccacgtcaacaggccgcaaaggcagacagaagggaaaaggccccgcgcgtctccacgtcaacaggccggaaaggcagacagcaagggaaaaggccccgcgcgtctccacgtcaacaggccggaaaggcagacagaagggaaaaggccccgcgcgtctccatgtcaacaggccggaacaggcagacagaagggaaaaggccccgcgcgtctccacgtcaacaggacggaaacggcagacagaagggaaaacgccccgcgcgtctccacgtcaacaggccggaaaggcagacagaagggaacaacgccccgcgcgatatccacgtcaacaggccggaaaaggccgacagaagggacaaggccccgcgcgtctccacgtcacacaggaccggacaaggcagacagaacgggaaaaggaccc

SEQ ID NO: 539635 - DNA, 301 bp, Homo sapiens
gcgtcgacaaagcttccggactgacctgagggtgggggtgcccggctacatcacacttggcgactacgctcgtactccccgaaatgcatttacggcgcagccttgacgacgttacctaatgtgcggtagagcgacggatcagatgcgagggcttcaccgcctatcacgtcttgataacctccgaatgcgcattagttctatctcaggagtgagggcatgggtgctaaggtccatgtcctcaaaggagaagaatccagaccatcagctacggtccccaaatccccactaagttgcactcacg

SEQ ID NO: 539636 - DNA, 175 bp, Homo sapiens
  misc_feature (103)..(103): n is a, c, g, or t
gactctcgaaggatctccattcgattggcgggcaacttatgcacgcttactatcttaacaagcttgagtgcagagatgaagagtcaaatctgaccaagatgtngatgttggataagagaatctctgctccccacctctaagtggcccgccaatcgaagggtaccggagctcgaat

SEQ ID NO: 539637 - DNA, 550 bp, Homo sapiens
  misc_feature (517)..(517): n is a, c, g, or t
gcagtggtgagaaaatgtataaagaaagattctgggaaagaatttgctgcaaagttcatgagaaaaagaagaaaaggccaagattgtcggatggaaataattcatgagattgctgtacttgaactagcacaagacaatccttgggtcattaatttacatgaagtttatgagactgcatcagaaatgatcttagttctggaatatgctgctgggggtgaaatctttgaccagtgtgttgcagacagagaagaagcctttaaagaaaaagatgttcaaagacttatgcgacagattttagaaggtgttcactttttacacactcgtgatgtagttcatcttgatttgaagcctcagaatattctgttgacaagtgaatctccattgggtgacattaagattgttgattttggcctttcaagaatattgaagaacagtgaagagctccgagaaattatgggtacccctgaatatgtggctcctgaaattcttagttatgatcctataagcatggcaacgntatgtggagcattggagtgttaacatatgtcat

SEQ ID NO: 539638 - DNA, 250 bp, Homo sapiens
tttttgagaggatccccccaggtggggcatcacgggttagcatctgtgggacattttggttggaatatgctagaaatcattccccagtttattataattcaggggattccttatttctggaaacaatttatatagaaagttcttcagggcaaaccttttcttgggcgttcttcagaaggccccagggtacggtgtactatttatcgtagatattccaacaaacttctggtgaactcagtgatgcccaggg

SEQ ID NO: 539639 - DNA, 952 bp, Homo sapiens
ggtgcgatcttcgggctgtcagagtgggtctgtaactcggtggtggcggagtcctacggaagcccgtttcgcttcacttttcctgctgtagaggctttccccctggcggtgagagtgcatgagacgaaggtgcgagatgagcactatgttcgggacactctcctcatcgtaataatctctgtgtgcacggtctgctcggaaaagggggcaataaccctgggtcctgttttaccatggaacagacctcgtacaaggcgactgaagggccagaactggtgggaacaaccaggcgtgacaacacaacttggacacagcacagcacgggaaccacataacaggaagtcagatgggtcgaaaacactagaaacaacgacacataggacgagaccaaggcacggagacatttgaaagaaataccgcacaccagcgactctatcacatgttcaggaatggaaattccccatgttctgctaatgtggcttttgtgttaacctggaccctaaatggaacattgtccaacttccaataatttgagtgggtacaaggtgggtgacaaaagcttcctttattacccccttctttctaacattccaaagggaatgtctcatcgaaatctgtggggcagattgacacacaagacgtgtacattcaatttcctgtattattcgtctgtactatgtcggtcggaagaacatcagaacgattctcggcctggcgcctttaaagagcgcacacagaggccaggtggaattcttggccacaacctctttgtgggaaggtccatggaactcagaaatcttaatgttatcatcttcagaccacgcaattcaactggcgcttgttgggcagcacctaggtagctaaactggcccttccagttgcaattaacctgtgttgtaaagggacggcccacgcatgctgctgccaagagtccaacggcgagacagcgatc

SEQ ID NO: 539640 - DNA, 503 bp, Homo sapiens
  misc_feature (470)..(470): n is a, c, g, or t
ttcccagttccttctctaaatttcaaaataataatacattttttaaaaaaggtatacagttactgccagactgtaattaatttactctgtagttctggtgtaagtgttcgccatttcttatgagttatatattactttaattttgcccttctctagtgctgctgggggtgaaatctttgaccagtgtgttgcagacagagaagaagcctttaaagaaaaagatgttcaaagacttatgcgacagattttagaaggtgttcactttttacacactcgtgatgtagttcatcttgatttgaagcctcagaatattctgttgacaagtgaatctccattgggtgacattaagattgttgattttggcctttcaagaatattgaagaacagtgaagagctccgagaaattatgggtacccctgaatatgtggctcctgaaattcttagttatgatcctataagcatggcaacgntatgtggagcattggagtgttaacatatgtcat

SEQ ID NO: 539641 - DNA, 979 bp, Homo sapiens
gcgctgccccgatgaagctgagccgtcgtgatctacctgcacacttgcagacatgactgccccaagcggcgcctcaagtgcgagtttagtggctgtgacttgcagctgggtgaggcctatgtagagccactgtaggggtatgtagcgccgcacagtgagtagtgtctgacttgtgatgaatatagtgtgagtgctcgctgcatgaatgcaggtcgtgcgtgcatggtcccacgtcgatgccagcctctagagatgcgcccatgccgcactcagtcctgcacctactgcgactaaggagttctgtctttgagcactctatccagaggcgcagccagataccaagtgcgccgataggctgctcgtgttagccttgggccgcaagccaattgtggtgtgggcactgtggctcggggaggacctgccaggaccatctgaaggacgagctgtaacgaccgccctgtgtgcgtctgcccattcagaagacatccgtgctgctaagtcactaggtgtgccctaagcgtggcaatggcgacggctatgtgtgaggagagtgtgaagccacatcgtggccatgatgtgtgccctggttgagccggcaacggaaggacgctgcaggaagcttcgcgtgaagacctcgtgaggagctcatcaggtgggcacgtgactggcgtgctcatctggacgattggcagggtatggacggtggctacaggaggccaaggccagagcccagacttgagtgcttcagtccaggcttctacagacataagtatggttacaccgctgcaggtgtctggattcctcgatggcaactggcagtggtgagggcacacgacttctcactggtgcattcgtgtggctgctggtgcctttgacagtcgtccttgagtgggccttttgcccgccgtgtcgccttctcccggctggtcagagggacctgggctggttagaccgagcccgtcccttggcaccttccggc

SEQ ID NO: 539642 - DNA, 369 bp, Homo sapiens
cagctagagagtgcaccggcgtggtatctggtcactgcagtctctccctcccaagtgcaagtgaatctcctgcctcagcctcctgagtagctgggattacaggcgcctgtcaccacacccggctattttttgtatttttagtagagacggagtttcgccatgttgaccaggctggtctcgaactcctgactgctggtgatccacccaccttggcctcccaaagtgctggaattacaggcgtgagccacctcacccagcctacaataaatctcttgaacggtattcctcctagctaactgaaattctatcttttgaccaacatctccctaccactctctccctgcaactaccctagctgaataatctcaa

SEQ ID NO: 539643 - DNA, 230 bp, Homo sapiens
  misc_feature (86)..(86): n is a, c, g, or t
tagatgacaggacaggacagtatagaacattgaagaatcacaattccagccagacgtggtggctcacgcctgtaatccccgcattntgggaggcagaggcgggtggattgcttgaggccagaagtttgagaccagcctggccaaaaaagcaagaccctgtctcttctaaaaatataaaaaaacattagcagggaatggtgacatgcctgtagtcccagctacttgggagg

SEQ ID NO: 539644 - DNA, 302 bp, Homo sapiens
ggtttgcccgccttgcattttgacccctggaagaaagagttttaccgcaacttcaaaagcatctccaaggccttggtggagcggggtggtgtggtcaccagcaacccacttggcttctgaatactacccgccagggcctgtcccagttatgtgccttccctcaagccaaagccgaagcccctttccttaagagccctggtttgtcacgaaggggcctagtgttcccaacaatatgcactgctctaaagagaaaatactgacctcgcaaataataaaaaattcatagccagacaaaaaaaaaa

SEQ ID NO: 539645 - DNA, 179 bp, Homo sapiens
tcgagatggggtcttgctcaggctggagcgcagcgttgcaatctcgactcacagcaacctccgcctccaggttcaagcgattctctctcctacagcctccgagtagctaggatacacggcgcctgcactgcgctcgctaattgttttgaattttatagagacgcgtttcaccaagacgg

SEQ ID NO: 539646 - DNA, 892 bp, Homo sapiens
catcaccttatatgtacactgttcgtaattaatgttcgagatttatgatgctggcttctggaagtattagtcgagtgctactttgtaaaagatcccagacttgtaactaaatgctgacatatctgttactgttgactcacattgcattctccgccattcaagtactattttttatccacatttttgtttggttcccaaagggtatctgtacaaggatatgtgtgataatgctcggaattcgagtaactattgtcttttgtctgtccaggaaacactgcgttgggatatttagggatagatttacaccataatttggggatagggatatggtctcgaatgctgatccacattgttttaggtcataagacattaaatgtgtcgagaaatctgggtgaagagagactctgcagctggcagtggacggtccgatccatgtgttacagagatactatcttaatgggagggaattgataatataagttcagaagcagaagtgtggtaaaatgttaaatacatgtacaattgtttaagtaggcaatcgatttgtagcatgggtgcctccaaggtttcaagcaatgggcagagttgaaaatactatcagattccgtcgcacctacgtttattatctcacgagtaaactgtgaatacctcttaggggtcatttatcacttaaataatactgtaccctaggtctttcaaattaaaattatacctgaatggaggtgctgggaaacataaggaattcggtccaagtaccgtttccccaattgtttcttgttccggttatgggacggcaagatttagggggacaaagtggttaagaaaaagaggtggcatgtatttatatagccggtgaacgagaagtttaaaaacacaatataaggcgggaagg

SEQ ID NO: 539647 - DNA, 718 bp, Homo sapiens
tccttttcctggctgtagtgtggaaaataaccgggaaagaggcaaaaaatgggttcagtgaaggtcagttaaacaataacaacttttataagtgaaaaacaacggcagcccggactaccggggtggctgtggaaatgggtgaagggatttgaaattaggagatagaaatgctgtggaactgtgagtgggttgtgcattagtgggcagttaaggacaaaagggtgtcctataagcccctaggtttggggctacaagaacgtgcaaggcacaggcctcccattatcaccaagtctcgtggagaattgtgaaaagggctgtggagattctctgaggagaacaccagtggtcttaggttctcaagatgtgtggggacaccattatatatctctgtgaaagaactcacgtgtggggtgacccctcttcccgagtgtgtgtgagagtctcactcacagaacagagagtgtgtcttatacagagtctctcgatggttctcaagagaaaccagctgtgtgattaatactataatatatcaaagattgtgtcttccccgcaccccccaagaaatatgagggagagaaaactattaaaccgaagatttcctctccttttcatcccaaacatattaaaccctattaacaaaacccacgaccaagacaaaaacaaatataacacgctgtggtttcgcaaaatttataactaaacacgtttatatttctct

SEQ ID NO: 539648 - DNA, 350 bp, Homo sapiens
aacatgatatatctagtatagtcgtatgtctataagtatatacatatatacaagatacatgtacagtatatgtaatattgcatctggtaatagctattaaatgtatactgtatataatagctatattttatatacacaatgaatatatttatattttaataaaatttgtgtatgtaaattttatgtttatcatatcaacagataatcatatacaatacacatcacacaatattatcacacatatattttgcatgcatatataatcacaccacattataaaattcatttatatataaatatatatggcaaaaatagctattagttctttttctaatctgggtagtcacaga

SEQ ID NO: 539649 - DNA, 490 bp, Homo sapiens
tgacttttcatttaacgtctcaaaaattgatgaataagacttcgcatgaattgattccataaattggatgttattcaaaacggcttcttctttttggttaagggcatcaaacttcagttgggctaacccatcttgtgattgcaaagtatccaacgtcgtgagcccaccacgacaaggttcatcgttttttgttcttgcggtgtcatgttaccacgccaatgccgcatgtcatttgatatcgggatacgcgtgtcgagccaaaattgttgggtgagcttttcccacgttgccttgtccactcgtcttcatgttgttccagttaattgctgtatatgaattgtcttttaaatgttgtaccacagttattctccaatattggttgattaagtgataagctttgtctgcatcgatgtgcttcgcgtaattcgtaggcatatacatcgggacgttaaaccgttcagatacgtgcgctgcaaatgaattgcgtaaa

SEQ ID NO: 539650 - DNA, 924 bp, Homo sapiens
actgaagaccttgcccagaaagtcaagtaggccttaccttcgcacaccccgccagaagatcatcgggagcagcagtgccttggtccagcagaagaggcaatgaattcctggcatctgtggctcgtgggacgtagctcctgcagactcaccagaatgctccaaggcgcagctttgctggtggaacatgggatagggaatatgtaggattagcatgaccagacggaatatgctgaatttcgagtatcggaggaggcacagactaatgtccgtcggaggagatgttcacgagtctactcacgtaatcctccagaccctgatgagccaggtgaacagcagttaagatattccacgaaggcggcagtagcagccgcaggcctggtacatcctggggcaggtgctggcatctactgagtagcgctgcacagctcttcccggcgtgactagacccctggcagtcggtctgaaggagcaggactctcttcaggctcggagttccttggatgaagacgatcccaatatacttctggcgatacaggtatcactgcaagagtctgggctggccctcgatgaagaaactagagacttcctcagtaaggaagcatccttaggtgcgataggcacttctttaccttccaggctggacctctggccccggaaatacggatagccctcgggctggcttgagcagctctgagcttttgggactggggggaccggctcatgagactaggagccgagaatgcgccattttcaactgggaccctgagcttcaaccctcttcagggagggccggaaagtggatccggggccctcagtctagtggagtcctgaatccacttggccaggaccccgaggatcatgagaagcctctcgggaccatcaatggtggggcctgacattgaccctaaaattggccggaaccaa

SEQ ID NO: 539651 - DNA, 500 bp, Homo sapiens
tgaagatgagtcatcagaagaagactctgagtgatgaagatgccggcacctaagagaaggttgcatgaagaaaaccccagccaagtccccaggtaaggccgcatctgtgaagcagagagttccaaacctgctacctaatagtctcagctgcccagcgggggaaagctaggcccttgcctaagaaagcacctcctaaggccaaaacgccgtgccaacgaagaccagaccctcatccacagtcatcaagcaaacctagtggtggctcctcaaagcaagcctgcaacctagtgccacagcaccaggcaacgtacacacattgccgggccacacgggcaaatccagccatgcaagaagtcttctcaagcacgtcgcaacaacacgttcaacatctttcactagggaaacacaaccggcgtatcaatgactgcacacatctccaccaaattcttcattctctctcaacggtccacgtcgtgccatcccgtctcaacgtttcggaa

SEQ ID NO: 539652 - DNA, 355 bp, Homo sapiens
gggtccgtaggttttataggggagcttcattctcctgcagggaggatgatgatatgtaggcataacctagactgggaggaagctagataggaaagacaactgacatttatggaatatcatgcactagtcccttacatatgtcatatgctcattatcgaactcagcagcacacagactctcggggattttccatctgacttccctggccactctcatcccatccttgcactaccagacgattcatacactcttgagactccagcgagacgctgttctcaccccttcctcctcctagcctctctcccaaaccgtaccacacacggctgacacaccccaacaaaccacaaacaaacaa

SEQ ID NO: 539653 - DNA, 1778 bp, Homo sapiens
  misc_feature (440)..(440): n is a, c, g, or t
  misc_feature (1726)..(1726): n is a, c, g, or t
tagaatcctcaagcgtgacggaccatcatccttgcgacaaatgtcagttagtctttttcacaggcgcatgctgccagtgttataggtcggggaaggtctctacaaaaggaggcaacattgagatcacacgccactcgcgcagagctagattccgctgctctgtgattcacgggcgtaggcgagggaagccagttgtccgatacactcgcagtcggagagtctccgattggcgctgcatgacaatctactcattaaccttgatcacgcgagaaggtaccacgattcgctcagataagcgtaaggccaaatgcatcgagttacattagagttaatttacttctataaaatcgtacatagtaaatcaactataacacataagtgaaaataaagtaccacacgaagagcaagatatcatagattttcatacataaaaatgatanagacgcataggtagacaacacaccacaacaatagatagtcccatggatacacttgcactattcaataacaatcaacattcgaatagagaacaaaataagtacgaggccacatacgatacaaaactcacaatagtagtgtcgccacacagtaatccctttggtctcactttcccacaatctagtcacaagggttgacagtccacggttccctatctgtgtccgaggggtcactcaactccaagactctgtgtaaattcacttatttcgtagttgagggctatgttgccacagtggttgcgcagagttaagggtaaagttaacccacacttgaatagcactccagaagtttaaccggtcggtacacaattccctctatgacgaataacaatccgttccagaggaatgatcccccgacgagtaagtagcattggaatcattacacttaaagcgcgaggatttcacttaatcgggcttaggataaaccgcattggaggcacctagggccccagttattcgtatagcgttgctttaccaacatcgaatttttaaactcacttaagttcccataatgcgtgaaacgtttaccccgggacaggtttttccacttaataataatccgttccgagaggggctataaaagacgctgttcctcagcggagcgaaggccaaacggcaattcctccctataattgtaagcgtataatattcttttccggcgcccggcgtgttgagaatatcgcccaatgggcgtttcaccttgttggcaacggtaagagcaacgtggcggtttaaaacaatatgcggggtacacaaacacgcatactgtcctaccgcatgaagggcagggaggggagtggtgtaccccccagtcgtgataaacccggacgaggtatttatatggcgccccaagagggggggggccaataaattcaagaaagagcagcttctctcaccaagaggagcagagccaacaaagggcctttagtatgattatccccccgaccaattatctatggtcgacaccagaatagccgccgctccatataacgagcgtacacattatacaaccatacgacgcaccgtgaaaatgtaggacccccgctagaatatacaacacatgtggccgccgtgtgtatacaaaggcggatggtagacaaatcagttagggtgggaagaccaacaacacagacccggcggtggtagacacagtgagactgcagcctcaccggaacagaagaacacgacgaccacgcaatcaaaaatcatagaattgaataaacagaagnatgacaatcatatgtactagcgcggtgacagccatgactcaagccagacaca

SEQ ID NO: 539654 - DNA, 858 bp, Homo sapiens
tgaaatggagtctcactctgttgcccaggtggattgcgtggaatgatcttggaatctctacctcccgggttcaagcagtctcttgctaagctccagagaccacgcctgtggtcccagctactggggaggctcgaggaacatgaacaattcgtcttgaacccgggaagtgaaggttgccgtgagctgagatacacaccattgccataaagcatgacaggtcctttgggacttttgtataacctgtattgtttcataatggatacatgcataatttctcaaggagaataaagatggagaattcatattattacggttcattcttttcaagctcgagagcacaatgagtttgggaaaagagggtggccactttcgtgactcggataagggaaatacctcctcattatactttgtagtgacaatctctcgggtatacctcaagatcatacgtctgacaaaacgggggacatccaagcagaaaaaaaacgaggccctcttccttggaataggtgacccgcagaagggtgggcataggcagccttgtgtgtgttccttggggaagacaacacgaaattcgtggtgtattcacggaagggattgacattcatcccaggaagaacgagtttctcaggcccacacgttttgtggtttgcgtttcccataacgagttacccgtgggtttaaattactgcactctttaaaagaaaatcagcggcttgacccgcgattaaaagaaaaatacggccgttctggggtgcccttctgtggggttacactggtcgaaactttcacaacgcctgcttttgggcggaaccctctttaccgataagacacgctcattttgcacctttcggaaatttt

SEQ ID NO: 539655 - DNA, 221 bp, Homo sapiens
gagaggggttttcactatattgtccagggtagagggcagggggtattcccagatgggaacataggacacggcagcctccaactcctagcctcaagggatcctccggtttccccctcccaagtaggattacaagcaggggccgacgaggcccagaatccagaacttggtttatccctttccccaacaacctaaatgggaaaacagaataaatttcccccaga

SEQ ID NO: 539656 - DNA, 117 bp, Homo sapiens
tgactgctctactctctcgtggttcttcttcatgacagagcagctccttcttgagcagcctcgatctctgtctccacgctgcagtcgtgagatattaggagtatcaatagaccttga

SEQ ID NO: 539657 - DNA, 222 bp, Homo sapiens
tgtatgcagcgggtgtacaaggtcgcagaaggaccgtgcggacagagtgcccctgtcttcacagcaggaagcctgcggcatggtggagcacccccatggagccatcgaccataacacagcacgtggagaagtctgggcattcgaactgactatcagggcactggatggcacccacggatgttgtaccttgatcttaggcatgcaggatctgcccgactgcac

SEQ ID NO: 539658 - DNA, 357 bp, Homo sapiens
gcgtggtcgcggccgaggtacggaatagaatgcaatggaacgaattgtaatggaatggaattgaatggaatggaatggaatggaatggaatcaacgcgagtgcaggggaatgtaatggaacggaatgcaatggaatggaatcatccggaatggaatggaatggaatggaatggaatggaatcaacccgagtgcaatggaatggagtggaatggaatggaatggaatggaatcaacgcgagtgcaggggaatggaatggaatggaatgcaatggaatggaatcttccggaatggaatggaattgaatggaatggaatagaatggaatggaataaacccgagtgcaatcgaatggaatc

SEQ ID NO: 539659 - DNA, 371 bp, Homo sapiens
taaaattgtccttttttttaaaagggggggagttttccctaaaacacttattatgtaagggtcattaaccaaatgttttgaagtagacatggaatttatgaagggttttttatcattttttttcccccttttgggcatccggggtggcctccagttttaggtcctttagtttgtttttgtaagcaaggggaacccctgttgagggggttttttccctcatgtatacttcaagtaagatcaagatttttttgtgaaattatagaaatttactatgtaaatgcttgatggaattttttcctgctaggggagtttttgaaaggggctttttccatttttttaaaactccccatgcatttaaaaggtccaatgca

SEQ ID NO: 539660 - DNA, 838 bp, Homo sapiens
ggcttcttttggggcccccccggatcggccatgctgccttcacctggacgtcaaccccgcccggctgatggtggtggaggagcgatgtggttactggtgtgactctgaccacagtggctggctggatccccccggagcctcgggtctcctctagcttatttggtgtctccagggctgtccacgggatttggtcttgcccgattccaaagccacgtggcccagactatgaagggttttgaatatatcttggctaagctgcaaggcgaggccccgttcccgagaccacttggttgagaccagcccagggtagcccaggagaaggccaaggagacggcactggcagctaccagaggaggcccaggacctcgcccagccaggcggccccccagaagccagccagccagcagccaccagtttgtgtagcccagtctacccacccccccccagcaccccacgacacgctatggcttatgcctctctgccctcccttcacattgtaactttatcacgttaaaaatcaaacttccacgccctgtctgctgtctaacgtggtgggttgtggggaatacacatttggcaatctgcacgtacaccccagcaccactgaattcaatgtctgagccacggtctgcttaattctccccgttgggcacagcctgaggaccgcaaggcacagaggtgcggtgacttgcccggggctcccggtagcctgccggtttactggcggtaaggtgctagactgtaagcccgaccagggccgggcttttggttttgttttctgatgtgtttccagtatctagcacataatagaccctccataaatacttgttgaattcca

SEQ ID NO: 539661 - DNA, 662 bp, Homo sapiens
accccgacttcatttaccagctgtattcagaagagggccaagcgtgtttgactcaggaagaacctgctgggtcacaagcagcacgggtggggcaccctctccctttgatagaaactttgggacccaaatctctgcccgagctatggagtggatccctgccaaactcacaggaggccccgggcagaggaaaaaaatttaccccccgatgattccatttgtgtgctgggaataagccaaagaaacgttatttttcaacctgtggcagagctgaagaagccaacggattttgagcaccacggattccccaaggacccgtggtggctccagctacggcccctcatggaaatcctggcccagtacaaggccacgctatgacgctgtcggaactcacggccacgctgggacactgtgcacgccctggaggtgtctgagcccacgtcccgcctgcatgtgcctgcagcccccgtggagctgtctctttttgtaacaccttaagttaattttatcagcagctttaatgcaccgtattattgacattaatacctaatcggcgagtgcccatctgccccaccagccccagtgcgtgctgtctgtggagtgtgtctcatgctttcagatgtgcatatgagcagaattaattaaacatttgcctacaactccca

SEQ ID NO: 539662 - DNA, 885 bp, Homo sapiens
ccttcgctgtggggtcccccgccggcgggtttttccggcccccattcccactcggggtccccaatttcttgatatgtctcctcgctattttccaacccccgacgctccctctctggttgagcgctgaacggtattttccggtaaagggtcgggggtcggccgatttgttcctctgtcggaggggtcgcccgcgcggagcatgtgtcgaggccctctcacagggcaccttgggtacgcatcttccggggcccctccccggcgcccatcaggcgccgcttctggtctgcccccgaacgcccgagcagttcctcttctcttctttgggaaatcatattcaggaacataaatcttctccggaatttctggccccctcccggtgttccaccaaagggaactcctttaccacatattgccgcttgttctctctctgggtagccgagtctccaccaatttgatggcgacttttctttcttagggagcgagtcttgtcgtctcccactgctcactcccacacgaggggttggttttatataatgatatctcttatgtcatacgatcgggccggcgtccaatatcagaaagcttagtgtacggtctctctcaatttgtcgtgccaaccttacgaaagtctatatttttctattttcctcctcccttatcgattacttctatatcttcttaatatttctcacgccccccccacatttatcagctatttttccaccaaagcccactgactctaagaagtccccttctaatatttcctgaggcgcagccatccaaggtgtttctgaactaccacatgaacttgtctcccaccaccctcttgaaattttcccccccttaactaccacggcttccccgaccaactttgaccacaaaaca

SEQ ID NO: 539663 - DNA, 856 bp, Homo sapiens
aacagtcccctggccccaacccgtcgtgtactctaccatctttgagggcacactcgtcaaagcggctaagctcgctactgatcttctttagcctgagtaggggcactagaaaataacacactgcgatgagcattgtttatttccaggtagcgtagaacctagatgaataatttgagatccactcggtttccgacagtaaagctgtacatcgagagtaatgtgtctctcgacgtcaagcgaagccgtcatccgatagatcctatgcataaataggcgtattcggcatcgtatcaggaaatgatatctctgcgcgggataagtgaactcggaatagagcacagatagctaaccgaaatgcaattatctcattcgatgtaagtaatctagtaattggactatagacaattgaaactaggagatagcccagctgttcacttctgaggtcaccagagggtgaccccagaggtacccccactctgactgtccggcgtatgctacatctcgtctacatggacataagaaactaagaccgcccgattctgctagaatcatatagccgataagtgctctgccgcatcatctaaacgtagagcacttacttcgcaactgctctcaaatcttaatcccatcatagcaggacaaggttgagcgtgggaggtgtaccgaaaacccgagcatgacgcaacagcattcttagcataactgcctcagattaacccgagattgggatgacgtatctggaggtcatccaggaaaagcgtaaataacaattttaattggatatggtatatcctaaatagtaccggatctagattgaacttaaaccaaggccaagaccaaatttggccctaaaatg

SEQ ID NO: 539664 - DNA, 1537 bp, Homo sapiens
  misc_feature (1537)..(1537): n is a, c, g, or t
gtagtatatccaaagacaatcatcattccccctaaataaattaaaaaataactattaaacccgatataacctccctccaatagaattcagaataataacacacccgaccacgaccgcataacaatcaatactaaacccctcataaataggagaaggcttagaatggaaaagcccataaaccccattactaaacccactactcgaacaggaaacaaagcgatacgattcattgattctccgcactggcataaatacacaaagaacagagagaaaacacaaaagaaaaaacaagaagaagaagagaacaagcaagataacatccataagaagacaataatcacacaacaataccaacataaagagtacaccaagaaaagacaagaatagaaagagaacaccaaaagatatagagcgggttcgacgccgtccagcaaggtcgcaactatagccctcgtgttaccgcataaaatccaacttaatcagagcgaggggggcagcgagccacgtcaaactcggagcgagagagtactcgacacacaaggtagcgacggaaaccacaacccaaccgggccagatagacacaagcatggcacaacggacaacgcaaggatgcacatagatcgacgcaagattccttttaacccaatgggataaaataaaaaccaaaaacggctgtcgctgctcacatacgcaacatggaacgttcgccgttgcaatttctagtacccctagcgcaacaatcgaacagagaaacagtcgaacaagcgtcaggcatagatgaacgagcatgccattaagccagtagcaggccctccaaccgaccagcacagtaacattagccacaacatacgcatccagctactatgttgacacctattaaaacccaaatacaacccagacacgcatctgtccggagagcagtcggggcgacgagtcacaacaaggggacaattaaactacacggggcacaagagacagacgtaccaccacggaccctgttacgcaacccccagtgaaactcaacgtaaacaaagggcaaccaaaagtagcaaggacacacgggaccgaaagggatcagcaagcagtacccacaatacacggcgcaaaagtggaaaagtaaccgaggcaaatgagtgacgacactataggatgacccaacagacaggcaaaacgagacaaaagaacccatatagagaacaactccagaggcacaaacacaacaacagaccaacaagacacacgcacaaccagacacaaaagcaaacacaacaacaaagtaagcagtgcgcgacgagcacggtcgaccacacccaccagaaagcaaacacagcgctacacgaaccaaacacagcaccacgacagaaggcgcagacggaggcgagacgacgcacagcaaaggcagtcacagagcgaagaaaatagagcggtacaccagcagtagaagagacaccagaagcggagagaaaaccccgacggagcacgaaagagaacacactcaaagcgagtaagagcacagtaaacaacagacaaccaccgn

SEQ ID NO: 539665 - DNA, 905 bp, Homo sapiens
attgcttgaacccaggaggcagaggttgcagtgagctgagattgcaccactgcactccagcctgggtaacagagtgagactcttgtctcaaaaaaaaaaaaaaaaaaaatctaagaataaaggttgggccaacagggcttaataataaataaaaacctcctgccattctaatttccctggtgaccccaatcccccgagaaacccccctcagcgaactttgggttgtaagggcgggttatttaccccgggttttaaggatgggtcccccttgggcttttggtcatttccagggcacggggtttccagggaagaacgcaaccaggttgctgtggcgaacagaatcggggtacgcactggtggaagcgttggccccagggcctggtgtacaccgcaaatacggtgggtgacggccagtgggggtctctcgcgacagcggcctcccttccccggccaccattttcagggcccaaccaattttaagggtggctgacgtggtaagggctcctccatggtcagtacgagggctcgcccttggtagcccggattcactaccagtacccctttccaaagacaaccgtgaggtattttggaagtgccttggccttcccctttgtgtccaatgaaacattgaagagagtggttaatggtctctggagttcctctgagcagagtgtcgtgaatctctgtggaggacgttaccccatttcttcatgagccatttttctacattcctaagaatgacccgtgttttaatcctttgtggaagaccattttctgccttcttattttccctggtgtgtccaagaaacgaaattccggggaaaaaggggcggggtttaaagcattcctctttccacaacagattgtttgtcggaatttccttgggccccaaaactggagcttaa

SEQ ID NO: 539666 - DNA, 588 bp, Homo sapiens
  misc_feature (23)..(23): n is a, c, g, or t
  misc_feature (62)..(62): n is a, c, g, or t
  misc_feature (74)..(74): n is a, c, g, or t
  misc_feature (78)..(78): n is a, c, g, or t
  misc_feature (90)..(90): n is a, c, g, or t
  misc_feature (99)..(99): n is a, c, g, or t
  misc_feature (118)..(118): n is a, c, g, or t
  misc_feature (120)..(120): n is a, c, g, or t
  misc_feature (146)..(146): n is a, c, g, or t
  misc_feature (180)..(180): n is a, c, g, or t
  misc_feature (213)..(213): n is a, c, g, or t
  misc_feature (231)..(231): n is a, c, g, or t
  misc_feature (256)..(256): n is a, c, g, or t
  misc_feature (269)..(269): n is a, c, g, or t
  misc_feature (273)..(273): n is a, c, g, or t
  misc_feature (275)..(275): n is a, c, g, or t
  misc_feature (291)..(291): n is a, c, g, or t
  misc_feature (309)..(309): n is a, c, g, or t
  misc_feature (316)..(316): n is a, c, g, or t
  misc_feature (326)..(326): n is a, c, g, or t
  misc_feature (330)..(330): n is a, c, g, or t
  misc_feature (346)..(347): n is a, c, g, or t
  misc_feature (352)..(352): n is a, c, g, or t
  misc_feature (359)..(359): n is a, c, g, or t
  misc_feature (361)..(361): n is a, c, g, or t
  misc_feature (369)..(369): n is a, c, g, or t
  misc_feature (371)..(372): n is a, c, g, or t
  misc_feature (377)..(377): n is a, c, g, or t
  misc_feature (379)..(379): n is a, c, g, or t
  misc_feature (386)..(387): n is a, c, g, or t
  misc_feature (390)..(390): n is a, c, g, or t
  misc_feature (393)..(393): n is a, c, g, or t
  misc_feature (421)..(421): n is a, c, g, or t
  misc_feature (428)..(428): n is a, c, g, or t
  misc_feature (431)..(431): n is a, c, g, or t
  misc_feature (438)..(438): n is a, c, g, or t
  misc_feature (444)..(444): n is a, c, g, or t
  misc_feature (450)..(450): n is a, c, g, or t
  misc_feature (467)..(467): n is a, c, g, or t
  misc_feature (485)..(485): n is a, c, g, or t
  misc_feature (490)..(491): n is a, c, g, or t
  misc_feature (564)..(564): n is a, c, g, or t
agtacatagtggttagttttgcnataatttctttttagccagatgtcatatcatcatataantctatgaatatnacanatgacataagancagtataantcagtttttgtagtatttncncttacccagaaactagcccaaatggngtcctaagacattgtttacagttaacgtgaactncggattccccatcctgcccctccaatgcttttncccgtttcgtattatttnctatcctagttttggctatggtttngcatgggattccntatnangtctgagcctttcccntccccgtcggggcttttngtataancgtccaaccncccnggcccgggccggggcnnatccnccgcccncngcgttttncnnccccncnggcttcnnccnttnggggcccggggcccccttgccccccctngtttgcngcngggggtnttcccngggggnctcggggttcccatctncctcccgtagcctgcggnccccnncggggtatagggggcggggggggttttccggggggggggggcgttgggcgttggcgccgttggcggggggccnttgggcgggggcgtcggtcgcagg

SEQ ID NO: 539667 - DNA, 420 bp, Homo sapiens
  misc_feature (154)..(154): n is a, c, g, or t
  misc_feature (296)..(296): n is a, c, g, or t
ttatagatgataggatgttttatgtggtgtatgtattggggtagttcgagtaatgttggggtattttggataggtcgagaaagtgttgtgggaagaaagttagatttatgtggatgaatatgatagtgaaatggattttggtgtaggtttggtntagggtgtagcttgagaataggggaaatcagtgaatgaaagcttcttatgatggtaaatacagttcttattgataggacatagtggaagtgagctataatgtagtatgtgttgtgtagtatgatgtctagtgatgagtttgntaatacaatgccagtcaggccacttacggtgaaaagaaagatgaatcctagctgactcgccacactccacggaagcaatatgaaatgatctgctgcagtgctctgagccctaggatgtcgacgc

SEQ ID NO: 539668 - DNA, 359 bp, Homo sapiens
  misc_feature (5)..(5): n is a, c, g, or t
  misc_feature (41)..(41): n is a, c, g, or t
  misc_feature (283)..(284): n is a, c, g, or t
  misc_feature (307)..(307): n is a, c, g, or t
acggncagtgcgttcacgatagacccagaaatagacgccgncaacaatccacataatggacataaaaaacggccagaagaaaacgaacctcatcatcagttcaccagagtgaaagtacgctacgcataggggtatgcataacaccgacataatataaaaaacgatacgatgcgattaatcatttttcggataccaggctgttgaaaactcaggacgaataaggtctatttcaggttggttatgcagaaaattgtcgggataataaccatagtttttcactccnntcagttgtaataggctcatccantgagcgagttgttgcgaagaaatagcctcctgctgaccatttttctcccact

SEQ ID NO: 539669 - DNA, 439 bp, Homo sapiens
  misc_feature (1)..(1): n is a, c, g, or t
  misc_feature (57)..(57): n is a, c, g, or t
  misc_feature (103)..(103): n is a, c, g, or t
  misc_feature (266)..(266): n is a, c, g, or t
naaaacttaagcccaatgaacaccaaaggagatgagagaggggattgtgagtaagtngagtaaacccatttgggaatctggtgaaatggatgacccaggtgtncagcagcagagtcatcgcagggcatcagtagcacagctgtggtgcatgtgcccctgtgaacattaaccataacagggctatacatctgccagcagctgaggctagacagccaacttggactttatgggccattcctctacaggctcaccactcatcccatggncaaggcagctttcccttctgtgttttctgtgtcctcagcctccacctttctgccacccacatggacaaggacaatgggaacatgtaaggccgcataccctgaccagccactgattttcactgttgtgaaagtgatttgacttagaattaaatggttttacattaaaaaaaaaa

SEQ ID NO: 539670 - DNA, 161 bp, Homo sapiens
gtgggcggacgcgtgggcgcggagacgacagacaccagcactgccgacacacatggacgaggagcatgctgcacagcttccttttaccaggttcttgtgttttgtggggcttgggttttggtaacttatttttataagcaataaaccttttgtatcctgga

SEQ ID NO: 539671 - DNA, 191 bp, Homo sapiens
gagagtctgagagtggggggaaaattttaaaaagataccttcatggtgtcaaggagtgtgccattctattttggtatcagcatgggaagtgcactttccctgtggggcgtgtgggtgtgtgaatgtgcaagtgtctgagggtctgggcggtgggtggttggttctgtgcatttctggttgcaccggggcgc

SEQ ID NO: 539672 - DNA, 591 bp, Homo sapiens
tagttaactatccaacttaataaggtgggattacttcaaaggaaagagtatcgtgcacgctgcgtgtaagggggctaccaagtatgctgaacctttggagcaggcaacatgcaatattctggtgccagcaagaaccaaaccgctgctcaaggggacacactggagtagtttgctgaagggaggtcccggcataccgcatggaaggtggaatatcctcgagggaccaatatacaccagttattaaaacaggcttaacggtgcaatagggtactggcggatgtattaatgttggggcaacacataaccttgggttgaggaacaaacatatctgctgctcacaggcacataagctgaatgcagtgttgttagaccttcattcagatgcttcatttaagcattaaaaagtgcgatcctctgacctaaaatatctttatgtacgccctgcgcatttggagggcaaaaacaaaatgtacccggtatttactggctacagtgttgatcgaaccaatcgtaggaacagccaactggagccggattgctgcaccacggttgaagcagttggtctcggaggggcgccaccgctatcgatcc

SEQ ID NO: 539673 - DNA, 999 bp, Homo sapiens
cctcacttcccctcctcccccttcccctggtcacctgtccctgaaataaagaacagcttgacagaaaaaaaaaaaaaaaaaaaaagaaaaaataaaaaaaaaaaaaaaaaaaaaaaaaaaaaaaaaaaaaaccaaagaaaaaaaaaaaaaagaaaaaaacaaacaacaaaaaaaaaaaaaaaagaaacaaaataaaagcaaaaaagaacaaaagatagcgaagcaggaggtgtcacggaccatagaccaagacctggccatatggacgccagccaaacacatggacccggggcagaacagagcaggctgcgggcatacaagaccgagcagctgctgcatcaactaactggagcagagtaaagccaactgacaactgaccaacgcccgtgactaccttctcagaccgaccgatgataaacagcaaaccaagaccgaccacaagattctgttagagagcgccagacagcacacacattacgtcatccctcagcgcaccacgaagcagagagtgtaccactaccaccaggaacacaacatgtcaacagcgacaacgcaaaagcgtcgctgaagcacgcagacaaccaggcagacacaactacaagcacgccaatgcaatgatgaaaacacatacatgggcggactagtagggccaaaacacccaaggacgctgccatagcaaggaaccacaatcgacatatccgagagcgcaagacaaatgcgagacgagggacaaagaagatgagaacatgaccacaaccagtaccagaggatcaagcacagaagcgcgacagcgtaaacacggaacaccaggagggaaagacagaagcataagagcagcaaacaagctacgcgcagagacgagaagaagacaaagacagacccgaaagatcaatgacacatcgacacaaaggaaaagaaacaggagaggaaagaaacaaggaaagacagaggacacagaccaccgcagcgcaaggagcagaccgagaccagacaggacgg

SEQ ID NO: 539674 - DNA, 396 bp, Homo sapiens
cgtcgacctttgcgtgagtctatagaatggatagagagaacactttctcagcctcccattacagtcagtgcctgaagtgtactttgcatctagatagtgttgttgctctgaaaagagcagacaatcttgaaatcaatccacttgcaagtctaatgtcctacaggagtaatttagcaaagaaaatagcaaagatggcaaagtcccccgcaaactgcctccatggtaggataatcccagctgtttgcttcctgtttattcctaagggttgctagttaaatgagagctgttttatttttttctgctgcccacatacaggagccattgtgagttagtgtgatgaatgtattagatttgcatggaaatgtcgacgcggccgcgaatttagtagtagtaggc

SEQ ID NO: 539675 - DNA, 120 bp, Homo sapiens
cgttcacggggactctccttgggcccttgcctgtgtattttgccagatgcttggtgctgcatatgtctcccggaagagaggggcttacaccttctctggtaagcctgtggcttgggtcta

SEQ ID NO: 539676 - DNA, 656 bp, Homo sapiens
aagttgatagacagatcatcataaactcactttcggtccaaatgtcatcttacgactctagcagcagagctggctcttcaccaatggttctactggcattacagaggggcaaagggcagctggcactgagctgaacaccgcataaggcaagattctcaaactgcagaagccaccaggagaacggaaccaatacagttttgtctacgtggttatggtgagagcagactcagtggcagagatgaagatacaggacagctagtccaaagaagtgaaagtccacaatctctgatcggtgagatcggggctaggggaacagtcctttaattctgaatagtcattcgtatctcctgtctgacatggatacaatatgcagtgctagcctgtattttcctatttgaatatcccacataaattactacagataggataaaaaagacacatatctatttaaatgacttcctagtttccattccaaaagcagaagatatgtacttaagcagcacatgctacagtgtcttctctttcaaactatctgttcctagcctctagggattttgtcttgttatgcttcattccactgcctaagaaactaagattttgccagcaagagggccaatatgacaaatcatcgatgattcttagcatggagccaagaa

SEQ ID NO: 539677 - DNA, 325 bp, Homo sapiens
  misc_feature (37)..(37): n is a, c, g, or t
  misc_feature (40)..(43): n is a, c, g, or t
  misc_feature (46)..(46): n is a, c, g, or t
  misc_feature (50)..(51): n is a, c, g, or t
  misc_feature (61)..(61): n is a, c, g, or t
  misc_feature (63)..(63): n is a, c, g, or t
  misc_feature (84)..(84): n is a, c, g, or t
  misc_feature (133)..(133): n is a, c, g, or t
tgcgtaagctggtgaagctgcgacattgcccgctgcnacnnnntancagnncgtggctgcngntgatgatggatcgcagctggnatgctcggcatgcggcgctgatggatcgttatggtcaccaggcgatggncggcatgagcatgaatcatggcgcgatgggcggtggagacatgaaaggtatggaccacggcaacatgaaaggcatggaaaagggcggcatgcagggcatggaccatggcaacatgaagggcatggatcatggcaagatggccgggatggatcacggtggcgcgcagggtaaagccaaaccgttcgatttcag

SEQ ID NO: 539678 - DNA, 169 bp, Homo sapiens
gctgcggtactctagagttaccatctaaaacactcttcacgccggctctattggctgggttatcgtgtgcacgcggggctggcacgaaattgacaaccctggggttagtatagcttagttaaactttcgtttattgctaaaggttaatcactcgccaatgagcagattt

SEQ ID NO: 539679 - DNA, 155 bp, Homo sapiens
ggaacacacagataccgccagtgagacgagaaaggagacacgacagaccgaccccgagagacacacacccgcccggaaaccacacgaacacatagggaaccggaactcggccccgcggaccaaccccggggtcccactccggcgtggtacgcgag

SEQ ID NO: 539680 - DNA, 1126 bp, Homo sapiens
gccgacgcatgagtggcaggcccttcagccaggcaggctgtccctgcaggatcccacgtacggctgaatcttcagactggggaaagagaggcaaaactccaatcatgaggcacacagttccgcacacataatttgaaacggccccacaggctgtgcatatctaactacccaacacctcacacatctccaggatctcgaagcagtgcactggccacaatattcacaggcagggggcagagcatggcagagttcaaaggaagacccaggcccacggccaggcctgaggtaaagcggctcttccgccccacttcgacggaactgaacgaaagacttcgactgacgctgaagtgttcgtcattgacgactgaccatgcacgactcactggtatcggctgatcacacaaagcttccactagctcccacgctccacgcttctggacacgacgaagattcgcctgcgcatcatattgatctttgacactcattatgctcccatcgagcatggcaccaactgccgcagcgacctgcgtttccttcggcgctggctccttcacagtgcgtgactctacttgcgcgctgaacagccgacacgagcccctcgctgcaacggagtatgcctgccgtcagtgcctgcggccgctgcccttcttcccagcatacccccatatggctccacggctgcgcagcgccctcagacacgccggagccctgcaacaaacccagctgcaaacattcactgacacaccggcaggcatgcccggcctcaacgtcggccaccggacacgaccggtccctcggtctcgccctggtgctctccttgtcttgtcgcccctctgccccctactgcccctgtcgggcacgttctctgtaccgctcgcgcgctgcctgccggtcctggccggacccctggccttcgccacgggactcaacgggccacctgggtctggttgcttccgcccgtcggtctccggtgcctcccccctggttccgagcgaccctgggttcccttggacgccgccttcgttcgcctcacggagcgcggcttgctccttgggcgccaggttgattggctacgcggagcgtatcctcgccccctccatctcctcccggcgtgccccttctcgcc

SEQ ID NO: 539681 - DNA, 169 bp, Homo sapiens
atctgccagcttgactgtgggttcatgaccagcttcctaatgacctgggagccatgggaacgtgggcatctccaccagagctgctgggcacaggtttctcgaccgtgtgtgggcgcacagggcggctttcctttttactccgaccgatgcttctaaggaagtcttcgac

SEQ ID NO: 539682 - DNA, 279 bp, Homo sapiens
agtaagctgacgggcgtggtagatcagagcgtcgtgctggtgctgattcagtagcagacgtattcttgggcatcaggcatcacagtcacgggagctgcgctggtgaaaggcagtcggtggtgacgacatactcaaacttggcgtgggtgctcgaaggtatcgccaggtcgtcatcgtgattggcgtgcgggtcgaagtagtccagtggcttggtcatctatcaggtaggtatctggcgtagacaacgcccgagaactcctcgccctggtacgcaggtag

SEQ ID NO: 539683 - DNA, 109 bp, Homo sapiens
cggactccccaagagacgtgtaactcaagaccgtaggacctttaatcgtgaacaaacgaacctttaatagcggctgcaccatcgggatgtcctacggtcgtgatggaca

SEQ ID NO: 539684 - DNA, 88 bp, Homo sapiens
  misc_feature (73)..(74): n is a, c, g, or t
gtcagctaatagcgtacttggggatgaggagcaaggaatattaccagatattaccctagatgttaataaaggnnatgttcaaaaaaaa

SEQ ID NO: 539685 - DNA, 186 bp, Homo sapiens
  misc_feature (122)..(123): n is a, c, g, or t
gcctcgtcctgggcggcggtggtgcggcggtcgccgttatggccactggtgctgggcggctgaccgccgggctaggaaagggcccaggccccgaatctcggtgtgccgctgctccagcgcgnnctgcgccatggcctcctccgccgcctcctcggagcatttcgagaagctgcacgagatcttcct

SEQ ID NO: 539686 - DNA, 402 bp, Homo sapiens
aaacacgaatctgctggcggatgataccgcgctacgtgcactcatcccacaacgggctgatcgctttccgatgaacgcggtacgtagcacgttgaaagaggaggaaaaactggtcaactccagcgactggggctacggacgctcaggcctttgcccgctggcgaccggagtacggttattttgccaaacaggcggggtttaccgttaaaacgtccgccagccttgctgctttatggcaggtagtgaaccaaatcggcggtaaagagcgttatttctttggcaatattttgtggcagacacgggcgttgatggaccgcgcgatcggtcataagctggcgaaaggccgcccggagcgcgaatatttacagactggcgatgcggtggatagctggaaagtgattg

SEQ ID NO: 539687 - DNA, 1328 bp, Homo sapiens
gaattgtcatcaagcccattgacaaaaaagccccggacttcgtcttctatgctccccggctgcggattaacaagcggatcttggccttgtgcatggggaaccatgaactatacatgcgcctgtcgccaagcctgtatacccatgtgaggtgccagccagatgcacaggcacaggcccgggcaggagaagcaccagacagcagatggcagcgtgcatatgctggcaaacatgagcaagaagaagccgtgcaacatggcgagcagcaaggagacaagcagaaagacttgaccctggcgacgacacgcgacggaagctcgactcgcgacgacgtgctggacacgtccacaattcagagcggaccgcaggaccctagacgaaatgcgactccacgggaacagaagacggtgagaaaacgacaacagcacccgccggtaggaggcctgcatgcgcgacactaatggacgccacggcaaccccgcgacaacaagcagcatggcgcgcgaaaagcacgcagaggacagggcacttggcaaaaatagcctctcgcggccgagatccgggcaacagccgttgcaaaaccagaacaagcattggaccatgaacgaagcaccatacaagaggaaagcgcaccagtcctggccttgggcacacgcacgaccaatacgacccggcgggacacacacccacgggccacaaccaacagaaacattgtcacaagaggacaaccacaaagacattaggtgccactttggaagacaacaaattgggaacgaagaaacgaccatggaatcgcacgacgacatccggaagacgtcccgtacacaccacaagagacatgagataaacgcacaattgaggacacacaacgagaacactacgaacacagaaaaccgtgggaaagaacgaatcgaaacgagcaactagaacagagaaagagtgaggagacacaaagcacaacgcgcaactgagggcaacgcacaacaataccactgggggatacacaaacaagcgtaaaacatgcaccgagtacgagcagacagcgaaacaacggtcaccgacacatgaacagaacatgagaaaggacaccatgagacacggtagaagtgtcgcgcgcgcgcataggaacgactatgatacaaacccacatgacgccacacgcatggaggcgaaagagacacagccagtccgacaaaggagacaggcacacaagtgagaggagaacgcggaaagtgacacagcgaagaagagaacatccgcacaaccacaatacgacagaccacacactacacaggccaccacaagccgagcacacagcaaccaataataac

SEQ ID NO: 539688 - DNA, 82 bp, Homo sapiens
catgccatttcaccaaggttaaggatttaacgaggcgatctggaggtttcataaacatttgactggaataaaaaaaaacaaa

SEQ ID NO: 539689 - DNA, 159 bp, Homo sapiens
tatggatggggtctgaatccatggaatcatgtgactgtagccacctgcatgcccactttcccttttccagaccatgctgtgggactctagaataccctatcccaaactgccaatgcctgactccattggtctgcacaattcctctatcccaatgttgcg

SEQ ID NO: 539690 - DNA, 350 bp, Homo sapiens
  misc_feature (9)..(9): n is a, c, g, or t
  misc_feature (115)..(115): n is a, c, g, or t
  misc_feature (175)..(175): n is a, c, g, or t
aaagaaggngaaaaataggcaaggtcctggccttaaactggatggacattcccacccattggtgatttggtcctggccccacccctaactggatcaattgaccttgtgacaatanaccttcccccacccttgagaaggtgctttgtaatattctccccacccaccccacgcccgnacccccggacccttaagaaggtattttgtaatattctctccgccattgagaatgtgctttgtaagatccaccccctgcccacaaaaaattgctcctaactccaccgcctatcccaaacctacaagaactaatgataatcccaccaccctttgctgactctttttggactcagccc

SEQ ID NO: 539691 - DNA, 81 bp, Homo sapiens
  misc_feature (1)..(1): n is a, c, g, or t
ntctcaggtgactggggacttggaacccctaggacctgaacaaccaagactttaaataaattttaaaatgcaaaaactcgg

SEQ ID NO: 539692 - DNA, 218 bp, Homo sapiens
  misc_feature (47)..(47): n is a, c, g, or t
ggggccgctcagggagaagaggtgctttcccactcatcttacctgtnaatactatatgcagtgggtgtcatacggagaatgacttttagtatggaaaacaaaaccagtcggcttatcaaataaatgtgattttttttttttttttttttttttttttttttttttttttttttttttttttttttttttttttttttttttttttttttttttttttt

SEQ ID NO: 539693 - DNA, 127 bp, Homo sapiens
tctggcagcgactgggaatgcctcccactaactggcgtcctctggaattagaaggtgtatagtgacaattgttgagtttgcaagctatttgcatttacgcacagagaagaaacccctttatccctta

SEQ ID NO: 539694 - DNA, 135 bp, Homo sapiens
ggggaaaagggatttccctatgtggccccgggggtttttgaacaacaacccccaagggattttcctgacccccccccctaaaggggggggattaaaggggggaccccccgccccgggcccgtttttgtttttcca

SEQ ID NO: 539695 - DNA, 424 bp, Homo sapiens
tctcatatagcaaatatcgtatacaatataacaaaaataacaacttcaccttacacattcctttttatatacttttcttttctttatcttttgatttaagacagagattcactctatataggccaagggctagagtgtaatggcatgatctcacctcactgcaacctcagcctcccacgttcaagtgattctcctcaaccttcaaagtagctgggattacaggcatcagccaccacgcccagctgattttcgtacttataagtagaggcagggtttcaccatgtcggtcagtctggtctagaactcctgacctcaggtgatccacccgcctcagcctcccaaaatgtcgggattacaggcatgagccaccgtgcccggcctacacattcatttcttatgcgtgcgtctttttcctccaaactat

SEQ ID NO: 539696 - DNA, 384 bp, Homo sapiens
accagggaagaccattatcacaggcagcttctgcatccagagtcacattgtcagtgtggtactagaatccccagtcaagaaattatattaatataaaaactgagatgggcgcagtggctcccccctgtaatcccagccctttgggaggctggggcgggtggattgccttaagtcaggagttcgagaccagcctggccaacatagtgaaaccgcatctcttctaaaaatacaaagaattagctgggcatggtggtgcccccctgtaatcccagctactaggaaggcggaggcaaaaaaatcgcttaatcccgggaggcggaggttgcagtgagctcagatccccccatagccctccagcctgggcaagagcgaggctctgtctca

SEQ ID NO: 539697 - DNA, 419 bp, Homo sapiens
  misc_feature (9)..(9): n is a, c, g, or t
  misc_feature (34)..(34): n is a, c, g, or t
  misc_feature (75)..(75): n is a, c, g, or t
  misc_feature (95)..(95): n is a, c, g, or t
  misc_feature (105)..(105): n is a, c, g, or t
  misc_feature (209)..(209): n is a, c, g, or t
  misc_feature (247)..(247): n is a, c, g, or t
  misc_feature (285)..(285): n is a, c, g, or t
  misc_feature (296)..(296): n is a, c, g, or t
  misc_feature (305)..(305): n is a, c, g, or t
  misc_feature (315)..(315): n is a, c, g, or t
  misc_feature (323)..(323): n is a, c, g, or t
  misc_feature (385)..(385): n is a, c, g, or t
aagttcggnaccgacggctgcagtttcacccccnaatttcaagtattgtgactttgtttgggccaaatgttggtnatcataggaccgatgataanacgttttcantttctttaaaatagagatggggtggctgggcgtggtgacttcgcctgtcttcccagcactttgggaggccgaggtgggtggatcatgaggtccaggagcttganagccagcctgacccaacatggtgaaatcccatctctanctaaaaatacaaaacttagctgggtgtgatggacaggncgcctgtagtncccagttanctcgggaggnctacaggncaggagaactgcttgaagccgggagacagaggttgcagtgagctgagatcacgccattgctnctccagtctgggcaacaagggatgctccgtctca

SEQ ID NO: 539698 - DNA, 132 bp, Homo sapiens
ccagtagtttgtgatgtgtccatcacatactactggacccatcacaaactagctgggcccatcacaaactactggagcccctcccctctacttgtcccatcacaaactactgggcccctcacaaactactgg

SEQ ID NO: 539699 - DNA, 102 bp, Homo sapiens
ctccacacagcactaggatagtcagtagaattagaattgtgaagataataagatgtaagcgggaaggttaataggttgaatattgctagaggatggcgctat

SEQ ID NO: 539700 - DNA, 707 bp, Homo sapiens
  misc_feature (22)..(22): n is a, c, g, or t
  misc_feature (62)..(62): n is a, c, g, or t
  misc_feature (66)..(66): n is a, c, g, or t
  misc_feature (72)..(72): n is a, c, g, or t
  misc_feature (74)..(74): n is a, c, g, or t
  misc_feature (77)..(79): n is a, c, g, or t
  misc_feature (86)..(86): n is a, c, g, or t
  misc_feature (103)..(103): n is a, c, g, or t
  misc_feature (105)..(105): n is a, c, g, or t
  misc_feature (113)..(113): n is a, c, g, or t
  misc_feature (126)..(126): n is a, c, g, or t
  misc_feature (128)..(128): n is a, c, g, or t
  misc_feature (137)..(139): n is a, c, g, or t
  misc_feature (146)..(146): n is a, c, g, or t
  misc_feature (152)..(152): n is a, c, g, or t
  misc_feature (172)..(172): n is a, c, g, or t
  misc_feature (182)..(182): n is a, c, g, or t
  misc_feature (184)..(184): n is a, c, g, or t
  misc_feature (188)..(188): n is a, c, g, or t
  misc_feature (699)..(699): n is a, c, g, or t
attattatagaatatataaaanaactataaagttcataaccacactctacatcatgatcganggtntaactnanaannntcaaaanaaaagaaatagcttgtnanattcttanaatattctaaaantnttcgatagnnnggttgtnatattngccaactttctttataagtncgtgggattnanatgnacatacatgtttttgctaagagcacatacatttcattctcctcactttgttcataacctcagcattgtcagataccctcagtgagttaactcaaagccttttattatggaaagaactggcacagttacatttgccagtggcaacatccttaaaaattaataactgataggtcacggacagatttttgacctagttccttcttcttttagagcaaaaagaacttttacctcggcatccagcccaacccctaaagactgacaatatccttcaagctcctttgaaagcaccctaaacagccatttccattttgatagttggatgcggattgtacccttcaatctgaaagtcttcagctttgaagtcatcaattttctcaacttttcgaagaatcctgagctttgggaaaggtctgggttctcgctgaagctgaattttcagtggctcgatgtgattcaggtaaatatgtgcatctcccaaagtgtgtataaagtcacctggcttcaggcccgtnatgtgcgc

SEQ ID NO: 539701 - DNA, 170 bp, Homo sapiens
  misc_feature (19)..(19): n is a, c, g, or t
  misc_feature (25)..(25): n is a, c, g, or t
  misc_feature (45)..(45): n is a, c, g, or t
  misc_feature (73)..(73): n is a, c, g, or t
  misc_feature (83)..(83): n is a, c, g, or t
ctaaatatgggcataattnaatggnccgtgctggacaggcccctnttgtcccaagctactcgggaggctgagncgggagaatncgcttgaacccaggaggtggaggttgcagtgagccgagatcacgccactgcaccccagccctgggtgacacagtgagactctatctc

SEQ ID NO: 539702 - DNA, 102 bp, Homo sapiens
ctgcttgtctgctctgtaaccaggacttttcgaagctgagacctgacatttccagactcttgcaaatgctaaagcaaaggggtggtgaatggacagtttttg

SEQ ID NO: 539703 - DNA, 860 bp, Homo sapiens
  misc_feature (264)..(264): n is a, c, g, or t
  misc_feature (458)..(458): n is a, c, g, or t
  misc_feature (490)..(490): n is a, c, g, or t
  misc_feature (651)..(651): n is a, c, g, or t
  misc_feature (654)..(655): n is a, c, g, or t
  misc_feature (657)..(657): n is a, c, g, or t
  misc_feature (661)..(661): n is a, c, g, or t
  misc_feature (698)..(698): n is a, c, g, or t
  misc_feature (701)..(701): n is a, c, g, or t
  misc_feature (708)..(708): n is a, c, g, or t
  misc_feature (749)..(750): n is a, c, g, or t
  misc_feature (757)..(757): n is a, c, g, or t
  misc_feature (760)..(760): n is a, c, g, or t
ggaagtgcaagtgccacggcacgtcaggcagctgccagctcaagacgtgctggcaggtgacgcccgagttccgcaccgtgggggcgctgctgcgcagccgcttccacctgctgccactgctcatccggcctgcacaacctgcaactggctggccatgctggatgcctgggcccatgcgtgggtgcacccttctgcctggcttccgggctgctccctgggcctgcgcctgactggtgccatgccccctgcctgacctggtctacnttcgaaaagtctccctgacttctgcgagcgcgatgccgcgccttggactctggcgggcaccgttgggccgccttgtgcaacaagatgcagcgccggctcggatggctgcggcagcatgtgctgcggccgcggccacaacatcctgcgccagacgcgcagcgagcgctgccactgccgcttccactggtgctgtntcgtggtctgcgaagagtgccgcatcaccgantgggtcagcgtctgcaagtgagcggccggggtcccctgggccctgatcgaggtcccctcctggagcctggccctctgaggcttacggtcttggcaaggcagcatcgccttggctcttgggaagaggagattggaccacatgatcttataggaacccctcanttnngnggtntgtgatcgccggacagtccaggcttgtctgaacccancantcacttnttgtgggctctaggactgactggggttcttcctccctcccnnaagccanacnagttcagttgggtgggggggggggtttgctccacacccttaaaacaaagccttagcccagcaacccccgggtgagttttgtctccctcctttttaccctt

SEQ ID NO: 539704 - DNA, 986 bp, Homo sapiens
tgcacatacttgatcgtagttattcgtgggcgggagcgtgtatgatggctagggtgagcgctgagtgctccttattcgcagcagaggtagggccggcagggcaactgctaggtgacgagcacagtctaccagcgttatcgtcacattgccgcgatgcattgtgtagtagaatctaacttctatcaggtaactaccaccatacaagtgaatccggcacggcgtctggggcaaatttggactaggtagcgcacgttaatagagtcggtggcgccctgcaattataggcagtgttgcgccggcgatcaaaccagagccatatacgcttggcgtgatctcgtataccgtccggtcatcatcgcttacatccgtgcttcgctgtcggcctatagtggcgagggccgggagcgaggatacccggttcgaacagtcataccttcccctttagcgagggcaacttaggtccccacaccgtgggagcagtccgtagagctaacagatctttgctccctgacaacctaggcaggatggtgtcacctcgtatcttgtcagcgggccgagacaaagtttcaatccagcaaaggaaataatgcaactatataaatcccccgtggcataagcccgaatatcaaaaggcccccgtctttcggtctcggatcctgctccctgtagtccacaggcagctgggtacttcgtgctatcggtcccagtccgtaggctgctggcatcactatagttatgtaagcagacgcagaaaaccttaaagcaccaccgtgtgcttctgaggcccgccggagggaggagacccattctatacaaaaactattctgagtgtgcggtcaacatgaaggtttatattggttatcctaccaggttcggcataatttcccatatatggagagtaactaatccggaaaaaagaaacctttgcgtccgctcggtttggcatgagcttgaaattaaaaaggttcaagggttatcctgggggc

SEQ ID NO: 539705 - DNA, 420 bp, Homo sapiens
gctcgacgcattggtggcagatgctatggtcccagctgctcaggaggctgagacaagagaattgcatgaacgcgagaggtgggggttgcagtgagccaagatcatgccactgcactttaaccctgttgaaagagcaagactcagccaggcgcggtactcacgcctgtaattccagcactttgggaggccaaggtgggcggatcacaaggtcatgaggtcgagaccatcttggccaacatggtgaaacctgtctctactaaaactacaaaaattagctgggcatggtggcgcgtgctgtagtcccagctattcgggaggctgaggccggagaatcgcatgaaacctgggaggcagaggttgcagtgagccgagatcgcgccactgaactccaacctgggtgacagagtgagactccatctc

SEQ ID NO: 539706 - DNA, 188 bp, Homo sapiens
gcaaaaagtcggcgactttcaccatatcatcataacttgaaggtaataaatcagaatcaccgttgccaccttgaaagcgggcgttcgagattccaagccgttttggccatgtcgtacaaaataaaatttagtccatattaaatcttttctagcaccccgcgtgccacaaggtcatcaacaaaaaaatt

SEQ ID NO: 539707 - DNA, 596 bp, Homo sapiens
  misc_feature (581)..(581): n is a, c, g, or t
attaagtaaataatttaatgatagaacactgaaatttggtccgacacagaagatcccatgttataatctttgtctgtggcacaaatatggctttacacttcccgttctctgaatgtaagcttacagaatgaataaatgaaaaatgttcttccacatctaagtttccggttctaatattccacttttctacattctttttatactcgaacaatatctagtttatatagtgaaggacggtctttattaagatttactggcaacaaggatgactgtcttttttaacaacacctgccttttgtctgggggctctgacagcaggacacttcctgtgcgaagacaggcccaacagtattttactgttagacaaggctattcagataagagcaccacttaaagttatttgccatttcagtgtcccgagaaatttgaacaaaataaatggttttctcttgaagaagcagcaaattgcataccaaacctaatttcttcctcagacttgagatattctgggatctactaaccagaggttctcagaagaatgttaaagttcatatccctgtgcctcagtggtttggctctgngaataccggagccat

SEQ ID NO: 539708 - DNA, 347 bp, Homo sapiens
  misc_feature (58)..(58): n is a, c, g, or t
agaggaccctgagtgcacgtacagatattacttatactggaggtagctcgtcatatanggcaaatttatgttgtcttttatttggaatataagggttttttagctcctggaatctatattatagtcctataattttattatgtttgggggtaagaaggggcacaacatattgggaacctaataaaattatcccgtatttttaatggttatttattaaattcctctccattaggagcccgttattaatggattggtatgtattttctggttataattttactggcatttattaaattctaatgacttaaattgtctggttttcatgagggcacacaggtgacactcaa

SEQ ID NO: 539709 - DNA, 248 bp, Homo sapiens
aactcatctccatcaagtacggcggaccctaccacattgggggcagccccttcaaggccaaagtcacaggcccccgtctcgtcagaaaccacagactccacgggacatcatcagtgttagtggggtctctgaccaaggacaactgtgcccaccagcatggggccccgggtcctgcgcctgctgacgccagcaaggtggtggccacaggcctgtggctgagcaaggcctacgtaggccagaagagcagc

SEQ ID NO: 539710 - DNA, 415 bp, Homo sapiens
caccaggcgcacttcttacctgcctccaggcagccatgcgctactgaggacggggatcacgctgggcaggagctccaggccccagcacagctcatgcccccaagggcaaaggctccccgtgcagcgcgtgcccctggagggtccactgcccgatgcatcccgcctgcagttggggactagaaattactgcttcttactgtaggcgaaaccagagctgccagtgctacatccagccagctcggccccagagtttcccttaccaggtcagcactggccccccggagccctggagattgggcacggcccccctgccccagctctcttggacgatcgtccggctccagccgctctgatcagagtgcccgctacccccaaatagctgcctcagtcctttcacagcctattctagagagaa

SEQ ID NO: 539711 - DNA, 357 bp, Homo sapiens
gcggacgcctactactactactaaattagaggccggtcgacataagtaaccagagacctttgcggcagcgctcccatctcaggcccggagctaggagggaaaaatggtttcatgggctgggtccagggccccctgctgtgtgcagccttgggacttggtgctctgcatcccagacgctccagcagtggctacaaggggccaaagtacagcttaggccattgcttcgtaggatgcaagacccaagccgtggcagcttccagttgatgttggtcctgcaggcgtgcagaagacaagaattgaggtttgggaacctctgcctagatttcggaggctgtatagaaatgcctggatgcgcca

SEQ ID NO: 539712 - DNA, 257 bp, Homo sapiens
tcgcggcagtagcatcatcatgagtatagagtgtagtgtggcccagtcctggagcacgaagtccaacttcacttggcttctgctgcaggatcagcctcttgatggagatgaggctataggacttggtgtctccaatcaccagccaccagccctcttcacgtctctgcgggaagagaggcgccatgacagggcctgtgacttcctcctctcgctccagctgcaccagcaccatcgctggcccgcccatttgcggatgc

SEQ ID NO: 539713 - DNA, 101 bp, Homo sapiens
agtctgaaagtgtgtttgacccctgtgcagatttaattatgtccctgccttgaaggcccagagggtggctatcgaaggcatcagtgctagagcaggtggga

SEQ ID NO: 539714 - DNA, 819 bp, Homo sapiens
attgatttcacatataattattatatgtagtctttgttaaattttttaaataatttgaatgttaccttgaagttctttggagtctatgtatattcatatcatctgcaaatagtggcaatttacttcatttccaaattttataacttttacttcattttcttaccttactttctgcatagtgactttagcactatattgaataaaagtggtggtgctgggggcatggtggctcacacctgtaatcccagcacttgggagcctgaggcggtggatgcttcaacccgggagttcaagaccagcctgggcaacacagcacgacaccgtctcagattttcttctttttttttaaagtggtgatgttggtcattctaggcttgatagttatcttaaagggaaattttacaacatttcaccattaaatactgtattgtgtgttacaggtgtttgtagacatctattatcggttaaaggaagtttccttctattccccgtttgccaacagttaattaaaattatcaaaaacattttggggtctattgagaagattatatgattctttttcccttttattataatttggtatattctagtaatgtgtctaatgttaaaactaccttgcattccctgggaataaattcacttggatactatatatactctgtttatatcactggattttgtttgccaattatcgttacgattcgcttctagctcagcgaggagattatcctgagacaaacctactatctattctgacaggtgtccggaggaaaatgggaagccctttaaaaatttccactcaagtcccctaaagtgcct

SEQ ID NO: 539715 - DNA, 252 bp, Homo sapiens
  misc_feature (8)..(8): n is a, c, g, or t
tagaggtncccccgtcatcggcgtaatcgtgattgacgacacggccgcgtcgatctggccggactgcacggccgcgaaaagccccgcgaacggaatgttcgtgaacttgacctccgagccgaggcgcttgccgacctcggtcatgaggtcgacctcgaagccgacgatcttgccgctggcgtcctggaattcccacggcacgttgccgacattggcgccgacgttgagttccgcgccttacgccgatgcggg

SEQ ID NO: 539716 - DNA, 135 bp, Homo sapiens
ccgtcgactgtataggactaattgtgtggaactgtgcaggtttgttacataggtaaacgtgtgccatgatggtttgcttcacctgtctacccatcacctaggtattagcccccgaagctataagctatttatcct

SEQ ID NO: 539717 - DNA, 269 bp, Homo sapiens
  misc_feature (44)..(44): n is a, c, g, or t
  misc_feature (64)..(64): n is a, c, g, or t
  misc_feature (163)..(163): n is a, c, g, or t
  misc_feature (196)..(196): n is a, c, g, or t
  misc_feature (262)..(262): n is a, c, g, or t
gccgctgctgactcaggacattcgcgcggcctctcccgccagangctggaccacgtgtggaccnacacgcactacgtgggtgctgcaattcccggatccggctcaccccaacaccctgcactgggtcgatgaggccgggaaggtcggagagcagctgccgctngaggaccctgacgtctactgccccctacagcgncatcgcaacgtcacgggagagctggtgtacgcccactacgggcggcccgaagacctgcaggacctncgggcca

SEQ ID NO: 539718 - DNA, 270 bp, Homo sapiens
ttcgggtctgcagaaacaaatatagcgctatctcattagaaatactgtctgacctatattctttcattcaagaacaagtgccatacgtattaagatattaagatgattaacgtttgggaccaagagtcacaacactgacttagcttaattgagaccaaggactggacacaggccatcaagcaaattcaatctgtcatcccacaatccctagactttagttgtccatctttatctcacaggcctttaataagttattcccagcattatgta

SEQ ID NO: 539719 - DNA, 108 bp, Homo sapiens
taagtcctgtggaaaagtaccctgtggaaagtaccctgtggaaaagtaccctgtggaaaagtaccctgtggaaaagtaccctgtggaaaagtaccctgtggaaaagta

SEQ ID NO: 539720 - DNA, 327 bp, Homo sapiens
agggtccgtcatcgttggcagtaatctgtgcatcattgcgagctttcatcttagcaggttatgctagtgctgagtcacagatatcgtgagatgcgtagctgggtcggttcagttgttcgtgtgtagggtaatctacttctggagcttgtcgaaaatgttgtcacatttcaaggtcttcgcacttatctgagtcctcgctgaggcagaagttagctaaagcctccaatggctctatgtagcgattagctgtcctcacagcgctcctagaatgtcttgctgtcatggcctccgagtgctcacgtaacaggcggacaggcgaccgccact

SEQ ID NO: 539721 - DNA, 517 bp, Homo sapiens
  misc_feature (112)..(112): n is a, c, g, or t
aatggtttattattttatattggcatgtttcccatacctggttaagagttttaaatgtaggcagttcatttcagagttgatcatatttcgggggtatttttgttgtttttgntatgataaatacctgaggaaactacctaggacgaggattggggcagaggcctcacatgtctgaggtttcagtccccgtgtgctcagctctgtcactgtgggtctgtagtgaggcagagtgcatcatggtgaccatggagggccagggcacagcatagccaccaggacagctccatcacctaacgtttctagttcctctcaagtacagtcaagctcttggcacatgagcctgtggaaatttcatattcaaaccagaacagcaaagtatactgatttttttttctctctcccttttatctttacaggatctactacaagtgaccatctgcaacacaaatcacaaagttcataaaagaaacatgttcaacaatgcagttgttgtcaaatacaaaccttgttactataa

SEQ ID NO: 539722 - DNA, 249 bp, Homo sapiens
gtgtaatttatgttatttatgtcatctagttgatgttgaagaattgtgacgacagtcactggatagaggtgattctatggaggctatcccatcccagtgtaatgttaatgcttgatccaaaatgtgttagctgcagttagacagatgtttctgtcttgggggtttagggcactacatttctgaggaactctgtactcattctgtcccttctcctttcacagggcagcaaggtgaatcccatccctttct

SEQ ID NO: 539723 - DNA, 113 bp, Homo sapiens
cgtgggttccttgcagagcgcggttccttgcagaaagaaatcattttgttgatttccagagcacggggcccactggcaccgtcctgtggccagtctgcaaggaacccacgcgt

SEQ ID NO: 539724 - DNA, 229 bp, Homo sapiens
agcctatgacgtttgcacccagtataactgcacgaacaacttggagccctggtgtggtgcattcagtcatggagttcacactcttctaacatttacagtaatggccctgtggcctccctgatacctactgcctcctgacctgcacctagtgactatttaccggcacttgcatggcccggaaaggagaataggcggagatgagtcagctccttaccgtttaccgtgcgca

SEQ ID NO: 539725 - DNA, 190 bp, Homo sapiens
gctcaggttgaccgatcctagattggaatccctggccatacgctgtataaaaccagctaataatccacttcagcaaaaccatcttatgggcacgtgattagagcatttttagatttagaaagctggttctgggtaaccgggtataataagcgggtttcatatatcggatggctggaatgccaagatgtag

SEQ ID NO: 539726 - DNA, 388 bp, Homo sapiens
ccagaggtctgcgtgctgtgcaggccatgccagctccacacaaagccagctctccccgaggtattagcgcggcccggaaaccaccagcatctgccctggtttcaatgcctggccggtgcgcgggttccaacgcttgagatgttgcatctcgacgttgaagcgtttggccaccatgtacagcgagtcacctttcttgaccttgtactgcaccggttttttcgccgcgactttacgcgtgtcctgcatcaccaaggtctggccgaccttgagggcctggccgttgagcttgttccagcgctgcaggtcatgcacatcgaccttgttggccttggcgatcagcgtgaggttgtcgccactgcgtaccttgtagctgcgggtacgccctgcg

SEQ ID NO: 539727 - DNA, 187 bp, Homo sapiens
caggtaggtaagcgtgcatgagaacccactctaaccacgagctgtgctcagtgtaggcaaactctggagtcactgactggttttgactttcatacggtgaattattccatttggtctggtactggatcattgggaataaaacaaattttcttcttttttttttcttattttattttatttatttttg

SEQ ID NO: 539728 - DNA, 657 bp, Homo sapiens
cctgaatcatccatatgtgtaattcattaagcatctgcgacatgaagcatcaaaacggatgatgaacctgaatgcgggtagaactttgctgctataatactttgccccactggctgaacaacaggcagggcgaacgaacgttcgtccatcattggaccaccgctgctacaatcaagaacctggtgaaaactcacccccaagggaattggcctgacgacgaaaacaacatattctcaaataaaccctttagcgcgacaataaggccaaggtttctcaccgtaaacacgccacatcttgcgaactaatatctgtagaaacctgccaggaaacatccgctcgtcgcgcatattcaactccacgagcgactcgacaaacccgtttcaacggcaaccgctcaatggaacaaaccgtgtaacccaacggagtgcaacacatatcccatattaccagactcaccgtctcttcattggccatacgaaacattccggactgacgccatttccatcagcgcgcggccaaccacatgctgcacatacccggccggcatcaacactctgtgctataatctgctctcttaccgagtctcttacacacaggcccgtcaaaatcccgctgaacgcgacctgcgtcatacgccaccctccgagcaccatgaac

SEQ ID NO: 539729 - DNA, 202 bp, Homo sapiens
  misc_feature (5)..(5): n is a, c, g, or t
cgtanacacagcagtcatcagtccagcctctcgctctccagcctatctgtgtactctgcagagtggagcccatcgttccttcatcctgtctgtcacccgccaggctacgtctggtaagccggcacctagcttggactcgaatctataagcacgtggtcctcatcactgccgaggcgtcttttgctgccacgactcggtggac

SEQ ID NO: 539730 - DNA, 224 bp, Homo sapiens
gcctttggggcccgggcctttggggcccttaaagtggggggggcccggttggttggtcaattggttaattgggtcggaacccggaacaaggaaggggccggttggggcaagaaggccaatccgggccctggaacggaaaccccaaaagaagttcaaacgggcccgggttcggggccaaaccggccttgactttgtccgctttccgaccgctgcgtcgcagcaag

SEQ ID NO: 539731 - DNA, 478 bp, Homo sapiens
  misc_feature (118)..(118): n is a, c, g, or t
  misc_feature (364)..(364): n is a, c, g, or t
tcagtgcccaagtctggaaccagatacatggttcccacagagggcccattggatctgtggatgagcatcttcggggattgccatggaaggaattcttcttttaagagggagggcaggncccagggggaaagtctgtgcccaggccgaaacctcatgagtttaaagtcatcaactccagctcccactgccattgtgttccttattaaaggagggactccctgccctttaaaagcatttacatgcgacagattgacccaatggttggtttgatttgatttgctctctgtgaggcctcctctttaaccaggcctttacggcccaaccccggccctgccaaagtcccgttttaaattaaagggggcanaagtctttctgtccatgggggggtaggaatttttgtgcaacccccccccccgtttggtttatccttgcccccttcagtgtttttttcctgttccataaaatgccctgttaagga

SEQ ID NO: 539732 - DNA, 268 bp, Homo sapiens
gttgtggtcactgtctggtgctggggataaccaggcagctgaatgaccagagtctggtaatgcttctgagcatcggtgaactgacattgtatattccgcttgtgatcatctccaaacatctatgagccttgggtatagccgatgaactctcggtcatgtaactcaaggtcgggtatcagcttcatgtgatcttcctgccgcattgttttcagcttggcgattgtcatggccctgatcttctctatgtcaatcatgcagtagtgccagg

SEQ ID NO: 539733 - DNA, 1676 bp, Homo sapiens
gcttcccttcactttatgccccggactctctttcatccatctcatgtcctgctgtcgcctcctctcctcactccagcctccttccctggcttattctgcccaggaaagtttcgaaccccgcgacccacacacatccccaagtcaggtcaaactgactagagagataggagggagatgtagagaaggaactgagagtacaggagagggagagggcaggaaggaaacacggaaaagccaaggcacacagacagaccctcgacgccaacggacagcacaatagaaggagagcggctgcgcgcagcaggaggcacagaaaaaacaagaacaaaaagaccgacgacagaggaaaacgaagcacaggcacacacgagacccacaccaaaacagagaaaagacaccacaaccacacacgagcagagacgcgacaaacacacgacactcacaagagagacaccagacacacaagagagaggagacgccaaagacaacaacaagcaaagacgacacaacaacgcacagccatgcccggcacacaagagagaacgccagacgaaccggacaccaagcgagaggacgcaaagaaacagaacgagaaaaaacaacacaaacacgacaacgagacaaaccagacaacacaccacacacaacaaaaacaaaaggaaaaaacagagcgagggaacacacgcacacaacgcaacaccacaccaagaagcaacagacagagccccaaagacagccacacacccagagcggaaacagacaacacagcagccgaaccacgaagacctacagacacgataaacaacacagggtaacagaaaagagacaaacccgccaccgaggaggacagccgacacacgaccagccacaatcaaagcacgacccaacaccaaaccaccacgcacaaacctggaacacacgaagagaaaccaccgcgaaaacgagcgctgacacaagccacacccacacagacggagagcacgaacgcaaaccaccaaacagccaagacaagcagacacgcacacgacacacggcagagacggggcaagagcaacaacagcgaaccaccgagcatgaaacggacacgggacggaggcagcgcagccagcagcgcatggacacgagcaagaagcacaaacagtagagagaaaaccggcaaccagaagacacgagcaacacagccccagcgccaccaaaaacgaagagacagcacacgagcagagcgcgcagagagaaaacgacagagcagagatgactgacagaggagccagacgcagacacgcagtgcgaggcgaacacccacacaagcagccaacacaccacagagaaagcgacaacgacaaaaccagagcgagcatcgcacaggcacaacagagccaccccgaagacgacagaacaacaagacaacaaacacaacagccacgagccaccagaagcaacacacaacaccagcaacaaaagcagaacgacgaacagaaaaacacgaacaacgaaccgaaagaggaaagaatacacacagccagcaacgaagacagcaccaacgcacagcaagacagaaacacacaacaaacatagaacgacaagcgaagcagaccacagagaagaagcaacacacgagaccacacacgcaacagcaacacacacgaacgacaaaactcacagacgaacagacaact

SEQ ID NO: 539734 - DNA, 385 bp, Homo sapiens
cctctgggtgccccacctctttgtttagttgaacccccccgtcccccctatgtgtctcccgcgcgcgtttgtaccacatttgtcggggtggtgttttgtatcccccccttcccacggccgcccgacgtggttgtgagttgtcgcgcctcaactcattttttgcgggcgagttgttccggcgtcgacaacattttggtgtagccaccacggtgtgccccgcgtttaccctgctatgtttgggggcactcgtcccccccagtttggcttgttccgcccccctcaatgtgttgcttacccaaaaacccttgtttaacccccccctttgcctttttttaaagtggtttttattttttttttttttcccttttttttgggggggttttta

SEQ ID NO: 539735 - DNA, 459 bp, Homo sapiens
cgcgattaagtgtcatcatgacgtgcagtgaggccagcaccaggcagaagtggaagaaggagatacatgtaagtgacgccagtcctagctcgtatgtcaacaggcccgagccctcacagagctgccacctgctgctgctgctgcatgtgatggcgtctagacataagtgggcactcctcgagcactgcatcaagctgttcacctgaccggtggtctgaggagcgcagactgatgaagagggtgcacaggaggacgatgatgaggcccacaatgctcggggcatcccaccactgggtctcatagccctcgagggcctgacacaactgtctcgttgcccagctgagttggcaaatgggggttgaatttctgttcagggatactggataaggctgaccaggtgacaaacatgatgtagagggtgaagaccgaggactgaagaaaacccgagaagggctgagc

SEQ ID NO: 539736 - DNA, 113 bp, Homo sapiens
acactccccatcctgatgtcactcctgaatcccatggttcaatttccacagatttgtaccaacagacggcacaggaaaaggtttagttgtgctatacgcaggttctgatttaa

SEQ ID NO: 539737 - DNA, 1330 bp, Homo sapiens
ggctactcctcattgtacccattctaatcggcaatggcattcctaactgcttaccagacacgaaaaacttctatgactatatacaattacgcaaaggccccaagcttgttgtatgcccctacgggcttactacaaaaccttcgcttgattagctcaataataatctctatcaccaaatgagccccataaaagcctggcacaatttatcatcaccctctacatcacccgtccctgaccttagctctcatcatcgttcttctactatgaaaccacctccccatacccaaccctctcatgatcaaacttcaaacgtagcgcctcctgtgattcatttcatagtcacgacactcatagcgctaatcacggttgtacatctaaatccttcctgaatccatggctgaggcatccaacaatcataaccttaagcacacctggagtcgggcgcgacgtgacggcaccctggacagtccggcaaaactacagtctctagtattgtacacgctcactctcataggccccactcaattcgtacataatctaaactaatttacttacataaagactgtgtctcgcctattacacacttagtcccgactcctctttattcaacgaaagccactataggcaaacacactatcttgaaattaacctcgcgtgacgcatttattgaacgacccttgggacccttatcaaactcagttggaatacatagtactccgcgagcgagctaatgccatgaaggagcccaaaaatcggatactcgccacactttcgtgaggctatggcacagaacacggggagaagttccagaaacctcaaggttcgtcacgtggacttatccattaacaatttcgcacatttaacggacccgtccagtgtcgccccatttacggggcccttagttaccttttcaactctacgttaacctgaagaattaacccaccaaaattacctaatttcaactctcattcataatgaaagatccaacacaccattcaaaccgacattaaacaaaattcttttcacccttaggtgaaaaaccaaaccattaattggaaccggcaaccttctttcccccacttggaaatcgttcttaacacacaacacaactatttgtgtgcttccaccacaaaggaacccccttaactcttcactaaaaccacttcccccgtggttatctttcactgcacatttccggaaaaccaagcaattaagcccgcacagaaatttcgcgcgttatcagtacaccaaattttcaattaaccaacggcttgcccttaatgtacaaacaacaacttttccttaaccaagtttcaagcccttaataatt

SEQ ID NO: 539738 - DNA, 216 bp, Homo sapiens
ctatctgtcgtatctcgaaacggtccttcggagagatcaaagaacatccggggtcacttgaagaggtccgctgagacaggggagtaattgggaataggagtctcggaactttacccgggttaacagggtatcttgactacaaataccaaaaagaacttatttggatctttaactgggagagtcagaactttgggttcctctttaaatgtaaataca

SEQ ID NO: 539739 - DNA, 559 bp, Homo sapiens
ccgccgccacactgcttttgcctcagtcatgccgaagcacgagttctctgtggacatgacctgtgaaggctgtgctgaagctgtctctcgactcctcaataagcttgaaggcgttaagtatgacattgacctggccaacaagaaggcctgcatcgaatcagaccacagcatgaacactctgctagcacccctgaagaaaacagcaaagaccgcttcctaccttgacctagtgcagcaggcgcctgatacccacagtctacagtacggaccaacgcctgcagtacgctgatcctcccgctgaccttccagacagacctgttcttggccacgcccccctgacgacgccgaccctaatccgccctcacattggccaaactccctcatagtacccctcgataaatctcacgtcccattcttacacctcaccactcgtccctcctaccaccaccttcatccccttgtcaacattccactcctcccactctccctaacatcatcaagaccacacccccccctttcccaacaataccaacctacccctcttctccacctcgcttcc

SEQ ID NO: 539740 - DNA, 154 bp, Homo sapiens
  misc_feature (14)..(14): n is a, c, g, or t
cctaaaactttttncagaacgcttgccaaaactgcttcttggaagaaacatggattccttgatgaacacggaaccagaaagaaggatataccagcaggtcccaatatcatcagggtagtataaaacttcatttgcttcgtgtctctcatatctc

SEQ ID NO: 539741 - DNA, 408 bp, Homo sapiens
catcatggggcttcctggtagggatgcttttcaaggtatgtgggtggtactgacagcagcctcaccctctcaaggacattcttctgtctgtactcatacatggatacctagcagttaccaagtttccatttcccttacatgtgtattaagtatttaaaccatgtgagtgcattgaaaatacgtctgaccatcatgtgcaggatctgctaatgaaactcacacagtattcgaatcattcagtgaactgctacctcaggtgcttgaaataacgatgaccctgcgcgtgtgtaaacactcaaagtgacttactgatcaactctgtcttttctgaaaaccaacttcaacaaactcatttttgaccacttgacccagggttactttgtaaacttatcaatcactaaatagtct

SEQ ID NO: 539742 - DNA, 747 bp, Homo sapiens
gatagttggtggatgattaacaaaaagcatgtgaaagtgtcctctagataaagtttttagtaacattacttacttattgcctagattgtaattatgacatatcccgaggtctccccttcgatgttggcatcatgctctgttgtaatcatgcccgatttatactcgaggtcccgtgatcagtgtggtcaatcactaatgatacccagatgtgctactgtgccttgtgttacttatatcatacagtaagctgacctggaaatgagtgaaagctattatctccgtacgaagtatagatggtatgagccccgagcagactttaagagttgtacagtgtacgttaaatgtcagaacactgttgaaacgtgtaccttctcactggtacgtagtgcgagaaaagtacaagctaggctgttacatgttactgagttgtccagcaccagtaagtgtagtttcccctttgcctagtcgtgctgtgtatgtgactgtggttaagtttcttttattgccttatacaggtagaaggataatgtatttttgaactaaggtgagacattgatatatccttattgctacgagctgtagctaattgtgctgagcttgtgccttgagtgacttgactccgctatgattgactgagtcggttttactcttgacttactgtagatcaccctgatgatttgccggttccgaacattgggcacggaaacatatgcggctttcaaaatcaattgcgggggacgaaaccgg

SEQ ID NO: 539743 - DNA, 696 bp, Homo sapiens
gggaatgtggggtgcctctttcatgaaaagcatgcccatacgattaaacctgcctttagtgggatggtttggccatggactcagcccccgttttaagatggataaccaactgcagttaatccctggggtctgtgggattccgaatttcaaatctcccccttttgttggtctgttccctgcatgctagtttagagatcttaagcacaacgcacatgaaggccttgcggaaaaaatttgttttgctaaccgggtatttgggaaacctggtccagcataactttggcaaagattaagccgccacccagaaacccgttgtggacataatttctccgttttatgtaaaggagggggggggcccgctaacaataaccttttttgtttccaacaaaaatgttttcccaaaactaaaaaaaaaaggggtggtttgtggccaacgggatcccaatggcctttgggggggccccggtcctctttataattttttccctgatgtttataaattttcccatttggccccttttaaacttggctttgcagaaaccaaaaattagccgggtttttttgaaccactttagccaattatactgaaaaccgctgggggtttttcaggatttttcggttttttattattgaaaggatgtccccctttgccccctggtacttaccattaataatattccctcccgaaaattttta

SEQ ID NO: 539744 - DNA, 1717 bp, Homo sapiens
  misc_feature (1010)..(1010): n is a, c, g, or t
gcgcacatgcagaacatcaaggacatcaccagacagcgatccacttcgaggcgtaccgttgtgaagcgcctcaagcgaggggcagcagcgccattggccaacggcgtggtaggagaaggatgccagaagccccggagtatgtagacgccgcccgggtaggtgagccgcgagacaccgtccagcggtcgaactcagagtgacgagcgcggacacccggggccgaacaagcacggaagacacgaagaaagaacaggaacaccggagaagagaaagcaaaaaggagcagtacagataacacgaaacgaaatacatcgagcggaataacagaaagaatgagacatagaaacagaacaaggaaggcgcgcaagaagatagaaagacataaaaaagagacaaccgaccacacgaaacggtcatcagaaaaaatgaagaacgcaatcaaactaacctactgacaaggacagaaagcaaaaacaagacacggagagaccaaggacgaaaaataaaacgagagaaaaaccgaaaaagacaagacaaaacaagaacaaggagcaggacataagacacacgggggaccgaggaacacaacaagaaaaggacctaggggacaccagagaacgagcaaacggcgcagaagaatgaaggagcacgcgtactaggcaaaccgagagaaaaggcaattggacgaaaaggcttgaaacgccacggacaagaacgactaaacacgacggcaacaaccagacccaatgggcgagataaacgaaaggaataaaacaacaaatacaccatgaggacccatcaccgcgacttaaagggaggaccacaaaaacacacaacataagaggagggcaccacgatggagcaccacacaaaggaggaaaggccacgcacacaggagaacacagaacacagaaagggaacagaataaccacacgaaataaagacgatcgcgacgagcaagaaaagggacattatggcacacacaacgacaagggagaacaggcaaacanatacagagataagggagaagcagcaacacggatagacacagaagaccgatacgaaaaacgaccacaactaagacaataagaagagagacggacaaggggggcaaagcgatacgaacataccaggacaggagcatcagcaagaagcgccgaagggatatacccagaaagaggatgagagacacaggcagagcacggaaagagagctcaccccgacagaaaataggagacaccatacaacagcaaacgaaagcgacgcagacgaatcagagaagaacacagacgagaaaagcaaccaaggagaaaagaaagagaggaaacaacgagaagaaagacaaagagaagatgacacacgaggaaagacagaacgagagcacgatagaacgagaaggagagaaaaaagaacagacaaagaacaaagaagacggagaagagaaaaagcgaggggggggggcagcgagagagggaggagggagcgcgagacgacgcgggagagggacacgaagagcaaggacgaaaggaaggcggcgccaggagcggaaggagcggggggggcggccggaggggagcgaggagagaagggaagagaggagcacgaagagcgcgaggagagagggaggaggggaggagagagaaggcgacagaaagagaagaagaaagcaacagagagcgagacagagcacgggaggacggagagagaggagacggga

SEQ ID NO: 539745 - DNA, 207 bp, Homo sapiens
cgaccacagtggtcagttcaaagaacaaacgtggaattaaaaaactgtagtcagccaggcacggtggttcacacctgtaatcccagcactttgaaaggccaaggcgggcagattgcttgagctaaggagttcgagaccagcctgagcaacatgatgaaaccccgtctctacaaaaagtacaaaaattagccaggcgtggtggtatgc

SEQ ID NO: 539746 - DNA, 733 bp, Homo sapiens
cgcctccgtgggacctcggcgattgcccctcacagcatggctgtcgtgtctacggcaactccacagacccagctgcagctccagcaggtggcgctgcagcagcagcagcaaacagcagcagttccagcagcagcagcaggcggcgctacagcagcagcagcagcagcagcaacagcagcagttccaggctcagcagagtgccatgcagcagcagttccaagcagtagtgcagcagcagcagcagctccagcagcagcagcagcagcagcagcatctaattaagttgcatcatcaaaatcagcaacagatacatgcagcagcaaacagcagctgcagcgaatagcacagctgcagctccaacaacagcaacagcagcagcagcagcagcagcagcagcagccagcgaggctttgcaggcccagccaccaattcagcagccaccggatgcagcagccacagcctccggccctcccaggttctgccccaaggcaagctgcagcatgatgcatcacacaacagcaccaccagccgccaccacagccccagcagcctccagtttgctcagaaccaaccatacacaactcccgccacagtcgcagacccagcctttggtgtcacgaggcgcaagtctcctggacaattgttgtatacacgaacacattgtattttgtcgacctctgtggtggtcatcacccccattgagccctggttcgcagcagaaaaggtagacgcc

SEQ ID NO: 539747 - DNA, 393 bp, Homo sapiens
taggtcctcagctttcttgcagcagaagcttctcccagttcctcttcagcatttatgatatatttgtggactttggatcttgttagaatcaataacaaaaagagattatgatatagataccatcaccttcattttccagatgtactatcattccatttggaaatcaaagttagtgttccctaagtgacttcctgctgcaataaatttgaggacatcatgggctctggactttgtgaaagtttccctttaagtttccaacaggattccagaccaccactgtatggacccctctctgggttgcacagaaagctacctttttttccttttcctttcctttttttttggggatgaagtctcgctctttcaccaggctgtagttgcgtgccttgatgt

SEQ ID NO: 539748 - DNA, 265 bp, Homo sapiens
gacattttttaaaaagacaaaagccagcttacaaagctttggacaataaaacccaaaggcctcctctgattaagaatatattttaaatactagtacgcaaaaatgtatttaggccaaaatgtaatagtacaatctgttgcacaccatacctgtaggtgttgcctgtttaagggaagtccacatggagtatgtaccttcagtgcttacaggatcaacaaaacttcatttagagagttacaagttcgtcgctgggctacagcacatg

SEQ ID NO: 539749 - DNA, 131 bp, Homo sapiens
tttagcattcacttcaagttttattttgcctcttgcatggtcttttacagttcgttttctacaggaactgagctctgatccaaacaatcaatcgagtggaaggaaatttgcggggtaccgagctcgaattc

SEQ ID NO: 539750 - DNA, 192 bp, Homo sapiens
aggagtatatgcgcgcacggatggtgactctgacagagcgcgaggtcacgggggacacgggtaatatcttgagactcccggtgctatagcgcgggccttctcaccgcgaaccaggctcttagaatacacctaccctaagtcggcacggacccgtttttattacctgcggggcccaccacagaggattttcag

SEQ ID NO: 539751 - DNA, 138 bp, Homo sapiens
tactgttggtctgctctagagttatccccggcctgccatggctggtacgggtcggagtagtggctgcggctcgccgtcgaagttgagccatacgggcagcacgacgcgcggactgcgattggtgggtcagaacataag

SEQ ID NO: 539752 - DNA, 914 bp, Homo sapiens
  misc_feature (265)..(265): n is a, c, g, or t
  misc_feature (699)..(699): n is a, c, g, or t
ttttttccaattttatttccattatgtccccttttatttctgaatttacccttattatcaaaatgtgcccttgaaaagatacaaaaaaaaataaggggccccttcaaaaaaatgctcccgcgtggacaggtgcgggagggaggacatgatttataggagcccgttgtggtggggaaaagagaaagagtgtttacttccgaggctcccgtgggtagtgccattttgtgtggtcaaatgcattctcagaacaacgtgagagggttgngacaaattctcaggataatatgaaagggcgttatcacggtggagagcctctctctctcacagaaatatattttcccatagaggggagtttcacaaatgtggccccttctatcagcgtattgaaaaatagtctcgggggtgtgtggttaatatatctcgggcgctcacgagagagatataactagtgagagaccgtctcaagagagaagggagcgcccccccatattgagcccggggtggagtctgtcgccaaaaggggggggacgcccctgttgttccgcccacaaaagaaggggctttttgcaacgaggggaattaggtcctgccactgttgtagtaaataatcaacagcgcccggcctggtgggcccccctttcttaagtagttggtcctaccatattactaaatgagccccacgagccccgaggagcgagngagaggtttacacacaaatgtgatactgatgtggggggtctcccccaaacctcgcgaaagagaaaagtgtctcttaggcccgagggttttctcgcgggggagtgtttataaaaaagtctatacagcttcgtgcactctggaccgcggggtgggggacaaaaaccaaaatgtaccaatatctacacacattctgtggggcgtcttctttatatatc

SEQ ID NO: 539753 - DNA, 328 bp, Homo sapiens
tgacagaagctacgaaggatacacatatgtccagtgactacaggaaaatgtacgatgatagaagctaggacaggtgacttatgtcctcccagaaagacatggagattcagacaggaccccgagaagacaaacttcagctaatcctcccacttcccagcacccagaggagatggagggcaggcaggaaaatgaggaacccacgaggtgaggacctctagaggagaggggaagaagggaggcaaggaacgacgaggtgtggtaacaactcaccttgccgaaatcaactaagccctgaacaatgtgatggcgcttgtcgaggctaagtggt

SEQ ID NO: 539754 - DNA, 160 bp, Homo sapiens
gcaacctaagtctttataagtcaagtggaaataggctctcctgaaatttctattgatggagccatgactgctcacgtggagccaagagagcactgcactttcctgcctttaaatatttgttgttagccgggcacagtggctcacacctgtaatcccagca

SEQ ID NO: 539755 - DNA, 1676 bp, Homo sapiens
  misc_feature (572)..(572): n is a, c, g, or t
  misc_feature (1118)..(1118): n is a, c, g, or t
  misc_feature (1406)..(1406): n is a, c, g, or t
gctgcgtgagggtgcgtgcggtgccgcgtgagccgacagcaaaggagcaggggcgccgccgcaagggagctcgtcagccatcctcccgtggagcctcgcagctggcctctcgtctatctggccagcatgacactgactcaatcggcatcagtcgaaggcaggtgcagatccaagttcggcctcattcaatctgcgcgcaacaaaagtgattttggacggggcgctgaggcggttccgggagttccaaggtgtagacacgcgctgtcctgcaccatgcgagtccttgcatagcaatgcatagctagcatcatgtgacggcttggcacgcaatgcctcctcgtggcaacgagagcggtgggccagctggcgcgtcgctgtttgatgtcacttgtcgccatgacgcaacacttgtgtggcctgctctagcgctgagtgcgtgcccgggaccagatgagaagcggtgccataacagttgtacctcgttgaccgcaatgcgggccgcacgggattgtcccgcggggcatcctcccgggaacctttgcgcctgttgttctcccccgtcctacttcggntggagttcggacaaagcaggtaccgcggacgcgggggtacctgacgtggggggttacctgggcttggacacggtttccctgtaacggggcccgtccattccgcaggtgggcggcccttaatccttttccaggtggcctggtgacgtaagcgccgggatggcgggaacccccgggtcgctttggttgccctgtggaacacttttgctgggcagaccgaaggaaagcaggtgtttaggtttccccccacaacaggtcacctggaacgcacagtggttggccgcaaggccggattggtctacgccactttctggccacctagtgttggcagagcacaccattatcacgacggggttaccaagaagcaagctatcctttaccacaagaggccgggttacaacccaccaggggtaaaaaggactgtgccttaagcgggctctgaccaaatctctctgtgaagaccgggccgggccggaggtgccggggggcccctgggagccgggcaaggcaattccggccggctggttaggcggacacaccaggcgcggnaagcaggttttggtcccccctttgtgggtgggcccggcttcctggcacgttccgggccttccctctttccacacgccgccttccggcctctcttccctccagggtggaacgccccatgggcggtctttacccaggttggttgagcgacagtgcaaacgccttggctctgggagacacccagcccggggtttttccctttggtcgccgccacacctggagaacgcgggtaggtcggcgcctttggttttgggtggtggcagggcggccccccggtacggtcccgtggcncccaacttggtgtcgttaccaaccgccctggggaaaggcttccccgcgcgctccggagcgcaacagcgttgtgccgccctttccccgcgcgaaaccttgtcttgaagtggtgccccgtgtacacccctgttgtggtgcgcccaggtacagtgggagccccacagctgaggcacgcgcctcacacagccgcgcggcaacagggccgccccaacagggtgtcgtccagcggagcaggacagcacctcattgtgtgctcttgtgagtgcagaa

SEQ ID NO: 539756 - DNA, 451 bp, Homo sapiens
ttggaggcacacgcacaattcacacacatacacacacttgatacaccccaattcacagacatgcacacacttgatacacacactttcacacatccccacacacatgcacacacttgatacacacacattcacacattctcacagacatgcacacacatgcacacacttgatacacacacactcacattctcacagacatgcacacacatgcacgcacttgatacacacattcacacgtccccacacacatgcacacacttgatacacattcacacacacatgcacacacttgatacatacattcatacattctcacacacgcacacactggatacatacccatgcacattcatacacatgtacacatgcacacacttgatgcacacacacctatgcatattcacacactcacacatatacatgcacacacaacacacacacatgcacacgc

SEQ ID NO: 539757 - DNA, 996 bp, Homo sapiens
ggggaaacggaagggccggaggcgcggcggcgggcggccgagaggggcggtcggtggcggcggcggtggtggttcccgcgtccgcggaggcccgtgccctgagagcctgcgtccatgttcctgccgtcctgttcccgccgtcctgtgggcgccgctcgatgacgcccagatctgcttcatcgttcacgacagggatggatggtcgagtcgttggaccgagccgtggagagcctcccatccctcctctgctctactcactcgaccgtctcacttcgcatggttgggaagaagagcattggcttttgtgcctgaacaggattcgaatgtctcgagaatagttacatgacgacgtccacctgctggacggacggcgatgcaatgaggctgggaactgtgtgacgagtcggacctagcagattacacctgcgaccgagattgtcgacttgaacgtaccgcgagatgcaggctgcaaagctagtgggtttcgcaggagttccacaatccaaaagggatgtctgtgcgtattaccatttgtcggagccatggacgcgtcaggtcatcgcggtcggaacttggatctgacggcttcttgacgaacatgaccggtacatgtccggaattgtcatgcccccatgatgtcgaccgaaatgctcgtcggacttctaacacaggagaaaggcgcttgcacagcgtacagcacccagaagggggccgcatgaacggcgagggggagctagcgggcgggctctgaggtcatcagccgggggtgggcctcggaaaggcggacgagcagcggtcaggccctggactacgtgggagactcttcggccgatgatccgagggcttcccccgcaaggagagcccgcaaccccaagagccggactcattgaacgagctgggccaagcaggaaggaagctggaagcgggacctagggcccaggagggtccgaggcagcggagcaagtgggtttgagggcacagacaggaagggaccca

SEQ ID NO: 539758 - DNA, 145 bp, Homo sapiens
ggggattctgagcagtgcctctgtctgagggacatatcagtgacctcgacgttgcctttaactacagttgtgttagcctcttgcgtatggctttttcagagtcatttatgagcagaaaaaaaaaaagtaaaacttggctaatatt

SEQ ID NO: 539759 - DNA, 132 bp, Homo sapiens
tcaagcttctaacgatgtacggggacatgccgggtggaccaggagctggagtctgttatcttagcacgaatgctcatgattttctaaaaaaaaaaataaatgttttgggggtgttctgttttctccaaaaaa

SEQ ID NO: 539760 - DNA, 250 bp, Homo sapiens
ttgtagccatgatggaagctctgagatgttagtatatatctacatatactttataaaaacttagtgaattaatacatctcaacatgataatgacatatgaaatggccatttcatatgagaatgaaatctggaatcttctcaaaagctgataggcttgaacatactatttctcaccacaggtggtaagttaatagtaagggccatttagttctttcaaaatagataaatgagtaaatactaaaaaaaaaaa

SEQ ID NO: 539761 - DNA, 1628 bp, Homo sapiens
aaacgcggaaagtctctaccgtgactgttacctcagacaaccccggagaacatcaacaatgaacctttgacgcagtacacgttggacccagggacccggtacccaaacctcaactcacactgtgtcaggccccatcaggtgaagcatttgtatatcactacggagctggagcacatacccgtctcgagcagacttggcgctcgcgtgcaggagatcttgtcaacctctccaggaaggagtcagcatatcctggtccacatgcaacgctccctgacctgtgctgcctagcatgcatgcacacgagcgcgctaccctaggcactgctcacaccgctccaccccgtacctgtacccgaccactccactgcgcggcaactagagagttagagcccacatgatgattgcccacactctactacccaccctgacactatcccggcgccctgcatgccctctactctaacgtataatgacctacatctctgaccactgacacgcactgcatcgcgtgatgcgcatgcaaccaaccccacgcctcgccactactctgactgctagcgcacgatgccgcagcagcctccggcgcaactccccatcccagctgcaccaccgcgagccacaacagccagattggccatttcatagccaccaagtgcaagacctcttgaatccatatctctctacacgcacattgcctccaactagctaacccgctcctttccaaaagcttccttacctgaacgcctacctatacgcagggcaggtcctaacaccacacaactttgcatggtagccccctgcttgacacattaccctatgccgccggctctaacacaacccgtcactgcagacggacgacatacattgccgctggaacccccacttcatggacgattgtgcagctccactagcatgttccacacttacgcaacgatattctcagtataatccgttatccaaccttaatttcataccaactagccctctactaccacgacttattaccccaaattcggtacaagcgaactcagaaacgtccaccaagccgagacgactggtcacctgtcgccacacaacctaacccgcgcacgacatcgaacgtcggcccaccatgtcaacctccacaagccagccgcgcgcatccagcgaccagggcgtgcatattcccaccaacagacgctaggagaacacagcaacaccactactacatacaacacttatgaactagaacaccgcgatatccttgaggtcgcctattacactactccatagaaaacaggtgtgtcggatacaccaacatacatgatcgcaacgatatggatcacctcgacaacaccaaggatcagagccaacagtgtgccaaatctgagctgtagctgagcacaacgatcgcgagaaaaatccatcctagataacctatacactctacgaacgacacgaactacaatacgcatggcatacatctcccaatccagctaagcaacaaaaaacgagtgcaccagtggacagtccagatgatacaactacatgataatgtacacgcgagtcacactctccccgccgatcagccatcagcaccaccacacacatactggtcgcatcactaacccgacattgcacccaaaagag

SEQ ID NO: 539762 - DNA, 121 bp, Homo sapiens
cacgagaccattcactaccatctgggaggctcagtatacgcagttccaacgtggctggcacagttgcacctagagtcctgcaggttcctcatggctggcctcaagattcgcgggatcccta

SEQ ID NO: 539763 - DNA, 239 bp, Homo sapiens
gtcatatgctggatgatgactgctacactcagcccgggtgactgcaccctgtgattcgccaggcacctttgatgccatttaagactacagtaccttgtccccgacctctgaaggagactgtatcaccacgtctccctatcaggatgtcactgaccacctcgttcagacccataccagagtctccgtgcagcggcctcaggctccagctgtggctacaacataggtgtaagggcccctgc

SEQ ID NO: 539764 - DNA, 215 bp, Homo sapiens
atgcgctctggtgcgctgttcacaaactaaaggctctaccatccatccagttgtccctgattggagtccttcaactgcagatcttttcccaagccacggctctgattctgtacctcaaagcactgagaatgctctggatcaagtagatgatggagaggttccgctgagggagacagagaagaacgtgcgtccgtactcaactgtatgatgcagta

SEQ ID NO: 539765 - DNA, 346 bp, Homo sapiens
  misc_feature (85)..(85): n is a, c, g, or t
  misc_feature (165)..(165): n is a, c, g, or t
cagcactctgggaggccgaggtgagtagatcacttcagcccagaagttcaagacaagcctgggcaacatgggaaaaccatatctntacaaatactcgcctgcttctgccactctgcaccatcaatataaataataactaattcacaataatcagtcatgaaagantaaaatggaaaacatgccaaatgcaggcccctgctttgttatcactgcatgccatacacataaagttctctgtcacgtgactacaggagcatctccattcctgtgcctcgtcctcaggtatcagtcgcaaagccacttgcgggcttgaagtcagcccacagtccttcttggaagtcaacag

SEQ ID NO: 539766 - DNA, 170 bp, Homo sapiens
tcgctttacttctccacgctttatacttctcaacgctttatacttcctcaacgctatatacttctacaacgctttatacttctcaacgctttatacttctcaacgcttatatactttcataccctgaaagtgaaatgagaaagcgtttgagaaagttataaaggcgtggg

SEQ ID NO: 539767 - DNA, 762 bp, Homo sapiens
  misc_feature (164)..(164): n is a, c, g, or t
agacaacgcgtgcgggccgaacccctccccccgccttgctcccaacaatataggactgccggggtctggccgcgtcctccctgtgtccccccgtccgattatgtctcggatcgaatccctcacagcgggtgcggatcgacggagccgagagctgggagcaaganccgggaaaaggagaagatgaaggaagccaaggatgcccgctataccaatgggcacctcttcaccaccatttcagtttcaggcatgaccatgtgctatgcctgtaacaagagcatcacagccaaggaagccctcatctgcccaacctgcaatgtgactatccacaaccgctgtacaagacaccctcgccaactgtaccaaggtcaagcagaagcaacagaaagcggcctgctgaagaacaacaccgacttgcagtccgtttctcttcgaagtaagacaaccatccgggagcggccaagctcggccaatctacccctccgacagcttccggcagtacctcctgggctcccgccgtggcagtcctccttgtctttagccaagagtgttcctacacaccaacatttgctgggacatattcaattgatgagtctcccctgtgggctgcgccggatactctcaacagtccacagatcgctcaagatgccggaaccgaccctatcagggcactccctcattgacgaagcacagggtatctacagtgagctgctgagtgacttagacacggatgacaaggacttgccgctcattcttggactggtg

SEQ ID NO: 539768 - DNA, 136 bp, Homo sapiens
actgagaatcctgcactggtagatcgttccccacccagcacagcaactccatactaacaagaaactcagcccacaaggtggcagtctggagggtgtatggccatgcagcttgctgtaagaatgaggaggaaggaga

SEQ ID NO: 539769 - DNA, 778 bp, Homo sapiens
gtcctgagagaccagaactcacaccagaatcgattattcctcaggtgaagcatagactctttcatggtagacagatgtcacgactcagagatagaaatctccatggctatcatcaggtcacgggtcagctcctgttggagtcctgcccaacttatgtggcttccataaaatggtaacagtccaggctccttgcctaattgttagagcattaactccctatttgccagtaagcaaggaggtggatctctgcaaacctacactgtctatgacagctctagttgtacttggtgtgactaatactacctcggagaaggtcaacctgcttctgcgaaggtttggaacgtgtcagcttctataatgacactagaggttcagaatgtccgattctagaccataactgaagggcttaaatggcaacaggatatgacgggaaacaagttgcatcatggagctgacaaagtggtgcatcaccaatggctagcacaatcaaggtatcacactgtccattctctgtgtctgctgggattaagcattttctgtgcctcctttgttcatcttttcacaacagctggctacgagggatcagaaatgagctgtgccatggtgctcattcactgtaaagctcccagttggagctacttggatccccggagggggccgatctcttgttccgagaacagaggggttttagcttatgaccttgggtgggccgccgtcatgcgatctgcttgggggaaggcctggtttctttcgctagccggggggtgtctgcgcactc

SEQ ID NO: 539770 - DNA, 1569 bp, Homo sapiens
  misc_feature (1246)..(1246): n is a, c, g, or t
accccgccccttcgcgcgctctttgtttgtccgcggtctgctctggactctgtgtctgattcttgtgtcttatgtttcattgttatgtctcttagcgtctcatcagaaaaatgaagaaagcaaaggaaagaatgagcgtcgagtgggtgcgtgtgggggagcggggcggccagaagggtgctctcgtgtgagtgtttttgattgttcagatactcctcttgcttcgtgtggttgatgtactcacgacctgtgttggcgatcctccctatcctccctggcgtttgattgggtctcttcctcacgtggggtgagtttgctgcttcttcctaccggggttacgctgttgttgggcctgtggttagatacgtatcgtctctgctcggcgtggttgtgtagtatctgcctctgtggtgggtcgtcgtagtcatagacggtttctctttatagtatagggtcgtggttgtcgccccccccgcttgggtgtggggtggttacggtttgtgctcgcacacgtacacgcacccgggggggggggtggtgtgtgtctgcgcttcccctccttgatgcggggctgggtggttgtcgtgtgttgagagcggcgcccccgcgtgggggggtgtgttttgggtcacggtgacagccgcgagctgctgtcttgctttaaagcgacgcggtgggcgttgagcactcgccctccctgggcgctctggcgggttaatatagatccctgggtgccgagatagtggtctgtgccccgtgtgtttgtcggcccgcccagcactgttggtgcatcctcccgctggtggggggccggcgctgtgtctaagtttgcgctcgtcggcccgccctttcccttgctgtagggccgggtgacatgtgtattccgtttttttaatatggccggggtcctgcttgacttcctatttcgtcgccgcggttctgttcgtacacccctcccttggtatattgtgtccatggctcttcccccggcacctcggttgccaacattcttgttttccggcccctgccgcgtgtttcgactcgtgcgctggtatggtccttgcttggcggtagcggtctgcgcccttcaggagtttcatcgcggggggcgcgtgtgtattctggtattcgctcgtgtcttttcggggcagccacccacctctctccctcacagattgtgttatttctgtcttctttgcgcggggcggtgctgtgttccgatggactcaactctgtgtgttggcgnggagggcgtgctcccccactcactgctcccgacctctcactcgaggcatctcctcggcctcgctactatgccagagtccgcagtgtcttgcgtggtgcagcgcgcacacactctctcggtgtggtatctctatgtgtcccctgcgtggcaatccgcattctttctataagaaggagggcgccctcccacacgagggtatgataaaagcatttccgagacgatctttttatgggtcccagtctacatacgtggtctgtgtctgcaccgaacttatcccacataagaccgtctttttactgtcccatcaatgatacaagaaatct

SEQ ID NO: 539771 - DNA, 465 bp, Homo sapiens
  misc_feature (36)..(36): n is a, c, g, or t
  misc_feature (46)..(46): n is a, c, g, or t
  misc_feature (178)..(178): n is a, c, g, or t
tcgtactctacactcgggacaagtcttgctcctccntgcactctgnttctcctccgaactccctctcaccatcctgcacccttgggtcctaccctgttcaacattgccctctcctgctcacaccctaacccctttcagggccttcccaagcccctgaactgtgcagagagggccaggncgtccacttatcacagggacgagctgcaggagggcagcatcacttataccggtagctgcagttgctccccaggcacaagatggatctcataacctcaaagtcacaaatgcacgcccctcgcgacgctctgcctccttcagggctacacccagtctcccagcatgatcagcccttgtgtgccctcacagggtgggctgcacactgatgtgccgaactcaccacctcctcactcacgcagggtcacacatgcagtcaccccggacacactctcaagtcacatggtgcac

SEQ ID NO: 539772 - DNA, 136 bp, Homo sapiens
ccgagtacacatggcaggaacagatgaggggctgcgaagcccctcaccctgaagaggggagcatcttcccagtccaccatccccatcgtgggcattgttgctggccgggctgtcctagcagttgtggtcatcggag

SEQ ID NO: 539773 - DNA, 101 bp, Homo sapiens
gcggtgttctgaggatccccactgttgtcatcccgagtgttcagcccccccgatcagcgagcaagtatgaacaacagtgcaggtatgaacaacagtggggt

SEQ ID NO: 539774 - DNA, 251 bp, Homo sapiens
gaccagatgtagccaaattacatgtctttgaagaagatgtgaaaatcgccagattattaatcttgaggcatgcaatgaatactttaaacctttgaggttaggggtatggaagagagttaatttgaacaattaatttaaaaatttgtgtgaacaaaggagagatgagagttgaaactctaaaccctcacataaaaaattaaatctctagaaaataaaactctcccttaaacgcgactcacaatagaggtgta

SEQ ID NO: 539775 - DNA, 818 bp, Homo sapiens
  misc_feature (433)..(433): n is a, c, g, or t
ggggtaagactgaggaaccgggctttgctgtagatagaatgctgttagaaggtggggcaattctgactgagtaaagaaggaacagccattctgtttagcacgagaaggggatgtttggtgttttgtgcgttgcaggtgcccttgtaatgtctgttcttagagaaaatcttcaagtggcattgctttgtcttggtgtgtcatgtctcagaataatcttatcccgacgtagggtatctggtggggatttgttcatgtccaggaggaaacagagttactggctgtgagtgtcagatcggttgtaatatattgaagtagtgtgggatcagagcagtttcaggtgttggaggcgttttttcttctttctcaatagtttattattctagcaaaagtattttgatagtattttcagaagaagcttaacaactctcaagtnatatcaatagttcttatctagaacagcgatatcaaagtctagtctgggcactggtgtcactttgggaagctgttttcacaggttttccaatgaaaatggaaaaataagaatgcaaaactaaaattattattagaatgttaatctttactctgatgttatggacttcaagttttcattgtgcaacgtgttcttaaaactaacggcagaggtacgatgtcatgtgcctggaattcggttgtttaaacatctccatttggcagaataaaatttggaccttctgtgcaaggcttcataaatttttttactggccggaaactctggattccatgcctgaggactttgaactaaagaattaggactctctggagaaaacgttcaggggatt

SEQ ID NO: 539776 - DNA, 331 bp, Homo sapiens
tgagtctaaggaaacatcatgccagataatgagtcattttaaggcattttgactcaagttgaggactgtagatagtcactaaagaaggcatatgatcagactttccttttaaatatgtcattttaagtggtatctggatgagttaagcgttgaaaaaactaagttttgatggtggtaccacgacatttaagtgaaaaattgtgttgatgtaaaaaagcgaacgttgcagggtaaatgttgctattgtttgattgggattgtgtatggcacaatacaaattgtaagtaatctgcgaggttattggcatgcgtaacccagctcacaatcgtaa

SEQ ID NO: 539777 - DNA, 598 bp, Homo sapiens
  misc_feature (556)..(556): n is a, c, g, or t
gtatagtctagtgctaggccaactgcagtgctttatatccgaatcaagatatcgttaaggaacaaagcacgtgagtctgcttttaagagaatataacctacaacaacaacagtctatttttttaaagaatcattaagggctaaagtaaatgtcttataaataggtatcttcccagattatggtataatctcctctacctgggagaatctagttggttgagccccagtcgttatgagacggcagcaaaaaccacattaagtcacctgcctcgttgagtcataagggaacacgtggatttgagcccgagccactctgacttagacaagtcacttcatctctcagggtcgcgctttcctcccgtataaaactagggcctgctaaggtccctttcagctcaaaaattctctgaatttcaggcaacagagagcacaggctctgagaaactgagcaaggactaggttttcttgaactctaaccagataatccttggataaggaagaactgggagcataaaaacacgtgaattctgaagaggaacactccacagaatgcccgnattagtgagacatcgtgggtacgagtcgacagagagggacac

SEQ ID NO: 539778 - DNA, 896 bp, Homo sapiens
  misc_feature (3)..(3): n is a, c, g, or t
  misc_feature (5)..(5): n is a, c, g, or t
ctngnatcgaagagtaaagagatgagaaagaggacgagaagacggagtgtgtcatcaagactggtccgctcttacgccccctgctgctggtctcctgtcgtcacccccaattccttggtccttaacctctctgtctcacgtatttacgtcggcccttgtcaatattggcttctgcaacatatagcgctcttagccaacttacattggctggagacactcttattcgcatcttgggtgactagcgactctcaacctgtgggacgtcaccaaccaaggctggtgaagttttctattcagagggtcctctgtatacttgtctcgttaagaaacttttccttacatcgccgcgtaaaaagactcttgcaagctatgttcctccccccaagccttcccgtttcaatattttccggggacgaactcccgcgcccttgtaaactgtggcggccacccttcccaaccgccttttttctggggcgtcactctccttctgagggctccattaaaccaggttaacaagatcacagaggaacaccccccgcgtcatacagccttaacacttagctccaacacccatcaaacccttgattaacccgcccctttgatcccacctggataattgataatataccttccaatattcacccagcactctatctattacattgcagcacgccgagttcatactgggttctacaaataggcacccacttcaactcaatatcttgcgcccctttccccgtgttttttaagaagcaaagacccgtcctacaggtattttattgttttcaccgcaccacaagaaagatgaacataacgtgatacctttgggggaagaaaaaccccggatggaattttctaacctaagagaccaaaaaagggggccgaaccccaaagcg

SEQ ID NO: 539779 - DNA, 305 bp, Homo sapiens
tccttttaaaaattttttcccaaaaccattagggattttaatccggaatccggttcccttaccaaccaccagtttttggatgccagcccccttttatttcctgtaggatggccaataccttaggtggacccagggtttgccttggttccttgcttcgtatggtaattaagtttaaaaccgtttaaattaggggtattttggtagggttttttccttcctcactgcccgtggaattgccttcctatgggatatctcctttcccggaaaatcttttaattaaaaaaggttttaaggaaaaaaaaaaa

SEQ ID NO: 539780 - DNA, 375 bp, Homo sapiens
attttttaaagaaattttattccctgggcccaaagggttgggtaaccccccccctcttctctgctttccccttttgagtgtccacaggaaacagaaaggaatgagtgtgtgacgttctgcgccgccttcctctgggcgagcctccttccggggagaaaatttgggttattttttttccggggaaatttttaatcccggcagaacctcatgtgagatttctttaaaatgggtttaacggttttttccgcctgaaaaaaaagggtttgaaaatgttttcttggagttttggttgggtttaaaccaccaatagggttttatccccccaaaaggaattatattggggattccttgaataaattttttttgaaagttagc

SEQ ID NO: 539781 - DNA, 764 bp, Homo sapiens
  misc_feature (559)..(559): n is a, c, g, or t
  misc_feature (571)..(571): n is a, c, g, or t
  misc_feature (586)..(587): n is a, c, g, or t
  misc_feature (595)..(595): n is a, c, g, or t
  misc_feature (610)..(610): n is a, c, g, or t
  misc_feature (612)..(612): n is a, c, g, or t
  misc_feature (614)..(616): n is a, c, g, or t
  misc_feature (620)..(620): n is a, c, g, or t
  misc_feature (627)..(627): n is a, c, g, or t
  misc_feature (629)..(631): n is a, c, g, or t
ttggacctttgacttggacctggatctggacccagggataagatttggacctcacttgcaaattttggtaatgaaattttcctttgctcctgtagtccttggacctaggcttcagtcatggatttagaccttagacgtgaccatcagaccttagagttgaacctaaattcctggtccccagtcctataactcagaatgattatgcataaccttggacttagaacttagatctggatcttagagctgatacttgacctggtactggatatttaaccttggacttcagacatggatttaatctgggccttgggatgatttaagatctagaagtggacctagaattagaccttggacttatgtgcctgagcctggactttggaagtggactttgggccttgtaactcaaccttgaatatgagcctcaaatgtagactgtgggccaggcacagtggctcacatctgtaatcccagcactttgggtggaaagctgaggcaggtggatcacttgagctcaggaattcaagaccagcctggggaacatggtgaaaacctggctctnccaaaaataaanaaatagccaggcttnntggcacanacctgtagttccagntncnnnggangctgagncnnnaggttcacttgggcccaggaggcagaggttgcagtgagctgagcttgtacagctgcactccagcctggaggacagagtgagactctgtctcaagaaaaaaaaataaaaaataaataaataaataagagaaaat

SEQ ID NO: 539782 - DNA, 955 bp, Homo sapiens
catctctgtaatcccagcgactcaggaggctgaggcaggagaatcacttgaacccgggaggccgatgttgcagtgagtcaagatcataccactccactccagcctgggtgatagaatgagactcagtctcaaaaaaaaaaaaaaaggaaaaaaacaaagactacagcatggggtacagactgggagggataaaaaagactaccctggggtgaggggtgcaccaaaatctcagaaatcaccactgaagaacttttccatgcaaccaaagcagctattggttccccaaacactatgaattaacggtttagagaaaaataggtaagaacagacttagggacacaggacaaaattccactggaaacaggtctggacgtatgcgaatacttacaggaaacttccaataagcttacctttggatttattgaccacacacacacacaggcgttttcttatacccagggtggaccctctcatttccacgaaatttcggggaggggtaaatccagcggggtcctaaccgcccagggttgcgggatccccttcaagggcctccttaggggaaatattacccggcggaattcccggcgtggtcactagctctccggagggacacaaccccttttcttaaacaaccagtgggcctcagaacacaaagtggccttctcaaaatggcggagatacgggcagggtgccacacacgaagcaacggcaccccgcgaataatggggcttaaaatgcagccaaggcggcgggggacacgcaacagaccaggggcaatatgcccggaggcgaaaggtttcggaccatgccccgggtccacagcaagccgggattgggggcgaaaacaccaaggggggggacggacacttggatgagatagcccccaaacgcacgaggcgggtggacacccgcccatggatcacatttgcgcagcccaccacctggatgtgatcaa

SEQ ID NO: 539783 - DNA, 263 bp, Homo sapiens
gtcccagcaactcgggaggctgaggcaggagaatggcgtgaacctgggaggtggagcttgcagtgagccgagatcgcaccactgcactccagcctgggcaacagagcaagactccatctcaaaaaaaaaaaaaaaaattcttattttgggccaggcgcggtggctctcgcctgtaatcccagcactttgggaggctgaaggcgggtggttcacaaggtcaggcgattttaggacccatcctgggctaacacggttgaaacccc

SEQ ID NO: 539784 - DNA, 989 bp, Homo sapiens
gccttctcagaaagacgaaatgtgaatgcagaacgacgcagtacattgtgtatcatgtcaattatatggtgcgtcgaactcttactgcactttttaatacacaatgtgagttaaccaccactgtgtgcgctgcccctaactggggaatacgcccgcttcactatatcgctgttttcgctccctccgccgtcttttttagttgtccgccggccagcctttggattaaacgcttagcaacgtgtgttgcggttatgcgcagcagacttttgtaagcgtgccaaacaactaggatctgttcgccatgagtgctggtagaattttacacaaaaggttccactttgggagtagggtgttaaaacctccaactctgggtcactgcgcaaaagggtggttctttctgaaattcgaaaaaaggggggcaccttttacttcaactgcgcagtgatgcatagtcctttgtaggaagccggtcgtgtcaccctggccccctgggcagagccacgatgtctgtgccgacgcccccgaaggtggttctgaacccggggataccccgtcataagtaccggcagagccaatactggttgcaggtgcgatccaggggcccactacccccggttgcggcgcttcttggaccaacaacctcattttttggaaggggtgttcgctcccgcggggttaaacacatttctaacaggatcagggtcctgtgacaccaccccgctgcgacacggcacctgtcggtacattcaggttgcgcaccatcatcagtcctggagcactcttgtggaaccaccacatagcacaaccccctttgtttgtgcagagagtaatattgtgcttggagaacataaaataagtgaataccctcttgcttggcccccccactgtaggagacaaacaccaggtggtcgttggttattttttttttttttcgcgccccaaaaaaaaaacaccttgtcccacaaaacaaaaaaaaccgaacataaaaa

SEQ ID NO: 539785 - DNA, 171 bp, Homo sapiens
cagacctggcgtctgggatagtgtgctgctttccccttactgtgctacatttctatagttaagctggttttacttgcaatgattcatgtttacgggggaaaatgaaaatctcccttaaaatttgtttcagctcctccggcaaataaaataaatgaagtggcagatgtacac

SEQ ID NO: 539786 - DNA, 222 bp, Homo sapiens
  misc_feature (4)..(4): n is a, c, g, or t
  misc_feature (6)..(7): n is a, c, g, or t
  misc_feature (30)..(30): n is a, c, g, or t
  misc_feature (40)..(40): n is a, c, g, or t
  misc_feature (48)..(48): n is a, c, g, or t
  misc_feature (55)..(55): n is a, c, g, or t
  misc_feature (64)..(67): n is a, c, g, or t
  misc_feature (79)..(79): n is a, c, g, or t
  misc_feature (97)..(97): n is a, c, g, or t
  misc_feature (103)..(103): n is a, c, g, or t
  misc_feature (105)..(105): n is a, c, g, or t
  misc_feature (122)..(122): n is a, c, g, or t
  misc_feature (134)..(134): n is a, c, g, or t
  misc_feature (151)..(151): n is a, c, g, or t
  misc_feature (167)..(167): n is a, c, g, or t
  misc_feature (176)..(176): n is a, c, g, or t
  misc_feature (200)..(200): n is a, c, g, or t
  misc_feature (215)..(215): n is a, c, g, or t
aaancnnatgctgctatacgagagaatccngtctatgaanagaagccngagaaanaagttaaannnnagaggtggaacngtcccgaaatgtcccttnctcagnanaaggatcgggtagctcnaaagaaggcaancttccgcagagctcagnaacgggctgctgaganctaaacccngcgattttctatgattttttcggntatagataataaacntatgaac

SEQ ID NO: 539787 - DNA, 123 bp, Homo sapiens
  misc_feature (71)..(71): n is a, c, g, or t
ggataaaagatttatttttttttctcaggaaaaacagaaagttagggatacacactacattagacaacctnccctgcgttggagtttttcctaacccttcctggcacagctatcaaatgtaca

SEQ ID NO: 539788 - DNA, 525 bp, Homo sapiens
accctccgagccaggtgtgggatatagtctcgtggtgcgccgttttttaagccggtctgaaaagcgcaatattcgggtgggagtgacccgattttccaggtgcgtccgtcacccctttctttgactcggaaagggaactccctgaccccttgcgcttcccaggtgaggcaatgcctcgccctgcttcggctcgcgcacggtgcgcgcacccactggcctgcgcccactgtctggcactccctagtgagatgaacccggtacctcagatggaaattgcagaaatcaccccttcttctgcgtcgctcacgctgggagctgtagaaccagaagctgttcctattcggccatcttggctcctccagaataaacctattttttggaggaaatataaccttttgaaaacaatgatggacaatttcttcggaaggatttaaacccaaagtgggcattaatatggcagggagaattcctgacactgcaagcatgtttctattttacctcaagactccagcttccttgcattca

SEQ ID NO: 539789 - DNA, 506 bp, Homo sapiens
gcatcaacatcagcaaaaaggtcatctacaccaaaaccacatctacaggtcaccaacatcaaagaccaaagatagataaaaccacaaagatggggagaaaccagagcagaaaagctgaaaattctaaaaatgagagcacctcttctcctccaaagggtcacagctcctcaccagcaacggaacaaagtgggacggagaatgactttgacgagttgacagaagtaggcttcagaaggtcggtaacaacaaacttctacgagctgaaggaggatgttcaaactcatcgcaaggaagctaaaaaccttgaaaaaagattagacaaatggctaactagaataaacagtgtagagaagaccttaagtgacatgatggagctgaaaaccatggcacgagaacttcgtgacacatgctcaagcttcaagagccgattcaatcaagtggaagaaagggtatcagtgattgaagatccaatttattgagttaagccgggaagacaaggttagaga

SEQ ID NO: 539790 - DNA, 156 bp, Homo sapiens
gcatttactccatggcatcggcatcggactacatgcaggtgggtggatgggcgtatgaatgccaaatgctgggacttcatgcctgcttccactctcccccgatcccagcttgggccatcatttgagatattctcatcacctcactttttctggctt

SEQ ID NO: 539791 - DNA, 228 bp, Homo sapiens
  misc_feature (39)..(39): n is a, c, g, or t
gcttattcagggaaggggaaaaaaaaggaatggggaggnaatatttaatgggggcatagttttagtttggaatgatgaaaagtttctaaaaaaggagggggggggcttttgccaaaccccgtgaatggtcttaatgcccctgaactggccccttaaaaatgggggggggggcaagtttttcgttatgtattttttcccctaataaaaaaattttggagggcccgttta

SEQ ID NO: 539792 - DNA, 301 bp, Homo sapiens
gatcccttcggcacgtatatcaaaagtgttatggaaatccccagaagaggacaatggaaaggtccggtggatttgctgacgtggggacgagggtatgcttgtgtttttacaggagatggacaaaccgtgtgggtgccctccaggtgtgtgtgaccatggaacgggagaccggagggatccatggtattcaaccgtgggcctgttacctccagtacgagccatgagccagcggaatctgaatgcaaagacagaacaagggccgaccggagtcacaatgacatccaaccccataacatgggga

SEQ ID NO: 539793 - DNA, 688 bp, Homo sapiens
aaactcactgaaagcatgtaccatgtccaggttggataatggcaaaaaggctatgttaaataaactctgagtgagtccctaaaatactatcatgggctaatctaagaaggagacgaatatatatttcccgctaaaattatagcttagaatggtcaaatgcttatagaagacaagttgatgggagtatatagattataacatataagaggattagtagaaactttaataataaaaatgtgaaccatcattttgttaacatgaaagatacatagaataattacaaatgcatcccagtggttaagaataagaaatgttaggatataatgtacaaatgtgtgtgaactgaaagtgtgtgtagataggacagtaagagaacaatgaactatatgagtagaaaaagcaaggaagagagaagaagcaaagcaaagaaaaagaacagagacaacaacagaacaaaagaaagaaaacagcgagagaaaaggacagacgaagaggaggggaaagagaccaaacaaagacgggggacgagacgcagacgagatcacggacgagaacgcaaggcggagcggcaacaaagggatcgaagacgcaagggcggaaacagcgagaagagaagacagagcgggcgagactctcggaggagggagagaggagacggcgaacaggcaaacagaaggtggaggcacgc

SEQ ID NO: 539794 - DNA, 126 bp, Homo sapiens
tgagagtctgtggcctgctgtgctggatgaccgaggcgcgcatggcacagctgcagtcctttggttcctatgcaggcagattgtccaggggaggagtgacacaacgtcaaccgtgaggcagctgta

SEQ ID NO: 539795 - DNA, 350 bp, Homo sapiens
agtggtacggggtaacctgtggcgggcgccggtcgagctcgccgggtttgcctttgaactggtactcgcgccaggtggcggcctcgttgggaaccggggcgtcggtgccttcgatcatgagctcgtcgcgttcgcgggtcacggatccgaaagcgccgtacgtgttcacgaggtggaggggatcgaagctcgcgttcatcatctgcgagccgctcagaagattgagcgtgggcttgatgctgagtatcgccaccacggcggccagaccgaagaagatcacggagggccaggccaagctcgcggccgccgcggggaggatcgcgccggcggtgccgaggaacatggcgagg

SEQ ID NO: 539796 - DNA, 418 bp, Homo sapiens
atttcattttatattaccagtacaagtggcatttgttagtaccacattctttttgctgcttttattttatttttctatttgcttacatgtttcaactagagtgagcataccttttcactgaacttgttgcagtttctgcttgatctcttcttaaatatttatataaagccttagggtaattccaagttctgaagattcaagttgtcaatacatagtttcacattgttaattagcatttctccagtttctgtcatacttgaagcattaagcaagtaaataataatggtgaataagatttttttctaaaagaagctttccagttgggcctggtgactcatgcctgtaatccaagcactttgggaggctgaggcaggcggatcacttgaggtcaggagttcaagaccagcctagccaacat

SEQ ID NO: 539797 - DNA, 297 bp, Homo sapiens
atattatatatgcatggcatcctcgggggttcgcagtatgacgctgaagtgatgaaatgatgtcctctggccgactgctaatacaaagtgctagaaaatacgaatcaggagctgaagactctgattagtcagtgtcagacaagacagatgcagaatattaatcccctgactatgtgcctgaatggagttatagatgctgcagttactggtggcgtttccaggtatcaagaggcattctttgtcaaaggaatatattcttaatttcttcccctgaaggattggggaagaaaactttga

SEQ ID NO: 539798 - DNA, 410 bp, Homo sapiens
  misc_feature (45)..(45): n is a, c, g, or t
cctgtattacttatgaactatttccagttcttctatatctggctngttctccagcgaaagatactaaagttgctcttggtcttcttttcagaggtgcggtttgatgattacgcacaaagagacaaagataatgagtgggggtagacctgctagctaaactttttcttttagagaagcacctaaggtgatctgtcacatggatgactctacccttcttgtgacggtctgatatgaaagcagattggactacatactgcacaaaggcattttaaacattgcaggtgtgaatgccccaaataacaatactttgaacttttacagaacctttcatccagtgataccaaaacaattcagttaataaaaggcctaggaagctggggacaaaacatccaattgatctatatatggaa

SEQ ID NO: 539799 - DNA, 634 bp, Homo sapiens
gtgatgcaggtctttctgagctcaaggcgtgaaagatgaatacaataacaaccatgaacccacctcacggtaagcttttttctgcactttgaacagaatgtcattgcagttggaggtgttttgtccatggtaaacagtttattaatatagaaggatgtattgggagaaggaactggatatctctcctgcagcccagcacagagatacccatggatcgggcctgagtgggcgagtaaatgcccccattgctcatgggcctgcggagttgtgtgacctgtagatatggcagccatcgcgagtttaaggatactgggcatgagcattgcttcattgggagttcattctgattttacacgtcagctattagtctttaccagttctctgtcgtgtaaagtcgctagccatctatatataaaaacgagtttcgctacgcagcgcgattgtatgtcttagctctcgaggctacgcttctatttccacagtaagtgtcgtgtgctacagacgtagtacttttcccaagataaccagcgaagcgattcagtcggtcagcatgagcgatgtgtgcagcaccttggcggaattagacagttcttgacgcttagccaccaagcactcaagacatggcgtactaaac

SEQ ID NO: 539800 - DNA, 138 bp, Homo sapiens
tctggtctagccgttgtgcgtcaaaaccaacaccaagcgagagcgtatagtgcagcgcagtttccacccagctccatcctctcgccagctctgcggatggtgttacatcacgatgagtgccgcacgtgtggtctgggg

SEQ ID NO: 539801 - DNA, 582 bp, Homo sapiens
  misc_feature (439)..(439): n is a, c, g, or t
  misc_feature (480)..(480): n is a, c, g, or t
  misc_feature (498)..(498): n is a, c, g, or t
  misc_feature (509)..(509): n is a, c, g, or t
  misc_feature (521)..(521): n is a, c, g, or t
  misc_feature (567)..(567): n is a, c, g, or t
atgtgataagatgcttgaacagctcgacatgcgtcgggatgtccaggaaatttttcgcatgaccccccacgagaagcaggtcatgatgttcagtgctaccttgagcaaagagatccgtccagtctgccgcaagttcatgcaagatgtaaatacccttctaccttctctccctccactccccgcccgctgcctcctccccttcctcgccctcttcctcagactcccttgtcattcaagtgccaagaaggcggcttgtgcccaactgggagtaatgactccttgaagagacatacagaagcagagacagctagtgttagggcctgcgcgggtgccagggaaactccggaagacttggtcgggttaatgtgaaaagcgggtagtggtcgacttttttcataaaatcacaacatttttgaaccctcttcttcctttgggggangggcagggatttttttgcctaacaaccacccaatccatcgncttttaaatggccccttnaagccacgccnccttcaaggggnattcgagcggaccaggtggagcccttttggttacccaaacttctantttcccgggggcggg

SEQ ID NO: 539802 - DNA, 258 bp, Homo sapiens
tgagtccatataaataaagtcagatatggaccagaggtaaggcatatatgttagagagatacatatatatttaatagctggtaaacttatcaagaaaaacaagaaagtgagtaatatataatacaggaaccatagttaactttgagaggaaaggtaaaggatatcatctgagatagacatgtggaacttgaaaggtactaagaatgatctatttcttaagctgggtggtggatacatggtcttttaattgctttatgc

SEQ ID NO: 539803 - DNA, 777 bp, Homo sapiens
  misc_feature (725)..(725): n is a, c, g, or t
ctaacaggcgccctctcagccctcctaatgacctccgggctagccatgtgatttcacttccactccataacgctcctcatactaggcctactaaccaacacactaaccatataccaatgatggcgcgatgtaacacgagaaagcacataccaagggccaccacgagaccacctgtccaaaaaggccttcgatacgggataatcctattatagttacctcagaagtatctttcttcgcagggatgttgttctgagccttttaccagtccgagccttagtccctctgacccgcccgaattaggagggcacaggggcccaacaggcggtcatcggccgctagatcccctagaagtcccctaacatcctaaatgacgatctcgtattactcgcactcaaggagatatcagaatcaccatgagcgcaccaagtaggctaatagaaaatcgaacccgaaaccaaataattgcaggcacgggtcattacaattttggactgggtctctattgtaccctcctatcaagccgtcagagtacttcgagtactcccttcagccatttccgacggcatcgtacggctcagacattgatatgtagccacaggctgccacgagacttacacgtcattagtggtcaagtttcctcactatctgcttcatccgcaactaatatttcactttacatccaaacatcagtttggcttcgaagccgccgcctgatactgacatgngcagatgtggaagactatttctgtatgtctccatctatgatgagggtcttaa

SEQ ID NO: 539804 - DNA, 122 bp, Homo sapiens
tctttctttactctgttgagctaggtaaatttgggcaaaggtatatctctccatgactgtttactcatctataaaataaaaatgttagccgggcgcggtggctcacgcctgtaatcccagca

SEQ ID NO: 539805 - DNA, 511 bp, Homo sapiens
tgtttattgatgcacaggccggcacaaagtcgctcctggtggcaggtttagaggtgccgagtgtaaacttcccaaggtgctgagtgcttcgtcttcatccgccgccccagcgcccagacccatgcctggttcaggatgtgctcagtaatattaccaatgccctttaagccagctgagcctgtttattcatctgtgatggggtggagaggggtcaaaagccttccctgggaagccacaaggagtagcgacaacgcatgtcaagcttgtgtgcacccgagctgtagatgcaaaggaaatggtgcctgctttcgccagccatgtggcctcacttcagtgtgcctcagttttcccatctgtagacagggttctcaaaagacggccagtgaggtgcgtagcatagttgctggcccctcgtgagtgctggacacttggtagccgttgcttttgttgcagctccttgtaaatgcctcttgtcaattacgattatttgggtggcatcgataaacagcgg

SEQ ID NO: 539806 - DNA, 822 bp, Homo sapiens
gcttgctagtaaggatcatattactggttggcatgtatatcttggttttggcttggtttggacgacggtgagagaaccaagtatacagtactttgtagaaccttggtaattaactcatattagtaggcaatgcaatcgtgggtgtatggcaggagactgcaagatgctgaatagactggcagtcgaggccctatactggaatatgagccgtgaaaatgtggcaaacgtgtatcgacagcgtacagagacagagtgtgcggcggcttaaagctaaagacatagtttcctggtgatacttcgtaggaaactgctagttggtgacaaagcttcctgctgatatcaggttaagttccagtcgaagcctcgtaccagcactgaaggcgttgagcagtcagattcgtcacagcggtgaatcatgctcctcgtgtcatcgaaagcagcactgatcccgttgccctgtacccgacgatgctgttcaagccaaggagtaaaaagaacactgcttgtgctgctcggtagcaaaaggattgcgtgcttgggacaaacgcttacttggggaacgtggctgggtatgactaacgtgggaagtttgatacagcgaaacatcgtgcaacaggcattcctggcgcagtggacaatttgggtgtgccgacagctggacacaagggcagaagagacaatcccgctttcaggctaacccacgcgtaggcatgcaacgtcctgcgctgacacaggctgtttccaccacggttcatcatcccttaattttgcgatgcaggccttgggattcatccactactggggcactccaaatgcccccgc

SEQ ID NO: 539807 - DNA, 367 bp, Homo sapiens
  misc_feature (49)..(49): n is a, c, g, or t
  misc_feature (119)..(119): n is a, c, g, or t
  misc_feature (159)..(160): n is a, c, g, or t
  misc_feature (198)..(199): n is a, c, g, or t
  misc_feature (211)..(211): n is a, c, g, or t
  misc_feature (242)..(242): n is a, c, g, or t
  misc_feature (262)..(262): n is a, c, g, or t
  misc_feature (305)..(306): n is a, c, g, or t
  misc_feature (334)..(334): n is a, c, g, or t
  misc_feature (338)..(338): n is a, c, g, or t
  misc_feature (361)..(361): n is a, c, g, or t
  misc_feature (367)..(367): n is a, c, g, or t
cggcacgagagccttaattagggacctgtgtgaatgggtccacgagggntcagatgtgtcttacttttaaccagtgaaattgacctgtccgtgaagaggcgggcatgacacagcaagangagaagaccctatggagctttaatttattaatgcaaacanngcctaacaaacccacaggtcctaaactaccaaacctgnnttactaagactntaccaggcgcgaactactatactcaattganccaataacttgagcaacggnacaaggtaccctatggataacagcgcaatcctatatctagagnncatatcaacaataggggttacgaactcnatgntggatcaggacattcctggtgcngcgctn

SEQ ID NO: 539808 - DNA, 692 bp, Homo sapiens
agtctgtctgtgtatgtgcagaacacagaccctcctttctccgtttgtggggaatacttccctcgggtgaaactgaagttaattttttttttttccaaacacaagcagagtctccttggaggtgacatggatatgggcaacccaggaaccctttcgcccaccaaacctggttcccagtactatcagtattctagcattaatcccggaagaaggctctttacagaaagggcattggggtgccacacagagaaggttagaaaggtccctcaagtttggccatttagagtataggctctttgagcatgcactgccgtctacaatgggcactcgccgggatacctttcctccaaaccggcacccagcactttccatagctccttcttcatgcaagaggcccatcacagcagtgcccttaggagctcctccagtgggatgaatcaccctggttatgcagaaatgttgggcaactcttctaatattcacagtccagcagctactgtagcctgcatccacatgaacgtttgagctatccatcacacttctgagcagacatcaattcaggctttctccgatggccactttccatcgaagggtaccaaccattacagcacctttgctggaccgctcttgcaatgggccagcatattatgcaaatagaggaagcgacaacccggaattcccgggtctttggg

SEQ ID NO: 539809 - DNA, 570 bp, Homo sapiens
tctagaggatctcgtaagtcaccgcgtcacctaccgtcctacagctgcagcgcgaagttgcgcagttggatgccagctctggttctggggaccatgaaccgccctgtcattcccatgcggcggatatagggatctacacgtgaacgatgttgggcctcatacagtgccagggctgtagtgggggcgccgcgatttctatccagtgcgtcggccagcgtctccgcgcccagcatcgccaggctagacccgttgccgaatagcgaagcgcatgacgcggcatcgcccaggagtgcgactcttcggtctcgccaacggggcaggctcacgcgacatactgcgtcgaagtagacatcctcggtatctgcataagctttgagcagctcctcggttctccaccgtccaccggcatagcagtcctgcagcagcatgcgctgcgcatcgacatcggtgtgtcctacccttgctccactgcggaacaggaacatcgctaatgcagaccctagggcagggtgtacgacgagtgcacgatctggctcgttatagatgagtacgcgggtgaccttcgggtac

SEQ ID NO: 539810 - DNA, 214 bp, Homo sapiens
gaggatcccaagctccaacaagatatcacagttgtatgtctaccaacatagatacatttttgtctatatgcaacctttttcatgtctgctttctttcactcagcttcatgtctgagagattatgcatgttctgcatcataagtagtttgttaactgtggaaccagtttccattgtacgagtataccagtttatgcatctcttgttggggagctt

SEQ ID NO: 539811 - DNA, 275 bp, Homo sapiens
ttactttcccctgaaagtaactatgtccaggaatccaagacaaagcagaaacaacagtggtagcaatcagtgctatagttacatttactgtacagcaggggtcaaggaaagctttccagaggagtgaaggtgcagcagctgagcctgagacacatggtttgaacacagcaaccagttaatgccaggggtggtaggcagtagttataaacagaaacaaaccacggaatttgctcgggaacaagtagatcctaatagtaacctatttaactagcatt

SEQ ID NO: 539812 - DNA, 761 bp, Homo sapiens
catacggaactgtaaggtccattaaacctctttcttttgtaaattgcccagtcttgggtatgtctttatcagcagcatgaaaatggactaatacagtaaattggtaccaggagtggggcgttgctgaaaagatacccgaaaatgtggaagctactttggaactgggtaacaggcagaggttggaacagtttggagggctcagaagaagacaggaaaatgtgggaaatttagaacttcctagagacttgttgaatggctttgactaaaatgctgatagtgatatgaacaataaggtccaggctgatgtgttctcaaatggagatgaggaacttgttgagaactgaagtaaaggtgactcttgttatgttaaagagactggcggcattttgcccctgccttagagatttgtgaaactttgaacttgagagagatgatttagggtatctggtggaagaaatttctaagcagcaaagcattcaacaggtgacttgggtgctgttaaaggcattcagtttcaaaagggaaacactataacaaaatttgaggggtgcatttaaagtttggaaaattttgcagcctgacaatgcaatagaaaagaaaatcccattttctgaggtgacttgggtgctgttaaaggcattcagtttccaaaagggaaatactgtaaaccaaatttgaggagtgcatttaaagtttggcaaattgcacccggcatgccatgaaaagaaattcagggccagccgggaaccccactgttatcc

SEQ ID NO: 539813 - DNA, 1062 bp, Homo sapiens
ggttccgtggcgctgcgggctgcgggagggtcctggcctgggctgtctctgcgagcctggagtttgcatgaaactttacacctgcgctccggggagactttcggtccggctcccaccgtgcgcctcgccgcctcgctgacctgtgggctccgtccaacccggccgacatggactgtgctccccatgtgcagcatcttccagtgagctccagatactgtgcacgaggacctggctacttctcgtgcgctgccgtctctggatggatgtacttggcaacagacctgcctagagctggaacgttacctccagagcgagcctgctatgttcagcctcagaaatcaaatttgacagccagtgaagatcttgtgggaccaaaatcattcttggctcgggagaaaaagtgaggaatccgaactgaatgatatcttccagtcctccagaggacactctcattcagtccgagctttttgttacaacttagatgaccaacagcctgaactacagatgtcagcagctgaatcctctgaccatgcctccgaggaactttctcctcactggcaagtttacctccgacccattgtgtgaagttttggtacagcatcgtgtgaacatttggagctcctctgtacctcccaatgcctccatacttctcctggaacttgagcattggaaccttctcaattgtgtgtgtttgctgtgccgattgagccttgcctcgccaggaacggtgcgccgcgtgccttctttcggaactccatgttgatatgtgacatgggtgattccatcccccgactgagtgatgatgtcttccctgtgtgcactttacgtgctgcgggaacgttaccccagagccccactttaatgcaatcatcgtgactaccaggggaaaggccttaccggtctcttgaggtttagtgcgttgcagagggtgactacctgagaccaatagacgtgccgctaattacccgtgagtttttcggttacacagggcctagataatggatgggcatgctgtacaagtcgagaaggcggagtgtccccacactccccacgaaactcgaa

SEQ ID NO: 539814 - DNA, 126 bp, Homo sapiens
cgtaccagtccttcgatcacctcagtcgctctaagtgagcgctgggctccgagaacggggctgttgcctgctcccggacgaggggcatgcccagtgaagtgaaagctggggctcagggcccgagag

SEQ ID NO: 539815 - DNA, 345 bp, Homo sapiens
gctatccatgtaaccgagtgataactgattctgtggacctgatatccccgtttggtaagtccttctgctgagctgtgtctctcggctctcatggcctaaccattattcaggagcatcagaaagccagaccaggagtgacttcctgctggatccaagcaggagttatagttaccctagacaaaagacgcaggcacaccaaagagaacttcccagcaccttttgattttgatggctgtagctctggcagcccactgccagtactcagattcagtagcgcgtctttgttgtccaagtagcagcatcttttgggagacagatgtaatctttcagctggttacaagcagg

SEQ ID NO: 539816 - DNA, 177 bp, Homo sapiens
ggatcactgttccaggagagtgctgcaggcaggtccaggctgggaggtgggcagtgccctggcccaaaagtgccagggaggtttgtatggttggcggcagcaggtgagaaatctcctctggtgagatccagatctgcctgtttccggtgcctccagaaggtgaccgatgagcgcgag

SEQ ID NO: 539817 - DNA, 308 bp, Homo sapiens
cgggggtcccatgatgatgttccagtctcaggtctcaactaggacctcatacctaacagtgtttaaaagagtattccgggcccggcacggttggctcacaccacttggggaggcagaggagggcggatcactcgaggccaggagttcaagaccagccgggtcaacacggtgaaacctcgtctctactaaaaatcaaaaaattagccaagcatgggggggggcgccggtaatcccagcggctggggaggctgaggcagcagaatcacttgaactggggaggaggaagttgcagtgagccaaggtcgagc

SEQ ID NO: 539818 - DNA, 105 bp, Homo sapiens
agcaggacccgagggctctcggtctgaatctctccattttgttgggagaagactaaccatctctttactaagttctagctcaacttctatttcctgcgcgacact

SEQ ID NO: 539819 - DNA, 130 bp, Homo sapiens
tggctggaagatcctgcgggtggggcttggggctcacacactgtagcacttactggtaggacccagcatcttgggggggtgccgtgagtggcaggggacaggagtccactttgtttcgtgggaggtctaa

SEQ ID NO: 539820 - DNA, 756 bp, Homo sapiens
  misc_feature (105)..(105): n is a, c, g, or t
ggtgaccaccatttccgacccgggcaagatggcagcggcgctgcgcgtgcgtgtagagtgtcgggacgcgggcctgcaggcgccatggtcttcctcaccggcagntctggctgggaatcgggtcaccggaccgtacttgcggatccaggaggtgctgaagcacggccaggcactttccggggggaaagggaaaaatcggctgctacgaggtgggcgggtcagaccccgtgatgcgagccttgtgtggaatgcaacccaaagccggatacctgaaagaaaaaaaggacctatggaggaccccttcctgattacttcgaataacacgtgctacgccgagggaacgtggccctgaagtatccacgcgctcatgggggaatttgaggtcaggtgccagggtgaggctcaaacaggaaacgtccctaaggggggatctgcgccaatctacgagccaaaaagactttccaaaatcttgtgcgctgccttgtgcccagttggaggcgacacgaagggatttgcttgctgcctgtgggggggatgggaaggaacctgaaggccattttttccagaggtggtggcagtacccactgaggactggtggttgtatggattaggaccagagaccagggtaattgggagttggtggataatactttgtgttttatctacaacccaataacagacttgagggatggcctgtctcccgtgggacgaggcttaaagatgatggccatgttgggtgttgatgaactcaacctc

SEQ ID NO: 539821 - DNA, 751 bp, Homo sapiens
tggaaaaagtcatggaggccagtggggtggggttgaaaccagcttgggggggttcgatcccttcctttttggtctaaattttatgtatacgggtttcttcgaatgtgtggtggtaggggtggggggcactccgatatagtctccacctccgagggtttagtgggagggttcttctacttatataggatttttcgctatcgaaagcgagaggcttctcaaactcagtaaaaattattaatatacacgtgcgtgctagagaaaactgaatgagcctacagatgagtaggatgttacagtggtgggtgtatgcatcggggtagctccgagtaacgtcggggcataccggataggccgagaaaagtgtggtgggaagaaagttagattaacgccgagtgaaatatgatagtgaacgggcatttgggcgataggttgggtctagggtgtagcctgagaactaggggaaatcagctgaatgaagcctcctatgagggcaaatacagctcctatggataggacataggggaagggggctacaacgtagctacgtgctcgtgtaagaacgaggtcatagagatgagttggataaatacaagtgccagcaaggcccctcttacggtgcacacgacagagaaacctagggccagagacatggagcagaatcattcaatatggctcccgggaggtgtggaacacagcaaaatactcggacgcggggggaaagagagaataagacgggagggaaaaaccccga

SEQ ID NO: 539822 - DNA, 429 bp, Homo sapiens
  misc_feature (20)..(20): n is a, c, g, or t
  misc_feature (89)..(89): n is a, c, g, or t
  misc_feature (121)..(121): n is a, c, g, or t
  misc_feature (150)..(150): n is a, c, g, or t
acttctgaagccagtttgcnttaaaacttttgttcaaccattcagaagaatttatattgggagagaaaatccctaacaaaatgttaatnaaatgtggaaaaacctctgttcagaaactgcnaggttaagaaaccagaggccaggcgcggntgctcacgcctgtaatcccaacactttgggaggccaaggagggtggatcacctgaggtcgggagttcaaggacagcctgaccaatatggagaaacctcgtctgtactaaaaatacaaaaattagcaggacatggtggtgcatggctgtaatcccagctactcaggaggctgagacaggagaatggcttgaacccaggaggtggaggttgcggtgagctgagatcgtgccattgcactccagcctgggtaacaagagtgaaactctgtctcaaaacaaga

SEQ ID NO: 539823 - DNA, 313 bp, Homo sapiens
ctacttataataattaatattcttgatttatattgtaaatacatcttaaacaaatatgggttactcgaattaaacaaaatggtcacatgataactagcattttagtacagataattaaaatgtatttatattatatagaaatctacacaatggaagatactactaaaatgttgctctacagcacatcaccctagacaaaatagaattctataattctctttaaaaaaaaaaatcactgagaattagatgatgactgtgaactaggttctcccattacaatactacttctgtcattcaaagttctgaccacggg

SEQ ID NO: 539824 - DNA, 1354 bp, Homo sapiens
gaccctgaactttttgaaatctgtagatctctagcaatagttcgagtatggtgccatggtctaagcccactagctgtagtcagaggatgctatcatctaggacataatctctacgctgtccgcgcgctctgtcttttgtgtcgtttccgttcgtatatagacgatcaaatatgtatgctgggagagcggttgtcatgccacaaccctacgatgtgcagccaaggacatgtgcatgtcttggactcctcgcgttaaggattcatccatagtacttgccccttgaaaaatctatatcaccagtcattaattcgaaaacttaattgaatacacgcataaagttatcgctggactcgatgccactgactacgttaagatcagacagtgagagtgagagcacagcgtggtgctacagcaagctgcgtttcgttccaaaccaattatcgagtcccactctaaagaatgctcatagtcaatgttataacgaatgctgggctattaattcgtgcttaaatccaaatggccccttgcgttcaaacattctgagtccagtatagaaggttatagcggtatagatcttgttttaaggttgagactctaaaggtgtctgtggtgttcgccgtatttgtggatgtccagactggatggtggatgaattcgtctacaagctaaattttaggaggtgtagtggacaatgattgacgcgtgacttggtttctaacctgtgtaaatggtacaacggtagaatctcttgaaagaaaattattgggatcagcgagcaaaagttattttgggaagtgaacaccgcactcctagttcctccttgtcttaatcgacaaattaagcaagaacaaatatcagatagaggcgggccatttggactcgctgtctagttggttggcccccctcgataacaacttcgccttggctctataaccaattcaaagcgaatgggccttgaaagaggacagaatgcaagaaaatttggtcgtttggaaagggccaagagggaaggtggccattgaaagtggattagcgccacgcgtgtggacgcccccagatggtaggtcctggatgccccaaaccaggaagcaaacgtcctctaggtgtgcctatgagtgattgaccacgagacgtttgaaacactttttggcccgtccaacgaaaaaactccattctagccttctagctgacaggcctcagagtagacagtttatactgaatacgagtgacacacacattattttgagaagctaccggacacgctccattaaagaagggtgatactttatacaaatacagggggagtgtagcacacctttgtggtagcgcaacatagttaaagaaaagaagcctg

SEQ ID NO: 539825 - DNA, 1215 bp, Homo sapiens
tgtgcggcaccaggcgtcccttcagggtgctcgtgtggtgtccttgtcatgtgtcgtcgttctttctccgtgttggtgtcacctggtgcatcgcgcagcgtccctctagtgtggggcgttccctgtccctcctcgcagcatttatatcggtcgcaccactctggtcatgtgctgtcgcgtgtgtggcatctgttgcttcgttaccccgaccggggggtttgtctgcggggcacgttccatgtctcagtgctttttccaacgcgtgttcccacgggtgccctgggccccctacggggatcctgttttggggaggatcggtcccgtggctcgccccattggcgtcgcgtgttgagtgttggttggtgacgggtgccgaatatggtggttggacacagggggcgctcctgggtggtgaagacacgttgttggaaaccccttggttgtaccggtggtgttgccgttgatctgccggtcatacacaacttcccaggagtaccgcttgcgtcactctggggccctggtgctgtccaacgccgctcccccacgtgtgctctgcctgctgggctcttaactgttgctcgaagactgtgacatcagaacggtgactcccactcctgaatcaagagttctctccagcctcacagagtgctgcctgattggcacctgcctagctcttgggcctgacctgccagtcctgctggcctgctcgttacttgcccccagccctggcgtttggcccctggaacctttgccttgcgtgtaccacaccctgcctgctttggacgccccttgtggacgacggctggcgtggggacgaagtgcctcccccgtgaggatcccctgtcaccctggggctgtgtggattggccagaatcctgggcccccagagacctttgcccacacacactccttccccttgtccctggggcactccccctggattgtgccattatgtccacgagctgtcccttttctgcacggcggactgggccactgggtcctcggcccatctgatccatccctcctctccatgacacagtgctgatttgggcaggacgtcaccatgcaatgggtgacatcgaccaccaccgtatccaaggccacccccacgctgctgcccctctgcctgcctgtacagaagcaactgaatctttttcatattgtaatacatccatgggagttctttaatgaatacataataacaatgaaagcgac

SEQ ID NO: 539826 - DNA, 129 bp, Homo sapiens
taattgttcaaatttttattttaatggacagtatgagaaatggacttttttaaatcaactgatttgtatgggaaatggcacgggaaataaattagggccatggtaaagcggagggtcagctaaatatcc

SEQ ID NO: 539827 - DNA, 198 bp, Homo sapiens
cctaccagcggtgatggtctcgatctcctgacctcgtgatctgcctcttggctcccgggtgctgcgattacagacgtgagccatcacgcctggtaaagcagagaatttctataaacctgggaggtggagtgttgcagtgagccgagatcgtgccactgctctccaagcctgggcaacattgcaacaacggtctcctca

SEQ ID NO: 539828 - DNA, 641 bp, Homo sapiens
atcgagtcggtaccgattacgctcctaatggacatctggcccaatgccctagcgtattgtaaatgctcagttgagccaacctctcagggatgagttccccacccacccatgatagtcagaaccaggtagcccctgtcaaggctccacccagtgccctacagaaacagaacatgagctttaatttcagcgagaggctgagaaggcaggcctctggggctggcagggagggtgtcagccagaggctccgtgtctagcgggcagcagaggaggtgctggcaaggacagcaagctggctggaagccctgactgcaggaaacagacctcaagcagcactccctgggggcaggaccctgccattctgtgctgtttgggggcagtttctaaagccttaagaaaatagcttcctgtctcaggctttctaggaagtcacaaactaggtgtctgggaggcagttttaggtaagtgcacagcccaagggagagctgacccctgtaccagacagagaccctgacagaagggacagcccagggccaggcacaaagggctccagctcaatcgaagttggtcaaacagggaccaaggagacagttttcttcaaggacaggaagaaatctgttgctatcctgtgtaccccgaattca

SEQ ID NO: 539829 - DNA, 616 bp, Homo sapiens
atacccaaaagccgagaagaactgtaatagtaaagttataaaaataaagaattttttcaaggttaaaaagctgaaaaagaaataattttatataagaaagaattttatatggtaaatttagtcctaaaataaaataactggttgtttaacaaggagggatgttcaggacaaaccagaaagtccaagcatgtcatgaacattggtgtaagtcatgataagatttatatatatatatatacacagcagcacacacacaccccaaaagcttttatataatcaagttgtcatattattattaagtcgggtttgcttagggaagaaagagctaatttttaaaaaatcaaggttattacatccatgtatcttcctgtgtatgctttaaagtccttgtaaacattgagttacagggctttaactcctgtgtctgaaaaatcacaaacactgtatgacaatcaaagcctcatcttaaggccccgtagaagatgccaatcaaaataaagtgcattcctgaggcactaggcaagaaattaaagctattcagatcctcaaggcccagggactattgcggaagaggtgggcgcgtaagattgtaagggccgattttgaaggaatccag

SEQ ID NO: 539830 - DNA, 163 bp, Homo sapiens
aagtaaatagaggtaccctgaaaatagtgaagccaggtacttctcttataacagtagagaattaaagcggcgtggagagagacagctcacatatgactttctattggctgtgtgataggacccaggtcacatgaggtaggggcttgtcaacgataggcccact

SEQ ID NO: 539831 - DNA, 212 bp, Homo sapiens
gtttccccgggacccatgtaccgatatgatatagtatactgatggtgaaatacacggatgtcacaaatactggtcgactgcgacaaatagctgtttattagctttttaataaagcaaaactttatagtgaaataaactcagaaatagctttttattttttcatatatatttatttatttttgagatggggtcttactctgtatgggggatct

SEQ ID NO: 539832 - DNA, 364 bp, Homo sapiens
gagaggttgctgacttttagacagaatggactctggcctcctcagcctttgacgtctcgcctggaagagtgtctcactctgggagcggtgctggttggttggaaggtgttctttctgccctgtccccctcccaaattcttctctcgtgtctgtctgctctcctaatcaggctcgctcagctggccttcagaaggtagcaagtgtctcaggggccgctgggcgtcttcctgctggccctgccctgggactggagctcagggggttggcctgtaagcaagagcacctttctgggtcattccaagtactgaggtccctgggccctctcctcccgtcccattttgggggcaaggagcctgtgggcagc

SEQ ID NO: 539833 - DNA, 978 bp, Homo sapiens
gcggtcaacatgcccggctgcgtggaccacgttgcccgtcgtgcaatgctgccgcccaagtgtcatgagaccgctgatatcatcgacgaggaaggttcttatgtccttggtgatagaaatgggatttggaccgcatcacggacggctgcgccgaagctctggtctggggcacataagcgagtttgattagtagtgcacggacattcgctgtgcaaacagcatgcccagcaagcagtgagctgttgactcgatcgaagaggcaccggcgacagaaatcaataccctcccaagctgcttcgggcgtgaattaaaagaaacattcccttagacacagtatctcacttttcagatcgttgaaaggtttgagaacttggaaacaaagtaaacgtataaagcttggtacaaatgggactttaaaacaaaaattgcttgccacgtttcccggtttccctgattagtaggtttgacgatcggtgcggtagccctgtgaccagtttcgagcccaacccttcgccgtatagctgctacgccttgacaccagtaagtcgtaacgccttacacctaggggtccgtgctggatccgcgggtatgctacggatacacaagaacgtcccgttgtggcgcactcagcgtattcattcgcaagatggccttcaaagaccttgggatgtcagcgaattcattttgagagttccctagtgaggcccaaacacctttggcgcctctcaaaagtgcgctctggccggcggactcgtcaggcgggttaggcaattcgggctctctctcccagacacctggcaccccctggaccaccgtgggccaattttcgaagcaaatttgtacccgcaaggggttggaccaacgggggatcatccgagacctttggggcgacatttacgagcttcgggggacatgggggcctggtgggccacgcccgtcaccgacaccatatggactctcgctgcacatatacctcta

SEQ ID NO: 539834 - DNA, 142 bp, Homo sapiens
gcacaccaaactacgttgtgctgctaaagacgtgtgatttatagcatctgggcattcacatccatgaagtaggaatggggctctgcaccaggcggttcttcttggtgttcctcttctcctcttctgaagagggaggcagcag

SEQ ID NO: 539835 - DNA, 129 bp, Homo sapiens
  misc_feature (3)..(3): n is a, c, g, or t
  misc_feature (13)..(13): n is a, c, g, or t
  misc_feature (64)..(64): n is a, c, g, or t
  misc_feature (108)..(108): n is a, c, g, or t
aanaatatatcanaaaggccaggcacggtggcttatgcttgtaatcccagcacattggttggcnaaggcgaaaggattgcttaagcccaggagttggagagcctgggnaacatagtgggctctgtctct

SEQ ID NO: 539836 - DNA, 720 bp, Homo sapiens
tccggctattacattttatgcttaaggctattattttcaggaatttgtaaaagatatcgtttcaaaaagtacacgccgatggcaatgacattttcaagctctatttaacccttcatttatggaagcaaagcctgatgttcttctggagcgacgaccgctctagaaaagggattctcccggcctaagggcctccagccaccagcagctgagaatcagtgatgttcggcagtcacgcctctcagacattataatgcaatgatgcttacgtcgggatagagtcaagtgatacaggattcgcttgaagttcagatctatgcaactcttctacaattgatctccaaatcaaaaggcatcatgatcgtgttcagctgttctaacacaagaaaagttcgccaaaagagcacctgtcagttgtcaaggaatatattccagccttagtaatggagcatacataggttgaatataacaaaaccttgtttatcatggagtgtatacaggtggattcagcaattcaagatctccttagtctttatcacatgttcttttaaaagctatgtctcaaaccattaggaatactttaataggtaatttgttcaaaagttttaattatgtttttctatttggatggtgtaaagccaacatcctgtctttcaaacaccaaatacataaatctttcggcctctgtatttagtgtaacatttaataaataatgaaaaaatt

SEQ ID NO: 539837 - DNA, 200 bp, Homo sapiens
  misc_feature (2)..(2): n is a, c, g, or t
tncaaaaaataaatttaaaaaaaccagcccggggtggtgatatgcgcccggttttttcaacaactttgggggcttaggggggaggattgctttagccccggagttaaaaactgcagtgagctttgatgggacccctgccctaaagcctgggccccaaagcagggccctgtttcaaaaaataaaataaaaaaggggaagga

SEQ ID NO: 539838 - DNA, 111 bp, Homo sapiens
tatcgagctggaccttctcccacctcctgctcactgtctttttcctatttttttttaatgagatgggctctcagtatgttgcccaggtggtcttgaactcctggcctcaag

SEQ ID NO: 539839 - DNA, 83 bp, Homo sapiens
  misc_feature (2)..(2): n is a, c, g, or t
antagcgggccggccctaactaactaactaatgactgcgaagaaagacgacaagcaaggggtcgaacgtgtcgtacgtgtatc

SEQ ID NO: 539840 - DNA, 908 bp, Homo sapiens
gctcggtttttttttattatcttttaacctcgggatctgtgttaacagttatgtaaaaaagctctaaggatcaggtaagggtttcgatggtgcttctctgtgagcagtctggaagaaaagaatagaaacagaaacccctatggggcctcagtacaacgctaggttggagctcgtgcacatgcgcatggaggcatcgggagtcaagtggcatgagaatgcatggttccacagccatcagcctcgaggtggggatagacaggaaatagacctgatgcgttccgtttgacgacgcacaccttggtggatacgtactggtatcccagggcggcaccaggttcgacttacaagccagatgggcggaattcgtggggccagggtaccatagcaaggctgttactagaaccaattgggataacacctaaatccccagtttagaccttatgtcctccaagggatgtcccgttgctatgtgagcgccctttttatgagagactcgctggatagaatggagttacatacgcggggccccaagccctgatgagaacagattcattggcccccgttggtaacagaaaaggcattctcgaaatggcgccgatgtcctagcatttgtattggacatctggggccaacagatttcaaatatgaagccctgtggaatatccactaaaattgatggagggttccttggaagactcggggtttagctacccaatcggggggtaccctgtggtaagaacagttcggagcaagggcatcggcacattgcaatgcaccacaagggacctaactgaaaggatcgaaggaaagagggtgaagtcacccgggaacttgaaaagaagggcggggtggaacgacgcctcggcggaggtggagccaacgcacgggagctggatcccaaaaaccca

SEQ ID NO: 539841 - DNA, 106 bp, Homo sapiens
  misc_feature (99)..(99): n is a, c, g, or t
caacacaatagttgcagatcaacaatcatcacctgccttttgtagaaaagaaaaccaaaaaaagtaaataaaaattttaaccagtaaaataaaagtttncctgcta

SEQ ID NO: 539842 - DNA, 441 bp, Homo sapiens
acagatccccgctcttgaccacgtgtacacatagcgattcgcttctgcaagtgtgtgggtagctctggcagctggcgcccataggctgggagagaagcaaagtcctccccgttgctgagaacagtgagggtgggaagcatacgacaatgaggttgacgcgtacgtgtctcctaagggagcaagctcttacagaggagttagggataccattagcagtacagacctggtacaacatcgaaataacaatcacctatatatgtccctatagtgacccttgtcttgaccattaagggccctatccctgtctgactctgccttcttccccacgtgagctgggacgcaaattgtggcatgcggatcccatttcttgtgtcccttttggaggatccggctccgtcgcgggcaggaggcccgatttggtgagggtgctccgggtgtttc

SEQ ID NO: 539843 - DNA, 243 bp, Homo sapiens
gtcgactgatttcaagaccattatgtggcacacagcaagaccctgtcatgtatcaacaggcagaaagtgtatatgggttgtacaatattggacctatttctcccattaccagattagagagagaccatgggatgacagctgacaaatttcaattcctcatatttttgaattccaattgattaggatatgttggcaatattaatcttcatattaagagatattaaggaaaagtggttgttactt

SEQ ID NO: 539844 - DNA, 190 bp, Homo sapiens
gacagtatagcgtacattctgtgcaatcaagaaatttagcagctgggcacagtggctcagacctgtaattccagcactttgggaggccaaggcgggtggatcacctgaggtcaggcattcgagaacagcctggcccacatggcgaaaccccatctctactaaaaatacaaaaattagcccggtatggagg

SEQ ID NO: 539845 - DNA, 437 bp, Homo sapiens
gcaacgagcggcgcaaaaaagatcaccatctttacggacgccaaggagtcgagcaccgtgttcgaactgaagcgcatcgtcgagggcatcctcaagcggccgccagaggagcagcggctttacaaggatgaccagctccttgatgatggcaaaactctgggcgagtgtggcttcactagccagacagcacggccacaggcccagccacagtgggcctggcttccgagcagatgacaccttcgaagctctccgcatcgagcccttttccagccctccagagcttccagatgtgatgaagccacaggattctggaggcagtgccaatgaacaagctgtgcagtgaggcctaggcctaccccctagagacccatttccccaataaaaaaaatttggctgtctacctgattgacttttctgttccctcttgttcacagaac

SEQ ID NO: 539846 - DNA, 330 bp, Homo sapiens
gcttattttccttctttttgctgccacgcaccttctgccagctgtatcctggacccctatcttcaaggctctttgatgctgatcatgaatttcaatgaaagaggagacagcaaaactgatagagaaactggacatcaaactgccagtatcattttttcacagaactagaacaaactatcctataattcatagtagaaccataacaaagagtccatatagcccaaggaatccttagcatatagaatcaaggctggaggcatcacattttgcaatcttcaaacttataggctatagttaccatcacatcatgctactggtacaaaaacaggc

SEQ ID NO: 539847 - DNA, 548 bp, Homo sapiens
  misc_feature (20)..(20): n is a, c, g, or t
  misc_feature (491)..(491): n is a, c, g, or t
cgggaacgccgccgcggganaacatgccttcatgggcacgaacacgccgtggtcccagccgcgccgatcgttcgccgcactcttcaccccggcggtaccgaggagttcgcggacacgggcggcaagctccggtgcgccggacgcgggccaggtcagccggtacgtgtagccgggaaaaccgccgtagtcgaaaagcagcggcggagcggcacccacgttgcggtcggcagcgcttcctcccagtgtcccgagacgataggatggtcgatggggttccgcagcgtgccggcgaaattccgcagataggtttccagctcgctccaggtgaggctcggtccgggctcaagaaagaacaagggccccgccgtgattgatgaagtaagttggctgcatacggcccatagtgggggcagccgcccttctgcagaagagatataattccgctctttctatcggtttatatgatgtatggcgctcggcaaccttagccnggaccaactgcgtgtgttggtgacgattgcggacgtgggcagcttctcggcggccgc

SEQ ID NO: 539848 - DNA, 656 bp, Homo sapiens
tgtttatttgtttatttattgtgtgtgtgtgtgtgagtgtgtgagtgtgtgtgtgtgtgtgtgtgtgtgtgtgtgtgtttctctctctacaaaaaaaaaaaaaaaaaaaagcgcacacacaaaaaacaaaaaaaacacaaacaagaagagagagggcggggcgccgccaaaaagaataaccgcccggggaggcgcggcacacctagacaagcagcacccacaatattatctagtgaagaaagagaggaggggcaccacacagagggggaggaggagaaaaaaaaaaagaaaagaaggagagcggggcggcggacacaacaaaaaaaaagggaggagaggggagaaaagaagaccgagaagaaaaggaagaaaggagggaagagagcgcccacacagaagaggaggggagagagaaaaaagaggagagggaaaaaaaaagagaaaaaagacacaacacagaaagaagggacgaaaaaacaaaaagaaaaaagaaacagcagacggggggagagaaagaacaccaggagaaatgagaaaggagagggacggagagcaaaacaggagagcagagaggaagcgggatgaaagaaaacaaaaaagacaaataacacaaggagcaagaaaagaacgaaaacacaaaggagggaaggggaagc

SEQ ID NO: 539849 - DNA, 294 bp, Homo sapiens
cggacctctagacaggcagcctcttcagctgtggagtccagcagtcacgctgtgttctcctggcgctcctcccctaagttattgctgttcgcccgctgtgtgtgctcatcctcaccctcattgactacagcctggggccaggggtagtggaggctggcacagcaatcatgttctcttcaccctactttgatttctgctttttctgtctcccttccaacctgtccccttccccccaccaaaaaaagaaaaagacaaacacaaataaaatatctgagcggaactgtgaaaaaaaaa

SEQ ID NO: 539850 - DNA, 82 bp, Homo sapiens
gggcagtgttcagaaagacattaagaagtggattgatgttgttccttttttgaagttgtcattaaagtagtgtgcaacaacc

SEQ ID NO: 539851 - DNA, 159 bp, Homo sapiens
gctgacttggtaagtacaaatccttaagcaaagtatgaactgactcagcactcctagtaagtgaccagattcagaggtaccctgaaggacacagagggcaatatcaggtgtattttcgtggctacaatcggtaagggtggcccagagagcctggaattc

SEQ ID NO: 539852 - DNA, 297 bp, Homo sapiens
  misc_feature (9)..(9): n is a, c, g, or t
gcagttctnctggtcctcatggcacctcgtggtacctgctggcaaacatggaaaccgtggtgataactggttctttctgtgtcctgttggtcctgctggtgcggtttggcccaagaggtacctagttggcccacaagggattcgtggcgataagggagagcccggtgaaaaggggcccagaggttttcctggcttatagggacacaatggattgcaaggtctgcctggtatcgcgtgtcaccatggtatcaaggtgctcctgatccgtgggccctgctggtcctagggccctgctgg

SEQ ID NO: 539853 - DNA, 130 bp, Homo sapiens
cgtatgccgtgcagcctgtagagatcagtgactaatcagcagcatcgaggcccagctgagcgagctcgcagctgagatggagtgccagcaaccaagcagtacaacaatgctgctggcacatcaagcacac

SEQ ID NO: 539854 - DNA, 302 bp, Homo sapiens
tgtgatgggtgcctagatcactatccgtctatgctggggaagcctcacaatcatgacagaaggcaaggaggagcaaatcatgtcttatacagatggcagcaagcaaagagcgcttgtgcaggaaaactccctcttataatagccatcagatctcatgagacttattcactatcacaagaacggcatgggagagacctgcccccaggattcagttacttcccacagggtccctcgcacaacacttgggaattcaagatgagatttgggtgagaacacaaccaaaccatattattctgcccctt

SEQ ID NO: 539855 - DNA, 270 bp, Homo sapiens
  misc_feature (15)..(15): n is a, c, g, or t
  misc_feature (24)..(24): n is a, c, g, or t
  misc_feature (53)..(54): n is a, c, g, or t
  misc_feature (126)..(127): n is a, c, g, or t
  misc_feature (185)..(185): n is a, c, g, or t
  misc_feature (188)..(188): n is a, c, g, or t
  misc_feature (196)..(196): n is a, c, g, or t
  misc_feature (237)..(237): n is a, c, g, or t
  misc_feature (239)..(239): n is a, c, g, or t
  misc_feature (251)..(252): n is a, c, g, or t
  misc_feature (254)..(254): n is a, c, g, or t
  misc_feature (257)..(259): n is a, c, g, or t
  misc_feature (263)..(263): n is a, c, g, or t
aaaaaaacgcccccnttaaacggnggaatgaaaatgaccttgatttataaagnnaagactgagggcggggatactgattcagaaaccctgtagcgtgtaataaaagaagaggaaatggcatggaannactgccccctgtgatttgaaggccattgtgaaggaaaacaatgcagtgaaagaaagtnctnccatattnggacagatatcattgcatcacatttatttatctttctgggnanttttatagcccnnanggnnnaatntttaaat

SEQ ID NO: 539856 - DNA, 434 bp, Homo sapiens
gctcgacattagaaatgaagttacacacgctagtcagtaattaaaacattttcctactgagctgaacagaaggtccctttgagactttaatattgctgtggctgaaggtcaatatccatggctacatctagctccttgaaatattaagtcaagatgtggtcaaaaaactttcagaacaacaaatcaggctacagtgttgatactgcactccagataaaccaatggggtaacaaccgacatccctaatttctccttaagcctcatctgttaagtgacaggctcagtgtgaaggaagatagagtgtgatgcgtactgtcacacaaagtaacattagtacttctgcagtttggcattattatttttttatttttgttttgagacggagctcactctattgcccaagctggagtgcagtgacacatctcgcctcactg

SEQ ID NO: 539857 - DNA, 437 bp, Homo sapiens
  misc_feature (49)..(49): n is a, c, g, or t
  misc_feature (101)..(101): n is a, c, g, or t
  misc_feature (118)..(118): n is a, c, g, or t
  misc_feature (158)..(159): n is a, c, g, or t
  misc_feature (301)..(301): n is a, c, g, or t
tacatgaattacaaatacaaatactctcctaaaaatacaaaaattatcncaggcgtggtggtgggctacctgtaatcccgaatcactgggactaccggctnaccatgcctggcttaanaaagtttttaaactttggttggtgatttaaaacaagtacnntgcagcatggccgtggtggcatcacacctgtaatcctagcactttgggaggcctaggagagtggattgcctgaggtcggaagttcaagaccagcctggccaacatggtgaaaccttgtctctactaaaaatacaaaaaattngccgagtgcagtggcgtgtgcctgtaatcccagctactctggagactgaggcaagaaccctggatgtggaggttgtggtgagccaagatcacgcctctgcactccagcctgggctacagagcgagacttggtctca

SEQ ID NO: 539858 - DNA, 243 bp, Homo sapiens
aaaaagaaaattttatttttttttttagggcgggccatagaaaagctattgagaggatttagtttatcagggccggaggtgggaaccctggtgggggatgggatggggttttggggttttgaaaggctttatcatttaggttttggttatttttcctttgatggtccagtcctagtttatagggttggccggtttaatgcttttctccccccttttaaataaatggtttaaatggggtttgga

SEQ ID NO: 539859 - DNA, 796 bp, Homo sapiens
ggaggtttcatcatgcagatgaagcctccaggcagcagactgcagagagaatggatgggagatgtttattatcagactgaaagactgttctgccagtcattccaaaagggaggggggataacaagcacggtggcttcaggtccctccgcattatcgcatgtgccagtgctttgctcctttttacacctgagtaatcgtccactgtggagtcatcctttcagctgctgagagatgcgtgggcagtttccacctgcagccatcaattcacaaatcctacaattctaagctctcagaacccttggatctgaaggttctcaaatgctaaggtttctagatgttagcagacgaaggtgtcaagacgcatgggatctacgatgcagagttctgagtggggatatgcgtcccccaccccgactcaccccacgacacatatcagtaacagcctctgcaaccccgccttggtgcccccgcacgttccaggggcagccacactgatggattgctcagaacgggctggagccgcatctccacttctgccccgacagttcctgctgcagcagatgcccttccagatgcaaactcctacgcatccttcaaaacccagctaaatgtcacttcctccggaaagccttccccacctctctagcaggcagttgagcccagcttacatttccgacaggccctcactgcccgggattgcagctgcgggctccttgagggcagggattgtccctcattcatcctgattccatgccaaggcttatagtaggtgctcaataaatgcttgctgaatgat

SEQ ID NO: 539860 - DNA, 590 bp, Homo sapiens
agactgtgttacgctccttaatttgtccctgcacaagaaataagcatatggatccgtgaatgtacccttcctcctctgctgcattctgaaaggaaagtcagaagctcgtcaaacttagaacttgaagctaagctattacaccctcggcagtgcaggggaaaagtaggaatgagaacaaaatgaaaaatcctgaagaaccactctgggagaagaagtcaacaaagattttataccactatgaggctcatgaagcccgtgcaggcctcccctgcgttcctaaaagctccccatgtgtggctgctaatgcacgggagccgcgattagctgcctgagaaaggcctaaaaataaaaaacattctgactagattactggataattagattggtagcgctcttccctgactgtggctgtcagattaaatctggctggctctctttagataactgtcatgccccaaaataccaaacagacactgacacatctaggagccttttaaaaaggggtccaagaatcaaagtgcctattttttctttaaaatataacatgaacaatgtttcacaaaatacaacaaaggcctcgttggcctcat

SEQ ID NO: 539861 - DNA, 855 bp, Homo sapiens
gatgtcagctcactgcaacctctgtcagcctccaggtgcaggtgattctcccacctcagcctcatgagtagctggggttacaggcgcatgtcacaatgcctggctaattttgtattttgggggtagagatggtttcgccatgtggccaggctcgtctggaactcctgacctcaagtgatctgcctgcctcggcctcccaaaatgctgggattacaggcgcgagccactgcacccagcctgacttgagcactttttcatgtatctgttggccatttgtatgtctttgagaaatacctattcaggtgcttgtcaactttttaagtgggttgttttcttgctattgagcagtttgagtttcttatatatcttgaatattaaccccttatcagatgttgtttggagcattttctctgatgctgtaggttgtctcctaactttgtggtttcctttgctgtgcagaagcttttcagtttgatgtaatcttgtctacatttttgttgcctagctttagtttcgggttttaacagctaagtctttaattcattgtaagttgattttttaatatggtatgaaataaaagtctaattccgttcttcaacatgtggctatccagttttcccagcaccatttattaaaaagacattccttctcccattgttgtgctaattgttgagaatataaatatgaaaccccgagcttgtcttcttcctctgaaagctgtggaccgcacttcctttttcctgcccttatgctggtgacaccctgtcctgatatatgagaattagagtaaagcatttttttttgtttttttgagacagaggtctcttgcctaggctggagtgtagcctcgtgccg

SEQ ID NO: 539862 - DNA, 157 bp, Homo sapiens
agagcacctgtgggcccccaccttcaatgtcactgtcaccaagactgacaagacgctagtccatgctgataggcataccaaggtgtccaacggatgatatgatacaacaacgaaatgttctgcaaatggcctcccaaccttcggacgtacgcagata

SEQ ID NO: 539863 - DNA, 163 bp, Homo sapiens
ctcgataataaagggcctgtgagatttacagcgtagtgcgtctaaagcagaggttaagaacatcatgccccataggaaaataaggtaaagaaggaagctgccatataagctcttaaaaatggtatgttagaaggttctaaaatctcttcagcactggttggtc

SEQ ID NO: 539864 - DNA, 201 bp, Homo sapiens
atcggtctgggtacaagcgatgctcttgcttcagccttctgagtagctgggattatgaaggggtggctgcccctccacatctgtgggatatctcatcaggtgggacaagagactgagaaaagaaataagacacagagacaaagtatagagaaacaacagtgggcccaggagactggcacttagcatacccaggacccgggg

SEQ ID NO: 539865 - DNA, 818 bp, Homo sapiens
gacggcagactgtccccctcatgcctttggtcggaatgactggagatgatgatgagatcctagacttcggtgactggcagtgtcccaacaggaatacctagacagtatgaagaaaaacaaagtgcacagagaaccgaccccagacaagagcttgagtggagaccacagggaacttggacaccagacgtcccagaccccagatacatccatgctctccggatgaccacactcaactatctataggcattcatgtccactcatagccatcacctatacatgattcatatatacatgacgtcatcccacatctagatataccacgatacactcactcaactatccacatcatggacatagtcaccacacccatgacaaactccatcgtcatcattgcacgtcatgaccacgtagtcacacatgatcatcatcatgaccagactgagtggtgacccgtgataggacacacaccacacaacaatacccagcacaagaacccagtccgcgtgacaatatacaaagaggagggaacagtcgagagacaaagagagtgaacagacaaggagtaagaacacaaagacaagaaacaaaaagcagacaaagaaccgaaaatgggacaagacaagggacaggagaccacaaagaaagacagaagaaggacaaatgcccagaaacaggaagggaaaaagaatagaccaacaagacaaacaacaaatagacagaaccaagaaaatgaagaaaaacaacaaagcagacaaacacaaccggaaaaaatgcgaggcaaagggaaagatggaaaagacaagaagggggaaaagaga

SEQ ID NO: 539866 - DNA, 303 bp, Homo sapiens
ttaaaagcccccccctttttttttaagggggaggggccggttttttcccaagtccccccaggggggggggaagcctgggttttgggtaaatattggaaagcaaaaattttttttttctgcccccaaaaattttttaatttgtttttttttgaaaggggggggctttggggcccccctttcccctttttttttcccccactttggagggttggggggttttggttttcctgggggggggggggggggggcgggggtttcctggtccctgtttttgggccggttggataaaagggggccccttta

SEQ ID NO: 539867 - DNA, 864 bp, Homo sapiens
atcagaataaaaactgactagaaataccgtcaaaagcagcacttgaccaaactcagagcatctgagtagcagaatcctgtctgcttcatcaatctgaaggttatggcctgttgacaagagggattctgaacgactaaattagtcagtgtgctcgctgtttgtttacttaaatgtatggttagatggtgtttggatctggctagtcttcccgtagtcccccgaaataagtaataataacttccatgctgcctgctgtgttccagatcacagaggcagcaaggcatcaggaaaaactggggcgtttgcttagggtcgagacctatgttctgatagcacagtctttgacaatagtagcttacgtaaggacgtgctcagaatgagtaagctttaggaaactactaaggatgctgtgggagagtaacaaaatccgttgctgctctcttgcacttgacagaagcattactgaattgagtctttcatagacccacttgggccaagcctttctatattgcctgtaggatgatcgggctgctggtgtggtagtcactctgatcacagattgctttaaatcagcggtgtggaatggtcatgagtcaaacatggtggccgggtctttgacaaggacagatggcgtagtgtccgcatgtactgcctctcgctgcggtcacgttagggtgtgtcttcacgtccggagggtgtaacccaaggtccttttgggtcactcccggctgtggatgcgtcttctcacatgggggggccacgggtgttgggcggagttcccggggcggggttctccgggcgtcgccaccctgttggcttaacagggggggacgggaccagggctctccggctgggagcccgggg

SEQ ID NO: 539868 - DNA, 132 bp, Homo sapiens
gcggccgcgcgcccccgccttcaccttcggcgcgcgcttccccacgcagcaaacaacagacatacccgggccaggcgacctggtgcccgctcgcatgaccgtgcgcggcaccgacggcgcccccgcctactc

SEQ ID NO: 539869 - DNA, 367 bp, Homo sapiens
  misc_feature (36)..(36): n is a, c, g, or t
  misc_feature (39)..(39): n is a, c, g, or t
  misc_feature (41)..(41): n is a, c, g, or t
  misc_feature (88)..(88): n is a, c, g, or t
  misc_feature (174)..(176): n is a, c, g, or t
  misc_feature (365)..(366): n is a, c, g, or t
caccctcacaccaaccacacccaacaaaaaagaatnaanancctcaacctccgactcccacctccacagacgtaagcgcactgcctcnaaacccactcccctaccctagacacaaggtgccctctttcaatcctccaatgaagtgtgggttgcactatctaaaaatccaacttnnntcaagaacccgcccccaccttcacctcgagccacccaaaaacccgcgaattccccccttcacacaacagatatattctcaaaagatttcaccaaacccagacccatcctttacacactcctcttaataaacaaacattcacaacctcccccagggggggggtgatattctcccctcttctttcttctcnnc

SEQ ID NO: 539870 - DNA, 134 bp, Homo sapiens
ttccacgaataggagaatgagccataggcgccgttgtcgttcaccttcacctcaatgccggcgccggactgcatcgcgaaatcggggccgaacacctgaagatcatccacggtcagaccgcgcggcatgttgcc

SEQ ID NO: 539871 - DNA, 1675 bp, Homo sapiens
  misc_feature (367)..(367): n is a, c, g, or t
  misc_feature (395)..(395): n is a, c, g, or t
tgttgtctctgctaatagctagttcttcttagttcgcttatcttctattgtctttcttacttaggtttcatcttattctcgttctgctccatgttttatcatagtggtcttcttctctcctcatgtttttctctcgtgtattttatattctcactggtcactgttatcacttttgttttctggtctgctcataaatactttgttacataaaatagctcgtgtgttgccgcgcttctacttttctccgcggttttttttttcttccactccctttctcttcttactaatatgattccacaccagaacttatgtttgttccccctcatatttaactcttttttcctcctccgtggagtatgtatatacncaccaaaagcgtgttgtagctcccttcncctccgctataattgtagaatcgggtccgtacgagcctcctcattttgtgggtcaccctgtttcttcgcttctttcctcagtggacagggggggccctccgtcgccatgtgtattctttttatatttgggaggggtatatatggggtgtatcactttcacacgccctctttttcctcggctaccatactccctcctgcggttttttctttctctgtcgctttttataatagtgtggtacgcccccaacgtgggcacagacacttgttgttggaaaccctctggctcccccccttctgtttggggccccacaattttggaggaagacattttttttggcccaaatttgggggccgctgttgaaagaaaggccgttttttctccccggggaaaaatttgtagaagtagggaaattttgttgctgcgcgccccactttttggcggttgttataacctcgcggtttctctccctctctcagagagtgttgcatctccccaaatatgtgtctccccaatagctccaccgcagaaagtatggatttttaaaaccaagaatctttttcgcccagaaaattttgtgtgtaatagccccccccgagtgatcttcccacagagagcccccctctctgggggcgcccccacccgctccagttatagggatctcccttctcccagagagatctctcttagagagaagagcacccccccttgtgttagaacatttgtgagaaatctcatagtgtggagagacgcttaacacccgacaatacggccaaggaccccatagcgcgcccgggacacacccatattttctcgcgccacggcccacaggatctcaccacagagcttcccgggtggggatataagagcgcagacactggctcccacacacagcgcgtcgccctgccacacagcgccccacatctcagagataggagaatagagcgcgcgccgcggttctctcagcgcccacagaaaacgcctctgggtgtaggtgtaagaaaagagaaagaaagagcgcctcgctttttggtggtttaagaaaacccgaaagaaaacccctctgggggggaaaaagagcagcccggcttccccgagaacccgccccctcggaaagaaagacctcccacgagagagaagaaaatcctcactaccacgagagaggagaaagaaagacctcggctggcataaaaattctttaatattggaatatattccataaaagaggccaaacattttgggcagactttttttggaaaaagaacccggttaaaccggccca

SEQ ID NO: 539872 - DNA, 174 bp, Homo sapiens
gttctctctcgcactcccgcgaaatgctctataaattacaaaaaaaaaaaaaatcaacagatggaggaacattaggcacagagagtaatggtggtgggttctggagctggcggtgctgggaatttgcactggaaaagggtaacgagaacgggcagggacggtggggacggagga

SEQ ID NO: 539873 - DNA, 131 bp, Homo sapiens
tattgaaatgtgtgctgacgtatactatataaacccattttcttatttcatatttgtcatataccccagataaagcatccatattcataaatgagttatttaacaactattaaaaaacttaactcaggttt

SEQ ID NO: 539874 - DNA, 371 bp, Homo sapiens
  misc_feature (36)..(37): n is a, c, g, or t
  misc_feature (40)..(40): n is a, c, g, or t
  misc_feature (50)..(50): n is a, c, g, or t
  misc_feature (92)..(92): n is a, c, g, or t
  misc_feature (166)..(166): n is a, c, g, or t
  misc_feature (371)..(371): n is a, c, g, or t
cagctctacccggtgcggccaatatggggtctaatnnganctgcaggccngccggcctacaccagagccacagcaacgcgggatccgagctncatctgcaacctacaccacagctcacagcaacaccagatccttaacccactgagcaaggccagggatcgaaccngcaacctcatggttcctagtcggattcgttaaccactgtgccacaacgtgaactctgagtagtttatagtttggatattaagcccttgtcagttgtgtcatttgaaactattttctctcatttcctaggttgtctttttgtttctttttatggtttcctttgctgtgcaaaaccttgtcagtttgattaggtccatattggctgn

SEQ ID NO: 539875 - DNA, 962 bp, Homo sapiens
tccctgtcgccgcgaaggggcggaggcaggacgcgcaactccgggcgaagctgtcccggggtcgtgagccgtccccgatttggtggtgggccccctcggttcctcgagtgcaggacgcatcgggtgggctcgggtctccagcccggtgcggggaagtgagggaccggggacatgcgagaggaggaacgtcagggcctcggcggggagatgcgcacacgcatgggtggggcgggcccggtcgttgcggcgcaccacttgtggcggtgtacccagggcctcaacaaaagtcggtacaagaactgccaaggggccaagtccagtccaacggtcaaggaccacgggggggccacggtggcacttcctgagtgggccaataggtgttggagaccgcgcggggattgacagacgacccgggtagtactgcgaggtggtcacaaaagcccgggaatggtttgtgcctaaccgggaacagcttaatgggcccagagacacagggggggctagaccagtgaccgtggggagcgacttcggcaccgcgagaatctcaggactcaaccagaggacagggcggactaaaaaagggtgaactgaccgagcgcatttcgtgggcccagaatagaagggtgaaagagtgatgatcctagatatcggcaggctcgagctgaaggataagggtgaatgctgtatagagggtacatggaagggggggttgaccatttaccaatttcacgagttgtaataccccgtgtagagatgtgtttgtgatccaccgtggtattaagagtaagatgtcttgattgtaaagaattgggcaggcttgcgtgggtgggagggcttgggggggagtgtctggcgccaagagagatttaaacattgacatgagaggatttggggacggagacgttgcaagaaaggttaacagagggaacggtctgatgttaaaaaggggggggatacaatcc

SEQ ID NO: 539876 - DNA, 577 bp, Homo sapiens
  misc_feature (37)..(37): n is a, c, g, or t
  misc_feature (92)..(92): n is a, c, g, or t
  misc_feature (95)..(95): n is a, c, g, or t
  misc_feature (99)..(99): n is a, c, g, or t
  misc_feature (151)..(151): n is a, c, g, or t
  misc_feature (191)..(191): n is a, c, g, or t
  misc_feature (200)..(200): n is a, c, g, or t
  misc_feature (210)..(210): n is a, c, g, or t
  misc_feature (212)..(212): n is a, c, g, or t
  misc_feature (222)..(222): n is a, c, g, or t
  misc_feature (228)..(228): n is a, c, g, or t
  misc_feature (313)..(313): n is a, c, g, or t
  misc_feature (315)..(316): n is a, c, g, or t
  misc_feature (333)..(333): n is a, c, g, or t
  misc_feature (380)..(380): n is a, c, g, or t
  misc_feature (384)..(384): n is a, c, g, or t
  misc_feature (391)..(392): n is a, c, g, or t
  misc_feature (403)..(403): n is a, c, g, or t
  misc_feature (416)..(416): n is a, c, g, or t
  misc_feature (427)..(427): n is a, c, g, or t
  misc_feature (429)..(429): n is a, c, g, or t
  misc_feature (436)..(436): n is a, c, g, or t
  misc_feature (484)..(484): n is a, c, g, or t
  misc_feature (512)..(512): n is a, c, g, or t
  misc_feature (517)..(517): n is a, c, g, or t
  misc_feature (567)..(567): n is a, c, g, or t
taaagaaatagttataagtgtgtgtgcagatacaganagtctttaaattttttgtctataaaatatttaaagaaatattctaaggatcttanagnaacnttgggaggcacggggaaggacaaagggactgaatttttatgtcgatggaccnctgatcagtgctgtttagtccaatccagtgcaagtaagtnaaggttcanagaaaaaatngntttataaaancatagngatgaaaaaaactttccagcctagcgtcatcccatccaagaaaaatactgagaaaacagcttgtaaaaaagaaggtaactaaaancnnattatactcataaaacncgtacacgttaatagacaggaatacataatatatataatataaaaanaatnaccattnntgccatacctntcagttccaaggnactgtacactntnctatctncttttctatcacgctggagtctcactctgtcacgcccaggctggagtncaatggcaccatcttggctcactgcaanctctncttcccccgttcaagccattctcctgcctcagcctcccaagtaactaggnccacatccat

SEQ ID NO: 539877 - DNA, 311 bp, Homo sapiens
  misc_feature (36)..(37): n is a, c, g, or t
  misc_feature (40)..(40): n is a, c, g, or t
  misc_feature (50)..(50): n is a, c, g, or t
  misc_feature (92)..(92): n is a, c, g, or t
  misc_feature (166)..(166): n is a, c, g, or t
cagctctacccggtgcggccaatatggggtctaatnnganctgcaggccngccggcctacaccagagccacagcaacgcgggatccgagctncatctgcaacctacaccacagctcacagcaacaccagatccttaacccactgagcaaggccagggatcgaaccngcaacctcatggttcctagtcagattcgttaaccactgagccacgacaggaactcctgttagattttcttttttttttttttttttttttttatattatttccccactgtacagcaagggcgtaaaacattaaccgcgggggaac

SEQ ID NO: 539878 - DNA, 291 bp, Homo sapiens
  misc_feature (36)..(37): n is a, c, g, or t
  misc_feature (40)..(40): n is a, c, g, or t
  misc_feature (50)..(50): n is a, c, g, or t
  misc_feature (92)..(92): n is a, c, g, or t
  misc_feature (166)..(166): n is a, c, g, or t
  misc_feature (194)..(194): n is a, c, g, or t
cagctctacccggtgcggccaatatggggtctaatnnganctgcaggccngccggcctacaccagagccacagcaacgcgggatccgagctncatctgcaacctacaccacagctcacagcaacaccagatccttaacccactgagcaaggccagggatcgaaccngcaacctcatggttcctagtcagattcntttctgctgagccatgatgggaacttctggaagcagattttcttttttcttttataagaaaagaaagatgatacagagaggaatctactcaacgggc

SEQ ID NO: 539879 - DNA, 422 bp, Homo sapiens
  misc_feature (46)..(46): n is a, c, g, or t
caagacctatggttagaattgagatgtttcccccctcagaaatggntccagaagtcctagacattgaaagtcaagtttgcctaaaaagccaaggttatagatagaaaagaaaatgaaggcccaaatgcggtggctcatgccctgtaatccccaacaatttgggaggcctgaggtgggaggactgcttgagcccaaagagttcaagaccagccctggacagcatagaaagaccccatcttgacaaaataacaataataataatttagtcaggtatagtgatgtgcacctgtggttccagttactcaggagggtgagggaggaggatcacttgaggctgggagggaaaggctgcagtggtgagccatgattgtaccactgcactccagcttgggcaacagagtgagaccctgtctccaagaatt

SEQ ID NO: 539880 - DNA, 150 bp, Homo sapiens
tggtgagcatgaacccaacagcaggacttctcttctgcctcccggagccagccgagacgctcaactccacctccagagagccattggtgtagaaaccgaagctgttcagcttggatgtccgctctgcttctccccactctggggtgcctg

SEQ ID NO: 539881 - DNA, 103 bp, Homo sapiens
cccgggtagtcttacgaccctggtgccctgggctgccagccctgctcctcgctctggggtggaaagggctctaggcgctacccgaggtacagaagcaagtttg

SEQ ID NO: 539882 - DNA, 288 bp, Homo sapiens
  misc_feature (36)..(37): n is a, c, g, or t
  misc_feature (40)..(40): n is a, c, g, or t
  misc_feature (50)..(50): n is a, c, g, or t
  misc_feature (92)..(92): n is a, c, g, or t
  misc_feature (166)..(166): n is a, c, g, or t
cagctctacccggtgcggccaatatggggtctaatnnganctgcaggccngccggcctacaccagagccacagcaacgcgggatccgagctncatctgcaacctacaccacagctcacagcaacaccagatccttaacccactgagcaaggccagggatcgaaccngcaacctcatggttcctagtcagattcacttctgctgcgccacaatgggaactccaatctctgccattttttaattgcgttgttttttaatttttttgttttcgttgtgagttaagaccgct

SEQ ID NO: 539883 - DNA, 262 bp, Homo sapiens
  misc_feature (36)..(37): n is a, c, g, or t
  misc_feature (40)..(40): n is a, c, g, or t
  misc_feature (50)..(50): n is a, c, g, or t
  misc_feature (92)..(92): n is a, c, g, or t
  misc_feature (166)..(166): n is a, c, g, or t
cagctctacccggtgcggccaatatggggtctaatnnganctgcaggccngccggcctacaccagagccacagcaacgcgggatccgagctncatctgcaacctacaccacagctcacagcaacaccagatccttaacccactgagcaaggccagggatcgaaccngcaacctcatggttcctagtcggattcattaaccactaagccatccatgggaactccttaagaattaatcttagctagtgaaagtcatatagcaca

SEQ ID NO: 539884 - DNA, 138 bp, Homo sapiens
tgcagagacatggtcttgctatgtatccaggctggacgccataagtcctaggattaagggatcctctcatctcagcgtcccgaacaggcgagagtaaagccaagagccgaggctgagatgagagtctccggtcgaact

SEQ ID NO: 539885 - DNA, 643 bp, Homo sapiens
tggagtccagccaatgacacgggagccaaaaagaaaaaaaagaaacaaaaaaagaaaaaagaaaaaggcagtgagacagattcagcccaggatcagcctgtgaagatgaactcttggccagcagagaggtctccaggaaatacagaaggccattgagctgttctcaggtgggttcagggacctgccaaaacctgtggaggaggctagcaagcgaagctaccagttcggggatacgcagcccgtccccaagctgggcgaaggtggtgaacacccatgtggccccggtggagcctgacagaggacaattatccgccaggagccctacacccgtgccccagggcttcaccgtgggatgcttgggacctgggcgatcggtgggtgtgctaaaagacctgtacaccctcctgattgagacactatgtggaagatgatgacaacttgtcccgattggattattccccggagttcctttggggggctctccggccacccggtgggttcccccagtggtgccctggggggttcgaggggtctcaagtcggaaatgggtggggttcataagcgccatcccagaaagatccatatctatgacccagagaagaagatggtagagatcaattcctgtgttgtccccaaaggtggg

SEQ ID NO: 539886 - DNA, 969 bp, Homo sapiens
tgtatggggcccgtgatctcaacggtcctgccctcggtctccctcttcccccgcccgccctgggccaggtgtttcgaatcccgactccagaactggcggcgtccaggtcccgcgggcgtggagcgccggaggaccgcctcgggctcatggggcccggtccgctgggcggaagcgccgtgctgctgtccaaccgtcttcgttcgtggctgaccgagtggcgggacgaggcgacccgcagcaggcaccgcacgcgcttcgtatttcagaaggcgctgcgttccctccgacggtacccactgacgctgcgcagcgggacaggaagctaagatcctacagcaccttcggagacgggctctgccggatgctggacgagcggctgcaggcggcaccgaacatcggggcgggaccattgccccggatcaccatcgtggagagaacagtccagcccgacaggggccgactgcgggaagtcaaggactcttccatgccagtgcctgccagggccaaagcgggaggctctgggcagctatgggcagctcgggactcaggacccgagtgatactgtgggtgcttctaccgggagcactgaattcctaatggtcaccatgcttaacaaggaggagtgctggcgaggtgtgctcagcagtccccaggtagcccgggagtgcccacctgaacaggcagtcgggtccgtcgttcagaggaactggtctcggaaaagagccagcaggacccattgacccagaggcgagcggcacgagttggcagtcaagcctgagtgtgactgtggatgggcacgggcccgggggaagacgcccgacgacggaagctgcaggaggaggcagagcacctgagagatgcagacagcgtggtgatggaccggagagcgagagatagcgggacacaggccatcagggtgaacagcaaagacgagagaggagacaacaaagaccagactatcgtcgcagt

SEQ ID NO: 539887 - DNA, 1622 bp, Homo sapiens
  misc_feature (1238)..(1238): n is a, c, g, or t
  misc_feature (1254)..(1254): n is a, c, g, or t
  misc_feature (1352)..(1352): n is a, c, g, or t
  misc_feature (1427)..(1427): n is a, c, g, or t
  misc_feature (1518)..(1518): n is a, c, g, or t
gagcgaccgtatggtcaccaagtcggtacatgcacccctatcgcagctttgtgcattacaagagcgagtacttccttgtcgaaagctctatgctcgacagacagccggggccatgatcatgcggcctactcggttgaagagagatgatccgtcacgcgcgaactcggcgtagtagatagtgttgagcaaatcgaatgcgtcgtctagtgtccagaagttcaatctcacctaaccgtggtgggcgccaggcggtagaagtccatgacagtgcccaagtgaccatttgatagatgaaccgtggtgctgaattcacagcagcagacacgaatggactgtggggcgtgcagcatcggttgacaatcctatggcgactgaacagtgataatcggtctgaacccgtcgcaatatggatagctctgttgcaaatgtcgtcacattgttaccacccccgatgtgtaaacaaaaagctacaaacgtcggtctgtgcatacccgagggacgccacatcacctgcgatgagtcagtctccgtgtcgaccgtagcaaaagtcacccaagggaaaagcgtgtctaacaccttggtgagcccgcatgaacgtgagggactcgcatcaatacgctaatccacgtggcatgttattgtgtgccattccgtgagactatgcgaacgacctttgcgttgaggcacatcaccccgctacagccgaaagcgggatgcctacctgactgtccgagttgtttggaggccgacagcctggcccgatggagctgcgccgagcgtgcagcatggcctccacccctttcttgcgactctaggccccgggtgtgctgtgaccgtcacgccgagggaggttgataggtcccacaggagcgttcaccgctctgggactcgtgctccccggtgaacccgcacaactctttcattgcacccaatagctcagaccccggggtactattcctgggctcgtgacccaagaaaacctgatagtgcatttgcccccccacaagtgttatggatttagatgtcccttgggagcggttcgatttcgccgcgcttccactctggcgccgctgtcgtgcggagccgagaccacaccccctgtgagacgtgccgcgtgtggcattattgtcgggggagtgtggatattaaccgcagcacgcggctgtcttcgtgaagagaggccagcctgtggtggcgggccttcggagggtgctctcattgtgttgtgtctggcctcnccgcgcgaacaggcgngtgtgcggcgacctccgcccactattctcgcatttcgctcacgtctggcggcgttgcaccgctgtacgggaaagaaggttggtctcgttgtgcgacanctatcctgtgctatcccgtttttccgttgtgacggggacatggcggtagaggattcgttctccggatgttagacngctcctatcagtatcttggagcccgagagaagtggcaggctttccactcttgcgcaaggttacagccggaggggccccgcggaacccaccntcttttgcggtccctccggcggtacccccccttccccctaagggcgccgccgaaccgggatcgccagcgctgtttccgacaaaatagagaggttctcttcttca

SEQ ID NO: 539888 - DNA, 1220 bp, Homo sapiens
  misc_feature (1220)..(1220): n is a, c, g, or t
gctctgcacctgggacccatcggggtcgggatgtgaccacacggacggggaggctcctgtgaggtgctttgaagatggatgagatgaggggtgtgctctgggtgggaggagcagcagtacacccgtcaccagaacatctcttgtgtcatgacatggtgggtgcaacgggggcctcacagcacagagtgacctgctgcctggcgttccccagcactcggtgtggaaccggcccctacctgctgtaacgattatgggtccatgaaagcagtaagctggacacagaggtgtacgtgtgcgggacagagggccttgcagatgcctttctgtaggtgtacttacgtgttaaaatacggagacgtatggcactcattcacctccattgtctcagcggctgtgcaagcagctcctagcttcggaagtacaggacacatacagtcgcagtaattcaagcagtgtcatgtacatgcaggtaacagcataccaagctgcacgtgcgaagcactctcagcagggatcactagaaacccaggcattaacttatcccctctacccgcgtacttcataccaccgaaggtgacaactcataaagtgtaatacttagtacgcaggtgcaatgccatatactgagttaatagagacaatccaggatagcatcctacatagagacatacaagagcgacgtaaggactaaataataggaataggcagaactactagaagaaatgaacaaaccatagagactgaatggagtcgataatgagatgcagtaggatgaagaatgaaaggattggatagagtagaaagaagaagaaaaggagaagaagaaaaatcaaaggggagagaatgaaaaaagaaatgaagaaatgacgtagaggacagagtaaataaatggagatattgacaactagatcgatgtaattggaaagtaaaaagtcatagatagaggaaccagccggacaggcgcacaacaacgaagaagaggcaaacaccagaaggacaagagccctacgcgagcgagtcgcagtaagccagaagacccccggaagacggaggagaggcccaaaggaagagagagacacaacggagaacaagggaacacacagagcaagagacaggcggacgaagaagcccgcaacaccacaccgccccacaccgcaacagaaggaaggagaaaaaaaagcagaggaaagacggaagaacgcgctacgacaagaccaaan

SEQ ID NO: 539889 - DNA, 256 bp, Homo sapiens
ccacaaaggtacagtattacttagctatctgaattatgatagaaacaggtcctagtaaggtacctatataacgcatgtggaagatgacctatgttgccctatgaaactctgaaaatagggattccgagggtgcggatacaaagacattgtctatgcatatccataagcaggtcttagagcatatattccaaactctagctgtctcagcagttactatgaggattgcaagtcataggtgtgtgtggcctatcagtcc

SEQ ID NO: 539890 - DNA, 288 bp, Homo sapiens
caggggggggaacctttttcccaaaaggggtggttgggggcccctaaaaaaaaaagggccggggtgttcatcctttggttcctttgcctttacccaaaacccttttggggggccccccccctttttttggggggtccccccccggatgggggcccgggtgttgtagggggttaaaaccccttttagctgggcccgggacttgcctttttaaaaacaaaaaattagtccctggccccttttttttttttttggcccccggccccaaaaaaaaaaaaagggttgggttga

SEQ ID NO: 539891 - DNA, 694 bp, Homo sapiens
ccgtccggagccaggcaacgagcgtttcgctcttgttgcccaggctggagtgcaacggcactatctcggctcaccgcaacctctgcctacctggttcaagcgattctcctgcctcagcctcccgagtagctgggattacaggcatgcgccaccatgcccggctaattttgtatttttcgtggtggtggtgggggggggggggtccctccattgttgggtcaggcgtggtctcgaaacccccgaacctcagggtgacccgccgtgcctcggcctcctaaaggtgcgtgggatatataggcggtgggccacttgcgcccgtggcctacctcaagttttataaacatttcatactaggaaattgtgtgtttccataaaaggaaaagtggcagacaattttctcgctccatgatgcgtacatctgggcgtctgggaaacccaaaccctcaaggatggccgggcgcatgggggaaccacgcctgctgggggcagggggctacccaggggcttcctatcctgggggcctaccccggggcaggcacccccaggggcttatcctgggacaggcacctccaggcgcctcaccatgggagcacctggagcttatcccgggagcacttgcacctggagttacccaggcacccagcggccctgggggctacccatcttctggaccagcaatgtgccccgagcttac

SEQ ID NO: 539892 - DNA, 201 bp, Homo sapiens
  misc_feature (93)..(93): n is a, c, g, or t
  misc_feature (113)..(113): n is a, c, g, or t
  misc_feature (141)..(141): n is a, c, g, or t
caggcccttccatgcctactcagttcagcttagcaatagatgctttcagctcctatttcatttttattaactaccaggagggcatgtttcagntaaggtcctgctttatcttnttcaagtccctcatactatcatacacanatcaaagagaaactcctgaaaaaatcttaacacatgtgtgggaaaagaggaagaaaggct

SEQ ID NO: 539893 - DNA, 253 bp, Homo sapiens
gacgtccctttgacgagtgttatgcctaccatggtgtagaatattggattatttgtttcatctttccccaatgatttcctggatgaactgaatgtttgaatctgtaacatcgtaaactttttatactagaaaatgtatattgttcatccccttgctactgccccattgtaattcttattacaacttctgtaactcagtgaatattcattctatgtttctgaagtaaaataaatggttatctgcatgaaaaaaa

SEQ ID NO: 539894 - DNA, 339 bp, Homo sapiens
  misc_feature (75)..(75): n is a, c, g, or t
  misc_feature (77)..(77): n is a, c, g, or t
  misc_feature (121)..(121): n is a, c, g, or t
  misc_feature (204)..(204): n is a, c, g, or t
  misc_feature (242)..(242): n is a, c, g, or t
  misc_feature (293)..(293): n is a, c, g, or t
  misc_feature (324)..(324): n is a, c, g, or t
ttgccatgggtttgggagcaggtttgggttacttgcgtttgaaggcagcagtggtctcaggaggaagcgggggcngnagagagtggtgatctgtggtcagtgggtcagtgacctgcaccgngattcttccaccttcggtaagggtgggactggaggcgtcctaggtcaagcccgttagttcgactccatgggcacctttgatcnggactgaccgcccgtgtgtgcacaagttgtctttgacnaagactcgttaaggatcgaaggcttgggaccccgtgttagcaggatggggncctgccttcccgtggaagttgtgactttaanccggcttgccgtacc

SEQ ID NO: 539895 - DNA, 1058 bp, Homo sapiens
  misc_feature (313)..(313): n is a, c, g, or t
  misc_feature (320)..(320): n is a, c, g, or t
  misc_feature (965)..(965): n is a, c, g, or t
  misc_feature (1010)..(1010): n is a, c, g, or t
  misc_feature (1048)..(1048): n is a, c, g, or t
cgatctagaactagtgcctcgacctcctgggctcaggtgatcctcccacctcagcctcctgagtagctgggactacaggagtgagccaccacgcccagctaattttgtattttttgtagaggcagggtttcaccatgtttcccaggatggtctcaaactcctggccttaagtgatgcacccgtctagtcctctcaaaatgctaggattacaggcatgagccactgcacttggcctgctatgtcttgatagtcattttttctttgaggactgtttacgttctgcaacgattaagtcccatttctgctgtttttngtgtttngcatttatacaacacttttacaataataagtagatgctgaaattacatgtgatttaaaactattgtttaaatctgatttatgaggctttcatttctaacttaagaagcattttaaatgtgttacaaggtgctcctctgtgggctagactaacctgggagtttaatcctgtgctctagaacagtgctatagtgatgggagtaatggagggttctgcatctgtgctgtctgatacactcgtcatcagccacatgtcactaacgaatatgtggaatgtggcaagtgtggctgttgaactgagttttaaattgtttttaattttaattaatttaaattaaaatagtcacatgtagctcgtggccactgtattggacagcccaactctagaatgttctggtttattatatgagtcacttagtaaaagccagctgcagcatagcctactacttggcaattagccttcctctaataaagattcattgtcaattgttagtctttcttccattttgaaattttagcagtctggaagtagtacctgacagtagttaaatacagtagaaatgtctggaaataaaatttgtttgaacagaattctatgtcccgatttatttctaagaaaaaagactattaagtaactaagaaaaatnaaaagaataatttaagccacttaaaatgtaattagctcttaccanactaatagaatggatgttttacatatattccattcgtnggtaagagtg

SEQ ID NO: 539896 - DNA, 230 bp, Homo sapiens
  misc_feature (85)..(85): n is a, c, g, or t
tcgagctcggtaccggcacgagcgcccaagtgggagcgcccaagtatgaatcgcaactgggccgggcgcggtggctcacacctgntaatcccagcactttgagaggccaaggcaggtggatcacctgaggtcaggggtttgagaccagcttggccaacatggtgaaatcccgtctctactaaaaatacaaaaaaattagctggtattggcgggcgcctgtagtcccagct

SEQ ID NO: 539897 - DNA, 249 bp, Homo sapiens
  misc_feature (229)..(229): n is a, c, g, or t
  misc_feature (241)..(241): n is a, c, g, or t
ctcctgttgtagttcactatttttgctggtgttctgttgttctcctctcatgctttgggcaaatcacttgggaatattatctttcatgtgaccatgaaactgtttcttattgagtgaaaatgatatctttaacaaaatcttatgcactttgcttattcaggaacacaattactggatgtgtctttatatatattgaacttatatagtacttcgattttttaaataaagnttaagaaagganaaaaaaaa

SEQ ID NO: 539898 - DNA, 130 bp, Homo sapiens
gtgataatatagcggggaaaaaatctatcttcccaagctgaggctgtcatagcagcttttgccaggagaagagattttatgcctctatgaaccttgaaactaagggcttattctagaaacattgaaagac

SEQ ID NO: 539899 - DNA, 157 bp, Homo sapiens
gatcacacaccggcggcaggtgcgcagcctgagcgcgatctgaagccaagaccgttgcgctgtgggtggcggacaaccagttgacgcgtgctgcagctcgacccgcatccgccgacgctggcctggcattcgggcactgcggcgatggccggtgaaa

SEQ ID NO: 539900 - DNA, 127 bp, Homo sapiens
gtagagtcgaagatccgcatggtactcatgagtacatcacttaatcatctccttcaacgtctccactgatcgggaagctgggccaatggtacagatgatgccagtgttccggggagtgatgctttga

SEQ ID NO: 539901 - DNA, 175 bp, Homo sapiens
tattgtcaatacggctagcagatgtctaacatgtacgattcagcatgatcagaattctctgatcattgatttgttatagatgattaaacttcaatttaagcttgattttaaaactcccctctgcttctgatgaacagcataattcctaaaattacactaaacaagtctgtcttga

SEQ ID NO: 539902 - DNA, 574 bp, Homo sapiens
  misc_feature (22)..(22): n is a, c, g, or t
  misc_feature (286)..(286): n is a, c, g, or t
  misc_feature (290)..(290): n is a, c, g, or t
  misc_feature (363)..(364): n is a, c, g, or t
  misc_feature (370)..(370): n is a, c, g, or t
  misc_feature (397)..(397): n is a, c, g, or t
  misc_feature (400)..(400): n is a, c, g, or t
  misc_feature (405)..(405): n is a, c, g, or t
  misc_feature (430)..(430): n is a, c, g, or t
acagcccagggatttcggacgntcttggaattagtcataaactaccagcaactctgcatctactggacaaagtattatgactttaaaaaccccattattgaaaagtacctgagaaggcagctcacgaaaacccaggccctgtgattcctggacccggcggacccttaccagggaaaacttgggttggtgggaggaccaaaagggtttgggaggccagcttggccacaaagaagcttgaggccctggcttgaatctaccccaatggcctttaaggaaattggggatnggtncccccagtgaagctccctggattctgcctggtgagaccctcctgctttccttccctgcccattccatcccctnncccctntccatgaagccttgagacatattagcnggngaccnttctttccaaagaacttacctcttncaaaggccatttatattcatatagtgacaggctgtgctccatattttacagtcattttggtcacaatcgagggtttctggaattttcacatcccttgtccagaattcattcccctaagagtaataataaataatctctaacacc

SEQ ID NO: 539903 - DNA, 285 bp, Homo sapiens
ccgccacagactttgtggatgattttcatttttacaaactgcttcctgatgataccaacgtctaagataatttggtacacacggtaaagttatctggaacataactttcagtttcctctgcagtttttaagtgctgtactactgatcatcctagagattacccactgaaaagtcttctctaatccagttttacaatatgacagtctttttaaccatttgtgttcgatataatgttttccgaagacatactttacttgcctgttttaatttctgtgcccctttcaa

SEQ ID NO: 539904 - DNA, 120 bp, Homo sapiens
tctggcggaacggcaatgtggggctgtctggcatggccatcgcagacgtcaccctcctgaatggattccacgccctggcgttgctgacctagagaagctaacctccctctctgaccgata

SEQ ID NO: 539905 - DNA, 131 bp, Homo sapiens
ataataggggcatgagccatagcagctgggcgagtaacaagtcttgatgagactccttcacagggctctctggcccaagcagtgtgaggactggggctcagtcatctgagtgtcagacatctcttatgctt

SEQ ID NO: 539906 - DNA, 435 bp, Homo sapiens
  misc_feature (16)..(16): n is a, c, g, or t
  misc_feature (31)..(31): n is a, c, g, or t
  misc_feature (45)..(45): n is a, c, g, or t
  misc_feature (412)..(412): n is a, c, g, or t
atctttattccactgnatccataatattaantctcctactatgtncccaggaactgtccctacatcgggaacagtatggtagtttaaaaaatatcccctgcccctcatagagcttacaatcctaatatgagaggacagacaacaaacagaatatatacatgttggcctgtaatcccagcacttcgggaggctgagatggcccaggagtttgagaccagcctgggcaacatggcaaaaccccatctctacaaaaaatgcaaaaaattcaccaggcatggggtcgggggggtggtgtgcctatggttccacctactccaggggctgaggtgggagaatcacttgaacctcgggaggcagaggctgcagtgagccgagattggccactgcactccagcctgggtaacagagaganagagaccctgtctccaaaaaaaa

SEQ ID NO: 539907 - DNA, 927 bp, Homo sapiens
tgaaggccgcgccccgtggaaacaggggccggggccccacaccgcttccccaaaatggcgcggggccacttgcgcaacgggggccgccgccgcccgccagtggtacccagaggaaccggccttcctacccacgaggctccgcagagccttagatagacacacgcggaccgggggtccaaccaaaccacgaagcaccggaacccaaggggtggaaaaccttcgacgcagtaggcacgaccggtccgcgaaatgtatgcaatgcggtccacccggaccagtggcagcccagagattaaacccagccccgacggaggggtgtccacaagcctcgcaggaaagatgggtatacagcccgcgtcaccaccgggctacacagcgccccaggacacgccgcgcgatgggatggagagcacaacagcgcgaccagggccctcaggtccgaacggcaccacagggggcacaggtacccgccccacgccagagcgcgctcaacaccaaaaatagttggggggaccgccgcacttttacgctcgtttagttggaagaaccaccgccgcaccccacttccatgcagagggggaaaacaacatcgggagacagagttgcgtgagcagggcaggaagtaaatgtccaccagagatgtccttgtcaagacaagcaggaagtgtgcaccgcgagggctcccctcgttatagggttagcaaacacgctggtgttgacatgacacgtcccgccaccctgttgaaggagggctgctcctccataccccacggtaactacggtggctaccaggggggctcccagcgcgggataaacatccggtgcgggaggccccggaaaagaagaagttcttgtcatcccgagccagaaacaattgtgacactgctcatagttgaaaaattggggaaaaaaaacctgcacaataac

SEQ ID NO: 539908 - DNA, 245 bp, Homo sapiens
  misc_feature (112)..(112): n is a, c, g, or t
  misc_feature (153)..(153): n is a, c, g, or t
  misc_feature (227)..(227): n is a, c, g, or t
  misc_feature (238)..(238): n is a, c, g, or t
atattctcatgtttaaatggaaataaagagaacctagaatggaaaaaatgattttaggctgagcgcagtggcacactcacacctgtaataccagtactttgggaggccgagnaggacggtttcgtgagttcaggaattcaagaccagcctggncaaaatagcaagaccaaatctctacttaaaaaaaaaaaatctctgggtgtgggtgcatgtgctggaagtccaantacttgggaangcccaag

SEQ ID NO: 539909 - DNA, 133 bp, Homo sapiens
  misc_feature (3)..(3): n is a, c, g, or t
  misc_feature (13)..(13): n is a, c, g, or t
  misc_feature (94)..(94): n is a, c, g, or t
ttnccgctttttnttttttccacaccggatggggcgattacagccctggaggactcccagcgaacgcgagcagccgggagccctctcatcgccncccctgctgacaggcagcgaccatacaagcttaacagtc

SEQ ID NO: 539910 - DNA, 195 bp, Homo sapiens
ctctacgaggatccccgggagtacagtccaatgatggtaaaagggtagcttactggttgtcctccgattcaggttagacactgtggacggtctagcgagctacggacgtcacctaccacgtgactttgcgcttacgttgcggcgacaatacttatcgctattgcttgtttaggactaatattggacggaattggg

SEQ ID NO: 539911 - DNA, 1258 bp, Homo sapiens
  misc_feature (663)..(663): n is a, c, g, or t
gattatttcgtgggtcaagacgccatctgctttgttagctgccctatgggcaccaaggggagtgaggatctgctgcctccggtgtgctaggccagtcaccaggctcgctcgcgatcccgcagtgaacatccagatgcctcaggtgggcgccggctgtgatggatcgatgcggcgaatcgagtgcactcgtggctgcgagtatacacgactcacgctggcgtagtatgcccaatcaagcctaggttatgagttgtgtggtcagtcgagagtctagagaacgagatggccgccgaagatgtggcgtgggcttactgaacgcggttgtacggctggcgccatccgaatgactcgactcgatgacgctctctttcgtacgccttggagagtcatgccctacttcgtaccccaagagtagtacacatgatggcgccagtacaatcatcgtccactcgatccttgagtagactgtatcgaagggccagtgcgatgttccagctggaattggtgaccagtcctgacaggtgacttaaggatagccggggtgcgcacagaggggcttgtcctcgggaaaacgagcccgtcacccgtcgatcatggagtgactggtgcaagtccctgagaaacgcgcagttacgttggattctcgcaacgccgcttccttcnactgggagcattagcatccttgcaccaaacattgcttgcagccctgcccgacatgctaactcagcccacgggagacgcattcaagcgaggttgcagcgcaattttggtccagagcccgttcatgttcagagctcagccagaagtggcaggctggaacactggtgcacgaggcacctcggcctaatttctggagcaaacgggcccttgcccactctggtgtccttccaccgactgccgttttcccaatgacatggcacaggcccacggtataggttttccttccggcacaggacaccgcgggcacccctcggaacgtctctcccccggctgggcctggccccccccgggtatttggccacaaagctgccacctgttggggctagcatggtccccggtgcccccttggccgaccgatcccttgtagcaccctcgcaatgacggagcccgagggacgcgctgtctccgaataaagcgactcgtgtttggggcctctctgcccggcaggcggactgaaccgcgccaccacactagcacctgcgcatcggctgactaaaagagtcaaatattcacgtcaaagcacgcatacctagcacct

SEQ ID NO: 539912 - DNA, 250 bp, Homo sapiens
cggttttttccccgtcacgaactcatgctttttcttcgtgtgaaaatgaacgcagtgtttttctgtatagaaacaatggacaatcttacctttcctgaactaaactctcctagtttttatcatttattattctcggttaagtgtgacatattcttgacattatcttcaacttaatttttgttcttgcttctactattttagtttaatttccaagtattttgatattgaactttcaagaagcaggaactgg

SEQ ID NO: 539913 - DNA, 146 bp, Homo sapiens
tataccatttaaaaaaaaagacagaaaggtagattttacgagccccattagagatcaggcagaaagttctagggatgtcagtgattgagtgagttggagcacgtgtctcagaagagtactgtagattaaatggctggagcctcgtt

SEQ ID NO: 539914 - DNA, 115 bp, Homo sapiens
cagttgtgcaattgtcgtgcacgtatcatgaatactacttagtgaaatgtcaatgatggaaaagctcaggacacttaaagaaaaatccccattgtgcacaacttgtccgatgatt

SEQ ID NO: 539915 - DNA, 137 bp, Homo sapiens
actgcagagaccctgaaaatttctgcacatcctgaacctacaggagttggagaattacttgggttgaacccctaaccaaggaatgccaaatttggatgctatcaaggtattctgtaatatggaacctggggacacat

SEQ ID NO: 539916 - DNA, 161 bp, Homo sapiens
cctctgcttccaggctgcgtcacactctcactaagggctctcatcttctggaaccatggccagcacatccaccaccatcaggagccacagcagcagccgccggggtttcagtgccagactcagccatggctccctgtgggtcagcctgctctggcttcagc

SEQ ID NO: 539917 - DNA, 205 bp, Homo sapiens
ccccgggggcgatggcccagggtggcccatggtatgtgctttctcgtgttacatcgcgccatcatagggtgatgggtagtgtgttggttaatacgcctagtatcatgagcgttatggattggaagtgaaatcacatggctaggccggatgtcattaggacggctgacagggcccctgttaggggtcctgggccatcgcgacgggg

SEQ ID NO: 539918 - DNA, 177 bp, Homo sapiens
  misc_feature (14)..(14): n is a, c, g, or t
gtcgtggaaaactnggtcttgttggggacaacctcactctggatggggtcaagtcctgtctgaagccacggttgggacaggaagccacagttgtcaaggccacaggcttcctcaagaactttctgatcgagcccttggtcccccacagttaggctgaggagctctatgtctggatcc

SEQ ID NO: 539919 - DNA, 320 bp, Homo sapiens
ttatatgtggatacacaatgcctaatagggagaccaccatgtgggcacgaaaataaagagataagctcaaaagcatcaattttacttttcatgcacatgttcttggaactctaaaccacgttctaatgactgaatataactatattacttacactattaaatatattagagccggacataattctactaaaatacctaatgcgggccgaggtgcggcggctgcgctcatgtatgtgctgtgcatgaacgtgtgcgctgcaccttcatgtgtgcgccgtgtgtttgcagtgtgctgtgttgatgtgtgatacgcatgcgtg

SEQ ID NO: 539920 - DNA, 265 bp, Homo sapiens
catgtgggaaccggggcaaggcagaacggggttttcctgacccaatgaaataaatcaagttaggggggctaaactccaaaagggattttccgaagactttgcgtaaaaactgttggtgctacagcttcttcctagagtggacacttcggggtccctggaagaaaatgggacagctgtgacagtgtttacctctcagaagttggagatactcagtggtggttttttaagcatgaaaaggaagatggcgccatttctaccatagtac

SEQ ID NO: 539921 - DNA, 400 bp, Homo sapiens
gtccacacagcagctaggctgactgagatgttcattaactgtttcttgaatgaataactgaaatagtagtgattaattctgctgaaagtagttagaaaaaactgcacaggaaaggtggcatttgttggaggtggatgaattggatttttgaatatagagctgtggttgggccactgcactccagctgaggtgacagtgagacaccatctaaaaaaaaagaaaagaaaaaaagaaagaaatgcaagcagaaaaacaacccaaggttcctcaggcatggaggaatgaaaatgcagggcttactggaagaatcatgaatagcgtagtatttagaaaccttagggagtatgttgagaagaagaaatagtgagatgtggagccagtttctgaaggatgttgaata

SEQ ID NO: 539922 - DNA, 776 bp, Homo sapiens
  misc_feature (98)..(98): n is a, c, g, or t
  misc_feature (163)..(164): n is a, c, g, or t
  misc_feature (169)..(170): n is a, c, g, or t
  misc_feature (182)..(182): n is a, c, g, or t
  misc_feature (188)..(189): n is a, c, g, or t
  misc_feature (191)..(191): n is a, c, g, or t
  misc_feature (208)..(208): n is a, c, g, or t
  misc_feature (212)..(212): n is a, c, g, or t
  misc_feature (222)..(222): n is a, c, g, or t
  misc_feature (229)..(229): n is a, c, g, or t
  misc_feature (239)..(239): n is a, c, g, or t
  misc_feature (314)..(314): n is a, c, g, or t
  misc_feature (322)..(322): n is a, c, g, or t
  misc_feature (340)..(340): n is a, c, g, or t
  misc_feature (362)..(362): n is a, c, g, or t
  misc_feature (401)..(401): n is a, c, g, or t
  misc_feature (416)..(416): n is a, c, g, or t
  misc_feature (422)..(422): n is a, c, g, or t
  misc_feature (441)..(441): n is a, c, g, or t
  misc_feature (445)..(445): n is a, c, g, or t
  misc_feature (462)..(462): n is a, c, g, or t
  misc_feature (536)..(536): n is a, c, g, or t
  misc_feature (638)..(638): n is a, c, g, or t
  misc_feature (645)..(645): n is a, c, g, or t
  misc_feature (647)..(647): n is a, c, g, or t
  misc_feature (657)..(657): n is a, c, g, or t
  misc_feature (704)..(704): n is a, c, g, or t
  misc_feature (762)..(762): n is a, c, g, or t
ggtgccgggagcagtcgccgctgccgcctccgcccgcggccgggacccccgtcctcgcccgggactccttacccggggaacctagaccaggtctccanaggcttgtagaagagaagcaggcgacccttcctgagttatcctggcttagcctcccaatctggcnnccctnncccttcccattnccctgnnanaactgtcccttccccanccanccaactgaantgggtanaggtcaaaanctcctctccttccttttccttcctaggcactcattggctagagacctgtttgctcttttttttgtgcccagaganactggaanacgcttcatctaagtaantgtggggaggggtctttttgantctacaagtccttgagcaaaaaaactgaaaaaaaaaaangaggtggaaaaaaancaaatnaaatgccccaaaaccccanacanggaaaagggcttccganaacacgggcaaactttcaaccgtggggccaaaaaaatatgctaaaggaaaatcaaaaagaaagcggccaaaaangtggtgaagggcctggacagagtccaggacgaatattcccgaagatcgtactcccgctttgaggaggaggatgatgatgatgacttccctgctcccagtganggttatnancgaggagaanggacccaggatgaggaggaaggtggtgcatccagtgatgctactganggccatgacgaggatgatgagatctatgaaggggaatatcagggcattccccgggcanagtctgggggcaaa

SEQ ID NO: 539923 - DNA, 217 bp, Homo sapiens
tcgagtcgtgcgtaatgttgacaccctacggtgtcaggcatagagcaagggattgcgtaccactgcctttcctggatggcgattagctactccaaaacaagctattttgctctgttcaagaacaagagtatttcagagctttccttcctgtagattaatttaaagctgctagtatgtccagttgctgaacctgtctggacagggtggtacctgagct

SEQ ID NO: 539924 - DNA, 140 bp, Homo sapiens
ggcttaggcaagatctggagagctgcaggacgttgcggaaagtcccgtacgcctacatgtaacgggatctgactacaagaccaccacatcctgctggacggcggcgcgtgaagctggagctctgggacacgtctgggcca

SEQ ID NO: 539925 - DNA, 129 bp, Homo sapiens
ctgttacaatggtttcgtctaacccgtgctagggtgctacaagggtccgctagatagagagataagtggatcccagaagaggaaagagtgtcatacatgatgaatccaaaggactgttcactcactgga

SEQ ID NO: 539926 - DNA, 821 bp, Homo sapiens
cgtagtggctcacacctgtaatcccagcactttgggtggtcgaggcaggtggatcacctgaggtcaggagatcgagaccatcctggccaacacagtgaaaccccgtctccactaaaaatacaaaaaattagcctggcgtggtggcgagcgcctgtagtctaacttttccaaccctccttacagccagctatcatcatgtgactaaactctgggtaaacgggttgcgagtagaagtaactaacactggaacctcaacctcttactgttgtgagcttccttcgttctgattttaccgcctgtgggaaaccaaaaaccataaagacccttctagatccacgagtggaagccacaagctgaggaaggccacctggcagaccagactgttagaggagaaagaaatgtgcttgcaccttgctcaaagccactgttcttgtgggacctccttgctgcagaagctcggttggtaccttactacaattggagcaaggttctttacttccctgagtctatggttgaatatataaccacttccaaaactcatgttaaaacttaaggccgggcgtaagtggttcacgtctgtatcccaagcactttgggaggctgaggcgggagaatcgctttgaaccgagcagggcagaggttgcagctgagcagagattggccattggactccagcctgggggacaagagcaagatccatctcaaaaacaaacaaaacaaaaaccttggttggggcgggtcacgtctgtgtccagaccgggggtgcccaatctgtactcgggggagttgggggcaaaacacctggtccctgggggaaaacc

SEQ ID NO: 539927 - DNA, 380 bp, Homo sapiens
aggttgagattcagttgttgtgagtattaatgtttgttcctttttatgctgaatgtattccatggtgcagacataccaccatgttgtttatctgttcaccagttgatggacatttgagttgcttccagttggggctattattagtaatgctgccaatacctttgggcatataatttgtgagtacgtgttttcttttctttttttatttttgagatggagtctcactcttttgcccaggctggagtgcaatggtgcaatctcagctcactgcaacccccgcctcccaggttcaagcgattcttctgctgcagcttcctgagtagctgggattacaggcacccaccaccatgcctggctaacatgggaaaaccccgtctgta

SEQ ID NO: 539928 - DNA, 524 bp, Homo sapiens
  misc_feature (493)..(493): n is a, c, g, or t
caaagtattgtaatgatggcttatggagtgtcagctggataaagagtgaaaatgaataaaaactaatggattgttcagtcgaatagcagatggtacaatggtacatggccagtagaataggggacccaataaaattgaagaccagtcagagtgggagtgatcaatccagcaaagtggaatggcaggggatcgtaggcacaaggtccagagtgtaacagtgacaatgtgtggctgatgtgggatcgaggaagtgattgtttttttttctaaaagttttccttgccatctcaggataccactccgttaaatattatggctagaaagaggaataagagatactaggaacataggaaatttttaaaattcttatctagcatgtatttcttaccttacatatgtcaggcagtaaaccccccaaaacataaaacgaatgggacagtatgttccttggtttaccgttgtgcttgagctcgtatgctgtacagtctccctnagcaggcagatgtagtcctgaattaaaaaaa

SEQ ID NO: 539929 - DNA, 764 bp, Homo sapiens
gcaccccatctctactaagcgaaaacccatctctactaaaattacaaaaattagctgggcatggttgcgcatgcctgtaatcccagctactttggaggctgaggtggggagaaatgcttgaaaccctggggaggtggagggttgcagtgacgccaaaaggtcgcgaccgttgcactcacaacgcaaggggggcacccacagcacagccaaataaacaaagagaaacaaaccacagaccaaaacaagatataagcaaagacgcagagaaacacacagaacaacagtgagacaacacccgcaacggaggggacaaatgcacaaaacaaacgcatcgggggagaaaaagaacactgaacgggcgcagaggccaagaaggagcgagaaagaccacggacgagaccagcgaaccacaaggagccacgcaccacgcgagcatgtccgggaaacacgagaacgccaccgaaggacaagcaccagtgctgaaacgcgagcgtggagagcaaaaaaagcaagaaagcaagcagaaccaagaaccacaagagacggagagcgggcgcgagacaaggcacgaggaggagatgacggcagggcgccatcccccagcaaaccaagtgagccgagagagcagagcgggcgggccgcctgagtgagctgaagcaagaagagcacgaccacaaacagagaagcgacaggggcataacggaacgaaaacagaacgaacgtggacgagacagacacagagggccggcctacgagaggaggaa

SEQ ID NO: 539930 - DNA, 392 bp, Homo sapiens
cctaagaagagatttggggagacaagatttttgtcccgaaacggctatttggttatgagtgggaggattaagagtcacatagcaaattaaaattcgccctacctcacccccttgctttttattagtgttactcctaaacattgcggctgcaaacatgcccacacacagatctgtcttgtgcatctctgattatttgctcatgtaaattcctagaatgaaatgtctcagttttaaaatgcaattataactttacccttttgaaatacaaaatacaattattttctgacagtttctaccaacttatgtaccaattagctacttattccatttcccttttctcaaaacacagattaaaactggatattttaatttttaaaatgtttcgacagtat

SEQ ID NO: 539931 - DNA, 132 bp, Homo sapiens
  misc_feature (102)..(102): n is a, c, g, or t
taaaaaaaaaaaataaaaaaaaggggggggggggggggggagagagagaggagagaaagaaaaaaatatatatatttataataataaataaaaaaaaatttnatagaaagaaaaggagggggggggggccgg

SEQ ID NO: 539932 - DNA, 269 bp, Homo sapiens
actgttgacccctatgctgattgaagagtatgtcaatgagtcgattttgggtctgtttgtcgtacgcggagtgagcttgtatataatcctgcctcatatggataagtgcaaggaaggggtacgtctatgtgttttgtcaggaggtttccaattagatgtgaggcgttttataccatcagactcgcctagttacaagacgatactgtcggctacgtactattggattccatgccctagggcagccattatgggttaccgatgctcgatct

SEQ ID NO: 539933 - DNA, 377 bp, Homo sapiens
  misc_feature (223)..(223): n is a, c, g, or t
  misc_feature (307)..(307): n is a, c, g, or t
  misc_feature (334)..(334): n is a, c, g, or t
ggcatgtgggttcgaccgtgcttcctcatccccaggcgggcggagggggacaccaaggtttagccaggccgtgctgaaggccaagattcagaaactggccgagagcctggagtcctgcaccgcgggctctggacgatactcagcgacgcagctggcagtctcgaggttcacgctctgccaccaagctccacgtcgctaggccacgacctcaagaatctgcccngcctgggccttcccaagagtgccgggcattacagggcatgagcccgcctgcgcctggtcacggttgcttaattttaaagccacnggtcaagggggatcctcctagaagtcngaacctgcaaggctatgccaagtcttgggccactggcccggtc

SEQ ID NO: 539934 - DNA, 226 bp, Homo sapiens
ggatccctctcacccctcagcagtcccaggccctggggatccctctcacccctgagcaggctcaggcactggggatccctctcacccctcagcaggcgcaggcactgggggtccctctcacccctcagcaggcccaggctctggggatccctctcacccctcagcaggcccaggcactgggggtctctctcacccctgagcaggcgcaggcatcaggggttccctc

SEQ ID NO: 539935 - DNA, 593 bp, Homo sapiens
  misc_feature (396)..(396): n is a, c, g, or t
ctcgtccgaatcctctcacatggtggcctttagaaaagatcttgcgccaggaggggtgatgccagcttatcttgcttctgaaatatctccctgggatggagtgatagtaccccctcagaaaaaggcttatgagaaccccccagagaagaaggaaggagaggaagaaggggggattcctgaagccccccctcaaggaaaggaagaagaaagcatggaaactcaggagtgacattcccttccctccttttcctacccaagggggaagactggagcctaaactgcctgctattgggctttacatggtgccaaccatttccgtgggatagggaagataccaggaaaaaaagtaacccccataaaagtgtcattcccctgggttttaatattggcttagcngccagtctcccatttgtgacctatgccacccatttataatggaggaacccaccatttcttcctaatattttataatccccaactcctgaaaacccctctctcaactaatactttgctgttgaaatgttgtgaaatgttaagggtctggaaatttttttttttaaaaaaacctattaaagtccttcctagtagggcta

SEQ ID NO: 539936 - DNA, 280 bp, Homo sapiens
  misc_feature (139)..(139): n is a, c, g, or t
ggggtttttttaaaaaaaagggggaagttttccggggttggggccgggagggggccccctttaatcccaggggggtttgggcccggggaaaggtttccccccctttttgccccctttttttttggggaaaaaggatttnggggggaaattcctttttttccccccccccccctttacattttgggggggggattttttttaaagtttttttttaggggggggggaaacgggggttttttttttttttttttttttaattcaattaaaccccttcccttta

SEQ ID NO: 539937 - DNA, 177 bp, Homo sapiens
  misc_feature (116)..(116): n is a, c, g, or t
ttgagatcgttgctttgttcagttacttatctgtaaggatgctctgggtctccttgtcagtattatcacgaagagcatgaaacgataaattctccacccgggaaagagcagagtanctgtgcagaggagacactcagagctgcttcagcctccagaaatcagagcagaaggtcgacg

SEQ ID NO: 539938 - DNA, 147 bp, Homo sapiens
  misc_feature (124)..(124): n is a, c, g, or t
acccacatcagcaagggtactctgggcaagttctctgtgcccatgctgaaagaggcctgggcgcttacgggctgaagagtggtctgaagaagcaggagctgctggaagccctcaccaagcactnccaggactgaccagaggccgcgc

SEQ ID NO: 539939 - DNA, 379 bp, Homo sapiens
ttaagatccactgatggtatgggggaaaggcactgacagtgagaaaggagcaggttcccttcattccccaaaagcagagcaagagtattataatgggtttcctgaacaactgtattagaaaaaggatcctaggccaggtgtggtggctcacgcctgtaatcccagcactttgggaagctaaggtaggcagatcatctgaggtcaggagtggaagaccagcctggccaacactagtgaaactccatctctactaaaaatgcaaaaattagctgggcgtggtagcgtatgcctgcagtcccagctactagggaggttaaggcatgaaaatcacttgaacccaggaggtggaggttgcagtgagcagagatcactccgcact

SEQ ID NO: 539940 - DNA, 254 bp, Homo sapiens
gttttgctttggcctccaggaagctcagggacactctgtagctcaacttcaaaaggaaaggaaatcattccttctttggctctctggtgctagttagcatcattcaacacagccaatttacaaattccctctgtgattcagatttgggagaatgagccaacttatggtatgtgcaggtcaccattacattacttgctgttgtagctgtgaataatcatcctgatttgggggtgttacttgcattgctctaaaag

SEQ ID NO: 539941 - DNA, 1047 bp, Homo sapiens
gttatgtctttccgtggagctgtcgccatgaagtaagcacgacccgtggttcccaatccgcttacatcctcgggcagaactcctctctgtcgtccctggacatggctgtagacaccctccctgatggactattcacatttatatgttgcagggctcgagctgatgcagatatttagcgaggtacaaagatctacccctggacacggagaggcgctacgcccaggaccgacggttttttgttttccagatttcttaatgcagaaatgcgcagtcgcgctttccatttccaagcaggaatcctcggcacgataaactggactgtacctctacagaaggaagcacaaaaagggacagacggaagaaattcaacagacaaagaacccgccgagcagtcaaataccagagggccattactggtgcatctcttgctgatataatggcccaagaggaatcagaaacctgaagttagaaaggctcaacgagaacaagctatcaggactgctacaggaacgcaaaaaaggctacgcaagcatctaacaaagactgcaatggcatgctgctacaggcacctacaaaggcagcacctaagcaaaagattgtgaagctgtgaaagttcagatccccgagtggtggcaaaccgctaaactggcagattagaatagtaaaactaacagactggactaataacatcatagcaaaaggacaaaagggacggacagcacaagacaatccacaaaggagcacaagaaacgcgataccagaaaaaagaaaaggagacacaaacaagaacgaacaaaaggcaaacaggaaaccagactaacaacacgactcgacacactgaacaggcaccacaggaaggacgcaaacagaagggagaaaaggaaaaaccaaaacataaaacacgtcagacacaaggtagggaaacaggaagagagacaaagccagcacataaatcgcaaaaggaaacgaagaaagaaagaaacagagaacagagaaggcaaacaaagacagagacgaaagagcgacaaaaccagagaagaaaacagc

SEQ ID NO: 539942 - DNA, 179 bp, Homo sapiens
tccgctgcgctctagaggacccgatgggcctgggtctcaataaagctctgcccatcctcgctgtttcccaaggcaggtggtgtgttgcgggccccttcagacccaaagctttaggcatgattccagctggctgcatataggagtcagttagaattgtttctttctctccccgattctct

SEQ ID NO: 539943 - DNA, 333 bp, Homo sapiens
agctgattcctgagtataaaatgccggcacgcggaaacagtcactctttcataaggttgcttccctactcaaacccacccttcttagcagatggcatgttgctctggcgcgagattttagcctaaacagacccctaggctacctgtgcaacatcaagcacagcaaaaggtcacccctttccggggggacggatactgaaccctgtcattccaattagaaacgtgtttcaaggacacagttactccggtctcagaactcttcaatgtgagtaggtaagtacaggcccgattacaagtgatgccacaaaaaaacagtattttgggcgtacgttca

SEQ ID NO: 539944 - DNA, 724 bp, Homo sapiens
  misc_feature (101)..(101): n is a, c, g, or t
  misc_feature (662)..(662): n is a, c, g, or t
cttctcataagattgatagaaacagctgatcgtttcgccgaaacaataattaggcacagagaacagacttcagctctctgaaggctgcatgaccacctgtnctctcatctacttctagtgtatgtcaaagctaaattacggtcaacacataggaaataagtcgaggaatccccgaattcgactagaacacttcaccaggtctctgtagatctagatctggccacattgtatcctgtgaattacttataggtcgatccctcacagaggttggcctccatcttcctgcttgaattcctctcgaggatcggggtgctcattgtgtgctttggctaagtcactctctgattgttagcaaacatctgtgaagagcttttattccatcagtcctgtttctgaagctgtacggtacaaattcattattatccccagttagaggctcaatctattggaattacatctaccatgtctcctagtgaaacttgcttctcctatggccaatcatccttacttaccttaatacctttttattttccctgaaaagttatcctttaaatcttcattaaaaagagcaacccattgcccattccacaaattacaagggtgacaatagttgaccaaacataaagttcaaacttacatcataattggggtgactcgatcanttaagtggtctatagtgttgtcctcccgagaatggttgcctgctttgattaattaacgcaag

SEQ ID NO: 539945 - DNA, 883 bp, Homo sapiens
gacagcgggcagcaggcagtcggggtggctcagacggattctcctcctcctcttgctcctccagctcctgctccttcgctcgtgaggacgcccggcgagtcctgcgccagggccgaggcagccatcgttgagtcgctagtcccgctgcagccggacatgcggagaggcatgtgcggccggaggtacaaaggatgccctcattaacgtgccccgatgtatcgcagcgtaactgcggggtggcaagagtccacagatagaaggtggtccacgggaaaattattgcgaaagggtgatgaagtcatgccccgtgtggggaaagtagtaatcagaaaaaaagcacgaggggccggagtctcatgggcaactgggacccaatgaactgcaggggccatgggggtgccccgagggctgagaatgctactaccctgacagtcgcgcgagacttcctgactgaagagccggacctcggaagcggggacagtgcaggcgcagcggtgggcaggaaaaggagcgccctgggacgcgcaggagaaacgaggacatgcattcacaaattggccagcgttcacgaatacgtcccggtgcagatttcagctgcgacagtggagaactacgtgacgaacggggaatccactggtaccagaactgcgcgagccggtgatagcgaggagccacggacgaggctgtccagaaagtcacagccactctgacagacagggcagactaggaacgcgggagacgaaaacaggcgtaaacggcggggggccagagactcggacgtgcccatcggcggaccgtgacagccggggaaggtttcaagtgaggccccaaaaagaagggagcacctacccccgcgaaacaaagaggcaaaagagacagggaa

SEQ ID NO: 539946 - DNA, 458 bp, Homo sapiens
  misc_feature (202)..(202): n is a, c, g, or t
  misc_feature (204)..(204): n is a, c, g, or t
tcggccagcaggatcgcgccgagatcgatgttcgaacgcagcaccttcagcagccggctgcgccgcacggtcaggccgaccaggttgtgctcgtcgcagaaacgcttgatcgcttcggcatgcatgcggctgtcgtcgaggacgagcaccttgctgacgggttggtcttcggtcatctcaagaattcctgatggtcggtcanancagttcgagctcgccgccggcatccaccgtcgccgtttccggcacatggaaatcgaccggcgcgttcgcgcacacgcacagcgtcgcaccgacccgcacgtcgccatcgagcgtcaggtcgtatgtcgccacgtaatcgggggcgagcgcgggcatgtagtcgatgctcgcaccgctcagcaggtacggcgtcgacatcccgagatcgggaaacggcgtggtcagcgcctggttgatcgcgccgcagcacaggt

SEQ ID NO: 539947 - DNA, 105 bp, Homo sapiens
actttatgtagtcatgcactttggtattaatatattagaaatctacagtctttggaggtgaatttacaaaaagcccagcctattatcatcctcctgagttatttg

SEQ ID NO: 539948 - DNA, 108 bp, Homo sapiens
atggtaaagagatcaacagcattgaattgtgtccagaaatggatattacctacatgacaactaaacagacaaagtgcaaaggcattcagctgagaaaaaacagtcttc

SEQ ID NO: 539949 - DNA, 865 bp, Homo sapiens
gggacgcctaaggtgggcggatcacttgaggtcaggcgttcgagaccagcctggccaacatggtgaaaccccatctctactaaaaatacaaaaattacccgggcgtggtgtcacccgcctctaatcccagctactcaggagactaaggcaggagaatcgcttgaacccaggaagcgaaggtgcggtcagccgagatcatgccactgcactccagcctaggcaacaagagtgaaactctgtcttaaaacaaaaaaaattaaacaattatatccgggccgggcttggggggtcaactcctataataccagcaccttaggaggccaaggcggaggatcacttgaaacccaggaggcagaggttgcagtgagccaagaccggcaacgtggcactccaaggcctgggcacacagaagtgagacctccatcctcagacgagaacacaaccaaccacacacacaacacaaacaaaaaaagtagcggaggaccacacggaacacagaaaagcagccgcacacacacccacgtagagggcccagggccacacaaaataaatgacaaaagggcacacgaggcccacagagaaactcggccacaatagggccagcgccacaccaacagaaaaaacgcaccgggggcacaaggaccgatcagaccaacaccgaaagaaacgggagcacaaggggccaaaccaagagcaccgcagcccaaaaacaaatcgccgccgcggagagaccgaccagccaagacaagcaccagacgacacacagaacgaaagagaaaccagaggaaagtagacagcacagcgaaccacgacccgcaccaaagacagacaaccaacacacaaagcaccaagccaaagacaaaac

SEQ ID NO: 539950 - DNA, 562 bp, Homo sapiens
  misc_feature (301)..(301): n is a, c, g, or t
gaaaaattttccttaaattacatctttttaacttaaaagctttttgggaatttgaggaaaattataatagaaggcattgaaaactttccgaaataaaaaacaaggcaattattaactccaagaaaaccaaaaagcataatcataggctgtaatcatagtgtataatgtagcttttagtgaggcccaacattacatagatcataataatgtaaacactgaacatcaatttaaccaaaagtaagagttcatatataaatctctgccaaaatattgctcttttaaaaagtaaaccattgaggcntgatgcagtggctcatgcctgtattcccggcactttgggaggccgaggcaggtggatcacccgaggtcaagagttcaagaccaacctgggtaacatggtgaaaccccggctctactaaaaatacaaaaattagccgggcatggttgtgcgtgcctgtaatctcagctacttgggaggctgaaacatgagaatcacttgaacctggaaggcgatcacatgttgcactatagcctgagcggcagagctagactccagctcttc

SEQ ID NO: 539951 - DNA, 244 bp, Homo sapiens
atgttggtgggtgtgtgtgtgtgtgaggctggagacttcactgtcctaatattaacagcccatttttctatcagtgaagtttcatagcaattttgattttgcgtagaaatacttaacctttcgtgtgtttagatacattttgtttctatactttaaattatctagatttttttatttgtacagtcaaatcaggttggaaccgttcatcacgtttttaaatgagcaaacaaaatacccaggcaat

SEQ ID NO: 539952 - DNA, 249 bp, Homo sapiens
gtgaggtgcagccgttggggcggctcagaggcaggtgactatgaaggcttatatttccaacagagttccacagatgaggaaataacatttgtatttcaggaaaggaggatcttcctgttacagaggataactttgtgaacttcaagttaaagcttgtgctctgagccagttaaatacaagcttctggcagaattgaagttgaaaaggatttatttctgttgggagagaatttgctggatttgtattaga

SEQ ID NO: 539953 - DNA, 945 bp, Homo sapiens
ggggagaagatggctgcccagaagtgcccgggctctcccggcagttgagagaaaggtggtcctgagagccagtgggaggctccctcctgggtatgaccggtaccaaactcgagcaccagggtggatgttcggtgtgggaagtctggcagtcgtttcagggttatgggacctgcagagtgtgtagcagacgtcaggacgagccagcagttgtgtctccccgggatgcctacagggggctagtatgcgctggggctgcggcgtgccgtaagctttgtgtgtctttccagagacgcagccgctggaagctgtgtagcctgagggtggcgcagagaggatggggggtctgcccttctgatgaaattccggggagtggggggcatggaacgatatgacgctccaagatgaagggttcccgttttgacgcatttggtggtgggaatgcttcaggtacctctgtggttcatgagcagtttgtgaaagcttgttgaggccgtgcctgtttcaggtatacgggtatagaaggtcgctatgcacaggaggtctttattcgttgttgagtcaaaacagaaatatgctgggggcaaggtagaaaagggagttggttgagaggtagagaaatcctgaatggagaccaagaggggtgtgtgtgtttggaatacctatgtgaagcggtccattaaggtgaaaggcctaaatgagatgacaggaaaagagaggtctttcggcatatgcaactgattagttgttgtgaaaatgtcggtaagaataccaaggagtgtttgctttttaccatgatgttgcctcgggaagggactgaagggcctgttctaaaaacaattttgagtaatgccgaaagctagaaggcgataaaggaagacgatggtggagggggaatgtttttcacaagggggaggaatggtggataagagagaaaaggaggggggg

SEQ ID NO: 539954 - DNA, 399 bp, Homo sapiens
ccgccctcatcatacctactagggggaattctactagacacatctgtgctttaatcatagatgttaatagaggaagcagatttcacgctgcagattcctgaatagaggtgctgaaagagggtacttctgaactcaggctaagttgaagaccagactgtgtagaaaggctgaatcaacaaggaaagacctgacagctaggtacatacgctctgacatagtactcccatgacggctttcagagacacatgtgctgatagaaatctaaacctatgaaacttcactgctggcgacttctatggccgaggactgaacagcgaaacactgacccagatgctatgtgccagaagagaactagagcattgcagcatggagatcgcctatgtatgatgaaggacggat

SEQ ID NO: 539955 - DNA, 343 bp, Homo sapiens
acatactgtaatcccaactctaggactttctgggaaggtcaaaaagatagacgtagtaaaaggatgagtggtggtcaggggtggaggagaggaggaggcacgaaagggtgaagtacagggaatttccagcagtgaaactatttggcatgatgctgtatgggggatataggacattacttattggccaaaacccatattctgtgaaactcaaagaatgaactctagtgtaaactatggacttgggaaacaaaagacattctatgacaagcattctgtctaaagtagcgggccgtccatttacaaaatatagtacttttcaataggtagagagccgggaaagggt

SEQ ID NO: 539956 - DNA, 147 bp, Homo sapiens
ccagtccccatgtgcaaaaaaggtcctgtacagatctctccgggctctcctttttcctttggaaaaacttgttcctatttcaggaaagggaaatggtgtccctcaggccctgggactccttttccagccaggctggggccccaggtc

SEQ ID NO: 539957 - DNA, 138 bp, Homo sapiens
ctaactcttacacagtcctgctgttgcactgcctacaagccttagcctgtctactcctcagccaacagcacaaataactgtatcatatacaacaccagaacgggtcatggctgctgtgaatggacacagcaacagctt

SEQ ID NO: 539958 - DNA, 797 bp, Homo sapiens
acagtgctccaaagaaatcagtttacaaatggataactcgttttaagaaggcataaggtaatgttgaagaagaagcccacagtggcagatcatccacatcagtttgtgagaaaaaagttagttcatggcgtaattgaagaaaaccaacaattaacagcagaaacaacagccaacaccatagacatctcagttggttcaccttacacaattttgactggaaaagttcagcaaactttatacctgataggtaccaaaaccattgcacccagatcagctacagacaagaatagagctttcaatggaaattttaaataaatgggatcaggatcttgaagcctttcattgaaaaattgtaacaggagatgaaacatggctttaccagcgcaatcctgaagacaaaacaaagcagtggttaccaagataagtagttcagttaaagcacaagaggactggttgagagcaaaggtcatggcaacagcttttgaatgctcaaggcattttgctttgactttctgtagggccaaagaatggtaacgtgcttatcatgggaggtgtttgagaaacttagccaaagcttcagcagaaaaatccccgagaaagaccagagagttcttcaacacaacaatggttctgctcatccctctcattaaacaagggcattttgcaagagttttgatgggaaatcactagggattcacccttcaggtcctgggtttgggacctttttgactttttggttccctaaccttaaaaaaaatttttagggggagtccatttttttcaaggtaatgtttaaa

SEQ ID NO: 539959 - DNA, 155 bp, Homo sapiens
  misc_feature (16)..(16): n is a, c, g, or t
atgagtagagtgatcnggcaaaaagaaaaggattgcacattttttaaaggtccgttagctcaattgttttgagaattggcaattatctttatctgtgtcgtgactacccacttagctgcaatgtgggagtgttccgttagcatggaaaaatttac

SEQ ID NO: 539960 - DNA, 124 bp, Homo sapiens
ctagaggatcccatggccggtgaagagggcaggctggtgcccagttgagtatgagttacagccagaaaatcactacgctacacacaaagctaggggtggtgggaaggatcatccctttcgctga

SEQ ID NO: 539961 - DNA, 274 bp, Homo sapiens
ctccagcctaagggacagagccaggccatgccacaaaagaaaaaagtggacaaattgtatgatttttagtagactcacagagttgtgcaactatcaccacaatcaattttggaagattttcatcactctaaaagaagccatatcccttagctgttactctcaattctcccttccccagctcctgacaaccctaaactttctgtctctgtgaatttgccttctctgcaaatctctttttttgagatggagtctcctcgctcttatttcccaggtt

SEQ ID NO: 539962 - DNA, 987 bp, Homo sapiens
  misc_feature (1)..(1): n is a, c, g, or t
nggttgagtgcccgccccgcgtgtttttctcgggagaacaaaagagttttgcttcgcccccttaattggtttgtatattgttgtaaagtagttggttgaacagcagtttgttcttcaacgacgggtcgtctctcatgggggatgatatttatgttgacacctcccgtgtgtgttggtgaacgttatgttctcctgttggtgcgccctgcgcgctgttctttttgctctcttattgttctgccgctcctctgttgcgccgcacctctcgctagagcgtctcctttccgccagtctccttgttatctcagattctccccgcacgcgaggggtctccccacaggagtctcctctctctcccctgtgtctctcgtctcacagatctcacaattgtgcgcccccccacagagtgtgttctgtgtgcacacctttctgtgggtgtcactcccgcggtgtttctgcggcgtggcatatatatttcttttcgcacactctctctgatcacagtatcatgtctctccccccttatgttttttctgggtggcacccagcgtgcggcacctgtggtgcactctcttctgtacacgttgcgccacactctgtagagtgagttatctcctcccgcggttgtgagaccccccactcttttggattaataaaaatatacacttcacccacaagctcttcttgcacactctcactctagagcttgtgctccccaccactctatgaggttttataaaacacacagatgccatttctcccaagactcgtgtttatacccacaacccctcttttcccccgtacacgacccggggtgatatatataccggtcacaagtgtcttgtaaatttgttgggcgcccaccccccatttctaatgcgccctctcgtctcctatgaaattaattctccccttaaaaatttttgtaaaatagggcgcccctattttatcccctttgccccccccttttcccccttttgggcccca

SEQ ID NO: 539963 - DNA, 565 bp, Homo sapiens
gggatcataaactatatgcgtcccgccgcgcgacgagaacaccgctatatagtagcagccagccgcgtcgcggccactacgagcggagacgatatagtagagaagcggagcggctagaggggcagcaccaccccaccgctcactgacgagagcgcagaccaccccttcgacggggggtggcgagagcgtgcgcccccacgccgcggtggtggcgcccccacaccactcgcgcgcgccgcccctcacactctctctcgctctctcctcgcggctgacaccggccacgcgctgtggctccccctcctctctcctcacacgtctctccccccccgctctctctgtggagcgccccctcgcgcaggcgcgcgctactacggtccacacagcagggccccctgctctctctataccgccactcgccgccgctagtgtgacgccggaagatacaggagaccccccaccaccccacccccccccccccctcacgcccccaccgcgcccgaatagagcgagccgccccacaaaacagcaatataatagggagaacaggcaaacaaaagacaga

SEQ ID NO: 539964 - DNA, 414 bp, Homo sapiens
acattctccgaccaagggccaaaaataggcaaagctctctccactaaatcggtttcctaaattggggatctcaaactagtaaaatttcagaaaactttcggaacttttgtcaagagcatactaaaaaagtttatcttttgtcgtttactatcattaaagccataaaacagcattttacaaggaaattttaaaaattaagaatatggcataactcccttccagagaggtagacccaaaaatattctgaaaagtttttgtaatgcattaaaatgacggcataacattttattaacactctgttacgtttcttttttcttttttttttgagacggttttgctcttgttgcccaggctggagtgcaacggtgcgatctcggctcaccgcaacctccgcctcccgggttcaagcgattc

SEQ ID NO: 539965 - DNA, 451 bp, Homo sapiens
gacagtgctgaaccttatatatattttttcctacacatacatacctatgataaagtttaatttataaattgggcacagtaagagattaacaataataacaacattaagtaaaatgagttacttgaatgcaagcactgcaataccataacagtcaaactgattatagagaaggctactaagtgactcatgggcgaggagcatagacagtgtggagacattgggcaaggggagaattcacatcctgggtgggacagagcaggacaatgcaagattccatcccactactcagaatggcatgctgcttaagacttttagattgtttatttctggaatttttcatttaatgtttttggaccatggttgaccatggttaactgagactgcagaaagcaaaaccatggataagggaggactactacaaaagcattaaattgatacatattttttaaaa

SEQ ID NO: 539966 - DNA, 129 bp, Homo sapiens
  misc_feature (25)..(25): n is a, c, g, or t
  misc_feature (58)..(58): n is a, c, g, or t
  misc_feature (98)..(98): n is a, c, g, or t
atttatgtgagatgtgtcaatactngtcttgcgttatttcggctacttgaaaataagntaaaaaagatagtgtttggttccaaaaaggaaaagtcagnctctcctgcatgagtgggagctgcaaccttt

SEQ ID NO: 539967 - DNA, 397 bp, Homo sapiens
  misc_feature (50)..(50): n is a, c, g, or t
tcccccggttcttacagttccccaatctcacgtcaatagtaattcaagtnctggagagtgctccaagctcccgaagccgaagtctcactttgctcccacatggaacacccaattctgcgtctccctgtagccagagacacctcagtgtgggggcccccggtgttgtcacaatcacgcatcacaagtcgcctgcagccgcccgaagagccaagagtcagtattccggccagcttcacgaagtcagagaggtacacactctcctgacagaggaaagctgtttgctgcactggtttactggatagattaactgggttgaggctgtgtaatttaatatgattttaaataaaccttttacagagtctgataaagaaaaaaaaaatggcctacttggcctcac

SEQ ID NO: 539968 - DNA, 276 bp, Homo sapiens
cattgcaggctgaacctgacccttgtggctccctgctctctgccagccctttctcaccccttggtcccacggcccctggtctctcccctctgctagaatctcgctgagggattggtggggagggggtggtcacgcacgtctgtggagatctgttgccccctgaaggccggacaggaagggccagggcggacaaggtctttgagaactcggtggcatcccgctcctgatggcctgggtcccaccgcccctcccccagccttcctgacagcagaggag

SEQ ID NO: 539969 - DNA, 196 bp, Homo sapiens
gacgctgttaattgtcagttcagtgttttaagttgttggtgattgtagatattgggctgttaattgtcagttcagtgttttaacttgttggtgattgtagatattgggctgttaattgtcagttcagtgttttaacttgttggtgattgtagatattgggctgttaattgtcagttcagtgttttaatcgtcgacg

SEQ ID NO: 539970 - DNA, 2359 bp, Homo sapiens
ggatgtgtgttgcccgaatgatgtgctctgtgaggcaccggctagttgctgtcccgagggtgggagtgcagcgtgtggcataggttgcggttgtgtagagtggtccgctggtggtccgcaggttctgtcgtatcttcgcctctgcgcgctccttgaatggaggaaacttttctttgccagtgcgagttgcaattgtggggaaaggatggatagactctccgcagggatgtccaggttctcggtaggttgatcccaaacattgcgtgggccgcgtgtatacgaggcgcctggatggcgttaggggtcgccagggcagttgtcgcgactcgctgcgcaaaagtagaatgttgctataaggccacagttctcctagaagtcaagtgtccctggagggaagaggccaggccgtggctcctgttctttcctcttcggagctgcttcgctcacgtgacatgagtctttagaaatcaatagtggctgcagtggtgaccttcactgaggcgatctgcttcctgctctgtattagttatctgtttccgagaaacagaagtgatcacagaacttcgtggcttaaggcaacaaacactgattatctcacaggcgctgtgggtcgggatttggaggcacattcagctgggtgttcctggctcagtgtctctctgggttgtagtcaagctgtgggtcatggctgcagtcatctcaaggcttgactggtgacaacctacttccaaggtcactcacatggctgttagcaggtctcagaaaatctgcttataaggtgactgacacagtggctggcacaccttcatgcctcctgcctgggctatccattggtggcctgagtatccttatgtcatggcagctggctttcctagagtgactgtgaggatcacctgccactcccctcgctccgccagacaacgcggagggcctccctgagctgtgactttgctccgccggtgataatttccaggttactgtgtaggagcgtctggcgcagcatcgtgtgcggaagaccgagagagggagtgtgcgtgtgagcctgtcaggccgggcgggtccatatccgggtggaccgggtgggtggggctgcccctccctccaggtcccgaggtggataaggggtggggagtgacgtgcagagattccctttcgccccttcggatccaagagagggtggcagaaggaatgcgtgggtgacttggcgtggatttagggcgtgcccaccctgcagatcggcctcctagagtgtcccgagggcctgagaggccgcagggacacgaaggaagagaaggaggaacccgaagagggctcgcctagccggccacccgctccgaacttgcccgggaaactagtgcggagggaggggccgggccctggccgcggcgggaggagtcgctggcgcagctgcatccagccccgttggcttccttcccagctctccttcgcctcctcctcctcttcctcctgtatgagtcaggcatttcccggggatttggagcaggcacgcgcggcccgggcgtccggagctgtagcagcagcagcagccgccgtgccggggccgccaccgcggcgggcacccgcgtcccgggcgcccacggaccatggagagggcagtccagggcacagacggcggcgggggtagcaacagcagcagccgcagcagcagccgtgctacctcggcgggctcctcgccctcctgctctctggcgggccggggggtctccagccggtcggcggcggccgggctcggcggcgggggaagccgcagcagcccgggctctgtggccgctagcccgtccgggggaggcggccgcaggagggagccggcgctcgagggcgtgctcagcaaatacaccaacctcctccagggctggcagaacaggtacttcgtactggatttcgaggctggcatcctgcagtattttgtgaatgagcaaagcaaacaccagaagcctcgaggagtcctgtctttatctggagccatagtgtccctgagcgatgaagctccccacatgctggtggtgtactctgctaatggagagatgtttaaactgagagctgctgatgcaaaagagaaacaattctgggtgactcagcttcgagcttgtgccaaataccacatggaaatgaattctaagagtgctccaagctcccgaagccgaagtctcactttgctcccacatggaacacccaattctgcgtctccctgtagccagagacacctcagtgtgggggcccccggtgttgtcacaatcacgcatcacaagtcgcctgcagccgcccgaagagccaagagtcagtattccggccagcttcacgaagtcagagagatgatgaaccaggtggaagggcagca

SEQ ID NO: 539971 - DNA, 953 bp, Homo sapiens
gagagaaagcgacctcaagatacaactggcaactgaggaaaaggcctcaattcaacaagtagctaacaagcttgggagtttatttcggaatctttaaaagactcttctgcttacccacaatctgggatccactgcaggaaaacaaaaaaggacaacttcatttaaagagaagcaagaagtaaacatgggacaaattgggaatgtttaagtctctgaaactccgcactgacacaaggaaaataagattgataacttaagcttaacattctgaggcataaagaaaacattaactttggaagtattccatccttggattccggaattccaggtttgaaagagacagtgtggttcacatctcgtgggtcacagtatcacagcttctctttacaatttataatcctatgggttggactcgttgactgtattttttaaaaggttgctcgtcaagttaactgagccttggaattcatggattttctaaagactaacaaatgaaaatattttcctgttgaagaacccagcggaaattttacagcaaacaaatttcatgttcctattgggtatttctgagaacaacaggaaactatctataaaagcatccaaaagattccagattatttgcaaaatacattgggaaggtcatagaggttataacctgcattcccaaaaggaagactggcagctgatgaaagtggcttccaaactgcaaaatttggacggtgcctttaacgaagggttaaggacgtttacaggttcccacatgggttgctaataattgactccctttaaagtaacactttcgtattggggtggcatgttacacgcaatgggaggtatgagccactggggtatacatactgccacactaggtgttggcccatatatgaactgttacacatcatgggtcacatcaacaggacgcgaaatggaacataaacacttacactgaatta

SEQ ID NO: 539972 - DNA, 2482 bp, Homo sapiens
ggatgtgtgttgcccgaatgatgtgctctgtgaggcaccggctagttgctgtcccgagggtgggagtgcagcgtgtggcataggttgcggttgtgtagagtggtccgctggtggtccgcaggttctgtcgtatcttcgcctctgcgcgctccttgaatggaggaaacttttctttgccagtgcgagttgcaattgtggggaaaggatggatagactctccgcagggatgtccaggttctcggtaggttgatcccaaacattgcgtgggccgcgtgtatacgaggcgcctggatggcgttaggggtcgccagggcagttgtcgcgactcgctgcgcaaaagtagaatgttgctataaggccacagttctcctagaagtcaagtgtccctggagggaagaggccaggccgtggctcctgttctttcctcttcggagctgcttcgctcacgtgacatgagtctttagaaatcaatagtggctgcagtggtgaccttcactgaggcgatctgcttcctgctctgtattagttatctgtttccgagaaacagaagtgatcacagaacttcgtggcttaaggcaacaaacactgattatctcacaggcgctgtgggtcgggatttggaggcacattcagctgggtgttcctggctcagtgtctctctgggttgtagtcaagctgtgggtcatggctgcagtcatctcaaggcttgactggtgacaacctacttccaaggtcactcacatggctgttagcaggtctcagaaaatctgcttataaggtgactgacacagtggctggcacaccttcatgcctcctgcctgggctatccattggtggcctgagtatccttatgtcatggcagctggctttcctagagtgactgtgaggatcacctgccactcccctcgctccgccagacaacgcggagggcctccctgagctgtgactttgctccgccggtgataatttccaggttactgtgtaggagcgtctggcgcagcatcgtgtgcggaagaccgagagagggagtgtgcgtgtgagcctgtcaggccgggcgggtccatatccgggtggaccgggtgggtggggctgcccctccctccaggtcccgaggtggataaggggtggggagtgacgtgcagagattccctttcgccccttcggatccaagagagggtggcagaaggaatgcgtgggtgacttggcgtggatttagggcgtgcccaccctgcagatcggcctcctagagtgtcccgagggcctgagaggccgcagggacacgaaggaagagaaggaggaacccgaagagggctcgcctagccggccacccgctccgaacttgcccgggaaactagtgcggagggaggggccgggccctggccgcggcgggaggagtcgctggcgcagctgcatccagccccgttggcttccttcccagctctccttcgcctcctcctcctcttcctcctgtatgagtcaggcatttcccggggatttggagcaggcacgcgcggcccgggcgtccggagctgtagcagcagcagcagccgccgtgccggggccgccaccgcggcgggcacccgcgtcccgggcgcccacggaccatggagagggcagtccagggcacagacggcggcgggggtagcaacagcagcagccgcagcagcagccgtgctacctcggcgggctcctcgccctcctgctctctggcgggccggggggtctccagccggtcggcggcggccgggctcggcggcgggggaagccgcagcagcccgggctctgtggccgctagcccgtccgggggaggcggccgcaggagggagccggcgctcgagggcgtgctcagcaaatacaccaacctcctccagggctggcagaacaggtacttcgtactggatttcgaggctggcatcctgcagtattttgtgaatgagcaaagcaaacaccagaagcctcgaggagtcctgtctttatctggagccatagtgtccctgagcgatgaagctccccacatgctggtggtgtactctgctaatggagagatgtttaaactgagagctgctgatgcaaaagagaaacaattctgggtgactcagcttcgagcttgtgccaaataccacatggaaatgaattctaagagtgctccaagctcccgaagccgaagtctcactttgctcccacatggaacacccaattctgcgtctccctgtagccagagacacctcagtgtgggggcccccggtgttgtcacaatcacgcatcacaagtcgcctgcagccgcccgaagagccaagagtcagtattccggccagcttcacgaagtcagagaggtacacactctcctgacagaggaaagctgtttgctgcactggtttactggatagattaactgggttgaggctgtgtaatttaatatgattttaaataaaccttttacagagtctgataaagaaaaaaaaaatggcctacttggcctcac

SEQ ID NO: 539973 - DNA, 2173 bp, Homo sapiens
ggatgtgtgttgcccgaatgatgtgctctgtgaggcaccggctagttgctgtcccgagggtgggagtgcagcgtgtggcataggttgcggttgtgtagagtggtccgctggtggtccgcaggttctgtcgtatcttcgcctctgcgcgctccttgaatggaggaaacttttctttgccagtgcgagttgcaattgtggggaaaggatggatagactctccgcagggatgtccaggttctcggtaggttgatcccaaacattgcgtgggccgcgtgtatacgaggcgcctggatggcgttaggggtcgccagggcagttgtcgcgactcgctgcgcaaaagtagaatgttgctataaggccacagttctcctagaagtcaagtgtccctggagggaagaggccaggccgtggctcctgttctttcctcttcggagctgcttcgctcacgtgacatgagtctttagaaatcaatagtggctgcagtggtgaccttcactgaggcgatctgcttcctgctctgtattagttatctgtttccgagaaacagaagtgatcacagaacttcgtggcttaaggcaacaaacactgattatctcacaggcgctgtgggtcgggatttggaggcacattcagctgggtgttcctggctcagtgtctctctgggttgtagtcaagctgtgggtcatggctgcagtcatctcaaggcttgactggtgacaacctacttccaaggtcactcacatggctgttagcaggtctcagaaaatctgcttataaggtgactgacacagtggctggcacaccttcatgcctcctgcctgggctatccattggtggcctgagtatccttatgtcatggcagctggctttcctagagtgactgtgaggatcacctgccactcccctcgctccgccagacaacgcggagggcctccctgagctgtgactttgctccgccggtgataatttccaggttactgtgtaggagcgtctggcgcagcatcgtgtgcggaagaccgagagagggagtgtgcgtgtgagcctgtcaggccgggcgggtccatatccgggtggaccgggtgggtggggctgcccctccctccaggtcccgaggtggataaggggtggggagtgacgtgcagagattccctttcgccccttcggatccaagagagggtggcagaaggaatgcgtgggtgacttggcgtggatttagggcgtgcccaccctgcagatcggcctcctagagtgtcccgagggcctgagaggccgcagggacacgaaggaagagaaggcatttcccggggatttggagcaggcacgcgcggcccgggcgtccggagctgtagcagcagcagcagccgccgtgccggggccgccaccgcggcgggcacccgcgtcccgggcgcccacggaccatggagagggcagtccagggcacagacggcggcgggggtagcaacagcagcagccgcagcagcagccgtgctacctcggcgggctcctcgccctcctgctctctggcgggccggggggtctccagccggtcggcggcggccgggctcggcggcgggggaagccgcagcagcccgggctctgtggccgctagcccgtccgggggaggcggccgcaggagggagccggcgctcgagggcgtgctcagcaaatacaccaacctcctccagggctggcagaacaggtacttcgtactggatttcgaggctggcatcctgcagtattttgtgaatgagcaaagcaaacaccagaagcctcgaggagtcctgtctttatctggagccatagtgtccctgagcgatgaagctccccacatgctggtggtgtactctgctaatggagagatgtttaaactgagagctgctgatgcaaaagagaaacaattctgggtgactcagcttcgagcttgtgccaaataccacatggaaatgaattctaagagtgctccaagctcccgaagccgaagtctcactttgctcccacatggaacacccaattctgcgtctccctgtagccagagacacctcagtgtgggggcccccggtgttgtcacaatcacgcatcacaagtcgcctgcagccgcccgaagagccaagagtcagtattccggccagcttcacgaagtcagagagatgatgaaccaggtggaagggcagca

SEQ ID NO: 539974 - DNA, 138 bp, Homo sapiens
atagccggcacctttcaagcggagatctggcctggagatgagagtggtgtgcaataaccaaaagatgttggcaggccatgtgctccctccggaggctctggaggagaatccatgcctggcctctttcgggttctggtg

SEQ ID NO: 539975 - DNA, 2830 bp, Homo sapiens
ggatgtgtgttgcccgaatgatgtgctctgtgaggcaccggctagttgctgtcccgagggtgggagtgcagcgtgtggcataggttgcggttgtgtagagtggtccgctggtggtccgcaggttctgtcgtatcttcgcctctgcgcgctccttgaatggaggaaacttttctttgccagtgcgagttgcaattgtggggaaaggatggatagactctccgcagggatgtccaggttctcggtaggttgatcccaaacattgcgtgggccgcgtgtatacgaggcgcctggatggcgttaggggtcgccagggcagttgtcgcgactcgctgcgcaaaagtagaatgttgctataaggccacagttctcctagaagtcaagtgtccctggagggaagaggccaggccgtggctcctgttctttcctcttcggagctgcttcgctcacgtgacatgagtctttagaaatcaatagtggctgcagtggtgaccttcactgaggcgatctgcttcctgctctgtattagttatctgtttccgagaaacagaagtgatcacagaacttcgtggcttaaggcaacaaacactgattatctcacaggcgctgtgggtcgggatttggaggcacattcagctgggtgttcctggctcagtgtctctctgggttgtagtcaagctgtgggtcatggctgcagtcatctcaaggcttgactggtgacaacctacttccaaggtcactcacatggctgttagcaggtctcagaaaatctgcttataaggtgactgacacagtggctggcacaccttcatgcctcctgcctgggctatccattggtggcctgagtatccttatgtcatggcagctggctttcctagagtgactgtgaggatcacctgccactcccctcgctccgccagacaacgcggagggcctccctgagctgtgactttgctccgccggtgataatttccaggttactgtgtaggagcgtctggcgcagcatcgtgtgcggaagaccgagagagggagtgtgcgtgtgagcctgtcaggccgggcgggtccatatccgggtggaccgggtgggtggggctgcccctccctccaggtcccgaggtggataaggggtggggagtgacgtgcagagattccctttcgccccttcggatccaagagagggtggcagaaggaatgcgtgggtgacttggcgtggatttagggcgtgcccaccctgcagatcggcctcctagagtgtcccgagggcctgagaggccgcagggacacgaaggaagagaaggaggaacccgaagagggctcgcctagccggccacccgctccgaacttgcccgggaaactagtgcggagggaggggccgggccctggccgcggcgggaggagtcgctggcgcagctgcatccagccccgttggcttccttcccagctctccttcgcctcctcctcctcttcctcctgtatgagtcaggcatttcccggggatttggagcaggcacgcgcggcccgggcgtccggagctgtagcagcagcagcagccgccgtgccggggccgccaccgcggcgggcacccgcgtcccgggcgcccacggaccatggagagggcagtccagggcacagacggcggcgggggtagcaacagcagcagccgcagcagcagccgtgctacctcggcgggctcctcgccctcctgctctctggcgggccggggggtctccagccggtcggcggcggccgggctcggcggcgggggaagccgcagcagcccgggctctgtggccgctagcccgtccgggggaggcggccgcaggagggagccggcgctcgagggcgtgctcagcaaatacaccaacctcctccagggctggcagaacaggtacttcgtactggatttcgaggctggcatcctgcagtattttgtgaatgagcaaagcaaacaccagaagcctcgaggagtcctgtctttatctggagccatagtgtccctgagcgatgaagctccccacatgctggtggtgtactctgctaatggagagatgtttaaactgagaggtgcgttcttctcccagtaacttttcagacaggcctctagttgctatggtgatggctctcttgttttttgattttttgtttttttaaattgcctttgacagtttgctgtgtttggaggactctgtggtgacacacattgcctctcttatccctgggtggggagatggagctgacattaggaattacttgtcctaattaactgaggaattaaggacaaaggaaaggtgagtgattcccaaagcagcgcgccttaggacttcgaagatcttaagtgttagctcagtatattctctttgacgtaatagtatgaatcttcactacagtgccctgtgagggctgtgctataagggcacaaaaaagacctttaagggtcctagtgttttccccccaaagtttctctagaaccgtttcttagtaaagtgcccctttgagttttgttcaatccactgtcgtagagcctggtgagaagccaactggaatggagttaatgtccctttgtatgctttcttcccttctctttgcttcttgaaaatggatatctttgctttaataaagaaaaaaaagaaaatggatacctgcccagcatcccggaaatgaggatgactttccagggagtccagtattcaccctcaagacacatccatcgcacagaaatgtcagacttgtaataaaattgcagtgtaatttgattgctagatcattctaccaggatctgtcatggttgcattgctgtgattcttctgccacttttcttctaataaaataatga

SEQ ID NO: 539976 - DNA, 1363 bp, Homo sapiens
  misc_feature (80)..(81): n is a, c, g, or t
  misc_feature (87)..(87): n is a, c, g, or t
  misc_feature (97)..(99): n is a, c, g, or t
  misc_feature (102)..(103): n is a, c, g, or t
  misc_feature (146)..(146): n is a, c, g, or t
acgcagacccctcttttgcacggcagcccgcccgcaccaccatggccacagttcagcagctggaaggaagatggcgctgnnggacancaaaggcttnnntgnntacatgaaggagctaggagtgggaatagctttgcgaaaatggncgcatggccaagccagattgtatcactccactgtgctgactggctacaaaaccgtcaccactaacacacacctgcagcagccacctcttgcaaacagcaagcacagcttcttcctctgctacccctgcgcgagagcaacgctttgcaacgaagaccaccagcctgactggcacgcaacaaacctcaccaccctgctcctgcacacctcttaccagcactgcgtgcactctgggcttcacgccatccaggcacgctggcgactgggcgacagggacacagccacaaaataaccaacggacacaccctctgcacccacgacctgggcgcacaactctacgcctgcgctggcacgctagctgctcccatgcaaccgaactggtcaacccgtgctcacctcggcgcactccctacttgcaacaacacacgctacagacacctaacaccaacttcgcaactcaacctccaaccctctctgcgcaccacggggacggctctcaacttctacaccgaaggacacgtggaacgccaaaggccgtccacggctctcaaccgctggaagcccacaagcttccttcgccgcttagcttgcaccatacaatctcttcggtcttctcaccgcgccccacgcgcaactacaaccctggggtggcttcttccacaacctccatcttcgttcacgatactacaaattacacaccgcacttctcttcgtaccaaagttgccaacgccccttatctctttccacacaagcctgcatggctacgggaacttctaccctcccacgcgcactccaactccccgtatgggggccttctacacacctcacacaacctcacacgtggtgccttcagacggcccctacactcaaccagccgcccgacgcacaccaccagaaccaacatgaccacgccacgcacaccgacagcggcgcccgcacccgcgccagcacaaccacccgacgcacgcacccacacaacacgcgcggcgcggccccgaccacccccgaagcacgtccccccgaccaccaagggggacccccacacacaccacctcactccgcgaccaccaccgacacgctataactgcgcacacacacccggccgggccaccacagaagatcatcgcgcaccgctatcaaaacagcaagcacagccgaccgcccgcccccacgcaaccaacaccaacccgcagcacaagcggcaacaaacaccgcgcc

SEQ ID NO: 539977 - DNA, 1505 bp, Homo sapiens
aaaacagagaccacggaaactgaatatggtggtgtagatttatagccggatctatcatcgtcgagtaccgagagctccatccacgctcatgctcgcggtgctcctcgggtaaagatggcgtaaggaactactaggcttcgatgtctatcatgatatgcgagccgttgtttacgtgggctgaaacacgcattatctgtgtactcaagtagctggattagcgactattacaagatgctcgtgaaatcgcgctatgcgcaattgggtatccagacaccggtcatgtgagtgagtaaatccaagatctcataaggattcaggtattacgttgccatagaatgtttgatgaaccctatttttcgcaaccacaagaagcatgatctcaattgcatataatccaaaacggtacggcaatgagagcatcctgttgctctgatgcctttccagacgtcattaaaccgatgaagggatgggtaatcgaagaaacgaggtatccctttcttattaatgagtaaggttccattctcgacccagcacaaatactatcttcacgagactaacgtacggctaagagggaattattcctggctcccacctcagggtgtccttcggagacagtgtgaacaccaatttgaataaagggttcgttcctggacacctttagccttttggttgcatcacaatagcccaatgaactgtggaaactttcaccttttcaatttttggcacggttctcgcactcttactttccctctggggaaaaacaatcgcaaacacagtgattacgaaggcaaagggcttggctggagaggaaagtagtgcgactcctaaataaggttaaccatttacgtccgttgggtgcgactaactccattacaaggctcgcttcgggcatgatacggagattggtccacgggctatccatctcctggcaagaacaagcttttgggttttctctcaaaggaaccttgcgtcttataatccttacaacaagatccttctaaggactgcacccttgcaattagcgttcggctgtacccattttatagtgcatagcgtttgaatcttgccttacataatacggaagtgtttccactgaacccgaacgcgacatcacttcgagcgtcacacatgtgttgtgttctatcaattctcgtgggaacccacgaagatgtgcgccggtgacccacccaattccctgtatcgcttccatgtaaatttctcgtgtacgacactgtgagaaggcatcggggttcccactggcccatacgggaaactgtgtgcttagagcccacgcaacgatatcatacgctgttgacaaacccgcgtcgataatttcacatccacgcaatgcgcacatttccagagggggctagagtgcatatcctgtgaacgcgctgtacaaccaagtgttctggtatctcgagacgagcgaacgcccacatcctgtgcaacatgcagcacagttcaatgtatgagctactatgttagagcaccgaaatcacgca

SEQ ID NO: 539978 - DNA, 703 bp, Homo sapiens
aatagctggaattacaggcacgcaccaccatgcctgactaattttgtatttttagtagacatggggtttctccatgttggtcaggctggtctcaaactcccaccttcaggtgatccgcccacctcggcctcctgaggtgctgagattacaggcgtgagccactgtgccagcttgctaattttcacagaagcttgactggcaattcttcacatgctaaacagtgccagtgcacagaacctttatatatttcctgacgccagtactgtgctctgcatataacaaagctgcttcaaggactgagaccttctttctaaacagcatgtaatgtgagacgccggcctgccattattttctcttatattctctctctctaatgaattaaacaactacgtttgtggcaagcgccacggtggcctcaggcctgctacattctagcactctcgaggaggccgaggcaggaggattacttgagcctacaagctttgaggccagcatgcacagcatagcaagactgcatctctacagagagtaacacaaattacccgacgtgtggtgatgtgcatctggtatcctcagcttactgggaagggctgaggtgacagcgctcccttgagccttggggctgagggtggaccctggcagtgccttccctgatcctgcgtgctagcactccaatcctggcacaaacagagccgagacccct

SEQ ID NO: 539979 - DNA, 375 bp, Homo sapiens
caagtccctctctcgattcgggaatcgattgggccattggaaaaacttggcaaaaattctttccaagaatctcgtggtggcttctccctgtgtgcacattctcattttcagattgctcagacccgaaggcccttctctttctgaatgcctggtcactgtttaagtcctgatctgaccgcgtgtcttcgtggcctccgggaactcgcggcctcgttgccagacttgttgtggttctcatcgaactcactctctatatgaggccacatctctttcgttgttggtcctggtttaagtcactgttcctgtttctgttcctggatatgtccttcatcagctattatgagtttatcctcatccaaagagtcctcacgtgct

SEQ ID NO: 539980 - DNA, 852 bp, Homo sapiens
  misc_feature (580)..(580): n is a, c, g, or t
ggatgagaaggcaagccggaaagagcgtaaagttatattattgctggaggtctccagtctcatttgtttgttgatcgtgggcaaaggcattctagccagcctgaggctactccctctcctggtccccacaggaggaggagatacggggctgaggaggaagaagaagaaactgctcgaggattggagaggagcgaagatgaaggtggaagaagaagatggacgaagacagacagaacgacggactgatcgaagcggctccgcgctcgaagacgacgctgcccgaacgaggtacggactgaacgcggtactcccaacacgcgcacgaacgaccagaacaactggcggcatccggcgatgaggctctctgctcaaccaggtctggggattgggagcgcctctcttgggcactggaaggtgtcgggtgcggggcagcccaagtccaagccacttcttcacctcggctccctgcatctgggccctgcaccatgagctggcaccctcttctttctcacccagcctttctcatttccgcctctccacgacactgcgcccgtccaccctcactctgtccattgttccnacctcctgactctgctccatcgtagagctctaccagcaaggcccccaattgctcctctctctctttgctctctttctccctcccctaccagcctcattcttcctccggtagcctctcccactaacctctgcatcccccagcctcatgtcctgccccatccctatcctgcctgatccctggatgctccctcagatcccctcttactcagacagcgcaaggccggggtggggccggggttggggattagcgcccacagctgccccccttacaca

SEQ ID NO: 539981 - DNA, 1004 bp, Homo sapiens
  misc_feature (790)..(790): n is a, c, g, or t
gcattcgttaaagtctctcttcacacctgccgtcgtgtctaagtcagagtctcctaaagagcccgaacagctgaggaagctcttcattggagggttgagctttgaaacgactgatgagagcctgattgatgccattttgagcagtggtggaaacgctcacggactgtgtgcgtaagtgacgagatccaatagcaccagatgcgctccatggggcttcgggtttgtcatcactatgccactgtgtgacggaggtggatgcaggctatgagtgcaaggccacacaaggtggatggaagagttgtggcaaccaaagagagctgtctccacgatgaagattctcattaggaccaaggctgtcgccatctctaacatgtgtaacaccgatatcttcgtgggtaggacactctctcctgaccagagtacctggaatgaaaccagtcaccctatacgagatgtagtgtccgaaagcagataagtggtaccaacattggcatgtggatcctgcagcatcggagtgcatgtgggaagcacaggacagcggtgggtgagatagtagtggcgctctcgggctatcgtttgatgcctctctgaggcaaccattggactcgcgtgggcatcaaggatgcgtcgatgccagcatagtcatctcatggtagtcgtaataggcacccacatttagtgggtgatgccttaggaaagagaccgcatggtttcaatacgacttggctaggatcggggttaggtgctttccaatcctaggtcattgagcaggggtcggacaggtgagtgnccgggacagcttgccgggtggggggctccggttggccaggtcggttgtcacgtgtgcccgcaatgggcttgctcccaagttacgtgctggtggttgacccttttggggggcggtggctcgggtcttgggtggggccgacccggggggtgggcgcgggggctctcgcgggggcacgctgtggggcttggggtgagataggattctgggtaacgcg

SEQ ID NO: 539982 - DNA, 174 bp, Homo sapiens
aggatccagtggggacatcacttcctcttaccccaaattcatacctcatttccccgaccccatctctccccagtgttctcaagtgtgtgaaatgggagagtgtagcatccctcggatccagtgcccactccactcctgtctcctggcaccacgtgggcatggctagagtcatgg

SEQ ID NO: 539983 - DNA, 146 bp, Homo sapiens
aacagcggttcgctggtggtgtagtctactactttcttgggggtcagatcacattggttccctaccaacaattggtggacatttgcactgggcataacgatctatttcctggcagccactggtttaacagttatgggaacggactt

SEQ ID NO: 539984 - DNA, 220 bp, Homo sapiens
atttttgaagcttggcagtatcatgtctgtttgttgatatctgcggcataagctgataccgtctagttaggaaagtcactctatcaggctttgtagggactctgatcagcattctgatttgaacccttgaaatgttgtgtatactccctcttaggtccaatgatgtatttcgttaaagtaccatgatcttggcttttctggatttattttgccatgaggt

SEQ ID NO: 539985 - DNA, 995 bp, Homo sapiens
agcggggggtcctgtccgaccgaagaaaccttgctgggggcccgggtactggttgggtctggagcttcgtgcctaggcgacgacgcgcgcgtgcaagcactcgtgcgcggattcgcgagcgtagtcgtggcaggtctggccgcaggactgtgtgaaccactatcatggatgtacgcatgcaggggagtagcctacgctgcacgcgggacagagggacctgagatctgcggacggtgcaagtatctatctagatgacctcatgtctcgtagcgtgaggaagggaacagagacaagactcactacacgttgcgattctggaacctccccataaggcgtgcctccaatcacaggcttgaatcacacagacgagagcttaactactacaagttgatatatatgattgaccgtagtcaatacctagttgcgtcatgggtaacccttttcgtcgcgtctcgcgacatccattggcgacgatagtcgcgagtatggaatactagacagcgacgacggatatccttatccccatacgagagataccatcctataacttcgacacaatatgtgtagtacatctattttgagatcgtatagtaatggagagtcgcttgttctcaactacatttcatcggattgagataagggttccgtctcatggcatcggcgctgacggagaatctttcttgatttaaccggttggtggaacaagggattaacagtggagatagaataggaaggctgagtgcatagaatggttgcgaaagggaaaagcttgtttttacgatgctacatttctcgctgatcaagttaccccatgctgctatatgcgtgacgagggagcggggtaggtctcaccaattaagaccgttgttttgttggggcagtgaaacaatccacatgacactttccgagtggcaacttttgctccgggtgtgtgacccattcggttaatttacacacattctcatggcaaggaatgagtctctttgtaaccccga

SEQ ID NO: 539986 - DNA, 213 bp, Homo sapiens
catattgaggactcagccatccattacgaactcatgtcgtcctctggacatatttatcactatacttgggttctaaatagtataaaagaaaactgtgatctatatattgatgtatcacctccatagtaaatttagcaggaaatgcatcacaattatgattttttttttcaccagtgaaacaataaagatgctattgaaacttctaaaactagg

SEQ ID NO: 539987 - DNA, 191 bp, Homo sapiens
  misc_feature (91)..(91): n is a, c, g, or t
  misc_feature (172)..(173): n is a, c, g, or t
cggttttacgccgagcgtcattcgcgggcggcatgcggcgaagatcgagcgaggtggcaggtcctgatctgcgttgttgttggcggtgaantcctgtatgtcggagtggcgtattctttcgagctaatgaggagttcctgaacaatggaaagacacgctcaactggttgccnntccgcactcgattgaggc

SEQ ID NO: 539988 - DNA, 212 bp, Homo sapiens
catatgcatacgactcataaagtgggaggagccatgttgtgatggagggagttacatgaagcagacagtgccaacgtcgaagccgaattcctggtctggggcaccaacgtccaatgtggccaatcgatcattggcaggcgggaggtcttggtggttttgtattcaatcactgtcttgccccaggctccggagtgactcgtggaaatgtccat

SEQ ID NO: 539989 - DNA, 318 bp, Homo sapiens
gagaggatacgtggtacgaggctgtgtacgaggggccggcttgttcctggggcgtacacgactgtcagctgtgctccgagacgcctggggaactccgacaagagtgacgcgccccagatggaccttgtcaaccggctttgaaagagttaatgggtcctgcgaagatgtggatgacgtgcgcgactggcgggcgcctgacaacacggagagtgtgccaaaaacgccgcggcgggtacacgtgtgtgtgccccgcacgggctttctgctcgactcgccccgcagccagctgcatacttcccaacaccgtgatctcacagg

SEQ ID NO: 539990 - DNA, 432 bp, Homo sapiens
tggcctcgtaatgtcacatagtcttgcccctaggctattttttttttttcatcttttctccagcacggtgcccctttccttaggaaactctcattccagtaccatataatgctcaggaaaaaactcatttgggtaatatattacttacgggttacacggtttttaaatgtttcatgagattaagtcttacctgtccttagacatccgtggtttaaaatgagtgataaatttaacatcagctgtggtcccgtgtacatatcccgtgataaatgaataatctaaaaagtgtccaggaaaattaaaattaactttattcaaacgcagaatacgaccatttgattcagagggtgggggatttgggtgaggaggagtggtaggtgtgggtgggcaggtcatatatgtatgctcctccccttcagtaataaaaggaga

SEQ ID NO: 539991 - DNA, 260 bp, Homo sapiens
ttcatatctgggctatgactgggaactgctggatctttgggtgtgtgtggattatgtattccgatcatgaggatgagccagatctgcctcttcttatgaggtgtactcgagtgagatcttccacgtctacctaagcttctactgcgggatacttcctcgtcttggtgtcctagaccgagacctccctctactgggaggtgtactggagcgtgagagaccaatgcgtctagctggggttctagagcgtgagcggacaagta

SEQ ID NO: 539992 - DNA, 435 bp, Homo sapiens
attcaaaggggtttgcaactcaaacaaattgttagggggttagtaaaaagtttatttggtaaaaaggggtatactccagctttaactacccttagtgaaaaaaaaaattttttgttgtttcaaaaccccttttttaacaaaaaggttttttgaccccccaaaaagtttttttaaactgtcagatttaagccttgttacccaaattagactaggggttccaatatttaagggtaaattttgttttccaaaaaaggaaaattgtttccagtttaaaacaaagactgtttttacccatgattttgtatattactccccaagaaaaagggggttttgtaaaccctgtaaaacagtttcatattcctttttttaaaaaaaagttattccaagggggcattttttgtttaataaaaaaagttttgatgcacagttccccca

SEQ ID NO: 539993 - DNA, 253 bp, Homo sapiens
  misc_feature (249)..(249): n is a, c, g, or t
gatgcctctcatggtgactgccagggccgcagccatgccaaaccttccattgttgaggatgtgcatggcaaccttgaagccactcccaacctcacccagcacgttctccgagtggcaccgcgtactccactcaaatgaacaccctctgctcgtgttctgagacgccttgtatgcccatcttacttctcagggtggcccatgggctatatgcccccgtaagtcgccctctccaccacaaaagctgtgatncttc

SEQ ID NO: 539994 - DNA, 181 bp, Homo sapiens
gctcagccctactgggtaccatgacaccactccagggattctaacttcttgttgcctacctgccgtactatcctgcttgaatattcgcccgtgtatgctccctgttccgagtggattggggtgacctcagcctaaggatcagctcgacattatctccagcctgagattgaggaggtccagg

SEQ ID NO: 539995 - DNA, 171 bp, Homo sapiens
ccttagtctggctgcagtggggatgtgtggacgggaaccagcctaaggaaagcactcttgagactcttcatcctgcccgggtgtgggtagcctgggtctgtcactcggccccagcacccgcgggccccactcctgagcttcgagtaagcgacgtcacacaatgtctagccc

SEQ ID NO: 539996 - DNA, 177 bp, Homo sapiens
tagcgcatagatacctagtgttcctagaagctcctcatagtcaacaagatcaaagcaaacgacagcacagatgtccagacgcccagcaaatgaatcactcaaaaaccacgtaaagatgaacgttcctagagtccgcctttcctcccgttcttgtgtcctccatgctttgtctctctc

SEQ ID NO: 539997 - DNA, 490 bp, Homo sapiens
  misc_feature (430)..(430): n is a, c, g, or t
  misc_feature (454)..(455): n is a, c, g, or t
acgcctaatgtctttgacgccaaagtgactgttgatggtctgcgcgcggttaagccaatgcgtgaatggcaactctctgataatgctgcttatatgcattattgcccgaatgaaaccatcgatggtatcgccatcgacgaaacgccagacttcggcgcagatgtggtggtcgccgctgacttctcttcaaccattctttcccgtccgattgacgtcagccgttatggtgtaatttacgctggcgcgcagaaaaatatcggcccggctggcctgacaatcgtcatcgttcgtgaagatttgctgggcaaagcgaatatcgcgtgtccgtcgattctggattattccatcctcaacgataacggctccatgtttaacacgccgccgacatttgcctggtatctatctggtctggtctttaaatggctgaaangaacggcggtgtagctgaaatggnnaaaatcaatcagcaaaagcagactgctatatgggg

SEQ ID NO: 539998 - DNA, 121 bp, Homo sapiens
tgcagtactgtgtgttgcactgcattgtgtgtttgcagctgcacttgtgatgtttgcagctgcattgtgtgtttgccgctgcattgtgtgttctgcagctgcattgtgtgtttgcagcatg

SEQ ID NO: 539999 - DNA, 201 bp, Homo sapiens
agagcatccctcgaattcgacggtatctctctctctttttctgtatagcaggtgctcgctgtgtggcccaggcttgaatgcagtggcacaatcacaggtcattgcagcctcgatttcctgggctcaggtgattctcccacttcagcctcctgagcagttggaactacaagcacgcattaccatgcctggaattccagtcat

SEQ ID NO: 540000 - DNA, 80 bp, Homo sapiens
ggtgtcttgttccgggcgtttgttggtgcgaagaaggcgcccactctgaatgccaaacgggcccttaccgtggatcgcac

SEQ ID NO: 540001 - DNA, 558 bp, Homo sapiens
acaaaaaacaggttgaaaatcagaatcttttacttcaagttgaagaagtatctgcaaacatgtagcaaagtgaaatccataatgaaaaagagaaaatgttttataaaggaacatgaaaacctaaagccactactagaacaaaaagaattacgagataggagagtagagttgagtactattaaaggattccttagcaaaatcaccttctgtaagacatgatcctctgtcttcagtaaaagagttgtgaagaaaaaatagaaaatctgggaaaaagaatgcaaagaacaggaggagaaaatacaataagataaaatgagttgcccgtaaaggctaagaaagaactagattccagcagaacagagacccagactgtgaaggacgaacttgaatctcttcgatcagaagaggaccagttagtctgctgccatgagagatctcattccaggagcagaaagctataagaatctgttatgagaatatgaaaagcagtcagagcaactggatgtggaaaaagaacgtgcaaataattttgagcatcgtctcgaagaacactcgggt

SEQ ID NO: 540002 - DNA, 560 bp, Homo sapiens
agtactcagctaccagagtcactggaacagatcagctcacacccagtctctcacaagtgtacattccataaaagtggttgactaaagtgaatgcgtcccaacttcgacgaccattcagagattcaacttcttcctggtttagtcttgggagagtgtatgtgtcgaggaatgtatccatttcttctagattttctagtttatttgcgtagaggtgtttgtagtattctctgatggtagttggtatttctgtgggatcggtggtgatatcccctttatcattttttattgtgtctatttgattcttctctctttttttctttattagtcttgctagcggtctatcaattttgttgatcctttcaaaaaaccagctcctggattcattgattttttgacgggttttttgtgtctctatttccttcagttctgctctgattttagttatttcttgccttctgctagcttttgaatgcgtttgctcttgcttttctagttcttttacttgtgatgttcgggtgtccattttggatctttcctgctttctcttgtaggcatctagt

SEQ ID NO: 540003 - DNA, 853 bp, Homo sapiens
gagcgggaggggcaacatggcgtccagtgtctaaagcggcgtgcctgtgcgaaacgtggtggttcctgcagcccgacggatcccccagtccagcgcgacgaggaagaggaaacacagacacgtcgaaaatgaggactgaagaccgactgactgaccacgctgacaaggacacacacggactgacacgacggaccgacggtcacttgttcgacggaacgtgacatatcgacattctgaaagcttactatccgctatcagaactacactcgacttactgaccggacacttaacgaacccttactggcagcacgctattttctaaacggctcctagtgaaacactagcacagacaccgtacacacgatctacttaaattcaacagacaccatattgaggacgtagtgatacaccagcacaacggactgtatcagacaggacagccaaaacgatgactatagggatgacagatcgacggtcactaggcaacaataacgcccctaaagcacagtctacacatgcaccagacaacggggtaccccaaggacggcgctacgaaacacacactaacaaagcacgaagcgaatctaccagaaaacatggcgagacacagaaaccaggtgcaaaaagacgaccaaaggaaagaaacacgactggcaacacgataaaacaagagaaccagcaacccaagaccggaaggagacaaaacgtagcctaagacgcaacagactcaaaaaacggacccacacaagaaagaatcgactacaaggacacagaaacccaaggaaaaaaaaacaacagaacaaggagaagagacaacaaagaaaacaagaaaaaaaaaagagacaagagcaac

SEQ ID NO: 540004 - DNA, 298 bp, Homo sapiens
cctctgttcgcaaatcctttatagagcgtctttatcataaagcgtatctcttagtattaatatccttaccgtgttcacagagcagaaacagctgggctgataaacaggcatagtcctttagaaggatgtggttgatcctacaacaacgcactttcctaaggatgacaacaactcaccccacccctagaatggctggtatgaaccgagtttccacacagtctagctggcaatggggtcaggagacgttttgctacttcacatctttaggggttaaatataggtatactttgaatttagc

SEQ ID NO: 540005 - DNA, 321 bp, Homo sapiens
tatcaaggactcagaggtctctccaccacagcagttgcacttgctgagcaggcagcttgaggacccacaatggtagcttttctaacgcctgagatgacgtgaactgagtgtggcacagaaaaccagaaaaacttttggagcgctgcaagtacctggcctgcttgtaacaatggggatgagtgtgcctaccattcaccccatctcaccctggaaaggcttcccccaaattggtaaacttgctgacaaaatgtttgtctgtacacccaaattgtaaatatgatgcaaagtgtactaaaccaggattgtcccttcactccatgt

SEQ ID NO: 540006 - DNA, 230 bp, Homo sapiens
ccgagcatactccgcttacacaataattgtccgccgaacagtacacacccaccaggccaccgcctcagcgtgcaagacttacaaaatttgttacaccacaaccacatctccaaatacaaatgcagcaagtgatttgaagatcatagaaatgacaatacaggcaaaaaatgcaacaaatcccccctgccaaattattcaactatgtatgacttctgcctcttcacagcgcc

SEQ ID NO: 540007 - DNA, 112 bp, Homo sapiens
cgagtagcaaaaataaataaataaataaataaaataaaataaaataaaatatacaagcaaacaacaacaaaaaaaacaattcagtttataaactgaaccagtgtggagagag

SEQ ID NO: 540008 - DNA, 236 bp, Homo sapiens
atgggtctggaaagctgatttgcagagcagatgttcagagagcattcagaattttttaggccaccttctgagatagcatactatccatcacttaaaaactaaatggggcatcaaacataacccaaggctgtgattcaatgagacattaccaggagtccccttcatcctcaggggaacatgttcccagaacctccagtggaagcttgaaaagtgtcaggtaatacccgaactttata

SEQ ID NO: 540009 - DNA, 309 bp, Homo sapiens
tgttatcacgccaacacgtaatcgctcatactttctccgtgatgtactgcaattttctgtgccctaggtatggaacttctaacagcattgcactagaatcttcatcataatccaattatacaggcaagggcaagatcatgggctgcatacttcccagatgcctagaagtctgtgtgctttcccccgccacttgtaaggttgagctgaatcaggatccattacaatggctctgacacagtctcgtaatggcagcaatttggcttctgtaataatgacgaagccactggccctcttggcataaaaaattgg

SEQ ID NO: 540010 - DNA, 1891 bp, Homo sapiens
ctctaaagggaaatcccaaccttctttggtcttgtagttttgaacagggagggtatcctgtattacacctccaatacggctcagtcttaggaggaagcattcaaagtcttccagttcagatgccaaaaaaaccccattcctggccagcttatctaaaatttcattcctcatgtagttgttacaggaagtattctggttaataacatcaacagtcagaaggggccatttgttctgctgaagtgaagcataactatgctgggtttgaaattctccaatccataagataatgtttaaccaatcatggcgagctgtgaggtatctccagagggcttcaggggaatatgatttgtattctacatgaaaaaaaacacattttaaaatataattaattatgtctattgacatgtaactcaacactaaattactgagtaaatataacaatctggacatagatatttatacaatatattaattattcaggtcctctgttttactattttcctttttttgagacaggatctcgctgtgttgcccaggctggagtgcagtggtgcactcgtggcagcctcgacctcctgggctcaagtggtactcctacttcagctgcccaagtagcagggactacagggatgtgccatcatgaccaggtaaatttttttttttttttttttttttttttttttttttttttttttttttttttttttttttttttttttttttttttttttgagacagagtctcgctctgtagcccaggctggagtgcagtggcgcaatcttggctcactgcaacctctgcctcccaggttcaagcgattctcctgcctcggcctcccaagtagctgggattacaggaatgcaccaccacacccagctaattgttgtatttttagtagaggcggggtttcacaatgttggccaagctggtcttgaactcaggtgattcgcctgcctcagcctcccaaagtgctgggattataggcgtgagccaccacgcccgtccacccaggtattttaaaaaatatatattctgtagagatgggggtctcactatgttgctaggctggtcttgaactcctggcctcaagcaatcttctcatctcggtttcccaaatttctgggattacaggtgtgagccaccgtgcctggccacattgttcattttataatcaatgctacagccaaagaactagatgtagcttctaattactctggtggttaaaatgaaacttacgtattagctgtacatttcacttacctgttcaaccctttttttcccttctctttcccttaatgtaaataaaaactttgtttcagatggggaaggatgaaaagaaaaaaataaattaaaaataataaacaaacaaaaacttcagccataatagtaagccagaattttactctctgaattgctactgtttaccactgttagttatgacccagatcccccatatcagatggcatagatccccaatttacacaagaagctcaagactatttgaaaaaacagattgtcactttgaagctggaatgaaaactcagccttgaaatctcaattaactatttttttcttttattagcacattataaatccctcccagaaactctgagataagaaagagatcttaatgcaacgacttgcattttaaagaacctgaatattatttcccgaaaggaattctaaaattgagacacatcaaaatattcaaatatcaatacccaatttaatcctcattcagtatgttcatatttcaggctctctcacacttgccttctggacttatcctggggagaaggatggattcttgtgttagttgatcccaccacagagcccaatttaacacaattctatggtcctgtttgttaaattcatctttacctttagagca

SEQ ID NO: 540011 - DNA, 720 bp, Homo sapiens
cctaaaccgcgaacatgtcactcgcccagagagatgcccaggagctgtatgacggccggggagaaaccgcctgggaacagacgagtccaaggttcaatgcggttctgtgctcccggagccgggcccacctggtagcagtattatcaatgacgtaccccagagaagagacaggaccgggacattgagaagacgcatcatgaccggggacgatgttccgtgcgcgagccttcggatgtgagcggccatgtctgggccgtcggtgacaattgatctccagagacactatccccagccttcacttgccgtgagagcgctcaactaaggaccactcgacggggggtcacggaacataaggcacccggaaccctgatgtcgcagtcatggtgtcttcgcagctgacgacacgaccatcctggacatcagatcagagtataagcggatgtacggcaagtcgctgtaccacgagcatctcgggtgatacttacaggggagttaccgagctagattctgctgaagatctgtggtggctatgactgaagcagtgactggtggctcacttcagcaccacctgcacggcaacaccagtgccaggcattaggccataaagaatgtctgtttctaacaaatccacaaatagccctcgagattcaccgtcttagagcttaggcctgtctaccacccctcctgacccgtatagtgtgccacagacctgggtcggtc

SEQ ID NO: 540012 - DNA, 123 bp, Homo sapiens
agaggatccccgtacgcaggatttgcaggatagcattcacaggtcctgtccagttctcagagttaggaatggatgctttcatcagatgctaaaagctgaggggactagactaagcttgtgcac

SEQ ID NO: 540013 - DNA, 326 bp, Homo sapiens
attggccaggctggtctcgaactcctgacctcaagtgatccgcccaccttggcctcccaaggtgcctgggattacctgatgtgagccaccacgcctggcctgttaacctattttaaaaatgagaatagacggccattggtgcctaccacctattaatcctactactttgggaggccgagcaaggtggaatccttagcccaggaggtatataaggtatatataatcttcaagttttaaagttgtagagctcaatttaaactcatataaattaaacacatactctgtagggcaaacacacaacatcttggcaaacagcagcacatata

SEQ ID NO: 540014 - DNA, 988 bp, Homo sapiens
  misc_feature (829)..(829): n is a, c, g, or t
tcagtggttctcctttggtttattctctttggcaccccaaggggttaaaccccttttcttttcgaaccctggcccacaggcccgtgcccccccccatggcttgtccctgacctggattaaagggaatctcagaaggttactatttcgaaccacagatctgttcgttcaaaattagacccacctattaggttggggtccgccagatctctacggctattccccttactccatgcctggagccagatacgtattggctttttttgctcttttaagcagtctcactcagtcttattccacagtaagagtactgggagaatccctaggtaaccttattaggaacccccattgggaccaccgtgcctttgtaaattgtgttgtcttccaccagtccatcccaatagatttttgtttttgttgttcccgccagcccccgaagaaattaggggttaaaccagcaccagtccaccactggtttgtgctccagattcaccaaagtagatttcctttgcaccctggcaccagacaccatttatactccagtttccatgaaatgattggaataattcccatccccttaagaatacccctgtaggccctttaactccctccacttggccctggtcccctagcctgatggattttgcccaaatggagattgttgatgaatcccatgtgaaaaatgtaatttagaaactgatttcttccagaaattagaatggctttattttttaaaataatttggaatgtaaacaccattttatattttaaaataattcaccaccgggaggcttcgggagtttcttagtcattactgtccttttcccctcancagaattttccctccttgggtggtggattcgccaccagaatattgtatagtatatttccgttcccagattgtaagtgaaattgcctgatattgttttccattaataagaccagcgatgaattttttctaattatttaaataaaatcccccaaaacatta

SEQ ID NO: 540015 - DNA, 347 bp, Homo sapiens
tacaatgtgagcagcatctatgaatactgaaatgtgatggtcaagtggtccatcatcaagcacaaactacaaatggaaatcattaaactttctggagtgggccatttgaataacaatgtcaagtgcctgggtatatcccagcggaatctcggtcttcttatctggataagcacaggcagagatgggctgtgtagtggccggtttctggatgcagctgatcgctggctggactttagcactgctgctcctcctccttggtccgccgtgagcctcctgccaagctctgggcactggcatgggccgtggtgctgaggacctcctcaaaactgcctccactaggtcgcagt

SEQ ID NO: 540016 - DNA, 856 bp, Homo sapiens
gcctgggacaaagtgagactctgtctcaaaaaaaaaaaaaaaaggacaaagaattagaattttgattaaccaattggggctgggcttgatttggttctttccagactttcgggaaaagagaacattcttttctggtgggcaataattcatcctcagagtaaaacaatttcctctaatctccaggagggaagggtaagataggacagatttccaatagttatgggtcattggctattggaaggtagagacttgggttagtgtgggggccattcgtgatgtctccatggagtggggaagaaacctttgggttatgactctaatcttttgtgtctcccagaaagatttacccattacttttattccagaattgagatttcccaaatactaggttaatctctccaaattaaaagaaagatgcagagtgactttttaaaagggcaggagttatatgtgggttacaagaaaattaaacttaatggccggataagtgtgaagtaggagggaaaacggacttggaatactaggtttaagaagatctagagcagttctgtgactttccggacaaaattagactttgggaacggggaggttgaaccatggagatgaagaacattcattattgataaggggtcagttggcaggaagatagaattaatcaatgtgtcacttaaaataggagactttggagtgtccttaagggaactgggaaatggaaaaatgtcccacgttggggtggatggtaaaggccctagtaattatgataaggagacttgggagtccaattgggggatattaataaggtgcgcaagaaatatggaaaggagcactcgggaggatatccacctgggaggatgtg

SEQ ID NO: 540017 - DNA, 595 bp, Homo sapiens
ctgaaagggggctttgtgtggtgcacgtgaggaatgttgcctcgccggatgtccggagggggccgtctgggggtaactttgtggtgtcctgcaggcacccggacaaactgtgggactagttgcctaggcccctcagtttgactatgggtccacggtgtggggtgtaccgcccgtcgatggttctcgcctggccccgccctccgtcctctctgcttttatgggggtccccggtcgccccgcgaaggagcgcgcggtgtgtgttgccgagcggatggcctattacgtcaggagtatcgcaccccgttcgccttgcccctgagtgactatccctccgacttttcagtcccccccgggcgacccgtcgccttagatctctctttttgtgttagcccacgggcaatattagctacccactgctcttactcctgctatggccccctaacaggtaacacacactgcagtaacgaaactcgcccgcctgtgaagccaagctcgcgcacccccccactggtcccccccccccctttcccccccaccccccttattcgttccttttccccctttaaccaacaaaaattttactgaaaacataaca

SEQ ID NO: 540018 - DNA, 935 bp, Homo sapiens
ccagctgcccatccccaggagaacgtccacctcctgggctcgtgggaagacctgaccagacacgagggtgcactcctgcagtgccaccaagtggttggtgtagacgtggagtggacacctgtgtttgttgctgggggccggcctcggccgtcactcctgcaggtggccgtggagggccacgtgttccttctggacgtcctggcactctcgcagccaccaacagggcagggagccaggcttttccggctggtggcccagctcctctcggacccctctatcaccaagctgggctacgggatggtgggggacctgcaaaaactgggcacgtcctgccccgccctggcccatgtggagaagcagattctgggcggatggacctgctgctggtgcacagacagatgcgggtggcgagcgtgccagccccagccgtggacagggccaggagctgaggggcctgagcctcctggtgcagcaggtgctgggcacagccctggacaagacgcagcagctgtccaactgggaccggaggccgctctacgaggagcaggtcatctacgcagctgcgacgcctactgcctgtggaggtgcaccaagccctgtgcagagagcccgcccgcttccacctgtcggaggactggctggagccggaggcccaggcacaggagagagaccaggcgcacggtaagccacccggctggcgaagcgtcagcaccgggcggaccagcaggtcctgtggctggggcgggctgaaggggcgcccttcaaattcggcagggcctccgggggtgtggtggacctgctgcgggtggcggagccccgggccgggggtcaccttgcactgggtacccgcggggcagatcgcacggacacactggagcgggcacaacggcacggggagccatcagcgcgaaaggggaccgccactacgcccgcaa

SEQ ID NO: 540019 - DNA, 199 bp, Homo sapiens
  misc_feature (118)..(118): n is a, c, g, or t
  misc_feature (126)..(126): n is a, c, g, or t
gcccagcatcattcatgggaggccctagttcatgactgcacccctgatcctgctgcaccagcgtcccaacggcaacaggcccttgctatcccttgtcattctggtcagccaggcaggnctcggtgngctggtgggtggggtaggggaagtctattacatcctcgggatgactgaaaggttgcctcctcccaatgccact

SEQ ID NO: 540020 - DNA, 114 bp, Homo sapiens
agctcagctttcacgcccgctcttctcccctggttgttggggcctggcctccccctgctgtcaggtggggattggcccatccatctgcttacaattccctgctgtcgtcttagc

SEQ ID NO: 540021 - DNA, 483 bp, Homo sapiens
aacggtcatctctccacgcccagtaacaggtgtctagttctcccaccctcacccaggacctgtcccttgcgctgggaggaggatctccagggctcacagcagaaggcaggaacgaaaagtgcacttaggcacaagctttgcagacatcctgaaaagggtcatatggacaaactctgctgcctgcagtatccacatggttacatctgggcacgagaccccccgtcccacctaccccagggtttgaggcaatgcggagaaaccaacaggctgagacgacaggtcacctgcttacacatcaccacaaaagtgtcctagacgccatgaagggacggccaggacaaaagtccactcctccgaccttcccaaggcaccggcagagtgccaggcacaaggcagatgctccaagacagtgaagccacgtcggtccgccgtggattcacacatccgtcatgttgctcaatgttggacctatgagactgaaga

SEQ ID NO: 540022 - DNA, 593 bp, Homo sapiens
  misc_feature (20)..(20): n is a, c, g, or t
cattgcacgccggtatgtgngtattgcaaaatatagtctgtgatcagaagactggtagtctacactgtcactaacagctgaaatcttgggactgttgattaacaactctggacttcaatttcttatttatgagggattaaaaaaaaattgagtccacctttaaacaaatgaaagtccataatttatgattctagggtcaaacccaattttttggtagtctctggaaataatttagtttactcgaccaattgagaatcttcattgctatgatatccttcccctgtgatgtgtgcatgaaggactaagtatatactcaagaaggatagttttgtctttaattaaaaggagaaatttactctaaaaatccaggtccaaaagcaatctatttgggattgatgacattatataaaaatacttcactaagtgaaattattcaaattatgcaattctgcaaacatctttttttttccttttgagacagagtcttgctctaattggccaggctggagcacaatcttggctcactgcgacctccaccttctaggttcaagcaatcatgtctcagcctacccaagagctgaggtggaggatga

SEQ ID NO: 540023 - DNA, 1104 bp, Homo sapiens
ttgaaatgaccacgtggtgtccgccttcgagcgctcccgcacagctcacagccctgcctttgtgcggctccactgctgtcttctccttcggtgcagacaccagctccgtgctattggagaccaccacccatgaccgccagcagcagggagcagcagctcggatgttatggcagcacaacacacatcacccattcacgatttgggggttctggcagaccccgctgatggcagtcgggagctcttgggatcaactgtggacaccaccaggctccagctgccagcacctggagctttcagctttggcagcaggacagagtgggagcacagccacctaccaaccccttcacagggggctataggtcagaacgccctgggcaccaccggccagagcacaccgatcgccttcaacgtagggcagcacaactgagagcaaagcctgtgcttggaggcaccgacacccccaccttatggtcagaacacccctgcgcctggagatgggcacatcgggcagcagcctctcctttggggcatcttcacgcaccgcccaaggctccgtcggtgtcggaccgacggatcggcggaccctacattgccatatggtgcgggatccaagacccagggctcgacagcgactgcaggcccgcaggcagacacacgcaaaacagtagcaccttgtcgccctgtccctgtacacgccagccgctacccctaaatctggacattggcacgtacacacaagacgcctggcccttcacatggataaggacactaaccggcactatggagttacagcgcaagggacgtagctcatggggccactccccacgaggaaaccacacccacggcagggccacgcgcgtgagcacaagccgggccgccatgggacgcaccaagagaaagagaggaaaaaggcagtgagaaagcagcggcgagggcccgagaggacaaagagaggaacaacgactcgaggaccgtagaggagggacgagagggccaggagcgcaagaaggagacacacaagctgcgcgacacacggcacagagcagagggaacgggaccagaacaccaggatatcgtactcgtcgagcgcaaagaggaaagaag

SEQ ID NO: 540024 - DNA, 547 bp, Homo sapiens
  misc_feature (2)..(2): n is a, c, g, or t
  misc_feature (11)..(11): n is a, c, g, or t
  misc_feature (37)..(37): n is a, c, g, or t
  misc_feature (42)..(42): n is a, c, g, or t
  misc_feature (134)..(134): n is a, c, g, or t
  misc_feature (293)..(293): n is a, c, g, or t
  misc_feature (327)..(327): n is a, c, g, or t
  misc_feature (339)..(339): n is a, c, g, or t
  misc_feature (445)..(445): n is a, c, g, or t
  misc_feature (449)..(449): n is a, c, g, or t
  misc_feature (471)..(471): n is a, c, g, or t
  misc_feature (473)..(473): n is a, c, g, or t
  misc_feature (491)..(491): n is a, c, g, or t
  misc_feature (509)..(509): n is a, c, g, or t
  misc_feature (527)..(527): n is a, c, g, or t
ancagccctanctgctctgagatattgctcctgttgnagagnaagctgcagactgataaagagaggtggcttctcagccacagaagtgagttattacatcacccagtttggtggggcctttggcttgcctactnaggttgtaggtgttgctgcacttcctgggtgagggagttagggcccttatcagccatttcctctccctcccacacccaaccaacacttcagttttcagtcaatgaaagagcaagccttaaccatcagccatccacttttctaggtttggcccacataanaataccctcttgaaatggttcaccggagtttgancattgcaaacantagaaacatcagaatctcagattataagagagcacaggaagatcctcatgcactacatgttttttcgaaaaagtagaggccaaagtaataacttgatgggataatnaaangggggtcacaggtaagtcaatnanctcttaagaaaacaaagncaagattcttcttgaaanaagtggtggtaagcaaancctggggattggttgaaggg

SEQ ID NO: 540025 - DNA, 1025 bp, Homo sapiens
ggagcgctgtaggtagcctgtggtgtgccgcgcacttaggcgtcagcagccgaggagcactagccgccgtgggagggagccatgatgcattacgaggtggagattctggatgcaaagactgtggagaagctgtgttatcttggaacaaggtggagccccaggaccatccattgcaggaagatcaatgaaccctcgttcactacatgactcgcaatcctgggaaggtggataccctgacaccagtctagtcgcccgtccgtactgggagcccacaagggacaaagtctcttgtaaggcatagaggaattgtatcttgcaagaagtctgtccgttgggaccacaacactggcctactaactgttacgttcacgtgagtaactcgtgaggggccgcagagtcagtctgtgggtgacaggctcttttgctatagcatggagttaccgctgagtggacgcacctattgtcatcctagcacgtgactctttctactgtccgagtgggcacattcatcataatgggcccaacaaataatgacgttatatcgattgcagtcggacagtacaaaggggctgacaacatcgctctgacaatacttgtcaactgcagttacacaactatatttacatgacgtcgtgtctggatgacgtcgtccttcgctggcgagcgatttctggccatggacagatattgtcctgttggcgcaagcaatcgttctagatgaaatctggaacctagctatctggtgggctttcgcacgtcggtgcgagtgtgcctgacttgacactcaagtacagtcctctcatacagttccctgctagcgttgcaggatgctcaggaggtgaaacttggcgctcgccctgtcatttgtgatctggcagactcaggcgaaggttctccatccaacctgttgcctgcggggagctggggccggctgggtcaaagaggcggatatccatacccacgagaacccttttggtgggtcttctgctggtggtcttggcccaaagactataaggggggtctcg

SEQ ID NO: 540026 - DNA, 149 bp, Homo sapiens
gatagtaccaaggaaggggtagactatgtgttatgtccaggaggttgcagcaatgcagtgtgcaggcgtattcataccatagccgcctaattttcacagagtacagcggataagtactattgacccagcgaaaacggcatcttcatcgg

SEQ ID NO: 540027 - DNA, 844 bp, Homo sapiens
  misc_feature (116)..(116): n is a, c, g, or t
  misc_feature (161)..(161): n is a, c, g, or t
  misc_feature (169)..(169): n is a, c, g, or t
  misc_feature (178)..(178): n is a, c, g, or t
  misc_feature (198)..(198): n is a, c, g, or t
  misc_feature (320)..(320): n is a, c, g, or t
cttcagacctgagtacttagctgagggtgggtgagagccctttgttccaaaagtccattagttttgctgttgtttaggagtaggtggttgttgttgtttttacttttttttttttngggctttggtaatgggaatccagtgttcacatcctggtgaactcnggtctccnggaaacccntgaagtatttcctaaaaccntgaaatatggtttccttccttggaattttctctagaattggcagaatattaggaaggtgaggggtctgtatcccccggcccccttctttcccatgctggactcccgagagtctccgtcgaantgtactggcgcagtggcagacaccaatgcattggactgtaagcgggttggtcttggtccagtggtttggtaaggctatcactggcctccaagctggtccaagcggagagacctggtggtcaaactcttgaatttcccgacttttctctaacacgcccccaagaaccacatgcatctctctggggtggtataacccctctgaaatatgaccgcactatggttattgagagcagggtccattcagcggatttataagggtattttcgtcgccacaagatttttgttccccaacttggtgctgatgagaggcggaaggggtccattaaaaccccaagatgtgttgccattgggctatacacaccccgtggcttcgcaccacatggcgtagacagtgcacacaaaactcacgattccatcatgggcggaaaacgtttgtatcaacattctgtgtcgatgctccccaatttcccttccagtttccaattccccttaacctctgatcacgactcagggcgtctggcagaa

SEQ ID NO: 540028 - DNA, 412 bp, Homo sapiens
cccccgctggaaccctgtatcttagaagctttataccaactatggttttatttgaccctgcatcacagtttggttcggaataggaacagattcaccaaattgtgtcttatttataggtggaatacaggttcagaagctcttgacaatatcatgagacgaaagtatgagacgccttattcaattcaacttctgtattttgcacttcaagaaactgagtaccagagttaaaaatctggacatttggtggatgttcttagatttgtgttaatgcaagagggatggattagataatctcacagggtatgggaatggatggtgtgttccctgtatctactgtgtagtgtaaagttaattgatactagctcaacatattagattaagtggcattttagcaaacatgaatgaaaggcac

SEQ ID NO: 540029 - DNA, 339 bp, Homo sapiens
ttagaggatcccaagctccaacaagaaggctgcattgatatctgagcacagcatgacactctgcttgctaacctgaagaaaacaggaaagactgtttctaccttggcttgagtagcaggtgctggtcccacagcccacaggatggacaaagtggggcaggatgctgatcctcccgctggcttccagacagacctgggactaggcagtcatgccgggtgatggtgttccctgcggagaccctcagtttgtccttattccttcctagcttcccttgcaataaaaatcaaggctggtcttgttgggaggcttgggttaccgagctcgaaattccgtatccat

SEQ ID NO: 540030 - DNA, 301 bp, Homo sapiens
ggtgttccagctttcctgattggtttttgtccaatttgcttttctttcatatctgaaacctagctgcttacttggcttttcaatttcagtagttaggattctgattttgtctactctagcctttgtctttttaggtctgtcatgatgtctagtcttgttgctatgattcataggtgcataaaggctttaatttgtttagtttttaaaagacaggttagcatggtgtgcactgtgcatatctttatccaagacttctcggatcatccaatttgctgagctaaaattttagatatgcaaaatt

SEQ ID NO: 540031 - DNA, 321 bp, Homo sapiens
aggactttcagtccgtggcgaagggcacggggtttatagactggcttcaggaggtggtgtctgatttacgtaggccccaaagattggttggaccaggtgtgccaatcagaagctggctgccccaccctaatcttttattatgcagatggagtccctgtctgaccgcgccatgttgtatgttccttgctgtacacgtggttgacaaagaaaagggaagatggagctgcgatgttggacatgcctggcctccaggtagctctttcctattggcacagctgctggcattcacccgtgcaaacttccagcttgcttatctatgtc

SEQ ID NO: 540032 - DNA, 652 bp, Homo sapiens
  misc_feature (1)..(1): n is a, c, g, or t
ntttggaacttgtgccagctcagttatctgtttgacaagttaatcttccttgcactccaaagtatatcgacctttggtaataggaaagcaagtaccagcagttccgtggcatataggcacgtttgtttattgccactttcgtataagcatgatctcaacaatgttcttccaatgtcatgtgatacagtgacattcgcatccacctttggtctcaccaatagcttcagcatcagcctgcatactttgtgcgcagggagcctctcatttctctatgcttcatgcatagctatgcagacacccttccccgtatgggttactcagttactcgcaactgtgctccctaagactccgtgtcgtgtattcactatgcagctccacttcagagctgcctctactgcttctgatgtttttgcctacactgtcacttcacagtcaatagatttcatgatcaccacagttcctcccagtcagacagttaccactgactgtcgtctctagccctctggaattatattctgccgaatagttggggcgatgaacccgctcactagtgtgtgcttccagccgcagcctggcaatgccataacgcgatctcagtgcatccgcttgtgaagtagactttgcacaattcagggtccacagggtaggtccg

SEQ ID NO: 540033 - DNA, 151 bp, Homo sapiens
cccactctcctcttcgtccctgatgacaaagatcttgccttacagactttacagtgcttggctttgagattctgtaactgcagacttcatttagcacacagattcacttctttttttttttcttttatttttttttttatgttgttaaaac

SEQ ID NO: 540034 - DNA, 177 bp, Homo sapiens
cagagatgatgccactgcactccagcctgggcgacagagcaagactccatctcaaaaaaaaaaaaaaaaaagcggcggaaatcgggcagcgcctttaaaatcccgggcccagggtgatttcggtaactccgggggcacccggggctacgggcgccttcctagggcccgggcaattat

SEQ ID NO: 540035 - DNA, 611 bp, Homo sapiens
  misc_feature (455)..(455): n is a, c, g, or t
  misc_feature (467)..(467): n is a, c, g, or t
  misc_feature (488)..(488): n is a, c, g, or t
  misc_feature (544)..(544): n is a, c, g, or t
  misc_feature (550)..(550): n is a, c, g, or t
  misc_feature (599)..(599): n is a, c, g, or t
  misc_feature (606)..(606): n is a, c, g, or t
cgtaaaccatgatgcccactacagttttcaggttcagtgtggattaattgtggtggcctataaggatgggtcccctgcgcaccctcacttcatggatgaagagctctgttccaagtattgggccaagtggttctccgactagaagaatatacagaaaagcaaaagaacctgagcgctccagagccagcgtagaggcccgggattgcttggcgatgctgcgcggcgatctctgtttgggagatgcactgctgtccactgagtttctaaagaggaatgcggggaactgagggctacattaacacaagctgaaggtgtggtgggttgggatgtacccaccgagaagccagagagtctggaggtcagcgcctgactcaccagctgcacgacctctggctgtttctcaacctgagaggaggacactgggattggcagctgcccagggacttcttgggctnccttgcaaaacntctgtgtcccttggcaggatnccaagtctttgaattgagatcagaaggccaaatgaagcatcatgtgcacacatgtncctaanagttcccaggatggaaggggcctgaaccctcagggtttcagagagaganagattancaaca

SEQ ID NO: 540036 - DNA, 363 bp, Homo sapiens
cagagtaccacacagtgcccagagtccaaacagtagcctatactacagtcaccaaagtgtacataagcaaaaacaaaaaatagtaatactatatgaaaatagataggttaacaaataatagtaggtagtataatcagtatgtagtagtactacggggtaaccatgctagaaggaataagtggagtaagtagattacggagcagtgggctctaagagtacagagacattgaagttcaaatacctaaactagcaacttagagctaaatagacctataagcaagccaataaaccacaaggccacagtaaactatatttattgtaaaagggaagataataacaatacctacatatctaatgtaaaat

SEQ ID NO: 540037 - DNA, 798 bp, Homo sapiens
gatgagaatcactgttgttatgtgcttgtctggtagaatccgtaacaaacccctaacatcgaatacgacctgggttgagaatcactgttcattatgtgcttgtctagtagaatccgtaacaaacccctaacatcgaatacgacctgggttgagaatcactgttcattatgtgcttgtctagtagaatccgtaacaaacccctaacattgaatacggcctgggttgagaatcaccgttcattatgtgcttgtctagtagaatccgtaacaaacccctaacattgaatacggcctgggatgataatcactgttcgttatgtgcttgtctagtagaatctataacaagtacctgatgtgcactgaatgacagaaaaatttaaaattaaaaaataaataggccgggcaaggtggctcatgcctgtaatcccagcactttgggagactgagatcacaagtgtgatccactgtgcccagtgaaaaagtatttaaaattatctttgtcttacagagaggtagaaatcacttttcttcccttgaaagaaaattaacgctggggtcccagggctcacgcctgtaaatctcagcaacttgtgcggaggctgaggcaggaggatctctcgaggcccaggagttgagaacaacctggacaaaacgggaagaccagtctcttacaagaaatagaagtaaaaataattagccaagcggggggcatgcacccgtatacaggaagtcgacctaaagagcaagagctaggaaaatgagacctacctttaaaaaaacacaagcaacaaaaatctgg

SEQ ID NO: 540038 - DNA, 161 bp, Homo sapiens
  misc_feature (158)..(158): n is a, c, g, or t
tcctagctctggaggtgctgctgtagggcagggaaatatgggagaagtgggggcagcgacaggcggtttcacgccccacacgttatacagaccgagaggccagttgatgtgctatgttttatgatagtgacaataaagatgattttatgatacacgtntga

SEQ ID NO: 540039 - DNA, 86 bp, Homo sapiens
tacaggtgttttttgttgaaccttgaaagagtttaatcttaacgttttctaattttaaaattttaaaatctgtttaacaaaaaaaa

SEQ ID NO: 540040 - DNA, 381 bp, Homo sapiens
  misc_feature (155)..(155): n is a, c, g, or t
  misc_feature (188)..(188): n is a, c, g, or t
atggggagggttttcaaaggaatccccccttcccccccttcagactttattttttacccctcccttggtccaggggtgatgggggcccaaaaccccccccgggtttttataggaaattccccggaattggggcccattgtttttggaggcccttncccctttttttttttaaaaattaaggtggccanagcccttggttggggatttgttttaaaggcccccctttaagttattcccgcccccctccttgttttcaaaaacatggggggaaaaagtttttaaaaaaaactattttgttatagatcctaaaatgcctaaaaccggcccaaaaaattttgtaatgggttgtttttaaaaaaaaaatccgttaaaaaagtttta

SEQ ID NO: 540041 - DNA, 102 bp, Homo sapiens
tactctcaccacccactgccaacggtgtattggactctgagttagccgacaggccaccccctctcactgcaaactgtgacttgtgacctctgagttaacccg

SEQ ID NO: 540042 - DNA, 272 bp, Homo sapiens
  misc_feature (196)..(196): n is a, c, g, or t
gatctcgtgatcggtaacttggtcgacagaatttagctttgtctaaagacagtagaaagaaatgcttgagttaagaaaaggaaggttatggaagccaaggttcttgttatgtagatgaagcctctaggtagtattcttcagcagagaatagatggtcaatgtctcttttcagattttaagatagagtccaactcangttaaatctccgtctacgaccgtggcaacagacctacgaacagggcaaagagattctaacagatgcaaacatttta

SEQ ID NO: 540043 - DNA, 127 bp, Homo sapiens
aagggtttccctctagagtattacaaagaagcaggtgactactggaaatggacatatggccaggttctaaaatgttatccttcctttgtatgtgacacaagactaagtgatttttaaaattagtatt

SEQ ID NO: 540044 - DNA, 186 bp, Homo sapiens
gcttccccagaaaggacgtgagaataatagttcttcagatctcctgcattgttagacactctctgatcatatcatcttactcttctgtctatatctggatcatacatcaggttaaagaaggagatcctgagggcaggaagatattaacaatgagatttgggtagtcataagagatatagggaggta

SEQ ID NO: 540045 - DNA, 245 bp, Homo sapiens
  misc_feature (86)..(86): n is a, c, g, or t
ctaattggttcttcgatgacgaatctctcaggatagaccacaatggaagataatataagaaaaggaatgtatacatatgtatgacngggccactttgcttactgcagaaatgggcacggcatcataaatcaactatactttaatggaaaaagtaattaaaaataaaattttaaaagatttaaaaaaaaattttaaagatggtttaagttaaagaatgacagttccgtcatcgaagaaccaattag

SEQ ID NO: 540046 - DNA, 228 bp, Homo sapiens
cgtagacacacaccagagcccaacacacacaccagcagccccgtgatacaacgccacaggatcccaagacacacacagcaagagcccccaacatacacagccagagcctccaagcacacacacaaccaggagccccacaacacacacaaccagacgccccacaacacacacatccagagacccccaaacacacaacacaaccagagacctggagtcctcaatgtgtag

SEQ ID NO: 540047 - DNA, 554 bp, Homo sapiens
gggagaactcctgacccgggaggcggaggttgcgtgagccaagatagtgccactgtcctttacacacggttacagtgtattaatattctgtgttattatctctgcacttactattaccagtaaggttgtaccttcaggtgagtatttattgctcattaatatccttttatttctgattgaagtattccctttagcatttcctgtgggacaggtttggtattgatgaaattcctccccttttgtttgtctgggaaagtctttatttctccttcatgatgaaggatactttcaccagatatgccactcaagggtaaagtccagcagtttaaatatgtcatgccactctctcctgcactgtaaagtttccatggaaaagtctgctgtcagaggtattggagctccattatatgttatttgtttctgtcttcttgatgcttttataatcctttctttatccttgacctttaaagtttgattattaaatgccttgaggtagtcttctttgggttaaatctgcttggttctataaccatcttgtacgtggggtaggaggt

SEQ ID NO: 540048 - DNA, 1076 bp, Homo sapiens
gtcacgacataaggcagactaaaccaatcccagcgtaccagatcaggaatgcacgagatcctgtctcgagaaaggagactaaagcagtctcagaaatgtctactgaaataggaccaatgatctcggtatcatctgccagaatatggtactaatgcaaaggagtcgtgtcacagactatactacaccctcttcttctataagcctaacaccgtggctactaataatacaaagatggaggatactttggttaaataatgatgccccatgacccaaacaccacttcccctccctaagagggagactatacaacagagctccagccataactacagttcctcccactactatacagccgtcaccttcacagatggagtcatagcacgcaaaagccatgggagaatactccacaaatgtaaggaaaaaggggtctccagtaactaccacagcaacgtccaaaagcaacatggaagaatcaagcaagaagatgccagatggacacaagcaacagctaaataaacaaaacgaaacacacgatgacaatccaagccacagaaaacacagacagcaatacagacaacgccctaccagacaaacaccataatcaaaggagacaggtacaaagcacaacacacatacgaaagacgacacacaacagtctaacaaccaccaacgagaacctgccaagatcagtagaggaaccaaacagaaacacacacacaaccacggacacgagacaacagcaagcaccggacaactaaccatggaacgagagcaaagaaccacacaggaaaaagccagaaatgacaaacaccaaaacggacccaggacacaaacagaatccggaaagaaaaagaagacacaaaactagcaaaggagcacagacacaagggaaaacagacccaggaacacaaaacaaaacacatacaacgaccacaaagggcaaagaagaaaaccacaaaaacctagatcaccaaaaacggaaaaaaaccaagaatacgaaccaaacaaagacaaaacgaaatgaaacgaagagaagcgcaacgagacgcacccaaaacaaaagaaaagagcgagcc

SEQ ID NO: 540049 - DNA, 179 bp, Homo sapiens
tggccggtgttaggaaattatttattaatttacaaaacaggttttaactcagccgaggtgtgggaaaggggtgtcccgtgtccctcccaaagcacagagcacagaaatgtgaggccgttatacagtggcgagttcctccgggcgtgggtgtttaagtctcattaaaaagatactcaaag

SEQ ID NO: 540050 - DNA, 244 bp, Homo sapiens
acctcccaggtaagaaaagcggtataattggttcatggttctgcaggccctgcaggaagcatggtgctcacatctgctcagcttcggcgaggccccaggaaatttacaatcatgagggaaggcaaagagggagccagcatatcacgtggcaaaggcaggggcaagacagagggaccaaaaggaccaccccaaaaggaaactcagatccattagcagccactccccttgccccttcccctagacc

SEQ ID NO: 540051 - DNA, 1531 bp, Homo sapiens
  misc_feature (1531)..(1531): n is a, c, g, or t
gggcgcttcgacgggctgggctgtgcgcctgcgcagtgtgggtcgctcccgattccctgccccggccggcccctcctcggctccgtaccctcgccccgctctcagcctgtcgcctctgctccctgtagcgagccagcacccgttgttcctggcaggtagtgttcaagcttggtgtcagcagacggatgcctctgacgcacagaacggatgcctggatgcgtcttcagcagacggtgtggccgacggtggcgttgcgtgcaagcatgtatcgcgcaggaaagtctagcgtaacactcctggaatgggatgcatctaacctgcctattccaacgaggttgccatcctcggcccaggctgactttgggaaagagaaccgactttggaacctatacggaaacacaagcgaaaagaccccttagttgcgtttgccttaccctaccggtttggtcggtgcaaggatatcgaagacaagcggtgacgagataggaccacgaggccccttttcgacgttcgcatgaagcagacccccgtaggaagtcccgggaactgcccgagtgggaaaacctttttcccctcagggggggaggcaatttggccaggtccacactccggtggaggaggcccctccgcggaatgtccttcgcacaacatcaaggctgcgggtaaagcagttacgcccatttttcccaatagtttccgggcacccttaggcatcacacctttggtccaaaccataggggtcggctccaccgaaagctattttgaaacgtgacgggccacggagttaggagggtatgtggcggcataggtcgggtgcgaaataacattcgggtacgagctttatccagaggattgggtgggttatggtgagaaacaccccctggacaagggagtggcatggagctccgcggccaattatttcatcgggggcccaaaaaaaaagggcggtttccacatagagccttgggcccgggagattacaattggggcgggcccgaataagatccctgagcctggttaattatatcgccaccagtttcccagagagtaccgaactggctggcgtttctcccaacagttaggagatttggagttatggggccgaccactctaaagcggcacgtttttggtagccgcctgccaaagagaaatgaccacccacacaaccttgtggtatcctccgcacatttttgggacgggcgaattcatgaacggggagctcaacagtgtttcccgggaaggaggaccccacaattttttcccgaaaagatctccccttatggagaaaggccagagaacttgccgccggcactgccgacaccaggacgacggagtggggaagacaaattttcccccctctgttgtattgagagagtttctccacgtttcggcgggagggaacccacagcgacaaaatctgggacaaccagcatggcggggcgacgatgatgcgccgccctcgtgtgtcgacacatatccacaataaggagagccacacgaacgaagcacgaaagggtgggggccctttaan

SEQ ID NO: 540052 - DNA, 319 bp, Homo sapiens
ggtcagtgattcctctggtgctcagtgtctctctatgctcttaacagtcccagatcccatcaatagtcacgccttgtgtccttccgccttctcacatattcagaaagcagatgtatagctgggcacggtggtgattcaagcttataatcccatcacatcggaatggcggagtggaggaggatcgcttgaggccaggaattttagaccagccggggcaagatagtgaaaccccatgctctaccagaataagaatagaacttagctgggcgtggtgtgcgtgtgcctgctgtttcagctactggagaggctgaagcgggag

SEQ ID NO: 540053 - DNA, 796 bp, Homo sapiens
caccttgtcacccttctgagtctccaatgtggagagattccacactccatgtccacgtgtacacattatttagctcccacttacaagtgagaacatgtggtatttgactttctgtttttgagttatttcacttaaaataatgacctccagtttcatccatgttgctgcaaaagacatgatctcgttcttttttatggcagtgtagtattccattccatatacatatataaacgttatatatatgtaacgttttctttatccaatcatctgttgatggatagattccatatctttgctactgtaaacagagctgtgataagcatacaagtgcaggtttctttttgatatactgatttcttttccttgggtagataccagtagtaggactgctggatcaaatggtagctctatttttaagacagtatggagaaatcaccatactgttttccataggggttgtactaatttacagtcccaccaacagtgtataggtgttcccttttctctgcatccttaccaatatctgtaatttttgacctttttaataatagccattctcacttgtgtgagataaggtctcatgtggttttaatttccatttctctgatgacttttgatgttaagcatttttttcatatgcttcttagccacgtgtatgtattctttttgaaaaaaatgtttattcatgtcttttgccactttttaatggcattattggattttgtcgagtaaggaggtctatatatctggaaataagttggataaatatctggaaattataaagtaaatatcgaaa

SEQ ID NO: 540054 - DNA, 161 bp, Homo sapiens
cctcgctttttcctccttctttcctttgttcaccgggttggccggaaccttttctggattgtagttgtccacaaattttcagtattttttccacttcattttttaggaagggagccaccggttggttgttcttcctttttttaaaaaaaaggttgcggccg

SEQ ID NO: 540055 - DNA, 100 bp, Homo sapiens
gcgcagatacgaatcgagccggacccctagtttagacagttcaactagcacaacatcaatgatgcatatgtccagaatcagttacaaagaccatccgttt

SEQ ID NO: 540056 - DNA, 164 bp, Homo sapiens
gatgtagttatgccaatatccgggttgaaatagagtaccaagtatagcaagatgtgaccactggaaaaaatggaataaaggatatgggggaatactataatttcgttataactgcatgtgaatctataattatcgtttactctattttttcactttgggaaccg

SEQ ID NO: 540057 - DNA, 209 bp, Homo sapiens
  misc_feature (118)..(118): n is a, c, g, or t
  misc_feature (185)..(185): n is a, c, g, or t
cacggtctccctgtttcccaggctggtctcagactcctggactctagcgatccccccagcttgagctcccaaattgctgggattcccgtcgtgagccaccatgtccagtctaactgtnttttaaagaagtttaaaaattactctctagctgcgcagggtggttggtgcctgtaatcccagcagtntgggaggctctggtgggaggacca

SEQ ID NO: 540058 - DNA, 408 bp, Homo sapiens
  misc_feature (1)..(1): n is a, c, g, or t
  misc_feature (129)..(129): n is a, c, g, or t
nttaaaactcagtgtactgccagattcgtctaaatgtctgtcatgtccagatttactttgcttctgttactgccagagttactagagatatcataataggataagaagaccctcatatgacctgcaganctcattttccttctgaaagaaactactacctaggagaatctaagctatagcagggatgatttatgcaaatttgaactagcttctttgttcacaattcagttcctcccaaccaaccagtcttcacttcaagagggccacactgcaacctcagcttaacatgaataacaaagactggctcaggagcagggcttgcagggcatgggtgggatcaccggagtcaagtaagttcaagaccagcctggccaacatggtgaaaccccacctctactaaaaattgtg

SEQ ID NO: 540059 - DNA, 212 bp, Homo sapiens
gcgtgcgggccacattgcagtgctgtcctctggctgcgagaatgtgatcctcacagcgttgtggaacgccacaacatgccggacgtggaagtcatggagtagcaaaagagctcctgttacaagctgtgaccatcagcagcactgagaaggaaaaggttctgatcgagggctccatcaactctgtccgggcgcattccgtgagcgggtacgct

SEQ ID NO: 540060 - DNA, 416 bp, Homo sapiens
acatcatgtggtctggagtgtagaaatctaatgcagccttcacgtagctggtcagcatctcagtgtggctggcagtgttgcgtagacgcctgactaactccaagatcaatgctggagctcctagcacgaaacccaaattaggtgacagcacatcgaagccccagcggtcctgatgtggcgtgacattgtgctttctgtctcgcggggaccggtcactccctcgctatgtgagcctgtctccttagcacgagagagaatatttctcctcactattaatggcgatataaacactattgttctacttgtcctgagactgaaaacagtagatgacccatatgcatacctaacttgtcccggatcagagacactcaatactgggccattgcaggtccaatgttccccgaagcattgcacat

SEQ ID NO: 540061 - DNA, 922 bp, Homo sapiens
aatctggtattcgtctgacagatgtgaagaaaattcttccatagaaggaaatgggcatatgattacccgcgtccttgatctctgggagtatagagagtgcgtagtgttagcagacgggaagctgtaatcactaatatgtctcactcatcatgtcaataccagactccatgtatccttcagaagaatgagtagtgtgtgtgctgtaggaaggagacgcagatctggtgctgctcagcgaacaagtatgctcatgggaatgctattaccgtaggagcatcctactacctacggtaacaagtgtgagatcatgactagagaggaattttctagttatcccgaggatgtggtgactactgaagaggattttcctagacgtgggcccggggcagctgtctggttccattatagagagggagtatttgatccgtaataagtaagataagctagttgtagaacctggggagggatctgagttgttagtggcggattcatgctagagatagtactagagcagtgatatctccagagaggggttcagatatgattaccaagcagttcgtagatcagagagatctttatatgaggagaaattagctcaagattttctgggtgataactaacacagtgtaggactaaggagctcatgacctgtacaagataagccccgctacttgggttaatgatatacacatgtggctactgggtttaccgggggatgttaggcgcatgaagtcccttgattgggttcaaaaacgggaaaaatccagaactctcaagaaaccaatctggtttgtcccatttgaccttggtgcctggcctggtctggctttattcttgacacttggctttcggcacactggcgtcactggtgcccagggggggtttccctgcgcccaacagtgggatgtttgtgttaccgaca

SEQ ID NO: 540062 - DNA, 773 bp, Homo sapiens
  misc_feature (5)..(5): n is a, c, g, or t
  misc_feature (92)..(92): n is a, c, g, or t
  misc_feature (112)..(112): n is a, c, g, or t
  misc_feature (142)..(142): n is a, c, g, or t
  misc_feature (206)..(206): n is a, c, g, or t
  misc_feature (241)..(241): n is a, c, g, or t
  misc_feature (243)..(243): n is a, c, g, or t
  misc_feature (256)..(256): n is a, c, g, or t
  misc_feature (279)..(279): n is a, c, g, or t
  misc_feature (281)..(281): n is a, c, g, or t
  misc_feature (298)..(298): n is a, c, g, or t
  misc_feature (301)..(301): n is a, c, g, or t
  misc_feature (308)..(308): n is a, c, g, or t
  misc_feature (322)..(322): n is a, c, g, or t
  misc_feature (340)..(340): n is a, c, g, or t
  misc_feature (352)..(352): n is a, c, g, or t
  misc_feature (354)..(354): n is a, c, g, or t
  misc_feature (363)..(364): n is a, c, g, or t
  misc_feature (366)..(366): n is a, c, g, or t
  misc_feature (369)..(369): n is a, c, g, or t
  misc_feature (371)..(371): n is a, c, g, or t
  misc_feature (378)..(378): n is a, c, g, or t
  misc_feature (380)..(381): n is a, c, g, or t
  misc_feature (388)..(388): n is a, c, g, or t
  misc_feature (392)..(392): n is a, c, g, or t
  misc_feature (394)..(394): n is a, c, g, or t
  misc_feature (396)..(396): n is a, c, g, or t
  misc_feature (400)..(401): n is a, c, g, or t
  misc_feature (408)..(408): n is a, c, g, or t
  misc_feature (411)..(411): n is a, c, g, or t
  misc_feature (414)..(414): n is a, c, g, or t
  misc_feature (437)..(437): n is a, c, g, or t
  misc_feature (459)..(459): n is a, c, g, or t
  misc_feature (464)..(464): n is a, c, g, or t
  misc_feature (466)..(466): n is a, c, g, or t
  misc_feature (470)..(470): n is a, c, g, or t
  misc_feature (480)..(480): n is a, c, g, or t
  misc_feature (483)..(483): n is a, c, g, or t
  misc_feature (497)..(497): n is a, c, g, or t
  misc_feature (529)..(529): n is a, c, g, or t
  misc_feature (558)..(558): n is a, c, g, or t
  misc_feature (605)..(605): n is a, c, g, or t
  misc_feature (631)..(631): n is a, c, g, or t
  misc_feature (641)..(641): n is a, c, g, or t
  misc_feature (648)..(648): n is a, c, g, or t
  misc_feature (752)..(752): n is a, c, g, or t
gaaanagaaaaaagtatttataaaaaaatgaataaatttagaaattgtacaaaacattaatccagcaagatattaattacagtcactaaaangaacactcaacatatttggnactgccacttccatgaaaagctcagaaaangtcactggctaaaaagtcacaacaaaagcaatttaagcgttacgtacaacagaaaagggaaatnttccacaataacaatgcagacacaatcactaagangntctccatgcggcnatgggttccggggaggtgttggngngtccatcttctacaagnganatcatcngcgttccaagagcnacacttgaggcattagangtaatacaaaananggggggctnnantantnagacaananngggacantaanananaggnngagtcanganggnggggggggggcggggggggggangggggggggggggggggggggngggcncngggngaatgggtcngtnaccaacctcctggncacaggaactaggcacagttctagggccattnacggggctccttcactggctctgaaagcngactttccctttcattaggctcggcaagcaagccagggtttcctggncaacattaaagaacattatcctctcnggcccaggcnagagaantttatcagtacacaagttgatttttatttcttgaacacttccaataaactagcataagttttattacaacatatacagatttgatacagtttacaaaaaaaacnagatttttcaactaaataaaa

SEQ ID NO: 540063 - DNA, 327 bp, Homo sapiens
acagtgctgtaccttcttcgctgtgtagacactgagctcgctgtatagggacctgggcatgcctgtagacgtatccagcacaggcgcgccgtgttgatctacctcatacgggtcttgcataaccgaccgaagcttgggtatttccacgtactgattgcgtttcaaacgagataggttcgatcccatgggtctccgtcacgcagggtgcgcaaaaccttggcctttttgccagcggctttggcaccaaccctgttgccatttgcttttggggccattgaaacgggatcctgggcttgaaaaaccacttgtgagaagctgtatgccctg

SEQ ID NO: 540064 - DNA, 1250 bp, Homo sapiens
ggttccccgaccaggtctggcgagacttggggccagcgcttctggtctggtaaatatgtatgatagtgtaagtgcttttttaacacaaggaggggccagtggattccacacagcaaaaccggtcccttccatgccctgggatgcctacaccacacccaggtctcttcctttgctctgaggtccctatcaaggcctaccccaatccaggccaaagccccatgtagcctatgtaccaggaaactcgcctagggccaatgccgacggggccacgcaggagggcagccaccacacacacatgcaccggcctagggcgcacgcccaacacacacgaaaccacatactaccgccctacatactagaactccaggaaacctacgtcctatgacacgaatcaggcactaagagaagtcactgcgcaacacccaaaccaaagacaacgcccccggaacataatgcggacaagacaacaaacggacacgcagagcaagcggaggacaaagaaaccaccgagagaacacacaccgacatgtaaaccaccggaaacagcacacaagatcacacaagcacaacgacacgcacggaggcgacctagagccgataacagcacaccatgcgagcccattcacaacgaatgaatcaatcgaaaagacatatatacactaaaagaaacaaacaccacagaaaaaggacacaccacaacaacacacgcgtacatacaaaccaaagagcaccacagaagcaacaaaccaacaagcgacgccgaacaaacaaaacaaaacagaacagagcagaactcacccgcagaaacaacaagccagaatgcaaagcaaaatgagaaaacgagaggcgcgcaaggccgcacaatgaacgaaacacagatagagtacaggcaagagacatatcctacgcgcacagtcggcacgagaagcgtcagacaaaagagcataaaaacaagagaacaatataagaaagaaaagacaggaacacagcacatacaacgacacaacgggacaaacgaacacaacaaacaacaaccgctactagcaacagacgcacagagacacacaaacacatgagacgacagcaaacagcaagcaaagcgacaacaaagacaataaacaaagacaacaacaacacacgagaagcaaacaaagaggagaacacaccaagagaccgaaccgacacatcaagcaacaaaagccacgagcagaataagtagagagacagacgaagcgagaaacgagaccgct

SEQ ID NO: 540065 - DNA, 736 bp, Homo sapiens
tggcccagtctgggcccccggggcatgacagtggaccaccagtggcctgctggcccccccgggtctaaggtgaccgaggcctagacaggagagaagggtccagctgggggccgcctgggctcctggggcctccagggccccgtgggcttcctggagagatgtgtggcgccccggccccccatgagaacaccctggtccagctaggcaacccaggcccctcaccaaacagccccctagaggcgccctctactcactgcagccagtctacgagacaaagacaatggagactcataggctggcctctgccatctgtggacacaaggtgctggcaggtgtccaaggaccccaggaggtccgccacttgagtccaccaagtggttccacccattgagtagacctaaggaagggccaccccaagagaagctccctaggataacacgcatggaatcacaagaggcacatgagcttggaagaggccagaaaggcacaaagatgggggcacagtccaggagtgaaaccgtgggccggttgacaacgggggcggacacatgaaacgcgatgaagtaaaaagcacagcacgactttgacaagaaggtgagcgcacagggacgtgaccagacgatcctgagcagaacggccactgagaagataccatggacaagaagcaaaagatccttagtactatagacgcagcacttgagtaggggattccaggaatccacagtagccatccacc

SEQ ID NO: 540066 - DNA, 256 bp, Homo sapiens
cacgaggggcgccctggtggcgagccgcgctgtgcgagtgtcggagatggtggggcttcaccacctcggtcgtcctgggccgccggacatccccgctggggtcgttgtccaccagtgacatccacttgatcaacctgttgcggctggagaagtaccggagcttctcccgccaccggagctgggcacagcaggaggcgcaggccccgcactggaggcggacctaccgaaagtaattcggggagaaatcattttccat

SEQ ID NO: 540067 - DNA, 283 bp, Homo sapiens
gctcgaccatggctctagcaaagcttttggctcggcaagggttggctcgcaggacttcgaaacctgccgcctggagtgctttcatggctcttcgctcgtagccaccggtcgcttccagcaatgcacgattgacttgatggcgcttcagcactcaaccatccttgaaaagtcattgatgtcattgggaaaaaccgcccccatcccttgtggatcaagttcgatctgcagggtgtctttagaaacgtcgatgccagcacaggtaaacatggccaaatcctcttac

SEQ ID NO: 540068 - DNA, 314 bp, Homo sapiens
  misc_feature (20)..(20): n is a, c, g, or t
  misc_feature (32)..(32): n is a, c, g, or t
  misc_feature (71)..(71): n is a, c, g, or t
  misc_feature (99)..(99): n is a, c, g, or t
  misc_feature (107)..(107): n is a, c, g, or t
  misc_feature (207)..(207): n is a, c, g, or t
  misc_feature (251)..(251): n is a, c, g, or t
  misc_feature (272)..(272): n is a, c, g, or t
ctcccagacttcctaagaancgccgggcccanctttgtactcatccaccccagccggcttgggactcaganaccgaagtcttttttttttctctccganccttgganacctcctctgtctgccatttattagccatgtgaacttggccacatcacttcacctccctgagcctcagtttcctcatctgtcaaatgggggtttataaanacctacctcgcagggttgttgtgaggatttaatgcgataatgtntgtaaagcgccttgcacactncctggcacacagtaggcgctcaataaatctaagcttcccttt

SEQ ID NO: 540069 - DNA, 166 bp, Homo sapiens
tgagtcggtacctaatcctatttgtcacggcaggacaggtggaggtattggatcatgggagtggtttccccatgctgttcttgtgatagtgagtgagtttacatgagatctgatggttttataagtgtctggcatttcccctggttacactcactccatcctgctg

SEQ ID NO: 540070 - DNA, 378 bp, Homo sapiens
atgaagatatgtggctcatgtactctacaaaaagtaaaatttgcagctgctcaggatatctctgcactcttcttcacaaccattaccccaattgcctggtaatcgttacgcagtcattctgcttgaccaattcaaatgtttcgcactcatgatccatgccaacatggtgaagacagatcacatatatattgtttgttattgaatccccagtgccaggcacatagtgctcaaaaattatttgctaaactaataaagattcactacaaaagaataaaacaagattcactaaaaaagaataaagaagacagtcatcttgtgtctttttaccaagagccagacatgatccaggatgaaatgggaccctttctcttacatgcc

SEQ ID NO: 540071 - DNA, 451 bp, Homo sapiens
  misc_feature (32)..(32): n is a, c, g, or t
  misc_feature (58)..(58): n is a, c, g, or t
  misc_feature (163)..(163): n is a, c, g, or t
  misc_feature (259)..(259): n is a, c, g, or t
aatttaaatttaaattttttttcatttttttnagaggttttttttgttttgttttgtngttgttgttgttgttgtttttgagacagtcttgctctgtcacccaggctgggagtgcagtggcatgatctctgcaacctctacctcccaggttcaagcaattctngtgcctcagcctcccaagtaactgggactacaggtgcacgctaccacacctggctgattttttttgttttagtagagacagggtttcaaccatgtngcccaggttggtctcaaactcctgagctcaggcaatccacccgccttggcctcccaaagtgctaggattacaggtgtgagccaccacacccagctattttttcctttgcgttttttaaattttaaagttggggggggtctcaatttgttaccctggctggtctcgaactcccggacttaagcgatcctctgg

SEQ ID NO: 540072 - DNA, 1214 bp, Homo sapiens
gctgggaagatggctgtgactcggtggctagcctgatgaggaggcctgtggggtgtgaacccgtgcccccgtggccccgagacctgactgagtggagcgactgcgcagtggcctggggagtcatggtctccatcacccaactccatgcttcgatgtcctgctctctgcctcagacctcccctgactctggctgtctggcctgctgcttgatccctccagtacagccctgctgtttttggtgtgcccagcaaatgggtgggacctggcctgttgtgaggatggccccagtgcaggtgtcctgtgcaaggacttgcatgctgtgcattcttggaacatgtgctgaatgagccctgtggtgaagcttgcttgctgcttggcttggtgccatgaaggcccagcaaggtagctgctgccccaccatctaacctcgtgttgagcagcttacgattcagttctgggagccaggcatcattgaggggatctcgggaccaacgtgcccccacttccttgttggacgcaggtgtacacactgcaagggacattgaactcatgccttcatcaatcctgaaacttgccccgtccttttgacaattcagcaaccatcccacagttgtttgtcattgcaaccatttgcaaagatctataccttagatgcctctatcgcgaatacttgagtgagttcccacttgtgcttggtgatagcacacatgtgtaaaacccaggtgatggcgacagggcttccgagcatcccacattcggtcaaagaccgacacttcacacctctatgtgcagggacacctatcatccccggatgttgtatggggcaagtgggcgtttggaagagggcttctgatttctacagagcttttgcctcgcactggatttattttcctttcgtagtgggtaatcacctcatgggtgcccatgcaagttcttcgacttcaaggacagggaggcgtttggtctggagtgaatatgctccaacgtgttccacgagaatgtaaagactatgtgtagaatccagcgcaaagctgttacacatgtgtgtgaacattaccttaagtggccgcaaagaacaaaacctatggtgccgcatcgatcgactacgtgctattttcatgatcgtgagatcactcccgcgcaaacacactgctgtgaagtgtccaaatggtgccgcaatctattaccattgattgtgtggtgcaggtacaacg

SEQ ID NO: 540073 - DNA, 162 bp, Homo sapiens
ataaaatattaaggatactagtataagagatcaggttcgtcctttaatgttgtgtatggttatcatattgttttgagcgttagtttgattagtcattgtagggtaggtgattagatcagttgttgatagagatatttaggaggtgggcgatcaataagaggg

SEQ ID NO: 540074 - DNA, 186 bp, Homo sapiens
  misc_feature (129)..(129): n is a, c, g, or t
  misc_feature (135)..(135): n is a, c, g, or t
  misc_feature (179)..(179): n is a, c, g, or t
tccttaggagggcgacaagactaaggcgatgctgtatcacaggaggcacgatcccaagctctttttttcttttttctttttgtctggtacagacgaagtctcactatgtggcccaggttgatctcaaantccggnggctcaactggatcctcccaccttgggcctcccaagaaggctanggattac

SEQ ID NO: 540075 - DNA, 103 bp, Homo sapiens
  misc_feature (12)..(12): n is a, c, g, or t
  misc_feature (21)..(21): n is a, c, g, or t
  misc_feature (82)..(82): n is a, c, g, or t
accgataaaaantccgaaagnaaaaaactggcccaacatgccgctatccgaaaaatgtccttcaaggctgggaatgaaaccntggaaagctccgaaaaacaaa

SEQ ID NO: 540076 - DNA, 109 bp, Homo sapiens
  misc_feature (101)..(101): n is a, c, g, or t
acaacagaagaactcacttgtggttctacacatgagtgcattgatagtcacactagtgcaggaaggtccaaatgagattaacaatcctgtacataacccgncttctgtg

SEQ ID NO: 540077 - DNA, 566 bp, Homo sapiens
  misc_feature (326)..(326): n is a, c, g, or t
  misc_feature (387)..(388): n is a, c, g, or t
  misc_feature (396)..(396): n is a, c, g, or t
  misc_feature (473)..(473): n is a, c, g, or t
  misc_feature (508)..(508): n is a, c, g, or t
caggcccagcatgcagcatcaaggagacagtcggggtctctgtcccttgagagcctgcagtccagaggtcgtgggaggaaggaaggagggtggagggaaagccggaagcccaggcgagctccaaggcctctggctcagtcagctgggcagcaggtggtggatcctgggcagagcatccctggagggaaggagaagggggcaggtgtggagctggggatgataggttcggttttgtcctgaaactggaggggaaggtggcatggtgcagaggtgtgtaccagtgaccaagaaggtccggtggccaggcatggtggctcacacttacnatctcagcactttgggatgccgagacaggaggattgcttgagcccaggagttcgagaccannctggccgncataggaaaccccatctctacaaaaaataataagctgggcttgatggtgcacacctgtacttaggagactgaggtangagaatcacttgtgcctgggaggtccaggctgtantcagctatgattgtgctactgtactccatcttgggtgacagtgagaccctttctcagg

SEQ ID NO: 540078 - DNA, 88 bp, Homo sapiens
taaattcacacgcgtcagacacagcaggatggtggccatggaagtaggcatcgggcgccttaacccggcgttcggttcatcccgcagc

SEQ ID NO: 540079 - DNA, 352 bp, Homo sapiens
gcgctgccctgtgtagacaagcattccaagctctttgaagacgcctgaggaccccagctaagcgcgcattcttcggccgagatcatctcctccgtgtccgacgtgaagtacatgccacatgcggtcgctaacatgctcacccggggactaccttacagtcaaggtctgggacctgaacatggaggcaagacccatatagacctagcaggtccttgtacgtaccttcggagcgagctctgttccctgtacgagaacgactgcactttgcgacaagtctgattgtgcctggaacggtagcgacagcgtcatcatgaccggggcctactacaactacttccgcatgtccgcttgt

SEQ ID NO: 540080 - DNA, 183 bp, Homo sapiens
tcctggtgatctaagtcgtcgtcgacaccagcatgatgtcgacttcaaagtgatatgtgatatatgaactagcgggtatgcacctgatcgcagcacttgtgcatttaactaagtactacccgacttgagggatgatacagttcctatagagtatacactgtcgaggacggaccgggtcgatcg

SEQ ID NO: 540081 - DNA, 190 bp, Homo sapiens
  misc_feature (85)..(85): n is a, c, g, or t
gtggaacatcagaacttccagcttctgtgatgcagcaggattccaggaaggcaaatggaaagtacacagggaggaagatgaactncgcaaagcctttgtcatatgatagtgactcgcgggctcccgggcgtgagggcgtgtgtgtagctagccctcagcggcctagtcagggtttctctatgggaaagtg

SEQ ID NO: 540082 - DNA, 102 bp, Homo sapiens
tctttgataggaacgtactgggatgaggaactttactgggatgaggaacgtactgggatgaggaacgtactgggatgaggaacgtactgggcaggcggtgcc

SEQ ID NO: 540083 - DNA, 300 bp, Homo sapiens
atttaatattctgtaggagcttggctgtgagtcttgggctctggcctccttgaagaaccatgccatgaatgaagaaaagtagaggtggctttgctgcctcctgggagcccagaacttgcagtaaccctttagtggtcctgccccaggcccatgcagtgctgaggagctgtcacagagagggcctcagctctgacctgacacctgctctccccagcctgttttctcttttctaaaagacaaattatggtaccataatgctgcaaatgatccctccttgctcagaccccttttgccagggcg

SEQ ID NO: 540084 - DNA, 224 bp, Homo sapiens
acactggaccatctctgtaggactcgtacaaaacactagaacacaaagaaaacacaagaaagaaagcgggaaaaagagctggtggtattgctacatttctgccatgatgtttacaagatggcgaccaccaaagtcaaacgactaacctatctatgcccaacagtcgtttctcagggtcactgtcctatgagcccaacagtcccttatgagcgtcagtatagata

SEQ ID NO: 540085 - DNA, 1211 bp, Homo sapiens
gtgtgacgagtcccgcgattctctccttgaatccactcgccagccctgcctgccctctgtctgccagcaccctgcacaccctgcccctctcctgtgccaggaacttgctactaccatgcaccatgccctaccaatatccatgcactgacccctggagcagaagaatggcatgctgtcttgacatcgctcacctgcctctgtggcacctgtgcacaggtgcatcctgtgctgcatgatgagtccactgggagcatttgccaatgctgcgctgcagctccatatggcacctgagcaacacccgagtgagaaccggcgcttctacctgccatgctgctcgctgacacgctgactgacctgcgatgaacccctgccatctgcgcggctgtacatcctacttccactgacgacaactcataccagcaagcgcggcatgactgggcgctcccattcccccaagctctatcacatcactcccacacgggcggcgcttgctgcgcactcccggctcacacacaacggccgtggctcccacactgagcagcgcgaccacaccgcgcggaccacctaccacccacaccggcgctccgcgactgccgctgctcctgacgccgaccagctgcgccccagtccacaccaacgcgacctcgccgccctgcaccgcctcgcgccaccagccggacgcacagtagctcgcccagcaccgcactcagcccgacccccaaccacccaccccctccccgcccccccaccgcccaacatcacctgcgcacaccacatgcccaaccccgcccctgcccgccggctcatgccccatagcgcccttccttgcccccaggaccgacaattgcgtcccctctgactgccacccacaaccacccgtcggacgttccttgacagcactcacaatcgccgactaacatgctgcgtcccccctactccacacttatcaatacaccaaccacttccacaacacaccataatctcacccccctcctcactctgcctcgtaccttcacaccaactcacatcttcactaccacactctgatcccttcctcgtcacctctcacctcccacccctcaccactctccccctccccttctcacacactctccaacccccttccaacctcacaccttgcctccaacccctatccctcacaccccccaccacatccccattacatccactcacaacactccaccacacac

SEQ ID NO: 540086 - DNA, 519 bp, Homo sapiens
atcaggactgctgatcactacatatccagatgctcatctttgggtgaaaaattgtcgggatcttctgcagctccagctacaacaaacagcgcttggatcaacctttagaggcttcaacctggctgaagaatttcacaacctacaaattgcgcgcttccttgaaccagggcataacacggtgtgaggaacgccacaagatgcagttaggaacttgtgctagaaaggagctaaacgaggcaaagttctatcgggtatgtttcacctacctagtgaccgtggatggaatcaatgctctttggggaagaaaccattctaaaaagagaagatcaaagcccgattgccccccaatgaaatttagcacttgttcacaacttgaggaaaatgatgcacaatgattcggcatggaggcgccattatgtcggcattgagccagactgggtctctctttaagccccggaaagcctatcttccccaagagtttgctgggaaaggagggattatatgccctggatcccttta

SEQ ID NO: 540087 - DNA, 1133 bp, Homo sapiens
tctggggggcaaagtctccctttgtccccagggtggattcgcagggggtggccatctcgggctccactggcgagcactggttctcgggctcactggcgagcctccggcctcccggttattcaaggcgattctcctgtgtgctcagcctcctggatgtacgctggggactacgggtgttggcaccaccacgcccgggctatattttgtggtgtattttcttagtagataagaagacggggggttacacatctgggtgtgtgtggcgccaggagagtgtgggctctcacaatctcttcagagctcctcgtgagaatctcgcgccacactctctttgagggctctccccccaaaagtgtgtgtttgcggagtattaaaccaggggtctgtgagaaatctctcaacccgatgggccccagagcaccatcttaaaggtgttatttcttcttatatattccgaccactctttctctatatccccctatagagaagacaatctcttctttttatatatatcttctcctctgtgagaaccctatattttgcgtatgaggaatcataaaatatagagggggctgtgggaggcgtctgtgggcgcccccccttgttgtgggtgccaactcacaaacgacagagagtgttatattttcgctctctttgtgggacgccacgagagtattgggagaaatagttttttggggcgccacaattagagagtatgaggagagtctggcgtgtgagagtagttttcaccacacacagaaggtgtgtgaggagccttttttgttttttcctgcggtgtggcgcccactaattttgtggtgtgtacactggggaggacagcaagacggtggtgtggggtcaccccctttgaagaaaaagaggggcgatagatagggcgaccacgttgtgtgcccctcgacaaatatcaacgaaggcaatactagtagaacagtggtacccaccactctgtggcgccagaatctctgtggtatatccccctgaggagttacattctggggaggatataaaaaccccaaaccttggcgggactaaactcttttgctaatatactcttcttgtgtgtccccccccaaaaaatgtgtcggggggggagggacacttttttattcccg

SEQ ID NO: 540088 - DNA, 855 bp, Homo sapiens
tggccaaaaaatcccgcttttttttccttaaatccggtgaggaaagggggggaaaaggcgccccttgtttgaggagggcgccttaaagcaaagagttgagggttcatcgccaagtcgcccgtgggctttgggggcatcgcgcggggagcatctgatgatggggcgtctccccgccagtctggtctggctttctcagacgggcgctgcggcctggtggttcgtcctgaaccttggttgccctccaggctcccggctctcaggctctcggggcctcgatcagtggccgacctcgcggtgcctatagttgcccggctcaagcgctccctgaagaaacaccccgtcgggggggccctccacgcctgcatcgtcctggtcgtctctgggcggtgttcacccttggggtgtacggcttcatctcaagggggggcgaggggttgcactcttgccgctggctctagattggtcctcgcgggctcatgcgggcccctctttcgggggggcactggcgctgcccgaggttttcttgccacacactgaagcctcccatctctgttacatcccgcgggaagcccccccttaaagagaccctcggatggtgtgtcccctcggagacaaggcgccacattcgggcgttgtaggtcccaaggcgctgggaggacaacatacctcccgggtgagagggcccaaggggagaccgtcttatgtcggccccagtaaagtcacaaagggaccccacagaaacgttgccgggcgggaacaccccaccctggacgacgttcttcagaaattggcccagcgcacaacggcttttgctccagtcccactaagctcgcccatataatgtgccgcaaccaa

SEQ ID NO: 540089 - DNA, 225 bp, Homo sapiens
acagtacgatacttatggtgaagaaggattaaaagatggtaatcagagctcccatggagacattttttacacttttttggggattttggtttcatgtttggaggaccactcgtcagcaagacagaatattccaagaggagtgatattattgtagatctagagtcactttgagagtatatgcagaaatttttagagtagttagaacaacctctgcaagcagcctct

SEQ ID NO: 540090 - DNA, 693 bp, Homo sapiens
cgcagtggttcacgcctgtaatcttagcactttgggaggctgaggcgggcggatcacgaggtcaggagtttgagaccagcctcaccaatgtggtgccctgtctctagtatacagctgtcttagattcactcgtttcctctacgcagtgacttgtcctgctatagcttttcttgttatttatctctatcgcttatttcttctcttcttgcagatttccgtctatctccttcctcttttattcttatcttcctttctatttccctcatttttttattctctcccttttttctattctatatcttcttatcatgtccttctcgttttctctatttttcttcattcttatcatttcgtttactctcctcatctgtatctgtatcccttcttatctcttttcttttctctccttatctcttcgtatctattattgttctctttcgtttcgtttttatacatgttctttttctatacactttctgctctttttcctttctgttatttatatttttattgtcttttatgatttcccttttccatctctcttctctttcattctttctctccttctatttcgtgtcttcgttttttttcattcctttttctctctttcctgctcttttcttcttattttttgctctttattgactcatcctatatctcatccttgatactgtttcttatcttttgtcctcg

SEQ ID NO: 540091 - DNA, 167 bp, Homo sapiens
cgccctggcgcgtggaaaccgctgagatcacatgtgctctcaatcaggatgccccctgcccctcccgcatgcagcctaaaattcagaaggatcccagtgtcttggctgtgagggaaaaccgagagaaggtcgtggaagccctcacccgtagctgtagctcacccgta

SEQ ID NO: 540092 - DNA, 305 bp, Homo sapiens
tttttgggggccccctttttaaaagtttaaaaaaatgttgccagggggggtccgtttttaacccaagacttgggggttatgccaccaattcccgtcggtggggtttaaagggttttaatcccccctgtatggggaagaagttccggggatcctgttgggaaatttaaaccgtaaaaataaagggtttaaaaacctgggttgttgctctgtatgggaaaaactaattttggtccgccagggacaaaaatactaaaccctttttttcccccttccagcccaaaaaaaggttgggtttttacccccca

SEQ ID NO: 540093 - DNA, 1185 bp, Homo sapiens
  misc_feature (222)..(222): n is a, c, g, or t
  misc_feature (521)..(521): n is a, c, g, or t
  misc_feature (556)..(556): n is a, c, g, or t
  misc_feature (949)..(949): n is a, c, g, or t
tcaatagccccttgagggtggtcaagcacggcccctgccgcggatttttaggggtgccccgcctatgttgtggacctccgtgaaggtagtcccccgccaggggttgtggtgcccacgagaataagccccaggccttttgggtttaagaacctgcactcgcgcccccacgttgtaacctttattttaaccgcgggtctccttaataggggttttcgcgtaagngccccttgtgtgttggccggaaaattttccgggcgcccccgcagaggggttcttcccctcgcccgaccgttttcttggggggttttccccgctgtggcccggtgtcccttcgggggacacccctcgggggaccctctcggggcccttgggcccctctagccgcgagatttttatggggccgcaccgcgatagagccccgctgttggcgctgtctctgtaaaagaggcgctacacgcgcccccacgcgttccacgggggcatctcactcacaatttgtcgaggcccacgaataggagaangttataattgtgagcccccgctgagaaggttttgngggaaagccactctataaaggagcctcgagctctgagaaggcccctcgccactgggaatgtccccacacgttgcactgagagttttgggaaggatataatatccacgccacgcgctcgtatacccacgctggccacggttcctcccacactctttatattcctctctattcccacgaaaaacacaccgcgctggggccccaacaagggagtgaaaagagagagaggccactctttgtgaagaacttgggccacaatgtggagactcgctgagcccacaagagttggttgtggccgccaatgggttctatttgagaagagtttctcgtgagttctcacacttctccacggaagacccacttgcactccacttgggccccaccacctcggtggtnccactgaaaaagccacgatgacttgggcccaaggtggaaatgaagaaagtacccaagaccacggaaaccgcctggaagttgctttggcttgtggtgtaaattgggatcgcccccatataaccactttcccttggatgtagtctgaggcccccttaactccatctgttatcctgctagctgtagaaatgtatccctgataaacaccattaaacccctgtaatcttataaagtgttta

SEQ ID NO: 540094 - DNA, 168 bp, Homo sapiens
tcgtatacggtggctgcactcctggatcgtcttgatccaagctagcatatcatctctgtcttcagcctgaaacaggcattcacacgtcggacgtggttgagtcgcaacacatttttcctacttggtctcacgagtaaagagatgtctatacaagcaagcattaacact

SEQ ID NO: 540095 - DNA, 1193 bp, Homo sapiens
aaaaaaaactgccagccaagaatattaaactaagtaaagcgtgtccttcaattttgaaggatagctttacttagtctactattcttggctggcagttatttttatttcagcactgtaatatactattatcccattctctcctgaccatgtaagctctttgtatccttttttgttctcttacaacccaggacaatctctcttatacgtgcacttgactgcctttcccttttggctgatctttagcacattctcatctggtgttggcactcttgtggaccaatttgaattgtaactgttgccttgtacagacacaacaccgtctatctgtgcgtttctgcaactcctcttctctgcgggcgcatctcacttgcagatcatctctcgtgcttactcactgagactgctcatgagtacttcgtcgtgtgcgaatacgcacctttaacagccacaactgttaccgaaccactggactatcattacataagaggccttacacatctaccgcgctatcaaccctctcgaggtgacgcgcattctgtactacgcgtcactattcgaataccatcatcaccccttgggataacaccacagctcccggaagagagacatctgtcactccactgcagagtaccattgagaacctttagggatgtatcaaatttcgacccaacacacgaagaggcatcacccttgtgatcgcctcattcacaacagaagtgtccacaagaacaacaaccaactccctttctcagggttgctcatcaggcaggcccacatacagcacattaccccatacaacagccggatagcaacctcatatacgcagcgacaacaaagaaccttccttcccaacaggtatcatcgcccgaaccgtgactgccaccaacaaagcacccttgagtcgagcagagatgactcccacaacatccaacggaacacaaacatattgcaatggagcgcccacaaagaatcaatcaccctcaacagacggacaactctaacaagcaggcactcacaccatggcaagcacgtaacataacttttataatcgtacacacgcctaaaagctaacagctagcctaagcaaactgtgcacgtcacaccactcaacccgctagggaccacaacctagggactgcaacgtcagacagatcagcccgccaaagaacagcacaccactaccatcgcaacac

SEQ ID NO: 540096 - DNA, 428 bp, Homo sapiens
gacggatcagggtttatctggaacacatgtactcaaggggtgtatagaacagtgaagtggcttgtctcttaacaacctcttagctgtttgcctcaatttcccatcacattctggttaaagccttacttcattaataatgtggtttatattatctttcactattcatcatcgtgaagatgatttctcatgggggggaagatttttttggtattccattatattttctcaaaatttaaagagtaaagaactgaatatttttggggccaggaagtgtggcttatgactataatcccagcactttcagaggctgaggcagtcagatcacttgaagtcagaagttcgagaccagcctagccaatatagtgaaacctcgttggtatcgaaaatacaaaaattagccgggcatggttgtgcgcgtctgtcatgtc

SEQ ID NO: 540097 - DNA, 162 bp, Homo sapiens
gacccctgaaaacagatctggcatccataatctcacctcgctgagaagatactgccatttcagccgacagtgcaatgacagtttctgcacagggactggagattatctccatgaaaagagcttggagtgaggaaattagttaatgtggatgaatgacgttac

SEQ ID NO: 540098 - DNA, 217 bp, Homo sapiens
ccaatcagctcccaagtatctaggactacaggtgcgtgccaccacacctgaccaatttgggatttttggtcgagacagggtttcaccatgtggcccaggctcaccacgttgaaccccggggctcaagggggcaaataggagaaggtttcaggcattggtttggtctctgggagggaaggcacaatgaggtggagtggacaaatggctgaggccttta

SEQ ID NO: 540099 - DNA, 293 bp, Homo sapiens
ctcacaacaggcatagtatttggaaagcaaaataaggttttcttttccccttctggtaataaatgataaaattccgagtctttctcactgccttggtttagaagagagtagctcgtcctcacgggtctacacgggtggccgaatttactggtatccctaacggtttggtatatgctgcatggagacttacggcaagaaggcattttttttttttcaagggaacacaaattctcaactcatgcagtgatcatacaacgctgcatatgcctcacaagctcgtgaatcaggtccca

SEQ ID NO: 540100 - DNA, 322 bp, Homo sapiens
  misc_feature (58)..(58): n is a, c, g, or t
  misc_feature (80)..(80): n is a, c, g, or t
  misc_feature (116)..(116): n is a, c, g, or t
tactagcgaacgtgaaggctaagcgctgagttaatgtatttagtgttttggtcctttnctgccctgtgattgaacacgcnttagttccaaagggcgcacaggaagagaatcccaantatggggaagaacagtgttcctatcctttcttttagatattatcacatgctcctgtttttcttttagaaagacaatagctacaacaaggataccatgaattctatttgaaactgagttgttgcagataaaaaatttgcctcaaagacattgtgatatatatgaccccatacaccacggaattgtgataagaaaattccatttaaat

SEQ ID NO: 540101 - DNA, 302 bp, Homo sapiens
gatcagtttatgagagcttgtgggacaccatctaagtggacaacaaatgcataatttgatatgtcagaaaaatgaagaaataaaatatattcaaatgaaattattgtcagacaaacttcccatgcttgactgagacgtcttgagcaagcttgtggaatgtgtagccctgggtgcactgggcacttgctcacaaaggcccaaagcagtgcatgtcaaaatgtggtaccgattgtgaacattgcaccatgactgtgttggttgctctgtcgttgaatgcacaccatggctcacatgcccaatcc

SEQ ID NO: 540102 - DNA, 354 bp, Homo sapiens
  misc_feature (9)..(9): n is a, c, g, or t
  misc_feature (90)..(91): n is a, c, g, or t
  misc_feature (274)..(274): n is a, c, g, or t
  misc_feature (290)..(290): n is a, c, g, or t
  misc_feature (311)..(312): n is a, c, g, or t
ccctgaacncccagggcatacctatacagccatgaaaaagaatgaaatgatgccctttacagcaacatggattccatctggagcccatcnncctaagtgaattaacagagggacagaaaaccaaataccacatgttctcatttataaatgagagctaaacattgagtacaggtgaacataaaaacaggtactacagacactggggactactggagagggtagaagggaagaggggaatggaccgaaaaactacccatcaggtactatgctctcncctgggcaacagggcnttccataccccaattcttagnntcacataatattcccatgtaacaaacctgcacttggaccccc

SEQ ID NO: 540103 - DNA, 446 bp, Homo sapiens
tgttatagttatgaacaaactgaaaaagaaacatctcatgtcaaaaactggcaaattggcagatgtctttatatacagcagcgtgcaagctaaagtcattaataacccagagaaaccaaagaacaggcaggtctatagcctgccctctatactcacatcgcgatgacaaggaccatttcactggtcatcaacgtttttgtttttcgtccatcaaaatcagcatgccttaacaacactggagaaggtgtggggtgaagggtcattaagggcacgcagtagccataatgccacaccctttgtgccagccactgcgcttctggaaacctaccccacagcggtcaaccgaaagacagcaaaggcttctggcactaagctggtcacaaacgcattactaattattgtgcacatgtggaacctaccatctaagcctcctttctaaggcgaaa

SEQ ID NO: 540104 - DNA, 127 bp, Homo sapiens
  misc_feature (76)..(77): n is a, c, g, or t
ccggaccgtaggtaggtttgttggggccactttctgagggcctcgcttgttctttacttttttccactctagggcnnacggatccccgcagtaccaaaccctgggaagggagtttaagccggggctt

SEQ ID NO: 540105 - DNA, 229 bp, Homo sapiens
tggaatcccctggtttgaaggcatacattttcctaccatgcgttcagatctgaaacttcaagaaaagtacatgatgagtttgtgataaggggtgaagatgtgataatatcgacttaccccaaatcaggcctaaattagctggctgagattatctgtctgatgggttctaagggggatgataggtgagtttaatctatgccaatttaggcgcgattgccccgggtagaaa

SEQ ID NO: 540106 - DNA, 174 bp, Homo sapiens
ggtcgacccagctactcaggaggttgagatgggaggatcactggagcctaggaagtcaaggcggcagtgagccactgcactccagcctgggtgacaggaatgagactgtgtctcaaaaataaaaaacaagttacagcttttgctttagaaaacttggaaagtacagaaatatat

SEQ ID NO: 540107 - DNA, 872 bp, Homo sapiens
  misc_feature (246)..(246): n is a, c, g, or t
  misc_feature (253)..(253): n is a, c, g, or t
  misc_feature (771)..(771): n is a, c, g, or t
agcgggtcagacccggcttagccgtccggctataagcctactgcttgagctagtcaaccccggggtcccagggcttctcgggcttggaggtcgtcgcacaccgtgtgaaggacagcggatggcgcgtggcactagtgggattcgtgactgtcgcgtggacgccggatcgctaatgcaagggaattgatagtgatactgccagaagagtggcacttgtgcgcaggattgactcaatagcgatgcacntcacacngtggacggacgactcacacaatgtgacctatcgtatcgtgaccggcgccagtagtaccgatcgacccatgctcaagcttcatcgcactcggtgcaggcatcgatgtactggtcgccttgtactcaggggatgcactctgtgtccagaaagaccaagggatcatgggaggacggcgatccatcatcttgtgtatagtcgctgtcattgtactggatcatgcagttgtggttgagcttgttcaccgcaaagaaggatccattcatctcggaacatcaatccagcctatatggtcgaagtgcgttcttgaggtactcagctgtgtctcgtacttaccgtgtacctggatattcctactacttcctagaatttacgacgctgggttgagaagtctctaatgtagttggctagatccaaactcgttcgaatacgccaacaagggaatgcaagatagtcatggagctatgcatgtgaagccgccactgtgatcacgctggagacgaggacttgctcatgccacntttgatatgagagcattttggacagttgctggggcatgggccattgaaaggctagcatggatccctaagtaccgtctactgctggacgaatcagtattacc

SEQ ID NO: 540108 - DNA, 150 bp, Homo sapiens
accccggtttctgtaaaatccctaaattttcccatctcaaaattatatctgtgcctgggtcatccacctccttcttgggtgtggggaaatgagtatgctttgatagatgctgcctaactcatccctcctgtaccatgacgctgaaaactg

SEQ ID NO: 540109 - DNA, 296 bp, Homo sapiens
ctggcgccccctggcccgctgttacgcaatggaaattacgaaagccccgcccgtcctcctggcccttgggggagtgcggcaggtttggcagactttgttttctttacctatctttgaacaccagcttttcttttatgggtgtctttttttctttttcttttgagttggagtctctgtcacccaagctggagtgcagtggtgtgattatagctcactgcaaccttgaattcctgggctcaagcaatccttccacctcagcctcctaagtagctaagaccataggtgtatgccaacat

SEQ ID NO: 540110 - DNA, 893 bp, Homo sapiens
  misc_feature (3)..(3): n is a, c, g, or t
cgncaacagacagtagagagagcgagcgagagagaaggcggaatgagagggaagcaaccagctctcaacgcgggtacgaagagtgccacaacagggggttaacccaacggcccccgtggggagccattgaacacaggggtccgaactaaacgtctcgcaccaaattaatcttggaagggggttacacccgccacacgacggtgggttggaggcaagcggcctcaagaggccgttaaacccggtgcttatccccggagtggtactctgacagaccggtgctcggaaagacccctttatcacccgcggaagaaaacctttcgtcgagcgctctaaaaaccaagggcggtcccaatacggggagcatctacatccgaggacccttgttgtaggaaacaacttgtcctggcgccaggggttccgggtctgtgccaaagagagaaatttttgcccgccccacgagggaccttggttttaacaccccctcggcccgttacagagtttccttggaaaaatcctcttgtggtcgtgaacacacatcagaacgtagcaacaaactgcccgacgcgactcccatgtgttcgaacccacgcgtaccctgatatgactgcggagtcattgaccctcacctgggcaaccgcgattttccatctacctccaggagttctgagtattagtgaggatctccacaccacgttgggaggttcggaggttaacactagaagactcgggagaaaagctttaccacctcccagcctcgggtgaatcctcccctgcccacctaaagggagacaccttctttgtattaggacaggggagttccccacccattactcggttgacaatcggagggtccgaaaggagaaaaaaatattcttttggcgggaaacaaaaca

SEQ ID NO: 540111 - DNA, 145 bp, Homo sapiens
cagaaagccatgtcggactcggcgcccagagcccaagcgctaacccgatgaaagtttctcagcgaaatcgcagggacgatctggaccccgctgagaggaactgatttagagtgagatggtcccacaggcctggaggagcggactg

SEQ ID NO: 540112 - DNA, 453 bp, Homo sapiens
  misc_feature (140)..(140): n is a, c, g, or t
  misc_feature (194)..(194): n is a, c, g, or t
  misc_feature (258)..(258): n is a, c, g, or t
  misc_feature (296)..(296): n is a, c, g, or t
  misc_feature (314)..(314): n is a, c, g, or t
gtttttttcagttattaattcttgttggtatcggattaagctttttcgtgccctttgcaccgaaatcctggcctgctgctatcgactggcacaccatcatcaccttaagcggcctgatgctgctgaccaaaggtgtgganttaagcggttattttgatgtgctggggcgcaaaatggtgcgccgctttgctacngagcgtcggctggcgatgtttatggtgctggcggcggcgctgctttctacctttctgaccaacnatgtctcgctgtttattgttgttccgctgactatcacnctaaaaagactgtgtganatcccggttaatcggctgattatttttgaagcgctggcagtcaacgctggttcgctactgacccaattggcaaccgcaaaatattcttatctggggacttctggtctttcgttgccggattattgccccaatgcaccct

SEQ ID NO: 540113 - DNA, 163 bp, Homo sapiens
aagggtgagacagaggttgaaaatgacaggtgtctacggaggagccaggcagccacgtgagacccttctattctaagtggcttcttgtccattcctggggattggggaaagaacgacagaacttaccttccatctatccttctcacaagcagtgtattgggtg

SEQ ID NO: 540114 - DNA, 593 bp, Homo sapiens
tcaccacttggtaacagcatctgaaggtttgtagttgctggtttctgtagccccatgagctacctgtgttccctctccatcccagagtgaagagcgaatcaaattcactcttttcctaaacagaggctctgctaggtcctggaataacttcctaacactagatttctggagatgcaggacctaaaagacaaaggtgggataactgaggagaaagatggggtgaactgaatagaaagatgggatgaacagaagtcagacagggagataggcacagctctctgcaaacatccatgtagacagcaacataccccagtcctgccagagaagctccatacatgttgacttgcatttcttttctcatgcttgtctgtcagtattctgcttcttatctttaaaatcaccaaccctagcctcagtcaatgatactgccagtctaagaagtattcaagaagtaaaaaattggcccggcacagtggttcacgcctgtaatcccagcactttgggaggccaaggagggcagttcatgagctcagggatcaagaccatcctggctaacacagtgaaactccatctctatttaaaacacaaaaact

SEQ ID NO: 540115 - DNA, 277 bp, Homo sapiens
cccgtcgtgaatttcatccgcgttaacggcacacttagacaggtgccgattgcccgaagttcggatctggtagacatccagatcttcttttttgctcgagacagatatttctcctgacgccgggagagctcaatgagtatgttctctacacggccggatctgagtgatttggagcaattctgagatttgatcgttggctgctgcggagcaggaagcaaaatattcggacgaagagctgaattgatgatcgaggtgaaactccgcttgacacttgata

SEQ ID NO: 540116 - DNA, 464 bp, Homo sapiens
ctgaggcccccccgggtcattttttggaaactctgggtctgtaggggcgggctgggggagggtccatcactggggggtttaattttggatttcgaacccctccccaggggtaaacgccaggtggtattccggcaaatgaaaaaggcccaatttggggagtgggggggggtgctccatgcccatggggggaggggggtaggggttttgggcccagtccttaaacccatggtgtggccccatggctggcatgggcgggtaggggtaggggtaggccccccaaaaatgttttggggggggctccccatgggaacgctttcctgaggcctttgctttccttttttgcggtttgaggggtttttttgccttttcctcatctttgaaagcttttagctgggcatttgacagggggacctgggcctgcaggttttccctttcccccccaataaagtaccccctttcagcca

SEQ ID NO: 540117 - DNA, 271 bp, Homo sapiens
gtcattatcctggctcattgcaatctggggctcctggtttcaagtgattctggtgtctcagccacctgagtagtcaggattacaggtgcacaccaccacgcatggctaaaaatacaaaaaattagatgggcatggtggcacatgcctgtagtcccagctacatgggagactgaggcaggagaattgcttgaacctgggaggcggaggttgcagtgagccgagatcacgtcattgcacttcagcctgggcaacaagagtgaaactccatctc

SEQ ID NO: 540118 - DNA, 841 bp, Homo sapiens
  misc_feature (325)..(325): n is a, c, g, or t
gcctgggcaggcttctcctgcaccttgggtcctgcttgggctgaggtcacacgagggtcaatcccgtgtgacaatggtcaggtaggtgtgcatccgtgacatagcccagctggcgggggtttgtcatggagcatacctgatggccgtgcgagaagggacaccccagtgcccctgggtcgtgcagcgttgccgtgcctgtatggagggttggtgtcattggcagcctcgatgccccttagggtcagatgagtcgtcggcctgcagtataggggtggtgtcgataggcagcccgaatgatccatcctggggtacgtgcagctcgctntggcatattgctacgggatctgtcattgggaacattccagtgtctgttgcagctaaggtagtgcctactggcccgtgggaggaatgagacctcagcttgctctgggaagtgcatgctcttgatgaaggttggtcttacagggctatccaataggtagttcctattgtcgcgcaccgggaacaagactggtcctgaggggtccacgagattattgcgtaccatccaagatggatggttacgagggagtgtggcgggacgtatacgccaaagagtgagttggaccggtgagccgatgggtatgactatggcttgggtgaatgtaaaacgtgcgggcaaggctgtgggaggaacatatggactagattggtggccatgtggaacgatggcgaaggacatcgccaatggtccattcatcagaagtttcctatgagagcgttggcctcgtgccagagtaggttcgcgcaaaaccttggtacgcctccgaaggctttaattacccatggggatggccgtaac

SEQ ID NO: 540119 - DNA, 492 bp, Homo sapiens
tagttctgagtgtaatgttttatgtaattgacatttttgaagagtccaagccagttgttttgtagagtgacctcagtttgggtttgtctgatgttttctcaagattaattttaggttatgtccttttggcaggactatgccaggagtgatgccaaattctcaatgcatagtatcaggaagcgtgtgctgttgattagtccagatgttcccaaacttggttatttgttggttttctgttgtaaggaagagctatctcttttttcatatatttgcttattcagttgtttttcatgtcattgtggactcttgaatttttactttaatacagtgggatctagccctttgcaatagttatttttacttgattttttaaaaatttattttcagtgtacagtgaaatttctctttgatgtacagatctatgacttttaacacatagatcatgtaattaccacagtcgaattatagaccagttctattacatccccccca

SEQ ID NO: 540120 - DNA, 346 bp, Homo sapiens
taaaaagtaaagtctgtctctgtcacccaggctggattgcagtggtgtgacggctcactgcagcctgcgcctcccaggcgtccagcaattcttgtttctcggcctcccaagtagctgggactataggtgcgtgccatcacatctggctagtttttgtatttttagtaaagacggggtttcaccattttggccagactggtctcgaactcctgacctcaagtgatctgcccgccttggccacccaaagtgctagggttacaggcttgagccattgtgcccagcccaggctctgggaattttgagataaataaaatgcttctatccatttattcaagcacattttggt

SEQ ID NO: 540121 - DNA, 668 bp, Homo sapiens
cgtgttttattgatctgtgctttaagggggggaagataggtacttacgaaacacagattaatggtgcggtatcctccgaggcaattgttatccaataatagctattgaattccagagaacagtgagcatactatgaggagcctctattcgcgatgagttcataaaatatcacgaaggcctagtttgtgacctaggtaacatacattattgacaataaatttctttgacctgatgacctagggctttgaggtcaaggacgggggttcattaccaagattatattctcgttactaatacagaaatttacacacatggattatccttcagctgtcaggaaatgcgcgctttctgttctggtggaggggaacgatactccctttcaggtggtcaaagggaagagcccttgcataaggagcggtgcacgattcctaggggtattaaaaaagggtcacccaaagggggggggaaggcgttaacatgtgggcggggaagcaagctgaactgtgctcataaggcggtttaacaggcccgctggagcaataagccttttttgccttggggaaggaggcgtgggtcttggggggtgcgggggacttgcgggtaaaggccggcccttctcagaaacattggaaaccttttcttttgggggcgagttgtttaatttttgt

SEQ ID NO: 540122 - DNA, 950 bp, Homo sapiens
  misc_feature (31)..(31): n is a, c, g, or t
  misc_feature (61)..(61): n is a, c, g, or t
  misc_feature (64)..(64): n is a, c, g, or t
  misc_feature (127)..(128): n is a, c, g, or t
  misc_feature (130)..(130): n is a, c, g, or t
  misc_feature (152)..(152): n is a, c, g, or t
  misc_feature (160)..(160): n is a, c, g, or t
  misc_feature (200)..(200): n is a, c, g, or t
  misc_feature (215)..(215): n is a, c, g, or t
  misc_feature (223)..(223): n is a, c, g, or t
  misc_feature (230)..(230): n is a, c, g, or t
  misc_feature (251)..(251): n is a, c, g, or t
  misc_feature (276)..(276): n is a, c, g, or t
  misc_feature (290)..(290): n is a, c, g, or t
  misc_feature (292)..(292): n is a, c, g, or t
  misc_feature (302)..(304): n is a, c, g, or t
  misc_feature (357)..(357): n is a, c, g, or t
  misc_feature (380)..(380): n is a, c, g, or t
  misc_feature (387)..(387): n is a, c, g, or t
  misc_feature (390)..(390): n is a, c, g, or t
  misc_feature (448)..(448): n is a, c, g, or t
  misc_feature (455)..(455): n is a, c, g, or t
  misc_feature (475)..(475): n is a, c, g, or t
  misc_feature (478)..(478): n is a, c, g, or t
  misc_feature (484)..(484): n is a, c, g, or t
  misc_feature (522)..(522): n is a, c, g, or t
  misc_feature (527)..(527): n is a, c, g, or t
  misc_feature (604)..(605): n is a, c, g, or t
  misc_feature (816)..(816): n is a, c, g, or t
  misc_feature (949)..(949): n is a, c, g, or t
atgttcctccactcatcttgaggtggtttantggcacacaatgtacatttctggcaacttnttnctccctcaagttcccctggttggtttttactcaactcatattaccaccaactctccctctcgnncnccaaaagtacaactggccagancacaaatngtttacattcttttttgtaagccattgtaagaaaaatggngcatggacacaaaanatgataanaactgcntttccatagaattcttaagtngcaaaagaggtttcattttaatganaaaataagcgtttntngtgggttttnnntttttcttacaaaaaaccttaagatattcagcaagggtcatttatacacagcnaggccccgccgttttcgttttanttgtctnccntttttaataattatatgagactcttcaaaactaggaacaataggtcagcactaaagtnaacctanaggtaatgagctcaatgccnccntttaancacttttaaaaggctctctccaataaggctgccgtccngtgcncctgccagtcttggagtaataaaacatttttactgcacacacctcatgggaaagtgtttatactgagtgtagtctcnngaggggtaaatgaagattatttccacaaattaagattgcacttagtacacgcctttacacaactctgatggtatttaccaaaacatggcatgtcttttcacgtatattcctgaaaacaccaaatagaactcttaacttttaaagaaaaatacagcacatttagttaagacagttgtggtgcagtggaaaattaagtactgagcactgagtnagaactctgctgttattaactagctgttcatatgaagaagaaaactcacctcatcagtctaatgagacaccagaaattttaaaatttcatctagctcaactcagtgatctaatcttatatgggggaatacacnt

SEQ ID NO: 540123 - DNA, 407 bp, Homo sapiens
  misc_feature (270)..(270): n is a, c, g, or t
  misc_feature (273)..(273): n is a, c, g, or t
  misc_feature (360)..(360): n is a, c, g, or t
tgagatgggagtttcactcttgtctcccaggctgcagtgcaatggcgtgatctcggctccctgcaatctccacctcccaggttcaagccattctcctccatcagcctcccaagtagctgggattgcaggcatggccaccatgcctggctaaatttttttgtatttcagtagagacagggtttcgccatgttggtcaggctggtctcaaactcctgacctcaggtgatccacccgcctcagcttcccaaagtgctgggattacaggcgtgnatncgtgcccggccgggtattcaggttcttactttgaggcagattccatctattcaggtcactggtttataacatattaaagtatctggntataaaagttgggggaacagctagggatcaagttttatttggatgga

SEQ ID NO: 540124 - DNA, 1457 bp, Homo sapiens
  misc_feature (216)..(216): n is a, c, g, or t
ggagtgttctgagggaaagcaaggacggcggcggcaggtcggcatatcgagtggcgagtagtgggaaaatgttagcttcgtagaggggagcccaagatgaccaggttctgaacggagttctaagacgtagaaacgcgagacacaccggaggtatggcatctctctctcggtgaatttgcagggctcctaagaacatcccaagtttctcgtggcttntggtcttcgcgtccttgggagactagcagtacctagtagcatgtctcataacggattggtagctcaggtgcgcggaaaatctcaattgcagtgcatcagaaagtaccgcaggcgatcaccacgtgcgagccttgtcgccttggaatatggctagctcttttcttacacgacttctccaagcaagcattagctcttgagtaaaggaattgttgaagaggaacatatggacgtcgacatccaccacttttgtaacaacagctgtgcacttgagcttgatgaacaccgcatggcacgtccaaagggacatacaccaatcgctgtgcttgtgtgaagaacaccacaagtgggaattggcccacctttacttccaagccagtggtttgcatatggcaaagatatacgatggtttgccgagcgaaccgattggaaactgcgttgaattgggttccgacattgggtaaaggatttgggcgggacattcaaagggacccaagatgtcaaaacacggtgcgttgtgcggaatacgcccaaaggtatactcgtgtcacttattaggttatactcggtcatagggggggaaactcgttcacagtcattactaatagagcctttgagagacatcacagtggtaaattcatttagcaaccctttcccattcagggtgaatcatggagtaaggcactacaggtgggcatggaagtatatcggtggacgagaaaaatatacggacagaggggactccgtaggaaaggaaagatggattatagcgtggtgactgaggaagaacaatatttagcagtgaaaaaggaattggaggggattttcagccggttggaccaatgggctaagtacggcggatggggggaacaggatgccgcattcgatcaccacgggaacgagatttatgtccgtaggaaaagcagtcagggcgtagaacgaatttagcacgaaaggcggcggtttaattcaccagggaagacattaaggggcaaggaggagggaataacggttggctataattatgcaaagaaggcgattcacgattacgttagagcaacattgcgaccttgtggacaggacagtgggcaaaatgtgtgaaagggcatagaggttaaggggcgacacacacaaggagaaagggatcatattgaagagagagatataaatgatataacggcaacagagaagataattgggtcgatatcaggaagtgttagttaacaatatgaaatggttacaaa

SEQ ID NO: 540125 - DNA, 488 bp, Homo sapiens
  misc_feature (108)..(108): n is a, c, g, or t
  misc_feature (199)..(199): n is a, c, g, or t
  misc_feature (425)..(425): n is a, c, g, or t
  misc_feature (435)..(435): n is a, c, g, or t
aattgcttgaggccgggagtttgagaccagcctgagaaatataatgagaccctgtctctacaaaaaatttaaaaacaagttagctgggcatggtggcacgtctctgtngtcccagccacttgagagactgagttgggaggatcgcttgagcccaagaggtccaggctgtagtgagctatgatggtgtcactgcactccngcctgggcaacaacgagaccccatcttaaaaaacaaataatgtatgtgagggtgtgtgtatgtgtcaaacactacttcattatggcttctacataaatgtcctatcatatcctatctgtggaattccacagttgtagtggtagaagtcattcttttgctttacttctttctggctctttcatttcacaaatatttgggcaagtggtctattttaaacctcccaggnactggttctnaggcatttgggaaagagccaaaaggaaattcaaggaaggatccggatcctttg

SEQ ID NO: 540126 - DNA, 125 bp, Homo sapiens
ggcggggggggtttttttcccccgggacccctttccttggtcccccccccccccgtcccccccgtttcccattttggggcccgggggttttcagggggtttcccttaggggttttttgggcccca

SEQ ID NO: 540127 - DNA, 104 bp, Homo sapiens
tagcggatcgccaaaaaaaaatgtgaagccgactgtcctcagaatctaacctgtagataactatagatgaaactcacattgtcgttcctttcgtgtacacattt

SEQ ID NO: 540128 - DNA, 173 bp, Homo sapiens
tatcctgctactgtaaaaactgaaataaagcagtatcatctgtgaccaattgcaggctccatgtctagaccagcaaaggaggtgctctctaaggcaaggggtcccccgccatgtgatgcaacaggtctacggcagggggttctcctatccctacaatgcacggagagcagacc

SEQ ID NO: 540129 - DNA, 273 bp, Homo sapiens
acactcaccggtcaggtactcaaaaatcaaaggtagataagcccacaaagatgagaaacgatcaatgcaaaaatgctacaacctcaaaaaaagccagagagtctgttctcttccaaatgaccgttaacacttctccagcaagaacacagaactaggttgaggctgagatggctgaaatgacagaagtaggcttcagaaggtgggtggtaatgaacttcactaagctaaaggagcatgttgtaacctgatatggtttgagtgtgattctggccg

SEQ ID NO: 540130 - DNA, 216 bp, Homo sapiens
accgtgccaaataggaagaggtagccttggttgtagccaaatggatctttttaacagtgtgcctttggggagggacccatgtccatggcttcgttgagggccatccatatgccagctgggggccagcccacagtggccatgttggctgcagctggaatggtgcccacctcggcgaattgaagggctaagagtcccagatagctaggccagagctgg

SEQ ID NO: 540131 - DNA, 875 bp, Homo sapiens
gcaggctcactgcatcaccaaatgggagaaaattttgcaatctatccatctgacaaatggctaatatccagaatctacaaggaacttaaacaaatttacaagaaaaaaacaaacaaccccatcaaaaagtgggcaaaggatatgaacagacacttctcaaaagaagacatttatgtggccaacaaacatatgaaaaaatgctcatcatcactggtcattagagaaatgcaaatcaaaaccacaatgagataccgtctcacaccagttagaatggcgatcattaaaaagtcaggaaacagcagatgttggagaggatgtggacaaattagaatgcttttacactgttggtgggagtgtaaattagttcaaccactgtggaagactctggtgattcctcaaggatctagaaccagaaataccatttgacccagcaatcccattactgggtatatacccaaagggttataaatcattctactataaggacacatgcacacatatgtttattgcagcaccgttcacaatagcaaagacttggaaccaaccacatgcccatcaatgatagactggataaagaaaatgtggcatatatacactgtggaatactatacagcgataaaaaaggatgagttcatgtcctttgtgcagggacatggatgaagctggaaactatcattctcagcaataatacaggaacagaaaacaaaaatggatgtgctcactcataagtgggagttgacatgagacacatggacaaggggggcacatcaatactgggtgtgagtgggggaggagggaggttggtcgggaaaatatggctgaggtggggggggacccgggttgttcttttaaaggtttggatttcggaattaaaa

SEQ ID NO: 540132 - DNA, 291 bp, Homo sapiens
gtcccagcagaactccccagctgactgcgaagctctgcttgtatgcggcacagtccgatagaagtcacagagacatacatcctcgctggaaacggtccagccacctccgtccgtgtccatgtcacagagcacagtcaggcgccggcagtcgggcaggtagatggtgtgccagacgctcaggaaatacccccggtctagcaggttattgcagttgcgtgggcctgtagcacacgactgagactgaccagcgtctcctttctctccacgcatccccttctctcctcggtctcc

SEQ ID NO: 540133 - DNA, 237 bp, Homo sapiens
ccaacataaatagaagagtatctgaggcatgggggtcaggtgtgaggtcttggtgagtgtttaagtggggttagcgatggaggtaggattggtgctgtgggcgaaagagtatgatggggtggtgattgtgattaattaaggagggacataaatagtgtacgaaagtggaagaaagggtataaggatagatgtgagagtagattctagatgctgggattggggctggagctgggcgtg

SEQ ID NO: 540134 - DNA, 850 bp, Homo sapiens
gcgtggtggctcacacctgtaatcccagcaatttgggaggccaaggcgggcggatcaccaggtcaggagatcgagaccatactggctaacacagcgaaaccccgtctctattaaaaatacaaaaaaaaaaattagccaggcgtggtggcaggcgcctgtagtcccagtctactctggaggctagggccagagaatggcgtgaacccggaaggcagagcttgcagtgagccgagatgacactactgtactctagcctgggccacagagtgagactctgtctcaaaacaaataatcaaaataattaacaaataaaagagaaacagacaagaaattttcttgtggccaagcactgtggctcacgcctgtaatcccagcactttgggaggccgaggcagggagaacgcttgagcccaggagttggagaccagtccaggcaacatggcaaaactccgtactctactacaaaatacaaaacattagccaggtgtgatggtgcacacactgtagtaccaggatacttaggaggacgatgcatgagaatcccttgaactcggtgagatggaggcctgaagtcggctgacatagcaccactggtaccccagaattgggtcacagagcaagactctgttctcaacagaaacaaacgggaaacaaacagagcccaacacaggacagcacacacccaaagcaacgccagacaaaagcaagcagaaacgctagcaaccaaaccaacccacgccacgaccgaacagtcacaaacgacaatctgcgtgtagacccaaaccgggagacccactgtgagacggggcatggaacaaccttaactttgtgagactcttcacaggaccac

SEQ ID NO: 540135 - DNA, 266 bp, Homo sapiens
ctaatgtagaatggctggcctcctcagctatgtcatcctcgatgagcagttcatccgtccacacatctgcacagctccactctgagaagcccagtgcggtcagcgtatggagaacgtcgcaagacccctgcccaccgcagcagtgtacacaccgactgtgcctcgcttctgaagtcgcagacgcttaaacacctacggagaacttctcaatgattgcccaaggttgggcagcttgatatgcacacctgcccgaagaccggtgccca

SEQ ID NO: 540136 - DNA, 358 bp, Homo sapiens
  misc_feature (210)..(210): n is a, c, g, or t
tgctcgcggcggacacggattcgagatcatcctctcgaaggtggagctgccggaggtcaccggcgcacagctgtacgagacggagaagcgcaagtgtccgcacctggcgtcccagatgatcttcgtgagctcccacggctccgcgccggaggtccgcccgctgctccgcaagccgatcaaccgcgactcgctgctgcgaacgatcgggantatgagcaagcgaatcgcggaagtgcaccagaagtagcgcttttgggctagaagctggtctccgtgaggcagctccataccgccgagatcggcaagctcgttgaagcgttctcgcccggcgcaacgtggtccgagatcgccaccccgg

SEQ ID NO: 540137 - DNA, 449 bp, Homo sapiens
ctcttcctcctgctccagccatataggatgtgcctgcttccccttcaccttccactacgactgtaagtttcctcaggcctcccaagccatgcttcctgaacaggctgtggaaccatgagccaattaagcctcttttcttcataaattacccagtctcagatagtttttttagcaatgtaagaacaaactaatacagtgtgtgagaaggttcactgtctcctatggggctggaatggcagaggtctcatgaagcttattgttccccagtagtgtgcactttctaaatttttttccccagtattttattcaccaggttgaacagttcagggtttatgccagtaggaggtgcccatgggtaaaaactggccgcagcaaagacaggtgggtaaatgcaatactgcaatggtgggcagaggtcccagccttgacagaagtggctgtggaagctc

SEQ ID NO: 540138 - DNA, 1003 bp, Homo sapiens
ctgaagggtgtggcgcgagcagcgtcgttggttggccggcggcgggccgggacgggcatggccctgctgctgtgcctggtgtgcctgacggcggcgctggcccacggctgtctgcactgccacagcaacttctccaagaagttctccttctaccgccaccatgtgaacttcaagtcctggtgggtgggcgacatccccgtgtcaggggcgctgctcaccgactggagcgacgacacgatgaaggagctgcacctggccatccccgccaagatcacccgggagaagctggaccaagtggcgacagcagtgtaccagatgatggatcagctgtaccaggggaagatgtacttccccgggtatttccccaacgagctgcgaaacatcttccgggagcaggtgcacctcatccagaacgccatcatcgaaagccgcatcgactgtcagcaccgctgtggcatcttccagtacgagaccatctcctgcaacaactgcacagactcgcacgtcgcctgctttggctataactgcgagtcctcggcgcagtggaagtcagctgtccagggcctcctgaactacataaataactggcacaaacaggacacgagcatgagaccacgctcctctgccttctcctggcctgggacacacagagccaccccggccttcctggtatcgccagccttaaggtgtctggagcccccacacttggccaacctgaccttggaagatgctgctgagtgtctcaagcagcactgacagcagctgggcctgcctcagggcaacgtgggggcggagactcagctggacagcccctgcctgtcactctggagctgggctgctgctgcctcaggaccccctctccgaccccggacagagctgatgtgccagggccaggagggcgggagggagggaatgggggtgggctgtcgcagcatcagcgcctgggcaggtcgcagagctgcgggatgtgattaaagtccctgatggttttcacacaaaaaaa

SEQ ID NO: 540139 - DNA, 496 bp, Homo sapiens
tcacacactaatcattagggaaatacaaatcaaaagcacaatgagatacacattgcacccatttctattaagaaaaaaagaagaaggaagtaatgctagcaaaatggccaaaaaaaaacccctactgcttgtccccctcacaaagacaggcagaacaatgaataaacaactacattttaaattttaatttaatttaattttatgtatttttttgagatagagtcttgctcggttgcccaggctggagtacaatggcgtgatctaagttcactgcaacctccacctcctgggttcaagcgattctcctgcctcagcctcccgagtagctgggattacaggcgcttgtcaccacaccctgctaatttgagtatttatagtagagacagggttttaccatgttggtcaggctggtcttgaactcctgacctcgtgatccacctgcctcggcctcccaaattactgggattacaggcgtgagccattgcacctggcccaa

SEQ ID NO: 540140 - DNA, 184 bp, Homo sapiens
tgtcgacaaagagacctagaatcgctcattgcatagtcttcaatcagccacatagccctcgtagtagagacattctcatccaaaccccctaaagcttcaccgtgcgcagtcaattctacctaatcaacccacggacctgagtacctgagactcgacattcgtaactccatgatcatagcatatt

SEQ ID NO: 540141 - DNA, 1093 bp, Homo sapiens
  misc_feature (736)..(736): n is a, c, g, or t
  misc_feature (745)..(745): n is a, c, g, or t
ctgaagggtgtggcgcgagcagcgtcgttggttggccggcggcgggccgggacgggcatggccctgctgctgtgcctggtgtgcctgacggcggcgctggcccacggctgtctgcactgccacagcaacttctccaagaagttctccttctaccgccaccatgtgaacttcaagtcctggtgggtgggcgacatccccgtgtcaggggcgctgctcaccgactggagcgacgacacgatgaaggagctgcacctggccatccccgccaagatcacccgggagaagctggaccaagtggcgacagcagtgtaccagatgatggatcagctgtaccaggggaagatgtacttccccgggtatttccccaacgagctgcgaaacatcttccgggagcaggtgcacctcatccagaacgccatcatcgaaagccgcatcgactgtcagcaccgctgtggcatcttccagtacgagaccatctcctgcaacaactgcacagactcgcacgtcgcctgctttggctataactgcgagtcctcggcgcagtggaagtcagctgtccagggcctcctgaactacataaataactggcacaaacaggacacgagcatgagaccacgctcctctgccttctcctggcctgggacacacagagccaccccggccttgtgagtgacccagagaagggaggcctcgggagaaggggtgctcgtaagccaacacagcgtgccgcggctgnacaccctgntgacatccagcctggtatcgccagccttaaggtgtctggagcccccacacttggccaacctgaccttggaagatgctgctgagtgtctcaagcagcactgacagcagctgggcctgcctcagggcaacgtgggggcggagactcagctggacagcccctgcctgtcactctggagctgggctgctgctgcctcaggaccccctctccgaccccggacagagctgatgtgccagggccaggagggcgggagggagggaatgggggtgggctgtcgcagcatcagcgcctgggcaggtcgcagagctgcgggatgtgattaaagtccctgatggttttcacacaaaaaaa

SEQ ID NO: 540142 - DNA, 931 bp, Homo sapiens
ctgaagggtgtggcgcgagcagcgtcgttggttggccggcggcgggccgggacgggcatggccctgctgctgtgcctggtgtgcctgacggcggcgctggcccacggctgtctgcactgccacagcaacttctccaagaagttctccttctaccgccaccatgtgaacttcaagtcctggtgggtgggcgacatccccgtgtcaggggcgctgctcaccgactggagcgacgacacgatgaaggagctgcacctggccatccccgccaagatcacccgggagaagctggaccaagtggcgacagcagtgtaccagatgatggatcagctgtaccaggggaagatgtacttccccgggtatttccccaacgagctgcgaaacatcttccgggagcaggtgcacctcatccagaacgccatcatcgaaagccgcatcgactgtcagcaccgctgtggcatcttccagtacgagaccatctcctgcaacaactgcacagactcgcacgtcgcctgctttggctataactgcgagtcctcggcgcagtggaagtcagctgtccagggcctcctgaactacataaataactggcacaacctggtatcgccagccttaaggtgtctggagcccccacacttggccaacctgaccttggaagatgctgctgagtgtctcaagcagcactgacagcagctgggcctgcctcagggcaacgtgggggcggagactcagctggacagcccctgcctgtcactctggagctgggctgctgctgcctcaggaccccctctccgaccccggacagagctgatgtgccagggccaggagggcgggagggagggaatgggggtgggctgtcgcagcatcagcgcctgggcaggtcgcagagctgcgggatgtgattaaagtccctgatggttttcacacaaaaaaa

SEQ ID NO: 540143 - DNA, 329 bp, Homo sapiens
ttttaaaaaaaaaaatttttaaaaaaccctaaaaaaatatttttaaattcttttaaaaaaaaaaaaatttttaaagccccctttttggggggatggcccccccatggggaaagaagggtttttaaaaaaggcccaatccgcccccccggttttcccccagaaaaaacccccttttttggggggtttttttttttttttttttgattttgcccggggggggggggccccccctggccagggccccccggggggggggccaaagctttttaaattggggtgaattggagggtttttcccttttgaaaaaaaaaccggggaaaatgtttcca

SEQ ID NO: 540144 - DNA, 398 bp, Homo sapiens
aatttttattatgcagtttgttggccatgggtaatcctccctttttacaaagaaaaaagtttccagcagaaagaatcagaggcttttattttggactcccaggggttttttttccctttttccccttccaggaaaacaactgttagttttgtgggtttctggtgctccccccagggtttgcagacttttgacctggtgagtttattaacactcaagaacctcaggagggctgccagcttgaccctggggaatccagccagtccagcccactttttcatcctgttctgttcaatgcggggggcctgcagaactttttaaaaatgttatgatttaggttcaaaggtaaaatgcctttcccctttccccaagttgggatatatcctccccccaattaagga

SEQ ID NO: 540145 - DNA, 231 bp, Homo sapiens
gtcgacaacctatcctacagagttatgagatgagatgacagaactgtgtgttcctgtgtttactgagtgctgacagtccatccatccacctagaggacttgtgtgtttactgagtgctgacagtccatccatccacctagaggactgtgtgtttactgagtgctgacagtccatccatccacctagaggactgtgtgtttactgagtgctgacagtccatccatcgtcgac

SEQ ID NO: 540146 - DNA, 245 bp, Homo sapiens
cttacactgggttcgagttcgagacagcctgagcaggtggcaaaaaccctggctctctaaaaaaaatacaaaaatggccgggcgcagtggctcactcctgtaatcccagacagtttgtggaggccgaggcaggtggatcacctggaggtcagggagtttgatgagcagcctggccaaccgtggtgaaagccgtgtctccacgtaaataatacaacaacttagcccgggcgtggtggcgggatgcc

SEQ ID NO: 540147 - DNA, 134 bp, Homo sapiens
cagccggacctagagccgtgtgagaatcgctgcagccgaggatgctacgttgctgtgagctgagactcgcaccactgcactccagcttgggcacagagagagacactgtctttaaaaaaacaaaccaatacaga

SEQ ID NO: 540148 - DNA, 1555 bp, Homo sapiens
  misc_feature (1549)..(1549): n is a, c, g, or t
tataggctaggtataggctccgtgtttaatcggcgagggtgccctgagtgtggcaagggcttccgccgaagctctgacctggtgaaacaccatcgtgtgcacacaggggagaaaccctacctctgtcctgaatgcggcaagggttttgctgacagctcagcccgagtcaagcacctccgcacccaccgtggtgaacgggcccggccaccaccaccatccactctgctgcggccacataacccacctggcccagtacccatggcccctcgaccccgagttcgggcccagccttctggacccagccagccccacgtgtgtggcttctgtgggaaggagttcccccggagctcagatctggtcaaacacaggcgtacacacacgggggagaagccatacaagtgtgcagagtgtggcaagggttttggtgacagttctgcccgcatcaagcaccagcgtgggcacctggtcctgacgccctttgggataggggatggtagggcaaggcccctcaagcaggaggcagcaacaggactggaatgacgcggtccagggagggtggaggcccaggagaccaaagggaggggctctgccgcttagcagagaagaaagggcctgggaggtggtgggagggagaaggaagggaagaaaggggaggaagaatagatagaaatagggattggagacagtaaccttgaagctcaggaaactgtcctggctgggctgagtcaggaccttgccaggacgggctgtacccctggcttctagaagactgcctagcacacagtaggcattcaatacttgttgaataaataaactggctttcacctaaggactcaaccctaaattcctgctgcctcatctgttaagaactgacactttccccttgctgggcaggtagtacacacctgtaatcccagcagtttgggaggctgaggtgggagaatcacttgagcccaaaagtttgaggctgcagtgagctgattgcaccactgatgcctcccaaccttgctctgggagaccaatgcctgaaccagggtttgtttaccttctgagctgcagagatggggcttctggaatttaaggtaacaggatgaggcaggggtatcttgatcatccggatggggcaaatactgctgtgtggcatggtggtacccacccctatggaggggcactcttggacagagcccagacctttgtgccctggagggagccaacccaccctgacacggagacactggcagaatagaccagagacagaaggtgctctcatggtatccagcctggatgccaagcccaagtcctggtggatagcagaggccagctgtttgggaaaagggcaggatgctctgaggcctggcagccacatttccatgtgtctttttaccaataaacggcttctcttctgaggcttggacagtgtgtgtgtacacacaggcatgaaaaaggtggagaggggtctctgcgcgcaaaactcagactgtaaattttgtgtggttcccttgctctctgagcccattaaataaagaggttgtcttggcgtaaaaaaaanacaaaa

SEQ ID NO: 540149 - DNA, 1245 bp, Homo sapiens
  misc_feature (580)..(580): n is a, c, g, or t
  misc_feature (1245)..(1245): n is a, c, g, or t
gctcaaaatacaaagttagctggatgtggtggcacatgcctgtaatcccagctactcgggaggctgaggcaggagaatcgcttgaacctgggaggcagaggttgcgatgagcctgagatgcaccattgcactcccagcctgggctgaactaacagtcggaaactccaatctcgaaaaaaaaaaaaaagaaaaaaggggtgacgaggggaggtcttcaccaaagggcttttccggaaacagcagagagttgtgaaaccggggcagttccattgcacgagtttttggaaacaggtgtttttcacattataagttcgtcggataaaatttataggcgaagagaagaaatcttacaaaggttaaaaccctatagaatttctccatagcaatggggcttggggggcaactgtgggtaagaatgtggggggctccgagtgttgcccccgatattgagccaaccaaatgtgtggtctgtgaaaggttgtgaagtgtggaattgtggcaaaatttttctggtggcagagaacggggacgtgtgggtgttcaccacctgtgggtgagtggcctatactactcaataagnttgtcgggctctccacaaattccctcccaaaagtatgtacccctgtgtggtgttcttcttatgataagtagcccaaggggtaacggcatcctatggggggaccccttgtgacaagggggtgtgctcaataagtttgtggactggggaatatgtggccatttaacaggctactactcaaatatagttggcgcgcggggggaacctgggggcttcaccgtggcgaaggggggggtcgccaattggcccacggacagtgcatggggttctggccagggtgaacgcacccacaaaaaagggggcaaaggaacggcattgcgaaacaacaccttgcggggtgcgaaatcgtgacaacagacaacagcaacagcctcatagacgtagttgcccttgtgggacacctgtggaaaaccgaggaagcccaggcgtgggagcgctccagaggcgcggaaaacgaacccggctggtcgtagaagccaacacagaggtaggagcccccgtgggagaacacagtacacttggagcgaaaatagtgaggggtggcacacgccacggggtgggactactcgagccccggcggacctggatggagcgggcggagaaacaatttccacaggtccgggggcacctgtgcccggcggaaacaattggcgtccgggaagaaactn

SEQ ID NO: 540150 - DNA, 741 bp, Homo sapiens
aaatgacagttgagggatacaaaacccaccccattcccggacgcgtgggaaaaaaaaaaaaaaaaaaaaaaaaaaaaaaaaaaaaaaaaaaaaaaaaaaaaaaaaaaaaaaaaaaaaaaaaaaaaaaaaaaaaaaaaaaaaaaaaaaaaaaaggggacaccagaaagggatcgcacgaacgacatgtaactactgacaaccggacccgcttgtagctaaactgctttgtatgaagtactgaccatgcagaccatgagcatgctatgtaccatcagactcagaacatacagcgtgccaccatagtcgacaccaactgatactacacagacgttaagcaaaacatgaacggcacataaccacacataagacgataatgcctctaaaaagagtgaagcacaatacatgccacagggacatggaagacaagtagcaccacaaggcggcacttattgagtgttgacgagatcatatgtatactaactgattgcctccaagcgcaacgaataacaacagaccaacaacatataaccaaccgacgcagaccaagctcgacaaacgaaagaccgaaacaaacgctacactaaagagattcaacaacagaagatcacctggataagatacaaaactatacaccaagacataactcgcatgatcaacacaaacatgaaaaaaaaacacgatgacaaatcctcaagagacaagataggagaaaaacatgaacaaaccgcatccccacgaaca

SEQ ID NO: 540151 - DNA, 1646 bp, Homo sapiens
  misc_feature (32)..(32): n is a, c, g, or t
  misc_feature (61)..(61): n is a, c, g, or t
  misc_feature (1640)..(1640): n is a, c, g, or t
tggcacagccccccgtgacacctcgagtcctnacactcggtgagccttttgcctgcctgcntggagccagagcctggggcccacaggctgggagccacccccaccactggcgggcgacaagccccacaagtgccctgagtgtggcaagggcttccgccgaagctctgacctggtgaaacaccatcgtgtgcacacaggggagaaaccctacctctgtcctgaatgcggcaagggttttgctgacagctcagcccgagtcaagcacctccgcacccaccgtggtgaacgggcccggccaccaccaccatccactctgctgcggccacataacccacctggcccagtacccatggcccctcgaccccgagttcgggcccagccttctggacccagccagccccacgtgtgtggcttctgtgggaaggagttcccccggagctcagatctggtcaaacacaggcgtacacacacgggggagaagccatacaagtgtgcagagtgtggcaagggttttggtgacagttctgcccgcatcaagcaccagcgtgggcacctggtcctgacgccctttgggataggggatggtagggcaaggcccctcaagcaggaggcagcaacaggactggaatgacgcggtccagggagggtggaggcccaggagaccaaagggaggggctctgccgcttagcagagaagaaagggcctgggaggtggtgggagggagaaggaagggaagaaaggggaggaagaatagatagaaatagggattggagacagtaaccttgaagctcaggaaactgtcctggctgggctgagtcaggaccttgccaggacgggctgtacccctggcttctagaagactgcctagcacacagtaggcattcaatacttgttgaataaataaactggctttcacctaaggactcaaccctaaattcctgctgcctcatctgttaagaactgacactttccccttgctgggcaggtagtacacacctgtaatcccagcagtttgggaggctgaggtgggagaatcacttgagcccaaaagtttgaggctgcagtgagctgattgcaccactgatgcctcccaaccttgctctgggagaccaatgcctgaaccagggtttgtttaccttctgagctgcagagatggggcttctggaatttaaggtaacaggatgaggcaggggtatcttgatcatccggatggggcaaatactgctgtgtggcatggtggtacccacccctatggaggggcactcttggacagagcccagacctttgtgccctggagggagccaacccaccctgacacggagacactggcagaatagaccagagacagaaggtgctctcatggtatccagcctggatgccaagcccaagtcctggtggatagcagaggccagctgtttgggaaaagggcaggatgctctgaggcctggcagccacatttccatgtgtctttttaccaataaacggcttctcttctgaggcttggacagtgtgtgtgtacacacaggcatgaaaaaggtggagaggggtctctgcgcgcaaaactcagactgtaaattttgtgtggttcccttgctctctgagcccattaaataaagaggttgtcttggcgtaaaaaaaanacaaaa

SEQ ID NO: 540152 - DNA, 301 bp, Homo sapiens
  misc_feature (42)..(42): n is a, c, g, or t
gcacgaggtttgttacagaagattttaagggccgggcacagnggtttattcctttaatcccaatactgtgtaatctcgaggcaggaggtttacttgagtccaggagttttatacctacctaggcaacatggtgaaaccttgtctctaccaatatttaaattagctgggcatggtggcacgtgcctgtggtcccagctacttgggaggctgaggtgggagcctgggaggtcaaggctgcagtgagccatgatcatgccactgcactccatcctgggtgacagcaagatcttgtctcaaaaaa

SEQ ID NO: 540153 - DNA, 450 bp, Homo sapiens
tccagcgtactagtttccattggaataatctaacccgcgtgtcctttcccctttctggggcacaagccactgcgggccatgtacccaaataaacctcttaatgcgtatgttaaaattagttggacatctgagtttccctctgaagaaatggaaaaagtgtcgggtgtcccatcccgacctcccccatccccgaccggaccataaagtccctacataagagggcgtgtcatgctgcctccggactctggcaacatcacatatacgcacacaaacacggaccatcaccgcacgctcacatggaataagaagctgaaacggaacgaacaagcagaagaccaaaacaacaaccaacacaggacgacacctcccacaagcaacgaagacaagccacccaagaagtcaacagcaaaacacagagcacaatgaagcccgagaaagaagacagacaaa

SEQ ID NO: 540154 - DNA, 162 bp, Homo sapiens
gcggagtgatgtaaaatgtaagtgtagatgaaattactaatcttttcagaagtgattaaaagtggaaaaaaaaggaggccaaccaagcaccacagggaaaattgggtggagaccattccagtttcaaactagaacctagtgaagatatattccctagcctca

SEQ ID NO: 540155 - DNA, 331 bp, Homo sapiens
gtagcctaacccaatggatagctgtcgtgggggtaatttgtcagcgaccacctgtgcaactgcggtactttgcgtgccattaccaataccttgaaacgcacgcagtaaaatcaaaacaagtaatgattgactaaaaatcagtaagccgaaatcgaccactaaaacgagcaacccaatcacgattaatggcttgcgcccaaagcgatcatcattttacccacaggcacacgcgctactagggctgctaacccccaatcccattcaccaggcccgcatcatcgctttgccacctatttgtgtcctatattggtacgtccccttttgtgcggtc

SEQ ID NO: 540156 - DNA, 419 bp, Homo sapiens
ccgagaccacctctataggacagcctactcaaaggactgcgcatcggtgagtcttgcctggcgatatatcggaacatggctctgaaacacactacagaagtaacacttactcagtagaaatggatgcacaacccgaatatctcactgagaggcctgacagtgactacaggcgtgtagtactacgctcattggcaagggtctctatataggtatgagtcatggcctggagaaagaacctgacatgaatgcactacggatgtggacagatttcaacgaagcatacacgagcaagacgaaagagtcagcactacaggagcattgaacacgctaactgaatgatgacggtctgagcgtatcagcggtacacttgcgctactgctacgctgattagtgctcacagacgaagtatcatggtgcct

SEQ ID NO: 540157 - DNA, 400 bp, Homo sapiens
  misc_feature (400)..(400): n is a, c, g, or t
ttcatacatggcggctccactagggggtgtggtttctggtcagccacccgggcccgctcagggctcgccgggtcttgcgggccaagcttcggtcgttcaggcaggtccaggcgcttctagaccttccagcagtactttggtggacgagttggaggcatgtttcgaggcttgctgtgcatctctggtgagtcaggactatgtgaatggcaccgctcaggacgttcggaccggtaagcattgcgtctgtgtacacaatggtctgggcttccgctgtctgtgctagctgctagtcatctgcttcatgtgtttcagtgctgctttgatcctatgacgacatctccgggactataatgtgggcacataagctctatgagctgctgattgctggttgagtactgtn

SEQ ID NO: 540158 - DNA, 319 bp, Homo sapiens
  misc_feature (39)..(39): n is a, c, g, or t
  misc_feature (51)..(51): n is a, c, g, or t
  misc_feature (270)..(270): n is a, c, g, or t
ttgtggccgccgtacttggagatcatgaagaggagaccngtcttcaatcanttggttgagcagatcgagagcgagctgccgggggcggtttgaggcgggcgaggtgtgggtgctggagcgcgctcgtggctccgcaacctggggcaggccgagaagatcacggtgctaggatcgcgtgccatcactcgtaggcgcgatcctgcttcgttggcggtacttcgactacatcaccacgccggatcagctcatccagatccaccgccgaagcgnccaggcatcctgtgcatgaatcccacttgtccttgtactcgcgtgccag

SEQ ID NO: 540159 - DNA, 101 bp, Homo sapiens
accacacacgacaagtatcttttcttccagtgtctcagcctcgccactctgtccaacacacacaacaagtatctttttttccagtgtctcaaacttgtctt

SEQ ID NO: 540160 - DNA, 470 bp, Homo sapiens
aacgatacagagcgggattcagtggcctagacggggaaggagcgtacgaggatgcgggacgagtccagatgagctggcttcttgggagcacagaagtgctcacctgtacttgacaataccacggatcacggggtgcccgtcgatgtatctttcagcacaatactgaacatcttagctgttcatgagggatcgctatctggcgaggatggggccgtggagcttccatcggcttggggaaccgcccagctatagttactccagatattcggcgtgcacgggcttgtggcactggagaaccttgatggcatcttcgactttgaaccactctcgcttcctcccaatgctaaccgaatcttcccaatcctccagcagctccgtgacagtcagtacatacacgtacgttttgtgcttgcgatcctggttctgttcgaagacgcccaggagccggcctaacttccccttgactcccg

SEQ ID NO: 540161 - DNA, 985 bp, Homo sapiens
  misc_feature (234)..(234): n is a, c, g, or t
  misc_feature (488)..(488): n is a, c, g, or t
  misc_feature (508)..(508): n is a, c, g, or t
  misc_feature (542)..(542): n is a, c, g, or t
gcaccaccacacagaggcggggcttgtgagaaccccccggcgttcacacagggaggcgtacaattcttgcgctcgcacacaaaaaagacgaaagtgcggcaaagagggaacggcgggtcgggtgttgtccgcggccccggttggttgccccaaagcaaactgcacccgcaagcagtgtggtgaaacccggtggtggcctggtcgtcggtcccacggccagaagtcgcccacgtnctctcccgagtcgcctgagaaactcccgcagtcgatggaaactctggggcacaatcatgcagaagatacagaccgaactcgccgcatcatggggaatggtccgcacacaccacctgcagcagggtgcacacaccggggaccctcccacaacgtagccctgtaggattgagcacatgcgagatcccgctaacaaaaaggcaggtcacgaaggtgcgtggccgctccaaggtacacaggcagctagctccctcaantgtgtgcccagcagatgctnggtgaagcaccgctcaactcgctctctggcgagngcaagtattgttaggacgagcgtgcccgacacgaagcgcacccgctgtgcaggggtgaagttccacaatagcacaccaccagctcggcgtcctccacaaaaataaacagacgcggcctgtttcctgcccccacaagaaacaggtgggtaagatgggccccaccggcagagacaaaccacgaaaggtgagcccccgcgcacaacaacatgccaaatcatggacggaaaagcaccacgtgggcggcaggcgtggtgccccccggcatcacacccacaaccgccatgatgccacacaagacatccgtacaagatatatttccccgggaaaataaaggggcaagaaaagtttgacacccgacacccgaccggagcgggaaagacgatcatacaatgaaaagacgcccggaggaatttccacaaaaaaaaaaaatcgcccaaaaaaca

SEQ ID NO: 540162 - DNA, 125 bp, Homo sapiens
gacatgcgcgtacgcatacatacgtatgcgtgcgcatgtacacatatatgcatatgtgtactgcgcacgagtacgctgctatatatacactatgttctgtacaagcgttcgttctactaggccag

SEQ ID NO: 540163 - DNA, 288 bp, Homo sapiens
taacacataggcaattgcgggattaattttacggtgagaaacagaccacaggtaattgatatcctcagcaccccactcatcatttctagcaaacttagccagattttcaaaattactgacatttcggcccgtctcaatatctccaaataaataattattttggcagaataccccttcgatcaatgcgaacacatcgagaagggaatttttataatacagatgacttttgaattaaattggcattaaaaccatattttgataaatctccatacttttcacagcatagag

SEQ ID NO: 540164 - DNA, 967 bp, Homo sapiens
  misc_feature (7)..(7): n is a, c, g, or t
  misc_feature (148)..(148): n is a, c, g, or t
  misc_feature (200)..(200): n is a, c, g, or t
  misc_feature (207)..(207): n is a, c, g, or t
  misc_feature (268)..(268): n is a, c, g, or t
  misc_feature (301)..(301): n is a, c, g, or t
  misc_feature (357)..(357): n is a, c, g, or t
  misc_feature (421)..(421): n is a, c, g, or t
  misc_feature (430)..(430): n is a, c, g, or t
  misc_feature (444)..(444): n is a, c, g, or t
  misc_feature (459)..(459): n is a, c, g, or t
  misc_feature (486)..(486): n is a, c, g, or t
  misc_feature (492)..(492): n is a, c, g, or t
  misc_feature (500)..(500): n is a, c, g, or t
  misc_feature (518)..(518): n is a, c, g, or t
  misc_feature (570)..(570): n is a, c, g, or t
  misc_feature (598)..(598): n is a, c, g, or t
  misc_feature (601)..(601): n is a, c, g, or t
  misc_feature (605)..(605): n is a, c, g, or t
  misc_feature (621)..(621): n is a, c, g, or t
  misc_feature (631)..(631): n is a, c, g, or t
  misc_feature (643)..(643): n is a, c, g, or t
  misc_feature (649)..(650): n is a, c, g, or t
  misc_feature (654)..(654): n is a, c, g, or t
  misc_feature (659)..(659): n is a, c, g, or t
  misc_feature (663)..(664): n is a, c, g, or t
  misc_feature (682)..(682): n is a, c, g, or t
  misc_feature (693)..(693): n is a, c, g, or t
  misc_feature (719)..(719): n is a, c, g, or t
  misc_feature (730)..(730): n is a, c, g, or t
  misc_feature (746)..(746): n is a, c, g, or t
  misc_feature (757)..(757): n is a, c, g, or t
  misc_feature (770)..(771): n is a, c, g, or t
  misc_feature (783)..(783): n is a, c, g, or t
  misc_feature (789)..(789): n is a, c, g, or t
  misc_feature (804)..(805): n is a, c, g, or t
  misc_feature (812)..(812): n is a, c, g, or t
  misc_feature (819)..(820): n is a, c, g, or t
  misc_feature (830)..(830): n is a, c, g, or t
  misc_feature (832)..(832): n is a, c, g, or t
  misc_feature (871)..(871): n is a, c, g, or t
  misc_feature (899)..(899): n is a, c, g, or t
  misc_feature (947)..(947): n is a, c, g, or t
ccggganggacccggcaccctcccctgaacttcctggctactcatttccagcgaatttaatcttattttttataattcgtttcagtttttcaaggaaatggaggagctgttttttcccacgggagcgggcgggccttgggaggtgtgncgggcccaagaaggttccggccgcgatgccgtcagcgccttcggcagaatgnatgaagncgagattttcttctcagaagtgagatgccacgatttcgagggaccagggagggcgggcggngccgcggggccacagcccagccccgcgccccgnaccgcgtcacaaccaaagccccgccggggtgcgcgctgcagaggggacacgccgcntataactgggcaccgcggtcggtcggccgcgtggcgggcggcagggaagaggtggggtccgggnagagcctangggacccgggagtncacccgcggaggccngcccccggttggttgccgtgggggggncggcancggggcancggcccggcgccgcctcnaaaacctccctcggtggcacgtctggcgcgccggtaggtcccacccaagctntgcctgcccccgttgaaagaacatcgcntgntacntttgagcaaccttccntcggggccgnccagaggtgggngggttnntggnttctncgtnnggccggacggcggaatcnatctgccttgngccctcgctttccacgcggttggttnctcggttccangaggggtcccatggtngactcctcccnaactccctccggnngggttcaagaanggccgntccgtgggtgtgtgnnatccaanagaaacnncctccaaaantncctttttttttctgctcttttttcacccgagtttgtttngtgcaaatgttccctgggcccctcgctnggtttctccccacggtggccccacggggggagggggaggatggaactncggggcaacagaagagctgg

SEQ ID NO: 540165 - DNA, 624 bp, Homo sapiens
tgtggagtagatggaaactccgcactatctgtgcagctgtaaatcagacttttctaaaaaatagtcaatttaaaaaaagctcacacagggcatcagcaatgtgttgcttctaaatgtcacaggaaaccgttaaacatacaacaggcatctcaatttatttacaactatttttcaacaggcaggcaagaactccactgggactcagaagtgcatcatataccacaccacttgccacttaattaactcgtagcattccagtatattagtcagactgacccaggtcagatggtcaacagttgacaaatatcaggtagacacttggcacaatattacgcagcatatggcagtaggacagctcgcgataaggcatgacccttcactatgcaaccctactcagagagttagacattgatcactcaaggaataatgacttgaaggccagtgcagtgagtgggtacacaaccatgtaatacctagacacatttgaggagcactaggtgagatcagcctgtagccccagcgagctttcgacgaccagacctagaggcaaccatatggagaaaccctagatctcatacataaagcaatacaatcaaattgagacagcgtgcacgtgtgtgccac

SEQ ID NO: 540166 - DNA, 836 bp, Homo sapiens
ttttttttttgtgaagtgaggtaaaggtaatgatgaacagagttgtgccaaataaagaacagacagcagcgtgtatttttaggggggaatgattttaagaaagaatacatacagaatatttatagaatacttaaaaatacttaacagacagtggaagtttggaagattatttttttaaagaacaaccctgcctgaatactctctggaaatccagtctctcagaaatgggagtaacctaattcctagggaatcaagctgattttaagaagtaatgaattgacactgagagtatctatggaaagtatgaaaaaggacacaggaaaataaaatgtctcaatcaacctgcctttaaaatgttgaaatttcaggtgaagtaaacaaagcacgagcaaagtatagacattgatgccaatgtgcctggatatggttatctactaaaggggggaagcatttcatgtttcaaaaggcgctggtcatgtttgcctgggatccaggaaatttagatgggaatggttagaagggaattcactgagctaggtgtgaagttattaacctttgggggcctcgggttcctggtgttagtagaatgattttccttaaggaatgaaggggtacttcgacccattttcatttgtggaaaaaaaaagatgatgcaggctatactggattttaaaacattgatcgagcgggcggaatagtaaacccgcgaggtggttggaaagcaagacaagagttcaaagtttatatggaaaaaaatattggtggacaccgaataggggcgctttggctggggacgtttgagaggtgagacggattgtagggggggtgccgccagt

SEQ ID NO: 540167 - DNA, 849 bp, Homo sapiens
  misc_feature (483)..(483): n is a, c, g, or t
tctaattggtctgtttattcccacaaggtagccagggtttgggggcgccgagccaagcccagcaggccatggaaccttcctccggcggggtgcacgctgaatttcgggtctgccccaccagcaggtttgcaggcaggccgcatgagtgccggtggaaggtctccaagggcgtgggcaggggctcgggcggggccacacactggtggagctagaacatagtggggcaggtccttctctatcaccaggggctcctccaggggtccgtagcgcttcaccacgcagccgttcttgtcgatgaggaactgggtgaagtctccacttgatggcatttcccaggatgcccttgccctggggtgggatcttcatccacttccacagcgggtgggcgtcgtccccgttcacgcagatctgtgctgaacatatcgaatttgacgttgtagcccgggggaactcttggatctcttcgtaactcccgggtccggncttcccgaacgggttacacgggaaggccaggatccgaaaacaactcaggatatcgggcgtgcaggtcgacgagctgagtgtagtaactcgggactagcctcacggggaggccccgtgggtcgacgatgcaccacgacagccccggtactgggtccaggttaacatgtgccgtgatggccttggcggaaaaacccgtgcatggaggggcacagggcaagtcgcccgagaaggcattggcccgcaggcagggggcaaaccaagagaaggccgacagccaggggggtcaaaacaggctacaaagggcaaggatccaaaagggtgccctctcaagtgtcgcgcacccgctgcatacattgaagcgcaaga

SEQ ID NO: 540168 - DNA, 316 bp, Homo sapiens
gcacgagtcatcgctgaagtgcggtggaaagcgagttatgtgtaaggatactgatggaagttagagaaatggtcgtgactggagaaaaacccgaggaatattaagatatataagttctaaaagattttaaaaagtactttgaagaagccaactatgatgaaatctgcaggtagacctaatttcaataggtgcaggataatataagctgaagccaaaaagttggaaaagaatattccggcagagcttaggtctgtacttcctgtgtctgggaaatgtccagtgaacaaagaaacaaatgaagcccagtgtggcagaa

SEQ ID NO: 540169 - DNA, 605 bp, Homo sapiens
ggtgcttggttacaggaatttaagcaaattacagggactgcactccatgagtttgtgaaaggaaaaataaatctcaggaccccaaaatcactaagccaaaaagaaaagtcaagctgggaattgcatcgagcaaacctgcctctcattttattcctgaataagatagctacaaagattaaaaaaaaaaaaagctacatacctccctgacaatttgcccccaaggaaattccttgtgggcctcaagaccttcactctaaaacagttctgttgtatttcaccctggcaatgtaaattgatagcttatcttcacaggtatgggacaaaggacagaactcaaagtcacccctctacccacctgagacaaatgcgtaactgactgcttcctctgccctactgtgtatgtaaaatcgcagattcatttagccgactaaggcataagtgactattcttctgtccctctctcacatgtaactggtgtattacgtgaaaagctgatcaaagactcaaaagaatgcaaccatttgtctcttatctatgacctggatgccccccatccttctagttgtcctgcctttctggagggaaccaagcaacccctggggtat

SEQ ID NO: 540170 - DNA, 1945 bp, Homo sapiens
tgaaataaatgtcctattccggtaaattttaaaggactgttttgacatgataatttgtctcctaaaataatgtcccaggacccacactaacaaaagtcaaaattgaaggtgaacctgaattcagactgattaaagaaggtgaaacaataactgaagtgatccatggaggtgcgttccttatgttacctggggccgactaccttcgctgtgattattttgaaatagtgttggtttagaaatattgaacatctgatattttctcttagttcttattttataaaaattgtgggaattatttcctcagctatgagttcttattagctggtcagaaataaaacatagttagcttttaatggatctagttggaattaatttatctattaagtcactgggcccaacaaaatgtcatgatttttgcatatacaagtgaggattgtggaataaaattgtaacattaatgtcagtataaaaggaaatattagaaacagtaggaaaaaatgaccattgtataagtctctgtctaataagccactccactactaggatttatgatagggctcccattccaatgatatagaactccctggattctcactaagtatttattccacatccagaaaacaagtatggcatggagagttaggatgtcaaatggccctctctctcaaccaagattcaggacatagctattaccttttagatccctattgatatgatttttgggggatatgttctaaaaatgtttatgattgaatcttaaatggtaatatttgtagaaatatagttaatcattacaatgtctagcttatggatgtatagtcacaatatgagggtaaatcaaatgcatttgtattcccctgcttttagagccaattattaaaaaatacaccaaaatcattgatggagtgcctgtggaaataactgaaaaagagacacgagaagaacgaatcattacaggtcctgaaataaaatacactaggatttctactggaggtggagaaacagaagaaactctgaagaaattgttacaagaagaggtcaccaaggtcaccaaattcattgaaggtggtgatggtcatttatttgaagatgaagaaattaaaagactgcttcagggagacacacccgtgaggaagttgcaagccaacaaaaaagttcaaggatctagaagacgattaagggaaggtcgttctcagtgaaaatccaaaaaccagaaaaaaatgtttatacaaccctaagtcaataacctgaccttagaaaattgtgagagccaagttgacttcaggaactgaaacatcagcacaaagaagcaatcatcaaataattctgaacacaaatttaatatttttttttctgaatgagaaacatgagggaaattgtggagttagcctcctgtggtaaaggaattgaagaaaatataacaccttacaccctttttcatcttgacattaaaagttctggctaactttggaatccattagagaaaaatccttgtcaccagattcattacaattcaaatcgaagagttgtgaactgttatcccattgaaaagaccgagccttgtatgtatgttatggatacataaaatgcacgcaagccattatctctccatgggaagctaagttataaaaataggtgcttggtgtacaaaactttttatatcaaaaggctttgcacatttctatatgagtgggtttactggtaaattatgttattttttacaactaattttgtactctcagaatgtttgtcatatgcttcttgcaatgcatattttttaatctcaaacgtttcaataaaaccatttttcagatataaagagaattacttcaaattgagtaattcagaaaaactcaagatttaagttaaaaagtggtttggacttgggaacaggactttatacctcttttactgtaacaagtactcattaaaggaaattgaatga

SEQ ID NO: 540171 - DNA, 194 bp, Homo sapiens
taccttgccacgactcgtttcttgccaacgactcgggagaagacccaggtaaccgagctgaatcgggagtgcaatgaacctgcaggtccagattgacgtcctccagcaaagccaaactcgcaggagtgagcctgcgggcgcgtgactggctcagtaagatagagaccggagacgcaatatcctcaacgtgcgcc

SEQ ID NO: 540172 - DNA, 1087 bp, Homo sapiens
gggttccaaaatccataatgaaacaatgtgttttgcaactaagaaacattcattatgatatatggaaaacactgtctgtctacttgtcctttacgaaaaaaatgtaaaactctgaggatcataaaatttaactactaaaaataatcttcgtgtttaagtgatacttatttaagactttacactgttctgtttaaccatggtctcctgtctgattttagccataattgcaaagtatttctaactacaacaatttaattttagacacacccgtgaggaagttgcaagccaacaaaaaagttcaaggatctagaagacgattaagggaaggtcgttctcagtgaaaatccaaaaaccagaaaaaaatgtttatacaaccctaagtcaataacctgaccttagaaaattgtgagagccaagttgacttcaggaactgaaacatcagcacaaagaagcaatcatcaaataattctgaacacaaatttaatatttttttttctgaatgagaaacatgagggaaattgtggagttagcctcctgtggtaaaggaattgaagaaaatataacaccttacaccctttttcatcttgacattaaaagttctggctaactttggaatccattagagaaaaatccttgtcaccagattcattacaattcaaatcgaagagttgtgaactgttatcccattgaaaagaccgagccttgtatgtatgttatggatacataaaatgcacgcaagccattatctctccatgggaagctaagttataaaaataggtgcttggtgtacaaaactttttatatcaaaaggctttgcacatttctatatgagtgggtttactggtaaattatgttattttttacaactaattttgtactctcagaatgtttgtcatatgcttcttgcaatgcatattttttaatctcaaacgtttcaataaaaccatttttcagatataaagagaattacttcaaattgagtaattcagaaaaactcaagatttaagttaaaaagtggtttggacttgggaacaggactttatacctcttttactgtaacaagtactcattaaaggaaattgaatga

SEQ ID NO: 540173 - DNA, 118 bp, Homo sapiens
ctccatttctaaaatacagttgtttcaaccaggttatgtagtaaaatagaatcacacagtatgcaaactttagggattttgttttcagtcagcataattttctggagatccatccagg

SEQ ID NO: 540174 - DNA, 4430 bp, Homo sapiens
  misc_feature (230)..(230): n is a, c, g, or t
  misc_feature (232)..(232): n is a, c, g, or t
  misc_feature (234)..(234): n is a, c, g, or t
  misc_feature (240)..(240): n is a, c, g, or t
  misc_feature (244)..(245): n is a, c, g, or t
tctcttcctccctgtgttctttgtttctttgttctgtgtttcttgcttttttgcttttcgtcccttctattctgtcctggtgtgatagtgcttgactctcgccacccgtgttaagccgtcccggtttttgggggacccaccgttgcccgtgttctgtgacccttgccacttacatacaatggcgcgccccaccgaaggtttaaatttttgtggccaagccgcacacattntntngtgttntttnnttttacttcaatttcctttaatgagtacttgttacagtaaaagaggtataaagtcctgttcccaagtccaaaccactttttaacttaaatcttgagtttttctgaattactcaatttgaagtaattctctttatatctgaaaaatggttttattgaaacgtttgagattaaaaaatatgcattgcaagaagcatatgacaaacattctgagagtacaaaattagttgtaaaaaataacataatttaccagtaaacccactcatatagaaatgtgcaaagccttttgatataaaaagttttgtacaccaagcacctatttttataacttagcttcccatggagagataatggcttgcgtgcattttatgtatccataacatacatacaaggctcggtcttttcaatgggataacagttcacaactcttcgatttgaattgtaatgaatctggtgacaaggatttttctctaatggattccaaagttagccagaacttttaatgtcaagatgaaaaagggtgtaaggtgttatattttcttcaattcctttaccacaggaggctaactccacaatttccctcatgtttctcattcagaaaaaaaaatattaaatttgtgttcagaattatttgatgattgcttctttgtgctgatgtttcagttcctgaagtcaacttggctctcacaattttctaaggtcaggttattgacttagggttgtataaacatttttttctggtttttggattttcactgagaacgaccttcccttaatcgtcttctagatccttgaacttttttgttggcttgcaacttcctcacgggtgtgtctccctgaagcagtcttttaatttcttcatcttcaaataaatgaccatcaccaccttcaatgaatttggtgaccttggtgacctcttcttgtaacaatttcttcagagtttcttctgtttctccacctccagtagaaatcctagtgtattttatttcaggacctgtaatgattcgttcttctcgtgtctctttttcagttatttccacaggcactccatcaatgattttggtgtattttttaataattggctctccatggatcacttcagttattgtttcaccttctttaatcagtctgaattcaggttcaccttcaattttgacttttgttagtgtgggtccttcagttttgataataggctgaagactgccttcaatcactttaatttttggttccacaactttggttataattttagttgctgaaagtatagaaagtggaacatgaaaaatatttacataaaaacctgaacaaaggttttttttttttttccttttcttttttgtctctgtaggatactaaggtacaggatgtggtaatatgttcaggcagtcagatacaggaaatatttatggtacataatataatatcttctcatgtccaggtgttgaactctgaagtctagtgacttgaatttgatctagtgaaatatatactcacaaagtgaggaattatatctagaaatctgtaatttttaattgtaccgctaaagcgctttaccttcttttgtacttcttgaaaatactggctgcattgcaacagaagacaaatatgattaatgtcatgcaattcataatatcttaaattgcattgctggattctttctcaattaaaagaaaaaatgaaagaaaaaggcttttaaaatgtttttcatgcatctgataacagtgacatagaaaggaaaaaatgaaacatagttcagaatacttaaaagtaagaataaatttcagccagccagacatgagctctattcaacaaacatgatatgatcagtatttaagttataggctaaaaggtctttaattttcagctttgttatcactatccttttttttttttaatttaaaggtatatattttaaacgtgtgtcgtctacctaagtaagataatagtctttgaactaggtactatgtttgctgtttgggtgatgggttcactagaagcctaaaccccagcattactcaatatatccatctatcaaacctacgtgtgtacccccctagatctataataaaagtaaattaaaataaattaaataccagtcaactatttggttgactttggttgtactgattaactggaaatgtgcctctgaagccacacagccagagcaactggctttttgtcatttctaatgaaaagccttgaaagatggttctattagataacgggccacactgaagctaactgtgcatctagatcacatcaaagcagtagaggtgagatgttagcacagctttggtttctgcagttctcacctcatgcttgtaagatgtttagctgtgtcaactttttgaattaatgtgggttcttagccttcatagaccctgtgtttcagccttattaggttttgtattttgagatctcaaattgtgaagctctaaaataaaacaaatctgtgtgtttaggtactagttccacaggtggtcttgccacagaagaacctttccatgaaagtcgaatacgaatacacagggctctctattgctgctatcaaaatggactaattccttttagcttacattttttacatcatgttaaggaatttgacgttttggatgttcagctggttggtagttttcatttcaatcttgattttctgcagacttaaatagttttgacaggtgaagctctgaggattaaatattgattttagccctctccaggtcaaatgttccatatttgacaacttataccaaaaacagcatccttcccctcaactatacactttaaaatggatgttattttggggatgaggataatatgcagcaaaaaattataggaattttagaaacaagtcaacaacgaaatataaaaatagaaaatttggtttaatttacctttacttctactttaaaatacttcttaataacagcataccgtctaaggaggagtaaaagaaacatcttacattggaatgtaaatgttagagctgtttcaaggcctctgggtaggtagggaaggaccattgaacatgtgtgtcttaataaaatgtagcttatgctctgtgagtgaggatgtaatttagtaggagaaaataattatatttttgctcattgtaatcaagatattgcattcacatatatagaaagtagtgaaactaagatggataaagaagggaagctaaagaaatgtagtgggaatgtgtatatatatatgcatatgtatatatttatacctttgatgaagaaagatggcataacatgtctgatgaatagagcccataaggattgcttaattttcagaaaacatattttttacaagattgtattcccatggtgaatcataactattccaattaaatctttaatacagtgctgagctggcctgatcctggaattgcatgttattattgcataattgaaatcaacaacagcagcagacattttgttttgctccttacattggctttactccttttccatatctagtataaatcttaagggaaattttcttaattaaataactggatgctcatggtataaaatggaatgattttctagccagaataaatgtgggtattgaagtaatgttttagctactgatacactttgagtgtttaattacagagccaaaacaaaatgaaaagaatttctgcttgaaagctacagggaaataaagaaagagagaaaagataaacagagaaaaagccatgatggaaaagatatactactagctacacttatgagaatgaaataccctttatcattgttaagtagtagaggtttaattttgataatctggttgtgtcagagatcaaagaaccctggaatttggaaactttaaatttgtcacatggcagatttttttgttcctttgtccaattttggatgggagagtttttgaactgccaccttataaacattggtattcttcaacacgtgcttctcagcctgcccttagatagctcagggcttgagggtggcgtgaacaacaagtcttggctaaggtcatttctgtgtccacacatctgaatttttagatatttctagagggtcttttcgccatctcttccctttatatgtcttttaattttcctggctctttgccacgctaatattatattttgctgtctttctcatgtcatatcatttctgtttttccaatgagtggggaagaagttcattggagtaa

SEQ ID NO: 540175 - DNA, 4346 bp, Homo sapiens
  misc_feature (230)..(230): n is a, c, g, or t
  misc_feature (232)..(232): n is a, c, g, or t
  misc_feature (234)..(234): n is a, c, g, or t
  misc_feature (240)..(240): n is a, c, g, or t
  misc_feature (244)..(245): n is a, c, g, or t
tctcttcctccctgtgttctttgtttctttgttctgtgtttcttgcttttttgcttttcgtcccttctattctgtcctggtgtgatagtgcttgactctcgccacccgtgttaagccgtcccggtttttgggggacccaccgttgcccgtgttctgtgacccttgccacttacatacaatggcgcgccccaccgaaggtttaaatttttgtggccaagccgcacacattntntngtgttntttnnttttacttcaatttcctttaatgagtacttgttacagtaaaagaggtataaagtcctgttcccaagtccaaaccactttttaacttaaatcttgagtttttctgaattactcaatttgaagtaattctctttatatctgaaaaatggttttattgaaacgtttgagattaaaaaatatgcattgcaagaagcatatgacaaacattctgagagtacaaaattagttgtaaaaaataacataatttaccagtaaacccactcatatagaaatgtgcaaagccttttgatataaaaagttttgtacaccaagcacctatttttataacttagcttcccatggagagataatggcttgcgtgcattttatgtatccataacatacatacaaggctcggtcttttcaatgggataacagttcacaactcttcgatttgaattgtaatgaatctggtgacaaggatttttctctaatggattccaaagttagccagaacttttaatgtcaagatgaaaaagggtgtaaggtgttatattttcttcaattcctttaccacaggaggctaactccacaatttccctcatgtttctcattcagaaaaaaaaatattaaatttgtgttcagaattatttgatgattgcttctttgtgctgatgtttcagttcctgaagtcaacttggctctcacaattttctaaggtcaggttattgacttagggttgtataaacatttttttctggtttttggattttcactgagaacgaccttcccttaatcgtcttctagatccttgaacttttttgttggcttgcaacttcctcacgggtgtgtcttcttgtaacaatttcttcagagtttcttctgtttctccacctccagtagaaatcctagtgtattttatttcaggacctgtaatgattcgttcttctcgtgtctctttttcagttatttccacaggcactccatcaatgattttggtgtattttttaataattggctctccatggatcacttcagttattgtttcaccttctttaatcagtctgaattcaggttcaccttcaattttgacttttgttagtgtgggtccttcagttttgataataggctgaagactgccttcaatcactttaatttttggttccacaactttggttataattttagttgctgaaagtatagaaagtggaacatgaaaaatatttacataaaaacctgaacaaaggttttttttttttttccttttcttttttgtctctgtaggatactaaggtacaggatgtggtaatatgttcaggcagtcagatacaggaaatatttatggtacataatataatatcttctcatgtccaggtgttgaactctgaagtctagtgacttgaatttgatctagtgaaatatatactcacaaagtgaggaattatatctagaaatctgtaatttttaattgtaccgctaaagcgctttaccttcttttgtacttcttgaaaatactggctgcattgcaacagaagacaaatatgattaatgtcatgcaattcataatatcttaaattgcattgctggattctttctcaattaaaagaaaaaatgaaagaaaaaggcttttaaaatgtttttcatgcatctgataacagtgacatagaaaggaaaaaatgaaacatagttcagaatacttaaaagtaagaataaatttcagccagccagacatgagctctattcaacaaacatgatatgatcagtatttaagttataggctaaaaggtctttaattttcagctttgttatcactatccttttttttttttaatttaaaggtatatattttaaacgtgtgtcgtctacctaagtaagataatagtctttgaactaggtactatgtttgctgtttgggtgatgggttcactagaagcctaaaccccagcattactcaatatatccatctatcaaacctacgtgtgtacccccctagatctataataaaagtaaattaaaataaattaaataccagtcaactatttggttgactttggttgtactgattaactggaaatgtgcctctgaagccacacagccagagcaactggctttttgtcatttctaatgaaaagccttgaaagatggttctattagataacgggccacactgaagctaactgtgcatctagatcacatcaaagcagtagaggtgagatgttagcacagctttggtttctgcagttctcacctcatgcttgtaagatgtttagctgtgtcaactttttgaattaatgtgggttcttagccttcatagaccctgtgtttcagccttattaggttttgtattttgagatctcaaattgtgaagctctaaaataaaacaaatctgtgtgtttaggtactagttccacaggtggtcttgccacagaagaacctttccatgaaagtcgaatacgaatacacagggctctctattgctgctatcaaaatggactaattccttttagcttacattttttacatcatgttaaggaatttgacgttttggatgttcagctggttggtagttttcatttcaatcttgattttctgcagacttaaatagttttgacaggtgaagctctgaggattaaatattgattttagccctctccaggtcaaatgttccatatttgacaacttataccaaaaacagcatccttcccctcaactatacactttaaaatggatgttattttggggatgaggataatatgcagcaaaaaattataggaattttagaaacaagtcaacaacgaaatataaaaatagaaaatttggtttaatttacctttacttctactttaaaatacttcttaataacagcataccgtctaaggaggagtaaaagaaacatcttacattggaatgtaaatgttagagctgtttcaaggcctctgggtaggtagggaaggaccattgaacatgtgtgtcttaataaaatgtagcttatgctctgtgagtgaggatgtaatttagtaggagaaaataattatatttttgctcattgtaatcaagatattgcattcacatatatagaaagtagtgaaactaagatggataaagaagggaagctaaagaaatgtagtgggaatgtgtatatatatatgcatatgtatatatttatacctttgatgaagaaagatggcataacatgtctgatgaatagagcccataaggattgcttaattttcagaaaacatattttttacaagattgtattcccatggtgaatcataactattccaattaaatctttaatacagtgctgagctggcctgatcctggaattgcatgttattattgcataattgaaatcaacaacagcagcagacattttgttttgctccttacattggctttactccttttccatatctagtataaatcttaagggaaattttcttaattaaataactggatgctcatggtataaaatggaatgattttctagccagaataaatgtgggtattgaagtaatgttttagctactgatacactttgagtgtttaattacagagccaaaacaaaatgaaaagaatttctgcttgaaagctacagggaaataaagaaagagagaaaagataaacagagaaaaagccatgatggaaaagatatactactagctacacttatgagaatgaaataccctttatcattgttaagtagtagaggtttaattttgataatctggttgtgtcagagatcaaagaaccctggaatttggaaactttaaatttgtcacatggcagatttttttgttcctttgtccaattttggatgggagagtttttgaactgccaccttataaacattggtattcttcaacacgtgcttctcagcctgcccttagatagctcagggcttgagggtggcgtgaacaacaagtcttggctaaggtcatttctgtgtccacacatctgaatttttagatatttctagagggtcttttcgccatctcttccctttatatgtcttttaattttcctggctctttgccacgctaatattatattttgctgtctttctcatgtcatatcatttctgtttttccaatgagtggggaagaagttcattggagtaa

SEQ ID NO: 540176 - DNA, 84 bp, Homo sapiens
gctgaggacacggctgtgtattactctgcgaaagatatgagctactatcctcctaggagggactttgactactggggccaggga

SEQ ID NO: 540177 - DNA, 4086 bp, Homo sapiens
  misc_feature (230)..(230): n is a, c, g, or t
  misc_feature (232)..(232): n is a, c, g, or t
  misc_feature (234)..(234): n is a, c, g, or t
  misc_feature (240)..(240): n is a, c, g, or t
  misc_feature (244)..(245): n is a, c, g, or t
tctcttcctccctgtgttctttgtttctttgttctgtgtttcttgcttttttgcttttcgtcccttctattctgtcctggtgtgatagtgcttgactctcgccacccgtgttaagccgtcccggtttttgggggacccaccgttgcccgtgttctgtgacccttgccacttacatacaatggcgcgccccaccgaaggtttaaatttttgtggccaagccgcacacattntntngtgttntttnnttttacttcaatttcctttaatgagtacttgttacagtaaaagaggtataaagtcctgttcccaagtccaaaccactttttaacttaaatcttgagtttttctgaattactcaatttgaagtaattctctttatatctgaaaaatggttttattgaaacgtttgagattaaaaaatatgcattgcaagaagcatatgacaaacattctgagagtacaaaattagttgtaaaaaataacataatttaccagtaaacccactcattaaatttgtgttcagaattatttgatgattgcttctttgtgctgatgtttcagttcctgaagtcaacttggctctcacaattttctaaggtcaggttattgacttagggttgtataaacatttttttctggtttttggattttcactgagaacgaccttcccttaatcgtcttctagatccttgaacttttttgttggcttgcaacttcctcacgggtgtgtctccctgaagcagtcttttaatttcttcatcttcaaataaatgaccatcaccaccttcaatgaatttggtgaccttggtgacctcttcttgtaacaatttcttcagagtttcttctgtttctccacctccagtagaaatcctagtgtattttatttcaggacctgtaatgattcgttcttctcgtgtctctttttcagttatttccacaggcactccatcaatgattttggtgtattttttaataattggctctccatggatcacttcagttattgtttcaccttctttaatcagtctgaattcaggttcaccttcaattttgacttttgttagtgtgggtccttcagttttgataataggctgaagactgccttcaatcactttaatttttggttccacaactttggttataattttagttgctgaaagtatagaaagtggaacatgaaaaatatttacataaaaacctgaacaaaggttttttttttttttccttttcttttttgtctctgtaggatactaaggtacaggatgtggtaatatgttcaggcagtcagatacaggaaatatttatggtacataatataatatcttctcatgtccaggtgttgaactctgaagtctagtgacttgaatttgatctagtgaaatatatactcacaaagtgaggaattatatctagaaatctgtaatttttaattgtaccgctaaagcgctttaccttcttttgtacttcttgaaaatactggctgcattgcaacagaagacaaatatgattaatgtcatgcaattcataatatcttaaattgcattgctggattctttctcaattaaaagaaaaaatgaaagaaaaaggcttttaaaatgtttttcatgcatctgataacagtgacatagaaaggaaaaaatgaaacatagttcagaatacttaaaagtaagaataaatttcagccagccagacatgagctctattcaacaaacatgatatgatcagtatttaagttataggctaaaaggtctttaattttcagctttgttatcactatccttttttttttttaatttaaaggtatatattttaaacgtgtgtcgtctacctaagtaagataatagtctttgaactaggtactatgtttgctgtttgggtgatgggttcactagaagcctaaaccccagcattactcaatatatccatctatcaaacctacgtgtgtacccccctagatctataataaaagtaaattaaaataaattaaataccagtcaactatttggttgactttggttgtactgattaactggaaatgtgcctctgaagccacacagccagagcaactggctttttgtcatttctaatgaaaagccttgaaagatggttctattagataacgggccacactgaagctaactgtgcatctagatcacatcaaagcagtagaggtgagatgttagcacagctttggtttctgcagttctcacctcatgcttgtaagatgtttagctgtgtcaactttttgaattaatgtgggttcttagccttcatagaccctgtgtttcagccttattaggttttgtattttgagatctcaaattgtgaagctctaaaataaaacaaatctgtgtgtttaggtactagttccacaggtggtcttgccacagaagaacctttccatgaaagtcgaatacgaatacacagggctctctattgctgctatcaaaatggactaattccttttagcttacattttttacatcatgttaaggaatttgacgttttggatgttcagctggttggtagttttcatttcaatcttgattttctgcagacttaaatagttttgacaggtgaagctctgaggattaaatattgattttagccctctccaggtcaaatgttccatatttgacaacttataccaaaaacagcatccttcccctcaactatacactttaaaatggatgttattttggggatgaggataatatgcagcaaaaaattataggaattttagaaacaagtcaacaacgaaatataaaaatagaaaatttggtttaatttacctttacttctactttaaaatacttcttaataacagcataccgtctaaggaggagtaaaagaaacatcttacattggaatgtaaatgttagagctgtttcaaggcctctgggtaggtagggaaggaccattgaacatgtgtgtcttaataaaatgtagcttatgctctgtgagtgaggatgtaatttagtaggagaaaataattatatttttgctcattgtaatcaagatattgcattcacatatatagaaagtagtgaaactaagatggataaagaagggaagctaaagaaatgtagtgggaatgtgtatatatatatgcatatgtatatatttatacctttgatgaagaaagatggcataacatgtctgatgaatagagcccataaggattgcttaattttcagaaaacatattttttacaagattgtattcccatggtgaatcataactattccaattaaatctttaatacagtgctgagctggcctgatcctggaattgcatgttattattgcataattgaaatcaacaacagcagcagacattttgttttgctccttacattggctttactccttttccatatctagtataaatcttaagggaaattttcttaattaaataactggatgctcatggtataaaatggaatgattttctagccagaataaatgtgggtattgaagtaatgttttagctactgatacactttgagtgtttaattacagagccaaaacaaaatgaaaagaatttctgcttgaaagctacagggaaataaagaaagagagaaaagataaacagagaaaaagccatgatggaaaagatatactactagctacacttatgagaatgaaataccctttatcattgttaagtagtagaggtttaattttgataatctggttgtgtcagagatcaaagaaccctggaatttggaaactttaaatttgtcacatggcagatttttttgttcctttgtccaattttggatgggagagtttttgaactgccaccttataaacattggtattcttcaacacgtgcttctcagcctgcccttagatagctcagggcttgagggtggcgtgaacaacaagtcttggctaaggtcatttctgtgtccacacatctgaatttttagatatttctagagggtcttttcgccatctcttccctttatatgtcttttaattttcctggctctttgccacgctaatattatattttgctgtctttctcatgtcatatcatttctgtttttccaatgagtggggaagaagttcattggagtaa

SEQ ID NO: 540178 - DNA, 3093 bp, Homo sapiens
  misc_feature (230)..(230): n is a, c, g, or t
  misc_feature (232)..(232): n is a, c, g, or t
  misc_feature (234)..(234): n is a, c, g, or t
  misc_feature (240)..(240): n is a, c, g, or t
  misc_feature (244)..(245): n is a, c, g, or t
tctcttcctccctgtgttctttgtttctttgttctgtgtttcttgcttttttgcttttcgtcccttctattctgtcctggtgtgatagtgcttgactctcgccacccgtgttaagccgtcccggtttttgggggacccaccgttgcccgtgttctgtgacccttgccacttacatacaatggcgcgccccaccgaaggtttaaatttttgtggccaagccgcacacattntntngtgttntttnnttttacttcaatttcctttaatgagtacttgttacagtaaaagaggtataaagtcctgttcccaagtccaaaccactttttaacttaaatcttgagtttttctgaattactcaatttgaagtaattctctttatatctgaaaaatggttttattgaaacgtttgagattaaaaaatatgcattgcaagaagcatatgacaaacattctgagagtacaaaattagttgtaaaaaataacataatttaccagtaaacccactcatatagaaatgtgcaaagccttttgatataaaaagttttgtacaccaagcacctatttttataacttagcttcccatggagagataatggcttgcgtgcattttatgtatccataacatacatacaaggctcggtcttttcaatgggataacagttcacaactcttcgatttgaattgtaatgaatctggtgacaaggatttttctctaatggattccaaagttagccagaacttttaatgtcaagatgaaaaagggtgtaaggtgttatattttcttcaattcctttaccacaggaggctaactccacaatttccctcatgtttctcattcagaaaaaaaaatattaaatttgtgttcagaattatttgatgattgcttctttgtgctgatgtttcagttcctgaagtcaacttggctctcacaattttctaaggtcaggttattgacttagggttgtataaacatttttttctggtttttggattttcactgagaacgaccttcccttaatcgtcttctagatccttgaacttttttgttggcttgcaacttcctcacgggtgtgtctccctgaagcagtcttttaatttcttcatcttcaaataaatgaccatcaccaccttcaatgaatttggtgaccttggtgacctcttcttgtaacaatttcttcagagtttcttctgtttctccacctccagtagaaatcctagtgtattttatttcaggacctgtaatgattcgttcttctcgtgtctctttttcagttatttccacaggcactccatcaatgattttggtgtattttttaataattggctctccatggatcacttcagttattgtttcaactgctggaaatacttaataaattaatcaaatacatccaaattaagtttgttcgtggtagcaccttcaaagaaatccccgtgactgtctatagacccacactaacaaaagtcaaaattgaaggtgaacctgaattcagactgattaaagaaggtgaaacaataactgaagtgatccatggaggtgcgttccttatgttacctggggccgactaccttcgctgtgattattttgaaatagtgttggtttagaaatattgaacatctgatattttctcttagttcttattttataaaaattgtgggaattatttcctcagctatgagttcttattagctggtcagaaataaaacatagttagcttttaatggatctagttggaattaatttatctattaagtcactgggcccaacaaaatgtcatgatttttgcatatacaagtgaggattgtggaataaaattgtaacattaatgtcagtataaaaggaaatattagaaacagtaggaaaaaatgaccattgtataagtctctgtctaataagccactccactactaggatttatgatagggctcccattccaatgatatagaactccctggattctcactaagtatttattccacatccagaaaacaagtatggcatggagagttaggatgtcaaatggccctctctctcaaccaagattcaggacatagctattaccttttagatccctattgatatgatttttgggggatatgttctaaaaatgtttatgattgaatcttaaatggtaatatttgtagaaatatagttaatcattacaatgtctagcttatggatgtatagtcacaatatgagggtaaatcaaatgcatttgtattcccctgcttttagagccaattattaaaaaatacaccaaaatcattgatggagtgcctgtggaaataactgaaaaagagacacgagaagaacgaatcattacaggtcctgaaataaaatacactaggatttctactggaggtggagaaacagaagaaactctgaagaaattgttacaagaagaggtcaccaaggtcaccaaattcattgaaggtggtgatggtcatttatttgaagatgaagaaattaaaagactgcttcagggagattagtaaaaggacaacaactaacccccttaacaggttctagtgactgagttcaactttttaaagaccgagcaagcagattttttcttttaattgggttaaaaaaaaaaagacaacatccactgttgtcttaatagatggattggttcaatggtagttaatagttatgaagaaatgattactagtttaaacagtctttaaaaagttctatggtataaagtttggggagcaatgaatattttttttgctttgattcagataattttaagggccttttaagtatgcaaaagggaaataattgttaaattgctagctgttaaacaagcccaaatttgatatactttttatatttaaaaaattatattcactgcccccataagagcaatcaaggcatgtctttaaattctatacatagatatagccaaaaatagtgcatttagtaacattcttttccaaaactatattcttgggaatgaatatctgtttcttctaacagtttgagtgataatctatacctgtagatataagttattttgcatataaaattaatcttaatcttttatggaatgttctctgtctgtggcattaaatgaaccttaagaacaa

SEQ ID NO: 540179 - DNA, 3186 bp, Homo sapiens
  misc_feature (230)..(230): n is a, c, g, or t
  misc_feature (232)..(232): n is a, c, g, or t
  misc_feature (234)..(234): n is a, c, g, or t
  misc_feature (240)..(240): n is a, c, g, or t
  misc_feature (244)..(245): n is a, c, g, or t
tctcttcctccctgtgttctttgtttctttgttctgtgtttcttgcttttttgcttttcgtcccttctattctgtcctggtgtgatagtgcttgactctcgccacccgtgttaagccgtcccggtttttgggggacccaccgttgcccgtgttctgtgacccttgccacttacatacaatggcgcgccccaccgaaggtttaaatttttgtggccaagccgcacacattntntngtgttntttnnttttacttcaatttcctttaatgagtacttgttacagtaaaagaggtataaagtcctgttcccaagtccaaaccactttttaacttaaatcttgagtttttctgaattactcaatttgaagtaattctctttatatctgaaaaatggttttattgaaacgtttgagattaaaaaatatgcattgcaagaagcatatgacaaacattctgagagtacaaaattagttgtaaaaaataacataatttaccagtaaacccactcatatagaaatgtgcaaagccttttgatataaaaagttttgtacaccaagcacctatttttataacttagcttcccatggagagataatggcttgcgtgcattttatgtatccataacatacatacaaggctcggtcttttcaatgggataacagttcacaactcttcgatttgaattgtaatgaatctggtgacaaggatttttctctaatggattccaaagttagccagaacttttaatgtcaagatgaaaaagggtgtaaggtgttatattttcttcaattcctttaccacaggaggctaactccacaatttccctcatgtttctcattcagaaaaaaaaatattaaatttgtgttcagaattatttgatgattgcttctttgtgctgatgtttcagttcctgaagtcaacttggctctcacaattttctaaggtcaggttattgacttagggttgtataaacatttttttctggtttttggattttcactgagaacgaccttcccttaatcgtcttctagatccttgaacttttttgttggcttgcaacttcctcacgggtgtgtctccctgaagcagtcttttaatttcttcatcttcaaataaatgaccatcaccaccttcaatgaatttggtgaccttggtgacctcttcttgtaacaatttcttcagagtttcttctgtttctccacctccagtagaaatcctagtgtattttatttcaggacctgtaatgattcgttcttctcgtgtctctttttcagttatttccacaggcactccatcaatgattttggtgtattttttaataattggctctccatggatcacttcagttattgtttcaactgctggaaatacttaataaattaatcaaatacatccaaattaagtttgttcgtggtagcaccttcaaagaaatccccgtgactgtctatagacccacactaacaaaagtcaaaattgaaggtgaacctgaattcagactgattaaagaaggtgaaacaataactgaagtgatccatggaggtgcgttccttatgttacctggggccgactaccttcgctgtgattattttgaaatagtgttggtttagaaatattgaacatctgatattttctcttagttcttattttataaaaattgtgggaattatttcctcagctatgagttcttattagctggtcagaaataaaacatagttagcttttaatggatctagttggaattaatttatctattaagtcactgggcccaacaaaatgtcatgatttttgcatatacaagtgaggattgtggaataaaattgtaacattaatgtcagtataaaaggaaatattagaaacagtaggaaaaaatgaccattgtataagtctctgtctaataagccactccactactaggatttatgatagggctcccattccaatgatatagaactccctggattctcactaagtatttattccacatccagaaaacaagtatggcatggagagttaggatgtcaaatggccctctctctcaaccaagattcaggacatagctattaccttttagatccctattgatatgatttttgggggatatgttctaaaaatgtttatgattgaatcttaaatggtaatatttgtagaaatatagttaatcattacaatgtctagcttatggatgtatagtcacaatatgagggtaaatcaaatgcatttgtattcccctgcttttagagccaattattaaaaaatacaccaaaatcattgatggagtgcctgtggaaataactgaaaaagagacacgagaagaacgaatcattacaggtcctgaaataaaatacactaggatttctactggaggtggagaaacagaagaaactctgaagaaattgttacaagaagaggtcaccaaggtcaccaaattcattgaaggtggtgatggtcatttatttgaagatgaagaaattaaaagactgcttcagggagacacacccgtgaggaagttgcaagccaacaaaaaagttcaaggatctagaagacgattaagggaaggtcgttctcagtgaaaatccaaaaaccagaaaaaaatgtttatacaaccctaagtcaataacctgaccttagaaaattgtgagagccaagttgacttcaggaactgaaacatcagcacaaagaagcaatcatcaaataattctgaacacaaatttaatatttttttttctgaatgagaaacatgagggaaattgtggagttagcctcctgtggtaaaggaattgaagaaaatataacaccttacaccctttttcatcttgacattaaaagttctggctaactttggaatccattagagaaaaatccttgtcaccagattcattacaattcaaatcgaagagttgtgaactgttatcccattgaaaagaccgagccttgtatgtatgttatggatacataaaatgcacgcaagccattatctctccatgggaagctaagttataaaaataggtgcttggtgtacaaaactttttatatcaaaaggctttgcacatttctatatgagtgggtttactggtaaattatgttattttttacaactaattttgtactctcagaatgtttgtcatatgcttcttgcaatgcatattttttaatctcaaacgtttcaataaaaccatttttcagatata

SEQ ID NO: 540180 - DNA, 912 bp, Homo sapiens
aatttcaattcctttcattttccggtagagacaaaggagacatgttttatccgtggacccaaaactccggcgccggtcacggactgggaaagcagccttccttggtgtttaatcatgcagggatgtctctctgattattcacccacgtttcaaaggtatcagaccacacagggacgcctgccttggtccttcacccttagcggcaagtcccacttttctggggaaggggcaagtaccccaaccccttctctcctggtctctaccccttctctgcttttctggggaaggggcaagtaccccaaccccttctctccttgtctctaccccttctctgcttttctggggaaggggcaagtactccaaccccttctctccttgtctctaccccttctctgcttttctggggaaggggcaagtaccccaagccccttctctccttgtctctaccccttctctgcttttctgggagaggggcaagtacccctcaaacccttcttccttcaaccttagtggcaagtcccgctttcctggggcagggtcaagtacccctcaacccttctccttcacctttagcggcaagtccgcttttctgggggaggagcaaggtacccctcaaagcccttctcctttcacccattagtgaacaaggtcctggctttactagggggcaagaaacccccaatacccttattttccaacaccaaactcttatcttctgatgccctaatccattatgtgccgggggccccaaagccccattcccaggcgtttaaagagggtatagaaaccgcgggagcccatgactacaagtgcataggccctataatcagggatgccaaccatcaaaggcaactaccacactccaagttcagtctatacctaagcacggtttacaactaacacttcagcagg

SEQ ID NO: 540181 - DNA, 407 bp, Homo sapiens
atagtgatcttatgcgagcaatatagtcactcttcactccccggcaagtagaagtagactcaacggcgattacaatttggttgctggcagccattctgggtttcttgatctcagtactccaagagaatatggtggtctcatggcgctagctgaccactacagaggggcgccttaaaagggaatcacttatcagtctccaagcataggatgcattaagaactatcaacggataactgacatcgtctcgttcagaagttcactgtatcatagctcactactgccagagcggccctggatgtacaacgaaagagcatgaaaaatacacacagttattaagccacctgattaaaagaaaaccaatatttaaaggcatttaatagcatatcaagtataactttgcaggagaa

SEQ ID NO: 540182 - DNA, 2019 bp, Homo sapiens
  misc_feature (230)..(230): n is a, c, g, or t
  misc_feature (232)..(232): n is a, c, g, or t
  misc_feature (234)..(234): n is a, c, g, or t
  misc_feature (240)..(240): n is a, c, g, or t
  misc_feature (244)..(245): n is a, c, g, or t
tctcttcctccctgtgttctttgtttctttgttctgtgtttcttgcttttttgcttttcgtcccttctattctgtcctggtgtgatagtgcttgactctcgccacccgtgttaagccgtcccggtttttgggggacccaccgttgcccgtgttctgtgacccttgccacttacatacaatggcgcgccccaccgaaggtttaaatttttgtggccaagccgcacacattntntngtgttntttnnttttacttcaatttcctttaatgagtacttgttacagtaaaagaggtataaagtcctgttcccaagtccaaaccactttttaacttaaatcttgagtttttctgaattactcaatttgaagtaattctctttatatctgaaaaatggttttattgaaacgtttgagattaaaaaatatgcattgcaagaagcatatgacaaacattctgagagtacaaaattagttgtaaaaaataacataatttaccagtaaacccactcatatagaaatgtgcaaagccttttgatataaaaagttttgtacaccaagcacctatttttataacttagcttcccatggagagataatggcttgcgtgcattttatgtatccataacatacatacaaggctcggtcttttcaatgggataacagttcacaactcttcgatttgaattgtaatgaatctggtgacaaggatttttctctaatggattccaaagttagccagaacttttaatgtcaagatgaaaaagggtgtaaggtgttatattttcttcaattcctttaccacaggaggctaactccacaatttccctcatgtttctcattcagaaaaaaaaatattaaatttgtgttcagaattatttgatgattgcttctttgtgctgatgtttcagttcctgaagtcaacttggctctcacaattttctaaggtcaggttattgacttagggttgtataaacatttttttctggtttttggattttcactgagaacgaccttcccttaatcgtcttctagatccttgaacttttttgttggcttgcaacttcctcacgggtgtgtctccctgaagcagtcttttaatttcttcatcttcaaataaatgaccatcaccaccttcaatgaatttggtgaccttggtgacctcttcttgtaacaatttcttcagagtttcttctgtttctccacctccagtagaaatcctagtgtattttatttcaggacctgtaatgattcgttcttctcgtgtctctttttcagttatttccacaggcactccatcaatgattttggtgtattttttaataattggctctccatggatcacttcagttattgtttcaccttctttaatcagtctgaattcaggttcaccttcaattttgacttttgttagtgtgggttatagacagtcacggggatttctttgaaggtgctaccacgaacaaacttaatttggatgtatttgattaatttattaagtatttccagcagttgatcatttccaacaggtgtgtctgctggatagaggagtttatctacaacatgaattacaccatttgttgtcatgatgtcagattcttttgatttcaattcattcaccagaagtgtatcatttacttctttcagaaagattttgcttccttgtgtggtctttaaaatgttagtaacaccaggttcaaatccttttccaatgaaaactcctggtgtcagctcgtgccgaattcggcacgaggcacatttctatatgagtgggtttactggtaaattatgttattttttacaactaattttgtactctcagaatgtttgtcatatgcttcttgcaatgcatattttttaatctcaaacgtttcaataaaaccatttttcagatataaagagaattacttcaaattgagtaattcagaaaaactcaagatttaagttaaaaagtggtttggacttgggaacaggactttatacctcttttactgtaacaagtactcattaaaggaaattgaatga

SEQ ID NO: 540183 - DNA, 181 bp, Homo sapiens
  misc_feature (103)..(103): n is a, c, g, or t
  misc_feature (158)..(158): n is a, c, g, or t
  misc_feature (166)..(166): n is a, c, g, or t
ccgccaacaccaacagagggcttagtttaacatgtcttactttcacagcatgtgacttacagcttttgtaatgaaaaccaataatcaattctaaaaaaaaaangacaacaggttcatcaagttcagggctttggtcagtttccaccggtgttccctcngccttggngtgggggataacata

SEQ ID NO: 540184 - DNA, 176 bp, Homo sapiens
ctctagacggactcccgaatacctaattacggaagctagttggacagggtatgccatagaggcatatagggcttcacctattatataacttcgacaaagttatgtaatattttactaattacctcgattaatcgaggaaagacatagtgggttatgaacggtgggctggaaaccag

SEQ ID NO: 540185 - DNA, 361 bp, Homo sapiens
cattaaagcatagcttttaaaaatcgattacctcaattattttgccctattttatttgttgtagttgaaaaaacattacatttatcatcctaacaatttttaagcatatagttcaatagtgttaaatatattcatgttgttgtatagcagatctctagaactttttcatcttgcaaaactgaaactctatacccattgagcgttaatttcctctctctcttccaccagctcttggcaaccacctttctactttctatgattttgactactttagatacttcatgtgagtggaatcatagagtatttatatttttgtacctggcttattttacttagcataatgtccttgaggttcattcgt

SEQ ID NO: 540186 - DNA, 2101 bp, Homo sapiens
  misc_feature (230)..(230): n is a, c, g, or t
  misc_feature (232)..(232): n is a, c, g, or t
  misc_feature (234)..(234): n is a, c, g, or t
  misc_feature (240)..(240): n is a, c, g, or t
  misc_feature (244)..(245): n is a, c, g, or t
tctcttcctccctgtgttctttgtttctttgttctgtgtttcttgcttttttgcttttcgtcccttctattctgtcctggtgtgatagtgcttgactctcgccacccgtgttaagccgtcccggtttttgggggacccaccgttgcccgtgttctgtgacccttgccacttacatacaatggcgcgccccaccgaaggtttaaatttttgtggccaagccgcacacattntntngtgttntttnnttttacttcaatttcctttaatgagtacttgttacagtaaaagaggtataaagtcctgttcccaagtccaaaccactttttaacttaaatcttgagtttttctgaattactcaatttgaagtaattctctttatatctgaaaaatggttttattgaaacgtttgagattaaaaaatatgcattgcaagaagcatatgacaaacattctgagagtacaaaattagttgtaaaaaataacataatttaccagtaaacccactcatatagaaatgtgcaaagccttttgatataaaaagttttgtacaccaagcacctatttttataacttagcttcccatggagagataatggcttgcgtgcattttatgtatccataacatacatacaaggctcggtcttttcaatgggataacagttcacaactcttcgatttgaattgtaatgaatctggtgacaaggatttttctctaatggattccaaagttagccagaacttttaatgtcaagatgaaaaagggtgtaaggtgttatattttcttcaattcctttaccacaggaggctaactccacaatttccctcatgtttctcattcagaaaaaaaaatattaaatttgtgttcagaattatttgatgattgcttctttgtgctgatgtttcagttcctgaagtcaacttggctctcacaattttctaaggtcaggttattgacttagggttgtataaacatttttttctggtttttggattttcactgagaacgaccttcccttaatcgtcttctagatccttgaacttttttgttggcttgcaacttcctcacgggtgtgtctccctgaagcagtcttttaatttcttcatcttcaaataaatgaccatcaccaccttcaatgaatttggtgaccttggtgacctcttcttgtaacaatttcttcagagtttcttctgtttctccacctccagtagaaatcctagtgtattttatttcaggacctgtaatgattcgttcttctcgtgtctctttttcagttatttccacaggcactccatcaatgattttggtgtattttttaataattggctctccatggatcacttcagttattgtttcaccttctttaatcagtctgaattcaggttcaccttcaattttgacttttgttagtgtgggtccttcagttttgataataggctgaagactgccttcaatcactttaatttttggttccacaactttggttataattttagttgtatagacagtcacggggatttctttgaaggtgctaccacgaacaaacttaatttggatgtatttgattaatttattaagtatttccagcagttgatcatttccaacaggtgtgtctgctggatagaggagtttatctacaacatgaattacaccatttgttgtcatgatgtcagattcttttgatttcaattcattcaccagaagtgtatcatttacttctttcagaaagattttgcttccttgtgtggtctttaaaatgttagtaacaccaggttcaaatccttttccaatgaaaactcctggtgtcagctcgtgccgaattcggcacgaggcacatttctatatgagtgggtttactggtaaattatgttattttttacaactaattttgtactctcagaatgtttgtcatatgcttcttgcaatgcatattttttaatctcaaacgtttcaataaaaccatttttcagatataaagagaattacttcaaattgagtaattcagaaaaactcaagatttaagttaaaaagtggtttggacttgggaacaggactttatacctcttttactgtaacaagtactcattaaaggaaattgaatga

SEQ ID NO: 540187 - DNA, 1994 bp, Homo sapiens
  misc_feature (230)..(230): n is a, c, g, or t
  misc_feature (232)..(232): n is a, c, g, or t
  misc_feature (234)..(234): n is a, c, g, or t
  misc_feature (240)..(240): n is a, c, g, or t
  misc_feature (244)..(245): n is a, c, g, or t
  misc_feature (1935)..(1935): n is a, c, g, or t
tctcttcctccctgtgttctttgtttctttgttctgtgtttcttgcttttttgcttttcgtcccttctattctgtcctggtgtgatagtgcttgactctcgccacccgtgttaagccgtcccggtttttgggggacccaccgttgcccgtgttctgtgacccttgccacttacatacaatggcgcgccccaccgaaggtttaaatttttgtggccaagccgcacacattntntngtgttntttnnttttacttcaatttcctttaatgagtacttgttacagtaaaagaggtataaagtcctgttcccaagtccaaaccactttttaacttaaatcttgagtttttctgaattactcaatttgaagtaattctctttatatctgaaaaatggttttattgaaacgtttgagattaaaaaatatgcattgcaagaagcatatgacaaacattctgagagtacaaaattagttgtaaaaaataacataatttaccagtaaacccactcatatagaaatgtgcaaagccttttgatataaaaagttttgtacaccaagcacctatttttataacttagcttcccatggagagataatggcttgcgtgcattttatgtatccataacatacatacaaggctcggtcttttcaatgggataacagttcacaactcttcgatttgaattgtaatgaatctggtgacaaggatttttctctaatggattccaaagttagccagaacttttaatgtcaagatgaaaaagggtgtaaggtgttatattttcttcaattcctttaccacaggaggctaactccacaatttccctcatgtttctcattcagaaaaaaaaatattaaatttgtgttcagaattatttgatgattgcttctttgtgctgatgtttcagttcctgaagtcaacttggctctcacaattttctaaggtcaggttattgacttagggttgtataaacatttttttctggtttttggattttcactgagaacgaccttcccttaatcgtcttctagatccttgaacttttttgttggcttgcaacttcctcacgggtgtgtctccctgaagcagtcttttaatttcttcatcttcaaataaatgaccatcaccaccttcaatgaatttggtgaccttggtgacctcttcttgtaacaatttcttcagagtttcttctgtttctccacctccagtagaaatcctagtgtattttatttcaggacctgtaatgattcgttcttctcgtgtctctttttcagttatttccacaggcactccatcaatgattttggtgtattttttaataattggctctccatggatcacttcagttattgtttcaccttctttaatcagtctgaattcaggttcaccttcaattttgacttttgttagtgtgggtccttcagttttgataataggctgaagactgccttcaatcactttaatttttggttccacaactttggttataattttagttgtatagacagtcacggggatttctttgaaggtgctaccacgaacaaacttaatttggatgtatttgattaatttattaagtatttccagcagttgatcatttccaacaggtgtgtctgctggatagaggagtttatctacaacatgaattacaccatttgttgtcatgatgtcagattcttttgatttcaattcattcaccagaagtgtatcatttacttctttcagaaagattttgcttccttgtgtggtctttaaaatgttagtaacaccaggttcaaatccttttccaatgaaaactcctggtgtcaggtgataaagaatgatgttttgaagagcatttttgtcccgtatcagaatttctttttcttcactagtcattcccttaaaagcatcattggttggcacaaataatgtccagtctccaggttgtgtcaaangaactttcaagtctgcagcttcaagtaggctgagagggtttcttagcgatagtttggct

SEQ ID NO: 540188 - DNA, 825 bp, Homo sapiens
  misc_feature (428)..(428): n is a, c, g, or t
ggaaaggcccctagctgggtctgggtgcttggaggtggcggcattcctccccgctcgttctccccgggcccagaggcactctcggacttcagtcatgactgagcagagtatggaagcacctgactatgaagtgctatccgtgcgagaacagctattccacgagagagatccggcggagttgtattatatcaacacttctgtttggcaacagctgtacagtcctgctgctcacatgcttgcctgagcccgcgttcaaggaagcctgcgtggagttcaccgacagtggcatgatgaagatgccgatcggtcaacaagattgcgctcgagtctgtgcagctttacccgtggaaatgtggtcctgggtgcatgtcctgactcctgcccgttctccatcatcagtcaagtgaaggctgcctgcatcgtacccntgaccgttcggagacttagcttacagtcctagtggcgtcacacggactcccgtcatccatggccgtctggaaccgttgtttgactcttctccaacctgtccgcgtcatgttcctcatgccctttgcatatttcttcactgagtctgagggctttgcgtggctccagcaaagggtgtcctgggccgggtcgtatgagacagtggtgatgttgaatgctccgtcactctgctggtgctaggtatggtgtgcggtggcatcagccatagtggacagagaacatggccatgcagagagtcactcatatgactgttcgggagtactatctccacctaagctctactcatgcattctccgttccttggggttctggctgctcctggtgtgtactccgactggg

SEQ ID NO: 540189 - DNA, 417 bp, Homo sapiens
  misc_feature (319)..(319): n is a, c, g, or t
aaattttagcaacaacaaccacaaatagaaaatttaccagtagtcaaccatgtctgtacagttatggaggctacttcccagccctctttggttcttgcaggaagagtgtttgcaggcctgtcctgttggtattgtttgtcagctcagaaagaatcaggtggtacccaagtgcggggtcttcctaacgttgaaaaatgaaacgagaagctgtatcacagaaaatacaaaatgatgattctgagagaaatattttccttcatttcaaatgttctttactaatgatgaatttgaaagaatggcttttttccttttttctttnttttttcttttttttttttttggatgcttaaaatcagaatttttaatggattttttaagataactttaattagtttatatgaaatcagcagcaaaagg

SEQ ID NO: 540190 - DNA, 212 bp, Homo sapiens
gaagatcttttcccagaagctggggtacctgctcttccgagacttcggcctgatccacctggaggaggccaggcccttggtggaattctatgaggagatcaagaagtacgagaagctggagacggaggaggagcgtgtgtcccgcagccggtagatcttcgactcatacatcatgaaggagctgcttgcctgcttgcatcccgtgtaccgag

SEQ ID NO: 540191 - DNA, 316 bp, Homo sapiens
gctacagcctatgtaacgagcgcctccgtaactgagcgcttcctgtaacgacgcgcctccgtaactgagccctgtttgcactccaccttcttcccagaccctgcagggcgccaagaccaaaatgagtgccagcgaccccaacatcctccatcttcctcaccgacatggccaagcagatcaaaaccaaggtcaataagcatgcgttcactggagggagagacaccatcgaggagcacagccatgttgggggcaacctgtagatgtggacgtgtctttcatgtacctgaccttcttcctcgagaacgacgacaagctc

SEQ ID NO: 540192 - DNA, 955 bp, Homo sapiens
tccccggcttccagcctcctgagattgccaatggactggacaccttttcaggtttcaaggtggacatctggtcagctggggtcacactttacaacatcaccacgggcctgtacccatttgagggggacaatatctacaagctctttgagaacatgggagaggagacttcaccatcccttgtgactgcggcccaccactctctgacctactccgagggatgtggagtatgagccggccaagaggttctccatccgacagattaggcagcacagctggttccggaagaaacaccctctggctgaggcgctcgtacctatcccaccaagcccagacactaaggaccgctggcgcagtatgactgtagtgccctacctggaggacctgcatggccgtgcggaggaggaggaggaggaagacttgtttgacattgaggacggcattatctacacccaggacttcacagtgcctggtgtcgaggaggcggccgaggcagggcttagcgaggatgcatgcgacacatgcatgtggaagagccagggcgcaggccttcctggagaggagcccgaggaggggtttggggctttagtgtagctccctgtctgctgcccaccatgtcctccataaagctttgtccactgtgtctgcaggtggatgcttgccggattccctcctgtcactacctgaaaggctcccaaccggctttcgagaacatgctgggtcagggctgagctagtccccaggcgcgggggccagccaggtctggggccttgtcctggggcgatgcaagcccatagtccggcttcaaagtgggggcgggagactcgggacacggtcccggaaaggaggtaaaagccggggacgggggcacaggggggaccaggatggggccgcgcatgaaacctggaagaccgagcaaacagggcgaaagtgaaaaaccagagggaaggcgcaagca

SEQ ID NO: 540193 - DNA, 808 bp, Homo sapiens
atagcactaaatgccaacaagagaaagcaggaaagatctaaaattgacatcctaacatcacaattaaaagaactagagaagtacagcagcaaacaccattttcaaagctcagcagcacaggcaagcaacataacgtcaagcatccagcagcagcaactagcacaggcacacatcagcagcacacgaaaacacacacgcccttccaacaacaatccacatgcacatcccaggcagcataggtcatttatgcacacacacgatcgaaccaacacatctgcatcggcacgtgcatcagcaacagcacgtcacatcaacagcacagcaacacagcagcagcacagcaatccacacatcagcacgacaagtaacacaaaatgcatcacacagggggcatcatccacgcaccggcatcaccacgagcaaatcaccacacactcacccataccagcagaacatcacttataacaaacaccgtctcactgcaacatacaaactcagaacaaaatcgtcagcaagcaacatggcattacacatatccctgtgacaacatcacaacacctcccacaatgaactaaaaccccaggacagaacgtaggacatctactgaccatacgaaccacataaacacgggctactggacacattgacgtgcacagtcacgatcacaatacgttataccacagccacagaacaaacagtctagggaccccagatgggattcacagaggaccgacatttctacccaagagggatccacaggcacgagaagcctggtacccagattcctttcgtgaaacctattccaact

SEQ ID NO: 540194 - DNA, 446 bp, Homo sapiens
cctgaccccccgccccgcccacccccgagaggccaagcacgcaaacagcagtaaaacgagaagaggacggcgcgcaagaagagcagcacgacatgcacaacaacagacacgtaccgagaaacgcagaaaggtaacgacgagcgagcgaggacacaacaaggcaccgcacaactgcagtaaacacccacatacaacacacacctgaacacaccacaccgacagaccacacgacgctcactgaaacacgagaccaaccggagacagataacaacagatagcacacagaaaaaagagcacgcaggacccataagcaaactcaccccggacgagcagacgaccaataagagaagacccaacctctcgtcctctctccagtacgccaccaccccggaaagtgcgagacgaagcgacgcgagtgaccggagcgtgagtggcggacgcgagac

SEQ ID NO: 540195 - DNA, 947 bp, Homo sapiens
gctttactcgccacgggttagctgaccatgaaactacagggatgatacgtagaacaacatgacctcacttaaattgaccaatacaatggcgaccatgagataatatgattcatactcaatcttgatcgtcattagtacacgcgtgtattccgaggccaagtccatcagtactggtcatctgatctatccaagcggtggcattcgatgaactacgaaccatggcaacacaattcattgaggcaaggcagggctggcctgcataatgcgcgagatgggcctcccttatccagtaatgcccttgggcttctctgtgcattcaaatctgaaaaatgcctgacgcagttgaatcggtcgcgtatcaccctaattggattatactaccctctgctgggaaacactaattgacagactctaggcaaagttatctcattgctgaaatacctcaatttggattgccccccacgcgacgaccacgcagccaactcatcatcgaaagaaggttgaaattaagcccgggaaacattctctaagggctcgacgtgagcacttgttcacaccgactgtggtaggcacgccttagcttgtagggcccgcatttctcgactaacctggcgatatcgacccaccgtaaaagggatcacggacccagcgaacgcgagtcaatgccacccatttcagtggcactttcgcaacaacattgggcacgtttgtcacatgacctaaataaggtctagccggatacatccgctggctgggcgaatacccaccttgacatactggacccatgaccaagtggccaccaaagtagcatttctgaccggacaacaaggcattaccctgcacgtgtccgggacatcacacaattagagtgatacccctgtacagcaacacactcgcgaccaccagcaccgagccgagctgacgacaatacgtgtctgggcacgctg

SEQ ID NO: 540196 - DNA, 425 bp, Homo sapiens
  misc_feature (126)..(126): n is a, c, g, or t
  misc_feature (138)..(138): n is a, c, g, or t
  misc_feature (141)..(141): n is a, c, g, or t
tttcccctattttcaggggcccccctaggcccaacctcggccaaaaaccatttcccttttatatttatgggggggaatttaactttttttcccccaccctttttgggcccatccggaaagccccgnggttttttgggntcncccgagggaaaccccccaaaaaacatcctatcattgggaggggccttcctttttctaaccccgggaaaattaaaaattttcttgattttaaaagccttcgcttcgaagggaaaagtcctaaaaggaaaagacccccccctaaaccgggggggggtaaaggggggccccccccccccccccccctttgaagaacccgggtacataaaatttagacaaaaaaggaagggatcggccccccccaaggggggttcaagcccccccccgggcccccctggcttttttta

SEQ ID NO: 540197 - DNA, 159 bp, Homo sapiens
ccccctgcactcggttaagtaccctgaggcctctcttaggatgtccagtgtgcccaggcccgcgggcacagccagcgccacaaccttgggtccctggaagagtccatcgtgacctcatcttgagtaccgaggctcgaacttctgtaatacgtcggtcag

SEQ ID NO: 540198 - DNA, 494 bp, Homo sapiens
  misc_feature (252)..(252): n is a, c, g, or t
  misc_feature (305)..(305): n is a, c, g, or t
  misc_feature (320)..(320): n is a, c, g, or t
  misc_feature (322)..(322): n is a, c, g, or t
  misc_feature (325)..(325): n is a, c, g, or t
  misc_feature (353)..(353): n is a, c, g, or t
  misc_feature (363)..(363): n is a, c, g, or t
  misc_feature (388)..(388): n is a, c, g, or t
  misc_feature (422)..(422): n is a, c, g, or t
  misc_feature (477)..(477): n is a, c, g, or t
agagaaggaaggaattcacacggcaaatacagtgatataggtaatgctctagttcagcagtgtccagtagatctttttgcaacagtggaaatgttccatatcggtgctgttcagtatagtagctaccagctttctgtggctattgagcactccagagagtggcttgtgtgactgaggaactgaatttttaattctcttaagtttaagcgggcacatatggctagtaactcataatgggatagtgcattctanttctagtggcaaatagacctatgtttattgttaggcatgaaaattacacgtangttaaaatagtctangnaanatccaaatgcagcataatcctaaaaagncatttaaacntaagcttcagaactcctttggtaanatagttcgctgctccgtaggtctcagcatgaccngttagtccccagccagcacagcagggataaataaccctctttattaggcctcagntaccaggcatcaggacc

SEQ ID NO: 540199 - DNA, 814 bp, Homo sapiens
  misc_feature (392)..(392): n is a, c, g, or t
ggccgccattatggatcggcaggtacatgagtccgtggttctggagacatgctggagactatgtggtggtgactgataataactgttaccagagtgaaagctattttgctaactatcttctccagcggagatggccacattgtgcttcgtaatcgaggagccagatctggtttcctattctcccaggatttcgctctttagcttaaatagggttgtcatattcccagagtgcctgttcgacgtgctaggatcatatcaaggcttcaggcatcgagtcttcgatagctggcatgcttgccatcgtctccagtatatatgcggtcgtcgaactgagtgctggccatcgatggaagacataatcgggcacacctgttggtagccgtcaagtatcnagcagtgcttcccagcgttacctgcgggaaacatatggtatgtgtgattgatcaccatcgagatgtggactgacttcaacacgtaagtaaagagcctgagttcatgaaaattgttgccgtgatgtctcatagcagaattccattttatcaagctgaaacgacgatgaagtctcgtcgatggctacaagtatgtggaatgtgaattgcgagggtaatagattgcccctgttgagacatgaaattgacagtgcagaaacttgactttggaagtgccagaggtagagtgtgcaatacaaatgtgtccagaattgttgcgacacgattgtgaagcactgttgcaggaaagtagctcatggggaaactaggtgattctgagtgtaagagggataaactaggaatgatatgactggtttggagtgcag

SEQ ID NO: 540200 - DNA, 248 bp, Homo sapiens
actgagaaagggcaggatagaacccgcaacctcatggtcctagtcggatacattaactactgcgccatgacgggaactcctagactttttttttaaatttaacctgcctatatacagttgtttagtgatttccagtggtgtgttgagcacggaatgttgatattcaacacaggatcatgtccaggaccctggtaatagacagcatattcctttcagacagggatttacaatttggtcaccaacttcaa

SEQ ID NO: 540201 - DNA, 247 bp, Homo sapiens
cagtgagacgagatcgcaccattgcactccagcctgggtgacagagagagactctgtctcaaaaaaaaaaaaaaaaactttacctctaaacatttgggaaggggctggacatcccaaaagcgaaggggcggaggggttcaaccttatgccaccccttaccgtgctgggtgggtgcctttttgcatccccgggactttgcatagacaccaggctgcccgtaatcagagcctggccctggaccgttgcc

SEQ ID NO: 540202 - DNA, 335 bp, Homo sapiens
attatggacattccacgtgcttatttcgcccgattccagtaggttaatagtggtgggtaaggccaggttagcgatggaggtatgattggtgctgtgggtcaaagagcatgatggggtggcggttgcgtgaaactttaatagtgcctgaagctgaatactttatgaaggagaggccccatggttcgattccggaggatcctattgacgcgcgggctttgtctgatcatgggcgttgattaataatacattactggttgctcattgaaagttggtgcctatatcgaaatcgcaattgctccgagcaataggctatgtgattaggacctggggtacca

SEQ ID NO: 540203 - DNA, 517 bp, Homo sapiens
ggtggcgatctagaggatccctcacgcccatgtcacaaaagaaaattacataaagcaaataaatttcttctcacggatatgaattcaaagtaaaaatttatattttacttaccttgggtagagagacttagaatacagacgggatacagtcaaagagtgaaaaacaagatggtaaataacaaaagacaacaagttggtcttcttccatacagcacaatgttacaagcctatgagaaagctcctagaatttgaatttctgaggagagtttcttcgtgaaaagttttagctgggcacagtggctcatgcctgtaatctcagcacttggggaggccgaggcgggtggatggcctgagcccaggagtttgaaaccagcccaggcaacatgaggaaacttcgtctctaccaaaaatacaaaaatgggctgggcatggtggtgcacacctatagtcccagttattagtgagtctaaggtgggaggatggcttgagcctgggaggttgaggctgcagtgagctg

SEQ ID NO: 540204 - DNA, 364 bp, Homo sapiens
acctctaccccacgaccaggtgaacttgcgggatgagctcctccagctctactcagattctgatgaggaggatgaggatgaagaggaggaggaagaaaaggaggcagaagaggaacaggaagaagaagaagcagaggaagacctgcagtgtgctcatccctgtgatgcccctaagctgtgagttcctgcctttgcacctgcaagtcctttctctgagcctcaatttcctcatttgttaagagggacacaggtgatgtgcttgccggcagggttgctggaactaattgagaacactgcccttagccctggtgggctgggaactgggaagccccactccctgcaccctgactcccattcctccctc

SEQ ID NO: 540205 - DNA, 120 bp, Homo sapiens
  misc_feature (90)..(90): n is a, c, g, or t
  misc_feature (99)..(99): n is a, c, g, or t
gatattcagatttaaaaggttttcaaagaattactttctcccatgtccaaagctagatttccctaaacacatgtatcacattcatatatntcgttcttnggccccactgccaaaggaagt

SEQ ID NO: 540206 - DNA, 2013 bp, Homo sapiens
  misc_feature (230)..(230): n is a, c, g, or t
  misc_feature (232)..(232): n is a, c, g, or t
  misc_feature (234)..(234): n is a, c, g, or t
  misc_feature (240)..(240): n is a, c, g, or t
  misc_feature (244)..(245): n is a, c, g, or t
tctcttcctccctgtgttctttgtttctttgttctgtgtttcttgcttttttgcttttcgtcccttctattctgtcctggtgtgatagtgcttgactctcgccacccgtgttaagccgtcccggtttttgggggacccaccgttgcccgtgttctgtgacccttgccacttacatacaatggcgcgccccaccgaaggtttaaatttttgtggccaagccgcacacattntntngtgttntttnnttttacttcaatttcctttaatgagtacttgttacagtaaaagaggtataaagtcctgttcccaagtccaaaccactttttaacttaaatcttgagtttttctgaattactcaatttgaagtaattctctttatatctgaaaaatggttttattgaaacgtttgagattaaaaaatatgcattgcaagaagcatatgacaaacattctgagagtacaaaattagttgtaaaaaataacataatttaccagtaaacccactcatatagaaatgtgcaaagccttttgatataaaaagttttgtacaccaagcacctatttttataacttagcttcccatggagagataatggcttgcgtgcattttatgtatccataacatacatacaaggctcggtcttttcaatgggataacagttcacaactcttcgatttgaattgtaatgaatctggtgacaaggatttttctctaatggattccaaagttagccagaacttttaatgtcaagatgaaaaagggtgtaaggtgttatattttcttcaattcctttaccacaggaggctaactccacaatttccctcatgtttctcattcagaaaaaaaaatattaaatttgtgttcagaattatttgatgattgcttctttgtgctgatgtttcagttcctgaagtcaacttggctctcacaattttctaaggtcaggttattgacttagggttgtataaacatttttttctggtttttggattttcactgagaacgaccttcccttaatcgtcttctagatccttgaacttttttgttggcttgcaacttcctcacgggtgtgtctccctgaagcagtcttttaatttcttcatcttcaaataaatgaccatcaccaccttcaatgaatttggtgaccttggtgacctcttcttgtaacaatttcttcagagtttcttctgtttctccacctccagtagaaatcctagtgtattttatttcaggacctgtaatgattcgttcttctcgtgtctctttttcagttatttccacaggcactccatcaatgattttggtgtattttttaataattggctctccatggatcacttcagttattgtttcaccttctttaatcagtctgaattcaggttcaccttcaattttgacttttgttagtgtgggttatagacagtcacggggatttctttgaaggtgctaccacgaacaaacttaatttggatgtatttgattaatttattaagtatttccagcagttgatcatttccaacaggtgtgtctgctggatagaggagtttatctacaacatgaattacaccatttgttgtcatgatgtcagattcttttgatttcaattcattcaccagaagtgtatcatttacttctttcagaaagattttgcttccttgtgtggtctttaaaatgttagtaacaccaggttcaaatccttttccaatgaaaactcctggtgtcagctcgtgccgaattcggcacgagggtctcactctgtcacccaggctggaatgcagtgacacaatcatagctcactgcagcctcaaacttctagcctcaagtgatcttcctgcatcaaccttccaaagtgttgacattacaggtgtgaggccaaggcaggcggatcacctgaggtcgggagttcaagatcagcctgaccaacatggagaaaccccctctctactaaaaatacaaaattagccgggcatggtggcgcatgcctgcaatcccagctactcgggaggctgagg

SEQ ID NO: 540207 - DNA, 463 bp, Homo sapiens
tgtgatggatctagaggatcccggcatgagctcttacacatgatcccatatctcgacctcatggaaatgggaagagcaacagctaactccacatgtgtcagaaaatagttaacattcaaaaaacttgtttcacatggaccaaaatgatgtgccatctaaacatacaaagcctcttgtcatcaacagccgtgaccactttaaaatgacccagttcatggcatgcttgaagcgacatggtgggtcacataacaccagtttctggcatagcgctattggtagtcactttggcttactcggcagagactgcagatcactcagatgtaaacattcaaccacctcgtgactacaatttaacttccatttagatatagctttactcagcatgcactgtcgataaggatcgccgccaaccactccttggcgcttactgaccatttaaaaaaatacttcaccacggcctccc

SEQ ID NO: 540208 - DNA, 1935 bp, Homo sapiens
  misc_feature (230)..(230): n is a, c, g, or t
  misc_feature (232)..(232): n is a, c, g, or t
  misc_feature (234)..(234): n is a, c, g, or t
  misc_feature (240)..(240): n is a, c, g, or t
  misc_feature (244)..(245): n is a, c, g, or t
tctcttcctccctgtgttctttgtttctttgttctgtgtttcttgcttttttgcttttcgtcccttctattctgtcctggtgtgatagtgcttgactctcgccacccgtgttaagccgtcccggtttttgggggacccaccgttgcccgtgttctgtgacccttgccacttacatacaatggcgcgccccaccgaaggtttaaatttttgtggccaagccgcacacattntntngtgttntttnnttttacttcaatttcctttaatgagtacttgttacagtaaaagaggtataaagtcctgttcccaagtccaaaccactttttaacttaaatcttgagtttttctgaattactcaatttgaagtaattctctttatatctgaaaaatggttttattgaaacgtttgagattaaaaaatatgcattgcaagaagcatatgacaaacattctgagagtacaaaattagttgtaaaaaataacataatttaccagtaaacccactcatatagaaatgtgcaaagccttttgatataaaaagttttgtacaccaagcacctatttttataacttagcttcccatggagagataatggcttgcgtgcattttatgtatccataacatacatacaaggctcggtcttttcaatgggataacagttcacaactcttcgatttgaattgtaatgaatctggtgacaaggatttttctctaatggattccaaagttagccagaacttttaatgtcaagatgaaaaagggtgtaaggtgttatattttcttcaattcctttaccacaggaggctaactccacaatttccctcatgtttctcattcagaaaaaaaaatattaaatttgtgttcagaattatttgatgattgcttctttgtgctgatgtttcagttcctgaagtcaacttggctctcacaattttctaaggtcaggttattgacttagggttgtataaacatttttttctggtttttggattttcactgagaacgaccttcccttaatcgtcttctagatccttgaacttttttgttggcttgcaacttcctcacgggtgtgtcttcttgtaacaatttcttcagagtttcttctgtttctccacctccagtagaaatcctagtgtattttatttcaggacctgtaatgattcgttcttctcgtgtctctttttcagttatttccacaggcactccatcaatgattttggtgtattttttaataattggctctccatggatcacttcagttattgtttcaccttctttaatcagtctgaattcaggttcaccttcaattttgacttttgttagtgtgggttatagacagtcacggggatttctttgaaggtgctaccacgaacaaacttaatttggatgtatttgattaatttattaagtatttccagcagttgatcatttccaacaggtgtgtctgctggatagaggagtttatctacaacatgaattacaccatttgttgtcatgatgtcagattcttttgatttcaattcattcaccagaagtgtatcatttacttctttcagaaagattttgcttccttgtgtggtctttaaaatgttagtaacaccaggttcaaatccttttccaatgaaaactcctggtgtcagctcgtgccgaattcggcacgaggcacatttctatatgagtgggtttactggtaaattatgttattttttacaactaattttgtactctcagaatgtttgtcatatgcttcttgcaatgcatattttttaatctcaaacgtttcaataaaaccatttttcagatataaagagaattacttcaaattgagtaattcagaaaaactcaagatttaagttaaaaagtggtttggacttgggaacaggactttatacctcttttactgtaacaagtactcattaaaggaaattgaatga

SEQ ID NO: 540209 - DNA, 271 bp, Homo sapiens
  misc_feature (248)..(248): n is a, c, g, or t
cttgacctcaggtgactcgcccacctcagcctcccaaagtgctgggattacaggtgtgagccaccgcgcccagcttttcctttgctttttactctcaggcagtctctctccagggtggtggcagacatggttccagcatctccagtttcttaattctccagtttagtgcttttgggagcattaagctgggagagaaaggcctaagatttctctggggattttgttgcacaccctggggaagcaaagantattggtcagttgccatctttga

SEQ ID NO: 540210 - DNA, 446 bp, Homo sapiens
gataatcataacacttttggtcacatgttttctcctgcagcctgaaagttcttaaagaaaaagatatcaaatgcctgctgctaccacccttttaaattgctatctttagaaaagcaccggtatgtgttttagattcatttccctgttttagggaaatgacaggcagtagtttcagttctgatggcaaaacaaataaaaacatgtttctaaaagttgtatcttgaaacactggtgttcaacagctaagcagctaaagtaattcaacccatgcattgctagtgtcacagcctttggttatgtctagtagctgtttctgaagtattttcatttatcttttgtcaaatttaaccctgtttgaattctctcctttcctcaaggagacacttatgttcaaagtgttgattctttgccttaggtgcatagagagtagacagtttggagatgga

SEQ ID NO: 540211 - DNA, 2017 bp, Homo sapiens
  misc_feature (230)..(230): n is a, c, g, or t
  misc_feature (232)..(232): n is a, c, g, or t
  misc_feature (234)..(234): n is a, c, g, or t
  misc_feature (240)..(240): n is a, c, g, or t
  misc_feature (244)..(245): n is a, c, g, or t
tctcttcctccctgtgttctttgtttctttgttctgtgtttcttgcttttttgcttttcgtcccttctattctgtcctggtgtgatagtgcttgactctcgccacccgtgttaagccgtcccggtttttgggggacccaccgttgcccgtgttctgtgacccttgccacttacatacaatggcgcgccccaccgaaggtttaaatttttgtggccaagccgcacacattntntngtgttntttnnttttacttcaatttcctttaatgagtacttgttacagtaaaagaggtataaagtcctgttcccaagtccaaaccactttttaacttaaatcttgagtttttctgaattactcaatttgaagtaattctctttatatctgaaaaatggttttattgaaacgtttgagattaaaaaatatgcattgcaagaagcatatgacaaacattctgagagtacaaaattagttgtaaaaaataacataatttaccagtaaacccactcatatagaaatgtgcaaagccttttgatataaaaagttttgtacaccaagcacctatttttataacttagcttcccatggagagataatggcttgcgtgcattttatgtatccataacatacatacaaggctcggtcttttcaatgggataacagttcacaactcttcgatttgaattgtaatgaatctggtgacaaggatttttctctaatggattccaaagttagccagaacttttaatgtcaagatgaaaaagggtgtaaggtgttatattttcttcaattcctttaccacaggaggctaactccacaatttccctcatgtttctcattcagaaaaaaaaatattaaatttgtgttcagaattatttgatgattgcttctttgtgctgatgtttcagttcctgaagtcaacttggctctcacaattttctaaggtcaggttattgacttagggttgtataaacatttttttctggtttttggattttcactgagaacgaccttcccttaatcgtcttctagatccttgaacttttttgttggcttgcaacttcctcacgggtgtgtcttcttgtaacaatttcttcagagtttcttctgtttctccacctccagtagaaatcctagtgtattttatttcaggacctgtaatgattcgttcttctcgtgtctctttttcagttatttccacaggcactccatcaatgattttggtgtattttttaataattggctctccatggatcacttcagttattgtttcaccttctttaatcagtctgaattcaggttcaccttcaattttgacttttgttagtgtgggtccttcagttttgataataggctgaagactgccttcaatcactttaatttttggttccacaactttggttataattttagttgtatagacagtcacggggatttctttgaaggtgctaccacgaacaaacttaatttggatgtatttgattaatttattaagtatttccagcagttgatcatttccaacaggtgtgtctgctggatagaggagtttatctacaacatgaattacaccatttgttgtcatgatgtcagattcttttgatttcaattcattcaccagaagtgtatcatttacttctttcagaaagattttgcttccttgtgtggtctttaaaatgttagtaacaccaggttcaaatccttttccaatgaaaactcctggtgtcagctcgtgccgaattcggcacgaggcacatttctatatgagtgggtttactggtaaattatgttattttttacaactaattttgtactctcagaatgtttgtcatatgcttcttgcaatgcatattttttaatctcaaacgtttcaataaaaccatttttcagatataaagagaattacttcaaattgagtaattcagaaaaactcaagatttaagttaaaaagtggtttggacttgggaacaggactttatacctcttttactgtaacaagtactcattaaaggaaattgaatga

SEQ ID NO: 540212 - DNA, 232 bp, Homo sapiens
acgccctcacgctaagtcaatcctaagccaaaagaacaaagctggaggcatcacactacccgacttcaaactatactacaaggctacagtaaccaaaacagcatggtactggtaccaaaacaaagatatagatcaatggaacagaacagagccctcagaaatagcggtgagggcgtgcgccctcaccggtgtactaatggagccatctagtagcgtggtccctccgaagttt

SEQ ID NO: 540213 - DNA, 775 bp, Homo sapiens
  misc_feature (9)..(9): n is a, c, g, or t
  misc_feature (126)..(126): n is a, c, g, or t
  misc_feature (434)..(434): n is a, c, g, or t
  misc_feature (457)..(458): n is a, c, g, or t
  misc_feature (468)..(469): n is a, c, g, or t
  misc_feature (527)..(528): n is a, c, g, or t
  misc_feature (557)..(557): n is a, c, g, or t
  misc_feature (564)..(565): n is a, c, g, or t
  misc_feature (641)..(643): n is a, c, g, or t
  misc_feature (650)..(650): n is a, c, g, or t
  misc_feature (652)..(652): n is a, c, g, or t
cttgagacnagaatcagtgttaaagtcattttattcttattaaggaaatactttgcatagattaatcagccccagagtgctttagaaattctcttaaataaaaataatagactcgctagtcagtanagatatttgaatatgtatcgtgccccctccggtgtctttgatcaggatgacatgtgccatttttcagaggacgtgcagacaggctggcattctagattacttttcttactctgaaacatggcctgtttgggagtgcgggattcaaaggtggtcccaccgctgcccctactgcaaatggcagttttaatcttatcttttggcttctgcagatggttgcaattgatccttaaccaataatggtcagtcctcatctctgtcctgcttcataggtgcccaccttgtgtgttttaaaagaaagggaaagcttntgtacctttagaagtgtaggtgnnaaatgaatgnnaatgcgcttggaaggtgcactagagacacacgcatattgattctcttcgctttggggnnaaaaaaagaaatgatcgcatatgaaactntggtggnngtgggtggtatttagaagaaagaataactcatgtgcgttattgctcacaataggagcgtagatatttgtaataaannnaaccccnanaatatcacaccgcataatgaaaagtgcgtgggcgcacaggttgtactctttttatcttgatgtgttctcctcacacacctcaaaaattaagatgataattaaatttttatattaaattttcta

SEQ ID NO: 540214 - DNA, 1910 bp, Homo sapiens
  misc_feature (230)..(230): n is a, c, g, or t
  misc_feature (232)..(232): n is a, c, g, or t
  misc_feature (234)..(234): n is a, c, g, or t
  misc_feature (240)..(240): n is a, c, g, or t
  misc_feature (244)..(245): n is a, c, g, or t
  misc_feature (1851)..(1851): n is a, c, g, or t
tctcttcctccctgtgttctttgtttctttgttctgtgtttcttgcttttttgcttttcgtcccttctattctgtcctggtgtgatagtgcttgactctcgccacccgtgttaagccgtcccggtttttgggggacccaccgttgcccgtgttctgtgacccttgccacttacatacaatggcgcgccccaccgaaggtttaaatttttgtggccaagccgcacacattntntngtgttntttnnttttacttcaatttcctttaatgagtacttgttacagtaaaagaggtataaagtcctgttcccaagtccaaaccactttttaacttaaatcttgagtttttctgaattactcaatttgaagtaattctctttatatctgaaaaatggttttattgaaacgtttgagattaaaaaatatgcattgcaagaagcatatgacaaacattctgagagtacaaaattagttgtaaaaaataacataatttaccagtaaacccactcatatagaaatgtgcaaagccttttgatataaaaagttttgtacaccaagcacctatttttataacttagcttcccatggagagataatggcttgcgtgcattttatgtatccataacatacatacaaggctcggtcttttcaatgggataacagttcacaactcttcgatttgaattgtaatgaatctggtgacaaggatttttctctaatggattccaaagttagccagaacttttaatgtcaagatgaaaaagggtgtaaggtgttatattttcttcaattcctttaccacaggaggctaactccacaatttccctcatgtttctcattcagaaaaaaaaatattaaatttgtgttcagaattatttgatgattgcttctttgtgctgatgtttcagttcctgaagtcaacttggctctcacaattttctaaggtcaggttattgacttagggttgtataaacatttttttctggtttttggattttcactgagaacgaccttcccttaatcgtcttctagatccttgaacttttttgttggcttgcaacttcctcacgggtgtgtcttcttgtaacaatttcttcagagtttcttctgtttctccacctccagtagaaatcctagtgtattttatttcaggacctgtaatgattcgttcttctcgtgtctctttttcagttatttccacaggcactccatcaatgattttggtgtattttttaataattggctctccatggatcacttcagttattgtttcaccttctttaatcagtctgaattcaggttcaccttcaattttgacttttgttagtgtgggtccttcagttttgataataggctgaagactgccttcaatcactttaatttttggttccacaactttggttataattttagttgtatagacagtcacggggatttctttgaaggtgctaccacgaacaaacttaatttggatgtatttgattaatttattaagtatttccagcagttgatcatttccaacaggtgtgtctgctggatagaggagtttatctacaacatgaattacaccatttgttgtcatgatgtcagattcttttgatttcaattcattcaccagaagtgtatcatttacttctttcagaaagattttgcttccttgtgtggtctttaaaatgttagtaacaccaggttcaaatccttttccaatgaaaactcctggtgtcaggtgataaagaatgatgttttgaagagcatttttgtcccgtatcagaatttctttttcttcactagtcattcccttaaaagcatcattggttggcacaaataatgtccagtctccaggttgtgtcaaangaactttcaagtctgcagcttcaagtaggctgagagggtttcttagcgatagtttggct

SEQ ID NO: 540215 - DNA, 1848 bp, Homo sapiens
  misc_feature (230)..(230): n is a, c, g, or t
  misc_feature (232)..(232): n is a, c, g, or t
  misc_feature (234)..(234): n is a, c, g, or t
  misc_feature (240)..(240): n is a, c, g, or t
  misc_feature (244)..(245): n is a, c, g, or t
tctcttcctccctgtgttctttgtttctttgttctgtgtttcttgcttttttgcttttcgtcccttctattctgtcctggtgtgatagtgcttgactctcgccacccgtgttaagccgtcccggtttttgggggacccaccgttgcccgtgttctgtgacccttgccacttacatacaatggcgcgccccaccgaaggtttaaatttttgtggccaagccgcacacattntntngtgttntttnnttttacttcaatttcctttaatgagtacttgttacagtaaaagaggtataaagtcctgttcccaagtccaaaccactttttaacttaaatcttgagtttttctgaattactcaatttgaagtaattctctttatatctgaaaaatggttttattgaaacgtttgagattaaaaaatatgcattgcaagaagcatatgacaaacattctgagagtacaaaattagttgtaaaaaataacataatttaccagtaaacccactcatatagaaatgtgcaaagccttttgatataaaaagttttgtacaccaagcacctatttttataacttagcttcccatggagagataatggcttgcgtgcattttatgtatccataacatacatacaaggctcggtcttttcaatgggataacagttcacaactcttcgatttgaattgtaatgaatctggtgacaaggatttttctctaatggattccaaagttagccagaacttttaatgtcaagatgaaaaagggtgtaaggtgttatattttcttcaattcctttaccacaggaggctaactccacaatttccctcatgtttctcattcagaaaaaaaaatattaaatttgtgttcagaattatttgatgattgcttctttgtgctgatgtttcagttcctgaagtcaacttggctctcacaattttctaaggtcaggttattgacttagggttgtataaacatttttttctggtttttggattttcactgagaacgaccttcccttaatcgtcttctagatccttgaacttttttgttggcttgcaacttcctcacgggtgtgtcttcttgtaacaatttcttcagagtttcttctgtttctccacctccagtagaaatcctagtgtattttatttcaggacctgtaatgattcgttcttctcgtgtctctttttcagttatttccacaggcactccatcaatgattttggtgtattttttaataattggctcttatagacagtcacggggatttctttgaaggtgctaccacgaacaaacttaatttggatgtatttgattaatttattaagtatttccagcagttgatcatttccaacaggtgtgtctgctggatagaggagtttatctacaacatgaattacaccatttgttgtcatgatgtcagattcttttgatttcaattcattcaccagaagtgtatcatttacttctttcagaaagattttgcttccttgtgtggtctttaaaatgttagtaacaccaggttcaaatccttttccaatgaaaactcctggtgtcagctcgtgccgaattcggcacgaggcacatttctatatgagtgggtttactggtaaattatgttattttttacaactaattttgtactctcagaatgtttgtcatatgcttcttgcaatgcatattttttaatctcaaacgtttcaataaaaccatttttcagatataaagagaattacttcaaattgagtaattcagaaaaactcaagatttaagttaaaaagtggtttggacttgggaacaggactttatacctcttttactgtaacaagtactcattaaaggaaattgaatga

SEQ ID NO: 540216 - DNA, 340 bp, Homo sapiens
aattgtaatgtccgcatatgggccctgtatggatgtaacacaggtggtttgagggtgtcctcttacaacatggctaggggttcttatcaacaagagtgtcgtgtctgtgcatacgctattattagcccacgcagttattccctgtaaccgcccggggctctcggtaatggttctacataatcacactgggttgtactcccgttttagccactgtgcgaggataccgccacgctaaagcggagggttagcctttgctcccacaagcccctggttcgcctccattaatgttatcaaatccccagtgcgtccaacccccacaacccccccgggccgacaatca

SEQ ID NO: 540217 - DNA, 272 bp, Homo sapiens
tcgtgtgtctgttaatagtgtgaaattgtcatgggggaaaaaaaaaacaggacccaaaggcgaccttgggcatatatgggaagctgaaaatcttcaaggctactgaggggggcccccttaatcttgcctttgattgctgcgggcagggaaaggtgcccccgtctgttcatgctgttttggggggggggggggtatttgcaagaatactcattttgacataataggtcctcttgtcagagatcctctaccacagacattaatagctgagcggg

SEQ ID NO: 540218 - DNA, 314 bp, Homo sapiens
tctcgctacacattatagtgtcttctacacatgcggttgaacccgtaaagtcacccacaatggttgaaacaacttcttccaaactcttgtaacactgctatttttatctccttccctgaatcatgaatgctgttaatggcatctggatggtgaatcatttccagaagactttccattcattttgcccaggtccatctgaggaatcattatctatggcagctgaagccttacgaaacgtatttcttaaatagtaagaacttgaaagttaaagtcactcctttgatccatgagctacagaagggacactatgttag

SEQ ID NO: 540219 - DNA, 2857 bp, Homo sapiens
  misc_feature (230)..(230): n is a, c, g, or t
  misc_feature (232)..(232): n is a, c, g, or t
  misc_feature (234)..(234): n is a, c, g, or t
  misc_feature (240)..(240): n is a, c, g, or t
  misc_feature (244)..(245): n is a, c, g, or t
  misc_feature (2559)..(2559): n is a, c, g, or t
  misc_feature (2656)..(2656): n is a, c, g, or t
  misc_feature (2705)..(2705): n is a, c, g, or t
tctcttcctccctgtgttctttgtttctttgttctgtgtttcttgcttttttgcttttcgtcccttctattctgtcctggtgtgatagtgcttgactctcgccacccgtgttaagccgtcccggtttttgggggacccaccgttgcccgtgttctgtgacccttgccacttacatacaatggcgcgccccaccgaaggtttaaatttttgtggccaagccgcacacattntntngtgttntttnnttttacttcaatttcctttaatgagtacttgttacagtaaaagaggtataaagtcctgttcccaagtccaaaccactttttaacttaaatcttgagtttttctgaattactcaatttgaagtaattctctttatatctgaaaaatggttttattgaaacgtttgagattaaaaaatatgcattgcaagaagcatatgacaaacattctgagagtacaaaattagttgtaaaaaataacataatttaccagtaaacccactcatatagaaatgtgcaaagccttttgatataaaaagttttgtacaccaagcacctatttttataacttagcttcccatggagagataatggcttgcgtgcattttatgtatccataacatacatacaaggctcggtcttttcaatgggataacagttcacaactcttcgatttgaattgtaatgaatctggtgacaaggatttttctctaatggattccaaagttagccagaacttttaatgtcaagatgaaaaagggtgtaaggtgttatattttcttcaattcctttaccacaggaggctaactccacaatttccctcatgtttctcattcagaaaaaaaaatattaaatttgtgttcagaattatttgatgattgcttctttgtgctgatgtttcagttcctgaagtcaacttggctctcacaattttctaaggtcaggttattgacttagggttgtataaacatttttttctggtttttggattttcactgagaacgaccttcccttaatcgtcttctagatccttgaacttttttgttggcttgcaacttcctcacgggtgtgtctccctgaagcagtcttttaatttcttcatcttcaaataaatgaccatcaccaccttcaatgaatttggtgaccttggtgacctcttcttgtaacaatttcttcagagtttcttctgtttctccacctccagtagaaatcctagtgtattttatttcaggacctgtaatgattcgttcttctcgtgtctctttttcagttatttccacaggcactccatcaatgattttggtgtattttttaataattggctctccatggatcacttcagttattgtttcaactgctggaaatacttaataaattaatcaaatacatccaaattaagtttgttcgtggtagcaccttcaaagaaatccccgtgactgtctatagacccacactaacaaaagtcaaaattgaaggtgaacctgaattcagactgattaaagaaggtgaaacaataactgaagtgatccatggaggtgcgttccttatgttacctggggccgactaccttcgctgtgattattttgaaatagtgttggtttagaaatattgaacatctgatattttctcttagttcttattttataaaaattgtgggaattatttcctcagctatgagttcttattagctggtcagaaataaaacatagttagcttttaatggatctagttggaattaatttatctattaagtcactgggcccaacaaaatgtcatgatttttgcatatacaagtgaggattgtggaataaaattgtaacattaatgtcagtataaaaggaaatattagaaacagtaggaaaaaatgaccattgtataagtctctgtctaataagccactccactactaggatttatgatagggctcccattccaatgatatagaactccctggattctcactaagtatttattccacatccagaaaacaagtatggcatggagagttaggatgtcaaatggccctctctctcaaccaagattcaggacatagctattaccttttagatccctattgatatgatttttgggggatatgttctaaaaatgtttatgattgaatcttaaatggtaatatttgtagaaatatagttaatcattacaatgtctagcttatggatgtatagtcacaatatgagggtaaatcaaatgcatttgtattcccctgcttttagagccaattattaaaaaatacaccaaaatcattgatggagtgcctgtggaaataactgaaaaagagacacgagaagaacgaatcattacaggtcctgaaataaaatacactaggatttctactggaggtggagaaacagaagaaactctgaagaaattgttacaagaagaggtcaccaaggtcaccaaattcattgaaggtggtgatggtcatttatttgaagatgaagaaattaaaagactgcttcagggagagaattgaaaacatgtatataatagaaaaaactggacttcatgctgagtatagatgatacatataaaagangtcaaaatttggagaaaaaatttaaaaagataagtagaaaaatgaagtaactgtagaaaccatacttactctttgatctcaaatgcccaaaaactgnatgaaaatgtgaatttaggccgaccaggtagtcttgtcaataaactaanagaaaaacaggaaaattgagaaatatgttacaactataacaacacaaaacagcatagttttgaaacacttgcagttcttaaatataaaagcttttattagttaattttttaaaaggatctcataggagtgacactgaatcaggttgggagag

SEQ ID NO: 540220 - DNA, 619 bp, Homo sapiens
  misc_feature (159)..(159): n is a, c, g, or t
  misc_feature (197)..(197): n is a, c, g, or t
gattgcgacctcgtcgatgccggagtcagagaggaacgtggctacgaaagcctcggagtgaagttcccagaccctacgccccgctgtcaggcagcccgccgatcagatggaggagaacgaggtggagagcagcagctgactgctggcccctgtggcctngcctggcccgaggatgccctctgagagctgtgccttgngttgttgggcacctcatgaatgcctgtgtcctgcctgacatgcatgctgactgcctgctgtggcctgcccctgtgtggcatgtgcatgatgtgcctggattgacttcttgtgctgttggtgtgcaaatgcttcgtgacctgctgtgcatgcctgttctcagtgaggaggtatctgagagcagctctgagctgcagaccccctgcctaatagctacctccctgattcatctgtctgtgtctcattgtggccatgtggcatggggtgacatgtgcgtgtcccccatgcacttgtgcactctagtgcactcccagaccccaacatgctggtgtccgacatgcacagcttcctcctcggacctgggctcggccatcgacaagatcatacgagtccaccatcgggcccgacctcatccagaactgca

SEQ ID NO: 540221 - DNA, 371 bp, Homo sapiens
aatgagaggcggttttcaatattactttaattttattttagagatggagtctcgctcttgcccagccagagtgcagttgcgggatctcagctcactgcaacctccacctcccgggttcaagcaattctcctgcctcagcctcctgagtagctgggattacaggcgcgtgctaccaagcccgtgtaatttttgtatttttagtagaaacggggtttcaccatgttggtcaggctggtctcaaactcctgacctcgtgatccgcccgcctcggcctcccaaagtgctgggattacaggcgtgagccaccgtgcctggcctccaacctttttttttttctataccaccttcagggtgagtttggaatggatgga

SEQ ID NO: 540222 - DNA, 1825 bp, Homo sapiens
  misc_feature (230)..(230): n is a, c, g, or t
  misc_feature (232)..(232): n is a, c, g, or t
  misc_feature (234)..(234): n is a, c, g, or t
  misc_feature (240)..(240): n is a, c, g, or t
  misc_feature (244)..(245): n is a, c, g, or t
  misc_feature (1766)..(1766): n is a, c, g, or t
tctcttcctccctgtgttctttgtttctttgttctgtgtttcttgcttttttgcttttcgtcccttctattctgtcctggtgtgatagtgcttgactctcgccacccgtgttaagccgtcccggtttttgggggacccaccgttgcccgtgttctgtgacccttgccacttacatacaatggcgcgccccaccgaaggtttaaatttttgtggccaagccgcacacattntntngtgttntttnnttttacttcaatttcctttaatgagtacttgttacagtaaaagaggtataaagtcctgttcccaagtccaaaccactttttaacttaaatcttgagtttttctgaattactcaatttgaagtaattctctttatatctgaaaaatggttttattgaaacgtttgagattaaaaaatatgcattgcaagaagcatatgacaaacattctgagagtacaaaattagttgtaaaaaataacataatttaccagtaaacccactcatatagaaatgtgcaaagccttttgatataaaaagttttgtacaccaagcacctatttttataacttagcttcccatggagagataatggcttgcgtgcattttatgtatccataacatacatacaaggctcggtcttttcaatgggataacagttcacaactcttcgatttgaattgtaatgaatctggtgacaaggatttttctctaatggattccaaagttagccagaacttttaatgtcaagatgaaaaagggtgtaaggtgttatattttcttcaattcctttaccacaggaggctaactccacaatttccctcatgtttctcattcagaaaaaaaaatattaaatttgtgttcagaattatttgatgattgcttctttgtgctgatgtttcagttcctgaagtcaacttggctctcacaattttctaaggtcaggttattgacttagggttgtataaacatttttttctggtttttggattttcactgagaacgaccttcccttaatcgtcttctagatccttgaacttttttgttggcttgcaacttcctcacgggtgtgtctccctgaagcagtcttttaatttcttcatcttcaaataaatgaccatcaccaccttcaatgaatttggtgaccttggtgacctcttcttgtaacaatttcttcagagtttcttctgtttctccacctccagtagaaatcctagtgtattttatttcaggacctgtaatgattcgttcttctcgtgtctctttttcagttatttccacaggcactccatcaatgattttggtgtattttttaataattggctcttatagacagtcacggggatttctttgaaggtgctaccacgaacaaacttaatttggatgtatttgattaatttattaagtatttccagcagttgatcatttccaacaggtgtgtctgctggatagaggagtttatctacaacatgaattacaccatttgttgtcatgatgtcagattcttttgatttcaattcattcaccagaagtgtatcatttacttctttcagaaagattttgcttccttgtgtggtctttaaaatgttagtaacaccaggttcaaatccttttccaatgaaaactcctggtgtcaggtgataaagaatgatgttttgaagagcatttttgtcccgtatcagaatttctttttcttcactagtcattcccttaaaagcatcattggttggcacaaataatgtccagtctccaggttgtgtcaaangaactttcaagtctgcagcttcaagtaggctgagagggtttcttagcgatagtttggct

SEQ ID NO: 540223 - DNA, 380 bp, Homo sapiens
gctcgacgttcacattcatagttccacatacatgtgtgtactgaatatctgggtctccagcaattacttgtgctgtcaaagacttcaataatagcaggttctcattcatatgcttaaaaagtcaatctcatggaggaagaaagtagagtgatgattcccagaggctgagaagggtggaaggacagggatgagaggttggttaataggtacaaaaatacagttacagatggaataagtgctagtgtttgatagcacagtagagtgactactgttaacaataattcattgtatatttcaaaatagctagaagagaagaaccggaaagttcccaaaacaaagacatgataaatgtttgaggtgatggatattctaattaccct

SEQ ID NO: 540224 - DNA, 1473 bp, Homo sapiens
  misc_feature (230)..(230): n is a, c, g, or t
  misc_feature (232)..(232): n is a, c, g, or t
  misc_feature (234)..(234): n is a, c, g, or t
  misc_feature (240)..(240): n is a, c, g, or t
  misc_feature (244)..(245): n is a, c, g, or t
  misc_feature (1406)..(1406): n is a, c, g, or t
  misc_feature (1457)..(1457): n is a, c, g, or t
tctcttcctccctgtgttctttgtttctttgttctgtgtttcttgcttttttgcttttcgtcccttctattctgtcctggtgtgatagtgcttgactctcgccacccgtgttaagccgtcccggtttttgggggacccaccgttgcccgtgttctgtgacccttgccacttacatacaatggcgcgccccaccgaaggtttaaatttttgtggccaagccgcacacattntntngtgttntttnnttttacttcaatttcctttaatgagtacttgttacagtaaaagaggtataaagtcctgttcccaagtccaaaccactttttaacttaaatcttgagtttttctgaattactcaatttgaagtaattctctttatatctgaaaaatggttttattgaaacgtttgagattaaaaaatatgcattgcaagaagcatatgacaaacattctgagagtacaaaattagttgtaaaaaataacataatttaccagtaaacccactcatatagaaatgtgcaaagccttttgatataaaaagttttgtacaccaagcacctatttttataacttagcttcccatggagagataatggcttgcgtgcattttatgtatccataacatacatacaaggctcggtcttttcaatgggataacagttcacaactcttcgatttgaattgtaatgaatctggtgacaaggatttttctctaatggattccaaagttagccagaacttttaatgtcaagatgaaaaagggtgtaaggtgttatattttcttcaattcctttaccacaggaggctaactccacaatttccctcatgtttctcattcagaaaaaaaaatattaaatttgtgttcagaattatttgatgattgcttctttgtgctgatgtttcagttcctgaagtcaacttggctctcacaattttctaaggtcaggttattgacttagggttgtataaacatttttttctggtttttggattttcactgagaacgaccttcccttaatcgtcttctagatccttgaacttttttgttggcttgcaacttcctcacgggtgtgtctccctgaagcagtcttttaatttcttcatcttcaaataaatgaccatcaccaccttcaatgaatttggtgaccttggtgacctcttcttgtaacaatttcttcagagtttcttctgtttctccacctccagtagaaatcctagtgtattttatttcaggacctgtaatgattcgttcttctcgtgtctctttttcagttatttccacaggcactccatcaatgattttggtgtattttttaataattggctctaaaagcaggggaatacaaatgctttgatttaccctcatattgtgactatacatccataagctagacattgtaatgatnaactatatttctacaaatattaccatttaagattcaatcataaacattttngacatatcgtaaatca

SEQ ID NO: 540225 - DNA, 1389 bp, Homo sapiens
  misc_feature (230)..(230): n is a, c, g, or t
  misc_feature (232)..(232): n is a, c, g, or t
  misc_feature (234)..(234): n is a, c, g, or t
  misc_feature (240)..(240): n is a, c, g, or t
  misc_feature (244)..(245): n is a, c, g, or t
  misc_feature (1322)..(1322): n is a, c, g, or t
  misc_feature (1373)..(1373): n is a, c, g, or t
tctcttcctccctgtgttctttgtttctttgttctgtgtttcttgcttttttgcttttcgtcccttctattctgtcctggtgtgatagtgcttgactctcgccacccgtgttaagccgtcccggtttttgggggacccaccgttgcccgtgttctgtgacccttgccacttacatacaatggcgcgccccaccgaaggtttaaatttttgtggccaagccgcacacattntntngtgttntttnnttttacttcaatttcctttaatgagtacttgttacagtaaaagaggtataaagtcctgttcccaagtccaaaccactttttaacttaaatcttgagtttttctgaattactcaatttgaagtaattctctttatatctgaaaaatggttttattgaaacgtttgagattaaaaaatatgcattgcaagaagcatatgacaaacattctgagagtacaaaattagttgtaaaaaataacataatttaccagtaaacccactcatatagaaatgtgcaaagccttttgatataaaaagttttgtacaccaagcacctatttttataacttagcttcccatggagagataatggcttgcgtgcattttatgtatccataacatacatacaaggctcggtcttttcaatgggataacagttcacaactcttcgatttgaattgtaatgaatctggtgacaaggatttttctctaatggattccaaagttagccagaacttttaatgtcaagatgaaaaagggtgtaaggtgttatattttcttcaattcctttaccacaggaggctaactccacaatttccctcatgtttctcattcagaaaaaaaaatattaaatttgtgttcagaattatttgatgattgcttctttgtgctgatgtttcagttcctgaagtcaacttggctctcacaattttctaaggtcaggttattgacttagggttgtataaacatttttttctggtttttggattttcactgagaacgaccttcccttaatcgtcttctagatccttgaacttttttgttggcttgcaacttcctcacgggtgtgtcttcttgtaacaatttcttcagagtttcttctgtttctccacctccagtagaaatcctagtgtattttatttcaggacctgtaatgattcgttcttctcgtgtctctttttcagttatttccacaggcactccatcaatgattttggtgtattttttaataattggctctaaaagcaggggaatacaaatgctttgatttaccctcatattgtgactatacatccataagctagacattgtaatgatnaactatatttctacaaatattaccatttaagattcaatcataaacattttngacatatcgtaaatca

SEQ ID NO: 540226 - DNA, 124 bp, Homo sapiens
cagtgatgcccaaatggcaaaattcatattttaatgtgatttacaagactagatgacagaaggattctgaagactttaaaaggtgttacagtgatgcccaacatggcagtgatgcccaacatgg

SEQ ID NO: 540227 - DNA, 718 bp, Homo sapiens
ttcagtgcgtaatggatctatgctataaatgcctgtctcgtaggctgagtcatgaagtgtgagcgaggatgtgctcagtcgccaaaagacatgtctggtacctgtgtggttaaaatgtaaggtagctcgtcttcaatgtggcgtcgctgatgtctgataaggtatgtcagtgtgcaaaaggctttaccttcagaatggtttatttatagcaaaggtaagtgtgaaaattttagacaaagtctctgtgggtggatgtaattaagtgtcagtgttgtggccgcgagagccatgggttttttttaaccccaaggttatccacatggtgtgtatgatgaattcttgagaactcgttaaggttttttgtgagaaaaggagggtgaattcaagagacaagtaaggcactgtgtgggtgcactagatagagttctgacagatgttgtgattcgtgtataggatttttaataatgacaagattcacaaaggtttattaactttttaaaagggtaacatgcctagttaactggttgcagtgatataccagaaatatatgggttcgtaagtactaaaatgcaaagcaagagtgcaagttttaaaatctagaaggttagggggttgaggggggaaaaaaatgggatggtctttaacctatgcaggttacggggaatttggtgcctagaactcgcgttgtgacatgaattgaaacagggcccggattaaa

SEQ ID NO: 540228 - DNA, 1329 bp, Homo sapiens
  misc_feature (230)..(230): n is a, c, g, or t
  misc_feature (232)..(232): n is a, c, g, or t
  misc_feature (234)..(234): n is a, c, g, or t
  misc_feature (240)..(240): n is a, c, g, or t
  misc_feature (244)..(245): n is a, c, g, or t
tctcttcctccctgtgttctttgtttctttgttctgtgtttcttgcttttttgcttttcgtcccttctattctgtcctggtgtgatagtgcttgactctcgccacccgtgttaagccgtcccggtttttgggggacccaccgttgcccgtgttctgtgacccttgccacttacatacaatggcgcgccccaccgaaggtttaaatttttgtggccaagccgcacacattntntngtgttntttnnttttacttcaatttcctttaatgagtacttgttacagtaaaagaggtataaagtcctgttcccaagtccaaaccactttttaacttaaatcttgagtttttctgaattactcaatttgaagtaattctctttatatctgaaaaatggttttattgaaacgtttgagattaaaaaatatgcattgcaagaagcatatgacaaacattctgagagtacaaaattagttgtaaaaaataacataatttaccagtaaacccactcatatagaaatgtgcaaagccttttgatataaaaagttttgtacaccaagcacctatttttataacttagcttcccatggagagataatggcttgcgtgcattttatgtatccataacatacatacaaggctcggtcttttcaatgggataacagttcacaactcttcgatttgaattgtaatgaatctggtgacaaggatttttctctaatggattccaaagttagccagaacttttaatgtcaagatgaaaaagggtgtaaggtgttatattttcttcaattcctttaccacaggaggctaactccacaatttccctcatgtttctcattcagaaaaaaaaatattaaatttgtgttcagaattatttgatgattgcttctttgtgctgatgtttcagttcctgaagtcaacttggctctcacaattttctaaggtcaggttattgacttagggttgtataaacatttttttctggtttttggattttcactgagaacgaccttcccttaatcgtcttctagatccgtaatgtagaaagaaacggagaatgtatagagctgtaaactgttaggaaatgtttaaaatttacagaatatattattgctctggtatgatgctatgcagaggccattgatttttgtgtgaataaaccttgagattatgttttgcttgaatgatgcttgcaacttatggtgaagcaaatgattatattttggatgcaaaagtatataaaataataatttgaaatgttaatgaattttaactctttagaaaatttgtgtcaatttggatatttacatagatttactgacacattcttt

SEQ ID NO: 540229 - DNA, 508 bp, Homo sapiens
  misc_feature (235)..(235): n is a, c, g, or t
  misc_feature (440)..(440): n is a, c, g, or t
cctctgtgagtctggatgaagtgagtctgctgtcctctgtcttcgacagtgtgtgctcataatgttgactcttggtctctagaagcgtttgaaagactaggctattttttaagaaattattttcccacattgcctcaaagctaaatatattatgttttcattctctaaaaactgataatcccaatatgtatggtaattttgaattattaggctatttagtctccatgctggttanaatgggaaactcctgtccctgtgacagaagttagttggaagttaaaacaactgttatagttgcttctattaaggatataattgacgctatgggaaatacactgcttagctttggtgcagagcctgaatgatcaatttgccaaaagactgattcactgaagactgtcagccaaatatcttaaatagagctgggaaagttcttgggntgggggagggagtagcagatgcagatttaggagtctgtaaaagtatgagtccatacagccacaaaaaa

SEQ ID NO: 540230 - DNA, 1092 bp, Homo sapiens
agcgggcttggaacccgagcctccgcggaaggtagccgttccctgacctagccatggcacagaacactgaaaaccacgacctgtcggatccatcttaatccagatccatgaagacctttatcagttaaaggacgcaaattagcaagaattctcacctgcaggaacaacggatgagactcctagacattcagagtcttgaaacagcaatcaaacaggactgaagtggggtaaaggaactacacatttgagacgtaatttaaactgcttgtaaacgcagacatgtactcaacgcacttctgtacaaattgatgacgagccttatatactcccccaggcttccaaacatggctatacttcccaactgtaaatagactcagaaatcagtctataatgcccactcaagggaactcttgcagagcgttaccactacttgcgaaaaccgcaaataggaccagcacaaggttacaatcctacttgcccattggtctatcccaaggaacgcaataagcggacagagaatcacgggggttggaacttgaacaaaaagtctttgccacgggatccctggacaacagccagttagtcaaccaagaatgaaaggctggcctctgggtagaagattggcctgaacacctaagtgcgaaagtccacgaaacgaggcgccacgtaaggtacataaacatccagaacgaaaaaaaggcaattgcttagtctacaccaggtttaacggcacacgataaacatacaaaagagggtacaaaaacaacgtaaatccaaagaacaatacacacagaggacaaccatgccacaaaatcacgcgaccttcgaatcatgtccacgcgatggaaatcgcgccgtaaagattgataccagcgttcccataaatacgcgcaaggttcagttgaaacagacagagcaggcaactgtcccagcaaagcaacagaaggaggagatacactgacgaggataagatgggaaaccagaaagcgcaaacggggccagcaacttacccaccacaaacagagagcaaacagagcagcgatacaagcacgcacagcgaacacatacacgccaccgaacagcaaaaacagc

SEQ ID NO: 540231 - DNA, 339 bp, Homo sapiens
tggtcgacctagagatccccgtcagcccactggtgatgcgttgtgcatgattgccaagtaactgtcagatataccttttcccctttaggcagttgtactgaagctatttgaatagggaactaagaagacatatcgttcaagagcaatattggacctcttagaatacatcagaaggaggaggaaacagtgggttccagtctccactgttatatatgccatttgatcagatgagtgggaagatacaaggactatcttgtctacaagaagaaggggccaagaggtccttgttcatcagctccttcggaaaaggcaggatttcatgtcatgatacaggacttg

SEQ ID NO: 540232 - DNA, 1334 bp, Homo sapiens
gaaaacaccaaatggcggatgacgccggtgcagcggggtgggccctgggggccctggtggccctgggatggggaacctgcggtggcttccgcggagtgtttcggcagtgtgcatccgggggcctggggtcgcgtgccgtggactgtgggcctgggtgcctgaggcctgctggagctctgcgtgaggcaaggcctgatggataatgtgatgtggattgccactgtcaccaatgttgggccggcttggtcaaagggacattgaaggaatcaaggtccctgtaatggagatctatactacttcctcccatgacccatttacagtgacatcaggagatcatttgcatttcttccttggtggtgccgtctctcaaaggcattgacgggtaatgagacagaattatagccaagtgcagcaaagcaggacccgtgccggcacaggcgcaaaccagaggttacaaggccattattgtcatgcatatcgcggggacatacaatttgtgacaacgtcagagtacttgggattgtataaagttgctcccaatggacagtgtggtctcacacgtgcatccggctggggtagacgatcattccgtgagccaaatggctcttccatccggtcacccgatgcacgcaagcaagagcttacttggagggaaccaacgattcggtcaaagccccacacaacatgttcccctttgacatagggttgacagggacctgctatgcagggctcctggtgctaggttacaggcactcatacccttgtcacccacaaggggtgcacctggggcattcggtcctccgtgcaacccttgttggccctatagaacgcttgcttctaatcgcagttggggcgtgggttattcaggactgaactttgcattaacacaccttccagtagccccgtggggggcgattgcaacattgacccacgcccgttggtaggccaaatctttccgacctaagtggcccacaggcgttattgacataggccccagttattaccattaaaaggaaaacccttaaccagtggtgtatacgcctttgaaacaccgccaccgtgaaacgccatcactgggggaaaagagggaagcaaaccgtggattattttcccagacgcgaaaagtgatgtctatcaccctaatctcacgtgggtagtgttatcacaggtgacacacaagcctattcggttacacaatgaaacgccgagacaacagacagaaagagtttcattccagtgtgcacagggagtggaacatcaccgtggcctatccaatgacactagtattggggtatagccgacaacagataagcgggagtatttctacatcttac

SEQ ID NO: 540233 - DNA, 457 bp, Homo sapiens
tgtatgctcagtgaagagctgaagaccccgtgtggtggtggggaggaggctctgtggattcttgtgcttggcaggtcagcatacagtacgacaaacagcacgtctgtggagggagcattctggacccccactgggtcctcacgggaggccactgcttcaggaaacataccgatgtgttcaacttggaaagtgcgggcaggctcagacaaaattggggaggtttccattacctgggtgtggggcagatcatcatcatttgagattcaacccctgttacccaaagaaaatgacattgacctcatttaagacttggagtttcccactccatttctcaggcaccagtcagtggcccatctgtattgccctctttgatgaggaggtcactccaggcaacccactctgtatcatatggatggggctttacgaagcagaatggagggcagatgtctgacatact

SEQ ID NO: 540234 - DNA, 129 bp, Homo sapiens
acagcatccgcaggacattgtccgggacaccctacaccacctcgcctttggagttcctgaccaccatcaccagctgggcctcactggtgatgatcagcaccagcccctgctccatcatcttgctgcatg

SEQ ID NO: 540235 - DNA, 224 bp, Homo sapiens
catcacaggaagtaggtaacatgcggctggaatagccaggagtagtctggaaaagtagaataatgaggtagggcttcccttcgctatttggaagtgcagataacactatgtaaaaccattaggaactgtcacgtgactagacagatcaatagttaatagcagtattagccagaatgtggggtcaggacgataggctaactagccctgtcctcattacatgccat

SEQ ID NO: 540236 - DNA, 353 bp, Homo sapiens
  misc_feature (277)..(277): n is a, c, g, or t
gtacttgccgtgtgctcttaaaactaggcggctatggtataatacgcctcacactcattctcaagcccctgacaaaacagcatagcctaccccttccttgtactatccctatgaggcataattataacaacgctccatcgtgcctacgacaaagcagacctaaacatcgctcagttgcatactctatcaatacagccacgatagccctcggtagtaacatgccattctacatccaaagccccctgtaagcttcaccgcgcgcagtcattctcataantcgcccacggatcttacatcctcagttactattctggcctagcaaactcaaactacgaaaacggcatcttcatcgg

SEQ ID NO: 540237 - DNA, 224 bp, Homo sapiens
tccaggcatgattcctgacgcagctggggaggattgcgtacttactcacagacaatgacaggcactcttatccagaactgagatgattttcaagacggctccatctcggaacagtagcctacggtctcgagtcaatggacgaagtacaaatgccacattttcatgcatttacacccagcaaagaaccacacgaagaaccacaggccagcagcaagaaccacacg

SEQ ID NO: 540238 - DNA, 214 bp, Homo sapiens
cgagctgtttgtttccccgcctggaaaaaatgttttaggcaggttccttaatttttcaggtctgtctcagataataaaaagctctttgtatgagcctcaaaactgttttttcagtgaatgaaattcccagtccttatacgaaggggctttaaaaaatttgtggaaatcctgaagtaaaaaatgataaaaaaataaaaactttattttttggcca

SEQ ID NO: 540239 - DNA, 312 bp, Homo sapiens
  misc_feature (92)..(92): n is a, c, g, or t
ctgcaagaacatgaactcatgatttttcatggctgcgtaacattccatggtgtactctaattcgtacatgtacaaattagaactacaggatnaagaaactcacttgaaaccacacaattatatggaaattgaacaacctgcccctgaatgactactgggtaaataacgaaattaaggcagaaataacaaagttgtttgaaaccagtgagaactaagagacaacgtaccagaatctctgagacacagctgaaatagtgttaccagggaaatttatagcactaaatgcccacgacagaaagctggaaagatcga

SEQ ID NO: 540240 - DNA, 250 bp, Homo sapiens
cgtactacatacatttcgtcactagtagaaacctcctggcggtggagatggaaggaaaataggtgacatcaaaatattaaaacaacttaacaacaaatataaatcagagtaagaagcatctaccagtgtacatagcaagggtaggaaagcaaaggcacacacgggtacaaggaccctcaccccacacacaggggggaacaacactggggagaaatactctactgcagaagaccagctcaatacatgtgga

SEQ ID NO: 540241 - DNA, 727 bp, Homo sapiens
atattatccaggagaacttccccaacctagcaagacaggccaacactcaaatttgggaaatatggagaacactgcaaagatactccttgagaagagcaaccccaagacacctaatcatcagattctccaaggttgaaatgaaggaaaaaatgttaagggcagccatagagaaaggtcaggttacctacaaaaggaagcccatcagaccaatagcagatctctctgcagaaaccctacaagccagaagagagtgggggccattattcaacattcttaaagaaaagaattttcaacccagaatttcatatccagccaaactaagcttcataagctaaggagaaataaaatccttttcagagaaggaaatgctgagggattttgtcaccaccaggcctgccttacaagagctcctgaaggaagcactaaatgtggaaaggaaaaagtggtactagccactgcacaaacacaccaaaatataaagaccaatgacactatgaagaaactgcttcaattagtgtgtaaaataacctgctaacatcatgatgacaggatcaaattcatgtataataatattaaccttagctgtacatggcctaaatgccccaactaaatactaccgtatggccaccataattacccccatactccttacactattcctcatcacgcaataaaaatattagacacaaactacagctaactcctcacaaagccataaaaaaaaaaa

SEQ ID NO: 540242 - DNA, 285 bp, Homo sapiens
  misc_feature (249)..(249): n is a, c, g, or t
gcgtcgaccctgtagtcccggcactctggggggccttgcagaaggatcgcttgggctcaggagttcgagaccagtctgggcagcatggccaaaccctgtctctacaggaaatgcaggaatgagccaggcgtggtggcgtgcacctgtggtcccggctgcttgggaggctgaggtaggaggatggcttgggcctaggaggcggaggttgcagtgagctgagatcatgccactgtactccagcctgggcgncagagccagaccctgtctcgaaaagaaaagtcgacg

SEQ ID NO: 540243 - DNA, 275 bp, Homo sapiens
aaagcaggcaggaagaatttgaataaggctgcagagtctgatgtgtccacagccattgagctttacagacaagccggcctacggcaatcatcatctctggaagtgagcggatgaccctcctggctacccctaaattctgtattcaaagatggaaaccctccaatagatgcccatacaaggaattagcttcggaaccacataattaaagaccagctggcctctaagtatctgtaccatggacagaccctggaaactctgggcggcaaaaaactgag

SEQ ID NO: 540244 - DNA, 385 bp, Homo sapiens
  misc_feature (31)..(31): n is a, c, g, or t
  misc_feature (310)..(310): n is a, c, g, or t
acaaaggaagcccaagaaaaaaaaaacaaanggaagcatgaaccatactggctaggccaggaatcaggacagaggagatgctgatggtcagtaaacatttttagtgccctagcacaggggtcctcaatccctgggccatggaccggtacgggtccgtggcctgttaggaaccgggcggcactgcaggaggtgagcagcagggagcgagcattaccgcctgagctccatctcctgacagatcagcagctggattcgattctcataggagggcgaaccctcttgtgaacagcgcatgtgagggatctaggtngcacggctccttattgagaaatctaaccaaatgcagggccaaggtgcgggtgggcttcacgccctggcaaatccc

SEQ ID NO: 540245 - DNA, 204 bp, Homo sapiens
gtcatgctccagctgccatgatacaactatcttgtacacaagtgacatcacagtaactctttccccagagaggaaacaaagtcctggggtgatgttcacccttcttgagcacctgtgcctgccttcatgccatgtgaaactacaagaagtctgcaactcccaagaaggtctttgccagaagctaaccttgctggaaccctgatc

SEQ ID NO: 540246 - DNA, 952 bp, Homo sapiens
gggagaccgttcaccctgatcagggagtatcggctgcgggtgcgcaagggtccaggagtgacctgcggttgtggaaagcgacccgtgactggtgtacagagtaccacctaggatgatttcgggtgactagatcagagatcatagatgagctcagtcggtatatcagtcgtcggatttagcagtaaaagtaaatagggttggggtggtcaaccggggttaccatgatttctcaagttctctattcagaaacttaggaaactcttactctaaagggaacacaagggggtttcaagtctttggcaaagttaaagaagcacgaaaggattgtgctctttactgaagaagttgaaaggattttgtgccatgacggtagtggaaattgattggaactcatacaaaattgtttggaatgaattcgaatggcaaggcataaagagttttcttgggaagcatcgtgtggtgagatgaagtgcatagattaacaacagtgttcttaagaagcgtcagacttggggaaccagggcctgggttctataccagaatggatggctaaagagatatttgtcccgaggttcaagtggagttgcacacacttactgaggtcaagggtggggactattgacatattgggtctctaagactgccgtttcttattagaaatacttggctatcagaaaattatttacgaaccagagcaagtgttttgaatggtatgagttgggatggatgaacggaggattaggaaacaggtgaggctaaggatgaaagtacacgggttcgagggtggacagttgggaaggagcgtgtaataattctcaccaggaaaggtggagtttaaaaaaaccggcaagggtaggtggattggtatgaagttgtaagggcagaaggtatacacgggagtgatgtcgtaagaggggggataataggacgacatatagggaaaggataggaa

SEQ ID NO: 540247 - DNA, 221 bp, Homo sapiens
acctcttgctggaccctctctgcctggaccctctcttcaaagctctcttccccacaaaagttcaaggtccagacaggccgtgtgagcctggaccccgagtgcctggcagaaaaataacaggatgaggaggtgactgctaggatcctggcgctccccagtcttctgcggttccgccaaatcctctgccaaattcaactgatgagaaacaccttccaaagcgg

SEQ ID NO: 540248 - DNA, 1496 bp, Homo sapiens
  misc_feature (619)..(619): n is a, c, g, or t
tctcccccccccctttttttcccttggggggcccggggacccctttttcccgggggggcgcgtgcctcccctctcccctcgtgatgtgctcccccctcgtggggacccctccccacatacgtgtgtgtgtggccccactatttccaatattttataaattacgcgcgtgttctccccgcgcggggcgcggggtgtgtgggaaagagtctccctcctctcaaaaaagagatgaaacgtccccgctgtgtgtgtgccgcctgtgtctctctctctctctctctcgcgagagagtatctccttgtgtgggcgcgccgagagacaccccccctgcgctgtggtggtctctctctcttgagagagagagagtctctctctctctctctcttatatatctctctctcgcgcgagagagagcctctctcgcgacgagggtggcgctgtgcgcgagtctgatgatgggagagaacacacactctctctctcaagcgcgatggagagagagatatcacagcagcaggtgtgtgtctctccccctctctctacatgatgagtgcgccgccctctctctctctcgagagagccgctcgcgtgatggtgtgtgtgagatgttctctctctncccgcgcgcgcgcgcgagagagaacacacgcgcggtgtctctctatatatagcgcgcgcgtggtgtctccacacccgcgcgcggcggtgtgtctctctctcgacaaatatgtggcgcgccgcgcacacgagacgagagagaaacaccgtctgttgtggcgccgcgagagatctctctcactatagagagagcgcgtgtgtggagcgcacacacagagggggtctccccccacaaagaacaggcgacaacaaaaaattatcgcgcggagagcctgctgtagaaaacaccccgtgtggtagtagaaaccacaacacgagaacacttgtgcaggcgacacaaaaaagagagaggagacacccgccgtggtgttttccacccaagagaaatatatacaactcccgccgaggggggaaaaataagtgtcaacacaccacaaggagggggggggagcgacctttacacaacaccacgccacaaataaagatgtgcggcccacggacgtatgaggaggagaaaagtccacacccatcaataaatgaggggggaggaagaaccaaccaactttggtagcagcaagagagaagaaagaaaaacactatgctcctctcccttcaaaaagcagactcaacagggcgcggcgcacgccgggcgctcttggttgggcacctgcggtggggccagcttgcgcgtgtggggggccccgcccaccaccaatattgtgggtggccccccccgcactgtgtttacccacacgcgggcgctgcggcgcaccatagtatggtggttgtttgcgtgctgcccaccctcttcttgtctttgctgttggcggcactcgtgtagcaaaaaacggtcgcgcacattgtggggggcgcgccca

SEQ ID NO: 540249 - DNA, 420 bp, Homo sapiens
tctacattgatgcatcattattcgcctgcccgcagtccatggtttacattcaggttcactcttgttgtacattctgagggtttggataaatgtatgacatgtatccaccattaattaagttgcataaagagtagtttcactgtcttataaaatgctctgtgctctgcctattcatgcaaccctctctaaaacccctagcaaccactgatcttttaactttcttgatagttttgccttttccagagtgtcatataattggaatcataaaatgtgcagccttttcaggatggcttcttccacttggtaatatgcatttaaggttcctccatgtctttttatggcttgatagctcatttctttttagcactgaataatattctactgtctggatgtgccacagtttatccatttgtcgacgcg

SEQ ID NO: 540250 - DNA, 377 bp, Homo sapiens
  misc_feature (351)..(351): n is a, c, g, or t
taaaggctttacattggatacacactatggaaaatcaatttaaaaaatagcttcccagtaatatatttaaagtaatatatttttaaatatttgtaaaaagggacaggtggaagaactttgaatttctcatatagtaggtatgtttggatgtaggcacctcacgtgttagggcacaaattatttcaaaaggaagtaactctaaagacactcagattatttcagaaaaaatgcaatagggggaatagtttgggggttaattttttattttaaaaagaaatttgacttatttaccacaagctatttttttccccttcgtggcgtgtaaaggtttgggtacaggacgaggtttgngctaaatgtgtctaaacacaaaacac

SEQ ID NO: 540251 - DNA, 150 bp, Homo sapiens
gaattgagggaaaaacaaatagagaagaaagaaatcagaaccttacggtagtattcaattcaaaatcaacgatatcatgaccaatttattattttggtttttttcccccagttccctcaaagttcagtattcaatttctcatccggggag

SEQ ID NO: 540252 - DNA, 544 bp, Homo sapiens
  misc_feature (416)..(416): n is a, c, g, or t
  misc_feature (422)..(422): n is a, c, g, or t
  misc_feature (447)..(447): n is a, c, g, or t
  misc_feature (460)..(461): n is a, c, g, or t
agatggtttctctcaaggactactgcaccagaatgaaggagaaccagaaacatatctattatatcacaggtgagaccaagggaccaggtagctaaacttccaaggccccttttgtgttggggaaaccggttctttccggggaaacatggcttagaagtgatctatatgattgaggccccaatttgggaatggaggtactgtgtcccaacagctgaaggaatttgaggggaagactttaggtgtcagtcaaccaaaaagaaaggcctggaacttccagaggatgaagaagagaaaaagaagcagcgaaaggagaaaaaaacaaagtttgagaacctctgcaaaatcatgaaagacatattggagaaaaaagttgaaacaggtggttgtgtcaaaccgattggtgacatctccaatgncttggntatttgctccaaccaaaggccaccnattattggctggnnacagcaaacatggagagaatcatgaaagctcaagccctaagagacaactcaacaatgggttacatggcagcaaagaaacacct

SEQ ID NO: 540253 - DNA, 154 bp, Homo sapiens
catgatctctggacggattctttggatatgtattctattgaggtgctcgcggattctccgtttccttctcgtgctgctggtgttcggggggccctcgcgcgtatcgggcggcggggatagtgttacggcaatcttggcgggttcttatgatttg

SEQ ID NO: 540254 - DNA, 541 bp, Homo sapiens
cagtacggattattggggagtaggtttggttatccaaggagcagtgtgagctccttgctattgggatatgggatgctggtgatttccagtaagtgacctcgaaaattactcaagctacacatactgttgattgtgatgaaatgccagttgaagcacctgtcctgcgagcttaggggtgctacaagttgaccactgcagcagtaaagatgactctgaagaatggcatgggatggatcctttcgaatgcacttgagcagcggtctccaaccacagggccacagagctggagctggatctaccatgaaagacctctgaatccaggaagagagattgactgagcaacatgtaattcgggagatggggtctcagcctgtcacccaggcttgactacagtaagtgctatcacagctcactgcagccttgaactcctgggctaaggatctccttactgagcctcctgagtagctaggattgttcctctgtgtccaggcggaggtagtagtgtatcaagtgatgagctcaactccggtgagggtctccc

SEQ ID NO: 540255 - DNA, 1510 bp, Homo sapiens
ggcagcggggcaggcgcgtggccgggccgcggcgcgatgagtggggcccgggcggcgcccggggccgcgggcaacggcgcggtccgggggctgcgggtggacgggctgcccccgctgccaaagagcttgagcgggctgctgcactcggcgtcgggcggcggcgcgtctgggggctggcggcacctggagcggctgtacgcgcagaagtcgcgcatccaggacgagctgagccgcgggggcccgggcggcggcggggcccgggcggcagcgctgcccgccaagcctcccaacctggacgccgctctggcgctgctccgcaaagagatggttggtctccgccagctggacatgtccttgctctgccaactgtacagcctctacgagtcgattcaggagtacaagggggcatgccaggcagcctccagcccagactgcacttacgctctggagaacggcttcttcgatgaagaggaggaatatttccaggagcagaactccctgcacgacaggagggaccgaggccctcctcgggacttgtcactgcctgtctcctccctctccagcagcgactggattctggagtccatctagagggtcttgggagggatgtgactgttgggaagcccttcctactggacacgctgtcatcatttgctgcttctcttgcaagaaagcacctccgttgtggacggtcctcgggcacaggggatgagcgctaccagtttcatttgtaggcagggagttctccgcggatgcatggtggcagtctgctttgatggcagcagtttctgcttaggtgacctagaggtcctcagcagtatcctccacacctatttattgaggtgcacctgctggggattcataatgagaatataacaagaggatctcggtgaaaggccttagtgggtgttttgtgtgaggtggcttgtagctagctacttccttacagatggtagagtattccaatcctctttgtgttagggttcttgcttccagtttgggatgtattaaaaccaccatttcactgcttcccttcctcaatatgctctgcagcttttcttgctgtttaaacctctcgcctcagctttatttatttgtaagctgcattactaactgcccagtgattcggtgaaagctttttactgaaaaagttaacatttctagtcatcccaatcaactggcttttttcaaccaaaattttatatcattctttgtctatcagatacgagaggaaggaagataatacgaagacatgttgaatagtgaaaaaaaaaaaaaagaacacaaaaactggggcaagccaatgtgatgtatcactcactgtaagatggcaaatgttttcatttttaagattccgaatgtaaactagtgtgctagaaagcaaaccacccgccactcaaaccagtaattaccttaagccttaatatatttattaaaatactttatgagaacattacactttgtaggttaaaaatgaggataaaatgctaaactatcaaacctcgtgccg

SEQ ID NO: 540256 - DNA, 220 bp, Homo sapiens
tccctgccaattgtgccactccgtccccctaagagcccgatgcctctgaaggtgctgggacaccagtctgccgctgcactatcttcttggcttacctggtgctgcctatcggtggtgagcgaatcccccattactaaatggactctctccactaccccgactatccctgcacagtaactccgatattttttttttttttttttttttttttttttttttt

SEQ ID NO: 540257 - DNA, 510 bp, Homo sapiens
  misc_feature (12)..(12): n is a, c, g, or t
tcactattcaanatgtcttcgtattatcttcccttcctcaatatgctctgcagcttttcttgctgtttaaacctctcgcctcagctttatttatttgtaagctgcattactaactgcccagtgattcggtgaaagctttttactgaaaaagttaacatttctagtcatcccaatcaactggcttttttcaaccaaaattttatatcattctttgtctatcagatacgagaggaaggaagataatacgaagacatgttgaatagtgaaaaaaaaaaaaaagaacacaaaaactggggcaagccaatgtgatgtatcactcactgtaagatggcaaatgttttcatttttaagattccgaatgtaaactagtgtgctagaaagcaaaccacccgccactcaaaccagtaattaccttaagccttaatatatttattaaaatactttatgagaacattacactttgtaggttaaaaatgaggataaaatgctaaactatcaaacctcgtgccg

SEQ ID NO: 540258 - DNA, 261 bp, Homo sapiens
tttaggttgagtgtatttattgatttattttcaggcagggtctcgatctgttgctcaaactggagttctgtggcgcgatctcagtttactccagcctccacctccccggctcaagcagtcctcccacttcatcctcccaagtagcttaaactacaggtgcatgccaccacatctggctttttttttgtattttttttttgtagaaatggggctttgtcgtgtggcccaggctggtgaaacccagtcactactaaaattcca

SEQ ID NO: 540259 - DNA, 373 bp, Homo sapiens
  misc_feature (224)..(224): n is a, c, g, or t
  misc_feature (297)..(297): n is a, c, g, or t
acacccccctcgggggttttttatatagcagggtacgcgatttgggatattcgacaccgtcgctgtgtcgctctcgccaacaagcaggcaaacccctatcatcggtctcctgtggctgggacaagctggtcaaaggtatggactggctaactgcaagctgaaagaccaaaccacatttggccacacaggctatctgaacacggtgactgtctctccagatgganttcccccttcctgattgccttatccttgggaacggcgccaaaacgggaacttggggcccaaaggggccccaantggttatacttggcggcgaattcgttcaaaaccgaaaaggggccaaaacaaccctttgtaacaaccgccttaggat

SEQ ID NO: 540260 - DNA, 1184 bp, Homo sapiens
cagcgcgcaagctcgcctctgccctcaccaaacgcatggcggccccgcgcgccgctcgcccaccctctcgctaaccaactggcaaccgcggccgctcgcgcccgacttctcgccagcacgcccatcagactctacgcctcctcctgcactgcacacgccgcgcacactcgcgcgaaacccgccgcgctgccacgctcggcacgctcactaacgcacgcgcgctcgcgctgcctctgccacctctgctgctcccttgcgagcgcctgcaccacccggccccaccctgcccccgccactgcctgcctacaccctgccacgctcctcctgcacccgcacagcgcgcaagcgactgcccaccgggccacactggcaccccccacacgcgccaccccaaccccacctctcacaccaccccacgcgccctccaagcgccctccgcactgcaccccctcacgccaaccccaaccccactcccccctcacccactcccaccgctcaccctccccccaccaccccgcccccaccgcaccaccgctgcgcccctgctccactctcctccaccctcccccgcccgcacccacaccctcccacccccccctcctcgccccctacgcgccacaccaccacccaaaccagccgcacctccccgcgcccaccccccaacccccccccccaccccacctccctcccacccacccccaccacccccccacacccctgccacaccaaccccccctcaaccactcacccacctcccacccctcactcccaacctccctccccacccccccccacccctcctctccccccccttcccctgcctcccccccccactctcccccccccaccccacctccccccccccccgcccccccccccccccccccccccccccccccccccaccccccctcccccccccccccccccccccccccccccccccccccccccccccccccccccctccgccccgccacccccaccccccgcccaaccccaccacccccaccccacccccacaccctaccccccgccccccgccccccccctccccgccaccccgacctcccccctcccaccacaccccccacctccccacactcccacacacctctcaccccactaccacactctccccacccctcctcctcccctctcccctccctccccccccctccctct

SEQ ID NO: 540261 - DNA, 325 bp, Homo sapiens
  misc_feature (5)..(5): n is a, c, g, or t
cgtantacacttccacaagctctcaagaaaaagcagacggataactgatgtgaatcggacagtttctatggcttttccttttttccatcccttcccgaccatcaaaagcatacctgctctaattaaaaaaaaaaaaaaaaaaaaatccaagtccagcggattggtgggtaagccgcactagaagggtatacatagtaaggtatatttatttacatacggaagtcctaaatttatattagaaaatggtaaataatcggggggtaaacatttttggaagatttatccttttgggtggtgggctgggagcgtgacgggggtaccgagc

SEQ ID NO: 540262 - DNA, 343 bp, Homo sapiens
tttccgagggaatataaggtgtcctgtgcgcacatcaaaagctgacctaggaccctatctcagacaaactgctacctccagtctcgatactttaaacacctctgcctaagttcttcccgcgattgtgcaccataaggtggtgaactccgatagctgttcttagatagctccagtgattccagggttcttagcttcggcgctcctgcacacgtgtctacgagttaatctcgcatctttccgcgggtctaattaatgcgtgagctctcaagtcctatcgcttatccgcaatacaggtttatcgttgggataaggctgtctgacactaagtcagagtgggcttgcg

SEQ ID NO: 540263 - DNA, 995 bp, Homo sapiens
gcctcatacgcatccgattcgggactcgaaggcgggcatgctaaggtgagcctgcagccccaggatgtgcccttaacgacactgctggaaccggattcattcgcaattgaagtaggcggacatatttccaggcgccagaagctcccctggagcgatagggagggacccgttcggaggggcctgtcccgtcgcctgacgtggtcaatctatgtgcgtgtctaccttaccccatgcgtcgcatgcaaggcgaaccggtcgttcatgtcaagatctcaactgcctacagggggcctcgtgggaaggggatggtgaaactgttgggaagcccttcctactggacacgctgtcatcatttgctgcttctcttgcaagaaagcacctccgttgtggacggtcctcgggcacaggggatgagcgctaccagtttcatttgtaggcagggagttctccgcggatgcatggtggcagtctgctttgatggcagcagtttctgcttaggtgacctagaggtcctcagcagtatcctccacacctatttattgaggtgcacctgctggggattcataatgagaatataacaagaggatctcggtgaaaggccttagtgggtgttttgtgtgaggtggcttgtagctagctacttccttacagatggtagagtattccaatcctctttgtgttagggttcttgcttccagtttgggatgtattaaaaccaccatttcactgcttcccttcctttgaatagtgaaaaaaaaaaaaaagaacacaaaaactggggcaagccaatgtgatgtatcactcactgtaagatggcaaatgttttcatttttaagattccgaatgtaaactagtgtgctagaaagcaaaccacccgccactcaaaccagtaattaccttaagccttaatatatttattaaaatactttatgagaacattacactttgtaggttaaaaatgaggataaaatgctaaactatcaaacctcgtgccg

SEQ ID NO: 540264 - DNA, 301 bp, Homo sapiens
caatcccaaaaaccccaatttaaaaaaattttttaattcccccctatgaaaaatttttttttttaacccaaaaaatggcttaaaagggtttcccaaaattaaaaaaaaaaagacccccccggccccaaatttttaaattcccaaccctgggttttgttggggggccggggaaagggattttccccctggaccccccccctttaaatttgcccatttaaattttagggggcttttttttttttcccccttgaggcccaattttaaagtctttttaaaaaaaccccctttattaaacccttta

SEQ ID NO: 540265 - DNA, 1305 bp, Homo sapiens
ctgaatcatgcgccgtgtggaaggaatgtgctggcaggcgcagatcgccggctgagtgttccactgaaattaaactcaagtgctgacttctcgttttttacctccccaccccttccctcaaggttggtctccgccagctggacatgtccttgctctgccaactgtacagcctctacgagtcgattcaggagtacaagggggcatgccaggcagcctccagcccagactgcacttacgctctggagaacggcttcttcgatgaagaggaggaatatttccaggagcagaactccctgcacgacaggagggaccgaggccctcctcgggacttgtcactgcctgtctcctccctctccagcagcgactggattctggagtccatctagagggtcttgggagggatgtgactgttgggaagcccttcctactggacacgctgtcatcatttgctgcttctcttgcaagaaagcacctccgttgtggacggtcctcgggcacaggggatgagcgctaccagtttcatttgtaggcagggagttctccgcggatgcatggtggcagtctgctttgatggcagcagtttctgcttaggtgacctagaggtcctcagcagtatcctccacacctatttattgaggtgcacctgctggggattcataatgagaatataacaagaggatctcggtgaaaggccttagtgggtgttttgtgtgaggtggcttgtagctagctacttccttacagatggtagagtattccaatcctctttgtgttagggttcttgcttccagtttgggatgtattaaaaccaccatttcactgcttcccttcctcaatatgctctgcagcttttcttgctgtttaaacctctcgcctcagctttatttatttgtaagctgcattactaactgcccagtgattcggtgaaagctttttactgaaaaagttaacatttctagtcatcccaatcaactggcttttttcaaccaaaattttatatcattctttgtctatcagatacgagaggaaggaagataatacgaagacatgttgaatagtgaaaaaaaaaaaaaagaacacaaaaactggggcaagccaatgtgatgtatcactcactgtaagatggcaaatgttttcatttttaagattccgaatgtaaactagtgtgctagaaagcaaaccacccgccactcaaaccagtaattaccttaagccttaatatatttattaaaatactttatgagaacattacactttgtaggttaaaaatgaggataaaatgctaaactatcaaacctcgtgccg

SEQ ID NO: 540266 - DNA, 502 bp, Homo sapiens
  misc_feature (66)..(66): n is a, c, g, or t
gacaaaatacaccccactcgcacctagtgagagccaccaacatcagtgcacagcctgtgtggctgnctcaggccaccgccaccacacacagatgtggacaccgctcaccattgacctcagtgggcttggcacagacgcttgacaggcctgcagccgccatccaggcagaaaccccctacttccacctcccctgcacagccttggactgtgttcctccagactcagggggaagcccccaagtagtcacagttagctcctccctattggtggggctgccatgcacctgtcccgggggtggggtgggtagagaatgacttgctttgtctgtggctcatataacatctctcaacatatggggtcaatgcaggactggagggcaccttccctaccggtaacctgtcctggacccaagacccgagatgagcgtgggtgagagcagctgccctcctgttggcttactgtggatggcgtggccctgcacgggtgggcttttgaatgccct

SEQ ID NO: 540267 - DNA, 476 bp, Homo sapiens
ggttaaagtctctcttcagcctgccgtcatgtctaaattctcagagtctcctaaagagctcgaagaggtgaggaagctcttcattggagggttgagctttgaaacaactgatgacgagcctggagggagccatcttttgagcaatggggaagcgctcacggactgtgtgtgtaactgatgagatccaatagcaccaaacgctccaggggctcttggggtctagtcagcatatgccactgtggaggagcgtggtagtgcgagctgagtgaaatgcaagggcgagcacggaaggatgggcatggggagaggaagtttgctggggaaagcacaagaaaattaaccggacggcctgggtgcttccgagcacgatacgcatgtcttcactgaccaggtgcccacttaaactgctgcatatacagactatcggtgggtggcttccacggaaggacctgaataacatgcagctaggagatgat

SEQ ID NO: 540268 - DNA, 613 bp, Homo sapiens
acacagtttaaagtgtcttggacatgtctcaagcccctccccagagagcaagcacaaggtggattccatatggtgggtaactcacgctccacctggtttttccacctcggtgcggtggtaatatttttgacaagggagggtgaaagtttttggttttccccatccccccaaagggggttgaaccccagcccccggaagcctgagaatgaatcctgaggggtttagcccagggtttgtccccggctttttggggggggccctcctgggaccagtgaaattgaagccccttactcaaagggggtgtttttttggttttgagggccggggtcccccgttcatttttttccgggaggaaaaaccccttttttacatccccgccccaaagagtctctccctttcagacatcctgggaagaaagaatttggcttttttttttttttttttttttggccatctgttttccctcttaggcttttaacccaaagttattgcttttacccccctccgattttaaaaactgagagcgatggggctaaattgaatttttgtatgccctgagaactgagctatgaaaagggttttattaaactgcgggtctgcctttatggattga

SEQ ID NO: 540269 - DNA, 1457 bp, Homo sapiens
gccatggaagctgctgattgttcttgaatttaaagtggagaataagggaccacaaattgcagggtttgagcattccatgtttttcttaaatgagcctgtctgcattttcaaaacgtgtgctttcaaaagagagctgtattttctgaatccagctgtgaatgtggagaccagccgtcctccaagggcatgtgagaacacaccgttgagatccaggctgcttctgctcggagagtggcttgctcggcggctccccagccactctttttctggaagggttggtctccgccagctggacatgtccttgctctgccaactgtacagcctctacgagtcgattcaggagtacaagggggcatgccaggcagcctccagcccagactgcacttacgctctggagaacggcttcttcgatgaagaggaggaatatttccaggagcagaactccctgcacgacaggagggaccgaggccctcctcgggacttgtcactgcctgtctcctccctctccagcagcgactggattctggagtccatctagagggtcttgggagggatgtgactgttgggaagcccttcctactggacacgctgtcatcatttgctgcttctcttgcaagaaagcacctccgttgtggacggtcctcgggcacaggggatgagcgctaccagtttcatttgtaggcagggagttctccgcggatgcatggtggcagtctgctttgatggcagcagtttctgcttaggtgacctagaggtcctcagcagtatcctccacacctatttattgaggtgcacctgctggggattcataatgagaatataacaagaggatctcggtgaaaggccttagtgggtgttttgtgtgaggtggcttgtagctagctacttccttacagatggtagagtattccaatcctctttgtgttagggttcttgcttccagtttgggatgtattaaaaccaccatttcactgcttcccttcctcaatatgctctgcagcttttcttgctgtttaaacctctcgcctcagctttatttatttgtaagctgcattactaactgcccagtgattcggtgaaagctttttactgaaaaagttaacatttctagtcatcccaatcaactggcttttttcaaccaaaattttatatcattctttgtctatcagatacgagaggaaggaagataatacgaagacatgttgaatagtgaaaaaaaaaaaaaagaacacaaaaactggggcaagccaatgtgatgtatcactcactgtaagatggcaaatgttttcatttttaagattccgaatgtaaactagtgtgctagaaagcaaaccacccgccactcaaaccagtaattaccttaagccttaatatatttattaaaatactttatgagaacattacactttgtaggttaaaaatgaggataaaatgctaaactatcaaacctcgtgccg

SEQ ID NO: 540270 - DNA, 369 bp, Homo sapiens
tacgagagtacctcctgcctagtgctgaaggagcttcatttgatagtgcgaggagagaggaataacaggcacaggagactgcgggacagaggcctagaagaataggcaaaggcgtacttcattctaaaggaacgtgagacatttggtttggccaaaactttaaggagttgagaagagacagggctttaaaaataagcaacagggccaggcgcggtggctcacgcctgtaatcccagcacctgggaggccaaggcaggcggatcacaaggtcaggagatcaaaaccatcctggccaacatggtgaaaccccgtctcttataaaatgcaaaaaattagccgggtgtggtggcgcatgcctgtagtcccacc

SEQ ID NO: 540271 - DNA, 465 bp, Homo sapiens
tttgtaagtcttaacccggaaattttggctttaattttgaaacccccttaagcctaaccaaaaaaaaaaaaggatgggtttttacccccgtttcccaaaaaaactctttttaagcaaggaggcaaggttttttccttcaaaaaaaaagtcaggagggggttcccccaccgcaaaagccatctcctttaagttaggagccctttaaacaaccctttaggtaaaaagaagtggggttcccccccccccaaaggggccgtggggggccggtcccccccaatgtaaccaaggatttttttgaaaaaaaggggcggcgcccaaagcctccccccaaaaaaaaaaaaagggtaaaattttaaaaattgttttttaaaaaggaaaccgggggggttttttttgaacaaccccaagtttggggccctttttcccccaaaaaaaaaaagccctttttaacccggaatttgggga

SEQ ID NO: 540272 - DNA, 1668 bp, Homo sapiens
ggcgtcgtgtttattttgcctgagctgatggataatttccgagatttaatccctttctctggtttcctgacatttccacttagagttactcttgtgtttatggccagaatgaaaggcatgtttactagtgtttgaagtttcaaaagtgggtctggcgttcttgctgactgctgcgggtactgctggacaaggccgtgcagaggccagcgcgcccggggcaaggagcgacctgcccgggtctggggcccccagccgcccccgcggcgagtgggaggcagcaggaggcgggctggattccgccctcggggagggccgggggtcctgggaccagagccaggcctcctgccctcgacgtcctgccggttgtgagccagagcctcggtacccccaccccctgcaacggctgcttcgtgggatctgaagctgggccgccccctgggcagggcagggatcggcggaggcaaggagctgaggagcgctggcaggttggtctccgccagctggacatgtccttgctctgccaactgtacagcctctacgagtcgattcaggagtacaagggggcatgccaggcagcctccagcccagactgcacttacgctctggagaacggcttcttcgatgaagaggaggaatatttccaggagcagaactccctgcacgacaggagggaccgaggccctcctcgggacttgtcactgcctgtctcctccctctccagcagcgactggattctggagtccatctagagggtcttgggagggatgtgactgttgggaagcccttcctactggacacgctgtcatcatttgctgcttctcttgcaagaaagcacctccgttgtggacggtcctcgggcacaggggatgagcgctaccagtttcatttgtaggcagggagttctccgcggatgcatggtggcagtctgctttgatggcagcagtttctgcttaggtgacctagaggtcctcagcagtatcctccacacctatttattgaggtgcacctgctggggattcataatgagaatataacaagaggatctcggtgaaaggccttagtgggtgttttgtgtgaggtggcttgtagctagctacttccttacagatggtagagtattccaatcctctttgtgttagggttcttgcttccagtttgggatgtattaaaaccaccatttcactgcttcccttcctcaatatgctctgcagcttttcttgctgtttaaacctctcgcctcagctttatttatttgtaagctgcattactaactgcccagtgattcggtgaaagctttttactgaaaaagttaacatttctagtcatcccaatcaactggcttttttcaaccaaaattttatatcattctttgtctatcagatacgagaggaaggaagataatacgaagacatgttgaatagtgaaaaaaaaaaaaaagaacacaaaaactggggcaagccaatgtgatgtatcactcactgtaagatggcaaatgttttcatttttaagattccgaatgtaaactagtgtgctagaaagcaaaccacccgccactcaaaccagtaattaccttaagccttaatatatttattaaaatactttatgagaacattacactttgtaggttaaaaatgaggataaaatgctaaactatcaaacctcgtgccg

SEQ ID NO: 540273 - DNA, 1181 bp, Homo sapiens
  misc_feature (1102)..(1102): n is a, c, g, or t
  misc_feature (1113)..(1113): n is a, c, g, or t
  misc_feature (1117)..(1117): n is a, c, g, or t
ggcagcggggcaggcgcgtggccgggccgcggcgcgatgagtggggcccgggcggcgcccggggccgcgggcaacggcgcggtccgggggctgcgggtggacgggctgcccccgctgccaaagagcttgagcgggctgctgcactcggcgtcgggcggcggcgcgtctgggggctggcggcacctggagcggctgtacgcgcagaagtcgcgcatccaggacgagctgagccgcgggggcccgggcggcggcggggcccgggcggcagcgctgcccgccaagcctcccaacctggacgccgctctggcgctgctccgcaaagagatggttggtctccgccagctggacatgtccttgctctgccaactgtacagcctctacgagtcgattcaggagtacaagggggcatgccaggcagcctccagcccagactgcacttacgctctggagaacggcttcttcgatgaagaggaggaatatttccaggagcagaactccctgcacgacaggagggaccgaggccctcctcgggacttgtcactgcctgtctcctccctctccagcagcgactggattctggagtccatctagagggtcttgggagggatgtgactgttgggaagcccttcctactggacacgctgtcatcatttgctgcttctcttgcaagaaagcacctccgttgtggacggtcctcgggcacaggggatgagcgctaccagtttcatttgtaggcagggagttctccgcggatgcatggtggcagtctgctttgatggcagcagtttctgcttaggtgacctagaggtcctcagcagtatcctccacacctatttattgaggtgcacctgctggggattcataatgagaatataacaagaggatctcggtgaaaggccttagtgggtgttttgtgtgaggtggcttgtagctagctacttccttacagatggtagagtattccaatcctctttgtgttagggttcttgcttccagtttgggatgtattaaaaccaccatttcactgcttcccttcctcaatatgctctgcagcttttcttgctgtttaaacctctcgcctcagctttatttatttgtaagnggttctaatgncagngtcgggaaggtttacggaaagtaacattcagtatcacaggttttcccaaattttccttgttcga

SEQ ID NO: 540274 - DNA, 1293 bp, Homo sapiens
ggcagcggggcaggcgcgtggccgggccgcggcgcgatgagtggggcccgggcggcgcccggggccgcgggcaacggcgcggtccgggggctgcgggtggacgggctgcccccgctgccaaagagcttgagcgggctgctgcactcggcgtcgggcggcggcgcgtctgggggctggcggcacctggagcggctgtacgcgcagaagtcgcgcatccaggacgagctgagccgcgggggcccgggcggcggcggggcccgggcggcagcgctgcccgccaagcctcccaacctggacgccgctctggcgctgctccgcaaagagatggttggtctccgccagctggacatgtccttgctctgccaactgtacagcctctacgagtcgattcaggagtacaagggggcatgccaggcagcctccagcccagactgcacttacgctctggagaacggcttcttcgatgaagaggaggaatatttccaggagcagaactccctgcacgacaggagggaccgaggccctcctcgggacttgtcactgcctgtctcctccctctccagcagcgactggattctggagtccatctagagggtcttgggagggatgtgactgttgggaagcccttcctactggacacgctgtcatcatttgctgcttctcttgcaagaaagcacctccgttgtggacggtcctcgggcacaggggatgagcgctaccagtttcatttgtaggcagggagttctccgcggatgcatggtggcagtctgctttgatggcagcagtttctgcttaggtgacctagaggtcctcagcagtatcctccacacctatttattgaggtgcacctgctggggattcataatgagaatataacaagaggatctcggtgaaaggccttagtgggtgttttgtgtgaggtggcttgtagctagctacttccttacagatggtagagtattccaatcctctttgtgttagggttcttgcttccagtttgggatgtattaaaaccaccatttcactgcttcccttcctttgaatagtgaaaaaaaaaaaaaagaacacaaaaactggggcaagccaatgtgatgtatcactcactgtaagatggcaaatgttttcatttttaagattccgaatgtaaactagtgtgctagaaagcaaaccacccgccactcaaaccagtaattaccttaagccttaatatatttattaaaatactttatgagaacattacactttgtaggttaaaaatgaggataaaatgctaaactatcaaacctcgtgccg

SEQ ID NO: 540275 - DNA, 81 bp, Homo sapiens
gcggccgcctactactactactgctcgaattcaagcttctaacgatgtacagggacatggtttctaataaaggattcaaac

SEQ ID NO: 540276 - DNA, 846 bp, Homo sapiens
agcggatgtgttttccaggctggtctcaaactcctggccacaagtgatcttcctgccttggactctcaaactgctgggattacaggtatgagccactgtcagcctggccctttcctaatctgtgcggtattgcatcttttcttgttgcctttccgggtcattctgcacggttctttggagagtatttcctgcgtctgttgttcattcccctcagggagcatgagttggcccttcagtattagactattgtagggtctcgagcacgaatagaccaagtgcttcgcgatcgctatatagtaggggacctccttgagctaacactttgtagatgaggtgtccattcgttctcctttggatagctttgttatctgcgtcatttctcttccagccatagagttgcgtatatacgttatccataggttgggactcgctatgtatcaagttgccattgtagttagactcagcaatggcaagtggactacacacgcctaatctgcatggctagtgtcctaggcgccaggaacaggtagggaacggcggcttaacgatagccagtcttagtggcttccataagtcgacgggctcgtctgactttttgttgctggatggcagcggactggatgtgcgtttaccgtgcagtactaaagtttttgctctctcggggaggactgcctggtgacgcaagtgccgcataaactcctatatgccgtgctatcgttattcccagaagtaggcaggaattgtcgtcgtgatcagtccccattgctcatctgaaccggttcttaggcttccagggtttgctcatatacggtgtcacctctgatctgtggcctgagggatgcccct

SEQ ID NO: 540277 - DNA, 730 bp, Homo sapiens
  misc_feature (157)..(157): n is a, c, g, or t
  misc_feature (168)..(168): n is a, c, g, or t
  misc_feature (199)..(199): n is a, c, g, or t
  misc_feature (201)..(201): n is a, c, g, or t
  misc_feature (203)..(203): n is a, c, g, or t
  misc_feature (208)..(208): n is a, c, g, or t
  misc_feature (216)..(217): n is a, c, g, or t
  misc_feature (250)..(250): n is a, c, g, or t
  misc_feature (265)..(265): n is a, c, g, or t
  misc_feature (302)..(302): n is a, c, g, or t
  misc_feature (366)..(366): n is a, c, g, or t
  misc_feature (382)..(382): n is a, c, g, or t
  misc_feature (400)..(400): n is a, c, g, or t
  misc_feature (403)..(403): n is a, c, g, or t
  misc_feature (416)..(416): n is a, c, g, or t
  misc_feature (425)..(425): n is a, c, g, or t
  misc_feature (432)..(433): n is a, c, g, or t
  misc_feature (463)..(463): n is a, c, g, or t
  misc_feature (468)..(468): n is a, c, g, or t
  misc_feature (508)..(508): n is a, c, g, or t
  misc_feature (513)..(513): n is a, c, g, or t
  misc_feature (515)..(515): n is a, c, g, or t
  misc_feature (530)..(530): n is a, c, g, or t
ggagtcagccaggagtagcaataggttggcttggactcccttaggtggagaaatcatgtcgtggaggcgagtcgaatggatggcgagggccagttaactctgaccggccagctcggggacgtgatgaaggagtccgcccacctcgctatcagctggntccgcagcaangcaaagaagtaccagctgaccaatgcttatngnangtttngctcttcnntgacaacacagacatccatctgcacttcccagntggagcttgtcacanaaagatggaccatctgctggagttaccatagtaaccntgtctcgcctcactttttagtgggcggctggtacgttcagatgtagccatgactggagaaattncactgagaggtctgtncttccagtgggtggaatnacngacaaagtgctgncggcacacngagcggnnactgaagcaagtcattattcctcggagaantgaanaagaccttgagggaatcccaggcaacgtacgacaggattnaggtntngtcacagcaagctgnctgatgaggttcttaagtgcagctattgatgggtggtttacttgacaagaccagacatgggtctgttaaatagcacaactgtaggtaccaaatctcaagttttatagacatttaagttatgaagtgctcaaaggtactgagaagttgattttatacagacattaggggtatgcagatgtcctgatagtaaacatatcaca

SEQ ID NO: 540278 - DNA, 1017 bp, Homo sapiens
gatatcgtcgaccacgcagtcggggattgaagggtcctgccggatagtttaccctgtccggcccagtgccactgccccccgaggctgctagacgtaggtgttaggcatgtccacccacaccgcgcatcccacggcactcggggacacccaagctgcagaaaagagaagactactagatacagtaaaaaggcgagtgagtgcaaaagacacgaagaaaagggttttacagtaagacacgggggatctggcttggactactgagcatgaataagcaatcatatagtgacagtagcatggatagagacccacacagagaactgatccagccaagccacagactcatcaggcaacatgtggatcccagacaaacagaagcccagaaaacacacgaaagatccaacagcgagagagcagggaagacaccacaagccatacaagacgtgcgtgacaccaacatcaaaacagcaataggcataagacacacatgaagagagaggagacagagagacagaaacaaaaggaagacagagacaaataacaagacacacagaggaaccgaacaaaaccaacaaaaaccaccaggaaaagcatacgcagagaaaatggcaaccaaattacacagaaccaggaaacaaaaaaacagaaacgggatacgacaagaagagaacaagacagaaaacaacagaccaagacaaacacaaccagagaaaaacacacaaaaaacaaaaagacaacaataaaaaccaaagaaaaagaaacaagaacaaacagagcagaaaaaaacagaacagaaagaaacaagacaaaagaagagaggaaagagaaagcgaacaaacagacgaaggaaagagaagacaaacaaaacatacaacaaaagaaaagaaaaagaaacgaagaaaagaaaggaaacagacagagaacaacacgaaaagcacaagagagaaagcaaaagacaagaaaagaaaaaaagaagagaaaagaagaaaaagcaagcagaacaagaaagaaaagaaagaa

SEQ ID NO: 540279 - DNA, 908 bp, Homo sapiens
  misc_feature (908)..(908): n is a, c, g, or t
catctttgcagagcacggtcatcacagcgctaagctcgcactgatcctttacctgaattaggtgctataaataaagatgcgagctttgattccagtgctaaccaaaaagataaagcctcgttgccagagatagctgtcgcatcatagtatttcttcacgcaagcaagcgaatccataatcacattctaatagctatccttcttcaataatatacgtctgcctgagtacaggatgaacgctataaacactaatacgtgaccgaatcaatttcaattcattcattgaataatcataatgggctatatgcatagtaaatactaggaatagcctcgcgctttctacttctgagtcccgaggaatgttgaccctggggagccctcgggacatccgggcgtgagtgtaatgtcctcagcatggacagaatcatgtagtgcgcccgcattctcagttcaatataacgcaaattcttcgccgcatcattaaaaacgttaatgtctggcctacctgcaactgctcattcgaagtgcattaatccatctagtagtcagggcagtgtttgatgcggtggacttacagaacaaagcccagcataagtcctcaaatcttaggcaatatctcctcaaatatagccacatagtggtgaataattagcacgcatctacgcggtacgaagcgctaagataaccagttcttgaatgttaactatgtataattagtcctagagtacgtgagcgcaatttcgctactactcgaattagagtcgagaaagcaggaacctactaatagttcggacttggagcatgtaatactgagtaaaaccgttagttcatcaacctcgctgccctagaggcgcccggtaaccgggttttggcccatgggcgatgcgagaatccccaaagaaaggcgcn

SEQ ID NO: 540280 - DNA, 743 bp, Homo sapiens
gaagaggctgcagaactcagccagttagtaaagctttcgaattgcccccttctccaagaaattgtggccagtgcagaccgattcctctccaacccctgaaatagtattatataaatatccaaagcaatgaggatctcctctcctggtttacccccttattgaaagcataaggagccagatggagaagaccatgcaccttagctgacctcctgtggaggcccaccacataccaggctccttggaggtacccacagtgatcagctgaagagtggcttgtctcctagccagaactgccccttccgggcagaatggtgaccctctagcatctcctgagatgagagcataaggctgagcaccactgtagttatattgtgagttttcctaacatttcgggtagcccccaacctccccaggtcttctctcctctgctgccttcatttcttccttctgtccttccatctcttactcctggcatctgcccttgacatgaaccccaagcccacctgtgatgattgatcaaatctggttgtatattcggctttagaaaggtacttaggacatgagtcatccccttgagaaattataccccaggagggagattggcagttggggaaggtagcttaaggaggtgctgggaagggccaggactgggcccaagccgcgttgcttctgggtgcactaaactggtgtcaaactctgcgcaactgggcaaaagggggcccggttcaagcgtctaaagccag

SEQ ID NO: 540281 - DNA, 104 bp, Homo sapiens
gcattgtggtaagttacagctcccgaggttcaccaggttctgcagaccctcgatcttggtcagccggttgctctgataactgaggactgtcaggttggtgagcg

SEQ ID NO: 540282 - DNA, 205 bp, Homo sapiens
gctgtatcttctggtgattctagaggatcccggacagcacgcgctaacaattaatactataccctccatatatggagtaaggtttagaagaaatcccctgaggtccccattactaaacccacactcaacagaaacaatgcatacattattattcttgcacggactacaagtacgatcattgatatgattaaccattcgttgtatt

SEQ ID NO: 540283 - DNA, 146 bp, Homo sapiens
tacctccagatatacacaccctctactgtgtcccagccagcatgtacctgctcttccaggagtctggacacaacgaaggggagcttatctggagcgcagtgagcgccgaacgatcgacattaactaacgacaagaaaaatgacctg

SEQ ID NO: 540284 - DNA, 512 bp, Homo sapiens
tggctccggcacggggtctcttctgaggctgtggccaagatgtcagtggggctgtgggcatcaaaggcatgaccgcccctagaggatgcactctgagaaagcttgttcatgtggctggcaagttcgcactagctgctggcaggaaacaacaaatccctgccatgtagatctctccacagggttgcttgagtatcctcgcagcatggcaactggcttctccagagcaaataattccagagagggcaaggtggaagcctcattgtcttttttatttttgagatggagtctcactgtgtcgcccaggctggagtgcagtggcgtaatatcggctcactgcaacctccgcctccctggttcaagtgattttcctgcctcaaccacccaagtagctgggattaccgaggtgtgccatcacgcccagctaatttttgtatttttagtagagacagggtttcaccatgttggccaggctggtctcaaactcctgacctcaggtgatccaccagccttgg

SEQ ID NO: 540285 - DNA, 1202 bp, Homo sapiens
  misc_feature (44)..(45): n is a, c, g, or t
  misc_feature (76)..(76): n is a, c, g, or t
ttccttttagaaaagcaggtttattggtcgggctgccccaggannagcaacgtgagaggttccccaagcccacagnaaactgcatctgcccacagctcaggccccttcaggccatcagcaccaagggaccttgtcccactaatccccaacctccctctggcagaggggtcttcagccattcagaggagagaagagaaccgagaaagggaacaggaagaaaaaaaaaaaaaagcaaagcttgtgctattgttataacgggtttcgtgctccccaggctcccttcccccaatccctttaaaacaagtgacctgcagtctcttaaaaagccagggccagtagcaaggtctaaggaagccaggttggggggaaaggaagcgaagcctctcggggcccttccctttcaggccttatgaactggggaagcaagggcgctgatccttatgcttctagacaaaccccccttttaattggcggaggaaccaagggagactcgatgttcctggcagaaccctggatcgctgttctttgagaaccccagttccgagacagaattcaggcctcttggaactgggagccaatcattcccttttaccccgcaaagaatttcgggaaaacgcaccccaaagggacaaggcaaaccatttgaggctcatgggcctagcctcttgagagctttataggatacttagcctctagggaacggattcttccctttcttttaaagcagcgttctcactcttgtagaccttaggaatggagccacagaggcaccccttcaatagctcacttgcagccttaaagctcctgggcaactggcggatacttacccgcgtttagccttcaccaagtatctgagaaccacaggcccgtgccaccgagtgctccctcggaacgcgagcttggcacggatctgccggagttgacccgggcttggccgctcttgatgtttcttccacatccgctcagctctcaattggtgtgcgggcggacctgtttccccttattcccgcctgtttgagcccccttttgggaccctaattttcctgacttagaattgccttcccgtggggtccccacaacccttaggaaccgaggcgcggatcccggtggaatacacccaggctgtcttgacgtattacggccgataacctcttaacatggctaactcggtccccttttatgagtccgcacacaacacacaa

SEQ ID NO: 540286 - DNA, 411 bp, Homo sapiens
  misc_feature (71)..(71): n is a, c, g, or t
  misc_feature (89)..(89): n is a, c, g, or t
  misc_feature (209)..(209): n is a, c, g, or t
  misc_feature (217)..(217): n is a, c, g, or t
tccttttaagtaaggttagtaattgtgccttccttttaaaaccaaaattacatataactgaaaatcctaantcctacagttcaataatnggaattttaagagctcaaaagctgcttccttagtcaggtgcagtggctcatgtctataatccccagcactttgggaggccgaggtgggtggatcacttgagtgcaggagttcgagaccanccctgganaacgtggtgaaaccccatctctacaaaaaaatcgttaaaaattagctgggcatggtagtgtgcgcctgtagtcccagctacttgggaggctgagatgggaggattgcttgggcccaggagatcaaggtgacagtgaaccttggcatgcgactgtactccagcatgggcaatagagtgaaaccctcctcaaaaaa

SEQ ID NO: 540287 - DNA, 437 bp, Homo sapiens
  misc_feature (5)..(5): n is a, c, g, or t
  misc_feature (68)..(68): n is a, c, g, or t
  misc_feature (117)..(117): n is a, c, g, or t
  misc_feature (128)..(128): n is a, c, g, or t
tgaanttcaaaagtggttatctttctgaaaatgtgctggttgccttgggcagtttgatagcggagccntactccatcaagcatgaggggccaaaactggtcaatgacttggtaccgnatccggaggcngtaggcgagtataccggcaacggttcggacctggagttggacctgcacaccgaaaatgcctttcaggcttatactcccgtgaacacctgccgctggctcttctgcttctcggcgttcgcggtgaccctgccggggtgggcccgaaaacctgggtggccgatgcgagggaagcccttcaggttctggaacaggccgatattgaaatcctatatggcaaacatttcatcattcgtcagccctaccgctggaggaacagtgccgcaggcgcgaaagaaactcatgtgtacccaattctgagcggcccgctga

SEQ ID NO: 540288 - DNA, 316 bp, Homo sapiens
ggtctaccagcgcacttcaagtctaccaataatctcaaggtctcccagataatcctgcagcttccagaaaatcccacatcttccagacaatccatgccttcccggacaatccatgtcttccaagcaagctccaagatcttcccagtagcatcaaagtctacacagcaaatcccagtctacccagcaatatactggtcttcacaccaaatcccagcatcttccaggcgcaatcccacgtacttcccaggcaacatcccatgtacttcccaataacatttccaaggatcttccatccaaataccagcatcttcccagc

SEQ ID NO: 540289 - DNA, 204 bp, Homo sapiens
tcggatcaagcggggaaccagccccaccccggccgggtccaggtttatgagaagtgatagtgtagtagatatttgggagagcataggggctaaaaataaagcttcagtggagcttccggttcctgggtggattacttttacatgtacatgtcaatcttttccctttcagtcttcccagctggctcagaggggtacggagctcga

SEQ ID NO: 540290 - DNA, 1386 bp, Homo sapiens
  misc_feature (307)..(307): n is a, c, g, or t
tccccgggttctttccccctccccgcgcccccccccccccccggcccctttccccccccggggcgggggggcccccccgcacgtgtgtggggccgcggggggctgcgggagggtctctcacacagcgcgcgcctccgccccgggtgttcactacaacggggttctacacgacggggcgcgggcgggcggggaggggtgctttccccttccgcgccccggtgtggggcccgtgtgtgctttcttgcgcggggggcacacacaccttgccgcgggtgtctccccacgcgggggggccctctcgcgcccncggggggggcttctccccccggtgttctcacacacgtgtgttcttctcttttctcaccgcgcgcgtggggcacacaccggtggcgcctccacactttgtctcaacatttaccacgccggggttgtatctcccactctccacacctccaccacatatatctcatcacactcgccccgcgcgctggtactctcacacccccgcgtgtgtgtggggaccgcggcggggactcttctcgggcgcacatgtgcgacatcccgcgcatatacaccgcgcggcggggggggccctgtggcacacatcgggcggggggccgcgcgcccattatcccccccccgcgtgtgtgtcactcctatctcacacgtgtggttttgtgtggcgccaccccctttttcatatcattttggtcccacactgtgtttggtttgtcccacccactacgtatttcttgtgggcaccaaccagccctctctgcgcgcttcctctctctctgagagacgatgtccgcccaccaaccgtggggcccgccggtgcatcttaccgacggcgggggggcgcccaacctcccttctgtggggtcctttggtgtgcctccgggaggcgcccccctatatattctcgcgcgtgtcatcccccccactcctctcgtggtctgggggggcgccccctatcccatgcgggtggttgcgcccccccttttggttttcttactctcgtcggggacttttgtggcgcacttacatgggggggccaccacttctcaagcaaccacgtttcccgcgggtgatgtccccctcatactaagagaggacactccatgtgagacgacaactgaaacagagtaggggcgccccccaccactacaccttgttgtcatatccctcctcataaaaagaagaggaccacgggcaccacatgtgtgtccccccaaagagagagtactaccacacttgcgggggggaaaccaccaaaccgggagggagcgcgaaacaataaaacccatctgggggagggggaaacaacaatagagtatgtaaccatcacttgtagaaagaaagaacgcccgccggttttttaacacc

SEQ ID NO: 540291 - DNA, 280 bp, Homo sapiens
tggagtcaagcacggggcaggggctcatgagtccagttctttacatgatgatagtgagatttctttgaggcatctgagaggagagatcaaatgagccatttggtggtgtttgactctcagaagagaagtctattcgtgattgtgagtgtgggaaccatcagagtagttacgtggtcatcaggaccagctctgagatcccttaaggagagcagattgagggagacatgaggtggttctatggctggactttgaagaaagccagcatttaaggacggctaac

SEQ ID NO: 540292 - DNA, 836 bp, Homo sapiens
  misc_feature (824)..(824): n is a, c, g, or t
agcggggtgacgccatctggagcgcgcttggaatccagcaggcggttgctgccgcgtcttccacaacctccgcggtctggagctggcctcccccaccgccgccccaaccaccggccccgccgccatcaccaccaccgtcacctccgccgctgcctccttggggccctcctccttcaccgcccccttagccacctctacacattctaggctttctgtcctggagaagaagctataatcggtttccttgtgggcccggtgcgcagccatggcggacggtggcggcggcggcagcggcggtgcgggcccggcctcgacccgggccagcgggggcggcggccccatcaacccggcctcgttgccccctggcgaccctcagctcatcgctatcatcgtggggcagctcaagagcaggggcctttttgacagcttccgccgggactgcaaggctgacgtggacaccaagccagcttaccaaaacctgagccagaaagcggataattttgtgtcgacacatctggacaagcaggaatggaatcctccagcaaacgacaaccaactgcacgatggtctgaggcagagtgtggttcagtcagggaggtcagaagctggagtggacaggattagttctcaggtggtggatccaaaactaaaccacatcttcaggccacaaatagaacaaataattcatgaattcctggtggcccagaaagaagcagctgtgccagcactccctccagagccagaagtccaggaccctccagctccgtctcaggacacttcctaagaatatgcctgacagcttttgaaagcgctattaatttagnggagacagaaag

SEQ ID NO: 540293 - DNA, 2333 bp, Homo sapiens
  misc_feature (1659)..(1659): n is a, c, g, or t
  misc_feature (1830)..(1830): n is a, c, g, or t
agcggggtgacgccatctggagcgcgcttggaatccagcaggcggttgctgccgcgtcttccacaacctccgcggtctggagctggcctcccccaccgccgccccaaccaccggccccgccgccatcaccaccaccgtcacctccgccgctgcctccttggggccctcctccttcaccgcccccttagccacctctacacattctaggctttctgtcctggagaagaagctataatcggtttccttgtgggcccggtgcgcagccatggcggacggtggcggcggcggcagcggcggtgcgggcccggcctcgacccgggccagcgggggcggcggccccatcaacccggcctcgttgccccctggcgaccctcagctcatcgctatcatcgtggggcagctcaagagcaggggcctttttgacagcttccgccgggactgcaaggctgacgtggacaccaagccagcttaccaaaacctgagccagaaagcggataattttgtgtcgacacatctggacaagcaggaatggaatcctccagcaaacgacaaccaactgcacgatggtctgaggcagagtgtggttcagtcagggaggtcagaagctggagtggacaggattagttctcaggtggtggatccaaaactaaaccacatcttcaggccacaaatagaacaaataattcatgaattcctggtggcccagaaagaagcagctgtgccagcactccctccagagccagaagtccaggaccctccagctccgtctcaggacacttcctaagaatatgcctgacagcttttgaaagcgctatttaatttttggtgaagaaatggattcggttacataagagtgcagtttcagattgaagataagccaagttcatcactgagctcaagatttccacctcgaccatgagcagtgaccagattgaaagggaagcaagttcgccagagagaaagttgaccgtggtacccccctgcattgcgctgccatttggccagcctttccaagggcatgacaccaagcacacactacagagagggaaacactaccgcgacccaggattgtcctgaaacagacatctatacttgaacatggagactgcacatggattttagggtttgtgctctgagataaacgaaagctacagcgagagaacataaccaatcccaaagacaatttcaaagaacaatgacagtaaaggttaactgggaggaatatttgacagtacttatttgatattgtctctcagagttgcaaactagattgtacacaacattagtgtcagatagctttgaagttgtgaccttcttgtacatgaatcttctagccagtttcctttcctttgtaagagataacaaagcatgaaaccctagaatgagtgagaagttcagacattaggtataaggaaactcatttgcagactctctgtccaagaatgcttcctgtcttgcaggggctagtgagtcttgggtgtgtttatgttatgctcacatttgtgttttatttgaaaagtggatggtcaataaatggcttatctttcaactgcaacaacaaaaaagaaatgcagatttacatccttttcctctttaagctccgtcagttttctgatatttctagaaggtcagacacctggcatggtttatgaggcccgngataatggggcccctggtcacctctgctgccccgtacactgtcatttctcatatgacaaccatgcccatgactatcctggacaccctgtgttccctctgctcactgtgaagggaatgccctcaaccactcctaccctcctttaagactcagctcctgaggagccacacatngtctaagcaggagtgacagactccttcctctgtgctcccatagatctcataagggatgaccacacttaactaatagtagctaaggtctaaacgaagcacttggctctaatgctctacagcttggcagtgttactaaacgcttaacttcgctttaccgtagtaagtcctcatgatctaattgacgaaatcggatcttattcccatttaatacccatttattaatgttgaaaccaaagctctcgacactggctaagtggagagggatggggctgaggccggtattggagccagaagccctcacttatgagacccagtttaagccatgcgtgtgaagacaaaacaaacagtcaaccaaagtgaaacaggcactagggcgtaacagaatctggtaaacccgacttaaagtggggaggtgccaaccaaggacaaggaataagataaggaacaaatccattaccataaaccccaggacctaccgcaattacaaggagaccacacaaacg

SEQ ID NO: 540294 - DNA, 1553 bp, Homo sapiens
agcggggtgacgccatctggagcgcgcttggaatccagcaggcggttgctgccgcgtcttccacaacctccgcggtctggagctggcctcccccaccgccgccccaaccaccggccccgccgccatcaccaccaccgtcacctccgccgctgcctccttggggccctcctccttcaccgcccccttagccacctctacacattctaggctttctgtcctggagaagaagctataatcggtttccttgtgggcccggtgcgcagccatggcggacggtggcggcggcggcagcggcggtgcgggcccggcctcgacccgggccagcgggggcggcggccccatcaacccggcctcgttgccccctggcgaccctcagctcatcgctatcatcgtggggcagctcaagagcaggggcctttttgacagcttccgccgggactgcaaggctgacgtggacaccaagccagcttaccaaaacctgagccagaaagcggataattttgtgtcgacacatctggacaagcaggaatggaatcctccagcaaacgacaaccaactgcacgatggtctgaggcagagtgtggttcagtcagggaggtcagaagctggagtggacaggattagttctcaggtggtggatccaaaactaaaccacatcttcaggccacaaatagaacaaataattcatgaattcctggtggcccagaaagaagcagctgtgccagcactccctccagagccagaagtccaggaccctccagctccgtctcaggacacttcctaagaatatgcctgacagcttttgaaagcgctatttaatttttggtgaagaaatggattcggttacataagagtgcagtttcagattgaagataagccaagttcatcactgagctcaagatttccacctcgaccatgagcagtgaccagattgaaagggaagcaagttcgccagagagaaagttgaccgtggtacccccctgcattgcgctgccatttggccagcctttccaagggcatgacaccaagcacacactacagagagggaaacactaccgcgacccaggattgtcctgaaacagacatctatacttgaacatggagactgcacatggattttagggtttgtgctctgagataaacgaaagctacagcgagagaacataaccaatcccaaagacaatttcaaagaacaatgacagtaaaggttaactgggaggaatatttgacagtacttatttgatattgtctctcagagttgcaaactagattgtacacaacattagtgtcagatagctttgaagttgtgaccttcttgtacatgaatcttctagccagtttcctttcctttgtaagagataacaaagcatgaaaccctagaatgagtgagaagttcagacattaggtataaggaaactcatttgcagactctctgtccaagaatgcttcctgtcttgcaggggctagtgagtcttgggtgtgtttatgttatgctcacatttgtgttttatttgaaaagtggatggtcaataaatggcttatctttcaactgc

SEQ ID NO: 540295 - DNA, 589 bp, Homo sapiens
  misc_feature (139)..(139): n is a, c, g, or t
  misc_feature (205)..(205): n is a, c, g, or t
  misc_feature (273)..(273): n is a, c, g, or t
  misc_feature (293)..(293): n is a, c, g, or t
  misc_feature (331)..(331): n is a, c, g, or t
  misc_feature (341)..(342): n is a, c, g, or t
  misc_feature (348)..(348): n is a, c, g, or t
  misc_feature (359)..(359): n is a, c, g, or t
  misc_feature (361)..(361): n is a, c, g, or t
  misc_feature (383)..(383): n is a, c, g, or t
  misc_feature (390)..(392): n is a, c, g, or t
  misc_feature (397)..(397): n is a, c, g, or t
  misc_feature (403)..(403): n is a, c, g, or t
  misc_feature (412)..(412): n is a, c, g, or t
  misc_feature (447)..(447): n is a, c, g, or t
  misc_feature (457)..(457): n is a, c, g, or t
  misc_feature (491)..(491): n is a, c, g, or t
  misc_feature (540)..(540): n is a, c, g, or t
  misc_feature (588)..(588): n is a, c, g, or t
tccattaaagagtgttcgcagacaaagtttctgaaagattagagaaggatcccccccaagattgccccaacactgaactacagactaacactatgttagttaaataaggagacagctttcgagaagtatacattctctnataaaaatagtttattattttgaatgatttaatggttttctacacaatttacatcacaacatgtanattttagcagtaacatctgattctaacagacatcatgctattcctttcatagagccttcagagattcnatgctaacaaatttccttanttggcatcaaggcctgatcactttagaggcttttaagnaattatttanngatgcnaatgctctgantnaaggtactatcccatcactgancccacannnacaantctacnatttaaaangctcgatggaaaaattctcaatcctgaatccctanggaagggcangagaaagtgccatggtgtattaagactcacagtntttagccttatcctacatgcatctgagatgcaggtaacttattgtacantgctgtgttctgtccagataatgagcacttttgtacggaactgttggnc

SEQ ID NO: 540296 - DNA, 203 bp, Homo sapiens
tgattttagagttatatgtgaaagttccatggcatatatacatacccataaaacataggtaatttcaaatgctatcagttacttttactaaaataccgtattactattaccatgaatgtttatttcatctcttgtggaaattgtcatttcagtgacaaagattttgggggtagtttgtgtccactctgtaatctccgaacata

SEQ ID NO: 540297 - DNA, 286 bp, Homo sapiens
gctcgacacagtgatgccctaatatcatcaaatgagcagtatatatttagctttccccaaatgtgcccaaaacattaattataaatattcttttaaactaggatctcattaaggagtatacattgcaattggtcattatgtctcataaatctcttatctagaatagcaacccctccacttttcttcatgacatcaactttttgaagtccagttctcttatacaatgtgtcattttttggatttgcataactgtttcttcatagtctcatttaacccgtcgacgcgg

SEQ ID NO: 540298 - DNA, 201 bp, Homo sapiens
  misc_feature (38)..(38): n is a, c, g, or t
  misc_feature (77)..(77): n is a, c, g, or t
  misc_feature (91)..(91): n is a, c, g, or t
  misc_feature (103)..(103): n is a, c, g, or t
ccaagtgtgcgtgcgctggtgctgcaggagcttgcgantctcgcgaaagcctttccgcactcggcgcaggggaaggnttctcgctgctgtngtgcgcctggtntgccgcagccccgccacacgcacgaagccttgccgcagtcgggacaggcgtgtgccgtgcgcccgcgtggatcttcaggtgctcggccaggttggagc

SEQ ID NO: 540299 - DNA, 655 bp, Homo sapiens
gacttggatgtcaagggaatggaagctgaacctggtgaggctggaaatatgcccatagcatggacctcctcctgacgtgtctgtccgtcgtgtcatcgtgagaactcgtgctgtcctagacaacaattcacgagtaccatcatgtaatacaaagcctctcctggttgtgcaaggacccttcatgggacacctctaccttcgccaacacagagcataagcaagaaatgccatatagcgagaacattataccacgtcccgagacttgctgttagcgtagacccatgataaaactcatagctcgggggcgccacttatctaggtaaccaaccttggctgccaattaggtgtgaaaacccgactacccttacacacagtgcaccgaccttccacaaaagagtttgacggcgccaactccactagggtgggagaccatgggcggtgtttatcgacggaagaaccgccccaattggagacttcttacgagacagccatacattacacgcccttagtgtggtgtgtgaccgaacaccaaaacgttgactcatactacacaagcaactcgatgcgcaaagcggtcgagcatagcgtgagctccccaaagctaacagtctttccccataggggaatcgagcgtaaggccaacaccgtagtccaa

SEQ ID NO: 540300 - DNA, 142 bp, Homo sapiens
ggaacaaaaaatatcacctctcatatggctgtcttctctttcctgtggacactattatagccacaaatcccaggtgatgacctaacaatcatttctaggcactaactgctgataattaacctacctatttcacgatctccgc

SEQ ID NO: 540301 - DNA, 711 bp, Homo sapiens
gcctcacccatatgtgtgcacgtgcgaccgccggagctcccccatgccgtcactgccccggcacctcgagcatcttcccgggtttactctttcctaatggaatccgatgcggaaggctcgctaacgtgggaatcggtgcataacggaggactttctgctggcacgcgctagggatcatacgcggtgagatgcgatctccgagcgtctgacatgcgcacagtcccatgaacggtcggacttgtggcactgaaacagctgtgactacatccgcgagtacgaacagtgcctgaaagtgctggatgcgggagtctccagcagtgtagccgcagtcctgggctgtggtgaccgaggccctgagccgctctgccttgctgcccccaggtgggccgccaccccttgacctgcctgggtccaaagatctgagccctgctggcaggacttcaagtatgaagccccactacaggggattttgctcctagagtaaggctcatctggtcctcggcccccgcacctggtggccgtgtccttgaggtgagccccatgttcactctgggccactgtcaggaccacctgtgggagtgtcatccttacaataccacagcatgcccggctcctcccagaatccagtcccagcctgggaggatcaaggcatgactcccgggccgttatctatctggaggctgcaggtcgttgtaagtcagggcacaaccc

SEQ ID NO: 540302 - DNA, 105 bp, Homo sapiens
caaaaaacagccccgctttttttttttgcggttccaaagggaatttcctttttggtgtcaaacaaaggggcccaaatatgatcccataaattgttttgaaaacca

SEQ ID NO: 540303 - DNA, 394 bp, Homo sapiens
aaatacatgcctccatagctttgttgtaacagatcaaataaaataacagatatgaaatatttttatagcctataaggtgctgtgaaaattttaagatggggctaggcgcagtggctcatgcctgtaatcacagcactttgggaaggccacagcgggccgattgcctgagctcaggagttagagaccagtctgggcaacatagcgaaaccccatctctagagaaaatacaaaaaaaaaaaaattagccaggcatggtggcacacgcctgtagtcccgggagggactgaggcaggaggattgcttgagcccaggaggtaaagcccagtgagccatattcatgccactgcactccagcctgggtgacagagccagaccccatctctaagaaaaaaaa

SEQ ID NO: 540304 - DNA, 108 bp, Homo sapiens
gggggggaggagcccctcccccaccccccccccccttcctctttatttttccccccttgtcttggtaaaaaaaaacttgggaattaaaatgttgattgaagtttggga

SEQ ID NO: 540305 - DNA, 291 bp, Homo sapiens
  misc_feature (220)..(220): n is a, c, g, or t
  misc_feature (236)..(236): n is a, c, g, or t
  misc_feature (272)..(272): n is a, c, g, or t
atttgttggctgcttgagctgggatattcatctttctcctgatcttggacatcagaactcctgattctcaagcctttgggtttggactggaggcaccagctttcctgggcctccagcttgcagatggcatatcatggaacttcctcagcctccaaatttcataactctaaatacaccagtacaaatggaaagatttcctaaatttcaaaagccagaaggnttggggttccctgttnccaaccctgccttttaacctttctgtgtggttcctnatgaagacacttcaatgct

SEQ ID NO: 540306 - DNA, 452 bp, Homo sapiens
caagagtaatatctgtcccctctgccccgcctcaaaaaaaaagttgaaggttaaaccccagtactcagactatggccttatttggagatagtctttacagaggtaatcaagttaaaatgtggtcattaaggtcagccctaatctaatataactcctgtccttatgaaaaggggaaatttggccgggtgcggtggcggctcatgtctgtaatcccaggactttgggaggccaagggggcggatcacaaggtcaggagtttgagaccagcctgtccaatatggtgaaaccccatttctactaaaaatacaaaaattagccaggtgtaggggcacgcgtctgtagtcccagctacttgggaggctgaggcagaagaacccgggaggcagaggttgcagtgagccgagattgagccactgcattccagcctgggtgacagagtgagactccttctc

SEQ ID NO: 540307 - DNA, 833 bp, Homo sapiens
  misc_feature (22)..(22): n is a, c, g, or t
  misc_feature (601)..(601): n is a, c, g, or t
  misc_feature (698)..(698): n is a, c, g, or t
  misc_feature (762)..(762): n is a, c, g, or t
aagagtggtatcaacgcagagngcccattacggccgggggccgccatcttggggctgctgggactcgcgtcggttggcgactcccggacgtaggtagtttgtgggccgggttctgaggccttgcttctctttacttttccactctaggccacgatgccgcagtaccagacctgggaggagttcagccgcgctgccgagaagctttacctcgctgaccctatgaaggcacgtgtggttctcaaatataggcattctgatgggaacttgtgtgtgtaaagtaacagatgatttagttgtgttggtgtataaaacagaccaagctcaagatgtaaagaagatgtgagaaattccacagtcaactaatgcgacttatggtagccaaaggaagccccgcaatgttaccatggaaaactggagtgaatggtttgaaatgaagactttgtcggtgtacttaggaagtaaatatctttggaattagagaaagtgttggggacagaaagtactttatgtaactaaggtgggctgttcagaagcttagaggtcattttggtaaatttcttttaatttactttagagagctagggatgcaaatgtttcagtnagaaagcctttatttactttggggaacttgacaagaaatgcatctgtcttagaaactggggattattgatgttaggtaacacatgtaatggttctcntggcaattgtgtctcagtatttggaaatgggatttaggaaaaccatttttaaattagtcatttnttaaagacattcatgtgcctttggcggatcatttttggggctaaatgtgttgggtgcaaataaatgggctg

SEQ ID NO: 540308 - DNA, 969 bp, Homo sapiens
  misc_feature (22)..(22): n is a, c, g, or t
  misc_feature (737)..(737): n is a, c, g, or t
  misc_feature (834)..(834): n is a, c, g, or t
  misc_feature (898)..(898): n is a, c, g, or t
aagagtggtatcaacgcagagngcccattacggccgggggccgccatcttggggctgctgggactcgcgtcggttggcgactcccggacgtaggtagtttgtgggccgggttctgaggccttgcttctctttacttttccactctaggccacgatgccgcagtaccagacctgggaggagttcagccgcgctgccgagaagctttacctcgctgaccctatgaaggcacgtgtggttctcaaatataggcattctgatgggaacttgtgtgtgtaaagtaacagatgatttagttagacagtgtctttgctctatgtgctcaggctgcagtgcaggtggcttgatccatagctcactgaatcctcgacctcctgggctcaaagcgggtcctctgtgcttcagcctcctgaatagcagagactacagtgttggtgttggtgtataaaacagaccaagctcaagatgtaaagaagatgtgagaaattccacagtcaactaatgcgacttatggtagccaaaggaagccccgcaatgttaccatggaaaactggagtgaatggtttgaaatgaagactttgtcggtgtacttaggaagtaaatatctttggaattagagaaagtgttggggacagaaagtactttatgtaactaaggtgggctgttcagaagcttagaggtcattttggtaaatttcttttaatttactttagagagctagggatgcaaatgtttcagtnagaaagcctttatttactttggggaacttgacaagaaatgcatctgtcttagaaactggggattattgatgttaggtaacacatgtaatggttctcntggcaattgtgtctcagtatttggaaatgggatttaggaaaaccatttttaaattagtcatttnttaaagacattcatgtgcctttggcggatcatttttggggctaaatgtgttgggtgcaaataaatgggctg

SEQ ID NO: 540309 - DNA, 601 bp, Homo sapiens
  misc_feature (398)..(398): n is a, c, g, or t
  misc_feature (452)..(452): n is a, c, g, or t
cctgagtatatggtgggaataacctgtcagagaccataacaacccggctaattagctggtaaaaagatacaaaaccttggcctgctttaacaagtccccagtaatagcattcttggtcaaatgatagtctgtgtgaaatgcttctattgtcagagagctcatagctgcttgtaaacttccataaaccttggcccgggtaaacttgatagagtgccgaacaccattattatcttcttggagtgggcttcattctaattcctcttggtcagttgttgggctctggtaagcactgtacttcttccttttcatggtactttgaatgctttagagaaattaaaatctccctggaaaagatcagggatccttggccaacactcccttcctctcatttaaagttngattaaccatttagagatcaaagccaataaactaacagcagagatctttctcanactagaacgcttgtcattctttgaccagcctgatgatgggagtttctttctgacctgttcatctcaggatgggaagaggcctgcttcttgttggcttgagaatttgctgccttccacctgcaggtataaacagagctggaggtcgacgc

SEQ ID NO: 540310 - DNA, 124 bp, Homo sapiens
cctaagcgctggacatatgaacctctttgcatttcttagctttcgaatttgaagaagtacttttgaagactcccattttaagaacctggcagattttgctaccaaaagtctacaccactgtgta

SEQ ID NO: 540311 - DNA, 324 bp, Homo sapiens
  misc_feature (59)..(59): n is a, c, g, or t
ggtaggggcggcaggcatgctgaggccactgcgcggctcacgtgtttgcaagccagagncactgaggtctccccaacaaagggaccttgcttgtaatggaggactctgcccaggagatcgccacctgcaacagccggaacgggaacccggcccccaagatcacgtggtatcgcaacgggcagcgcctggaggtgcccgtagagatgaacccagagggctacatgaccagccgcacggtccgggaggcctcgggcctgctctccctcaccagcaccctctacctgcggctccgcaaggatgaccgagacgccagcttccactgtg

SEQ ID NO: 540312 - DNA, 245 bp, Homo sapiens
cgtcccttcatcatacctaccaaagtaaggggtttctgggataaacaacctaatgattcttgctgaagatggccagagataatcagagtaattaatttggggaatggtgaaggataaggaacctgatcagatatcaagggtggggatactcttgctaaactgactcagtagggttcttgctaaacactggtttttacaaagagagagcacaggtaggtatgatgaggtaggtatgatgaaggacg

SEQ ID NO: 540313 - DNA, 278 bp, Homo sapiens
aaacctgggggggccccccccccccccggaaattgaaaacccccgaaagccggaaaggtttgggccccctttttccccgggggcccccctttttttccccttttgggggggggggaaaattttttttcccccccccccttttttttttttccccacccccaaaattttttgggggggaaagggtttttttttttttttttgggggttaaaacccccccccccccccccgggttttttcccctttcctttttcgggttttgggaatgggggggggggga

SEQ ID NO: 540314 - DNA, 816 bp, Homo sapiens
cctcccactgtctcttgtataagcatcaatggaagcgagaaaaagataagcaccctgagaatggagacaggtgtttgaagatgatggatgaacgaaagcacaggaggagtttcatcattcgataagaagaaatagtccttggccatgagaactccatctaagacttgtccttttagcattatctgtactcaacgtgtatctctactgatggtgaggtatgcctattggttatatacattgttggaaatttaatcgaaaagctgaatgagcacattctggatgtcattataccagtcagctgtgagttattgtgcggggcaattcccggatcaaagttatcgctgagtgtatttacagaacaagagagttgaggagaaataagggcatgcattgacgtgttattaggcacatacttcttttaggacctatggtgaggtgtatgcacacgcatgtagaagattaccatgaaatggttgaataaatcttgaaagcaggagaaggaagagactcaaggattagcatcaacgataaggagaataagcacgagtgctcggaaaagggacggattgcgattctccaatccgggataactttccatgcagacagaatggctttcaagtacaatgtcagttgattcaggcttactcggtactgttccaccaattaattcttgcagaatgtactatcagatctcactatacgaagaattgggctttgaatagagcattgctgatgacatttttcccgtggtcatcagttacttatggggccaatcgtgcgaatatactggccatcccagatcagcaatgatgaata

SEQ ID NO: 540315 - DNA, 212 bp, Homo sapiens
cacgatcccttaaggctgaggtcaaatatactgctgagtaaaggccacaccaatcaaaatttgtttattaagacggagtctcactctgtaacccaggctggaatgcagtggcgtaatctcagctcactcactgcaacctccacctcccaggttcaacgcgactctcctagcctcagcttcctgaagtagtctgtgaccacatggcacacaac

SEQ ID NO: 540316 - DNA, 539 bp, Homo sapiens
tataatccaatctttatttaaaaatctaatctgccagtttagggttttccaccaactcggggagcggaaactttcacagggttcacaatcttttgcttaggtgctgcccttgtaggggccttagcagcagccattgcagtctttttaaatgcctggttaaccctttttgcttccttagcagccctgatagcttgttcccgttgagcctttttaacttcagggttctgattcctcttggcccttatatcagcaaaagatgccccagtaatggccctctggaatttgactgcccggcgggttcttttcttttgaattttttccgactgtccccttttgggcttccttctgtaaaggacagtccagtttatttgcccaggattccccttggaaaggaaaaccgactcgcattttgcattaaaaaactggaaaaccttcccgtcggtcctggggtagggcctcccgtgtccggggtaaatcttggacccgctaaaactgcccaggtcgaccttcatggggacagctccccggaaaggccaaag

SEQ ID NO: 540317 - DNA, 148 bp, Homo sapiens
tgttacggttgtgcatcccccagtgtgtgtatgacactggcagatctgcctggagacccttcgacaacagcagcctgcccagacaggtggtggctggagcaccgcaaggcgcaagtggctgaaagaatggcatccctgccgctggaca

SEQ ID NO: 540318 - DNA, 90 bp, Homo sapiens
gctagcagcagagtgagctcaccgggaggcaaggtgccctgattctgagctgccggactaagatgttctggactctgagtcacctggaca

SEQ ID NO: 540319 - DNA, 859 bp, Homo sapiens
  misc_feature (752)..(752): n is a, c, g, or t
gggcatggacgctttcatgggtggttacgcgacagttgccatgaccgagggcgaaaccgtggctgcaaggcattgtggagacattggaggacttggaatatgcgctagaaggctcaatccaatgcccagtatggtaagaggaagacgtacggcagtcgagagtacagctgatccggagtcgggagtcggtcgcttgtcgccaggtggccctacacctcttcccagaaggcattggtccgtctgtgggggcacgccccctgccgaggcggactaggtgctgtccgtctagtggacctgggtaggctgcggtggccgtagattccgtcgctggcgtcccgttgcgctttcatccctggccggtgtggaccgccggggatttggcgtgggatacaacctgctcgaccacaccctgtcctccctgtacttgcgcctgtgttgaccacattactgttctactgtgttgtgggctacgcgatcagatacggtatggctagttggtttgggaagtggggaggccctgtataagattgttaaacggttattactgtatatatgctctaacagagcttgcctgggggtgcgcttccagggaagcgtggcgccaaatctcatggccgggagacggacgagcgcgtcctggtgcgcagggcgtgctgccagggaattactatgggtcgtgggcctgattggtgcgaaacgttactaccagcaattccacccaaggcttagccaggccatttgcggcgaaaggngtgcgggaataggggggacaagcccaagaacgcctaaagggcccaagaaaataggggccgcctttgggaccccaggaatgggatgccatgggtggtgaacttggtcc

SEQ ID NO: 540320 - DNA, 144 bp, Homo sapiens
cgagaatccccatacagagtacacagtatcagtgagtgcctatttagagttatgagctatgctacgtcctggggcatacaatttttaaaaatgatgcctgtactttcaaagaagctgacatgcccggggaagccaacgttcact

SEQ ID NO: 540321 - DNA, 106 bp, Homo sapiens
tgatatgctgtctatggtttcgtgaaagctgctgatctcattagtttcagaaatgattgcatggctaggcagtgactctcgggtagatcagcgctgactgggtgcc

SEQ ID NO: 540322 - DNA, 338 bp, Homo sapiens
ccggtttacagttcctgattagtggctgtggcgtgcacatgactgtgtgccgtggccgtggccactgtgatcttggtcacatgtggtcttagggggtgccctccccgatggctggcttatggtgtgtggccagtgccctcgtcaccctcgtgcatcttctcgtgggaggtccaggttagcctcgccatcagcatgatgaactcctcgaatctcaggtgcttgtctgcatttgtgtccaggtcctccatgtatgtgttctatgaccttttcattcttattctccttcttgagagaattgtgctgatcttctcgcagcagctctttgacttccccctggt

SEQ ID NO: 540323 - DNA, 246 bp, Homo sapiens
  misc_feature (10)..(10): n is a, c, g, or t
ttttttaacnaaaaattgggccattttttaggctccttcccaggcttggccccctttttttatttttattttttcccttggccgaagggatcccctcccgggtccttcctttccccctgggttttaaccttagggttaccttcccctggtttttggcttagccggggcccccaaaaccaaaaaccaatgggcccccccccccttcccctttactgaaaagccttaaataaatttttggattttgga

SEQ ID NO: 540324 - DNA, 663 bp, Homo sapiens
  misc_feature (543)..(543): n is a, c, g, or t
ggtgtccttgatctgggtcggttggtgtagacagtgatgctccactccggtgcctcggattgcaactcgctggctagtctatcgctcgtgagctgcttctccgctttctgcggccattctgcatggcacatacccatccgatggtgagccgcatcattgaatctggacgcgctgtgagctcatgtctcttccttctggccactgtgagccgctggtggctctgccggctgctgccgcgcagtctgtaggctgtccgctgcgtcagtgcgtcgaggcgttccggtgagctctagccgtctcgggctcagaggttggacgtgcctctgcgacgtcgccgtacggtgtctggttgtctggccgcccgtcccctctgacccttcgacctgcacccgtctccgagaacgtcgagtccacgtggctgaagatatgagacgcccacgtacgggtagaagcagcccggttatcctggagagccaattggacacgcaggaggcgccgacagtgcgaggagaccatccgcctgctgtgcccctgcgcccctgntccaaagtcgagcgctgctaaactgacgcagcgagcatgcctgagctgacggcggggacgctggactggtcccgagcaagaaagcccgtctggaagaaaaggaagaagagggagggtagc

SEQ ID NO: 540325 - DNA, 492 bp, Homo sapiens
tgtggttcctcaccctggttcagattgctgccctctgcctgtctgaaggagcaagcccacccagtacacgaggctgccttcaaaggcccctactggtttaatagctgctgagatggattgtcttgtcctgccgccctttgctgtgtgggcagtactctgaagcaggcaaatgggtcttaggatccctcccagaaacctgctctgacccagacccatcacccagcttggggatggcaccacgttctactgcccctccaactctggcctggcaaaggcctgaaggtgagcaggaaggagcaagaggacagaagcaaaactatgaacctggggggttacctagggcttgaccccgccctcctgggaaggcatgcctcagcctggggtagaggtaggatgactgactggttttggctggcctctgctgccctcatcctgggctaggcagctgggagccaaagttgaaatacaaataaagttgttttgggccttgaa

SEQ ID NO: 540326 - DNA, 515 bp, Homo sapiens
  misc_feature (134)..(134): n is a, c, g, or t
  misc_feature (152)..(152): n is a, c, g, or t
  misc_feature (324)..(324): n is a, c, g, or t
  misc_feature (359)..(359): n is a, c, g, or t
  misc_feature (362)..(362): n is a, c, g, or t
  misc_feature (390)..(390): n is a, c, g, or t
  misc_feature (405)..(405): n is a, c, g, or t
  misc_feature (418)..(418): n is a, c, g, or t
  misc_feature (426)..(426): n is a, c, g, or t
agttcaatggtgtcatctcggctcactgcaacctccacctcccaggttcaagcaattctcctgtctcagcctcccaagtagctagaattacaggcgcctgctaccacgcccggcttcccctgcttttgagcaanaatgtccttactggttancctgtgcctgcctctaccactgcacactgggagtgtggagatgacctgtctctttagctcacaggtctgcagataggaaatgcacttaagggctggatgcggtgctcacgcctgtaatcccaacactttgggaggccaaggcaagtggatcacctgaggtcaggagttaaanacgagcctggccaacatggtgaaatcccgtctctnctnttagctgggatggtggtgcatgcctgtngtcccagctacttgngatgctgaggcangagaatcncttgaacctgggaggcagagttttcagtgaggtgagatggtggtggctctgcacttcagcttgggaaacagagcaagactccatttcaa

SEQ ID NO: 540327 - DNA, 293 bp, Homo sapiens
tcggctcggtacccctagttagaagtttcaatagcacattgctgcctggggtagtaaaatgggcaggtaagggtgtgattccattggtatctgggctgctgtgggatgctgttgattcctcactacggcctgaggttgtggagctctcaggaaagtgtgttgttgcaattgagcccgggctgctgtagtagctggtaggttcttcaacaagggcagatgtggtgctaggaggtgaagatattgtgtgtgttgtgctgctattgaaacttctaaaactaggggtaccagctcga

SEQ ID NO: 540328 - DNA, 147 bp, Homo sapiens
ggggtgatttaagcctttccctccaactgtagtccgtttgctttattaatatttatttatttatttttgagacagagtctgcctttttcacccaggctggactgcagcggcacaatcatggctcactgtaacctcagcctccagggc

SEQ ID NO: 540329 - DNA, 395 bp, Homo sapiens
  misc_feature (68)..(68): n is a, c, g, or t
  misc_feature (73)..(73): n is a, c, g, or t
  misc_feature (341)..(341): n is a, c, g, or t
  misc_feature (352)..(352): n is a, c, g, or t
  misc_feature (355)..(355): n is a, c, g, or t
  misc_feature (358)..(358): n is a, c, g, or t
gccttcagtagaatttatgattcacagaaaccctttaaaaaaacctcagtttgggccccaggccgtgngttgncacgccctatattccccagctctttgggaggccgaggcaggtggatcaccctgaggttgggagttcaagaccagcctgaacaacatggagaaactccatctctactaaaaatactaaattagctgggtatggtggctcatgcctgtaatcccagctactcaggaggcagaggcaggaaaattgcttgaaccctggaggcggaggttgcagtgagccaagattgcgccattgcactacagactggacaacaagagcgaaactcagtctnaaaaaaaaacnaanacnaaaacaaacaaaccaacaaaagaactcagttttccag

SEQ ID NO: 540330 - DNA, 739 bp, Homo sapiens
ggacgcgtgggaaccactatgaggtgatactaatattcctgttttatagatcaagcaactgaaattcacaagtaatttgcatagggctttgcctatgaacttgtgcaaggcagaacctgaacacaggtttttcatattctttgattatacttcttccactgtatcaaaggttattcttcattccaagtttcatatttataaaagttgtaattttgatgggaattatttttcatatgcattccagaatataaatcaagtgaatctgtgtctctgttacaaaaatagaaggagaaaaagaacagaaaataattgagaaacaaaatcagaaaaagagcttgtctgtctactaatatcaatatcctttaaaatgacagggtataaattaaacaggaatctgacttggaattccggtcgaatgtcaataaaacttgaattaacagatgtgttctgttttacaggtgcctgatgaaaatggttcagaaagatctgtcaatcaagcagtagtgtgaaaaaagcactataagagaatgcatcatcagtttgctatttccctgatggccttaatttaaagagtggtctaggattactaaagataaagagaaagcacattttctagaatgaactcacagagatgtgctgcatgcgactcaacggattttaaactcccaaagtaacagtttccagaaaacaatttaccgtaatgatgataaaagcagcgttcagttgttatagaacgttg

SEQ ID NO: 540331 - DNA, 873 bp, Homo sapiens
ccacgcgtcggatgcaggcttggcgactcggtgcgccaaagctcgagccgactcggccgcgaggggtagcgcatgaaggggaggctggggtcgccatgaggcgagatggtgtcacctccgtcggtacctggggatatcggggcaggctccgtgaacagcacagtcaggccgcatgtcgccgagtggggctggaaacagacccggcgcccagcggtagccctccttgcgcctccgattcccaggtgagggagaggaggagcgggatgcaggggacccgccgtgctcgcggcgggatggaaagcctttcggaagcctctcgctcctccccctgcgctgtcctcctccagccgcgcagcctctgccctcccgacatggaaggtctttaatgtaactttaaatggttcaccaaaggatgctctaatggatgacagcgatactcctacatattatctgcaaatagaaccacaagatggatgtcatcctgtgtgacagcgtggaaaggagtgtgacctgttcttgccttctgcatcagattgaaaactgaaatcagcttgacggggacgggcatgagcatctgaccagcagtgacagtgcgatgggaaaagccccaagtgtctgagcaggacagtctcaataatgtaatgaaagctgacattgagctggcgaggtggtgcaggtgaagaactcggaaaacaccctttgtgaagctcagagatgacagggcttcttgggaacggccaaaaattctggaaaaagaagtccaggaagcaaacaggactggtagaagatacccaggaattttcaggagaatggctttatggagaaagactaggccggccattgctgtgtataaaacggcagtaaggtagaaca

SEQ ID NO: 540332 - DNA, 677 bp, Homo sapiens
ttgccaaacagaccccccaccccctgcgattttccttcctccctccatcccttgacggttctggccttacccaaactgcttttgatcttttgattcctcttgggctgaagcagaccaagttccccccaggcaccccagttgtgggggagcctgtatttttttctaacaacatccccattccccacctggtacctccccctatacccatgctagccaacttctaaccgcaatagtgacttctagtagcttgtactagtaatagtatctagtagtataaaatggaatgttagtaggagatgacccctccctgtgccaggcatggttacctctcccttatacccactgagtcacggactactcatggaagacaggaccagataagggacctatcgattaaaaaaaaaaaagcaactcaaaaaaaacaaatcaacacaaaaacaaacaacaggaaccaagcacacactagcacatagtcgcggcacgcctgcatcactccggcacactcgcagaagaaaaaaacgcgcagataataactgcacgcaccagcaccaaaagaagacaccaagcccacaccgccttaaggtgaccagtcgagaatacaaaagagggaagacacaaccaggagaggaaactataatactcacgagcgcgagcgacaccaggcataaaaagacaaa

SEQ ID NO: 540333 - DNA, 1057 bp, Homo sapiens
  misc_feature (10)..(10): n is a, c, g, or t
  misc_feature (23)..(23): n is a, c, g, or t
  misc_feature (60)..(60): n is a, c, g, or t
  misc_feature (70)..(70): n is a, c, g, or t
  misc_feature (86)..(86): n is a, c, g, or t
  misc_feature (219)..(219): n is a, c, g, or t
  misc_feature (246)..(246): n is a, c, g, or t
  misc_feature (258)..(259): n is a, c, g, or t
  misc_feature (456)..(456): n is a, c, g, or t
  misc_feature (500)..(500): n is a, c, g, or t
  misc_feature (510)..(510): n is a, c, g, or t
  misc_feature (599)..(599): n is a, c, g, or t
  misc_feature (652)..(652): n is a, c, g, or t
  misc_feature (654)..(654): n is a, c, g, or t
  misc_feature (672)..(672): n is a, c, g, or t
  misc_feature (674)..(674): n is a, c, g, or t
  misc_feature (680)..(680): n is a, c, g, or t
  misc_feature (708)..(708): n is a, c, g, or t
  misc_feature (710)..(710): n is a, c, g, or t
  misc_feature (719)..(719): n is a, c, g, or t
  misc_feature (721)..(721): n is a, c, g, or t
  misc_feature (725)..(725): n is a, c, g, or t
  misc_feature (730)..(730): n is a, c, g, or t
  misc_feature (755)..(755): n is a, c, g, or t
  misc_feature (761)..(761): n is a, c, g, or t
  misc_feature (776)..(776): n is a, c, g, or t
  misc_feature (796)..(796): n is a, c, g, or t
  misc_feature (799)..(799): n is a, c, g, or t
  misc_feature (828)..(828): n is a, c, g, or t
  misc_feature (830)..(830): n is a, c, g, or t
  misc_feature (837)..(837): n is a, c, g, or t
  misc_feature (854)..(854): n is a, c, g, or t
  misc_feature (865)..(865): n is a, c, g, or t
  misc_feature (870)..(870): n is a, c, g, or t
  misc_feature (885)..(885): n is a, c, g, or t
  misc_feature (889)..(889): n is a, c, g, or t
  misc_feature (897)..(897): n is a, c, g, or t
  misc_feature (906)..(906): n is a, c, g, or t
  misc_feature (911)..(911): n is a, c, g, or t
  misc_feature (917)..(917): n is a, c, g, or t
  misc_feature (926)..(926): n is a, c, g, or t
  misc_feature (933)..(933): n is a, c, g, or t
  misc_feature (988)..(988): n is a, c, g, or t
  misc_feature (991)..(992): n is a, c, g, or t
  misc_feature (1026)..(1026): n is a, c, g, or t
actcattgtnataaagtaataanctgggaaactgggtcagaaggcatagaaacaactgtnatcgcccatnctccctttctgtggangaggcgggacaaggccggccccctggctggggcctgggacgcgagggctctcagagcttggagaaggtgacggttttcagttccttgttctcagttgtggcctggaccgacttcacgaggtcttgggtctgcngcttgctcatgttccaggacgccacgnagttgaggctcnnggccaccgaatggtcgcgggaatacagcaggttgaccttggtgctctgcacgccacggggctcttgctggaaatctcggccgccagcgctaaggcagcatccagcatgacctctttgtctgggaacacccggctgatcagcccactgcccagggcctcgtcagccatcatcttgcgggcggtgaaggccagcacgtngaccaggctctggttcccgatgaccttgggcaggcgctgcagtnttcctacatnggcagctaaacccacgttcaccttcttcacctggaagaaagcatcctgggcacagtaccggatgttacaggcggtgacaaggtccacanctccgccaatacagctcccatggacggcagctattacgggctttgggcacctntngatgacgtagaaggtctncnggtatnaagtaaaaaaaaaaaaaaaaaaacaacngncccgggccncncccnctccnttgggctgccggatgttcgacgccntgttcnttaggtcaatacctnctgttaacatttttcctgcnccngacaccaccaccgcccgacagttagcgtntnttgaaancttgttgaagcactttnccacctctctncagangaccttgtacatggnattnctcttgtngggccggtngagcnggacangcagaacangtttttncgcagacgttacaagaagggacttaaagctgttgtctggggcttcaccgagggcnacnncggaagccgcctcttgttccgaggagcaagttangtgaagctaaaactgagttccgggtagttgg

SEQ ID NO: 540334 - DNA, 279 bp, Homo sapiens
tgtcatattgaatgaagctaaagagtaacataaagtacttcagcttttatctcagcaatgcagacatgaatactacacattagtgtgcaaacaacacacaacaacaaacacacaaacacaaacaaaacaaacaaacacaaaaatccccaccaatcttcatggtgtaaacttatcctgctacagggcatgtaacgctgactcatagaccactctcgcggattcctgcgcgatagcacagacacaatgatcatacctgaagatcatgccaacatatcatga

SEQ ID NO: 540335 - DNA, 939 bp, Homo sapiens
gagcttgctgagctccggggcccgcgtagctcgcgcaggctctgggaaaggacgaggagtgtaccgggagcagtgctccattgtgcctcgaggccccgattcgggctaggccgcgagcggcctccttcccttcactttcctctcgtgggaggatacggcggcgggacgagtgactgcggccaaccccttaggaaaggggaatctcgctgattacaaagattgacccaaggagaagaaaccttttttccccaggaggggttccggacttgaggtgacacacacagactttcacaagtttattggcaagaaggattggaggtataattcctaaagcatgggaaaccacatttgtggacggcttttgttgtacaacgtttgggaggggggcaagctaacaagaagaattttaaactgttaagggattgtaacgctggggctaaagagaagatgtctagaaaggaaaaaaattaaagaggacaacaaaaaagagagggatgttttggaaaggccggggaaaaaacaattgctttggaaaggggagaataagcaacccagggggaacaaagatgagtgccaaaggcagttggtcattaaactccaacattccagtaacccttcaaaggacaagtcccaaggaaatgacggagggtgttttgggcccaaatcgtgggatgacatcacaccaattgtgatttaggacccccaagggggattcaaccgtttgtgttttcccctaaacaattgttgaccatgtgcgtgccacgtggaacaacagacttaaaaggcaccacagctgttggaaccacggccccaaaatatgtgaacattggggtggacttggaaaatttaacgcccttggatagcgttacacaaatttaaatatctcccccaaggaaaacaattccctaggaagagccacataagagaaaaacgtggggg

SEQ ID NO: 540336 - DNA, 160 bp, Homo sapiens
aaatgagctggatgggatcccgttgatcctggacaactgctacatgagtgacagggacccctttctgacccagagggtgatatatgccgtccgagaccttaccgaagacaacagccaaaaccgacatttgtttgcaaagatggaggaacaggggctggct

SEQ ID NO: 540337 - DNA, 172 bp, Homo sapiens
tactcgctcgtaccgactcttgctcccctcacggactcggtactttccacttagcccacgctgcccaactccactaccttgctggtcctttcaccccaattcaccatgccacttctcccatatggtggccaggggcactgtggtgcactctggctgctgggacgccgcctgg

SEQ ID NO: 540338 - DNA, 368 bp, Homo sapiens
caaacctgtcatcaacaccctgtcatcaaaccctatcatcgtctcctgtggctggtgacaagctggtccacggtatcgaacctggctactgccagctgatgaccaaccatccttggccacacagcgctatctgaacacggtgactgtctctccagattgatccctctgtgcttctggaggccaggatggccaggccatgttcctgggatctcaacgaaggccaacacctttacacgctagatggtggggacatcatccacgccctgtgcttcagccctgaccgctactggctgtgtgctgccccaggccccagcatcaagatctgggatttagagcgttatgagggtttcgatgaccgggtaccgagc

SEQ ID NO: 540339 - DNA, 290 bp, Homo sapiens
  misc_feature (27)..(27): n is a, c, g, or t
  misc_feature (105)..(105): n is a, c, g, or t
tttctggtgggcatgggggctcacccnccttttttaccagcacttggggagcgaaggcggttggatccccccctgggtagaagttgagatcaacccctgccgaanctagtgaacccttgttttactaaaaatacaaaaattagctgggcatggtggcggcccctgtaatgccagctcctccaaggctgaggcaggaaaattgcttgaacccagtaggtggaggttgcagtaagccacagttgcgccattgcactccagcctgggcaatgagtgaaactctgtctcaaata

SEQ ID NO: 540340 - DNA, 687 bp, Homo sapiens
ctgaaggctggagggcggcgccgccgaggcccagatgcgccaggaaattgagaggctgacgtgagcgactagaagaaacaagagagggagatgcagcagctgctgagccagccccaacacgagcgagagaaggaagtcgtcctgctacggaggagcatgggcagaaggggagcgcagccctgggccgccagtgacgtcctgtgccgctccttggccaacagagacccatcagctgcggaggacgctgaccgcacaaccgcccacatgtgtcagacatctggccaagtgtctggatgaacgacaggcatgcacaaagggaattgtgcggggagagaagtcctgaccagatcggaacacacagatgggcacaccctctgtccaagagatgtcaattgagacaagttgcaggaagaaacatcgacctgttaacaaccagaaggtgactcacgtgaaagacctcaatgccaaagtggcagcgcataaaaacgccagcaggggacgaatacgtgagggggctccatgcgcaagctcagggaggctgcaagatcccccaagagacccgagctgatgaggaagggagatctcccgggtcaacaagaccagtgggacagagaacgataaatgacctgtgcccgaagtgaaagcaggaagctggcgcgctccaggaaggcccgggaatgcctgcgt

SEQ ID NO: 540341 - DNA, 299 bp, Homo sapiens
cgtagggggctctaagatgtttgtcaaacttcatcttaagaacactttgctggccgggcacagtggctcatgcctgtaatcccagcactttgggaggcagaggtgggtggatcatttgaggtcaggagttcaaaaccagcctggccaacatggtgaaacctcgtctctactaaaaatacaaaaattagctgggcgtggtggcacgtgcctgcaatcccaaccacttgggaggctgaggcaggagaattgcttgagcccatgaggcagaggttgcagcgagccaagatcacaccactgca

SEQ ID NO: 540342 - DNA, 138 bp, Homo sapiens
tctatcattatcatagaattattatattactgctgttagagaaattaattatcctacagatgatagatgtttcactgtggtgtatgcataggggtactccgagtaatcgtcggggcattccggataggccgagaaagt

SEQ ID NO: 540343 - DNA, 299 bp, Homo sapiens
ctcgatgcaggattgtatcaagtcagtgtttctgtctctggctatatttataaacatagatttattgtgtactcatcaccagcacctcttaaagacttcctgctgcctgctgtcgctttaatatctgaaaacattcctgaagtttgggtttttgtctaaaaccatgagcatatgtggcctgcattgatatttatgatctttacaaatttccatgggtgagatgtaacaccacttccaagtgggattagagtgtttcctggtcactttcatgacccaacaagagaacgagaaaatttatt

SEQ ID NO: 540344 - DNA, 330 bp, Homo sapiens
ggaaaggataaaaatggaagttataaataaaaagaagatgtattgggaaagaaaaatacaaaattttaaaaaggaatggcacatgtttacatcaatttaacacaggcacacatttcacaattcaaactaagacatttgggggtggcatcatcattgtaattaatctgtgttggcaaagaatgtcatggaacatggacattggcggtcagtaacactgtaacagagctacaactaggaaaattagagtggtagtagtcacttatttaagaattcattcaggtaaacagctgcacccatctgtaccccttaagtggcaaagaagctgttata

SEQ ID NO: 540345 - DNA, 616 bp, Homo sapiens
cgcggggacaggtggtcctttttatttcgagtgtagaaggacccattgttgggggttggcgagccacagtgtccaataagagcgggaacaattcacgaacggataacccccccggcccagttttatatttacaagaggggcaattctcttgagccttggcccaaaatccagcaaggccccagagcctgcctttcaaaattattaagtaaagtgaacccctttccctccgccacaaaacattgaccaacgcgcagatttgtttcccaaggagtatccaatttctttcacaaccacgtttacactgttcacaccaagtacctatggtccataaggctaaacatagcgcgcttgtatcagtcggcaccagttttgatttatcttcagttttcagaaaagcttcacctaactctaggctggtgccaaatattaataaatgtaagtcgttagtctgaaaacctcacactaagtatgctccaaaagatctcgcattacgacccatttcctttggacaatacttgatttacgcaggagtattaataaagggggcatgccgctttgaaaacaaaattgaatcgttttagatgaagagaaattggacattttctcaggaacatgt

SEQ ID NO: 540346 - DNA, 292 bp, Homo sapiens
cgttctcattgtgcgctctgtcctgtcttgtgtcctctgtcttgattgccatacccttgaggtgggctggcgaagtccctttggtccgtgtgacaggagatgctgctgccatggttacaatcctcagacgttatattatcaactgtttccaaagatgcattcctcttgactaatcccttccacatttagttaaggacaaagttgcgtggatcgttggatgccgcatggctttcagataaggacacggagaaaatccaaatgagcacaagagctgtgcacatcttgtgggtga

SEQ ID NO: 540347 - DNA, 252 bp, Homo sapiens
  misc_feature (249)..(249): n is a, c, g, or t
ggcacgaggcaggattcaaagaggtaaatgacttaatcaaaaatcacacagtgccgggcgtacacagtggctcacacttgtaatcccagcactttgggaggctgaggcaggtggatcacctgaggtcaggagtttgagactagcctggccaacatggtgaagccctgtctctactaaaaatacaaaaattagccgggtgtggtggtgggcatctgtaatcccagctactccgtaggctgaggcaggatnaaa

SEQ ID NO: 540348 - DNA, 119 bp, Homo sapiens
ccacacaggtctgcaaactaacacccattacccaccaagggccctctgggccaggtatactaaatcctgggttcctcacagtctcccaccattaatcatacattactgggcatccaggg

SEQ ID NO: 540349 - DNA, 149 bp, Homo sapiens
caaacataagaataaaaaaatcaaaaaaaggttaggtatgtcatgaatgcttagaatatttttcgatactagtttaagtctgggattattcacttattttttttttcaataaggttcccagtcatcattaggctattagcatttaagtt

SEQ ID NO: 540350 - DNA, 376 bp, Homo sapiens
taagggggggtctcgctcggtcgcctaaactaaacgggagtgcaggggcctgatctcggctcacgggaacctcgtgcctcccggagtttcggggcgggttctccgtggcctcagcctcctgtggagtgtggcgtgggactgtgcagggcgtccgcgtaccacaacgtggcgtgattttgggcattttataggtggagacgggggatatgtgctagtgttgtggccaggcgtggtctcaagcttcgtgacctcgagggtgatgtgccgtgcctcgggcctcccagaaggtgcgtgggaattacggggtggtaagttcacgtggtacccagtcccaaaagcgagggtttaacaaaaaaacaaaaaaacagaggggcgg

SEQ ID NO: 540351 - DNA, 166 bp, Homo sapiens
cctgcagttatcagtgtctgactctagaggacccccctgtgtaaggctgccagcacacacacacacagactgcccctgcacacagacacacagagacctgctcctgcacacacacagagactgcccctgcacacacacacatgagacttgccctctgcacacacac

SEQ ID NO: 540352 - DNA, 434 bp, Homo sapiens
  misc_feature (19)..(19): n is a, c, g, or t
  misc_feature (54)..(54): n is a, c, g, or t
  misc_feature (72)..(72): n is a, c, g, or t
  misc_feature (97)..(97): n is a, c, g, or t
  misc_feature (102)..(102): n is a, c, g, or t
  misc_feature (192)..(192): n is a, c, g, or t
atggggttcaccctgaaanaaacttttcctttgaatctgagtaccaaacttctnaccctaggtcactggganccctggacctacggcactgctcccngcagncctggttatccctgcttgaggcagcaatcctcttgagccctagtgaaatgcaactggctgtacctcaatgatgttgccctgagattctgnccagtcgaggtattacttcaatctcctgagaccagcctctacctccagatccagggaggtcagtgcacatataaatggactagctttattaaaggggatatctgggccaggcgtgcgtgtcacgcctgtaatcccaatactttgggaggccgaggagggcagatcacctggggtcgggaattagagaccagcctggttaacatggtgaaacgaagtctctactaaaaatacaaaaaaaaaaa

SEQ ID NO: 540353 - DNA, 246 bp, Homo sapiens
gacagcagcctgccccaaaaccagccctttgtcttttcccttggcacaggcctggtcatcaagggctgggaccatgggctgctggggatgtgtgagggggaaacccgcaagctgctgatcccatacactctctggtgtcgtgagcggggatctcccccggagactccaggcggggctgccctgatgctcaacgagctccttttcataatggagtgtctaactgtcctgtcaccctactgggtgatg

SEQ ID NO: 540354 - DNA, 483 bp, Homo sapiens
aatcggaggctcggcgaaccttcagttccgcggaaagaccggcgcgatgtcgccattcaggcagaacgtccgagccgagcgtggtatttcgccgcctcgcggcgcatccgagcctcttccggcgacacgtagatcgacgtcgtgccgagcaacgcgtggccgagtgtgcgctgcacgaccttgagcgcgacgccggcggccagcatctgcctgccgaccgtgtgccggaacgcgtgcggcgaggtactggacagcttgcgccgctcggcctcgctcaggtcccgcatcacctcgagcagctgcgcgatcgcccactgagtgagcccgcgcgcgccgcgcaccgaatagccgttcgttgtcgtgcctacggccggttcgccgacatctgagggttcgccaaatttttcgcgagcccgcggcggcgtcgggatgaccagcggcgccaccagcggcaacccgggggggcttcgccgcggcggccgc

SEQ ID NO: 540355 - DNA, 809 bp, Homo sapiens
  misc_feature (702)..(702): n is a, c, g, or t
ctgaagatcttcctatacttttctagggggaatggggtcgagtgagagcaacctcctatggttgtttgtgagaattaaatagagatgaagcctcacagcaggatctgtgcataccaagcaggtgatacaagcaaactgttttgtgtgacaaagtgtgtttgaaccgggtcaagaccctatccacaccccctactatgcgattgtctatacactgtgctatatattatatcctatccaaacaaggcacctacccagcgcaaagacctatggtaacacagggggctactcaccatggcgattcaagtgccattgttggtggccgctggttcccgggcttgggggtccccggttgaaagcaaccttggctgcatttggaagacttagctggcaaagcaggcgccgtagcatgtgggtggccgaatccatatcccgtggaaccccaaagttctattcttcccttgagcggaggcctctcggttctccctatcccttggtatttgggctgggaagccccttaaacttgggaaaggcctaacgttggtgaaaggggaccttcgcaattgttggtgaccccccagtacccgtacttccacgcttcgaacatacccgtccacgatggccactgggggacaacccctggcagccttatttccccacgtgggacacggctgtggaccccagagaactctaggaaccccgggnggcttcccccttttgattaagagaacccgcggctctatacatgtacgtgagccccgctttctctgtgggtatcccctggtgggtttgggaccccttagcacccccgg

SEQ ID NO: 540356 - DNA, 419 bp, Homo sapiens
tagagagcactggcgtgatactttttcctcttttgtaataatacttagcttaaaacacaaacacattgtacagctgtacaaaaatattttcttcatatatccttattccataagcctatttctactttaatttttattttattattttctaattttacttctaaaactcttttgttaaaaattgagacacaggctggggacagtggctcatgcctgtgatctcaccactttgggaggctgaggcaagaagattgcttgagcccagaagtttgagaccagcttggtcaaaatagtgagaccctgtctctaccaaaaatacaaaaattagctggatgtggtggcctgagcctgggaggttgaggctgcagtgagccatgatggcgctactttgctgagtgatggaacaagaccctgcctcc

SEQ ID NO: 540357 - DNA, 312 bp, Homo sapiens
gactccatcttcccacaggaaaatgaacgtcctctcggaaggcgcttacaggggctacatgggcttatacacggtgaacaccagccagagcttcttcatggtgaacaccagacagagtgtgtagccgacctccgggatcaacctgcgcattaacgcatgggttcttgcacgcagcgttcttgggccgctgtgccccgcatgctgctcaagctagtgctgaattatcaaatgaaggggtaatgcaaccatagacagcgaggaagaacgtgtacacgcaaacacagacaaaacgagcgcgtaagggccccgcag

SEQ ID NO: 540358 - DNA, 399 bp, Homo sapiens
  misc_feature (19)..(19): n is a, c, g, or t
  misc_feature (37)..(37): n is a, c, g, or t
  misc_feature (189)..(189): n is a, c, g, or t
  misc_feature (393)..(393): n is a, c, g, or t
  misc_feature (396)..(397): n is a, c, g, or t
tggaaaagcaggggcaaantcaggggctcacctgggncctccgccttccgggctcaggtgaccctcctgcctcggcctcccgggtagcctgggacctacagtgctctccctatcaaatctagaattggaagattgatggacagcaactgaggtgctccccaggatcccaaaaagtctgctggataaacnccatctctattctaatattatggagagatcaggatctcctgtgcccaaatcaaacctgttaatacactcagctgtcctcagtggtaacactgaggtcaacacacaactccaacatcaggaacaagtcataaccattttgcatctgaaacagtgcctgacacaaaggtgcttgatcaattttatttactaaataaacctatatanttnntt

SEQ ID NO: 540359 - DNA, 264 bp, Homo sapiens
tcggcgtagcgatatcgcagatcatctgcacgggcttgtcgaaggagccgaaaccttctttagtggtcgtgcgcgtagcgttgccgagcttcgaaaccacgtcgggcaatacgaacgtgagcgactcggtgagctcgcggccttcctggtacgagatcgtaaccgtttggcggccgtcgcggcccgcgtagaagtagccgacacgtccacgccgcggcgatccacggtggaggtgccggtgacggcgttgccgtcaaccttgaa

SEQ ID NO: 540360 - DNA, 700 bp, Homo sapiens
  misc_feature (55)..(55): n is a, c, g, or t
  misc_feature (128)..(128): n is a, c, g, or t
  misc_feature (147)..(147): n is a, c, g, or t
  misc_feature (154)..(154): n is a, c, g, or t
  misc_feature (166)..(166): n is a, c, g, or t
  misc_feature (171)..(171): n is a, c, g, or t
  misc_feature (174)..(174): n is a, c, g, or t
  misc_feature (204)..(204): n is a, c, g, or t
  misc_feature (211)..(211): n is a, c, g, or t
  misc_feature (214)..(217): n is a, c, g, or t
  misc_feature (260)..(260): n is a, c, g, or t
  misc_feature (263)..(263): n is a, c, g, or t
  misc_feature (271)..(271): n is a, c, g, or t
  misc_feature (293)..(293): n is a, c, g, or t
  misc_feature (298)..(298): n is a, c, g, or t
  misc_feature (304)..(304): n is a, c, g, or t
  misc_feature (321)..(321): n is a, c, g, or t
  misc_feature (335)..(335): n is a, c, g, or t
  misc_feature (344)..(344): n is a, c, g, or t
  misc_feature (353)..(353): n is a, c, g, or t
  misc_feature (356)..(356): n is a, c, g, or t
  misc_feature (372)..(372): n is a, c, g, or t
  misc_feature (378)..(378): n is a, c, g, or t
  misc_feature (385)..(385): n is a, c, g, or t
  misc_feature (393)..(393): n is a, c, g, or t
  misc_feature (401)..(401): n is a, c, g, or t
  misc_feature (405)..(405): n is a, c, g, or t
  misc_feature (411)..(411): n is a, c, g, or t
  misc_feature (429)..(429): n is a, c, g, or t
  misc_feature (455)..(455): n is a, c, g, or t
  misc_feature (498)..(498): n is a, c, g, or t
  misc_feature (505)..(505): n is a, c, g, or t
  misc_feature (524)..(524): n is a, c, g, or t
  misc_feature (533)..(533): n is a, c, g, or t
  misc_feature (549)..(549): n is a, c, g, or t
  misc_feature (555)..(555): n is a, c, g, or t
  misc_feature (565)..(565): n is a, c, g, or t
  misc_feature (615)..(615): n is a, c, g, or t
  misc_feature (684)..(684): n is a, c, g, or t
tataaatttttttggcaatttcatcttagtaacccgttttgtcctattgccattntcccaaccattgaaaaagtttacaataatttacatagataatattttcaaagtgcttaagaatagtgattgtnctctgggatatttacaganggcctanacaatgtatgtncaggnggnatgccctatagcacaagtttcactgctggnatatggnttnnnngggaaagtgcatatttgggcagagggggcaatagtgtctaganatngaagggtnacagaaactcggtaaccacatncaaanctgaantagaatgtggacaagantatttacaaaagtnatagaaaancggtcaagnccncaagcctgacccatcnccaagncatctcnacgttctnccagcccncacncccccnaacacactccatccgccngctcggttaccattccgacgggggtnttatttgtttagacctcaaaggtcaacatttgttacagaagtnaagccanaccatcatctgttccttcnacttaaatngccgggtacgtgtttnctacanaagcactgtntctaccaatgtctattgagaggtcctcttcagttgttttcaagtacacangatttttaaagttcatgcttttcatgtacttgtgttgccaattccgccacaacaagtagccacctactnctgctatcatttagag

SEQ ID NO: 540361 - DNA, 862 bp, Homo sapiens
agcggacaagcggctcgcacgctggaagatgatccttcccgccgatcagtctgtgcacacactcacaatggtaatctcggacgctctagtcctgtcgggctggtgctcctcctggttgtcttctgccattcaggtcatagtctgcaatgttacaactgtcctaagccaactgcctgacgtgccaaaacagccgctcgaagtgtgctctcagtctggagttcctatgaatgcgctgtcgtcagttaccgaaaagcgtgcgcgtcacaacgatgtataacagacgtgttggacactttgaggcattgcgcaatttctacgatcgtcaacaaacccgcgttgaagcaaccatgagcctaacgtactactgctgtgagacacggacctggtgtaacctttaacaaacatccttgcataattagtggatcgcggacgattccttagttcgaggaggaaaagcgagatttcttgcttgcctggtgactcgcacttatctgcggctacgtccgtgctggcagcgcttcgatcccttaagtcaagcaccctagcgagagactttcgtctccaaaactccccgtttacctgcggtcgatccgctttctcttgctgccaacatttctagaagggcttgatattttaccagtacttggatccttggttgcggcaaaagaaataggaaatgagccttggagtgccatgctggtctaaagatagacgggggctctggggaccacctgcgacagaaccagatcctgttatgctgtgcacagccccgacttgacaggaatgaaactctaacagtgaacctaaggtgtgaattgcaccgtacattgccatgctttcctacctttgctctgggaccgac

SEQ ID NO: 540362 - DNA, 221 bp, Homo sapiens
tatcaggccttcagccacagactgaagggctgcaccatctgcttgtctgcttttgaggttttgggactcagactggcttcctggcttctcagcttgcagactgtgggacttcaccttgtgattgtgtgagtcaattttcctaagaaactccccttcatatatacatcgattagttctgtccctataacggagctcaatacaccaccaaacaagtcaaaaaa

SEQ ID NO: 540363 - DNA, 137 bp, Homo sapiens
tagtcctagctcttcctgtttgaaatcctcggctaccttcaccgtccaaacttcggaaacctcttacagttttacagatccattactggaatatctttctagagttagggtaacccatatttctgtgcccatttcaa

SEQ ID NO: 540364 - DNA, 791 bp, Homo sapiens
ggacgcgtgggcagggcgaactgtgaccgctattgcttgtttgggatgtgcgctggaccacttataagaggattgggctataccgtgggcccagtcataggctcatggtcccagtccatatcactctggtgagtgcttttcacgatgtcgggtattcaacattcaaccatccggcggatggatgatggaccgtcatatatgacctgggccgggagggctcgaaccgtgaggaggtgagaacttgaaggaggctagggccataaggagggattgactagaagcagtaccctcaaggccttagtcctaatgagcatttgcctatgtgaaaaatcttcatttgtatctttctggggtgggcaggaaatgacagagcccagagccctgaacttccttccagacacctggccctctggtgggggaggtgcccactcctgccatggctcagtctgcacagggtcgaggtggggcctttgtgcctttaatgaacccagctgggaggacgtgcggggtccaggatcttcagactcttgtctaactcccccaggactcaatgtcgcacccagcatttggtaggatgcaaaactagagacacccatcacacagctcacacagctggaggaccaggggcagaggtgcaccctagagtcagtttgatcgtagccttggacataagagtctggccagtggcgtgcccatgggtgcaggagcaggaaagttggctgagggcttggaaacggggcaagaaaatggagtggagcggaatggggaaacaggaaggaagatatctagaa

SEQ ID NO: 540365 - DNA, 288 bp, Homo sapiens
tcacctctcagataggtcaagatcccataagcatctagtgtggctactgctctagcacaggaggaagagctcacgtggtcgtgcgagcataggggagcagctgtcacatgacagaagaagcttcgctcgcttgcctgccgccccctcctgctgtgtaggccagttcctaccaggccacaaaccacaacctatcaagaaacactggcttactaagacacataaaattgtttcgtcttccctatcgctttagtgcactatggtctaaatcgtataagaagtattgctagc

SEQ ID NO: 540366 - DNA, 97 bp, Homo sapiens
taatcccccccccccccggcggacgggttcctgagtggaacatggcgacttgcgccgaaatcctgcggagcgagttccccgaaattgacggacaggg

SEQ ID NO: 540367 - DNA, 532 bp, Homo sapiens
cgatggtgcacaagcagaaatgacaagcgggacgtagttaactgaagagcttctgcacagcaaactaaactatcaacagagtagcagacaacttacaggatgggagaaatatttgcaaattatgcatctgccaaaggtctaatatccagaatctataaggaacttcaatcagcaagcaaaaaacaaataaccctattaaaaactgagcaaaggacatgaacagacatttctcaaaagaagacattcacatggccaacaaacatatgaaaaagtgctcttcatcactaatcatcagagaaatgcaaatcacaaccacactgagataatatttcggcaccaatcactagcgataggtgccaaaaggttagaataagatcgaaaactagcattggagtaggctgaggagtaatagagctttgaaatccttttcgaggcttaatgtgctttcaaagaggatggcttctggccgaggagagtagtctttccataaaacatttacattgccaatatataaccaaagactgttccacct

SEQ ID NO: 540368 - DNA, 490 bp, Homo sapiens
  misc_feature (33)..(33): n is a, c, g, or t
  misc_feature (400)..(400): n is a, c, g, or t
  misc_feature (413)..(413): n is a, c, g, or t
  misc_feature (415)..(415): n is a, c, g, or t
  misc_feature (419)..(419): n is a, c, g, or t
aattgatggccaaactaactccctcaattgccnaattttgaatctgacaattcctaaaaaatgcctgtcccacgaacctctggccagagacaaatcccagcgaatcgttgcctcacattaggtgccatagtaggcccgggtgcggtggctcaggcctgtaatcccagcacttggaggcagaggcggtaggatcacgaggtcaggagatcgagagcatccctggcccaacatggtgaaaccctgtctcaactaaaaatacaaaaattagccgggcatggtggcgggcgcctgtagtcccagctactcgggaggctgaggcaagagaatcgcttgaacccaggaggcagaggttgcagtgagccgagatcgcgccactgcactccagccttggcaacagagncgagctgcgtctnanatanataaataaataaataaataaataaataaataaataaacaagtgcatagtaaaaatttgtaaaaaaaaaaaa

SEQ ID NO: 540369 - DNA, 277 bp, Homo sapiens
caaacccccccggtttgggggttttgtttcctcggttttttgcgccccaaaagggggggttttttttttgggggggcctgtcccccgaaaaataaaggggggggttgcggattttttttacctttgcccccagggttgtgggggggtttgggggggccccccgggccaatttggggggggggcggaattttttttttcgggggcttttttttttgggttgcggcccccccggaattggggtttttggggtcccaattaattcggtcggggtttggga

SEQ ID NO: 540370 - DNA, 341 bp, Homo sapiens
  misc_feature (211)..(211): n is a, c, g, or t
  misc_feature (256)..(256): n is a, c, g, or t
  misc_feature (271)..(271): n is a, c, g, or t
  misc_feature (286)..(286): n is a, c, g, or t
  misc_feature (325)..(325): n is a, c, g, or t
ggggtttcaccacgttggccaggatggtcatgatctcttgacctcgtgatctgcccgtctcggcctcccaaagtgctgagattacgggtgtgagccactgcacctggcttagtgttagtgtattttatgtgtggttcaagacagttcttccagtgtggtccaggggaaaccgaaaattgggacacccttgctccaagatctgggaatatgnacaaggatgcccactgttcaccactgttatttcaatggcagttantaggaagtcctaggntaggagcagttcagnacaaggacaagggtattaaagggtattccaggttttggnaagggaaggaagttca

SEQ ID NO: 540371 - DNA, 642 bp, Homo sapiens
gccgccctgagcatcctggctatcaaacgggtgcctggtcagaaggccagccgaccaccttcccgctttcctctttaactgaggagaagctgatccagctttccggtaaacaaaatccttttctcatttggggcagggtgggctaactacgctgacagtgctagtcaccttctatttaacactaggcaaaatcaggaaggcggcgaaataggctggcgacttcatgctcgaccgccctagaagggcacttttggagacagaccacacgacctcgtatcgctacgattcaacgtctgtaacgcaaacaccgcactctttctacacagctgtgggcttgccattccttacgccaacactcggccgtctgtgggaaacttggccagtaacaagcctacatgagcaacggcgtatgtgcaactatgtgtagtccaattaacgactatttcccccgtccgtttaagaacatgcctggccattgcccacaccaccagaacctacggggcctgaacccacatcaactttcataccccgtgtggccattattctaaccaacgaatccactcaccaaaccacctaccatcttacaagtaccgataaacccaggctttataggcgggccccaacttccactattggggcttt

SEQ ID NO: 540372 - DNA, 242 bp, Homo sapiens
cccttggagagctccttggagagctccccttggagagctccccttggaagagctcccttggcagaagctccccttgtgagagctccgcttgtattcgatgacttcaaggtaaatgttcttccaggggaacttcttctagtagcaaacccactacagttaccctgcaggtagggcccaatattccttgtggaagctcaggttgggaaacaggcatcactgacactagctctgccaaggtaccg

SEQ ID NO: 540373 - DNA, 165 bp, Homo sapiens
  misc_feature (30)..(30): n is a, c, g, or t
  misc_feature (99)..(99): n is a, c, g, or t
  misc_feature (156)..(156): n is a, c, g, or t
ggaattcggcacgacgtaattactgtccgncatcccatacattgggacagacctagttcaatgaatctgaggagggtactcagtagacaggcccacccncacacgattctttatctttcacttcatcttgcccttcattattggaggcctaggagngactccacc

SEQ ID NO: 540374 - DNA, 239 bp, Homo sapiens
  misc_feature (208)..(208): n is a, c, g, or t
  misc_feature (216)..(216): n is a, c, g, or t
aaagggaagcttagatttattgagcgcctactgtgtgccaggcagtgtgcaaggcgctttacatacattatcgcattaaatcctcacaacaaccctgcgaggtaggtgtttataaacccccatttgacagatgagaaaactgaggctcagggaggtgaagtgatgtggccaagttcacatggctaataaatggcagacagaggaggtntccaaggntcggagagaaaaaaaaaaagact

SEQ ID NO: 540375 - DNA, 131 bp, Homo sapiens
tccccccggcagcccccccgaaaaaatttccaaaaaactggcattaggagttaggttcttcccaaaaacaccccccctgccccccaccctttgccgttgcctttttcaaaaaaaccaaacggtctgaatta

SEQ ID NO: 540376 - DNA, 401 bp, Homo sapiens
ccggccttccttcccattgggttcccccggggaagcccggggttttttttctccgcccccaaaaaatgggaaaccccttttggttggggggggttttttttcgccccctttttggaaaaaaaagggcccttaaatggtaggggcccttttaaacccccgggggaagggccggttggggttttcctttaaaattggggggccccccaagggggggttcccgccccattttttttgcccttttgggaaaggaaccccctttttttttttggttaaaataaagggggattggggggaacccctttcccctttgggcctttttgggattaaaaccccgggggttttaaatttttggggtttgggggggccttggttttttttttaccctttttttccccgtttta

SEQ ID NO: 540377 - DNA, 1380 bp, Homo sapiens
  misc_feature (680)..(680): n is a, c, g, or t
gagagcgtgttcgcccggtcgagcacaggatacctcggcgcatttggctgatctcgctcgctgcgtgcaatacgcgtcgtaagtctctacatggattatgatatctgccgtcgtcctcgttcgatggtaggaacgaggtctgggtgttgctgcaataggccagagtgtctctgcgtggcgaacgtactgacctcgccctgggacccgatcgtgtcctcctacccactcgaattggggcagcactgcaggacgatgcaggggcagtcaatgggtggggcgagtggaactgcaacgacacgggacttaccatactgttggtgccagatggaggaacgcgcgacgacgtcgagaggaggacggcgattcctcagggggctgtgaatgtacggctcaatcgtagggcacacggcactcggtcacttcaaatgtggagatcgcacactgtggaggaaccataatctggcagcaatcattctatctacctgaatggaaggctgccgttgtagggcgtccccggaggggaagtgacctcgccgatgtacatgtatgtagcctgagatgggcgcactatagaaacaactcagaagggaaccggaagatgtcaaatgaagaggacttgaggttcgcatggagatcacctgggattttgacgggaacaccgttctcgagaagcttagccncccaaaggtggccaatagctgagcatgcttttgccatgagtgcctaagcgtactgggtgacataaatcaccccatggcttatacgggcgctttgcgtggggcacagcttagggctatctctggggcagatttccgatagcattggcgcactcgtctccgagattgggaaacaggcgggttttccatcgcagaagaaggtaatggttggagtcgcggaatcagggaacagggaaggcggaagaggtccatatggcgcacggttttccgttcgccgagagtgggtccaacaactgctccagttggccgggctcctttgggggatcttttatgcggacttagggcccttggtggaggaatccttgtgagaaccgcgtcggataatccataagaccctgcttcgcaaatgtggcaacgagtcacagttccccaattcgacaccatcgggaaattgcccaaggcccgcgtattgttaaacacgacgagcgtttgtctatgggacgatttgtggaatagcggggcctctcgcaaacttgcgggtgtagggaaaccacactaacgggggtaagcgggtttccaaactaccttatttatagcagcgcgacgtacaatgggcttgtgttggcatataacaaggcttatgcggacccgtatggttgcgagccgtttttcgccgacacgtacaaaagcggaatagaacatg

SEQ ID NO: 540378 - DNA, 114 bp, Homo sapiens
ggtggagacggggtctggctagtgcccaggctgggtctggaactggtgggctcaagcagtcctcccacattagccttcgaaagcacggggtttataggtgtgagcccccacacg

SEQ ID NO: 540379 - DNA, 1478 bp, Homo sapiens
ggggctctgggagatgctgatgcagctgagctggctggatctgccggagcgcgatgtgagtgtggagcctgagccgccctgcctgcctgccgcctccgcctcccctccgcgaacagtgagccctgggcctggggcccggcacgcctgccccatgtccctgtccctcgtgctgtccatgtgcctgccgagggtagctgctgctgcgagcgagcgaggggggacggggacgatgctgagctgatgctgcctgtgtgaggatgtgctgtgcctggaccctgtagctggtgcggccctgcgctgttgtggcgtgacggggcaagcctgcttgccccgggcgacaccattgcaacgaacaagaaagtcacgtgcacttcaatattccacacaaagcccatatcaccaatattctctatcatacttatcaacacatacatttacatacgtcatcataccaaaaacacgctactaatcaccacaacacactagcataacatcaaatagcacactgcaaatcaaaatatgtacactctcacaacaatactcccactcgcatcacacaacaccaacactaccaccactcgacacagctcaactacactcgcacacatcccgcctccactatcccactaatagcaagcagccgcacactcccccccacataccctccccacagcgtcccctccacgcctagtagaacatcacacaccaagccaaacaccaccatcatcaccacccatccacatctccctaccaaccacggcttactcccatagaaacaccaccacaacatagcacagcaacccccttctgcccgcaccgcacctcccacaccacaccacacgcatacagataaagcatatacacgcaacacgactgcaatcaaccgcacatccagatcaagtacacaaccctcctccacacactcgccgtccaaaccgctctacaagcattcgcgcacccacccatcccgtcagactattgtctcacaccacaatcccgtgatatacacagacggcggagagggagaccgggctagcgcgacacgccctctcgcaagctgagcgatgcgagcccgcacgctctggcgcgccagcggcgcgccgcagccctcgcgcaccgcggccgggacgcgcaaggatcgacacgccgtgcagcggtacgcaacgcgctaggcccgttggcgctcactcgggccttcatcccagtacacagccctaaccccgtacgtccgccgcaccaactcccctgcacgcaccacaccccatctacaccactctctcgctcacactacactctaaacacaccgtacccgccccatcactcctccacaccctccagctctggagtcaactaccactacacacatatacagctcaccacacccacacactaccaacctactcccacacttccactctctaccacctcaccacatcaccagccagcgcaccacatacacccaccatctcacacaacac

SEQ ID NO: 540380 - DNA, 432 bp, Homo sapiens
ggggccggcagtgtttgatgccttttttccatttacatgggtacatgccgaccgctcggggactgcagcaaggtaccatggtgaatcagatctagagcttgtactgctcatcaggaagccttgtacgctacatgtgatcaacgttgttatagatggctgcttagccacattgagtggaacttgcacatgtgaacaaacctttgtttcattacctctctgatgagtatacctgcgtgatattccatgaagcccatgttgctgactgtattgatgttgctacacagtgtgaagtcgcattccaacaagccagaatgttcagattgaacacattgtgcattaatatactcgagctaatttggtaaagcttgtaaccgccattgatgagttagagaaatcatgtattgtggcatcatcagccattgtctgttcccg

SEQ ID NO: 540381 - DNA, 86 bp, Homo sapiens
cccaggcaggcagcaggttgccagtcaagctgcagcatcgtgctactgcattcccaatctggtgtgacagagtgagactccgcctc

SEQ ID NO: 540382 - DNA, 206 bp, Homo sapiens
actactgattactatgtatccccctctattgacccccacctccaaatatctcatcaacaatccgactaatcaccacccagacaatgactaatcaaactaacctcaaaacaaatgatagccatacacaacactaaaggacgaaccttatctcttatactagtatccttaactccttttacttgggtgtaccgatgctcgaacttcgt

SEQ ID NO: 540383 - DNA, 237 bp, Homo sapiens
  misc_feature (3)..(5): n is a, c, g, or t
tcnnntttatcatccctaagatcaagttagttcccactaggatgatgggagtgttgggacagtggtgcgcacctcaggatacactagatgtgaagaaggaacagaggttgtgacacgctccttttacaggatgtccttcacctaaatcaacacccaggccggcggcactcatgccaagacacctaaccttcaggcaaggcctccccacggaggcttcaggtggttccccacccttca

SEQ ID NO: 540384 - DNA, 160 bp, Homo sapiens
gaagattaggatactagtataagagatcaggtcgtccttgatgttgtgtatggtatcattgatgaggttagttgataagtcattgtagggtggtgattagtcggatgtagatgagatatatggaggtggggatcaatagagggggaaatagaatgatcag

SEQ ID NO: 540385 - DNA, 255 bp, Homo sapiens
tacagaagtagacacgaagagactgctgttgactgcaggcacacgagcgcttggtggtggcattagttggatttggggcaaccagagttggagtactctgcgaggagttacttgaagttcagttgttgtttcactggaataaatctgcgtgcggtaggagcagtgccagcagcagcagtcccagcccgagcctggccacccattggtcgtgcccatgtccccctccgtctggtagcgcggcgcggtctagacagg

SEQ ID NO: 540386 - DNA, 322 bp, Homo sapiens
ttcaggcagggaagagtgaggagtacaggtttcacgtatgacaaatatatgatgttaaacaaacgaactcaggaccttcaaagatgtcttcgtcccaagcacacacattcgtaattggtgtccattggctattgcccttcttctataatcttcaaattatatagttatgcatggagttccctatgcatctcacccatctccttgatctcagccttctcatacttggccattctcttctttctggaaataaccagcacaacaattccagcaacaactgctatcaccacaaccacaataacagcaataacaccagctagagaca

SEQ ID NO: 540387 - DNA, 304 bp, Homo sapiens
  misc_feature (2)..(2): n is a, c, g, or t
  misc_feature (8)..(8): n is a, c, g, or t
  misc_feature (18)..(18): n is a, c, g, or t
  misc_feature (38)..(38): n is a, c, g, or t
  misc_feature (56)..(56): n is a, c, g, or t
  misc_feature (65)..(65): n is a, c, g, or t
  misc_feature (70)..(70): n is a, c, g, or t
  misc_feature (85)..(85): n is a, c, g, or t
  misc_feature (90)..(90): n is a, c, g, or t
  misc_feature (97)..(97): n is a, c, g, or t
  misc_feature (116)..(117): n is a, c, g, or t
  misc_feature (124)..(124): n is a, c, g, or t
  misc_feature (126)..(126): n is a, c, g, or t
  misc_feature (161)..(161): n is a, c, g, or t
  misc_feature (172)..(172): n is a, c, g, or t
  misc_feature (178)..(178): n is a, c, g, or t
  misc_feature (183)..(183): n is a, c, g, or t
  misc_feature (213)..(213): n is a, c, g, or t
  misc_feature (215)..(215): n is a, c, g, or t
  misc_feature (237)..(237): n is a, c, g, or t
  misc_feature (241)..(241): n is a, c, g, or t
  misc_feature (252)..(252): n is a, c, g, or t
  misc_feature (274)..(274): n is a, c, g, or t
  misc_feature (277)..(277): n is a, c, g, or t
  misc_feature (280)..(280): n is a, c, g, or t
  misc_feature (297)..(297): n is a, c, g, or t
  misc_feature (302)..(302): n is a, c, g, or t
tncagtcncgcgcgaganctatctgtcatctatcatcncgcggagtacaacgcgcnttcgagaangcgcncgcgagaacatgtcntgtanatccgtntccccccgtgcgttcaggnntcgctcncntgactcgtgtgacatcgtcacatgtgggcgatgtnccggccgtctnagcaantacangtgcgcttcaacgttctcaaggtcaccgangncttccggcaccgaagaagcagntccngaagttctgangctgaacatcggcccgctcccngcnatnaaataaagttatttctnattcngg

SEQ ID NO: 540388 - DNA, 1209 bp, Homo sapiens
cactccactcttgactgaccagacaaccttcatgccaacatccattgtacccaagataaagtatagtgcgatacacattgaaagcctggcgcaacagatatagtaccgctaaggcgaaatgatgaacaattcagtaacctaagcataatatagcaaggacgtaacccgcatataccttctgctataactgcaattaacgtagaacatacacttgtgcgagggaggagccaaagctaagacccccgaataccaggacggagctacgctaaggaacatgctaatagagagcacaccctgtcgtatagtaagcacatagatacgatgggagaggaattctactacgagtaccgacgtgccgagcaagagctctagccgagtccgtggctgtatcagcgtgggttgtccagagatagaatcttagttcaacgtttaaatttgcccacagtaaccctctaagatccccttgtcaaatttaactgttagtccaaagaggaacagctctttggacactaggaaaaaaccttgtacgagagagtaaagaatttaacacccatagtaggcctaacagcagccaccaattaagaaagcgttcaagctcagacacccaggtacctgaagaaaagtgccaaacatataactgaagctcgtcacacccaattggaccaagtctagtcaaacagaaagatcctggaaaggcccagagactggaacattgaaaggtcgaaaagagacccggaaacacagtagctgccaggagagcaccaaagacggagcgaccgaaatcctcgaacaaggacccacattaggcctcttaaacacaaacagcggagcccaaaacaggggaactagaaaaacagcgggcaaccgcggaagaaaaccccaacacggggggcgacaaaaagggacaccaccacaaaagaaaaacccccagggaaaaaaaactagcgataaaaacgtgcaacaaccataattctctcttaaaaaatatccccccgtcattaataaaatacatcacactactcatcaactcccaaccacacaccaatacacacaccaatcactaagaatcgtccatcacaaactaacactcactaccaaccataacacaaaccaaacctcctccaccagaacacaacactaaccaccacataatacacaaacagaccacaccaaaccacacacacatactatcactaaacaaacaacact

SEQ ID NO: 540389 - DNA, 167 bp, Homo sapiens
  misc_feature (14)..(14): n is a, c, g, or t
  misc_feature (88)..(88): n is a, c, g, or t
agctgaggggctgnggctggcgtgttgaagttggctttgcatgcccagcgatgcgcctccctgtggtatgtcatcaccctgggaccgngaggcccttgctcactgtgtctgctggttgatctaataattgtcctttcttctaaatcccaaccgaacttcttccaacc

SEQ ID NO: 540390 - DNA, 154 bp, Homo sapiens
agggtcaacacatctttattaaacacctgaagttactggtaggaggccatgatgctggacacacagtcaaagtcaatgttctccacaatgttcctgggtttaatgctctctttttggatacagatgaagatgtgcccccttctgtcgtcttctc

SEQ ID NO: 540391 - DNA, 392 bp, Homo sapiens
gctcgaagtaactttggaataaaaccagggtgggtaataaacctcctaatcctaaatttacatataagatctaataagcttgacacatcttgtcatcaaggactgaagacaggaagcagttcctgagtcagctggttcccaagctcgcacagaaggtgataagttaataatcaatgccagtggagaatcttcttatagaataacctgggcccaagtgattttagtacaaaacttgcccttctttggtttaattttctatgtgcttttaggtgtgaatccagatatgcggtcgggggggggggggggggggggggttcgtttagttactgtacactcttgtttgttcaataaactgcatatcaacttcccacaaaaaaaaaaagtcgacgcgg

SEQ ID NO: 540392 - DNA, 415 bp, Homo sapiens
cttcatagagaggtcctgccacatgttcgaattggaagctagaaaaaaaaaggtggcagcttcccagataggactcccttggtgcacatgctgtcattgcgaagtcacttcttactacctttatggcactgttttcaaagggtagcaagggtgaacatgcattgaggtctcaacagtcagctaagcctagaaagacgtgtgaatccagaattgggccaaatctcagcaggctttgtgtccttccttatttcatatcctaccttaacctgggccttgggccaaacttttcaaaattacacataaagaataaaaaagcaagcccatttctgacaatgggagatgtcagaacatctcagaatccattaccaacacactaaagactggattttacatcacaattagtgccggggcttcc

SEQ ID NO: 540393 - DNA, 312 bp, Homo sapiens
agcggctcatggcctgtaatcccagcactttgagaggccgagggaggtggatgacctgaggtcgggagtgcaaggacagtgtggcacaaatagtgggtagaaaccgctgtctatactaaatatacaaaaaaaaaaaaaattttctcgaggcgggtgatgtcgtgcgggcaaaggggggagagaatcttagagggggggggccgcggacccctttttgtggtgtcccctttgtaggagggggttatattcgagagcggtgggtattactgggtggtcataggtgtgttccgggtgtgtgtgagaatgtgtgtg

SEQ ID NO: 540394 - DNA, 98 bp, Homo sapiens
aaaaaattaatcaaagtaactaaatgattgcttcacccaaacagttataatgcagacccaccctccttttttttgcttggggctatttttccccctga

SEQ ID NO: 540395 - DNA, 163 bp, Homo sapiens
aggacacagtcttcgttccctctggaggactcagcaacaacacaccatattggaagcagagagcagtcctcaccagacacggaatctgccagtgccttgatcttggacttaccagcctccatacctgtgagaaataaatttctattgtctataagttaaaaaa

SEQ ID NO: 540396 - DNA, 119 bp, Homo sapiens
tggcgtttggcagttttaagttattagtttttaaaatcagtattttttaatggaaacaatttgaccaaaaatttgtgtcacagaattttgtgagacccatttaaaaaagttaaagtgag

SEQ ID NO: 540397 - DNA, 122 bp, Homo sapiens
cctgctctctctttattttaagagcacctattaaattagggttataattaaagttaaatgtgacctcatttaaccttaactatctctctaacagccttatctccaaaggcggccccggcgtt

SEQ ID NO: 540398 - DNA, 126 bp, Homo sapiens
aacacacaaacatacacacacatagacaagcatacacaaacacacaactgacaagcacacacaaacacactccccatttacatgtatgtgcaggatgggggttaggttctaagagttggtcgacgc

SEQ ID NO: 540399 - DNA, 428 bp, Homo sapiens
acaacaaaaaaatagcgtgggtggggtggctcactcctgtagttttgaggccaaggtgggaggattgcttgagcccaggaggttgataccagcctggccaacaaagcgatagcctgcctctcctaaaataaataaatatataaatatataaataaatggaaatataaaatgtgccggggcgaatggcgcaccccctctattcctggggccaagatgtaagcatcttctcgcccttagagattgtggccagcccgggcaacatatcgaaacctggttttttcttaatagaccgaaacaaaacaaaacaaaaaatagcttgggcagggtggtgcgtggctgcggtcctgaggcaggaggatcccttgagcccaggagcttgatgccggcctggccaacatagggaaacatggtttctactaaaaaaaaaa

SEQ ID NO: 540400 - DNA, 284 bp, Homo sapiens
  misc_feature (150)..(150): n is a, c, g, or t
tcacaggctcccctgcagcatttcagcaggctggcagcctttgggtgggggccgcagtgcacggggcaccatgttggggggcaaccgggggcatgtccagcccacagtcaggcaagcttctggccctttcccttcccagccccaggtccncccagtgtccttggcccccgtgttgggtccatctccttggctgggcccccaccttccccagtggcagcacagcctggcactggtcccttcccgggctccttcccccacagcgtcggggtcaccgcagctcgcac

SEQ ID NO: 540401 - DNA, 115 bp, Homo sapiens
caattgcatgtcggtggtggcggtagacaccgagtacggccgcaagcgccagatcgaccaatcttcctgcaacaaggacttcacctgcctcaacggtttctgcccgagttttgtc

SEQ ID NO: 540402 - DNA, 265 bp, Homo sapiens
gcggccgcctactactactaaattggcggcgctcgacatcagcttggacaatgtagtgagacctggtctttaccagaaaaaagaaaaaaaaaaattagctgggtgcgctggcatgtgcctgtggtcccagctactcaggaggctgaggcaggaggatcacttgagcacaggagtttgaggctgcagtgagcacatgggcaagagagtgagactccgttttgtgccactgcactccagccagggtgacagagtgagactctgtctc

SEQ ID NO: 540403 - DNA, 152 bp, Homo sapiens
tgtaatagagaccagaaccctgactgaggaaggtgttattaaagttaaaacagaggcttgcgataggcttttggctcatcgagtggaaccaaaatgaagggaataagtgaatgaggtctgatagatgcactgctatccaccagaggacgtag

SEQ ID NO: 540404 - DNA, 327 bp, Homo sapiens
aatctagtctctctaggtggtctccgctgtcaccattatcatggcttcctatttgtcttcatagcctttgactttatcccagttagggttttgagatgccaccttgtagcttcatttggttggaagtctagtcttcccatctggtattttgctttcattggtaggggattcctggtatatacttggtatttagtgtgttgctgtgtgtctatattttgggggattttcatatcattgagcctagaatctgttcctcatattcttatatcttagaattttttgattatgtttgagttttttttctccttttagcaaacaattaaaaaa

SEQ ID NO: 540405 - DNA, 111 bp, Homo sapiens
agattcgagtggagacgtccccaagattatgggacatcttttgtgattagtatggccgtgattggtacaagagccgtgcaaagtttgataggtccaatctgcttcacaacc

SEQ ID NO: 540406 - DNA, 118 bp, Homo sapiens
tgctccaccactacccagtgacacacgccttcatacatctcacgtagggggacaaaaaagggggaacgggggggcacgagaggctcagtcattcaaaagtagaacagaagtagcaaag

SEQ ID NO: 540407 - DNA, 129 bp, Homo sapiens
actgtgagccatgttgcgggaacggagggtgtgtagctgtagggtactacggaacactggtctcaggtggctcattgcaagtggtcccagctcagcgtgcagctctgctactcagagggcaggtcttct

SEQ ID NO: 540408 - DNA, 1119 bp, Homo sapiens
ccttgtttgtacgttgtcttgttcagttgatcataggaagaatgaggtgtatccagtattgataattctgcttcttgtaaacaggctgagtttttgaactgttttaactgtgatcgaaggctctaatagattggtctgtatgattatcaattctaatgtggtaatttgtctcctactaattccctgtttctggatcgcaggggaaattgttttcagatggtgttgagaatccctgtgggatccatgtcggtttgatctgtgtggaggggtaggaccgtgttacggtgaacgggatattcaggttgtctaatgctctgttgggctttccttttattccagtattggaacttttgacatcttgatcgagtcgtcagtcaacctcgttcagtacaaggtcagattggtctagcatggagatgatcacgtgtgtactcaatgcaaggcatcccaatttagtcgtagaccatatgacacagggtcgcctaatcgatcgaacgttaaggtatactttcctgagatatggctttctctctcctgactaaatctgtctctatgctggacaaactcctacccgagaggaaggaagtggaagagactgatgagatggaccaagtagaactggtggactttgatccaaatcaggaaagacggcgccactacaatggagtaagcatatgaggatgatgaacatcatcccatgaggtggtgttcagtgtcagacctcttaatgggccagtgaataacactcactgctggcatttaatgtgcagtagtgaactgagtgaaggacatgtaagtcataagtatgctcactacttgctcttgtttttgttttaataaactatagtagtgtgtttgaaacaagctctgatacactgcaagcatatacaacggcacaatagtagaaagcctctagagttgttgtccctgtagtgtatcgactgacttcagctgtgcaagatgcaagctttaatacctgtaaaaactacaaagaagttcccctagcatttgctaggccaaaccttgtaattgacttcagctatgtacgtggacaagcttagactgagatgtctaggtatatgtattggcttcagtgtatgaaccttcattgttaagcta

SEQ ID NO: 540409 - DNA, 754 bp, Homo sapiens
atgaccccaatacgcaaaactaaccccctaataagaattaattaagccgactcattcatcgtactctccgccaacccattccaacatctccggatgatgaaacttcggctcactccttgtgcgccgtgcctgaatcctccaaatcaccacgaggagcgtattgcctagccatgcgctacttgcaccagatcgccgtcgaaccgctccttttcagtcaattcggccctacgatctactctgagacagtagattagaggctgagatcatccgcgtaccttcacgccaaatggcgcctcaatattctgttatctgcctcttccgtacacatcgggcgaggcctatattacggatcattgtctctagctcagaagacgctgaaacatgcggacattatcctcctgctatgcaactataggcagacagcctatcataggctatgtcctcccgtgaggccagaatatcatctctgaggggccagagtaattacaaaattcactatcgagcgatcccatactattgggtacagacctagttcaatgaatctgaggaggctactgcaggagacagtcccagcctcacacgattctttatctttcacttacatcctgcccgtgcagttagtgcagtcctagcagtactccacctccttatgtcttgcacgaaaggggatcgaacaaatcgccctaggaatcatctcccattccgataaaatcactttccaccttactacacaatccaacgacgcctcggttat

SEQ ID NO: 540410 - DNA, 344 bp, Homo sapiens
cccaagctcatctgagtatggttgtgtggcatatgatttttttcattgaggaggtcaaatctgaaaagactgctttgaaaagaaaagttcaggaaccctagagaattccacaaattatagcaaatttcctcctctgaaaattcttgacattgaaaaaccataagatcaaatgattgttttatttttcaatagacagaaattaagagcaaatgattgttgtatttttcaatagacagaaattaagagctaaatttgagtcaaactgggcatgtaaaaataggatgcagcccctggagaagagcttgtccaaccaggagtagtggaaagccctacaaaaaccaagg

SEQ ID NO: 540411 - DNA, 120 bp, Homo sapiens
tagggatacccagggtggtgggggaagggcctggagggggctatgtgggagcagccactgcgatggtagttcttaagaggggatcattaattgtataagaataagtaagcaagttttcta

SEQ ID NO: 540412 - DNA, 407 bp, Homo sapiens
gctcgaccggattgcagtgagccaagatcgcaccactgcactccagcctggcaacagagcgagactctgtctcagaaaaaaaaaacaaaaaccagtttaggctgggtatggtggctcaccagcactttgggaggctgaggcaggtggatctcttgaggtcgggagtttgagaccagcctggccaacatggtgaaaccctgtctttactaaaaatacaaaaattagccaggcatggtggcgtgtgccagtaatcccagctacttgggatgctgaggcgcgagaatcgcttgaaccctggagatggaggttgcagtgagcagagattcgcaccattgcactccagcctgggcaagagtgagactgtgtctcaaaaggaaaaaaaaataaaagtcgacgcggccggcaat

SEQ ID NO: 540413 - DNA, 130 bp, Homo sapiens
  misc_feature (68)..(68): n is a, c, g, or t
  misc_feature (70)..(70): n is a, c, g, or t
gcttctaatgtcagctctttttgaggcattccaatctcttagtactaaacgtcatctgagatgagggntntcctaaaaattggcaataagacatgacatgaaatgcccgcctcctcccaataggtccttg

SEQ ID NO: 540414 - DNA, 245 bp, Homo sapiens
tgacatcatgacccttggaccataatatgatatatctaccacactagcagagaccaaccgaacccccttacgaccttagccgaagagggagtaccgaacatagtctacagtgctatcaacatcagacataacgccagcaggacccctatacgaccctcattactatcataagaccgaaatcacaacaacacatatattcataactaaaatcaccctacaccactcacaatacttccataggaaca

SEQ ID NO: 540415 - DNA, 128 bp, Homo sapiens
tcataatacttttttttattacaatatccaaaaaactgggtatgcaagtaggggatctcgagacccctctgaaggagggacggggatcgagagattgggatacccatggccgtctacatatggcttgg

SEQ ID NO: 540416 - DNA, 225 bp, Homo sapiens
ttaaaatgaattgattcagcacttaaacaccttaggctatcgtcaagttgatgtaaaagatgaaaagcagctcctaatcaatctcaaaacccagattgaacaagccaatggactttctgtactttctgaaaatgaatggggacagattctcaatcatctgaaagccggtaatagcttcaattgtgccaaagtgctacgtcatcgctttccagtgaactttgatga

SEQ ID NO: 540417 - DNA, 967 bp, Homo sapiens
tcgtggatgagactcgagtgttttggctacatctaccacaagctgttggtccacgaggtgaaggacgtaatcatcaagtgccaattggccaagcgcttcacgagtgcagtggcatccccgactccaaacactcccaagtttatgtcgtgaagactgtgctgcaaaaccactgagcctgatccaggcccgccaggcacgggaagacggtgacgtcgtggccaccatcgtctaccacctggcccgtgcaaggcaactgggccggtgctggtgtgtgctccgagcaacatcgccgtggaccagctaacggagaagatccaccagacggggctaaaggtcgtgcgcctctgcgccaaagagcccgtgaggccaatcgactccccggtgtctttttctggcccttggaaaaacagatcaggaactatggacagcattgccatgagctggagaagctgcaggcaggctgaaagacgagactgggggagcttgtcgtctgccggacgagaaagcggtaccgggccttgaagcgcaccggagaagagagagctgcttgatgaacgcggcatgtcatctgctgcacatgtgtgggcgccggtgaccccgagggctggccaagaatgacagttccgctccattttaatcgacgaaaggcaacccaggcagcgagccggagtgcagtggttccgcgtgctccatcggggaccaaagagctgatccctagtaggggaccacttgcatcgtgtgccacgtggtgtttttcaaaaaggcgcaaaggccggcatgacacaagacgtcttcaagagccctgggagaagcgcaacacggggcaccggtcaagccaaacggtagtcctctgctaagagagccatcaacaggtatataagtccccccacaagggtagcgctgcatagtcttaaaagtgtttccgcgtcaccaggcagggcttatacaacgcagagtaggttgccca

SEQ ID NO: 540418 - DNA, 895 bp, Homo sapiens
gttgctagcggagagggacgagggagaccaaatgtcggaggttggcgagtgggagggcgtctgtgcagagtgcaatctgacttcatttgtgccacacgcatggtgcacttgtccgccttgcgctgtcccatgtgcatgctgcttgcctgtggtgcccatggttgctcgctgagcagcggtgtggtgtcttggtgaggtgggtgttgatgagtgcacgtgatatgtgggtgtcacgaagtaaggtcgggaggtcagtcttacgttgtgtgcctagagattggcaagactcaatagatggtgtgcatgaaccaatgagaaattgggggctagctattctgccgcagtgggagcttgcaagtcgatggctaacatgttgatacctatttttctaacactctacaagcaccaaaagacagcccgtttgatacggatacaacttgagcctctctacttctatctctcgtaacagatatgttacaacccgtccaagataactatttcacttgtaaaaactctgtgtgttaaccacagtggatgcctcaatcttgacgcccccaaaggctcacgcgcacatcgccgttcccacacgcgttctttttggggtgagctaatgaccgccattgtgtacaatgacggcgtcttgggtggtaagcccacagggtcaaaatttacggcaggggcggacgagctcagagcgcgggatacaatattacacataccaccctcctttgacttggtctttccacgtcaaggtgccgcgtttaagccccgtttattcatatcagccaaaagcacgtgaaacttagcttaccccaaggctaaccagcaggggacgcacaaggggcctctctatgctcttctctcacgcgcacgaacaaccctatgcggtgcacaa

SEQ ID NO: 540419 - DNA, 589 bp, Homo sapiens
gtgattccatcgtattttggtgactttctggatgagaaggctaaaaagaagagtggccccttttctaaaattccaaatctttccttttggaagatgacggcatgtgaaagaaataaaaggtgaaaagattggtaaaggatgacgggctctagtaccaactaaaggccaggggggacggtaagtcacggaggtgacacaaagcagccaggggttttcctcgcctttttgatggggaaaaggcacctttcaatcctagaagataatgggactgggcaaagtccctatgggtagcaactattttcttactttaaaaaaaaggggtgagcggggagccagacggtgcacatcagccaagatggctatggccaaagggagcccagaagcatccaggtacactttccaacaggcagaccctaccaggaacggggagacaagagcgggctctctcctgagataagacaagtttaaggtgaagacctttgggaaaatcccggggttgtccgggctctttacagtgggggtagctctgaggaatagggaggttctcatgaagatatcttaaacttccatgctctgagaaatctgagac

SEQ ID NO: 540420 - DNA, 287 bp, Homo sapiens
ctcgctgcactgtggaaagatccctgtgcgtatctctaggctgcgtgcccttttgtgcactgtaagtgagttaggactcttatgctgagcccaaagtgaaaagggttaccagaccactatcaatctgatctcagaccatctatcagttccaaagacctgattccgggaatcattgctttgtgttttaaagagccagcatttgtactgtgttctatggttgacaaataaatattgcacagatttttgatatatctctaggaaagaagacatctgcccatcaaggatga

SEQ ID NO: 540421 - DNA, 164 bp, Homo sapiens
cagaaacgccagggttgcactgatagagggaattcccgatgacttcatccctgattttccaaagatgatgatgggagcagtgccaggggcttccttctccggccaggccccagcctcttcgcaccctcagaagcacctcttggaaaagccaggccccagtctgc

SEQ ID NO: 540422 - DNA, 434 bp, Homo sapiens
catcacagatggggtgttaggggaaggacgattgcttttgaaatatgaggacatgagattgggaggggcggggaagaattatatggtttggctctgtccccacccaaatctcatcttgaattgtaacaattcccatgtgtcaagggtggggccaggtggagataactgaatcatggaggcagtttcccccatgctgttctcatggtagtgaataagtctcatgaggtctgatggttttataaatggatgttcccctgcacatgctctctcctgcccaccatgtctgactaaattttgtatttttactagagacgggggttcaccgtcttagtaaggatggtctcgatctcctgacctaatgatctgcccgcctcggcctcccaaagtgctgggaccacagacgtgcgctgccttgccaggctaaattttaatat

SEQ ID NO: 540423 - DNA, 179 bp, Homo sapiens
  misc_feature (45)..(45): n is a, c, g, or t
  misc_feature (123)..(123): n is a, c, g, or t
  misc_feature (142)..(142): n is a, c, g, or t
cagagatcctaacactggctgggaacctctgactcagagcatgtntttaaagagtccacatctggccaggcgcggtggcacatgcctgtaatcccagcactttgggaggccgaggcgggtggntcacgaggtcaggagtttnagaccagcctggcaacatagtaaaaccccgtccctac

SEQ ID NO: 540424 - DNA, 601 bp, Homo sapiens
  misc_feature (83)..(84): n is a, c, g, or t
  misc_feature (92)..(93): n is a, c, g, or t
  misc_feature (114)..(114): n is a, c, g, or t
  misc_feature (141)..(142): n is a, c, g, or t
  misc_feature (151)..(151): n is a, c, g, or t
  misc_feature (227)..(227): n is a, c, g, or t
  misc_feature (355)..(355): n is a, c, g, or t
  misc_feature (426)..(427): n is a, c, g, or t
agcggtgtcatcaacagcactgccctatcagtgaagtcaaagattgaagacggaactctttcaacacctttcaacgtgccccnnctcctttnnccttaaacgtcttttaataanggggtcccccctatttcttggcccaanntctcccaanatccattgactgaaaggatcaaagcgacacctgaacacagaggcgggcaaaacaaaagaaaaccaaaaaggggggntttccaaaccctttggggagccccaaaggggccaaaccttatgtggccctcatttggggggaggggggcccaaaaaacgggccacaccctgtttaggcgccccaaaaagaaggctcccaaatcgtccncggagcccaaaaaagattttccaaaaacccctcattgaggggggacggcacgcacagaaccattccccttnnggagaaacccaggaaagattgtggggagaaaacccccagaaaagaaactacttggggccgggacccacacccacgggccccacccccctattgtgacgcccaccccagacacagcacccgaccccatattttaccccgtttttgggcacaagagaggcggggaggggacaccca

SEQ ID NO: 540425 - DNA, 886 bp, Homo sapiens
ggagcgcgcatgcgccgcacgccagcgctctccccggatcgtgcggggcctgagcctctccgccggcgcaggtctgttcgcgccagtcgtcccgcagcatgacaaccatcatcgagcgggagttcgaagagtaggatactcagggtcggttggcagccggtgtgcttggaaattcgacccactgtagtcccatgacgtatcctgcatagagttgtggctcaagtttgccagagaaatacgaacatcgaacacgagagtgacagagatgtacgccgcatatgatcacaggcgtgtcagctgtgcaaggtgctgagaatgctgatattaatgtccagtcaagttagactagtagaagaggagccaaagtgagttaacatgcgttaaccgagagggggtccagtttgaatatacactgtgctgtccacttatcgtggtctggagtgggtcttgggcagacagtaaagaccaaaggcggattgtgcatgctgataccgtgattggtgggagacagcgaatgcggatttgactgtgcagaagtattggtgcaagagattggaccaaagaggattgctgtcgtaacacgaccggcgggagtcaggcgtgcacgctcagggtccgagaagattgttcagaggttgtatttctaacacggcactagtcctattgtgcctgggcaaataatctcaagcaggggtggaaaccagcagaatatctccacttccttccctagacgccgggcgcgaaattgggcgccctgaaatacgcagtgccttcatcagatttgcctggtcacactggcaccacctgcgcgcgtgggccggacacggccggggagccctgtgggcacgtcggcggctgaacattttgtacccgcggagcgcccgga

SEQ ID NO: 540426 - DNA, 285 bp, Homo sapiens
taatcgtcgtcttatttcccgatatagcattccctgcatcagtactgacaggctgggtagagggtgataaattcccttaattttgctcgcctgagacacactttatttctacctaatttttctctttctttttttttttaaagtggagtttcaatcatctggcccatgctggagtgcaggggcatgatctgggctcactgcagcctccacctcccgaggttcaagcgattctccgtgtctcagcctcgtgagcagcggggataacacgcgcagtgccaccagtgc

SEQ ID NO: 540427 - DNA, 907 bp, Homo sapiens
gactcagggaccggagcagccctcaactcactcttcagttccctgctgtgttgctaggccagccgctccattcatgtccttcagtgctgaccagattgctgaattcaacggaggcagttcgtcctgtttgacagaacaggtgatgccaagtatcaccttaaagccaggtcggtgatgtccttcgagctctgtggcacaaatcccaccaatgcagaggtcaggaaagttctgggaagaccccagcaatgaagagctgacatgccgaagaaaactgagtttgaacaattttctgcctatgatgcaagccatttccaacaacaaggaccaggcacctatgaagacttcgttgagggtctgcgtgtctttgacacctggaaggcaattggcaccgtcatgggtgctgaactccgccatgttctagccaccctggtgaaacagatcacagaggaagaagtggaagccctgatggcaggtcaagaagactccaatggtctgcatacaagtacgaagctttggtccagcacatcatgtctatctgacatgggagctctctaagacccaagcatgtgttctaggacacactggtgggcacttatttgtagtcaacaccccatgactaaatctctccagattctgtgtaccattcatcagggaaaacaaaagcaatctggagggttccaagaactgaggcaactccctgaatttttatacattcttcacgtttggtcttgaatgggattgcttaccaccccaaagaaagtgtgtgtggtctcagatggagacagcataacattttggcgatttaattccaagcgccatctttatattttccaggaacaagcacgattcttaacacatacatgctacacattggcgcgggcgcgtgtcaagagagacacgaacatac

SEQ ID NO: 540428 - DNA, 292 bp, Homo sapiens
ccagcactgtctacagcagttgattgctcctttcagggagtagcttgattcagaggtatatggtaggataaagaacctgtccagtagttctcccaaataacgaagcggtctctctctctctacagcattcatttctctctgtggggctcctcaatgccctataatcaactcataatccaaacatttcgtgaaatccatattttccagataaggagactggagtatatggtaccgaactatatattcgcagggttctaaatgccatgtgccatagagctgaccctccccaccg

SEQ ID NO: 540429 - DNA, 142 bp, Homo sapiens
acccagtgccacttgatcagcaggccattgccctacactttgtacattaacaaagccccttctgtgactccatatttcaacgcaactcactgctccaccacggtttctaactttcctctcagttccccacattccaatagga

SEQ ID NO: 540430 - DNA, 225 bp, Homo sapiens
ggtccgaaaataaggacaggatatataaagatggaaatataactagagtctggagagagcatgagatataagcactcaagtcaagtcttatttctagatctagacaacaaagcttactggctcccaaacacccaatattgttcctcaatataaaaattaagaacagtagaatgactttacccatactggactgacgcttttacatacagcacattcatctttcac

SEQ ID NO: 540431 - DNA, 826 bp, Homo sapiens
  misc_feature (18)..(18): n is a, c, g, or t
  misc_feature (21)..(21): n is a, c, g, or t
  misc_feature (27)..(28): n is a, c, g, or t
  misc_feature (39)..(39): n is a, c, g, or t
  misc_feature (49)..(49): n is a, c, g, or t
  misc_feature (51)..(51): n is a, c, g, or t
  misc_feature (70)..(70): n is a, c, g, or t
  misc_feature (83)..(83): n is a, c, g, or t
  misc_feature (90)..(90): n is a, c, g, or t
  misc_feature (98)..(99): n is a, c, g, or t
  misc_feature (106)..(106): n is a, c, g, or t
  misc_feature (115)..(115): n is a, c, g, or t
  misc_feature (175)..(175): n is a, c, g, or t
  misc_feature (189)..(189): n is a, c, g, or t
  misc_feature (214)..(214): n is a, c, g, or t
  misc_feature (216)..(216): n is a, c, g, or t
  misc_feature (220)..(220): n is a, c, g, or t
  misc_feature (222)..(222): n is a, c, g, or t
  misc_feature (227)..(227): n is a, c, g, or t
  misc_feature (244)..(244): n is a, c, g, or t
  misc_feature (246)..(246): n is a, c, g, or t
  misc_feature (259)..(260): n is a, c, g, or t
  misc_feature (266)..(266): n is a, c, g, or t
  misc_feature (272)..(272): n is a, c, g, or t
  misc_feature (278)..(278): n is a, c, g, or t
  misc_feature (281)..(282): n is a, c, g, or t
  misc_feature (292)..(292): n is a, c, g, or t
  misc_feature (301)..(301): n is a, c, g, or t
  misc_feature (304)..(304): n is a, c, g, or t
  misc_feature (328)..(329): n is a, c, g, or t
  misc_feature (332)..(332): n is a, c, g, or t
  misc_feature (344)..(344): n is a, c, g, or t
  misc_feature (346)..(346): n is a, c, g, or t
  misc_feature (349)..(350): n is a, c, g, or t
  misc_feature (365)..(365): n is a, c, g, or t
  misc_feature (370)..(370): n is a, c, g, or t
  misc_feature (372)..(372): n is a, c, g, or t
  misc_feature (405)..(405): n is a, c, g, or t
  misc_feature (422)..(422): n is a, c, g, or t
  misc_feature (424)..(424): n is a, c, g, or t
  misc_feature (427)..(427): n is a, c, g, or t
  misc_feature (444)..(444): n is a, c, g, or t
  misc_feature (452)..(452): n is a, c, g, or t
  misc_feature (471)..(471): n is a, c, g, or t
  misc_feature (499)..(499): n is a, c, g, or t
  misc_feature (503)..(503): n is a, c, g, or t
  misc_feature (592)..(593): n is a, c, g, or t
  misc_feature (627)..(627): n is a, c, g, or t
  misc_feature (635)..(635): n is a, c, g, or t
  misc_feature (660)..(660): n is a, c, g, or t
  misc_feature (730)..(730): n is a, c, g, or t
  misc_feature (802)..(802): n is a, c, g, or t
gccggcggggagagaagnggntcccgnncgagccccggncccaaggaangncgccgccccggagccgccngggagggcccccnccccacnaagtgccnntgtgcanagcaccagngcccacccgcacgcgcgcgggaccacgacagcgggacgggcaagggcggggcggggaggngcagacgacccaanggaccagcggcggggaacaagagcngngaangnaagcnggggcggcggggggagngngcgggaggcaaanncagccncggccnccgcgnggnnaagggacagnggcacgagngcnaggagagcacaaggggagcggccnnccncacacagacggngngcnnggatgacacaacagngaagngngagagcggggacacagcgggacaggagcgggancacagcctggcccccangnacnatcggggggcccaggcngccatcgngggcgaggagagcaccaanacagagacaggggcacgggccaagaacngggngaaggagcgacagaggcaggccagccccaacatcgtcattgcactcgcgggttacaaggcagaactggccagcaagagagccgtggaannccaggaagcacaagcctatgcagacgacaacagngtgctgtncatggagacatcagcaaagactgcnatgaacgtgaacgaaatcttcatggcaatagctaagaagcttcccaagaacgagccccagaatgcaactngtgctccaggccgaaaccgaggtgtggacctccaggagaacaacccagccagccggagccagtgctgcagcnactgagccccccttgcctgcccgc

SEQ ID NO: 540432 - DNA, 366 bp, Homo sapiens
ctcagcagtgaggaataattagcctagactgagcacagcgccagaatcccccaccaaatcatgacagcaacccgaagggattgaactgtttccaacaaacttaactgcatcgcagaacaaagcacacaattatttataggaacacaaacatatccagcacccagcgaagtaaaattcatggtgtctgacatccaataaaaaataaccagtcatgcaaagaaggaaaatatgacccatagtaaggagataaatacatcaatcaaaactgacatagaactgacacagaagccaggattagcagacaaggacattaaaacagttattataactgtgttccatatgttcaaaaagtcaaggagagacaaa

SEQ ID NO: 540433 - DNA, 442 bp, Homo sapiens
aaaaagggggggtatcccttttccaaaggctccaaggccctcctccccttccaaattcagggaccccaacccaagctcaactctgggacctttgttcccagcaatctcttgtcctctttgattaaagaagattctccttccagggcctaaagcctggggatttgggcccaagaagataaagaatcccaaactatgaggctagttctttgtctaactcaagactgttctggaatgagggtccaggcctgtcaaccatggggcttctgacctgagcaccaaggttgagggacaggattaggcagggtctgtcctgtggccacctggaaagtcccaggtgggactcttctggggacacttggggtccacaatcccaggtccatactctaggttttggataccatgagtatgtatgtttacctgtgcctaataaaggagaattatg

SEQ ID NO: 540434 - DNA, 387 bp, Homo sapiens
ctgacctgccaggtcacaaaccaagcacaggacactgatttagtgataggttaaggacgcaaagctttgtctacaaacttggagggtccgcagaaaggaacattacggtctggcacaggcaccatcaggaagaaactgagagcaaagaatggcggtcagagtttcgtccctggtgttcccccttatctgacgtctgtgtgcactccatttggtgggggtctgggtattctcgaaaagtcagctcaggggcacgtgtacaggatgtctctaggtgcactctcaacttccctggctattgtatgaaactgttatgaccttcttgcttatcagcttgctggtttccttctcggggcgagctgggtgcctggcagtttacggtgaaggaaa

SEQ ID NO: 540435 - DNA, 736 bp, Homo sapiens
gcctacagtttcgtttccatctcacgacgcgttcactgatcgccacgagtatactgcatatacgcaaagacacagacaatcttcagaaatgatcttttgccaccggagcttggaaattaataagaatagctggccatgcctgaaaggaacttctttcgcatcaacatttcgggtttggctgttggtaccagccatggcgataatggccggccattatcagttcttcctgcggttcgggtttggcagtaacatatatattttaaacacacttatcttgttttaaaagtttgatcttttcaatgaggcttcctggggcttcgttttattactatttttttcggtcgtgggtggatcgggggcgagatgctaaaatatagctgctaggatccagaaataccacactgtttcatatattcggcaacttgttcattggctagccttatgccagctgcactgtccaatatattctgttccccttggttaccaagcttcaatataactcttgtgttcaggcgaaatgaggctttttatcctatggtaatattttcaattgatcataagatgtcattaaaattctactgttgtaataggagaccggtgtacccaaattactcttgacctttctataaaggacacgcaatggagtcgtccttgctctcacgcaggattgactccctcatgttcaaactcatcatcgacttcaacagctaatcctagtcttcctaagaatcaccaa

SEQ ID NO: 540436 - DNA, 1541 bp, Homo sapiens
  misc_feature (822)..(822): n is a, c, g, or t
aaaagccctctttgatgggggaaggggaggactggaaaagcagagagatctttctggatgtcctgggagagcagccctttgggtggtgggtggaggctggaggcagggaggaatcccctcacagtgccatgagaagggcccccaaacccaggcgagacagagggagggtcaagaacgccaaggcaaatgtcacttgtgccttgttttttccctaaagaaactaaacaaagcggccgcgttcggtggcccctcaggaaggccggtcatttcctgaggagatatcaggccagcccaggccccattgttcccggtttccagccatggctgccattacctgaccagcgccacagccggtctctctgcaggcgccgggagaagtgaccagagcaatttctgcttttcacagggcgggtttctcaacggtgacttgtgggcagtgccttctgctgagcgagtcatggcccgaaggcagaactaactgtgcctgcagtcttcactctcaggatgcagccgaggtgggcccaaggggccacgatgtggcttggagtcctgctgacccttctgctctgttcaagccttgagggtcaagaaaactgtaagtctgatgtttccactgtaacagatgtttctacctggcttcctcctttctcttctgtgatgcctaaaacgcacattaaattgctggggtttgatacttctaacaattaaggaaaagaatccaattgagaactaaagtttatcccatgtgggcatttttagaaaggcttagatctaagccaagttctggtcagtgtgttttagaagtagcacacgtttccttgnctggtctgaaagtagtgggttatcttgatgaattgttaagtcagttacagatcaaactccatgttcttttctctgttctcacgactactcttgactagtctaaaaatatattaggtgttgaaaagtaatcgtggttattgccattacttttcttaacaagatggcaaaaaacacaattataagtagcacacatttctgtcggtttccctttagtttggagacagaagtctcggtaacccaggctgggaagtgcagtggaggcaaacacagagaaactcaggagaaagacagcacacacatggatccaaggacaatgcgccggacgaaggcacactaagagtagccgggcacttacgagccctttgcacaccaggtactcagataaaactaagaagccagaacacaagataagaagataagagacaacacccaaggtgggcgccacagagagagggatactagagcgaaagcggacacacacgaggccacaaccagacaggacgcaacaagcgacagcacaacgcgcagcagtcgatgaaaccgatgtaacgacacacgcaggaagcacgacgggacgacgcaaaagcggtacgaagaaatacgcaacggagtagaaggagaagagggagcaggacaagcatgatacccgggggaaagccaggaaggcgaacaggcccagcaccaacggagcagcgcggcagacggcagccgagaccgac

SEQ ID NO: 540437 - DNA, 100 bp, Homo sapiens
gcgtgtcgggtgctaggctgcagacccgccgcatgacgctgcgcgcggccgtcttcggaccttgacggggtgctggcgctgccagcggtgttcggcgtcc

SEQ ID NO: 540438 - DNA, 261 bp, Homo sapiens
tgcacatttcaccgtgtcagtgagccacattgatatggcatgtccaaagacagcacagatttagaatatactacatcattgtagaaagctctattgaacgctgctgagtaaaagggtcaattgggtttggttttgagatcggagtctcgctctagtagcccaggcttggatatgcaatggcaaggatactactgcatcacttgcaactctactgcctacccaggatacgagacaatccatcctgtatacagccccccctaa

SEQ ID NO: 540439 - DNA, 271 bp, Homo sapiens
cgcggtatctagaggatcccacgacggtctctcgatccaagtggacttgtactatactggatcagctgcaaagtagggtgtggggtttttgttgtttttttgtttgtttgttttttgcttttttgttttgagacggggtctcgctctgtcgcctaggctggagtgcagtgttgtgatcttggctcactgcaacctccacctcccaggttcaagcaattcccatgcctcagccacccgagtagctgaggacatcgttggggtaccgagctcg

SEQ ID NO: 540440 - DNA, 364 bp, Homo sapiens
  misc_feature (103)..(103): n is a, c, g, or t
  misc_feature (223)..(223): n is a, c, g, or t
  misc_feature (325)..(325): n is a, c, g, or t
gtggtagagtcccccctatgcgcttgcccttgggccgcaagaagggagccaagctgtctcttgaggaaaaaagagtttttaaccaaaaaccgttttaaaaaanttcagaagaaatatgatgaaaggaaaaagaatgccaaaatcagcagtttcctggaggagcagttccagcagggcaagctttttgggtgcatcgcttcaaggccgggacagtgtggccgancaaatggctatgtgctaaagggcaaaaagttggagttctattttaggaaaatcaaggcccccaaaggcaaataaatccttgttttgttttcccccatgtaanaaaggtgtttattgttttgttcccccaccaaaaaaaaaa

SEQ ID NO: 540441 - DNA, 294 bp, Homo sapiens
  misc_feature (153)..(153): n is a, c, g, or t
  misc_feature (255)..(255): n is a, c, g, or t
cagctggcttcatgcttgcccccagggtacctgaacccccaaaaatttttaagcgggtggaaaggtttgggtagggcccccttgtcgttgtgctaaggatcacctactcttttgcagcgtgcatcgcttcaaggccgggacagtgtggccgancaaatggctatgtgctaaagggcaaaaagttggagttctattttaggaaaatcaaggcccccaaaggcaaataaatccttgttttgttttcccccatgtaanaaaggtgtttattgttttgttcccccaccaaaaaaaaaa

SEQ ID NO: 540442 - DNA, 229 bp, Homo sapiens
tctaggattgacacatagaatgccacacaaggtacctgcacccaagtgctgagcctgccacccaaagtgctgagcctgcagccaagttcagagcatgccacccaaggtgcctgagtcctgcccttcaatagtcactccagcgccagcccagcagaagaacaagcagaagtaatgtggtccacagccattcccttgaggagccggccaccagatgctgaatcccctatcc

SEQ ID NO: 540443 - DNA, 303 bp, Homo sapiens
atttggagatcatacttctctgaatgtccagttggaaagatgtagagttgttgcccaagactctcacttcagtatacaaaccattaaggaagtgagagttgttgcccaagactctcacttccttaatggttgtatactgaagtgagagtcttgccactttagaacatttgtacaaaaagaacagtgtgacttctcaaattcattaaaatgtacagcagtagaaataagaaacattattgaaaaagtaaaatgttctctggaaataacactaaaagaaaaacatcaaaaagaactactgtcttt

SEQ ID NO: 540444 - DNA, 402 bp, Homo sapiens
tggctatggtttgatgcccttcagctcctcaccgtgcctggctggggcatgtgcatttgcatgagcctgttctgaccatgggctgctcaggggtcccgggcaggctgtggtctctgcagtggcctgtgccgagttccttgtgttgctgtgacagtcccccaggtcaggtgattcatgaacacagaaacttctcagagttcttgaggctgaaagtcttagaccaaggcctgggcaggtttggggtctggcgagggccctaggttccctgccgtgtcctcccatggagggtgggagggcgacagctctgctgctgaggcctgggggtagggactttcatccccttccacacctcaccacctcctaccggccccccgcctcctaccggccccgcctcctaccggc

SEQ ID NO: 540445 - DNA, 463 bp, Homo sapiens
  misc_feature (463)..(463): n is a, c, g, or t
ccttattgttgactgctaacagccatcatggggcgtacgcatgctaccggcaagggcctgtcccagtacggctttacgctatcgatgcaactttcccactagtttgaagaggacatgagcctacgtgcctgagcagatttacttaactggccatgacgggtctgactatttcacagatcgaagatactctgatagtaccactatggtgacgcacaagaccgttccgtgacatgggccttattacgagcgaatacctgcttctactgcacttgcacctgacctgactggagaacgctaccactctaatcagcttaaactcgactgactctatttgagagccgcattcaccgtttggctcgatattataagaccaagcggttgctcgcttccaatcggaaatatgtatcatctaccgactttgtgcttgccgcctaaatttgagctgagtcgtcagctatacacn

SEQ ID NO: 540446 - DNA, 273 bp, Homo sapiens
gttttttttattcccaaaaatttttttaaaaaaggggtttttttcccccgattcctaaattgggtcccgagggggggggaattaaaacccccccgggggccggccaaatgagagggggcccttttaaaaccccccctttttagttgggcaaaggggcccgggggggttattggggggttttaaagggggtttttacctcccgggaaccgggttggggccgggttttttttttttaatttggggggttttccccctggtttacccggggtttta

SEQ ID NO: 540447 - DNA, 194 bp, Homo sapiens
gaaagcgtgagagtaatcctggagataacccaaaagttgcacatggaagtgggagatacatgaggagtatggcggacctctaaaggtaattaccatacttggatcataggacagattcacagaatcatgacacttccattgtttatacgcacttatgcagttcacaaacttgcttttacgctacagacatctta

SEQ ID NO: 540448 - DNA, 177 bp, Homo sapiens
  misc_feature (12)..(12): n is a, c, g, or t
  misc_feature (173)..(173): n is a, c, g, or t
agagcggcgggntactactctgctggcgaagaagacgacagaaggggaaagaaacttggactcattgtcctctaagagcttttccaactctaattgtaatgagtattgataattttcatcatatttgtaatgggtactgattcgtcctccctacttaagcattagtgctcacnctta

SEQ ID NO: 540449 - DNA, 460 bp, Homo sapiens
  misc_feature (39)..(39): n is a, c, g, or t
  misc_feature (147)..(147): n is a, c, g, or t
tgttttagggtggttattatgttttttttgtggtttttnggttaagagtaagttaaaaaatattttggtgagaatggtgagtgaagttgggataggtttttgttttaatattaagagaaattgattgtgggaaaaattgattttttngtattatgatttagttgtgaaataaagagttttttttgtggaaaagaaaaaaatatgttttttttaaatggtggattgaaaatgattttgatttataaagagaagattgagggtggggatattgatttagaaattttgtagtgtgtaataaaagaagaggaaatggtatggaattattgttttttgtgatttgaaggttattgtgaaggaaaataatgtagtgaaagaaagttttttatattaggatagatattattgtattatatttatttatttttttgggtatttttatagtttttaataaaaaatatta

SEQ ID NO: 540450 - DNA, 476 bp, Homo sapiens
  misc_feature (224)..(224): n is a, c, g, or t
taggctgaatatccactttgtttttatggatggctcccttcccccattcgccttccaagaatatccttcaagttccacttccaagggagctctgggggaggggcggccattctggctccgtccccagtggccaccttggaaacatcggctggctttgggactattccacctccttcccctgagcccagatctgcccccaccatccttcaagttccacttcccanggagctctgggggaggggcggccattctggctccgtccccagtggccaccttggaaacatcggctggctttgggactattccacctccttcccctgagcccagatctgcccccaccatcctttctctggcttcttttagcaagttatcaactaatcactaactccttccttttcctctgcatgccagcctgaaaattccaaatctagcctctgaatgtcttggctccatctcttcagacccctttgccttta

SEQ ID NO: 540451 - DNA, 114 bp, Homo sapiens
ggcctaagcctgcgtgggtatagtcggcggattaggatgtcacccccatccctcgcagcatccaaaggggtgcgtggtccgtctgtgacaattcctcaaatttttgttaatatg

SEQ ID NO: 540452 - DNA, 301 bp, Homo sapiens
acacctgagaacccagtctctaaggggactgtctcactctgactcccgtccctcatgtgctgtcccggtctctgaggcaggaactggaggatgtggctggccctgcgagccgtctctcccctactgctgggaaaatgagtccagcggaaagccagagtccccacattggctacatgaaggtccccatttctcccgagtctcatgggtgtggaggctgtgtactacagtgccaccaatcaactgccccaggtgccagccctcaaattctcaacttaacattaccctgtggggattaggcagt

SEQ ID NO: 540453 - DNA, 918 bp, Homo sapiens
ggtggctgctctgggaccacccgaacccgcggccatggccccggcctgccgccagccccccgtgaggtgatcccgcgcggcgcagaaggaccgagtactacctgctgtgtgggctgccgggagcgctggcgtggcggcgccctgcacagcctggcgggtgaggggccgggctgccggcccggacgtcctcgcgagcggcccagtgggtgtgttgcccctcatggagtgcggggtgtctgccgtgtgtggtcacggtcgcctgggcccgtcccacaacctggtgaccccgtgcagtctccttcgcctgccctgctggcattcagtggatgtgcgtggtggcacctcctgccctccctggccagttgtggccccagagtgcacagtgccgcagacaccgggggggacctgcgtggtggcctccagttcccgccaagcccttcccgtccccagctcagggcaggtccagctgacgccagcggcttggggaagactctgtcccctccaggtgtgaggccttggaagtgcttcaagcctccctccgatctcccctgtgagcagaggggtcagagcgccgctgggcgaacgcctcatacctcggtccgggtcacactgacccggcttatctaggctgagcagagcccaggccccctagcactgattgaacccagtgtaggctcagcagggcccttgctgctcaccaagcggcgagctgagtacagaagccagtggtctccaatgaagcagaactgtatccagcagtttgggaggcacaggcggaggatcagttgagccaggagtttgaacccctggaacatggcagaaccgtttctaacaaaacttaaattagcggaagtgagaggaatggaaaccacactaagagaggaaaaatacctaacccgggaaacgtagagcgatgca

SEQ ID NO: 540454 - DNA, 267 bp, Homo sapiens
  misc_feature (58)..(58): n is a, c, g, or t
  misc_feature (104)..(104): n is a, c, g, or t
  misc_feature (108)..(108): n is a, c, g, or t
  misc_feature (115)..(115): n is a, c, g, or t
  misc_feature (120)..(120): n is a, c, g, or t
  misc_feature (131)..(131): n is a, c, g, or t
  misc_feature (172)..(172): n is a, c, g, or t
  misc_feature (229)..(229): n is a, c, g, or t
  misc_feature (261)..(261): n is a, c, g, or t
acttcctcgggtggaaaatggggttaataaagtataccaggccgggcgcagtgggctnaacttcctgttaattcccaacactttgggaggccgaggccaggcgnaatncacttgnaggtncaggaattagnaaaccagcctgggccaacatggatgaaacttctgttctttnacttaaggaattagattagcccagacgtggtggtgggcgcctgttagttcccagctnacttctggagggctgaggcaaggagtgtttgncccggg

SEQ ID NO: 540455 - DNA, 139 bp, Homo sapiens
gtagcaggtcaggagatagaaagcgttgaacgatcatgcccgccatcatcctagatcctcatcgccctcccatccctacgacatcctattacatcacagacgagggcccacgatccctcccttaccatcaatatcaatt

SEQ ID NO: 540456 - DNA, 859 bp, Homo sapiens
gtatgtgaattttcgtatgttgccactgagggttcagatgatagacctcaaaaaaaatcgaaaatactggttgaaattgtagcatccatttagttattcttttgacctaaataacttaatagtttattaaatctaaggttagctaaatatgtagctaaccttattgttttctttcctaacaactctgaagaatacataggactttgcacttttttttttttgtttttttttttaaaagaaacggggtccggcctggtggcccagggtggggggttgggcccaccgtgggcccttggaccctgcaacctccggggtccaaggggatctcgggcgcaaagcctccgggagaagcgggagataacgcgcaccggccacaaaacccgccaaattttggcggatgtccaggggacgacggggtttcaccattgggcgccagggggggtcttcaaactcttgagggacctcgggtgatccacccgcattgggcctcccaaaggggcgggggatcacaggggtgtgagccccaagggcgcggggccgggacttggtacttctgccaaatgcatctcaatatatcgctggaattatttacccaaaagaataattcggggcgagaagtgggaacgttaacaatataaacggccgggccgagaaatttatggtgctgaagaccttcaccacaattttttttattaaacctcaagtcggttaactgggggaccctggtctgcgggatgtgaaattcgggacaaagctgtgtcaatcggggcattacgggtagtaacccggaccaatatttgttggggtgtgcccaaaaggggagcataagaccttagagggaatgttcccacaggttccg

SEQ ID NO: 540457 - DNA, 197 bp, Homo sapiens
tcacgcccattcacaactggctaatttttgtatttttggagagatggggttttgccatgttgcccaggctggtccggaactcctgggctcaaacaatcccaaagtgctgggactataagcaggagccaccacgcccagcatctacccacattctcaaccacagcttcaagagccacccccccctccccccccttcca

SEQ ID NO: 540458 - DNA, 415 bp, Homo sapiens
tcgctttgtcttaactttaatgcaattactgggtcatagcttttcacattttaattaagaagagagaatattttctatatttggctaataagttttgctaataatttttagttaacaaatttttaaaaaagcacaacccaacagagattctttggttctacagaaagtctgtatccacccccgtaggggtgggagagatgaaggaggaagaggagagacaaagagaaaaacattaaaaggggaaaaagcaagttggacaatatgcctcaggtaagacaaacacaaagatggggaaagaggtggtaacggaccaacagggaccatcttctatgagcaacaagcttccatgagcctggtaaccctccaggcaatgcagctaaagccttgcacagctgagtgacattctggtaccaca

SEQ ID NO: 540459 - DNA, 312 bp, Homo sapiens
tacacaacctagggtcagttttgcaggtgtaagccatttaccaagatagttgtaggtaaagaagggcagatttattagagaaattgtgaaaatatgttgcagtgggcagctcagcagagaaggggctacctgcaaagaggcaagggctggaggaaagttttatagggtcctgctgaagggtgctacgtgtggaatgaggtcattgtgcccgcaggttgtttgtgattagctgtttctaacaattgttcatacaataattgttcattattgttctcaacttggggctctccccaacctggggacccttcctta

SEQ ID NO: 540460 - DNA, 389 bp, Homo sapiens
atttcccctgtcccgccccctcccaggacaaccaccccatttccagggcagcacctgcgctcccagctgccgtgcccgcttggtgcctgagtccgggccaggcagcccccgcagcgcccaggccctcgccctcgccctcgccctcgccctcgccggccccagcgccgccctttgcccggcctgggacttctctgccgggaaaggggaggcgagggcccctaggccttaggcaaggggctcaggcccaccgggtggggtgcgtgggccagggccgccagccccggggtgacttggctggagccggaggaaggagttggaggagggagcccggccggcaggggggcagctgtgggggcagcgcccgtggccgccccattagtatgcggccg

SEQ ID NO: 540461 - DNA, 3645 bp, Homo sapiens
ttccgctgctccaggtcccaggctcagccagagcaaaggctgtggaagggggtgttccaagcaccatcagtgtttccccaccatcacccagacccaagtgcagggactgaccttcccggtttgccaagtactgtcccagttttagcactgaaagtcccacatctcaggaaacccttcagtcctgcgtaagcaaggacaactggtgaccccagatcgaagctgtgcaattaggaaggggactcctctcagcccctggccagtgcttagctgctttggagatgagactcgtctcctgaatctgagaagtacagtcatttgctgcaggaatcaactcgtcccctagatatcggttcccttattcaacaactgtggcctgctataggagtcaatttcttgttacctttggtcaggggaataagacttacttttgagtttttcatggttttccccagtcttccccgcccgccccaccaagcttcccctctctaagtgcaacagaagcctcctcttagagggaaggcttccctggtctctatctcactgctcttttcccagaggagtgagctttagaatcacaaaagggcttgcacccagggctcttcctggtcctgcccccagttctctgaagtcagccccctcctcccatctcagcccctgagagagggtggtcagaggtcaggacttcttgctccttcatctgaaaacttgtgaccatgccagttgcaccctcctgtgccctcttcccttggctaactcacagcaacggcctttgggggtccacacgggggtcagaagagggctgcacatggagggggccctttccaaagtccttgtttgaggccccagcatttctatgtatgcacctgctctaaggtgtttccaaaaattaatgggcaacacccccaggtgcacagtcaggctccctttggtgtgtcccggaggccagcctccctggagctccatggcttctcaccggcacctgtgtgaggacgacatcccgcctttgtcccctgagcccacacctgctccccagagtcactgttgagtgcctgtgagcagcttctcagtgcacatcccatcagtaacaggcgcaacagcctcaacagctcagtgggttcccagcgatccacaatttcttcacgatagcttccttttctgtagaaagcagaacccagaacactcccctgggagattctgctgctagtcaggaagtaaaatgtgttcccatttctcgttctcatagtttgctcagcaggaaatcacctccagtcagagcagtgataaatcagaacacaaacaagcaaaggcagcacttgcctactttgggtcacaacacaggagcttcccctgcccatgagttgagtgggcctttcttctagctactggccttggcttccccagtactcgcaagtgtccaagttccctctgacttgcaccacagccaccacgtgttccttccactgtgagttaggagaggcttccagggagaggacttcatgtggctgggaaggacactgtgttaaccgggatgtcgggccccctgagctcagattctgtccttgtttgtggctgtgttgctgtgcctgggaaagtgtctcacacatgagtttggtagatggagcctcttgagctttcaccctcaagtagcacaagtggttcctgaggaggaggtgtgatcgccttcctgagcggtcatgcaaatgctgggtcggagcagaattgctggagtcagaggagaggctgcggggtggggatgggaggaaccgggaaaggaggcctgttgactggggaggtgggaaggggctgtggagagcaggctcatctgatgaggatgaggggttgatactgaggtgccatgtaagttctcacttcatttctcccacaaatcctccagtgccatgccccttgctcacagatgctctgatgtgaacaggttttatagtggaaaaggtcccaggccagaactgaggctgtctttgaggacaacgtatgatgaacacagtactgtttcctcttcctttttttcacttgaggtgaaattcacttaacataaaattaaccatttcaaaatgaacagtttgctaggctgggcacagtggcttatgcccataatcccagcactttgggaggccaaagtgagaggactgcttgaagcgaagagttcaagaccagcctgggcaatatagtgagactccccatctctacagaataaaacaaaactaaaaaattagccaggcctggaggcattgctactcccagcaatgtccagctactcctagctactcccagctactcccaagtagtctcagctacttgggaggctgaggggaaggactgcttgagcccaagaggttgaggcagcagtgagccatgaccgcaccactgcactccagcctgggtgacagagcgagactctgtctctaaaacaaaacaagacaaaacaatttggtgccattcagtaaatttgcaatgttacacgtctctatctagttcagaaacatttgtatcaccccaaagaaagacccagagccattaagcagccatgctcccatgtcttctcccctggacatgtgtcttccctgctctgtccctggctctaggcccagtgacctggggaagaacgcaggggacacgctgcctcaggaggacctgccgctgacgaagcccgagatgtttgagaaccccctgtatgggtccctgagttccttccctaagcctgctcccaggaaggaccaggaatcccccaaaatgccgcggaaggaacccccgccctgcccggaacccggcatcttgtcgcccagcatcgtgctcaccaaagcccaggaggctgatcgcggcgaggggcccggcaagcaggtgcccgcgccccggctgcgctccttcacgtgctcatcctctgccgagggcagggcggccggcggggacaagagccaagggaagcccaagaccccggtcagctcccaggccccggtgccggccaagaggcccatcaagccttccagatcggaaatcaaccagcagaccccgcccaccccgacgccgcggccgccgctgccagtcaagagcccggcggtgctgcacctccagcactccaagggccgcgactaccgcgacaacaccgagctcccgcatcacggcaagcaccggccggaggaggggccaccagggcctctaggcaggactgccatgcaggtgcgctgcgccacacgtgggttcgtgtgcatttgtgtgtgtgtgtgcatgcgtgagtgcgtatgtgtgtacctatgcatatgtgtgtgcatgtgtgtgtgcacgcatgcatatgtgcgtgcatgtgtgaacgcatgcatgtgcacacatgcgagtgatggtcctgggaactgctccatgagaagggagagtcaggatttgaacccaggtctgcctgtcccacacatccctgaccctgcattgcctctgcagcagttgttaaaaggaagaaaggcggggctgtggataaacttagtctagtgtcagtcccagaggaagaagattccataaagaaaaggagcctaaatcatttatatctcattgttattataaatttgttttgcaactgagtttcgccaggtgatctgcctgcctgggcctcccaaagttctgggattacaggcatgagcactg

SEQ ID NO: 540462 - DNA, 371 bp, Homo sapiens
caatctttacaaactttctactgactatagtgaaagatacgatgtcactattccctgaaataaacagttaaatttataatatcatattctgtgtgtatgagatacctctaaactgagtgtctatactaaagtctcttaaaaccagggctaggaattactatctaaaagttatggctttgttaatggcgggtttaaaatatttcagggactttgaattttaaggaaaacttgatatactgtacctatttcaagatgaagtgaaagttaggctagctgttaccatgaaatacatgatgtctagctagatcctttgtgcataatgacacagactgatcaatattcaagcttgttgctttaaaatgttaacctgc

SEQ ID NO: 540463 - DNA, 1043 bp, Homo sapiens
  misc_feature (27)..(27): n is a, c, g, or t
ggggaaagctccagcatttttctaatnctttttctttcaagcacgaacgccctgtttgtcagtaacttcatttatgttctctaagatcttgttatatctcccctcccaaaagtcacaaatccaaagagagagccggtggggggcgggggacctgcaattgcattggtgactgcccggaacccggcatcttgtcgcccagcatcgtgctcaccaaagcccaggaggctgatcgcggcgaggggcccggcaagcaggtgcccgcgccccggctgcgctccttcacgtgctcatcctctgccgagggcagggcggccggcggggacaagagccaagggaagcccaagaccccggtcagctcccaggccccggtgccggccaagaggcccatcaagccttccagatcggaaatcaaccagcagaccccgcccaccccgacgccgcggccgccgctgccagtcaagagcccggcggtgctgcacctccagcactccaagggccgcgactaccgcgacaacaccgagctcccgcatcacggcaagcaccggccggaggaggggccaccagggcctctaggcaggactgccatgcaggtgcgctgcgccacacgtgggttcgtgtgcatttgtgtgtgtgtgtgcatgcgtgagtgcgtatgtgtgtacctatgcatatgtgtgtgcatgtgtgtgtgcacgcatgcatatgtgcgtgcatgtgtgaacgcatgcatgtgcacacatgcgagtgatggtcctgggaactgctccatgagaagggagagtcaggatttgaacccaggtctgcctgtcccacacatccctgaccctgcattgcctctgcagcagttgttaaaaggaagaaaggcggggctgtggataaacttagtctagtgtcagtcccagaggaagaagattccataaagaaaaggagcctaaatcatttatatctcattgttattataaatttgttttgcaactgagtttcgccaggtgatctgcctgcctgggcctcccaaagttctgggattacaggcatgagcactg

SEQ ID NO: 540464 - DNA, 467 bp, Homo sapiens
tatcggcctctatgtctcgatcgtagagatcagcatgtaatagtgtgttagctaatgaagcctcagtaaactattaggacaatgaaacttctatagaacatttatttgcatcctgttattatgcgtgtatataaggcttttcataacagttacctactctttcttcaatagagtagcttatttactctgtaaaatggaaatcgcttataaatcactttagaattcaaagattaacttatgtagagtgttacagaattttgccactaacaccaaataaattatatttgaaaaagtggtagaagtgacggaaggatagtaatatacaatagttaactcttgaagatcgtatggggattaagtaagtacttctggaagccttttttcctaagatatggggatgggggacaggaggaatagatactgttctacatttgcgttaatattatttctcaacagtatcatttctt

SEQ ID NO: 540465 - DNA, 859 bp, Homo sapiens
gtattttgttgttagtattgtgctcattaaagtttaggaggctgattgtggtgaggggtttggtaagcaggtgcccgcgccccggctgcgctccttcacgtgctcatcctctgccgagggcagggcggccggcggggacaagagccaagggaagcccaagaccccggtcagctcccaggccccggtgccggccaagaggcccatcaagccttccagatcggaaatcaaccagcagaccccgcccaccccgacgccgcggccgccgctgccagtcaagagcccggcggtgctgcacctccagcactccaagggccgcgactaccgcgacaacaccgagctcccgcatcacggcaagcaccggccggaggaggggccaccagggcctctaggcaggactgccatgcaggtgcgctgcgccacacgtgggttcgtgtgcatttgtgtgtgtgtgtgcatgcgtgagtgcgtatgtgtgtacctatgcatatgtgtgtgcatgtgtgtgtgcacgcatgcatatgtgcgtgcatgtgtgaacgcatgcatgtgcacacatgcgagtgatggtcctgggaactgctccatgagaagggagagtcaggatttgaacccaggtctgcctgtcccacacatccctgaccctgcattgcctctgcagcagttgttaaaaggaagaaaggcggggctgtggataaacttagtctagtgtcagtcccagaggaagaagattccataaagaaaaggagcctaaatcatttatatctcattgttattataaatttgttttgcaactgagtttcgccaggtgatctgcctgcctgggcctcccaaagttctgggattacaggcatgagcactg

SEQ ID NO: 540466 - DNA, 879 bp, Homo sapiens
  misc_feature (29)..(29): n is a, c, g, or t
  misc_feature (555)..(555): n is a, c, g, or t
cttcctgctctgccaatgcattggcaggnagtcaagttgggggagcaggttgtgtgtgtgaaagaaatttcaaccctcatcttccatagtggacagtcaaaaatgtaataggacataatgaaaactgaaacatcggaaagtattaatctaagcattttttttttaagaaacagagtagaattccaaaagaatccattaagagagttgaaattggttgcctatagggagctggacattgaagagaggttgggttgtggaggactattgtttgcaaaaaccttatagaacaacgactcttttaattgttgatgacagtaaaatgtaaaattaaatttagatataaattaaaaacaaagcaaaagaaggaaaggaggaagagtaaggaagaaaggagggagggagaagaggaggaagaagaggagaaggaagaagagagaggggaaggagggaggcagggagaaagatgaaaagacgatcacgctgtctctgctctggccaggccaactcttgcttgttccagacatcaccctccccaagcatgagcctctcttgggnagagcagctggaagcagagggagctgggagaccagacacaaactcggggctcagcttggggacgggagttgatagtcaggtgcctggaacataatggagaccgtccatattggttgaatgagtggatgaatgaattaatgaatttcttttctcttaagtcctgcagctcattaagtcacagaaatttctgaataagttggtgatcttggtggaaacagagaaggagaagatcctgcggaaggaatatgtttttgctgactccaaagtaagtgacagcaaacttctgtgggctgtgaggtagggaggggacacgcgttttgggct

SEQ ID NO: 540467 - DNA, 245 bp, Homo sapiens
tccccccaatctcatgacctcgcccacatcagtggcggacattcgggtcccaatattactgagctggctcggaagaacctgcacggggagctagacaagtctggtctcagccagattgaggagagcaccacagtggtcaccacacagtctgctgaggtcggagctgcttacacgacgctcactgagtcttagacgtacgagtctcaggtccttggtacgtatcgacctgtcactccattatagat

SEQ ID NO: 540468 - DNA, 390 bp, Homo sapiens
tttatacgtacgtagaggctgtgctatgtgatatgcttgcgctgctaagattagaaatgtcctagcaattcttaccactatgtacacctacaccctttatccccatactagttattatcagataccatcagcctcactcatacaaccaattagccctgagtccgtacgcctaatccgcttacattactgcatgccacgcttactcatgcacctatttggaatcgccaccctagtcaatatcaaccattaagccttccctctacacttatcatcatcacaattctgattctactgactatcctagaaatcgctgtcgccttaatccaagcctacgttttcatacttctagtaagcctctacctgcacgatatcacatagttcagcgtctga

SEQ ID NO: 540469 - DNA, 257 bp, Homo sapiens
  misc_feature (11)..(11): n is a, c, g, or t
  misc_feature (13)..(13): n is a, c, g, or t
  misc_feature (45)..(45): n is a, c, g, or t
  misc_feature (149)..(149): n is a, c, g, or t
cacgagggctntntccctttgtctggcaggctctgcaaaggggantgaggccagtggttctctgtgtcccagaggtgtccctgggagatgtagtgtcactggactagagattcatccttgctatctctgatgcaagacgattgtatcanttcaggctctggaggtaggacagggagcagaaggatggggactaaagccatggaagaaagacagaaaaatcaccttttctatgtgaagtgaagagacaacggaacccg

SEQ ID NO: 540470 - DNA, 491 bp, Homo sapiens
  misc_feature (194)..(194): n is a, c, g, or t
  misc_feature (215)..(215): n is a, c, g, or t
  misc_feature (320)..(321): n is a, c, g, or t
  misc_feature (324)..(325): n is a, c, g, or t
  misc_feature (337)..(337): n is a, c, g, or t
  misc_feature (341)..(341): n is a, c, g, or t
  misc_feature (344)..(344): n is a, c, g, or t
  misc_feature (346)..(346): n is a, c, g, or t
  misc_feature (348)..(349): n is a, c, g, or t
  misc_feature (354)..(354): n is a, c, g, or t
  misc_feature (363)..(363): n is a, c, g, or t
cgtgacatcgccagcagtccaggctgcatggcgtagtttcaggagcatggtacatgaagacgtttcctcgggccctctttgcccaggcactggccatgtcgattatagggcagatgataaagtagtcccgggtggcattctccagagcccgggagaaggaggcatagtcatccgtggagtgctccagagagtantaccatgtagcagcagcctcnacgcgggcatctgagtcctcgccacccagtagaattctaaagatgcctggtaaaagtctgttttgctactggtccggcctcgactttcctcaaattggttcacannctnngctctggtgatnagcncgncntnntgagnactcccaangagcagatcgacctctacccgtaaagacctcttcagtgctctggctggaggctcacggaggaagtgccatgcagatcacaggacgacagtgagtgggataaggccactcactggccagagctgtagcg

SEQ ID NO: 540471 - DNA, 4639 bp, Homo sapiens
ggggcaggccgtggtcccagttgagaagctgtgctcccttgggtgttttggaggttcagggtgggtgctgaaaagccccgctgggtacagatggttcgggggcctgtctagggcatggcatcccacgtgggtgtcagcacggccgcagaagaaccacttctctggcccacccatgcctgctaggccatgcttcttcagaagtggccacaactctcctgacgtctccagagccggtcattccacccagggggacttcagctgccactggacacttcaattgtacgctgcgaccagttgccaggaaggagagggctggcaagagagccgcggcagccgtggcagggtgtaggggacggtggacggccagggcccccccctctctctctttctctctctctctcttgcttggtttctgtaatgaggaagttctccgcagctcagtttcctttccctcactgagcgcctgaaacaggaagtcagtcagttaagctggtggcagcagccgaggccaccaagaggcaacgggcggcaggttgcagtggaggggcctccgctcccctcggtggtgtgtgggtcctgggggtgcctgccggcccggccgaggaggcccacgcccaccatggtcccctgctggaaccatggcaacatcacccgctccaaggcggaggagctgctttccaggacaggcaaggacgggagcttcctcgtgcgtgccagcgagtccatctcccgggcatacgcgctctgcgtgctgtatcggaattgcgtttacacttacagaattctgcccaatgaagatgataaattcactgttcaggcatccgaaggcgtctccatgaggttcttcaccaagctggaccagctcatcgagttttacaagaaggaaaacatggggctggtgacccatctgcaataccctgtgccgctggaggaagaggacacaggcgacgaccctgaggaggacacagtagaaagtgtcgtgtctccacccgagctgcccccaagaaacatcccgctgactgccagctcctgtgaggccaaggaggttcctttttcaaacgagaatccccgagcgaccgagaccagccggccgagcctctccgagacattgttccagcgactgcaaagcatggacaccagtgggcttccagaagagcatcttaaggccatccaagattatttaagcactcagctcgcccaggactctgaatttgtgaagacagggtccagcagtcttcctcacctgaagaaactgaccacactgctctgcaaggagctctatggagaagtcatccggaccctcccatccctggagtctctgcagaggttatttgaccagcagctctccccgggcctccgtccacgtcctcaggttcctggtgaggccaatcccatcaacatggtgtccaagctcagccaactgacaagcctgttgtcgtccattgaagacaaggtcaaggccttgctgcacgagggtcctgagtctccgcaccggccctcccttatccctccagtcacctttgaggtgaaggcagagtctctggggattcctcagaaaatgcagctcaaagtcgacgttgagtctgggaaactgatcattaagaagtccaaggatggttctgaggacaagttctacagccacaagaaaatcctgcagctcattaagtcacagaaatttctgaataagttggtgatcttggtggaaacagagaaggagaagatcctgcggaaggaatatgtttttgctgactccaaaaagagagaaggcttctgccagctcctgcagcagatgaagaacaagcactcagagcagccggagcccgacatgatcaccatcttcatcggcacctggaacatgggtaacgccccccctcccaagaagatcacgtcctggtttctctccaaggggcagggaaagacgcgggacgactctgcggactacatcccccatgacatttacgtgatcggcacccaagaggaccccctgagtgagaaggagtggctggagatcctcaaacactccctgcaagaaatcaccagtgtgacttttaaaacagtcgccatccacacgctctggaacatccgcatcgtggtgctggccaagcctgagcacgagaaccggatcagccacatctgtactgacaacgtgaagacaggcattgcaaacacactggggaacaagggagccgtgggggtgtcgttcatgttcaatggaacctccttagggttcgtcaacagccacttgacttcaggaagtgaaaagaaactcaggcgaaaccaaaactatatgaacattctccggttcctggccctgggcgacaagaagctgagtccctttaacatcactcaccgcttcacgcacctcttctggtttggggatcttaactaccgtgtggatctgcctacctgggaggcagaaaccatcatccagaaaatcaagcagcagcagtacgcagacctcctgtcccacgaccagctgctcacagagaggagggagcagaaggtcttcctacacttcgaggaggaagaaatcacgtttgccccaacctaccgttttgagagactgactcgggacaaatacgcctacaccaagcagaaagcgacagggatgaagtacaacttgccttcctggtgtgaccgagtcctctggaagtcttatcccctggtgcacgtggtgtgtcagtcttatggcagtaccagcgacatcatgacgagtgaccacagccctgtctttgccacatttgaggcaggagtcacttcccagtttgtctccaagaacggtcccgggactgttgacagccaaggacagattgagtttctcaggtgctatgccacattgaagaccaagtcccagaccaaattctacctggagttccactcgagctgcttggagagttttgtcaagagtcaggaaggagaaaatgaagaaggaagtgagggggagctggtggtgaagtttggtgagactcttccaaagctgaagcccattatctctgaccctgagtacctgctagaccagcacatcctcatcagcatcaagtcctctgacagcgacgaatcctatggcgagggctgcattgcccttcggttagaggccacagaaacgcagctgcccatctacacgcctctcacccaccatggggagttgacaggccacttccagggggagatcaagctgcagacctctcagggcaagacgagggagaagctctatgactttgtgaagacggagcgtgatgaatccagtgggccaaagaccctgaagagcctcaccagccacgaccccatgaagcagtgggaagtcactagcagggcccctccgtgcagtggctccagcatcactgaaatcatcaaccccaactacatgggagtggggccctttgggccaccaatgcccctgcacgtgaagcagaccttgtcccctgaccagcagcccacagcctggagctacgaccagccgcccaaggactccccgctggggccctgcaggggagaaagtcctccgacacctcccggccagccgcccatatcacccaagaagtttttaccctcaacagcaaaccggggtctccctcccaggacacaggagtcaaggcccagtgacctggggaagaacgcaggggacacgctgcctcaggaggacctgccgctgacgaagcccgagatgtttgagaaccccctgtatgggtccctgagttccttccctaagcctgctcccaggaaggaccaggaatcccccaaaatgccgcggaaggaacccccgccctgcccggaacccggcatcttgtcgcccagcatcgtgctcaccaaagcccaggaggctgatcgcggcgaggggcccggcaagcaggtgcccgcgccccggctgcgctccttcacgtgctcatcctctgccgagggcagggcggccggcggggacaagagccaagggaagcccaagaccccggtcagctcccaggccccggtgccggccaagaggcccatcaagccttccagatcggaaatcaaccagcagaccccgcccaccccgacgccgcggccgccgctgccagtcaagagcccggcggtgctgcacctccagcactccaagggccgcgactaccgcgacaacaccgagctcccgcatcacggcaagcaccggccggaggaggggccaccagggcctctaggcaggactgccatgcaggtgcgctgcgccacacgtgggttcgtgtgcatttgtgtgtgtgtgtgcatgcgtgagtgcgtatgtgtgtacctatgcatatgtgtgtgcatgtgtgtgtgcacgcatgcatatgtgcgtgcatgtgtgaacgcatgcatgtgcacacatgcgagtgatggtcctgggaactgctccatgagaagggagagtcaggatttgaacccaggtctgcctgtcccacacatccctgaccctgcattgcctctgcagcagttgttaaaaggaagaaaggcggggctgtggataaacttagtctagtgtcagtcccagaggaagaagattccataaagaaaaggagcctaaatcatttatatctcattgttattataaatttgttttgcaactgagtttcgccaggtgatctgcctgcctgggcctcccaaagttctgggattacaggcatgagcactg

SEQ ID NO: 540472 - DNA, 578 bp, Homo sapiens
  misc_feature (539)..(539): n is a, c, g, or t
tgcccgatgtgcagcgagcagttccctcctgactatgaccagcaggtgtttgaaaggcatgtgcagacccatttgatcagaatgttctaaattttgactagttactttttattatgagttaatatagtttagcagtaaaaaaaaaaaaaaaaaccacacctaaaatagaccactggagggagacctatagagcgggatggcgttctcatggcgacccttttactggcactttctggaccagggagctactttggagtttgggtggttagctaggatcaggggtcagtctttgggcttatcaataaatgtttaaatctctggttaatctttacctggcgtttaaacaaaaaggttctggtggtggtccggtatcgtttatttattccctaagtttggcgagaactggtctggaataaagggatacaagggattatttcaagtggttaccgtggcaccgtggaacaaacgcggtgttatgtggtattatagcgtgggtgcgcatagaattataattttatgagccagaaaattattttcancaagagttttcgtggtgtggaccttgtggtggaactgga

SEQ ID NO: 540473 - DNA, 4662 bp, Homo sapiens
ggggcaggccgtggtcccagttgagaagctgtgctcccttgggtgttttggaggttcagggtgggtgctgaaaagccccgctgggtacagatggttcgggggcctgtctagggcatggcatcccacgtgggtgtcagcacggccgcagaagaaccacttctctggcccacccatgcctgctaggccatgcttcttcagaagtggccacaactctcctgacgtctccagagccggtcattccacccagggggacttcagctgccactggacacttcaattgtacgctgcgaccagttgccaggaaggagagggctggcaagagagccgcggcagccgtggcagggtgtaggggacggtggacggccagggcccccccctctctctctttctctctctctctcttgcttggtttctgtaatgaggaagttctccgcagctcagtttcctttccctcactgagcgcctgaaacaggaagtcagtcagttaagctggtggcagcagccgaggccaccaagaggcaacgggcggcaggttgcagtggaggggcctccgctcccctcggtggtgtgtgggtcctgggggtgcctgccggcccggccgaggaggcccacgcccaccatggtcccctgctggaaccatggcaacatcacccgctccaaggcggaggagctgctttccaggacaggcaaggacgggagcttcctcgtgcgtgccagcgagtccatctcccgggcatacgcgctctgcgtgctgtatcggaattgcgtttacacttacagaattctgcccaatgaagatgataaattcactgttcaggcatccgaaggcgtctccatgaggttcttcaccaagctggaccagctcatcgagttttacaagaaggaaaacatggggctggtgacccatctgcaataccctgtgccgctggaggaagaggacacaggcgacgaccctgaggaggacacagtagaaagtgtcgtgtctccacccgagctgcccccaagaaacatcccgctgactgccagctcctgtgaggccaaggaggttcctttttcaaacgagaatccccgagcgaccgagaccagccggccgagcctctccgagacattgttccagcgactgcaaagcatggacaccagtgggcttccagaagagcatcttaaggccatccaagattatttaagcactcagctcgcccaggactctgaatttgtgaagacagggtccagcagtcttcctcacctgaagaaactgaccacactgctctgcaaggagctctatggagaagtcatccggaccctcccatccctggagtctctgcagaggttatttgaccagcagctctccccgggcctccgtccacgtcctcaggttcctggtgaggccaatcccatcaacatggtgtccaagctcagccaactgacaagcctgttgtcgtccattgaagacaaggtcaaggccttgctgcacgagggtcctgagtctccgcaccggccctcccttatccctccagtcacctttgaggtgaaggcagagtctctggggattcctcagaaaatgcagctcaaagtcgacgttgagtctgggaaactgatcattaagaagtccaaggatggttctgaggacaagttctacagccacaagaaaatcctgcagctcattaagtcacagaaatttctgaataagttggtgatcttggtggaaacagagaaggagaagatcctgcggaaggaatatgtttttgctgactccaaaaagagagaaggcttctgccagctcctgcagcagatgaagaacaagcactcagagcagccggagcccgacatgatcaccatcttcatcggcacctggaacatgggtaacgccccccctcccaagaagatcacgtcctggtttctctccaaggggcagggaaagacgcgggacgactctgcggactacatcccccatgacatttacgtgatcggcacccaagaggaccccctgagtgagaaggagtggctggagatcctcaaacactccctgcaagaaatcaccagtgtgacttttaaaacagtgagcagctggctgcacgctgggtcgccatccacacgctctggaacatccgcatcgtggtgctggccaagcctgagcacgagaaccggatcagccacatctgtactgacaacgtgaagacaggcattgcaaacacactggggaacaagggagccgtgggggtgtcgttcatgttcaatggaacctccttagggttcgtcaacagccacttgacttcaggaagtgaaaagaaactcaggcgaaaccaaaactatatgaacattctccggttcctggccctgggcgacaagaagctgagtccctttaacatcactcaccgcttcacgcacctcttctggtttggggatcttaactaccgtgtggatctgcctacctgggaggcagaaaccatcatccagaaaatcaagcagcagcagtacgcagacctcctgtcccacgaccagctgctcacagagaggagggagcagaaggtcttcctacacttcgaggaggaagaaatcacgtttgccccaacctaccgttttgagagactgactcgggacaaatacgcctacaccaagcagaaagcgacagggatgaagtacaacttgccttcctggtgtgaccgagtcctctggaagtcttatcccctggtgcacgtggtgtgtcagtcttatggcagtaccagcgacatcatgacgagtgaccacagccctgtctttgccacatttgaggcaggagtcacttcccagtttgtctccaagaacggtcccgggactgttgacagccaaggacagattgagtttctcaggtgctatgccacattgaagaccaagtcccagaccaaattctacctggagttccactcgagctgcttggagagttttgtcaagagtcaggaaggagaaaatgaagaaggaagtgagggggagctggtggtgaagtttggtgagactcttccaaagctgaagcccattatctctgaccctgagtacctgctagaccagcacatcctcatcagcatcaagtcctctgacagcgacgaatcctatggcgagggctgcattgcccttcggttagaggccacagaaacgcagctgcccatctacacgcctctcacccaccatggggagttgacaggccacttccagggggagatcaagctgcagacctctcagggcaagacgagggagaagctctatgactttgtgaagacggagcgtgatgaatccagtgggccaaagaccctgaagagcctcaccagccacgaccccatgaagcagtgggaagtcactagcagggcccctccgtgcagtggctccagcatcactgaaatcatcaaccccaactacatgggagtggggccctttgggccaccaatgcccctgcacgtgaagcagaccttgtcccctgaccagcagcccacagcctggagctacgaccagccgcccaaggactccccgctggggccctgcaggggagaaagtcctccgacacctcccggccagccgcccatatcacccaagaagtttttaccctcaacagcaaaccggggtctccctcccaggacacaggagtcaaggcccagtgacctggggaagaacgcaggggacacgctgcctcaggaggacctgccgctgacgaagcccgagatgtttgagaaccccctgtatgggtccctgagttccttccctaagcctgctcccaggaaggaccaggaatcccccaaaatgccgcggaaggaacccccgccctgcccggaacccggcatcttgtcgcccagcatcgtgctcaccaaagcccaggaggctgatcgcggcgaggggcccggcaagcaggtgcccgcgccccggctgcgctccttcacgtgctcatcctctgccgagggcagggcggccggcggggacaagagccaagggaagcccaagaccccggtcagctcccaggccccggtgccggccaagaggcccatcaagccttccagatcggaaatcaaccagcagaccccgcccaccccgacgccgcggccgccgctgccagtcaagagcccggcggtgctgcacctccagcactccaagggccgcgactaccgcgacaacaccgagctcccgcatcacggcaagcaccggccggaggaggggccaccagggcctctaggcaggactgccatgcaggtgcgctgcgccacacgtgggttcgtgtgcatttgtgtgtgtgtgtgcatgcgtgagtgcgtatgtgtgtacctatgcatatgtgtgtgcatgtgtgtgtgcacgcatgcatatgtgcgtgcatgtgtgaacgcatgcatgtgcacacatgcgagtgatggtcctgggaactgctccatgagaagggagagtcaggatttgaacccaggtctgcctgtcccacacatccctgaccctgcattgcctctgcagcagttgttaaaaggaagaaaggcggggctgtggataaacttagtctagtgtcagtcccagaggaagaagattccataaagaaaaggagcctaaatcatttatatctcattgttattataaatttgttttgcaactgagtttcgccaggtgatctgcctgcctgggcctcccaaagttctgggattacaggcatgagcactg

SEQ ID NO: 540474 - DNA, 1063 bp, Homo sapiens
cttaatagctctgcgaggctgttaagaggcctatcagggccttcgacgacccggggaaacggcgaggtgagttgctaaactgctaagattgacccatcgacttgactggtagggacgcgaacccattgcacagacgttggatccctgcggctgcctggtgcccaccggggggctgtgcctgtgtccgggccgcaagggcaagctggctgccgcgccattccctgcgttgctgctgctgctagctgctccgtggctgtttcgagagacttggtgggcacaggctgtgcggagggcagacctaggtgccttggccgcgcacgcagaaaaaactaccaaaggtctccgtgctttcgggctcactcataaggaagatgtctcctggggagtgcgggcatgaggagaattcgccaggacccagtcgtatggtgggaccatgcgcaagaggcccctttgaccattgcgattatatatgtcacatgcaggtgtagcgacaaaattgcaattccaaacacaataaaattttccctatccggctatataactcacgagattgcactttctccttgctatccctacactgggcccaagtaggattgcgaaccaggtcccttcgagagagaaaccccaatggagtgtggtacatcgcgtgcgtgttgtgacaactgccaaagtgcacccctcagggagggcatattcatctctcttccaccggggttgggagtgtgtatcagttctgtgcttctcctagtttggcattgtttgtcgccaccccccgtccgtttttttttggccaacgcggaaccggtttttacaatctgcggccggtgggtaacccaccctttcgccctagtgttttaacacacacggaagtcgtgccttgcattgcacatggctgtatgactagttgtggggtgaggactctcctcttttgccaccaaggtttgagcatgttcttgatacccagtaccggtggccacacttggctatcctaaaggccgcataactctgtatagagaacctgtgcgctaaccgactggaatccgttgccctgtgacacgcactc

SEQ ID NO: 540475 - DNA, 489 bp, Homo sapiens
  misc_feature (70)..(70): n is a, c, g, or t
  misc_feature (138)..(138): n is a, c, g, or t
  misc_feature (249)..(249): n is a, c, g, or t
  misc_feature (251)..(251): n is a, c, g, or t
  misc_feature (309)..(309): n is a, c, g, or t
  misc_feature (315)..(315): n is a, c, g, or t
  misc_feature (389)..(389): n is a, c, g, or t
acgcggtgcactgttttggtgaaccttgggatccatgcggattgtagtgacagggggctctgggctggtnggcaaagccatcctagaggtggttgcagatggagctggacttgctggagaggactgggtgtttgtctnctcttgagacgccgatctcacggatacagtacagacccgcgccctgtttgtgagggtccaacccacacacgtcatccatcttgctgcaatggtggggggcctgttccggtntntcaaatacaatttggacttttggtggaaaaacgtgcacatgaacgacaacgttctgcnctcggncttcgaggtgggcgcccgcaaggtggtgttctgcctgtccacctgttttttccctgacaagacgacctacctgnttgatgagaccatgatccacaatgggccttcccacaacagcatttttggttcttcgttgccaagaggatgatcgtcgttctgaacagggtctactttcag

SEQ ID NO: 540476 - DNA, 317 bp, Homo sapiens
  misc_feature (225)..(225): n is a, c, g, or t
aagctgtggtttgcattcttcctctttctggtttcagtgacctcaagttaaaacccacaggaaataatgtgtgttgtgcattcgtgcgcgtgcgatgggtacaaaggagtgagactgtgtgtgagagtgtaatcaagatactgctgacagaaggaaatggtttttgccatgtcctgctgtaaaacagcaacactcacctcttaatttttctattattacacatanttgctttcgtttggcaagcagccaatataaactagcgccagttaccagtgcttaaaccagagggtgactgaaagggaattcggttttggttt

SEQ ID NO: 540477 - DNA, 4592 bp, Homo sapiens
ggggcaggccgtggtcccagttgagaagctgtgctcccttgggtgttttggaggttcagggtgggtgctgaaaagccccgctgggtacagatggttcgggggcctgtctagggcatggcatcccacgtgggtgtcagcacggccgcagaagaaccacttctctggcccacccatgcctgctaggccatgcttcttcagaagtggccacaactctcctgacgtctccagagccggtcattccacccagggggacttcagctgccactggacacttcaattgtacgctgcgaccagttgccaggaaggagagggctggcaagagagccgcggcagccgtggcagggtgtaggggacggtggacggccagggcccccccctctctctctttctctctctctctcttgcttggtttctgtaatgaggaagttctccgcagctcagtttcctttccctcactgagcgcctgaaacaggaagtcagtcagttaagctggtggcagcagccgaggccaccaagaggcaacgggcggcaggttgcagtggaggggcctccgctcccctcggtggtgtgtgggtcctgggggtgcctgccggcccggccgaggaggcccacgcccaccatggtcccctgctggaaccatggcaacatcacccgctccaaggcggaggagctgctttccaggacaggcaaggacgggagcttcctcgtgcgtgccagcgagtccatctcccgggcatacgcgctctgcgtgctgtatcggaattgcgtttacacttacagaattctgcccaatgaagatgataaattcactgttcaggcatccgaaggcgtctccatgaggttcttcaccaagctggaccagctcatcgagttttacaagaaggaaaacatggggctggtgacccatctgcaataccctgtgccgctggaggaagaggacacaggcgacgaccctgaggaggacacagtagaaagtgtcgtgtctccacccgagctgcccccaagaaacatcccgctgactgccagctcctgtgaggccaaggaggttcctttttcaaacgagaatccccgagcgaccgagaccagccggccgagcctctccgagacattgttccagcgactgcaaagcatggacaccagtgggcttccagaagagcatcttaaggccatccaagattatttaagcactcagctcgcccaggactctgaatttgtgaagacagggtccagcagtcttcctcacctgaagaaactgaccacactgctctgcaaggagctctatggagaagtcatccggaccctcccatccctggagtctctgcagaggttatttgaccagcagctctccccgggcctccgtccacgtcctcaggttcctggtgaggccaatcccatcaacatggtgtccaagctcagccaactgacaagcctgttgtcgtccattgaagacaaggtcaaggccttgctgcacgagggtcctgagtctccgcaccggccctcccttatccctccagtcacctttgaggtgaaggcagagtctctggggattcctcagaaaatgcagctcaaagtcgacgttgagtctgggaaactgatcattaagaagtccaaggatggttctgaggacaagttctacagccacaagaaaatcctgcagctcattaagtcacagaaatttctgaataagttggtgatcttggtggaaacagagaaggagaagatcctgcggaaggaatatgtttttgctgactccaaaaagagagaaggcttctgccagctcctgcagcagatgaagaacaagcactcagagcagccggagcccgacatgatcaccatcttcatcggcacctggaacatgggggcagggaaagacgcgggacgactctgcggactacatcccccatgacatttacgtgatcggcacccaagaggaccccctgagtgagaaggagtggctggagatcctcaaacactccctgcaagaaatcaccagtgtgacttttaaaacagtcgccatccacacgctctggaacatccgcatcgtggtgctggccaagcctgagcacgagaaccggatcagccacatctgtactgacaacgtgaagacaggcattgcaaacacactggggaacaagggagccgtgggggtgtcgttcatgttcaatggaacctccttagggttcgtcaacagccacttgacttcaggaagtgaaaagaaactcaggcgaaaccaaaactatatgaacattctccggttcctggccctgggcgacaagaagctgagtccctttaacatcactcaccgcttcacgcacctcttctggtttggggatcttaactaccgtgtggatctgcctacctgggaggcagaaaccatcatccagaaaatcaagcagcagcagtacgcagacctcctgtcccacgaccagctgctcacagagaggagggagcagaaggtcttcctacacttcgaggaggaagaaatcacgtttgccccaacctaccgttttgagagactgactcgggacaaatacgcctacaccaagcagaaagcgacagggatgaagtacaacttgccttcctggtgtgaccgagtcctctggaagtcttatcccctggtgcacgtggtgtgtcagtcttatggcagtaccagcgacatcatgacgagtgaccacagccctgtctttgccacatttgaggcaggagtcacttcccagtttgtctccaagaacggtcccgggactgttgacagccaaggacagattgagtttctcaggtgctatgccacattgaagaccaagtcccagaccaaattctacctggagttccactcgagctgcttggagagttttgtcaagagtcaggaaggagaaaatgaagaaggaagtgagggggagctggtggtgaagtttggtgagactcttccaaagctgaagcccattatctctgaccctgagtacctgctagaccagcacatcctcatcagcatcaagtcctctgacagcgacgaatcctatggcgagggctgcattgcccttcggttagaggccacagaaacgcagctgcccatctacacgcctctcacccaccatggggagttgacaggccacttccagggggagatcaagctgcagacctctcagggcaagacgagggagaagctctatgactttgtgaagacggagcgtgatgaatccagtgggccaaagaccctgaagagcctcaccagccacgaccccatgaagcagtgggaagtcactagcagggcccctccgtgcagtggctccagcatcactgaaatcatcaaccccaactacatgggagtggggccctttgggccaccaatgcccctgcacgtgaagcagaccttgtcccctgaccagcagcccacagcctggagctacgaccagccgcccaaggactccccgctggggccctgcaggggagaaagtcctccgacacctcccggccagccgcccatatcacccaagaagtttttaccctcaacagcaaaccggggtctccctcccaggacacaggagtcaaggcccagtgacctggggaagaacgcaggggacacgctgcctcaggaggacctgccgctgacgaagcccgagatgtttgagaaccccctgtatgggtccctgagttccttccctaagcctgctcccaggaaggaccaggaatcccccaaaatgccgcggaaggaacccccgccctgcccggaacccggcatcttgtcgcccagcatcgtgctcaccaaagcccaggaggctgatcgcggcgaggggcccggcaagcaggtgcccgcgccccggctgcgctccttcacgtgctcatcctctgccgagggcagggcggccggcggggacaagagccaagggaagcccaagaccccggtcagctcccaggccccggtgccggccaagaggcccatcaagccttccagatcggaaatcaaccagcagaccccgcccaccccgacgccgcggccgccgctgccagtcaagagcccggcggtgctgcacctccagcactccaagggccgcgactaccgcgacaacaccgagctcccgcatcacggcaagcaccggccggaggaggggccaccagggcctctaggcaggactgccatgcaggtgcgctgcgccacacgtgggttcgtgtgcatttgtgtgtgtgtgtgcatgcgtgagtgcgtatgtgtgtacctatgcatatgtgtgtgcatgtgtgtgtgcacgcatgcatatgtgcgtgcatgtgtgaacgcatgcatgtgcacacatgcgagtgatggtcctgggaactgctccatgagaagggagagtcaggatttgaacccaggtctgcctgtcccacacatccctgaccctgcattgcctctgcagcagttgttaaaaggaagaaaggcggggctgtggataaacttagtctagtgtcagtcccagaggaagaagattccataaagaaaaggagcctaaatcatttatatctcattgttattataaatttgttttgcaactgagtttcgccaggtgatctgcctgcctgggcctcccaaagttctgggattacaggcatgagcactg

SEQ ID NO: 540478 - DNA, 173 bp, Homo sapiens
gttaactccggcagaacttctgcactggaaggcaggttcagacaatcccctacttcttccagtgtttgctcggctcgcaggaacgggctcaccagaacgcgttcgatttccactttttgacctttcagccagttgccatcaggcgagattcgtcacaaccattagtggtcaga

SEQ ID NO: 540479 - DNA, 4725 bp, Homo sapiens
ggggcaggccgtggtcccagttgagaagctgtgctcccttgggtgttttggaggttcagggtgggtgctgaaaagccccgctgggtacagatggttcgggggcctgtctagggcatggcatcccacgtgggtgtcagcacggccgcagaagaaccacttctctggcccacccatgcctgctaggccatgcttcttcagaagtggccacaactctcctgacgtctccagagccggtcattccacccagggggacttcagctgccactggacacttcaattgtacgctgcgaccagttgccaggaaggagagggctggcaagagagccgcggcagccgtggcagggtgtaggggacggtggacggccagggcccccccctctctctctttctctctctctctcttgcttggtttctgtaatgaggaagttctccgcagctcagtttcctttccctcactgagcgcctgaaacaggaagtcagtcagttaagctggtggcagcagccgaggccaccaagaggcaacgggcggcaggttgcagtggaggggcctccgctcccctcggtggtgtgtgggtcctgggggtgcctgccggcccggccgaggaggcccacgcccaccatggtcccctgctggaaccatggcaacatcacccgctccaaggcggaggagctgctttccaggacaggcaaggacgggagcttcctcgtgcgtgccagcgagtccatctcccgggcatacgcgctctgcgtgctgtatcggaattgcgtttacacttacagaattctgcccaatgaagatgataaattcactgttcaggcatccgaaggcgtctccatgaggttcttcaccaagctggaccagctcatcgagttttacaagaaggaaaacatggggctggtgacccatctgcaataccctgtgccgctggaggaagaggacacaggcgacgaccctgaggaggacacagtagaaagtgtcgtgtctccacccgagctgcccccaagaaacatcccgctgactgccagctcctgtgaggccaaggaggttcctttttcaaacgagaatccccgagcgaccgagaccagccggccgagcctctccgagacattgttccagcgactgcaaagcatggacaccagtgggcttccagaagagcatcttaaggccatccaagattatttaagcactcagctcgcccaggactctgaatttgtgaagacagggtccagcagtcttcctcacctgaagaaactgaccacactgctctgcaaggagctctatggagaagtcatccggaccctcccatccctggagtctctgcagaggttatttgaccagcagctctccccgggcctccgtccacgtcctcaggttcctggtgaggccaatcccatcaacatggtgtccaagctcagccaactgacaagcctgttgtcgtccattgaagacaaggtcaaggccttgctgcacgagggtcctgagtctccgcaccggccctcccttatccctccagtcacctttgaggtgaaggcagagtctctggggattcctcagaaaatgcagctcaaagtcgacgttgagtctgggaaactgatcattaagaagtccaaggatggttctgaggacaagttctacagccacaagaaaatcctgcagctcattaagtcacagaaatttctgaataagttggtgatcttggtggaaacagagaaggagaagatcctgcggaaggaatatgtttttgctgactccaaaaagagagaaggcttctgccagctcctgcagcagatgaagaacaagcactcagagcagccggagcccgacatgatcaccatcttcatcggcacctggaacatgggtaacgccccccctcccaagaagatcacgtcctggtttctctccaaggggcagggaaagacgcgggacgactctgcggactacatcccccatgacatttacgtgatcggcacccaagaggaccccctgagtgagaaggagtggctggagatcctcaaacactccctgcaagaaatcaccagtgtgacttttaaaacagtcgccatccacacgctctggaacatccgcatcgtggtgctggccaagcctgagcacgagaaccggatcagccacatctgtactgacaacgtgaagacaggcattgcaaacacactggttcccaggtgatgtgcagctgctggtccagggaactccctttgggaaccactgacctagaatagatcagaacgttggcagaaaaagggaacaagggagccgtgggggtgtcgttcatgttcaatggaacctccttagggttcgtcaacagccacttgacttcaggaagtgaaaagaaactcaggcgaaaccaaaactatatgaacattctccggttcctggccctgggcgacaagaagctgagtccctttaacatcactcaccgcttcacgcacctcttctggtttggggatcttaactaccgtgtggatctgcctacctgggaggcagaaaccatcatccagaaaatcaagcagcagcagtacgcagacctcctgtcccacgaccagctgctcacagagaggagggagcagaaggtcttcctacacttcgaggaggaagaaatcacgtttgccccaacctaccgttttgagagactgactcgggacaaatacgcctacaccaagcagaaagcgacagggatgaagtacaacttgccttcctggtgtgaccgagtcctctggaagtcttatcccctggtgcacgtggtgtgtcagtcttatggcagtaccagcgacatcatgacgagtgaccacagccctgtctttgccacatttgaggcaggagtcacttcccagtttgtctccaagaacggtcccgggactgttgacagccaaggacagattgagtttctcaggtgctatgccacattgaagaccaagtcccagaccaaattctacctggagttccactcgagctgcttggagagttttgtcaagagtcaggaaggagaaaatgaagaaggaagtgagggggagctggtggtgaagtttggtgagactcttccaaagctgaagcccattatctctgaccctgagtacctgctagaccagcacatcctcatcagcatcaagtcctctgacagcgacgaatcctatggcgagggctgcattgcccttcggttagaggccacagaaacgcagctgcccatctacacgcctctcacccaccatggggagttgacaggccacttccagggggagatcaagctgcagacctctcagggcaagacgagggagaagctctatgactttgtgaagacggagcgtgatgaatccagtgggccaaagaccctgaagagcctcaccagccacgaccccatgaagcagtgggaagtcactagcagggcccctccgtgcagtggctccagcatcactgaaatcatcaaccccaactacatgggagtggggccctttgggccaccaatgcccctgcacgtgaagcagaccttgtcccctgaccagcagcccacagcctggagctacgaccagccgcccaaggactccccgctggggccctgcaggggagaaagtcctccgacacctcccggccagccgcccatatcacccaagaagtttttaccctcaacagcaaaccggggtctccctcccaggacacaggagtcaaggcccagtgacctggggaagaacgcaggggacacgctgcctcaggaggacctgccgctgacgaagcccgagatgtttgagaaccccctgtatgggtccctgagttccttccctaagcctgctcccaggaaggaccaggaatcccccaaaatgccgcggaaggaacccccgccctgcccggaacccggcatcttgtcgcccagcatcgtgctcaccaaagcccaggaggctgatcgcggcgaggggcccggcaagcaggtgcccgcgccccggctgcgctccttcacgtgctcatcctctgccgagggcagggcggccggcggggacaagagccaagggaagcccaagaccccggtcagctcccaggccccggtgccggccaagaggcccatcaagccttccagatcggaaatcaaccagcagaccccgcccaccccgacgccgcggccgccgctgccagtcaagagcccggcggtgctgcacctccagcactccaagggccgcgactaccgcgacaacaccgagctcccgcatcacggcaagcaccggccggaggaggggccaccagggcctctaggcaggactgccatgcaggtgcgctgcgccacacgtgggttcgtgtgcatttgtgtgtgtgtgtgcatgcgtgagtgcgtatgtgtgtacctatgcatatgtgtgtgcatgtgtgtgtgcacgcatgcatatgtgcgtgcatgtgtgaacgcatgcatgtgcacacatgcgagtgatggtcctgggaactgctccatgagaagggagagtcaggatttgaacccaggtctgcctgtcccacacatccctgaccctgcattgcctctgcagcagttgttaaaaggaagaaaggcggggctgtggataaacttagtctagtgtcagtcccagaggaagaagattccataaagaaaaggagcctaaatcatttatatctcattgttattataaatttgttttgcaactgagtttcgccaggtgatctgcctgcctgggcctcccaaagttctgggattacaggcatgagcactg

SEQ ID NO: 540480 - DNA, 208 bp, Homo sapiens
taaatcgagctcggtaccgatcagcagctggatctgcggctgcgccaccgggttccgatggtgcaccagaccgagtcgtcagaatgcgggctggcctgcctggcgatgatctgcggttactatggtaaaaacgtcgacctgatcgcgctgcgtcggcagttcagcctgtcgacccgcggcgccacgctggccgggttaaccggtatag

SEQ ID NO: 540481 - DNA, 4049 bp, Homo sapiens
  misc_feature (11)..(11): n is a, c, g, or t
  misc_feature (13)..(13): n is a, c, g, or t
  misc_feature (45)..(45): n is a, c, g, or t
  misc_feature (149)..(149): n is a, c, g, or t
cacgagggctntntccctttgtctggcaggctctgcaaaggggantgaggccagtggttctctgtgtcccagaggtgtccctgggagatgtagtgtcactggactagagattcatccttgctatctctgatgcaagacgattgtatcanttcaggctctggaggtatcggaattgcgtttacacttacagaattctgcccaatgaagatgataaattcactgttcaggcatccgaaggcgtctccatgaggttcttcaccaagctggaccagctcatcgagttttacaagaaggaaaacatggggctggtgacccatctgcaataccctgtgccgctggaggaagaggacacaggcgacgaccctgaggaggacacagtagaaagtgtcgtgtctccacccgagctgcccccaagaaacatcccgctgactgccagctcctgtgaggccaaggaggttcctttttcaaacgagaatccccgagcgaccgagaccagccggccgagcctctccgagacattgttccagcgactgcaaagcatggacaccagtgggcttccagaagagcatcttaaggccatccaagattatttaagcactcagctcgcccaggactctgaatttgtgaagacagggtccagcagtcttcctcacctgaagaaactgaccacactgctctgcaaggagctctatggagaagtcatccggaccctcccatccctggagtctctgcagaggttatttgaccagcagctctccccgggcctccgtccacgtcctcaggttcctggtgaggccaatcccatcaacatggtgtccaagctcagccaactgacaagcctgttgtcgtccattgaagacaaggtcaaggccttgctgcacgagggtcctgagtctccgcaccggccctcccttatccctccagtcacctttgaggtgaaggcagagtctctggggattcctcagaaaatgcagctcaaagtcgacgttgagtctgggaaactgatcattaagaagtccaaggatggttctgaggacaagttctacagccacaagaaaatcctgcagctcattaagtcacagaaatttctgaataagttggtgatcttggtggaaacagagaaggagaagatcctgcggaaggaatatgtttttgctgactccaaaaagagagaaggcttctgccagctcctgcagcagatgaagaacaagcactcagagcagccggagcccgacatgatcaccatcttcatcggcacctggaacatgggtaacgccccccctcccaagaagatcacgtcctggtttctctccaaggggcagggaaagacgcgggacgactctgcggactacatcccccatgacatttacgtgatcggcacccaagaggaccccctgagtgagaaggagtggctggagatcctcaaacactccctgcaagaaatcaccagtgtgacttttaaaacagtcgccatccacacgctctggaacatccgcatcgtggtgctggccaagcctgagcacgagaaccggatcagccacatctgtactgacaacgtgaagacaggcattgcaaacacactggggaacaagggagccgtgggggtgtcgttcatgttcaatggaacctccttagggttcgtcaacagccacttgacttcaggaagtgaaaagaaactcaggcgaaaccaaaactatatgaacattctccggttcctggccctgggcgacaagaagctgagtccctttaacatcactcaccgcttcacgcacctcttctggtttggggatcttaactaccgtgtggatctgcctacctgggaggcagaaaccatcatccagaaaatcaagcagcagcagtacgcagacctcctgtcccacgaccagctgctcacagagaggagggagcagaaggtcttcctacacttcgaggaggaagaaatcacgtttgccccaacctaccgttttgagagactgactcgggacaaatacgcctacaccaagcagaaagcgacagggatgaagtacaacttgccttcctggtgtgaccgagtcctctggaagtcttatcccctggtgcacgtggtgtgtcagtcttatggcagtaccagcgacatcatgacgagtgaccacagccctgtctttgccacatttgaggcaggagtcacttcccagtttgtctccaagaacggtcccgggactgttgacagccaaggacagattgagtttctcaggtgctatgccacattgaagaccaagtcccagaccaaattctacctggagttccactcgagctgcttggagagttttgtcaagagtcaggaaggagaaaatgaagaaggaagtgagggggagctggtggtgaagtttggtgagactcttccaaagctgaagcccattatctctgaccctgagtacctgctagaccagcacatcctcatcagcatcaagtcctctgacagcgacgaatcctatggcgagggctgcattgcccttcggttagaggccacagaaacgcagctgcccatctacacgcctctcacccaccatggggagttgacaggccacttccagggggagatcaagctgcagacctctcagggcaagacgagggagaagctctatgactttgtgaagacggagcgtgatgaatccagtgggccaaagaccctgaagagcctcaccagccacgaccccatgaagcagtgggaagtcactagcagggcccctccgtgcagtggctccagcatcactgaaatcatcaaccccaactacatgggagtggggccctttgggccaccaatgcccctgcacgtgaagcagaccttgtcccctgaccagcagcccacagcctggagctacgaccagccgcccaaggactccccgctggggccctgcaggggagaaagtcctccgacacctcccggccagccgcccatatcacccaagaagtttttaccctcaacagcaaaccggggtctccctcccaggacacaggagtcaaggcccagtgacctggggaagaacgcaggggacacgctgcctcaggaggacctgccgctgacgaagcccgagatgtttgagaaccccctgtatgggtccctgagttccttccctaagcctgctcccaggaaggaccaggaatcccccaaaatgccgcggaaggaacccccgccctgcccggaacccggcatcttgtcgcccagcatcgtgctcaccaaagcccaggaggctgatcgcggcgaggggcccggcaagcaggtgcccgcgccccggctgcgctccttcacgtgctcatcctctgccgagggcagggcggccggcggggacaagagccaagggaagcccaagaccccggtcagctcccaggccccggtgccggccaagaggcccatcaagccttccagatcggaaatcaaccagcagaccccgcccaccccgacgccgcggccgccgctgccagtcaagagcccggcggtgctgcacctccagcactccaagggccgcgactaccgcgacaacaccgagctcccgcatcacggcaagcaccggccggaggaggggccaccagggcctctaggcaggactgccatgcaggtgcgctgcgccacacgtgggttcgtgtgcatttgtgtgtgtgtgtgcatgcgtgagtgcgtatgtgtgtacctatgcatatgtgtgtgcatgtgtgtgtgcacgcatgcatatgtgcgtgcatgtgtgaacgcatgcatgtgcacacatgcgagtgatggtcctgggaactgctccatgagaagggagagtcaggatttgaacccaggtctgcctgtcccacacatccctgaccctgcattgcctctgcagcagttgttaaaaggaagaaaggcggggctgtggataaacttagtctagtgtcagtcccagaggaagaagattccataaagaaaaggagcctaaatcatttatatctcattgttattataaatttgttttgcaactgagtttcgccaggtgatctgcctgcctgggcctcccaaagttctgggattacaggcatgagcactg

SEQ ID NO: 540482 - DNA, 145 bp, Homo sapiens
tccaaagggaaaaaaaaaattttaattaacaacgggaaaaaaagtagggaaaaaagtatttgggccccaaaaaatggcataacggttttatccacaacctaagaagaaggtagtaaaaaaaaattcggccctccccctccccccc

SEQ ID NO: 540483 - DNA, 320 bp, Homo sapiens
cgacaagaggtgaactcggtccgggctgaacggtccgggggaagcccttgggaaacctcagcagccctgtgagcgggtgggggcaggaaacataaatgcagaaggtcccaagctggccactggaaagaccaggtctcccaccatctcatcacagagcaagcaggggtctggtccgggcagctgccatgtacccggattcagccaggctctggcaaaaactactccggagacctcggggcgcgagtggcccggcatgaactctacaagtacatcaacaagtactatgaccagatcatcacggcccgggttagggatgcggt

SEQ ID NO: 540484 - DNA, 350 bp, Homo sapiens
  misc_feature (1)..(1): n is a, c, g, or t
  misc_feature (130)..(130): n is a, c, g, or t
  misc_feature (170)..(170): n is a, c, g, or t
  misc_feature (262)..(262): n is a, c, g, or t
  misc_feature (304)..(304): n is a, c, g, or t
nagaaaaaagaaaagtagtaaaaaaaaaagcggtaacggacggaaaaccgggaacaaaattaaaaaaatcaacaaaggcagaaaaataaaagaagaagcaaaaaaaacaaaacaaaaaacatcaaaaaantcacattctgtggcacaaaaaatcaacacaaaaaaaaaanagggaaacaacaaaataaacaatgtcaaaactacaaaatcagacaaagggaacacaagaacaacaaacacaaaaactataagcatatacaanttcacacaaaagagaaagaggcttccagataaaacaaaacanggatgacagaacagaacactgggaagggaaatccagaaaagcagaa

SEQ ID NO: 540485 - DNA, 301 bp, Homo sapiens
catctcccatgccttgtattttcattaaaaaaaaaaaaaaaaaaaagcatttcagggccaggctcagtggtttactcttgtaatcccagcacttttggaggcctaggtgggaggatcacttgaggccagaagttcaaaaccagcctgagcaacatagcaagaccttgtctccatgaaaaataaaaaattagccagaaatggtgatgtgtgcctagagttccaactacttggaaagctgaggcaagaggatcgcttgagcctaggagttcaaggttgcagtgatctataatcaccactgcac

SEQ ID NO: 540486 - DNA, 180 bp, Homo sapiens
  misc_feature (156)..(156): n is a, c, g, or t
atctatgggccacttatttttaattttattttgagacagagtctctgtcgcccaggctggagtacagtggcgtgatcacagctcactgcagcctcgaccgcctgggctcaagtcatcttcccacctcagcctcctaagtagctgggaccgcagtgntgcaccactgtacctggctaattt

SEQ ID NO: 540487 - DNA, 786 bp, Homo sapiens
cgtggtggctcacgcctgtaatcccagcactttgggaggctgaggcaggcggatcacaaggttaggagatcaacaccatcctggctaatatggtgaaaacccgtctctactaaaaatacaaaaaattagccaggcatggtggcacacacctgtagtctcacctactcgggaggctgaagcaggagaatcacttgaacccaggaggtggaggttgcagtgagcctcactgcactctagcctcggtgacagagcaagactccatctcaaaaaaaaaaaaaattcctcaggagaagaatttattatcaaggttatttccaggttccgtgggtcccaggcaaatcccaggggaaacacccaattttcctcgtggaaactctcaaagaaatctcttaaagaaatttctcaaagcttaaagccaccaaagaaattaaactcacgagagccaggcagggtggctcatgcctgtaacaccacttggggaggccaggcaggaggactcatgagctcaagagatcgagaccatccgggacaccttggtgaaaccccggtttctactaaaattacaccactacatttagccgcgcgtggagggcatacgctggtattccagtactcaggaaggctgaggcaggcagaaattggtggaaacccagcgaggccagtgcagggagccgagatggggccacggcctcccagcttggaggacccggggagaattcggtccccggaaaacacaacagcacaaaaaacaacgcggcggccgccggcccagagaagcccaaaccc

SEQ ID NO: 540488 - DNA, 596 bp, Homo sapiens
aacagtaggatgtatttactaaaccccggccagacaccgaaaaaaaaaaccttgagggtcacaaattttcctgggtttgaattcctagtctcagcgaattgggaccaaacagctggctgtcatcaccaatttgagcaacatggggccctgaaccacctccaactgaagaatgagctgaagggctctttcccaccatggatgaaccgagagagaaagaacactttatcatcacatcacttgttactcccttctgcaaaaggcaaaacctccttgaccttcacccaggccacaagattgctgtcgggatcctaataaaataaatttgatgaggcacttcagcttccttgaaaagggatgagacagatatgtcatttttattagtccaaacgtgaaagtacttttaaaaagcattctagctactgaaatgtgcgactcaactttatccagttgacattgtctatcagcattaggctgaaattagaaataagcttgtttttaatgacttgtttccccagagaaatttatataaggtagatatgtaacttattattttccaacaccatggatcatccaaataaatattatgcagtcattaa

SEQ ID NO: 540489 - DNA, 723 bp, Homo sapiens
aacagtaggatgtatttactaaaccccggccagacaccgaaaaaaaaaaccttgagggtcacaaattttcctgggtttgaattcctagtctcagcgaattgggaccaaacagctggctgtcatcaccaatttgagcaacatggggccctgaaccacctccaactgaagaatgagctgaagggctctttcccaccatggatgaaccgagagagaaagaacactttatcatcacatcacttgttactcccttctgcaaaaggcaaaacctccttgaccttcacccaggccacaagattgctgtcgggatcctaataaaataaatttgatgaggcacttcagcttccttgaaaagggatgagacagatatgtcatttttattagtccaaacgtgaaagtacttttaaaaagcattctagctactgaaatgtgcgactcaactttatccagttgacattgtctatcagcattaggctgaaattagaaataagcttgtttttaatgacttgtttccccagagaaatttatataaggtagatatgtaacttattattttccaacaccatggatcatccaaataaatattatgcagtcattaacaaaaaaaaaaaacaatgggctcgatgacctcaacgaaggaactctgcggacgctagcctttaaagagggataaatgatgatactgagtcactgactcaatgaactcgaacatattactgagacaaa

SEQ ID NO: 540490 - DNA, 123 bp, Homo sapiens
agtgatcgtctctgaactctctgatggttgtggtgttcatctgtgggattaaagtggtcccagtgttcagggcatgtaaagatatgttggagtgcttctgttgagaatatcaccttcctccca

SEQ ID NO: 540491 - DNA, 1348 bp, Homo sapiens
  misc_feature (394)..(394): n is a, c, g, or t
gaccgggatgtgagtcatgtggctgagtgcgtggttggagtaacaatggactccccagggaggagtggcatcattagctgaggatctcactggctgtctgttgcccctcccctggtctaccggtcgacgcgacacgatgcgggggtgaacacccaagcgcgtctgggttttagtgagacgaagttgtaggcattcccaaacgaactctgccgtggtgagtacgtggctcctcgtcgtctagggactcggctcgacactgttgcgatacgtgccatattgtgaatgactgtgcgtacgaccccttccctcttcagcagtgagtggacgatgttgtggcatgactccgacctatgtggtggtccgagataatttgggacatgcccttgttgtggcnatgagccaaatgtggcttatgaatcggagccagggcttcgcggtgagcgtccttgtgattgtgggggcttggcaagcactgggaacttttgcggaacactagcgtccctcacttaaagagagaggatcaacgttgatatgttgacccaataacgcaccagcacttggtctgacccaaatctgaatagtcaactcgaatgttggagccaaggaccaatcggagcccaatttctttgggtccgtatcgaaatcgagcggggccaattgagacctccacgtttcgcagcacctagcccattcttggattgcaacgctaccggggaacatacttcggagagatattccctccattgccctcgttgcgatttgtcgtagggcgcatccctggggtgggtggtggagtcgatcgcaaattacagcattgctgctagcacgttcgttctcactagggtttcgagccccgttggacaactctgaattccggggtgcctttcttacccgaaacccaaggcctcccaagtttatcaacctttaaactttagggatctcccacctttttccaagcgaaacggaactttggaggtggtctcgggaagggggactctttcgcacgggaagaggggcaacacagattttcgcccaaagcagccaaggaaaacgaaccccagctgtcccggtgggggtgggcacaagtccagggggggtacaccccacacgggcccaggaaaaagggagcaccctcacatcagaagaaaaacgcaaacggaaaaaaaagagcgcggggcaagcacgcgaattcccgttaaacagttgcagacacccccgttctaggaaaaagaccccaacgggtaaaatccaatggcgacattatttgccggttgtaaagttaaccgtattggcccgcgatggaataacccacccaacggagacttgggcccgactgcaaacacggggg

SEQ ID NO: 540492 - DNA, 254 bp, Homo sapiens
cagagagtcccagcttattcttgactgccctttgataagtgaatttcccggcaactcctacctgccagtcggcatggcgcggatctaccgatcgaagaacgacacaaagtctccgctctcgtgccgtttacagagaataatgaatgagattaattaagacatgactgagattaatcgactgacattgccagactgaatgaagtgaatggcctgaatatcaacaatttccaaatacagataacactgcatattga

SEQ ID NO: 540493 - DNA, 167 bp, Homo sapiens
tatcccccggcgacatatcctaatctctctagaagacgctggaataaaatgcctttaacgtccttagtggcaggacttttatggagacacacaggtatccagccgtgcaaacactgacttcaagaaactggtcctttcacatcattttgcgatggtctctcacgaga

SEQ ID NO: 540494 - DNA, 808 bp, Homo sapiens
tgttcggccaatcctgggcccttcaagttgccggccacaaatgtccggggtcctttagaaggctattcggccacgcatattgtccaacgaagccgcttccaggaatgtctatctttaagttcacccaccgaggagttccaccctgagtggcccccccaagctttgggttggtctattatatgggaagggaaccctggtacagagcgcttgaccacattgacatcattttaaaggggcccctaggagataccccgtgaaaaagtcgacaataacagccagtgtagacccaacagcgtgaccttcagcctcaacaggtgagacccaaatcaagacttggccaattttctcacatttgttgcaagtatgtttactagctgaatctccgatacaccatgtgaccagccaccaaacccatctttttgattctttattcccactaccaatatttccccaacacagtccagtagttctttcttgtcttaaataatcatgatttcaaaaagacagccccaggcccggagcggtggctctacacccgttatccgtagcacatttggtaggcaccaggcgggtggacacataagtcaggagttccaagacccgacctggcgccacatggtgaaacacccatccctttacttaaaataccacaaattagccgggtgtggtggtgggcccccgtaatccccaactactcaggaggctgaggcagagggacttgtcttgtaacctgagaggcggaggttcaatgagcctagatcacgtccctgcatttcaacctcggcgacagagccagactccctttcca

SEQ ID NO: 540495 - DNA, 168 bp, Homo sapiens
ccacctcagcctcccaagtagctgggattataggtatgcaccactatccctggctaaagagtttttaaaagcgcaaggtacaagtggtggtaaatatgtacctgggaggaacccctctctgctcctgtggccatctttgtagcccactgagagcagcagggaaagaca

SEQ ID NO: 540496 - DNA, 1179 bp, Homo sapiens
ggcggaatggtagtcatgtgaacccgccagacagaggtgagcacgagcctggaagacataccaggcacttcacgcctggaagaaagacctacctgtcgcgagggactatacttactgggactcttgcacccctggccgcggggtgaacttgcagtccgacttgccgtgttgcttgcacaacacttcgataagtacatgcagtcggattgcattcttctcgctagatgggtaacgatcgaagcatcgccgggaaggacaacgctctatcaaacacagtctgtgcgagtgtgctgtcgccttcggacgaatcctcatactaagtccagatcacaggatggtcccgtgtcaggaatggggaccagacaacacgactcatccacttccgtgataaactcgcttctggagacccactgagcggtctaactcattcactagaatgcgagacttccttgctaacagagggcagcatggcatgatgggcagaaggtggtgaagcccagacctatctgaggcccatcatggcgtaagggcatctagcggccctcagtacgtattgccgatggaccgggtacctgcaccactagatagcttggcgtctgagtttctcgaggctgcagactcatatcgctgaaagaacatggcgcagaagtaacggcttgctggtgaccttctagaacgggtatcgccatggtagtggctcgagctcgcttgagagcgcgcaccaggtttctgaggggatgtacgatcaacgtgctcggttccctcgggacgggtccgagactacaggtcgcccggccgcaagagtgagtttcgtggcgttggcagtcctgggcgttgtggcccggtcctgtggtgtctcggccgctggtcctggagggcccttagggagtcgtggtgctggccccggaccgggctggggcccgcgtgagtgaggccagggcggcccccaggactggggcctgagggcccggaacccgtttcgcaaccgggctgtcccagaacaagggccggttttagagagaggcttttacctgtggcgccggcctgcgtctggggcgaaccctgtgacgtcctttcaaagttaggggcggggtgtcaatcgtgggaccctttgtctttgcacgtaagtcacatattctgttatagagcggcctgtaaaagggtgcaggggcaacacag

SEQ ID NO: 540497 - DNA, 696 bp, Homo sapiens
agctgggtacccgttcttgccaacgtattgcggaaggggctgtctgtttagttttactccaatcttgtctgttggcgcctattatggagaccctcaggccctatggactccatcgttatgagacttgaagtcatcgctcaaacattcccctaaaagaacgggggtgagggagaatgggaggcaacccgagggaaaaaagcagattagcttcggaatcggacaacttaaagtctcgatgtagagcctcggattgtatacgaacgtccatgagttctagacccagctctgctactaacttgtctgaccttccccatttatgaactgttgtgggtgagaggtgggactaggtgaactctgagagccctgcactcagcgcggacgagggattgaggggagagtgtgctgtataccccgcgagccttcacccgtacgagggcccagcctgccctggatgaaatcccggatggcaggcgcatgtgcaggcagatgatcctggcggctgacgtgggccgggagctatctggacagttacatcttgttggacgccggcaatcggcaaagtgtgttctgtgaactccgggatcctagattgataagttccggaattaacaggctggtaaaccccttattgctggtgctttaacgggtataggcaagcacaagcccaggggtgccttaacactatccaagggcgcc

SEQ ID NO: 540498 - DNA, 133 bp, Homo sapiens
gtagagtatagagactcgcaactcgcagcagcatcttagtcattgctgacagagcactttcacactgcccctacacagcgcgctgctgctttagagccactgtctgtatcgtggagtgaagcgactgtcgtta

SEQ ID NO: 540499 - DNA, 83 bp, Homo sapiens
gatttgctggtgcagtacaactaggcttaatagggacatgtccctcgaattcaacttctaacgttagaagcttgaattcgagc

SEQ ID NO: 540500 - DNA, 185 bp, Homo sapiens
ctgcttgtgcgtctcctccaccatgtgcatcccccttgcggcactagggacttttgtacagcgtcgcctcaagagcgggagacgcatatcccgtggcctgagatgtgtgcttcccagcacgctcacggttattacacgatactactttacaggacagaatactccgtcggactgccttcttcaaa

SEQ ID NO: 540501 - DNA, 858 bp, Homo sapiens
  misc_feature (14)..(14): n is a, c, g, or t
  misc_feature (25)..(25): n is a, c, g, or t
  misc_feature (52)..(52): n is a, c, g, or t
  misc_feature (57)..(58): n is a, c, g, or t
  misc_feature (63)..(63): n is a, c, g, or t
  misc_feature (81)..(82): n is a, c, g, or t
  misc_feature (139)..(140): n is a, c, g, or t
  misc_feature (158)..(158): n is a, c, g, or t
  misc_feature (165)..(166): n is a, c, g, or t
  misc_feature (168)..(168): n is a, c, g, or t
  misc_feature (177)..(177): n is a, c, g, or t
  misc_feature (321)..(321): n is a, c, g, or t
  misc_feature (484)..(484): n is a, c, g, or t
  misc_feature (573)..(573): n is a, c, g, or t
  misc_feature (611)..(611): n is a, c, g, or t
  misc_feature (620)..(620): n is a, c, g, or t
  misc_feature (622)..(622): n is a, c, g, or t
  misc_feature (631)..(631): n is a, c, g, or t
  misc_feature (718)..(719): n is a, c, g, or t
  misc_feature (723)..(723): n is a, c, g, or t
  misc_feature (729)..(730): n is a, c, g, or t
  misc_feature (751)..(751): n is a, c, g, or t
  misc_feature (783)..(783): n is a, c, g, or t
  misc_feature (796)..(796): n is a, c, g, or t
  misc_feature (841)..(841): n is a, c, g, or t
gcggcgggcagggngcaggcctggnatatggacgacgccccgggcgacccgnggcanncccancgccccgaccccggccgnncgagtgggcctggagcacgctgcggcggctcggggtgctctactggaagctggatgnngacaaatatgagaatganccagaannanaaaagatcngaagagagaggaactacatcctggatggacatcgataaccatatgcaaagataaactacgcgaaattatgaagaagaagcattaagatgttctacgaggagcatttgcacttggagcgatgagatccgctacatcctggatggnagtgggtacttcgacgtgagggacaaggaggaccgagtggatccggatcttcatggagaagggagacatggtgacgctgccccgcggggatctatcaccagcttcacggtggagcgagaagaactacacgagaggccatgcggctgtttgtgggagaaccggngtggacagcgtacaaccggcccgctgaccattttgaagcccgcgggcagtacgtgaaatttctggcacagaccgcctagcagttctgcntgggaactaacacgcgcctcgtaaaggtccccaatgtnatgactgancngaaaatcantcactttctctttgcttttagaggatagccttgaggctaggttatctttcctttgtaagattatttgatcagaatattttgtaatgnnaggntctagnnagccacttggcagtgtaaagngtcaccttcattttctgtaactcaatcaagantggtgggtccatngccctgtgttagttcatgcattcagttgagtcccaaatgaaagtntcatctcccgaaatgca

SEQ ID NO: 540502 - DNA, 90 bp, Homo sapiens
gagcagccagggtgtggactgtaggctccatgttgaacttccgtgaactagccgtgaatgtgccataatgcacccttctgtcgtcttctc

SEQ ID NO: 540503 - DNA, 869 bp, Homo sapiens
attctagaggccgaggcgggtggatcaactgtggtcaggagtttgagatcagccaggccaacctggtgaaaccccgtctctactaaaaatacaaaaattagctgggcgtgatggtgggcgcctgtaatcccagctacttgggaggctgaggcaggagaatcacttgaacccgggaggcggaggttgcagtgagccgagatcgcaccattgcactccagtctgggcaacagagtgagattccgtctcaaaaaaaaaaaagaaagggaaaaaaaattagctttatacctcttcctggtgtctcaaccgccattgaaatttctgaacactccaatttcgtggattatttccaaaacaaattttttagtttaaaatatttttcactccttatagtaatagtatactttaaaaagcctcgggtatattatcttctaaacagctacaatccagtgcagctactttaaccacctatgtctctagttgagaacaactaggcctatttcatgctgtgtagcctcagtgcctaacatggtgccaaatagatatcgtagaattaccctgaatggtaaaccattcgttgtgttacaatgccaaatctcaagggtcgtattttgtaattctttgaacttatattctattggattcccagtatgacggcggggggacttagcatagtctcatttttaaactctattgtgctggtttcacaaatcttctcttccaggtattttcaatccggctgcccccaggtttatggtctggaacgtccgattgcctcgcatgggtatcccattttaaaatgctggtttgagagcacgtacattggtgggtgatcacaagctatggggcacggtaaagaaggcgattgtacg

SEQ ID NO: 540504 - DNA, 954 bp, Homo sapiens
cttcctgggaatgaagatggttggtgagctgctacgaatgtcgggtgcctttttcatgcggcgtacctttggtggcaataaactctactgggctgtattctctgaatatgtaaaaactatgttacggaatggttatgctcctgttgaatttttcctcgaagggacaagaagccgctctgccaaggacattgactcctaaattcggtcttctgaattaatggggaggggaccctattttaccaagagagaaagtttgatgaatcatactcatgttgctaactcaagttatgcaagtcatgattggaatactgtgtcattgagcaagccaaccttcgttgtatgtagtcatgaagctggctaggtgagttcctaaacccactaagaactctacaagctgggttgctgaacagccagaaagattctctctgaaaattgtggaagcactccatgtgtacttggaagatcctgtgtcacttcgatctttggcacgctgggaggatgagtcggagctcatataacttggttccaagatacattcctcagaaacagtctgaggacatgcatgcctttgtcactgaagttgcctacaaaatggagcttctgcaattgacaaaccatggttttgagcccctggacctaatagtcgtgtctgcttcagaaaccggcaaccatggacttgatgctccggtgcaaacagacctctatggctaacaggttaacccaggcatgggagggtcctcatggctgataataacggctgagagttgtccggcacgcatctccggattccagctgccacctgcacaccagggaccgcgaagggcccggaaccgcagggcaagggcgagacaagcaactccggtccacacgcacgcgcactgggccatagagacattcgcaaccggccaaagcgcaggccacagagagagccccacaccaaagggcgaaaaaaaa

SEQ ID NO: 540505 - DNA, 184 bp, Homo sapiens
gactccaagcatggatacagcaaatgagatccacatcaagactcattacagtccaattgttgaaagccaaagacaaagggatattattattttttttttaaaaaccgggtttacccataatatggcccaggctggtctaaactggcgtggcgctcaatggattctcccgcctcaggcctcccaa

SEQ ID NO: 540506 - DNA, 892 bp, Homo sapiens
gagaagatgttattgtgcaaaaggatctcaaaaatcatgacttgaatgtgaaatatctgttggcaccagcacaacactgagtttgtgtgtgtgtgttgcatggcagagtagcttcagtcagtcatcttccatctatttatttttgggtcacatgtcctttattaacacttgcatcaacatcaacaggaccagtgggtcatcatcacagttactgctttcagtgtgtcccttatactctgaataaacggagtgtgggcagacacttatttcggaagagtctgtcttgggtgatacctggtaagaaagaccccattagggtcactgtccagtgcttagggttagttcactgcagaagcaactgaactgagacttgatgagaaagtgcaagggcatcggcatagtcagccataccacctagcagataagtcatgatccagatcgcgaatagcatgcaccgcaagaccacgcagcaaccatctgagcctatcacgcaacgggaacctgggcagcgaacagcgccgcaacagcgggcaaggggacgaacgaccagacacaccaatgaaacacagcacgaaaacaacacagaggcactcccagagcaactacaaaagagagaacgaaaacacgaacacgacacaccaaacaacaggcaaagaaaaaccacaaccaaacaagaccgcactggcaacgcgaaggcaaccggaggacatacagacacacggcaacgtacacaacacacgaacacccaaccaccaccacagcagacaccacagatggcccaacgaacacaagaaataaccaagcaccagagagacacaccaagcagcgagcaccaccactcaaagaaaacaccgacaacagagcataaacaccacaccgtaaaacaccgccg

SEQ ID NO: 540507 - DNA, 498 bp, Homo sapiens
  misc_feature (99)..(99): n is a, c, g, or t
  misc_feature (138)..(138): n is a, c, g, or t
atacatcccttccaaaaagcatcaaaatggcccaatggctttcttctttcccctgggacaatattaggggcttcagtccttcacccaaaggccctggcntattctgtctctctttctccccctggctgtgtctgtctntaagctctgtgtcctcggttcaatccaaggctgggaatccactaatcttcctttgcctttttaaggtggactggccctggttttaccagtaagccttttccccaactggtgctgcaagaactttatttataaggaagaacctgtggcaacttctgccccaaccacaactgccctggctgtgctccccacacatttggggcaaccttccctggcaagggcccttgtgggttttcattttccatttccttccctgtgggtaaagggttgggttaagggaatgaaaaggaaggcttccctccatggttttgggccttaagaaaattagtttggttattttaataaaagatttggcctttttta

SEQ ID NO: 540508 - DNA, 109 bp, Homo sapiens
cggctcgtcgattaggacggatcagacgaacaggggcgtttggtattgggttatggcaggcggtttcatattgataattgttgtgatgaaattgatcggcccctaagtg

SEQ ID NO: 540509 - DNA, 303 bp, Homo sapiens
  misc_feature (64)..(64): n is a, c, g, or t
  misc_feature (202)..(202): n is a, c, g, or t
  misc_feature (259)..(259): n is a, c, g, or t
gcacgagcttcgcagcagtgcctccctactagaaaaagtaagggcccacagctgggcgcaagtntgcgcctgtaatcccagcattttgggaggccaagatgggcggatcacttgaggtcaggagtttgagaccagccttgccaagatggtgaaaccctgtctctacaaaaaatacaaaaattagcctggtgtggtggtgcanacctgtaatcccaggctacttgagaggttgaggcaggagaatcactttaacttaggnggcagaggttgcagtgacacaagattgaccactgcactccagcc

SEQ ID NO: 540510 - DNA, 469 bp, Homo sapiens
  misc_feature (89)..(89): n is a, c, g, or t
  misc_feature (152)..(152): n is a, c, g, or t
gtgagagtgtctcagcccggtgctgggtctggccgaggggctggagggcacagctgcttccagcagccagcattcagtggccttgtacnaagctccacacctcctcctggtgctggctttggtgacatcacaaggcccctccaggtgcaggngcttctgtttggcaggcccctgccagggggacctggtggcctcctcattctcttttgccattggaatgtccccttgcagttctcttctcttttttttttttgaaatggattttcatttttgctgcccaggtctggagttgcagtgcctcaattctcggtctcacttgcaaccttccgcctcccgggtttcaagttatcgtcctgccttaggctcctgagtatgctggggatttacaggttcctcccagcattgctcggcttatttttttttttccctgggaaaaaggttcagctttgtgggaaccctctagagttca

SEQ ID NO: 540511 - DNA, 252 bp, Homo sapiens
cagtgccttcaggcgccattctagaccctgagaaagctttgaataaaacagaattcctgtccccagacagtttacactctggtggggagagacaggcaagtgaaccagtaaatagacagtatatcctgtggggaatcagtagtgtagatgcctgcaaggagattgctactactttacccagggtgtcaaaggaaggcctttctactaaggtgagtcctttcaggaaatctgaagaggtgtctggagaggctg

SEQ ID NO: 540512 - DNA, 384 bp, Homo sapiens
agggccgaggtccagctcctcaacaacacgtgggtctcgtcagcgtcacccagtgcctctgctgcctgcgtcccggtgcagtgccaggtgcagctccacagatgcaggtgcacccgctgccccaaggctgcccatgcccccagagccatcatccgaaccaccctatctccttcctgggcagggaggtttgagcaagacagggagctcgtagcagacatggccggtgaagatggccaggcagctgctctcactcccgctggctgtgctgcatcccaagtcccaggggccatcatcccagggaggaagattcatcacacctggaaacagctgggtccgccctcagatgaagagtgactggaaaaataaagccaaggatgccttaaa

SEQ ID NO: 540513 - DNA, 249 bp, Homo sapiens
agaatttattccggacacgtggcatgcggtgctggcagtgcccaccgtgggggacggggtggagggtgggttgggggcaggtaggagccgagccccgagcccctgcccggctactcgcggtaagtgaccgctggtgctggatgagctgggagctctggcgaaggccttcgcaggcgccacaagcgaaagcttcacgcccgaaagagaacgcaggtaccggaagaagagaaagcggccacaagcaaaaca

SEQ ID NO: 540514 - DNA, 827 bp, Homo sapiens
agcggaaccctagttgacaggagccgaagcagcagcgcgggttgtccccgtttcccgcgtcccccttccctatctccggtttgactcattcctggagggtcggccgtatacggacttgccagcagatcccacggttcgccgccagtgtgccccagatagacgaaacgaacgaaagagcaatcccggccgagacgccgacgacccggcggagcgaagcaagcaggacacgcacggaccaaaagaaaggtatactgcgctgaggacgaagctgaacgaggcaaaggctacatggccacaatacgccaagacctcatgtgagcagacagaagccatggagggtctccgagattccctcattgatactaagactctcacgaaaggggcactagacgtcacttttcgaccttcacggaggcactaagcagatccatagggctcagagaggacgccacaaagaatgtaaacgaattgatagggcaatgtgctggcccacaaagatgtcctaggggacccatgaacttaagaaatccttaggttgacttgggggttggatccggacaagtgctcgctccaaccctcgcgaaccaaagcgaacttcttttgtcacccccaagggaaagaaagacggttcctttccagaccttccggtctatcccaatgacctaccattgccattgtgaaccgggtgcttgggacctcacaaggttatagagcactggaacttggccttggccccccagtgggtcactttccttagtccagagaatttccccttgaagcgatctcgaccatttccccccccttacacttgaactttgcgatcacac

SEQ ID NO: 540515 - DNA, 315 bp, Homo sapiens
ttatgcacaacctagggtcagtctgcaggtgtaaagccatttaccaagatagttgtaggtaaagaagggcagatttattagagaaattgtgaaaatatgttgcagtgggcagctcagcagagaaggggctacctgcaaagaggcaagggctggaggaaagttttatagggtcctgctgaagggtgctacgtgtggaatgaggtcattgtgcccgcaggttgtttgtgattagctgtctctaacaattgttcatacaataattgttcattattgttctcaacttggggctctccccaacctggggacccttcctta

SEQ ID NO: 540516 - DNA, 279 bp, Homo sapiens
gacaacatcaaaagcctccatgtgacactgaatggtagtgtggaaagattttgtggggatgccagttacatacaatagccttgttactggtaagcactgtcaataaaaggtcacgtcatgccccttgatttgaggaaaacaatgagaatgtatttggtgaactagaatccgtgtcagtattgggaaattttaatgttgcaatatctagtcaaactttgagtgtactggtgctgtgaaccacctgaaaaaacaaattaaatgtattaatccttaataaga

SEQ ID NO: 540517 - DNA, 116 bp, Homo sapiens
tcggtaccttacttattttatgatctgagcactttatattcacttacagaagagttaaaagaatcacagtagaaaacagtaaagtttttcttggttccttgtttacctttcacggt

SEQ ID NO: 540518 - DNA, 928 bp, Homo sapiens
ggactcgagcagtctctggaacacgctgcggtgctcccgggtcctgagccaggtctgttctccactcaggttttccgcgcgccccgttcagccatgtcgtccggtcatccatgttgctgctggatgattggaaggcttacaaaggtgcacttcggcttggccatctgtgcgcgatcctggtgccggcttgttctcgagcgcgtgactgctggtgctcacggccgtcgggactgtgaccgcgtggtgccagggctgcgccgtactatgtcgagcatgcacggctggagggcctgtagcccagcgcttccaccagactgagtacatctgacgatctgcaagaatgcatccgcagccctgcgcagaacttcctgacgacacaggatgtactgggggcctgtacgtgctggtcaacaacgcgggcatcgccttcaaggcttgcgtgatcctcacatcccttgtcatattcaagcttgaagtgacgattaaacacaaatttctttggctacccgagaatgtgtgcacagaattactccctctatagtatagagacccctagaggtggagagtgcgtgaacgtactctagcgatcgatgacgcgtcagatcccttaaaagcgtgcaggccagagtctgcagcgagaaggttcctgcagtgagtaccatctactgagcgaggagctggtggggctcatgaacaatgtttgttggatggatacaattgaagcggagtgcaacctcaaaggaagggctggtcccagcagtcgcattacggggttgacgaagattggcgtacaccgttctgtaccaggatccagcgccaaggaaaacttgagttgagccagaggaacaggggaccaagatccttccttgaattgcctgctgcccaaggttggtgagaactgacattgggggaccaatggcaccagagc

SEQ ID NO: 540519 - DNA, 873 bp, Homo sapiens
gtgcattcctgaagtctctaatgtgactgtagggggcctggggaaaccactggcaaagtggatccaccttacgagcccactcaactcctcgcatcacttccgcgcctcccctccctctcctctcctctgagctcacactcctcgctcccacctccagcttgtgcccgcgacccccgaagaagaggaagctctatactcgtgagtcggccctgagggcgtggaaggtgatagagtggacatatgatcatcatcagagactatccacgtgcgaactctctgtgcccttcccgcggagatcaccaacgacagtgtgacatcacgagggcgtgagacctcatgatgcacaactctcgctgtgcaactctctccgtgtgcatctctatatcccactacccttttgcgcgagctctctctcgctgaaatagatgtgagtgtcgggcgtatctataaccgcgagggtgtgtgtagggcctcaacagtgtgtgacccccaataacgctgctcccagttgatgtgatccatgtcatttctaactcgctgattataaacccagctctctcctctactcaaagatgccctccacagctgagaggctacaaatcgcggtgtacaccgagacattattaatcccagccctccaaatgaataagaatcaataaatccactaaataggactgttatatttatcctcctcccgctcctaaggatgatggcacccgtcgatagatagaggcgctcccccgaagaaagatgaggggagcagttccgatcgaagtatgctagctatagatctcttcctccgccgacgtcagtcgctggtactaagaagaagaattctttctcacgggggctgatctccataaagatcgacgt

SEQ ID NO: 540520 - DNA, 302 bp, Homo sapiens
  misc_feature (198)..(198): n is a, c, g, or t
  misc_feature (223)..(223): n is a, c, g, or t
  misc_feature (273)..(273): n is a, c, g, or t
cccacagcaaagttgtatcttcggcccagcatgaagacctcttacacagtggttctgagagtacctggtacatacgtgtgtgcacatagttgaaaatgccttctgaataaagtgattgttttttaatcactaaaggagaataaccgaaaattcagagatttgggaatgttctatcttctatgtaaaagagaagaaganagacctactgctccctctctggatntcaagattaaatctactacccttttatcacacttccaggttttccttcanaattcattaactgcgagttggttccccat

SEQ ID NO: 540521 - DNA, 155 bp, Homo sapiens
  misc_feature (89)..(89): n is a, c, g, or t
  misc_feature (118)..(118): n is a, c, g, or t
  misc_feature (123)..(123): n is a, c, g, or t
  misc_feature (130)..(130): n is a, c, g, or t
ctttctgagcccatggaggacacagctaatcagtaaaggcatatattcttttttttttgagacacagtctcactccatcacccaggctngagtgcagtgagctgagatcgcgccactncactncagcgtnggggacaaaagcgaaactctgtctc

SEQ ID NO: 540522 - DNA, 118 bp, Homo sapiens
  misc_feature (6)..(6): n is a, c, g, or t
  misc_feature (43)..(44): n is a, c, g, or t
  misc_feature (46)..(46): n is a, c, g, or t
  misc_feature (99)..(99): n is a, c, g, or t
  misc_feature (106)..(106): n is a, c, g, or t
cactcncttccagcagtagtcgcttttactgtttacctgtttnngncctagaagttttccctcatctgtaaatgtgatttaaatctaagccatgatatncttattntaagagtatgcg

SEQ ID NO: 540523 - DNA, 347 bp, Homo sapiens
ttgtattcgggttaattccattccattccattccattccattccattccattcgcattccattacaatcgagttgattccattctattccattccattccagtcctttccattccattccactcgggctgattccattctattagtttccattccattccattcccttccattccactctggttgataccattcctttccattccactcgaatacattccctcctattccactcggaacgattccattccattccattccattccattccattccattccattccattccattccattccattccattccattccatttcgttccattccattctattccgtatcat

SEQ ID NO: 540524 - DNA, 107 bp, Homo sapiens
atctagaggatcccgtggacatttccacgagtcacaaattgagtattctatttctcagaaataattaataagaactttgattttattgcctttgcccactttatgag

SEQ ID NO: 540525 - DNA, 174 bp, Homo sapiens
  misc_feature (22)..(22): n is a, c, g, or t
  misc_feature (62)..(62): n is a, c, g, or t
  misc_feature (65)..(65): n is a, c, g, or t
aatgactctacatgctcatctnggctcagcatcctgggaccagtaacatgcctgctgctgtncancacccagccggggacgctgcagccacccatggtctcctagatttcccacccctcgcctgctttctcaacaatattctggttgccttcaatgatctgcgcctctgctgcc

SEQ ID NO: 540526 - DNA, 722 bp, Homo sapiens
gggcacggtcaatacaccatttgagactttatttaaaccggaaggccacataacaggtcctccccttggggtgatatcgtaggtaactccggccaatcatgcgtggtacaacaacctgggttctcccataatgaaggatttcttaacccatgtccgtgaccacatgaaagtgagtaaagggcactcctttccattcagaggcagacccagaaaacaatatcgaacagtagtcggtgcatttgtcatgccatagcagacgttttcaagttggtcattgggtaataagcatcccgcatactccgcgtcaagctcaataagcagtgcctaaccagctgggccccaaaatagctatcacaatccgcagctttggcaatctctatcaaaaggatgatgacgccacgcaggttgtaatcaagcccttataaaaagaaggtgataggccagtgacctagcgatcccacagctaccgtctcgatacgccaagtgtcccccagctccgtcagaggtgtattcagttcaaatgtcagtggtcctaaaaacatagattataggcctcagagtacgaagcagtctgggccgaaagaatatgaggtgtgtaaaataaagccccatcaaccaactctaaaagtactgcagactttcctatgtacaagattttacatatcagtatgaaaccagtcagaaataagatatgttgagtacttaataaataagctcagact

SEQ ID NO: 540527 - DNA, 360 bp, Homo sapiens
tcgacgggtggcagtgtgcacctgcagtccttgctacttgggaggctgaggcagaaggatggcttgaaccaaggagttcagttgcaccactgcactcctgggttattttggagaccctgtctctaaaataaataaaaaagaagttagagaccagcctgggcaacatagtaagaccctgtctctacaaaaaatggaaagattagctgggcatgatggcacacgcctgtagtcccagctacttgggtggctgatgtgggaggactgcttgagcctggaaggtcgaggctgcagtgagctctgattgtgatcgcccaccatattccagactggaagacagagcaaaccttatcaaaaaaaaaa

SEQ ID NO: 540528 - DNA, 106 bp, Homo sapiens
  misc_feature (46)..(46): n is a, c, g, or t
aagtcatcatctgtgcatggcacgaacagcagcacaacgacagacnggtgatcacttcgggcatcaccaacggtgccgtcaccaggccaccgaacagcgtgcggcc

SEQ ID NO: 540529 - DNA, 1037 bp, Homo sapiens
  misc_feature (739)..(739): n is a, c, g, or t
cctctgggtcggaactggcatcttgcagtagtccgcccaaatcaggaatgcacagggaagagtacagcggaggctcccgatatatgtcctctagaccttgctgaaaatgtggagttgctcgttgtgtccacatatatgcagaatctgtacgaaaggtgaatactagtgaaagcaatgaaggaaatgtggtgctgttcctaccgaacgcgaagtgtcccagagagtgttgatccagagggcaaagaactggagggatgatcgtagcggagtgtttacaccaagttatagcttgtattggccatttgtatgtaaatacaaaaacaatgttaaagggacaaatgattccttggcaatagagacataaactgttgctgtattttgacgtcaacgatgtaatgtcacattatatagatgacttggaagaataagcaatgcctgacaactgtatttgagggccaagtgattcgggaggctaagatatatgacagacctacacgatgacaccggtaatcttgggtatactatttgacctggggcaaagactgttcacaaccaagaagaaagcaacaacttgtgttgatgaaccaatggggaaaggaagccctagagtttgttgaaaacctattctcttatggagttcagtggacataatagttgggacaccacacagcactaagcggcctcctggggtcaccgacgagaacaagaacaaagaggctcgagaaacaacaccctatgnagaaaacgcgcggccggaaaaaagagttgttcagcaccactctcagacgggcgacggccacaggaagtaattggaatctgcaccaggtgcccccaaaggcaacaatggaataacccgggacgtgtgtgtgtgacccaaaaagacaacgcccgcgcgaccgcgctgtttgcaacaacccagacagctacggagcacaaggagcaccacacaggaggccagcgagcctaataaccacacacatcaggtggagaacaaccacgagcacaacgcacgcaccagcacaaccccacgccagaca

SEQ ID NO: 540530 - DNA, 118 bp, Homo sapiens
gttctcagcaggcatcccccaaaaacagcccttcattcacccatccaaccaccagtttgcaacggtcaattccagtggggtcccgcagctcgcacattcgtcaatccatggtccatca

SEQ ID NO: 540531 - DNA, 516 bp, Homo sapiens
  misc_feature (134)..(134): n is a, c, g, or t
  misc_feature (268)..(268): n is a, c, g, or t
  misc_feature (272)..(272): n is a, c, g, or t
  misc_feature (382)..(382): n is a, c, g, or t
  misc_feature (399)..(399): n is a, c, g, or t
gaagatattttatttaaaggatttagaagtacggtccctctgaatgataaagtccaggatgtggcagtgggctgcagtggcagaagaattttagtggtgctgactacactggagctgaggaggttgcctgaccntcactgtgatctgtgatatcacccacagtaattgaagtacctgggatggagaagacatgaacccagttctaaagccttaactgaagaggggattgtcagaactgaagaatacaaactggtgtcattagatggcntganattcaaaggaatggggtttttgtttttattaagggtggagaagtgattggaaaagtcactgtgagcaagtagcaagtgcttacttctcatcctaactctgaggaaatganatatgggagaaggaacngcttccagggaacctgaaatgtggtttgagcgtatcattctgtggtctgaagaggctgtgacttttctatgtggttagcaactggcagacactaaacttcaaaccaagtctccaaac

SEQ ID NO: 540532 - DNA, 112 bp, Homo sapiens
atcgatttgctgcctttttttgcggaatcaccatggttgctgtgacctgtacacgtatctgaaaactgtagggcttcaaggtctcatcgctgctcagtacagcggggctcag

SEQ ID NO: 540533 - DNA, 123 bp, Homo sapiens
tagtattgatatactagtttactaaacagtaaatatatgtgtgttatatttttatagaaaatactaaatgtagtcttctgggacttctttttgttcaagatcacattactaatatttgtcctt

SEQ ID NO: 540534 - DNA, 257 bp, Homo sapiens
aaaatccacaaatataaaatactggatgtggtgatgcaaacctgtggtcacagctacttgggaggctgaagtaggaggactgcttgagcccaggaggttgaggctgcactgagctataattgcaccactgcactccagcctggtgacagagccagcctccgtctccaacgaaaacaaacaaaaaaagaattacttcttccagagattctctgccagaactcctaggtggtgttggacccatatcttttacttccata

SEQ ID NO: 540535 - DNA, 447 bp, Homo sapiens
gtcacagaagagctggatccagtgacaagactcaccttgaccaaacccttgttaggctcctctgagccttcctctgccctggtcctcaaccctagtccccagccctggacctcctgttcttgcgagggcttcatggcccagttttaggaaagaatcctgctaagtcagtttagaaaggctcccccccacccttggtatctgatcaccctcaacatctgaccaagttcttctttcctttgatgtctaaggctttgtcctggctttagcaacaatattgttaggtcagtttatctagaacctcctacctttgatgtctctgcttagtaattctgtttgaaaccgttccgctactttaataatgacccaatcattccatactgtaagtgagatgattttaccctccctacttgcttgttttaattgttttccaatttttctccatctttt

SEQ ID NO: 540536 - DNA, 338 bp, Homo sapiens
  misc_feature (33)..(33): n is a, c, g, or t
  misc_feature (44)..(44): n is a, c, g, or t
  misc_feature (105)..(105): n is a, c, g, or t
  misc_feature (112)..(112): n is a, c, g, or t
  misc_feature (161)..(161): n is a, c, g, or t
  misc_feature (172)..(173): n is a, c, g, or t
tgttcccctccagggaggggtccccttgctccngtcctgaggtnaccaggtggtgggaaaggagctggagcttccgtgctcagacccacaacattggtccatcancaggctncacttttcctcagttccagggtggatagaggtcaagttcttgaccttangctctgtatcnnaaaattgccttgagaaactgcttaagaaaaccagatgtcatgctgagcgcggtggctcacacctgtaatcccaacactttgggaggccaaggtgggaggattgcttgaggcgaggagttcaagaccagcctggccaatatagtgagaccccatttctgtttttga

SEQ ID NO: 540537 - DNA, 303 bp, Homo sapiens
tggcccatgcaatgtcgaaatccactagggcagccaaatatcaatgctctgaaatgatctcttttgactccatgtgtcacaagtagtgtcattgctgatgcaagaaggtgggctcccagtggccttgtggcagctccacccctgttggtttgcagtggtacagcatttgctcccagactgcctatcatggtactggcactagagtgtctgcagtttttctaaggcaactggtgcaagctgtcagtggatctaccattctggggtctagaggacgaaggcctttatctcacagatccactaggc

SEQ ID NO: 540538 - DNA, 658 bp, Homo sapiens
  misc_feature (310)..(310): n is a, c, g, or t
  misc_feature (313)..(313): n is a, c, g, or t
  misc_feature (596)..(596): n is a, c, g, or t
ctgcctcggcctcccatagtgctgggattacaggcataagccaccacgcctggccaataaaatcaacatttacctggtttatgtgttgaccaactatacacatataattctacatttttttctaaaaattattatcaaacccccaatttcaccattagaaaaagagatcttaacatttctagatttttttttccatcataactcagttacttatggctgggataaaatatgtagggagataatctaatacctaattcaaaggaagaaaatatctaattctaagtcttgaattcttctcatcataccatancangatttaacatttaacatttttcacgaacttctaatacacttcattcacttttttagccacagcattggcatttaaattactgtactttaaaacatggaattgctggaggcttggaaacttagatgcaatttccctactgctacctccaatgagaatgacacaaaacagtggtaggaaaaactctcaaaattttacccaattgtatattttctacattgtcactatctacttttatatacttaatatatacttctaaaatttctgacagtgtttggtgtatcanaccaacctcaacatgtaagaacattgactttcacagtcaactaatgccacttatggtacccg

SEQ ID NO: 540539 - DNA, 896 bp, Homo sapiens
  misc_feature (9)..(9): n is a, c, g, or t
  misc_feature (18)..(18): n is a, c, g, or t
  misc_feature (30)..(30): n is a, c, g, or t
  misc_feature (38)..(38): n is a, c, g, or t
  misc_feature (49)..(49): n is a, c, g, or t
  misc_feature (89)..(89): n is a, c, g, or t
  misc_feature (99)..(99): n is a, c, g, or t
  misc_feature (127)..(127): n is a, c, g, or t
  misc_feature (146)..(147): n is a, c, g, or t
  misc_feature (162)..(162): n is a, c, g, or t
  misc_feature (168)..(168): n is a, c, g, or t
  misc_feature (170)..(170): n is a, c, g, or t
  misc_feature (212)..(212): n is a, c, g, or t
  misc_feature (227)..(227): n is a, c, g, or t
  misc_feature (239)..(239): n is a, c, g, or t
  misc_feature (258)..(258): n is a, c, g, or t
  misc_feature (260)..(260): n is a, c, g, or t
  misc_feature (268)..(268): n is a, c, g, or t
  misc_feature (281)..(282): n is a, c, g, or t
  misc_feature (288)..(288): n is a, c, g, or t
  misc_feature (295)..(295): n is a, c, g, or t
  misc_feature (304)..(304): n is a, c, g, or t
  misc_feature (394)..(394): n is a, c, g, or t
  misc_feature (396)..(396): n is a, c, g, or t
  misc_feature (440)..(440): n is a, c, g, or t
  misc_feature (443)..(443): n is a, c, g, or t
  misc_feature (453)..(453): n is a, c, g, or t
  misc_feature (478)..(479): n is a, c, g, or t
  misc_feature (483)..(483): n is a, c, g, or t
  misc_feature (486)..(486): n is a, c, g, or t
  misc_feature (488)..(488): n is a, c, g, or t
  misc_feature (491)..(491): n is a, c, g, or t
  misc_feature (500)..(500): n is a, c, g, or t
  misc_feature (522)..(522): n is a, c, g, or t
  misc_feature (535)..(535): n is a, c, g, or t
  misc_feature (569)..(569): n is a, c, g, or t
  misc_feature (574)..(574): n is a, c, g, or t
  misc_feature (580)..(580): n is a, c, g, or t
  misc_feature (589)..(589): n is a, c, g, or t
  misc_feature (631)..(631): n is a, c, g, or t
  misc_feature (665)..(665): n is a, c, g, or t
  misc_feature (671)..(671): n is a, c, g, or t
  misc_feature (674)..(674): n is a, c, g, or t
  misc_feature (697)..(697): n is a, c, g, or t
  misc_feature (733)..(733): n is a, c, g, or t
  misc_feature (743)..(743): n is a, c, g, or t
  misc_feature (779)..(779): n is a, c, g, or t
  misc_feature (827)..(827): n is a, c, g, or t
  misc_feature (879)..(879): n is a, c, g, or t
cgggggggncagggaggngcgcggagaganaaggccgngagcgcgccangaggcgctcaggccgagacaccttgcagctggccgccgcngccaccgagncgccgctgtgctcactgatccgtctccngggccaccgccttgttganncgcggtgggaagaanaagtcnancaagacgtcgcaggctctgccaaagcagggagttatgctttnccgtgggtgcggatnctgtggtacatnaagaaaggctacctccaantncaggattngagtgggggcacnngtgtanatggtcngccgtcctnggatacctgacagcggagattctggagctttctggcaatgcatcgatgatacacacaagaagggacgggtgcacaccctggctatatgcntngctggttgtgtgccaatgatgaagtagttgaatcaggctggctnaanggggttaccntagccagtgggggtgtgttaccgcnncatncancncgngttgctagngaagaaggggggattcaaaggnaagttggaagctntcagtcacaccacccccaggcataaaaggccaanttttnatcccngaagaagcntgtatctaaaaaagcaggaggtaagaaaggggcgcggaaatncaagaagaagcagggtgaagtcagttaggcagcnagcgcnganagcacaaccgagggcacacctgncgacggcttcacagtcctctccaccaagagcctctnccttggccanaagttgcaagttgtacaggctgacattgcctcgatngacagtgatgctgttgttcacccgacaaacactgacttctacatcggnggtgaagtaggaaacacgctggagaagaaaggtggcaaggagtttgtggaanctgttctggaactccgg

SEQ ID NO: 540540 - DNA, 323 bp, Homo sapiens
cccccggcacgagcgctgccacctccgattccgagctttcggcacctctgccgggtggtaccgagccttcccggggcccctcctctcctccaccggcctgcctttcccgcggactatcgccccacgtttcctcagccccctctctcccggccgagcgcggcggcagagcagcagcagcagcagcagcaggaggaggagcccggtgcggcggttgcggggagcccattggtaacagtcaaggaggcggcaaaaaaaagtcttctactactacacggttatatggaattattattatggacaggtcatcccatgagcctcataga

SEQ ID NO: 540541 - DNA, 615 bp, Homo sapiens
  misc_feature (365)..(365): n is a, c, g, or t
  misc_feature (615)..(615): n is a, c, g, or t
gcagtaattcgccaatagatgagctgatacagctcaaggtgaaaggagtgagatgcgcacccgagtatatgtgctctagtgcctttcaggaaacacatggagtttgttcccttttggtccgacgatatagtggcgagatactagtaagaggaaaaagagtcgatgttggttatgatcagtctaaggcgagatgaggctagctgtctcgagaaaaggaagtagccccacaaggtgcttatccaagtggactaaaatgcgtgcgcaattagatcatactagatgttgacccgagcatgactgctctgcgcatgtgttggtcaatactgatagcgaagattcagaggggcatcagtattcattgtccnagagaagaattcaatgatgcaggtattggagcgacattaaggtgacttctataggagccgagatagcttccttgaacacgttgtgaagggaataactgatcgagaatacaagataatgagagccaaacgagcatagaggtacactgtggcttcaagcatacacagcgccatgccatgctcctagccctagtagaagcacactttgtgagaaccaatgggaggggagcctgagctgctggaacctattacn

SEQ ID NO: 540542 - DNA, 796 bp, Homo sapiens
cccacatcctgggttgtgggccgcgttcccaacgggtgttactggcgcgctatggtcccgcgtggcgcgagcagaggcgcttctacgtctgcaccttgctgcaacttgtgcctgggcagacgaagtcgctgtagcagtgggtgaccaaagaggacacctgcctttgtgccgactttgccaaccactccggacgcgcatcttcgcacaacggtctcttggacaaagccgtgagcaacacgatcgcctctctcatctgcgggcgccgcttcgagatcgacgaccctcgcttactcaggctgttggacctatctcatgagggactgtaggaggagtcgggctttctgtgcgaggtgctgtatgctgtacccgtcctcctgtgtatcccagcgctggctgtcaaagggctacgctgacaaatggcgttcctgacccagctgggtgagctgctcactgagcacatgatgacctgtgacacaaaccagaccccccgagacctgtctgaggcctatctggctgagatggaggcgaaggggaaccctgagagcagatttaatgatgagcccgcgcgtagtggtggctgacctgttctctgccgcgatggtgaccacctcgtgcacgctggcctggggccgcctgctgatgatactacatccggatgtgcagagccgtgtccatcaggagatcgtcgacatcgtatggctggtgctgcgaccacagagggggaccaggctcacattatctacaccactggcgtgattctgacgtgcagagtttgtgacatatacccctggggggc

SEQ ID NO: 540543 - DNA, 814 bp, Homo sapiens
  misc_feature (78)..(78): n is a, c, g, or t
  misc_feature (340)..(340): n is a, c, g, or t
cctcggggagacctcgctaccttattaggagcaaatgtcctttggagctctcagtgtgtgataagggaaccaactcanaataagtctcgggggggaggaaactacgaaaatttgtgatgctctgaaacttcaggggaagaatgtgcaggccctcaaacccccatgatctggcttttcattcagatttgtgtgggtcaaggggagtattttatccctcactgtggcctgagcctgagggtgggggaattttagccccagggggcatctctgctttggcttggacctctgtcttcttacaccacattatctttctttctttacttggtcctttatgggtttngggggggttttggatatggattcggatttatttgggaatctggttctctctcaggggcaccatgaaaagctagggatgggagaagggagatcttctacttggctggttccctgaagaactggttggagcagagcccagcctttgcctcatgtaaaatccttggaatgttgagggagaaaagtcccaaccttgtacctaggcattacggcccaaagacacccaaacagggggcttgcgggcgctaagggggggagctctggcggcggttgcctccagaggggggtgaggtccggggcctcggtgccgggtcggtggggtcgggggcgcggtggggggagcggggtcgcggacctgaaggggggggtacgtgcgtccccccgacgcgggggttaccgcgtgatggagcgggggcggggggggcgtggggggggcgggaccggataaagggcgcgtggcttgccgtcttccctgtcg

SEQ ID NO: 540544 - DNA, 348 bp, Homo sapiens
  misc_feature (48)..(48): n is a, c, g, or t
  misc_feature (70)..(70): n is a, c, g, or t
cagggctttgaccatgtcgacttcaaacttcgtgaattgatcattacntgagcaacctcggcaaccgctntggcccgttcgatttccattggtctttctgggtccaggaggctctcgatcgcgacgaacaggtgattacgtagatcttcaatcttgttcttcatgttcaacctcccggatggtgcgtttgagtttgccgatagcgcgtattgcggatttcagctcttccggataccgatgaatggtgttccgacgcatacgttctgcttcaaggacggcaacaaggcccatatagccctgaataacctggagttgctgacgagagcagtcgacgcggccgcgaattta

SEQ ID NO: 540545 - DNA, 346 bp, Homo sapiens
gtatagacagggtctcactatgttgcccaagctggtctcaaactcctgggctcaaaggatcctcccacctcagcctcccaaagtgctgggcttacaggcgtgagccaccaaccccagcccacttgttggtcctatgcacaacagccagagatctctctgtgtatgtgaccttgctctccacaaagaaggacagcagaagctgggagaaagtcctctgggcgcctgggctctggcggtgctctctttcacccatcgttcttatctcgcactcaggggagaaaaggtttcagtacagaaatttacccacagcagaggccaggcctcaattaaaggcctacacaatggg

SEQ ID NO: 540546 - DNA, 689 bp, Homo sapiens
ctgtctcaccaaaggaaaaaaaaaatatccagtagtctatacaacataagtaattgcgtaaacatgtcagtggggggagggccaggtctgtcttattaattctaatatagaagaaattttgggaacaggaaactgctgttgcagaaaccacactggtgacaggtgcagattacaaccctcagcgggccgggcgccagtggctcacgcctataatcccaacactttgggaggccgaggcaggcagatcacttgaggccaggagttcaaggccagcctggccaacatggagaaaccctgtatctactaaaaatacaaaaattagccggggctggtggcgtatgtctgtaatccagctattcgggaggccgaggtgggagaattgcctaaaccaggaggcagaggttgcacgcgagcagggattgtgccaactcactccagacctgggcgacagaaccgtctctaaagacaaaaccttcagttgccatgaagcgcatggtgacgtgtggtgagaagcaggtgcacgctgcctgaaaaaacacacaaggacaagcatagtggaccccgagcgacagcatggtacagcgaacggagaggcccctccagaagcgaggcgggccacagggcgcacaccggggggtccaagggcggacccccggaactggccaatgcggcgaggaccggggcccccg

SEQ ID NO: 540547 - DNA, 935 bp, Homo sapiens
  misc_feature (34)..(34): n is a, c, g, or t
  misc_feature (103)..(103): n is a, c, g, or t
  misc_feature (141)..(141): n is a, c, g, or t
  misc_feature (148)..(148): n is a, c, g, or t
  misc_feature (150)..(150): n is a, c, g, or t
gatcgaagatgggggcggcgatctgtgtcgggcnttaccagaagagtcttcatgtggacagtctcagggacaccatgtagagaattttggtctcgattcaganaaagagaaagagccagtggttgttgagcacagtaggangagaaananagggaacctcatcctagtgtgtccaccgtttagcgaagccgcaggcatacacaccgacctgaaggatctccagagtcgttggggaatctgtacgtgtaaagaaggttttggttctcatgctctttcctgaggtaattgggcaagaccatctccctgggaagatggctcgatctatgaggttcaatcttctgggctcattccagctgatgacttggggctcatgtatgtctcgcctaaacatccagactccatcccagattgtgcaggggttaagagatgttcttgtatgtttctataatgtccctattcgaagatagatctagcatttgatggaagcgtcatgtgccgggtgatctgccccccatatttgaacaatcaccttggtggttactaacgcaattcgggaagagatacacatgtggatcacgtgtgctttccctgagcaaggggggtgtcattagatctttgataactttacatgtggagatatcttgcagaactgtgctgtaaaccacttttctggtcaaggagtgtcatctttcgtctcatattaccagtggcagttacggtgctcactgcctgtttgtgagcccatttcatgggatgcgctcttttgaaaagtttggtgggctgggcttggttaaaaagagggcctgggagcccttgctaaggtaaattgaaaatgtcgccgcggacacaaaaaatgtgggcgcaacaattgcactcgacaaaaagttgggtcggggcatttagtgtggaaaaaaaaagggcggctacaggcgggg

SEQ ID NO: 540548 - DNA, 164 bp, Homo sapiens
ttcgagtcagacttgctctcgagggcgagaagaggcatcacatcaacaaggtacaccaaggtacccaatgcctgtttattcaccatcaaggaagaagaccacacactgggaaacctccattaaatacacaactcctaaaagacccgcaaagtgctattctgctg

SEQ ID NO: 540549 - DNA, 743 bp, Homo sapiens
  misc_feature (6)..(6): n is a, c, g, or t
  misc_feature (102)..(102): n is a, c, g, or t
  misc_feature (110)..(111): n is a, c, g, or t
  misc_feature (114)..(114): n is a, c, g, or t
  misc_feature (124)..(124): n is a, c, g, or t
  misc_feature (129)..(129): n is a, c, g, or t
  misc_feature (143)..(143): n is a, c, g, or t
  misc_feature (168)..(168): n is a, c, g, or t
  misc_feature (170)..(171): n is a, c, g, or t
  misc_feature (219)..(219): n is a, c, g, or t
  misc_feature (238)..(238): n is a, c, g, or t
  misc_feature (248)..(248): n is a, c, g, or t
  misc_feature (263)..(263): n is a, c, g, or t
  misc_feature (270)..(271): n is a, c, g, or t
  misc_feature (275)..(275): n is a, c, g, or t
  misc_feature (281)..(281): n is a, c, g, or t
  misc_feature (284)..(285): n is a, c, g, or t
  misc_feature (353)..(355): n is a, c, g, or t
  misc_feature (453)..(453): n is a, c, g, or t
  misc_feature (460)..(460): n is a, c, g, or t
  misc_feature (464)..(464): n is a, c, g, or t
  misc_feature (486)..(486): n is a, c, g, or t
  misc_feature (625)..(625): n is a, c, g, or t
  misc_feature (645)..(645): n is a, c, g, or t
  misc_feature (727)..(727): n is a, c, g, or t
atcatnactttcataaatattcaactatctagaaatatgttacctccatgtttagcacatttaggtattttggtacattttaagtactatttcaatgttctntgtttatnntgnctgagtaggnagctnatagaaaattatgncatatatgatcaactattaccattntnnataaaaccacaggactttctacttggggctaatcaatagagggtcatntggcccctgtcttgtttancttctgagcntcaccctcttcttcnccctcanngtancgttgnatnntggtctgattatctctccttcaatgtaacctgtagcatttatatgggtcaatgagacaactattaatnnncctcaacataaacaaatctttaactaaacttattttgactaattatataatacccttcagaactgttgttcacaacaggtctgaaaatgatctggtgntcgtttngtanttgtgaggagaaaaatattgcngacattagattttcaatggtaaccccaaacatttgttctacagctttttctcccctcttatcttcctactaacgacattgagattgtggctgcaagaaaagttttccagttacttgataaaggcctagcatgaccccanataagcacctaatgtgtttngcacaatcacatttagctttgtgatatgttgctcttcaaaatagagtcctttgttgctgagttgagttcaatttctcttgancattaactgctcttct

SEQ ID NO: 540550 - DNA, 168 bp, Homo sapiens
gatcacctcccttccgctaattaaagctaagattcagctgagtcgtattgtgttccagtagtatacaaaatacactacgaaagtggatttagattatctgaacactcaatagctaagacccaaactgggattagattccccactagtgcttggtcccttatcgagggt

SEQ ID NO: 540551 - DNA, 413 bp, Homo sapiens
  misc_feature (133)..(133): n is a, c, g, or t
atgtgagtaacaggaatgtgtctttaaaaagctagagtggtttcttttaatcagcctttttggtggtttgggttcatgagttgttttggcctcctctcccacaactggggttgttttctcaggacttttttcnttaaagctagtcccttcgaaagcattttgtatttttttgaatgcccccagtatgggcgctttcgacacctttaacccactttggtttggtgtttataaaacctggtccctccctcaagttaatggatggtcttgctttttttttgtttttttttccctccttttgattgattagacattgtctagtattataaaatggtatttaaaatgcttgtaaatactatttatgtttttaattttgtaaaataaaaatttctttttaaccactggcaaaaaaaaaa

SEQ ID NO: 540552 - DNA, 1170 bp, Homo sapiens
tagacacacgaagcatatttcacctccgctaccataatcatcgctatccccaccggcgtcaaaagtatttaggctagactctgccacactccacggaagcaatatgaaatgatctgctagcatgtggctctgagccctagtgattcatcttactattcacctgtacggtggcctcgactggtcattcgtattagcaaacgtcatcactagacatcgttactacacgacacgtactacgattgtgatctcacgttccaactatgatcctatcaaataggagcatgtatttgccatcataggaggcttcattcactgattacccctatgctcaggctaaaccctaggaccaaacctacgccaaaatccatttcactatcatattcatcgtgcgtaaatctaactttcttcccacaacactttctcggacctatccggaatgccccgaggtaagtcggactaccccgagtgcatacaccacatgaaacatcctatcatctgtaggctcattcatttctctaacagcagtaatattaataattttcatgattctgagaagccttcggttcgaacgcgcaaaagtcctaatagtagaagaaccctccataaacctggagtgaatatatggatgcccctcaagcgctacaaacattcgaagaacccgtatacatcacatcttagacctaaaaatcggacggcatcgaagcccccaaaggcagggttcaaagcgcaagcccaaggggctccacgactgcgctcaacggacaccgacacagaagaacaccgacacacacaacacacacaaacgcggggcggaacaggagagacacactaaagggaccccacaaaggagaacacagcgcgagctcgaccaacggcgggcccacagacggagcgccaaacaaacgacagagcagggcgaatacaacgacgggcacaagagacaacacggacgacacacactccgaacgacaccaggcggggcagcacacgcgagccaaccccagcaccggccgggacccaagactcacactgagctcacacgaccaacccgacgacgggaggttacgccacaaaagagacagtggaccgcaccaacagcacgcaccacggccacctcaacagcaacagagagacaggacgcacgagccgccaccacgcccccatcgcgcg

SEQ ID NO: 540553 - DNA, 215 bp, Homo sapiens
  misc_feature (1)..(1): n is a, c, g, or t
nttttccataaaactagctcatcatagattaaaaagcaacagatgttaaagttacaaactaatattacacaaggataaataatagcttaatcatggcaatctaactcccaagctaacactaagagaatgacatctttcagaatatgagtttaaaaacttacaaaacagggtatcaaataggatgtgattactaccatgattctgtgacaatcatc

SEQ ID NO: 540554 - DNA, 253 bp, Homo sapiens
cacgaggcttaccactgaacaaatagcacacgattttcttaatgaacgtgttgctacctttgcgcaaagtgcaatctctgagtgtctaccatccccagctggcatactgtgtgctgcagtttttacctaaggtcagcaccctcaccggaccagtggggatgggacttctcacatactggccatcgattcacagaccatcagaagtcatgttctgaaacgagttatcacaaatttgacatatcaatgcatcatc

SEQ ID NO: 540555 - DNA, 1279 bp, Homo sapiens
cgagccctgtccgaatgggagcggagcgcatgcctggccctggggcctggtcgagcccgcggccatggcggcctgaggcgacagtgtggccggaagcggggctgttggcggctgcctggccaaagacggcttgcagcagtctaagtgcccggacataccccaaaactggctgtgcgcgcctcgtcgctgtcgcgtgacgccgagcgcctgagcctaccaaatggtgccgggagtacttgggcaggggcctggcgccgagtgcagccctgagtgagctgagggttttacccccgttggaggtgggaggtcaggggtacagcctctaccggtgcgcggatcgcgggtcacgggggtcagcctgcgtgggcccctcagggatcgctccattgttattacggcccccccttctttgctgccctgctgcccttggcggccgtggcgcctggggtggcccgcgcccttgggccggcgaaggggggcccgggggggccctgccgggccacgcggctagggcgcccgggccgcgacaggcgccttgaacgcggcggccccatggccacgttggggcttcttgctatgtcgggcaagggcccatcagggcgtatcccttgtcttccgttcccagcttgcactcggcatccgcggggtacccatccgcttggccccaggcggtctgcgcccgagggagggccccccacgtgggacaccggcttgcccattacattagccgcggcataggctaaaccagaaaaggacccaactcctatgtaccaagtggggacaggttcgacaactattcccccattgagccatggctatacgaacacaagcgccggcttggacattagttacccggccccaactaaagctttttgaccgaggacaacgccgtggccatacgacaattgctgaggaggacaccccccaaagcggattgtgataaccgggcgaggcatacacatatcaccccaaagaaggggtgtggccccaggcgacttgttgactaaacgtagcactaagcaatttccccccaaaaatgcactaccgaggccccagataggcataacaacaactcttcccgtacggacagcccattttccgaacagccactgccccccaggatcgtacttcgggtcaacaggtcacacgacacctatgtttgaccaccacgtcgtaaccaacgtgtgtggccgccaaactttatccacattggacgctatttgtgcatgcacgatgtccctcgtatctccactaccgaatgtggtgtacggtcccctaa

SEQ ID NO: 540556 - DNA, 163 bp, Homo sapiens
gctcggcccgacgtacagggcgactccttcttaaaacaaaaaagtttgtcatttctagattacagatttccaaattaaggtgttaggtacacacatttagaatttttatgttatcttgatggattaaccactttatcattaagaaatgagccgactgagtcca

SEQ ID NO: 540557 - DNA, 183 bp, Homo sapiens
agaagacatatctttagctagacaaagtgcttatagaaatcttgacaactgaaccattcagaaggatttgtctggtataaaactggatcccactgtacagcaattaagagataaaatatatgatatcatactccatatgcttctctatccgctatactatgaggtaactaagatttgtttaca

SEQ ID NO: 540558 - DNA, 951 bp, Homo sapiens
ctctgttcaccgccaccctcatgcacaggctagcgccacactggttccttcgcacgctggctgctctgcaatggcagtctgttccggtacatacacccgtcagaggaggaacttcgggcgctgtcagggaaactgaggccccgggtcaggaaggagcggtgggcaaatggtcttcatgacgagaagccattgtcagtgcctcgagatgcccatttccagctgcagacctgtcccctcactgctgtggatgccctagtcctgcgcttctttctggaataccagtggttcgtcgacttcgcagtgtactccgttggtgtgtacctcttcacagaggcctactattttgtgctgggcccagtccaggagaccaacatcgctgtgttctggtgcctgctcactctggccttctctctgaaggtgttcctcatggtgacccggctgtacttcagtaccaaggagggcggtgagcgctccgtatgtctctcctttgccttcctcttcctcctcttggccatgctggtacaggtggtgcgggaggagaccctggagctgggcctggagccgggcctagccagcatgacccagcacctggagcctattctgaagaagcaggattgggactggacactccctgtgatcaagttggcatccgccttgggctggcggtgctaagtccctgtgggcgccttcctcattttcactggcctgaggtggccagaccacaggagcgctgacctgtctggggacgaccctgtacggtgtctaacccagttctgttccctgtggcctgtggtctggcaagctggccggattcggcacggcccaggactggtttccgtgcggcgaggtcgacctcgcgggtggggggtcgtccggacgcctggcttttgcggcgggaccatggtgcgccacgcgggtgggggccccctcgaggggccgcgggggcggcgg

SEQ ID NO: 540559 - DNA, 238 bp, Homo sapiens
  misc_feature (11)..(11): n is a, c, g, or t
atgtctagtantctaaggatcccggcctccacttggtttgcagaaagccaagatcgcgccattgcaccccaagcgtgagcaacacggcgaaactccatctcaaaaaaaaaaagaaaggggtaaaccccgttttttatttgccccgttattcccttccttagttttccggcaaagaaaattaaaaccttgggcttacacacaaaaagggaggtgtccccatttgtccttggctttttca

SEQ ID NO: 540560 - DNA, 168 bp, Homo sapiens
  misc_feature (12)..(12): n is a, c, g, or t
  misc_feature (93)..(93): n is a, c, g, or t
  misc_feature (98)..(98): n is a, c, g, or t
  misc_feature (118)..(118): n is a, c, g, or t
  misc_feature (141)..(142): n is a, c, g, or t
  misc_feature (154)..(155): n is a, c, g, or t
  misc_feature (166)..(166): n is a, c, g, or t
aaattgttagcnttccttcctttggtcttcccacacccctcaccacaagaagaaaacaaaaaaaactaataaggaggacaataagtgcaaganaaaanagaaaatctaaatagtatgngattagtttttatttttaactannaataaatgcttnncatctttccanaa

SEQ ID NO: 540561 - DNA, 212 bp, Homo sapiens
tatatattgggctgttttgtccgtcactgttctctattctgacgcaggctttgcggaggacaatgtctcttcatgcttacttatactaacattcgcttcttctatcgagtgattgattgctccaatctgggtgtgaggacttcagttatctgtttgggattttttaggtcgtgcgtgttgctgtttgtgggggtagcactgggtaccgagct

SEQ ID NO: 540562 - DNA, 339 bp, Homo sapiens
  misc_feature (12)..(12): n is a, c, g, or t
aggctctctcgnggggggatcgaggaaaaagctggagcactgggtgcagtttctggagccagaggacaccgtcactccacggtgctcggagtaatggatgctcggtagaaagggaagcccggcacttcatttgggttagagacacggaactcgggataacccaggcaccaggtttcaggttcggcccagtgccttcctgggtagtttacatataagtatccagggatatactcccactaaggcgagttctcaaatggcataagggggcaaatcttttcaccttcttactaaccttggtggatttatttggtctatttcttacccccacagagagagcgt

SEQ ID NO: 540563 - DNA, 1014 bp, Homo sapiens
cgtgtatttaattacgtggctgggttagtcgctctgtgactgggccgaggtcgtcagaaggtgatcaagagaagctcacttactggctttacacattgagagcagcagccggaaccaggcagcccaagctgccaatcctgaagaccctcggagccagggcgtggaagattcatacaggagtcaaaattaaaaaataaacctctttgagaaagaaaaggacatgaagaaaagccccacgtctcttaaagggagacatactacctgtcagacagccccttgctggggccccctgtgtgtgagccgtcggtcttgggctcctccccggccgtgcccagctcgtggtgcccaggcctcgcctcacccggtcgccgaggcctcggtatctgctcatgctttgcccagggaatcatgcactgttcatgctgccaagtcaggcagcggactcagaggaagcccgggagcaaccttgctgctggctcgagcggcctctgttagagggaaagaagcatccctggggctgcggagaaagcccaggatatgagatccaggtagtccttccaggacaaaaaatctccaggtgagaaggaatcccagcggattgtctccctgacaaacctgcccggtgctgtcacatgtgccggccgcggagccacttggccaggcaagggggcgatcccttgttccaacacgtgggggctaaaagaagaccctgttaaaaagcaacccggtctaacagcaatctcgcaaggaagtcctcctcagggctggttggacacgggcaatcaaatggcggtgccatcccaggaatggaagctaatacagggatttggaggttcctgcaaaagatccggcttgtcaaataggaagtggacaatggcccccatgttggcaatttctcaggcgtgggaccctgcaccacggcgatttaacggggatagcaccctaaacccacaaacaaagaaagacaaaaaggaaataaaaaaaaggagacaccagaataaaagaaataagacg

SEQ ID NO: 540564 - DNA, 143 bp, Homo sapiens
gtacggtcacacgcaccggaagggggcaaagggagtctagggaagagggggatcgggagagggcttaggtgcctagatgatgttgctcagcagcctggcctgggtcagagagcctgaggggcccttctccggtggcgtggtgt

SEQ ID NO: 540565 - DNA, 311 bp, Homo sapiens
tacaacgtcgtgcacagagttaaaaccaagggggtaaaaggatcctgaaatgtcctaatagttggtgtaggcccccaaccattaagggcaagatagatagtttaaaaatgtaatacctcaggtctacacatgaatgactttaaatttactccttttggtatgaacccaataagcagtctaataccacggggcctacgtgctataaaagtaagtaataaaccaaatacttgaaccatgatggcaacttaaatcctggggataatcttttatattactagagagaaggagagtgggctaggccccaggggggc

SEQ ID NO: 540566 - DNA, 476 bp, Homo sapiens
acgaaaatgacactctgacacagacgcatggagacagcatcagtctccactttaggctggatggtctgagaagaaggctgaattcctcccaacggtatatcgaagactcctgttgtggtgtagatggatctgtctgttttatcacctgttgccaaaattccagcaggaaggtttattttatttagctgctgttgagtctcagagtttaccttaatgttcaacacttggacaaaatcagccatattaacacttgtaatagattgtagtaggtttagtagaattgccaattcactgtggtttaagtgctgtccagggcctgtttatacaggtgccacatttgcgctgccctgagatttcagctgtgaagatggcagcacaccctggggtgtgtaggttctgctgtcatccaagcccagagacaagtccttcctgggggctttaattgtggaaacatcatcagtcatgcccatctgctt

SEQ ID NO: 540567 - DNA, 289 bp, Homo sapiens
ctcatctgtctttggtcgttctttcttcccatggtggtctcctctttgctttcatccctggtgatcccgctcgaggaggagaactcccaggggatgatgggcggatatactttagactcgttctgcccgtctggaggatagagatttagttcttactcttatagagatccgttctctaggtgggtagaagcgatttcgctaactcttcagaaaaggccgcagaagtctcccaaaattccttgtaacaagaaagtcaatccgctagacttttggtctccgctggtgtcca

SEQ ID NO: 540568 - DNA, 407 bp, Homo sapiens
tcgagccggtcctcaccctactgtatctagatgtgcaaacacaagtggggacttggtgatccacttcatggaggagatagacaaggagatcagtgagatgaagctgtcagtcaatgcctctccctgacgtatcctaaggaaataagttgaaatgtgaacaaatatttatttataagtatgttaactgtgaggttattagcagccatggaaaattggagacattccaaatttctaacaatgggggaatgtgtttaatgacatattgtacaaccatttaatataatgtataggattaagatggtaatttttatgttatgtctttttcactacaatttttaaaaaaatgtatagggcctggtgtggtggcacagtttctgtaatcccagcaactcaggagactgaggcag

SEQ ID NO: 540569 - DNA, 296 bp, Homo sapiens
ttttagtcttatcgagagactcgatagtgaacccgttgaggtcgatgaactttgccgtgccatagggcggggtagcgagtcgccgaataaacggagccagtggaatgatgggggtgctgttatcggccggcagggtgaaagtcgcgtttttcagcgcgtagccaaggatgatggggtcggggtaatgcacatcgttttccaatagcaacacgccgtgaatcagcgtcattgtggaagccgtcgtgtcagtggagtcctcgtcgtaggggtgcaaggtcgaggaagagagttcgatc

SEQ ID NO: 540570 - DNA, 235 bp, Homo sapiens
  misc_feature (106)..(106): n is a, c, g, or t
taactccacagtagtagacagcagcatgaaacgggggggggtgggagaaaggggaggggaagagtactggaatatgtatttgagccctgatattgacgtagttgangcggccagcgcgtgaatatggtgaaggcaaaaagacgctgctttggcattctctttgcagcacagagaagtttacatgaagtagaagaaatccttgcagtggtgaaaactgacatggcaagtggcagaa

SEQ ID NO: 540571 - DNA, 431 bp, Homo sapiens
  misc_feature (4)..(4): n is a, c, g, or t
  misc_feature (11)..(11): n is a, c, g, or t
  misc_feature (21)..(21): n is a, c, g, or t
  misc_feature (29)..(29): n is a, c, g, or t
  misc_feature (39)..(39): n is a, c, g, or t
  misc_feature (54)..(54): n is a, c, g, or t
  misc_feature (61)..(61): n is a, c, g, or t
  misc_feature (69)..(69): n is a, c, g, or t
  misc_feature (89)..(89): n is a, c, g, or t
  misc_feature (119)..(119): n is a, c, g, or t
  misc_feature (128)..(128): n is a, c, g, or t
  misc_feature (144)..(144): n is a, c, g, or t
  misc_feature (158)..(158): n is a, c, g, or t
  misc_feature (170)..(170): n is a, c, g, or t
  misc_feature (176)..(176): n is a, c, g, or t
  misc_feature (190)..(190): n is a, c, g, or t
  misc_feature (209)..(209): n is a, c, g, or t
  misc_feature (219)..(219): n is a, c, g, or t
  misc_feature (240)..(240): n is a, c, g, or t
  misc_feature (243)..(243): n is a, c, g, or t
  misc_feature (245)..(245): n is a, c, g, or t
  misc_feature (273)..(273): n is a, c, g, or t
  misc_feature (299)..(299): n is a, c, g, or t
  misc_feature (306)..(306): n is a, c, g, or t
  misc_feature (309)..(309): n is a, c, g, or t
  misc_feature (311)..(311): n is a, c, g, or t
  misc_feature (315)..(315): n is a, c, g, or t
  misc_feature (321)..(321): n is a, c, g, or t
  misc_feature (325)..(325): n is a, c, g, or t
  misc_feature (334)..(334): n is a, c, g, or t
  misc_feature (337)..(338): n is a, c, g, or t
  misc_feature (341)..(341): n is a, c, g, or t
  misc_feature (360)..(360): n is a, c, g, or t
  misc_feature (364)..(365): n is a, c, g, or t
  misc_feature (368)..(368): n is a, c, g, or t
  misc_feature (371)..(371): n is a, c, g, or t
  misc_feature (407)..(407): n is a, c, g, or t
taanaaaaacntatttatttnccaggccnggggggggcntgggggtacggttcngggcccnggggcccnaaagggggccggggggcccngtcgggggggccgcgggcccccgggggacngccgggccngaggcccggccccccnccccggccgtgggngggacccgtggngggggncgggcccgggcccnccgggggggggccccccgngttggccccnccccccccggttctcccgggnccncncgcccctccggggccgggggccccggcngcccccgggggcccgggggccgtccngggggcnggncncccngggccncccncgggggccnccnnccntgccggggggccgggggcncccnnccnccnccccgttccgggggccctggccccccggctgtttcncccggggccgggctgggtcccccc

SEQ ID NO: 540572 - DNA, 1450 bp, Homo sapiens
gagaggcggccgcgggcggaggggcgggggcaggctagcgggaggctctccgtgaggcacggagggtgactggggacaggcgggcggcgacgggcttgtcatggggatccgggctgcgagacggcactcgtagcatctggggactccgagggggacaggaagttcagcgcccgggaccccggcgccggccccgccgaggggatccccactgctccggtcctggagcgggaggggagaaaggagggagccccggtttcgccccgcccctgggctggtgctgcgggggcggggagtgagggctgctctggggggagtggagatcggggagcgcggccgtgccctctcgagcggctgcggggtccccgcggcgccgggctgctgagctgagggcccgcggcggccgcggccggtgcatgtgcggctgctggatgcggaggcggcggcgacggcgcggatcggcaggatgttagggcagcagcagcagcaactgtactcgtcggctgcgctcctgaccggggagcggagccggctgctcacctgctacgtgcaggactaccttgagtgcgtggagtcgctgccccacgacatgcagaggaacgtgtctgtgctgcgagagctggacaacaaatatcaagaaacgttaaaggaaattgatgatgtctacgaaaaatataagaaagaagatgatttaaaccagaagaaacgtctacagcagcttctccagagagcactaattaatagtcaagaattgggagatgaaaaaatacagattgttacacaaatgctcgaattggtggaaaatcgggcaagacaaatggagttacactcacagtgtttccaagatcctgctgaaagtgaacgagcctcagataaagcaaagatggattccagccaaccagaaagatcttcaagaagaccccgcaggcagcggaccagtgaaagccgtgatttatgtcacatggcaaatgggattgaagactgtgatgatcagccacctaaagaaaagaaatccaagtcagcaaagaaaaagaaacgctccaaggccaagcaggaaagggaagcttcacctgttgagtttgcaatagatcctaatgaacctacatactgcttatgcaaccaagtgtcttatggggagatgataggatgtgacaatgaacagtgtccaattgaatggtttcacttttcatgtgtttcacttacctataaaccaaaggggaaatggtattgcccaaagtgcaggggagataatgagaaaacaatggacaaaagtactgaaaagacaaaaaaggatagaagatcgaggtagtaaaggccatccacattttaaagggttatttgtcttttatataattcgtttgctttcagaaaatgttttagggtaaatgcataagactatgcaataatttttaatcattagtattaatggtgtattaaaagttgttgtactttg

SEQ ID NO: 540573 - DNA, 157 bp, Homo sapiens
atgttgcaggatgtctcaaactcctggacttaaggaatccctctgtctcagacttccaaaatgttgggattacaggcatgagccaacatgcccggtaaaagaaaggttttgtagctgtttctgtgggcagtgagcaccgtgagaaaatcttaccttt

SEQ ID NO: 540574 - DNA, 88 bp, Homo sapiens
caggggattgatttgaaaaaaaaatgtgttgaattaccccatttgctggacaaattatttaataaactttattcaaaattgggtggca

SEQ ID NO: 540575 - DNA, 1562 bp, Homo sapiens
  misc_feature (1562)..(1562): n is a, c, g, or t
gagaggcggccgcgggcggaggggcgggggcaggctagcgggaggctctccgtgaggcacggagggtgactggggacaggcgggcggcgacgggcttgtcatggggatccgggctgcgagacggcactcgtagcatctggggactccgagggggacaggaagttcagcgcccgggaccccggcgccggccccgccgaggggatccccactgctccggtcctggagcgggaggggagaaaggagggagccccggtttcgccccgcccctgggctggtgctgcgggggcggggagtgagggctgctctggggggagtggagatcggggagcgcggccgtgccctctcgagcggctgcggggtccccgcggcgccgggctgctgagctgagggcccgcggcggccgcggccggtgcatgtgcggctgctggatgcggaggcggcggcgacggcgcggatcggcaggatgttagggcagcagcagcagcaactgtactcgtcggctgcgctcctgaccggggagcggagccggctgctcacctgctacgtgcaggactaccttgagtgcgtggagtcgctgccccacgacatgcagaggaacgtgtctgtgctgcgagagctggacaacaaatatcaagaaacgttaaaggaaattgatgatgtctacgaaaaatataagaaagaagatgatttaaaccagaagaaacgtctacagcagcttctccagagagcactaattaatagtcaagaattgggagatgaaaaaatacagattgttacacaaatgctcgaattggtggaaaatcgggcaagacaaatggagttacactcacagtgtttccaagatcctgctgaaagtgaacgagcctcagataaagcaaagatggattccagccaaccagaaagatcttcaagaagaccccgcaggcagcggaccagtgaaagccgtgatttatgtcacatggcaaatgggattgaagactgtgatgatcagccacctaaagaaaagaaatccaagtcagcaaagaaaaagaaacgctccaaggccaagcaggaaagggaagcttcacctgttgagtttgcaatagatcctaatgaacctacatactgcttatgcaaccaagtgtcttatggggagatgataggatgtgacaatgaacagtgtccaattgaatggtttcacttttcatgtgtttcacttacctataaaccaaaggggaaatggtattgcccaaagtgcaggggagataatgagaaaacaatggacaaaagtactgaaaagacaaaaaaggatagaagatcgaggtagtaaaggccatccacattttaaagggttatttgtcttttatataattcgtttgctttcagaaaatgttttagggtaaatgcataagactatgcaataatttttaatcattagtattaatggtgtattaaaagttgttgtactttgaaaaaaaaaaatgggcttgttggctaacggggagctttgcgccgttcccttaggagggtattatgacctcgtactgatcgtgcctcggcgttcgtggggaacggatagtaan

SEQ ID NO: 540576 - DNA, 1199 bp, Homo sapiens
  misc_feature (1084)..(1084): n is a, c, g, or t
  misc_feature (1111)..(1111): n is a, c, g, or t
  misc_feature (1114)..(1114): n is a, c, g, or t
  misc_feature (1124)..(1124): n is a, c, g, or t
  misc_feature (1132)..(1133): n is a, c, g, or t
  misc_feature (1138)..(1138): n is a, c, g, or t
  misc_feature (1141)..(1141): n is a, c, g, or t
  misc_feature (1151)..(1151): n is a, c, g, or t
  misc_feature (1187)..(1187): n is a, c, g, or t
gagaggcggccgcgggcggaggggcgggggcaggctagcgggaggctctccgtgaggcacggagggtgactggggacaggcgggcggcgacgggcttgtcatggggatccgggctgcgagacggcactcgtagcatctggggactccgagggggacaggaagttcagcgcccgggaccccggcgccggccccgccgaggggatccccactgctccggtcctggagcgggaggggagaaaggagggagccccggtttcgccccgcccctgggctggtgctgcgggggcggggagtgagggctgctctggggggagtggagatcggggagcgcggccgtgccctctcgagcggctgcggggtccccgcggcgccgggctgctgagctgagggcccgcggcggccgcggccggtgcatgtgcggctgctggatgcggaggcggcggcgacggcgcggatcggcaggatgttagggcagcagcagcagcaactgtactcgtcggctgcgctcctgaccggggagcggagccggctgctcacctgctacgtgcaggactaccttgagtgcgtggagtcgctgccccacgacatgcagaggaacgtgtctgtgctgcgagagctggacaacaaatatcaagaaacgttaaaggaaattgatgatgtctacgaaaaatataagaaagaagatgatttaaaccagaagaaacgtctacagcagcttctccagagagcactaattaatagtcaagaattgggagatgaaaaaatacagattgttacacaaatgctcgaattggtggaaaatcgggcaagacaaatggagttacactcacagtgtttccaagatcctgctgaaagtgaacgagcctcagataaagcaaagatggattccagccaaccagaaagatcttcaagaagaccccgcaggcagcggaccagtgaaagccgtgatttatgtcacatggcaaatgggattgaagactgtgatgatcagccacctaaagaaaagaaatccaagtcagcaaagaaaaagaaacgctccaaggccaagcagggaaaggggaagctttcacctgtttggagtttngcattaggttccttattggaacctacntantggtttatgncaacccanntgttnttntggggggagntggttggggtgtggaccattgaaccagtgttcccanttggattgggtt

SEQ ID NO: 540577 - DNA, 1025 bp, Homo sapiens
cgggcctggaaaatggctggtcgcgagaggggcggtggcgagctggctgctggggagggagtcggggctgtgcgggggcgttggttcggccccagcggagtccgaatcggggtttgcagcatgttttgcggtgatgtttccaacctctttcccagtcaatggatcaggacggcgatcagcagctcggaccgtcgcggatcctggctccgcaaacgttaaaggaaattgatgatgtctacgaaaaatataagaaagaagatgatttaaaccagaagaaacgtctacagcagcttctccagagagcactaattaatagtcaagaattgggagatgaaaaaatacagattgttacacaaatgctcgaattggtggaaaatcgggcaagacaaatggagttacactcacagtgtttccaagatcctgctgaaagtgaacgagcctcagataaagcaaagatggattccagccaaccagaaagatcttcaagaagaccccgcaggcagcggaccagtgaaagccgtgatttatgtcacatggcaaatgggattgaagactgtgatgatcagccacctaaagaaaagaaatccaagtcagcaaagaaaaagaaacgctccaaggccaagcaggaaagggaagcttcacctgttgagtttgcaatagatcctaatgaacctacatactgcttatgcaaccaagtgtcttatggggagatgataggatgtgacaatgaacagtgtccaattgaatggtttcacttttcatgtgtttcacttacctataaaccaaaggggaaatggtattgcccaaagtgcaggggagataatgagaaaacaatggacaaaagtactgaaaagacaaaaaaggatagaagatcgaggtagtaaaggccatccacattttaaagggttatttgtcttttatataattcgtttgctttcagaaaatgttttagggtaaatgcataagactatgcaataatttttaatcattagtattaatggtgtattaaaagttgttgtactttg

SEQ ID NO: 540578 - DNA, 205 bp, Homo sapiens
ggcccggagacagcggctcgagatgaacctggggctgcagaagatattccagtgaaatgctctacattatgtgactggatggatgaaatgaatggtgctagtatttgtctcaatgactattggcaaacgacttacttgtgtgtgcgaagaccctgttacatgaagcacacccgtggttgaatgcagacacttggcatccatggca

SEQ ID NO: 540579 - DNA, 103 bp, Homo sapiens
gcggccgcctactactactactaccactgctcgaattcaagcttctaacgatgtacggggacatggaaatacagttgttggcctccggcctcccctcaaaaaa

SEQ ID NO: 540580 - DNA, 948 bp, Homo sapiens
  misc_feature (124)..(124): n is a, c, g, or t
gggtttccggaatatggcggggcgtttggctcttgctgcagccagagctccaggtctcgtcttcatttctgtgtcctttgttcttagaggtccagcctgtgtggccctgtgacccgcagatatngggagatacacagctaagactccaggaccccctggaagcctagaaatgtgactgtgcctgacgtgtagccctgtctggggagctctgcacgcgcaattccgcagtctctcccagattgtgcaagaaccatgggaggggcgtcagatggagtcttgctctgtcgcccaggctggagtgcatggcaccatctcggctcacagcaacttccacctcccgggttcaagtgattctcctgcctcagcctcctgagatagctgggactacacgatgtgcaccaccacgcccagctaaatttctatttctctcctatttttaagtagagaaagggtttcactgtgttagccaggatagtctcgatctcctgacatcgtgatctgcacactcagcttccaaagtgctgggattaccaggcatgagccattcgtgcccaaggcctgtattatatctttatctttatcaagtgcggtctaagtgagcattggtatgacttcggggcatcacttggcattctggctgacggatcggcgcgtatactgcatgcggtggccaattttcagcacgtttctgacacctgggtcactgcaccacccacctcctcatcactcatggcttggcgttccccccaatggccaggaacttccccaccacttatggtcattcagcgccaggcaattggggtccagctgtctgcagctacacgtcacgggaccaccggcggcattgtctgggccccccgggtgcgcccaactcaacagcgaatacccatgacattccaacactacacgtgcaacagggtccccggatctcgaggcgaactatcaaaa

SEQ ID NO: 540581 - DNA, 586 bp, Homo sapiens
tgggtcagatggacaataaaattcaggctgaagtggtttctgatggagatgaggaacttattcagagttggagtaaaggtcactcttgctatgcaaagagactagtggcattttgcccctgtcctagagatctgtggaactttgaacttgagagagatgatttagggtatctggcagaagaaatttctaaatggcaaagtgttccagaggaagcagagcatacaaatttgaaaaatctgcagactgacgatgcagtagaaaataaaaacccattttctagggagaaattcaagctggcagcagaaatttgcataggtaataagaagctaactattaatcaccaagacaatggggaaaatgtctccagggcatgtcagagaccttcacaacaggccctcccatcacaggcccagaaacctaggaggaaaaatggtttcatgggtcaggtccagggtccccctgctgtttgcagcctagggacttggtgtcctgcatcccagacatgccagacatggctaaaaagggccatgtacagtcaggcctggttcaacagtgaagcctgaagtctggagttccaatggtgtga

SEQ ID NO: 540582 - DNA, 361 bp, Homo sapiens
catttccactggtgatatgaatcaggaatatcaactcccattgtcacaaaatcatattcacaggtacagaatgtgaagactctcaactcgtatctcatttgactgagctgcaaggcaaggaagagtagcattttcaccatttgtttgtctttctgggaactttgatgatgatttgcttcgactagaaactcctaaccatgttactctaggcacaatcggttgtcgatcgctctcaggctccagtgctgttgtcacagaattttgataaacgagcaaggaaaatgtcgcttattgcctatgcactgcatttctacaaacatggttcctttataggattagtccaggataacaggatgaatga

SEQ ID NO: 540583 - DNA, 134 bp, Homo sapiens
cacacacacagatggggaggtacagaaacccagctggtaagagtttcttaccctccttagccagcataccagctttccaggttaccatttctctgcagcttattgagcacagagagctttttatgacctactag

SEQ ID NO: 540584 - DNA, 294 bp, Homo sapiens
  misc_feature (35)..(35): n is a, c, g, or t
cttggcggggccctgcaaattaatgatctacatgnagtatattattagagggaaactaatctttctgctaagcagtgtgttgtcctacatagtgaatgttcgtgttttggaatttattaattatttaaggtaatggtgttccgtatggttttggaatgtctggtgacttgcttattttttagtgatccccattaagtcagaaaaatgtatttttaaatgtttcaaaaagagccatatgacatattttaacaaacgaaatttaaataaagcataaaataaaatgccatgttaaaa

SEQ ID NO: 540585 - DNA, 1713 bp, Homo sapiens
  misc_feature (1135)..(1136): n is a, c, g, or t
  misc_feature (1140)..(1140): n is a, c, g, or t
  misc_feature (1143)..(1143): n is a, c, g, or t
  misc_feature (1147)..(1147): n is a, c, g, or t
  misc_feature (1149)..(1149): n is a, c, g, or t
  misc_feature (1151)..(1151): n is a, c, g, or t
gatatggagtcgcagttcttgtttgtggattgctgtgatcgtcacttgacaatgcagatcttcgtgaagactctgactggtaagaccatcaccctcgaggttgagcccagtgacaccatcgagaatgtcaaggcaaagatccaagataaggaaggcatccctcctgaccagcagaggttgatctttgctggaaaacagctggaagatgggcgcaccctgtctgactacaacatccagaaagagtccaccctgcacctggtgctccgcctcagaggtgggagtgcaaatcttcgtgaagacgcgtcactggtaagtaccatcgcccttgacgtggagcccagtgagcacgcatctgagaatgtcaaaggcaaagatccaggacaaggaaggcatccctcctgaccagcagaggttgatctttgccggagaaacagctggaaggatggacgcaccctgtctgactacaacatccagaaaagagtccaccctgcacctggtgctccgtctcagaggtgggatgcagatcttcgtgaagaccctgactggtaagaccatcaccctcgaggtggaagcccagtgacaccattgagaatgtcaaggcaaagatccaagacaaggaaggcattcctcctggaccagcagaggttgatctttggccgggaaacagctggaagatggacgcaccctgtctgactacaacatccagaaagagtccaccctgcacctggtgctccgtctcagaggtgggatgcagatcttcgtgaagaccctgactggtaagaccatcaccctcgaggtggagcccagtgacaccatcgagaatgtgaaggccaagatccaggataaagaaggcatcccccccgaccagcagaggctcatctttgcaggcaagcagctggaagatggccgcactctttctgactacaacatccagaaagagtcgaccctgcacctggtcctgcgtctgaggggtggctattaattattcggtctgcattcccagtgggcagtgatggcattactctgcactatagccatttgccccaacttaagtttagaaattacaagtttcagtaatagctgaacctctgttcaaaatgttaataaaggtttcgttgcatggtaagcataaaanncagnaanaaanananaaaaaaaaaaaaaaatgggggggggcgtcaaaaggccccaggggggccgcaataggaccgccgttgtttgttgacaatgggtgcggaccacaacaagcggaggggtgagataaaagggcaatgggcagggcgacggtgtaaaccccaccatcgagggccggcgggggaacaatcggcgactggcgaaagctgggcgaacgagcgaccgatgactgcgggggggcggcaaactatggggaataagccctccatcctaaaagatgaaggctttagcgaaaatactagcaaaagtcttctgcgcgcgtgaatacagggcgtggtgccaccaaacgccggcctataagacatggggctgcagaaacatgcggacaaccacggccaggtcatccgaggacatttgccccccgcgcgagatagaaaatccctgtcccaaaagaaaggccaccctgatggagatcacgtgaacggaggactgtggccgaggaagcttggactggcccgccgagaggccttgaagcagcagtactgtgaacaacgtgtcgcgcgcgatgacatgaccgac

SEQ ID NO: 540586 - DNA, 128 bp, Homo sapiens
gtcaaaggtaatatccaactaaagtcacatactagaggtaacaggtagacatgaagtaaagggggacaccactcaacccatagcagaaccacatatagcagtcacattcccgataaccacaaagaccc

SEQ ID NO: 540587 - DNA, 158 bp, Homo sapiens
ccgagatcgcgccactgcactccagcctgggccacggagcgagacttccgtctcaggaaaaaaaaaaaactgattatgagggcacttgtttgtactccttggtagcttcagttacggcaacagcccagatgcggtggctcccgcctgttgtcccagca

SEQ ID NO: 540588 - DNA, 1221 bp, Homo sapiens
gatatggagtcgcagttcttgtttgtggattgctgtgatcgtcacttgacaatgcagatcttcgtgaagactctgactggtaagaccatcaccctcgaggttgagcccagtgacaccatcgagaatgtcaaggcaaagatccaagataaggaaggcatccctcctgaccagcagaggttgatctttgctggaaaacagctggaagatgggcgcaccctgtctgactacaacatccagaaagagtccaccctgcacctggtgctccgcctcagaggtgggagtgcaaatcttcgtgaagacgcgtcactggtaagtaccatcgcccttgacgtggagcccagtgagcacgcatctgagaatgtcaaaggcaaagatccaggacaaggaaggcatccctcctgaccagcagaggttgatctttgccggagaaacagctggaaggatggacgcaccctgtctgactacaacatccagaaaagagtccaccctgcacctggtgctccgtctcagaggtgggatgcagatcttcgtgaagaccctgactggtaagaccatcaccctcgaggtggaagcccagtgacaccattgagaatgtcaaggcaaagatccaagacaaggaaggcattcctcctggaccagcagaggttgatctttggccgggaaacagctggaagatggacgcaccctgtctgactacaacatccagaaagagtccaccctgcacctggtgctccgtctcagaggtgggatgcagatcttcgtgaagaccctgactggtaagaccatcaccctcgaggtggagcccagtgacaccatcgagaatgtgaaggccaagatccaggataaagaaggcatcccccccgaccagcagaggctcatctttgcaggcaagcagctggaagatggccgcactctttctgactacaacatccagaaagagtcgaccctgcacctggtcctgcgtctgagccttcgcctcagaggtggcatgcagatctttgtgaagaccctgacaggcaagaccatcaccctggacgtcgagcccagtgttaccaccaagaaggtcaaacaggaagacagacgtaccttcctcaccacagtatctaaaaagagccctccttgtgcttgttcttgggtgtgatgggggaggtgtcttagttttccctatcttttaagctgttaacaagtttcattgcactttgaataaagttcttgcattcc

SEQ ID NO: 540589 - DNA, 262 bp, Homo sapiens
  misc_feature (32)..(32): n is a, c, g, or t
gtgttagaggatcccattagaggcgagcgctntacgagtaggaatatgataggacggtctatttgttgttcgaatgaggcatgatcagagggacggcggggatcgtattgcgcgtagaggtgaattcttggactgggcaagacggacagagcgaaagtatttgcaagaatgtctcattaatcaagaacgaaagtcggaggttcgaagacgatcagataccgtcgtagttccgaccataaacgatgccgcctggttaaaagtg

SEQ ID NO: 540590 - DNA, 1884 bp, Homo sapiens
  misc_feature (1049)..(1052): n is a, c, g, or t
  misc_feature (1056)..(1057): n is a, c, g, or t
  misc_feature (1059)..(1059): n is a, c, g, or t
  misc_feature (1063)..(1063): n is a, c, g, or t
  misc_feature (1065)..(1065): n is a, c, g, or t
  misc_feature (1319)..(1319): n is a, c, g, or t
gatatggagtcgcagttcttgtttgtggattgctgtgatcgtcacttgacaatgcagatcttcgtgaagactctgactggtaagaccatcaccctcgaggttgagcccagtgacaccatcgagaatgtcaaggcaaagatccaagataaggaaggcatccctcctgaccagcagaggttgatctttgctggaaaacagctggaagatgggcgcaccctgtctgactacaacatccagaaagagtccaccctgcacctggtgctccgcctcagaggtgggagtgcaaatcttcgtgaagacgcgtcactggtaagtaccatcgcccttgacgtggagcccagtgagcacgcatctgagaatgtcaaaggcaaagatccaggacaaggaaggcatccctcctgaccagcagaggttgatctttgccggagaaacagctggaaggatggacgcaccctgtctgactacaacatccagaaaagagtccaccctgcacctggtgctccgtctcagaggtgggatgcagatcttcgtgaagaccctgactggtaagaccatcaccctcgaggtggaagcccagtgacaccattgagaatgtcaaggcaaagatccaagacaaggaaggcatccctcctgaccagcagaggttgatctttgctgggaaacagctggaagatggacgcaccctgtctgactacaacatccagaaagagtccaccctgcacctggtgctccgtctcagaggtgggatgcagatcttcgtgaagaccctgactggtaagaccatcaccctcgaggtggagcccagtgacaccatcgagaatgtcaaggcaaagatccaagataaggaaggcatccctcctgatcagcagaggttgatctttgctgggaaacagctggaagatggacgcaccctgtctgactacaacatccagaaagagtccactctgcacttggtcctgcgcttgagggggggtgtctaagtttccccttttaaggtttcaacaaatttcattgcactttcctttcaataaagttgttgcattccccannnnaaannanaaananccaagaataaaggaaaggcaattccgtccgtgatcagcagagtgtttgctcttgggcgcgcaaacagctggcaagactggtcgtaccctgtactgagctacgcaccatccagaaagagtccatttttgcacctggtactccgctctcatgatggtggcgatgcaaaatcttgcgatagaagacgcgtcaactgggcaattgactcagtcagcccctctgacgtgtcggaagccgcgaggttgagcacacaatcngcggacactgtcaaaacggctaaaagagtcccttttgacagatcggacaggggcatttacccttccacttgaacccctttcaaggaagggttttgaactcctgtgtggtctgagaaaaaataccaggccgtggtaaaggactggggcccgcatactcccgttgattccttggagcgtaccataacggtccctatgtacacatgtcagttcctaacacccctttgtctatcctcttggcgctggcgtcccggctcctttccatacaaaacaggtcggggggacaacttgcccaagaaatttttattcagggttgtaagtagaaacccgccttggaaccttgtggggtttcgaaatggaaaccccaatgtttcatgaacgattccgtgccggaacacgagtattgggtgaaagccccacagatagtgttggaatcctatcgtccaaattttttgcacaggaaaaactttggttcccacaacgcggcgcgacacaaaagagaacttcctcccaaggacactcacaactggggcaaacagcgggcgcaatcttctccccattatacccg

SEQ ID NO: 540591 - DNA, 427 bp, Homo sapiens
tgttccggcctttctttgaggaggtttaagcccacagggcccccttggtgtgttttataaggtatttttacccgggaaccgtacagttggcccggaaggcaaaaaaacgccccgttaaggggggggtggggtccccccccccctccaaaaaaagcaataataggtagggggccagcagtttcctgagcctgacgccttgacagtggaagtcccccaaaggttacagttgccaggtcaggcatgaagggggccccgtggaaaagacaggggcccctaaagaatgtttaagggtttttacccctcccccccccccggggggattaaaggggggggatcccagggggggggtttttcctccccccccaagggataaagcccttttcccggccctcaataaacccccaataaaaattttttttgtcaatca

SEQ ID NO: 540592 - DNA, 2123 bp, Homo sapiens
  misc_feature (751)..(751): n is a, c, g, or t
  misc_feature (1288)..(1291): n is a, c, g, or t
  misc_feature (1295)..(1296): n is a, c, g, or t
  misc_feature (1298)..(1298): n is a, c, g, or t
  misc_feature (1302)..(1302): n is a, c, g, or t
  misc_feature (1304)..(1304): n is a, c, g, or t
  misc_feature (1558)..(1558): n is a, c, g, or t
gatatggagtcgcagttcttgtttgtggattgctgtgatcgtcacttgacaatgcagatcttcgtgaagactctgactggtaagaccatcaccctcgaggttgagcccagtgacaccatcgagaatgtcaaggcaaagatccaagataaggaaggcatccctcctgaccagcagaggttgatctttgctggaaaacagctggaagatgggcgcaccctgtctgactacaacatccagaaagagtccaccctgcacctggtgctccgcctcagaggtgggagtgcaaatcttcgtgaagacgcgtcactggtaagtaccatcgcccttgacgtggagcccagtgagcacgcatctgagaatgtcaaaggcaaagatccaggacaaggaaggcatccctcctgaccagcagaggttgatctttgccggagaaacagctggaaggatggacgcaccctgtctgactacaacatccagaaaagagtccaccctgcacctggtgctccgtctcagaggtgggatgcagatcttcgtgaagaccctgactggtaagaccatcactctcgaggtggagcccagtgacaccattgagaatgtcaaggcaaagatccaagacaaggaaggcatccctcctgaccagcagaggttgatctttgctgggaaacagctggaagatggacgcaccctgtctgactacaacatccagaaagagtccaccctgcacctggtgctccgtctcagaggtgggatgcanatcttcgtgaagaccctgactggtaagaccatcacccttgaggtggcctcgaggtggaagcccagtgacaccattgagaatgtcaaggcaaagatccaagacaaggaaggcatccctcctgaccagcagaggttgatctttgctgggaaacagctggaagatggacgcaccctgtctgactacaacatccagaaagagtccaccctgcacctggtgctccgtctcagaggtgggatgcagatcttcgtgaagaccctgactggtaagaccatcaccctcgaggtggagcccagtgacaccatcgagaatgtcaaggcaaagatccaagataaggaaggcatccctcctgatcagcagaggttgatctttgctgggaaacagctggaagatggacgcaccctgtctgactacaacatccagaaagagtccactctgcacttggtcctgcgcttgagggggggtgtctaagtttccccttttaaggtttcaacaaatttcattgcactttcctttcaataaagttgttgcattccccannnnaaannanaaananccaagaataaaggaaaggcaattccgtccgtgatcagcagagtgtttgctcttgggcgcgcaaacagctggcaagactggtcgtaccctgtactgagctacgcaccatccagaaagagtccatttttgcacctggtactccgctctcatgatggtggcgatgcaaaatcttgcgatagaagacgcgtcaactgggcaattgactcagtcagcccctctgacgtgtcggaagccgcgaggttgagcacacaatcngcggacactgtcaaaacggctaaaagagtcccttttgacagatcggacaggggcatttacccttccacttgaacccctttcaaggaagggttttgaactcctgtgtggtctgagaaaaaataccaggccgtggtaaaggactggggcccgcatactcccgttgattccttggagcgtaccataacggtccctatgtacacatgtcagttcctaacacccctttgtctatcctcttggcgctggcgtcccggctcctttccatacaaaacaggtcggggggacaacttgcccaagaaatttttattcagggttgtaagtagaaacccgccttggaaccttgtggggtttcgaaatggaaaccccaatgtttcatgaacgattccgtgccggaacacgagtattgggtgaaagccccacagatagtgttggaatcctatcgtccaaattttttgcacaggaaaaactttggttcccacaacgcggcgcgacacaaaagagaacttcctcccaaggacactcacaactggggcaaacagcgggcgcaatcttctccccattatacccg

SEQ ID NO: 540593 - DNA, 458 bp, Homo sapiens
gactcatggacctgagcttctggatctaagcctgctgcactttgttctcttctctttcccttgccgggagagggggtgtggattgaggcggcatcacggaggccagcagggaggtccgcaggcacccccagctcttctgggcagcgcttatgctgccgacaggagtggggactacaggcatgcgtcaccacacctggctaatttttgtatttttagtagagacggggtttcacctattggccaggctggtcttgaactcctgacctcaaatgaaccaccccctcggcctcccaaagtgttgggattacaggcatgaaccactgcggccagccacctttttcttttttttatttttctttacttttttgagatggagtcttgctctgttgcccaggctggagtgcagtggtgagatctcagctcactgcaacctctgcctcctgggttcaagtgatcct

SEQ ID NO: 540594 - DNA, 2014 bp, Homo sapiens
  misc_feature (1179)..(1182): n is a, c, g, or t
  misc_feature (1186)..(1187): n is a, c, g, or t
  misc_feature (1189)..(1189): n is a, c, g, or t
  misc_feature (1193)..(1193): n is a, c, g, or t
  misc_feature (1195)..(1195): n is a, c, g, or t
  misc_feature (1449)..(1449): n is a, c, g, or t
atcctcacctgtgtgctccagccccatctgtgtgctcatctccacctgtgtgctcatcctcacctgtgtgctccatccccacctgtgtgctcatccccacctgtgtgctcatccccacctgtgtgctcatccccacctgtgtgctcatccccacctgtgtgctccgtctcagaggtgggatgcagatcttcgtgaagactctgactggtaagaccatcaccctcgaggttgagcccagtgacaccatcgagaatgtcaaggcaaagatccaagataaggaaggcatccctcctgaccagcagaggttgatctttgctggaaaacagctggaagatgggcgcaccctgtctgactacaacatccagaaagagtccaccctgcacctggtgctccgcctcagaggtgggagtgcaaatcttcgtgaagacgcgtcactggtaagtaccatcgcccttgacgtggagcccagtgagcacgcatctgagaatgtcaaaggcaaagatccaggacaaggaaggcatccctcctgaccagcagaggttgatctttgccggagaaacagctggaaggatggacgcaccctgtctgactacaacatccagaaaagagtccaccctgcacctggtgctccgtctcagaggtgggatgcagatcttcgtgaagaccctgactggtaagaccatcaccctcgaggtggaagcccagtgacaccattgagaatgtcaaggcaaagatccaagacaaggaaggcattcctcctggaccagcagaggttgatctttggccgggaaacagctggaagatggacgcaccctgtctgactacaacatccagaaagagtccaccctgcacctggtgctccgtctcagaggtgggatgcagatcttcgtgaagaccctgactggtaagaccatcaccctcgaggtggagcccagtgacaccatcgagaatgtcaaggcaaagatccaagataaggaaggcatccctcctgatcagcagaggttgatctttgctgggaaacagctggaagatggacgcaccctgtctgactacaacatccagaaagagtccactctgcacttggtcctgcgcttgagggggggtgtctaagtttccccttttaaggtttcaacaaatttcattgcactttcctttcaataaagttgttgcattccccannnnaaannanaaananccaagaataaaggaaaggcaattccgtccgtgatcagcagagtgtttgctcttgggcgcgcaaacagctggcaagactggtcgtaccctgtactgagctacgcaccatccagaaagagtccatttttgcacctggtactccgctctcatgatggtggcgatgcaaaatcttgcgatagaagacgcgtcaactgggcaattgactcagtcagcccctctgacgtgtcggaagccgcgaggttgagcacacaatcngcggacactgtcaaaacggctaaaagagtcccttttgacagatcggacaggggcatttacccttccacttgaacccctttcaaggaagggttttgaactcctgtgtggtctgagaaaaaataccaggccgtggtaaaggactggggcccgcatactcccgttgattccttggagcgtaccataacggtccctatgtacacatgtcagttcctaacacccctttgtctatcctcttggcgctggcgtcccggctcctttccatacaaaacaggtcggggggacaacttgcccaagaaatttttattcagggttgtaagtagaaacccgccttggaaccttgtggggtttcgaaatggaaaccccaatgtttcatgaacgattccgtgccggaacacgagtattgggtgaaagccccacagatagtgttggaatcctatcgtccaaattttttgcacaggaaaaactttggttcccacaacgcggcgcgacacaaaagagaacttcctcccaaggacactcacaactggggcaaacagcgggcgcaatcttctccccattatacccg

SEQ ID NO: 540595 - DNA, 763 bp, Homo sapiens
  misc_feature (49)..(49): n is a, c, g, or t
  misc_feature (65)..(65): n is a, c, g, or t
  misc_feature (107)..(107): n is a, c, g, or t
  misc_feature (133)..(133): n is a, c, g, or t
  misc_feature (203)..(203): n is a, c, g, or t
  misc_feature (224)..(224): n is a, c, g, or t
caatttgcgggctctctttctgctgctccccggttctcggaaacagccnacaccatgggtttcgnagacctgaaaagccctgccggcctccaggtgctcaacgattncctggcgcacacaccgctacatccangcgtctgtgccctcacaagcagctgtggcagtatttgaacgccctgtccagcccaccccctgcccacttntctcatcccctacgttggtanaatcacatcaagtcttacgaaaaggaaaaggccagcctcccaggagtgaaaaaagctttgggcaaatatggtcctgccgatgtggaagacactacaggaagtggagctacagatagtaaagatgatgatcacattgacctctttggatctgatgatgaggaggaaagtgcagaagcaaagaggctaagggaagaacctcttgcacaatatgaatcaaagaaagccaaaaaacctgcacttgttgccaagtcttccatcttactagatgtgaaaccttgggatgatgagacagatatggcgaaattagaggagtgcgtcagaagcattcaagcagacggcttagtctggggctcatctaaactagttccagtgggatacggaattaagaaacttcaaatacagtgtgtagttgaagatgataaagttggaacagatatgctggaggagcagatcactgcttttgagagactatgtgcagtccatgacgtggctgccttcaacaatactaaatccatcctagtgcatcctgttggctagca

SEQ ID NO: 540596 - DNA, 2117 bp, Homo sapiens
  misc_feature (751)..(751): n is a, c, g, or t
  misc_feature (1282)..(1285): n is a, c, g, or t
  misc_feature (1289)..(1290): n is a, c, g, or t
  misc_feature (1292)..(1292): n is a, c, g, or t
  misc_feature (1296)..(1296): n is a, c, g, or t
  misc_feature (1298)..(1298): n is a, c, g, or t
  misc_feature (1552)..(1552): n is a, c, g, or t
gatatggagtcgcagttcttgtttgtggattgctgtgatcgtcacttgacaatgcagatcttcgtgaagactctgactggtaagaccatcaccctcgaggttgagcccagtgacaccatcgagaatgtcaaggcaaagatccaagataaggaaggcatccctcctgaccagcagaggttgatctttgctggaaaacagctggaagatgggcgcaccctgtctgactacaacatccagaaagagtccaccctgcacctggtgctccgcctcagaggtgggagtgcaaatcttcgtgaagacgcgtcactggtaagtaccatcgcccttgacgtggagcccagtgagcacgcatctgagaatgtcaaaggcaaagatccaggacaaggaaggcatccctcctgaccagcagaggttgatctttgccggagaaacagctggaaggatggacgcaccctgtctgactacaacatccagaaaagagtccaccctgcacctggtgctccgtctcagaggtgggatgcagatcttcgtgaagaccctgactggtaagaccatcactctcgaggtggagcccagtgacaccattgagaatgtcaaggcaaagatccaagacaaggaaggcatccctcctgaccagcagaggttgatctttgctgggaaacagctggaagatggacgcaccctgtctgactacaacatccagaaagagtccaccctgcacctggtgctccgtctcagaggtgggatgcanatcttcgcgattgacggtcactggaagtacatcgcccttgacgtggagcccagtgagcacgcatctgagaactgtcaaggcaaagatccaggacaaggaaggcattcctcctgagcagcagaggttgatctgtgtgccgggaaacagctggaagatggacgcaccctgtctgactacaacatccagaaagagtccaccctgcacctggtgctccgtctcagaggtgggatgcagatcttcgtgaagaccctgactggtaagaccatcaccctcgaggtggagcccagtgacaccatcgagaatgtcaaggcaaagatccaagataaggaaggcatccctcctgatcagcagaggttgatctttgctgggaaacagctggaagatggacgcaccctgtctgactacaacatccagaaagagtccactctgcacttggtcctgcgcttgagggggggtgtctaagtttccccttttaaggtttcaacaaatttcattgcactttcctttcaataaagttgttgcattccccannnnaaannanaaananccaagaataaaggaaaggcaattccgtccgtgatcagcagagtgtttgctcttgggcgcgcaaacagctggcaagactggtcgtaccctgtactgagctacgcaccatccagaaagagtccatttttgcacctggtactccgctctcatgatggtggcgatgcaaaatcttgcgatagaagacgcgtcaactgggcaattgactcagtcagcccctctgacgtgtcggaagccgcgaggttgagcacacaatcngcggacactgtcaaaacggctaaaagagtcccttttgacagatcggacaggggcatttacccttccacttgaacccctttcaaggaagggttttgaactcctgtgtggtctgagaaaaaataccaggccgtggtaaaggactggggcccgcatactcccgttgattccttggagcgtaccataacggtccctatgtacacatgtcagttcctaacacccctttgtctatcctcttggcgctggcgtcccggctcctttccatacaaaacaggtcggggggacaacttgcccaagaaatttttattcagggttgtaagtagaaacccgccttggaaccttgtggggtttcgaaatggaaaccccaatgtttcatgaacgattccgtgccggaacacgagtattgggtgaaagccccacagatagtgttggaatcctatcgtccaaattttttgcacaggaaaaactttggttcccacaacgcggcgcgacacaaaagagaacttcctcccaaggacactcacaactggggcaaacagcgggcgcaatcttctccccattatacccg

SEQ ID NO: 540597 - DNA, 2013 bp, Homo sapiens
  misc_feature (641)..(641): n is a, c, g, or t
  misc_feature (1178)..(1181): n is a, c, g, or t
  misc_feature (1185)..(1186): n is a, c, g, or t
  misc_feature (1188)..(1188): n is a, c, g, or t
  misc_feature (1192)..(1192): n is a, c, g, or t
  misc_feature (1194)..(1194): n is a, c, g, or t
  misc_feature (1448)..(1448): n is a, c, g, or t
atcctcacctgtgtgctccagccccatctgtgtgctcatctccacctgtgtgctcatcctcacctgtgtgctccatccccacctgtgtgctcatccccacctgtgtgctcatccccacctgtgtgctcatccccacctgtgtgctcatccccacctgtgtgctccgtctcagaggtgggatgcagatcttcgtgaagactctgactggtaagaccatcaccctcgaggttgagcccagtgacaccatcgagaatgtcaaggcaaagatccaagataaggaaggcatccctcctgaccagcagaggttgatctttgctggaaaacagctggaagatgggcgcaccctgtctgactacaacatccagaaagagtccaccctgcacctggtgctccgtctcagaggtgggatgcagatcttcgtgaagaccctgactggtaagaccatcactctcgaggtggagcccagtgacaccattgagaatgtcaaggcaaagatccaagacaaggaaggcatccctcctgaccagcagaggttgatctttgctgggaaacagctggaagatggacgcaccctgtctgactacaacatccagaaagagtccaccctgcacctggtgctccgtctcagaggtgggatgcanatcttcgtgaagaccctgactggtaagaccatcacccttgaggtggcctcgaggtggaagcccagtgacaccattgagaatgtcaaggcaaagatccaagacaaggaaggcatccctcctgaccagcagaggttgatctttgctgggaaacagctggaagatggacgcaccctgtctgactacaacatccagaaagagtccaccctgcacctggtgctccgtctcagaggtgggatgcagatcttcgtgaagaccctgactggtaagaccatcaccctcgaggtggagcccagtgacaccatcgagaatgtcaaggcaaagatccaagataaggaaggcatccctcctgatcagcagaggttgatctttgctgggaaacagctggaagatggacgcaccctgtctgactacaacatccagaaagagtccactctgcacttggtcctgcgcttgagggggggtgtctaagtttccccttttaaggtttcaacaaatttcattgcactttcctttcaataaagttgttgcattccccannnnaaannanaaananccaagaataaaggaaaggcaattccgtccgtgatcagcagagtgtttgctcttgggcgcgcaaacagctggcaagactggtcgtaccctgtactgagctacgcaccatccagaaagagtccatttttgcacctggtactccgctctcatgatggtggcgatgcaaaatcttgcgatagaagacgcgtcaactgggcaattgactcagtcagcccctctgacgtgtcggaagccgcgaggttgagcacacaatcngcggacactgtcaaaacggctaaaagagtcccttttgacagatcggacaggggcatttacccttccacttgaacccctttcaaggaagggttttgaactcctgtgtggtctgagaaaaaataccaggccgtggtaaaggactggggcccgcatactcccgttgattccttggagcgtaccataacggtccctatgtacacatgtcagttcctaacacccctttgtctatcctcttggcgctggcgtcccggctcctttccatacaaaacaggtcggggggacaacttgcccaagaaatttttattcagggttgtaagtagaaacccgccttggaaccttgtggggtttcgaaatggaaaccccaatgtttcatgaacgattccgtgccggaacacgagtattgggtgaaagccccacagatagtgttggaatcctatcgtccaaattttttgcacaggaaaaactttggttcccacaacgcggcgcgacacaaaagagaacttcctcccaaggacactcacaactggggcaaacagcgggcgcaatcttctccccattatacccg

SEQ ID NO: 540598 - DNA, 132 bp, Homo sapiens
  misc_feature (110)..(110): n is a, c, g, or t
  misc_feature (116)..(116): n is a, c, g, or t
tccttataggaaagactttactgagaccctgactcgggccaaatttgaagagctcaacatggatctgttccggtctactatgaagcccgtccagaaagtgttggaagatnctgatntgaagaagtctgacat

SEQ ID NO: 540599 - DNA, 166 bp, Homo sapiens
atacctctctcccttttgagtcccagtgtctattgtttcatctttatgaccacacgtacccattgtttagctctcacttataagtgagtacacatggtatttgatttctgttctgaatttagagacagtagattaggggaattagttttcaggagtaaatggatct

SEQ ID NO: 540600 - DNA, 1894 bp, Homo sapiens
  misc_feature (1059)..(1062): n is a, c, g, or t
  misc_feature (1066)..(1067): n is a, c, g, or t
  misc_feature (1069)..(1069): n is a, c, g, or t
  misc_feature (1073)..(1073): n is a, c, g, or t
  misc_feature (1075)..(1075): n is a, c, g, or t
  misc_feature (1329)..(1329): n is a, c, g, or t
acttgaaccgattctggatggctgtcctgatgttcctcattttcactttgggctgtgggatgcagatcttcgtgaagactctgactggtaagaccatcaccctcgaggttgagcccagtgacaccatcgagaatgtcaaggcaaagatccaagataaggaaggcatccctcctgaccagcagaggttgatctttgctggaaaacagctggaagatgggcgcaccctgtctgactacaacatccagaaagagtccaccctgcacctggtgctccgcctcagaggtgggagtgcaaatcttcgtgaagacgcgtcactggtaagtaccatcgcccttgacgtggagcccagtgagcacgcatctgagaatgtcaaaggcaaagatccaggacaaggaaggcatccctcctgaccagcagaggttgatctttgccggagaaacagctggaaggatggacgcaccctgtctgactacaacatccagaaaagagtccaccctgcacctggtgctccgtctcagaggtgggatgcagatcttcgtgaagaccctgactggtaagaccatcaccctcgaggtggaagcccagtgacaccattgagaatgtcaaggcaaagatccaagacaaggaaggcattcctcctggaccagcagaggttgatctttggccgggaaacagctggaagatggacgcaccctgtctgactacaacatccagaaagagtccaccctgcacctggtgctccgtctcagaggtgggatgcagatcttcgtgaagaccctgactggtaagaccatcaccctcgaggtggagcccagtgacaccatcgagaatgtcaaggcaaagatccaagataaggaaggcatccctcctgatcagcagaggttgatctttgctgggaaacagctggaagatggacgcaccctgtctgactacaacatccagaaagagtccactctgcacttggtcctgcgcttgagggggggtgtctaagtttccccttttaaggtttcaacaaatttcattgcactttcctttcaataaagttgttgcattccccannnnaaannanaaananccaagaataaaggaaaggcaattccgtccgtgatcagcagagtgtttgctcttgggcgcgcaaacagctggcaagactggtcgtaccctgtactgagctacgcaccatccagaaagagtccatttttgcacctggtactccgctctcatgatggtggcgatgcaaaatcttgcgatagaagacgcgtcaactgggcaattgactcagtcagcccctctgacgtgtcggaagccgcgaggttgagcacacaatcngcggacactgtcaaaacggctaaaagagtcccttttgacagatcggacaggggcatttacccttccacttgaacccctttcaaggaagggttttgaactcctgtgtggtctgagaaaaaataccaggccgtggtaaaggactggggcccgcatactcccgttgattccttggagcgtaccataacggtccctatgtacacatgtcagttcctaacacccctttgtctatcctcttggcgctggcgtcccggctcctttccatacaaaacaggtcggggggacaacttgcccaagaaatttttattcagggttgtaagtagaaacccgccttggaaccttgtggggtttcgaaatggaaaccccaatgtttcatgaacgattccgtgccggaacacgagtattgggtgaaagccccacagatagtgttggaatcctatcgtccaaattttttgcacaggaaaaactttggttcccacaacgcggcgcgacacaaaagagaacttcctcccaaggacactcacaactggggcaaacagcgggcgcaatcttctccccattatacccg

SEQ ID NO: 540601 - DNA, 2171 bp, Homo sapiens
  misc_feature (1336)..(1339): n is a, c, g, or t
  misc_feature (1343)..(1344): n is a, c, g, or t
  misc_feature (1346)..(1346): n is a, c, g, or t
  misc_feature (1350)..(1350): n is a, c, g, or t
  misc_feature (1352)..(1352): n is a, c, g, or t
  misc_feature (1606)..(1606): n is a, c, g, or t
tcgccctctgaccgcaggtgatcttgctgtaaacgtgacagctcccgtctgattacaacattcataatgagtccctgtcctctggtccgtcttacatgtggcatgcttatttcgtgtataccctgtactggtcacatactcactctcgtaattggtccgagatgcactccatagtcaatgtcaaggcatagatcctatgacactgaacgctactccctcctgagccagcagaggttgatctttgccggaaagcagctggaagatgggcgcaccctgtctgactacaacatccagaaagagtctaccctgcacctggtgctccgtctcagaggtgggatgcagatcttcgtgaagactctgactggtaagaccatcaccctcgaggttgagcccagtgacaccatcgagaatgtcaaggcaaagatccaagataaggaaggcatccctcctgaccagcagaggttgatctttgctggaaaacagctggaagatgggcgcaccctgtctgactacaacatccagaaagagtccaccctgcacctggtgctccgcctcagaggtgggagtgcaaatcttcgtgaagacgcgtcactggtaagtaccatcgcccttgacgtggagcccagtgagcacgcatctgagaatgtcaaaggcaaagatccaggacaaggaaggcatccctcctgaccagcagaggttgatctttgccggagaaacagctggaaggatggacgcaccctgtctgactacaacatccagaaaagagtccaccctgcacctggtgctccgtctcagaggtgggatgcagatcttcgtgaagaccctgactggtaagaccatcaccctcgaggtggaagcccagtgacaccattgagaatgtcaaggcaaagatccaagacaaggaaggcattcctcctggaccagcagaggttgatctttggccgggaaacagctggaagatggacgcaccctgtctgactacaacatccagaaagagtccaccctgcacctggtgctccgtctcagaggtgggatgcagatcttcgtgaagaccctgactggtaagaccatcaccctcgaggtggagcccagtgacaccatcgagaatgtcaaggcaaagatccaagataaggaaggcatccctcctgatcagcagaggttgatctttgctgggaaacagctggaagatggacgcaccctgtctgactacaacatccagaaagagtccactctgcacttggtcctgcgcttgagggggggtgtctaagtttccccttttaaggtttcaacaaatttcattgcactttcctttcaataaagttgttgcattccccannnnaaannanaaananccaagaataaaggaaaggcaattccgtccgtgatcagcagagtgtttgctcttgggcgcgcaaacagctggcaagactggtcgtaccctgtactgagctacgcaccatccagaaagagtccatttttgcacctggtactccgctctcatgatggtggcgatgcaaaatcttgcgatagaagacgcgtcaactgggcaattgactcagtcagcccctctgacgtgtcggaagccgcgaggttgagcacacaatcngcggacactgtcaaaacggctaaaagagtcccttttgacagatcggacaggggcatttacccttccacttgaacccctttcaaggaagggttttgaactcctgtgtggtctgagaaaaaataccaggccgtggtaaaggactggggcccgcatactcccgttgattccttggagcgtaccataacggtccctatgtacacatgtcagttcctaacacccctttgtctatcctcttggcgctggcgtcccggctcctttccatacaaaacaggtcggggggacaacttgcccaagaaatttttattcagggttgtaagtagaaacccgccttggaaccttgtggggtttcgaaatggaaaccccaatgtttcatgaacgattccgtgccggaacacgagtattgggtgaaagccccacagatagtgttggaatcctatcgtccaaattttttgcacaggaaaaactttggttcccacaacgcggcgcgacacaaaagagaacttcctcccaaggacactcacaactggggcaaacagcgggcgcaatcttctccccattatacccg

SEQ ID NO: 540602 - DNA, 2127 bp, Homo sapiens
  misc_feature (751)..(751): n is a, c, g, or t
  misc_feature (791)..(791): n is a, c, g, or t
  misc_feature (1292)..(1295): n is a, c, g, or t
  misc_feature (1299)..(1300): n is a, c, g, or t
  misc_feature (1302)..(1302): n is a, c, g, or t
  misc_feature (1306)..(1306): n is a, c, g, or t
  misc_feature (1308)..(1308): n is a, c, g, or t
  misc_feature (1562)..(1562): n is a, c, g, or t
gatatggagtcgcagttcttgtttgtggattgctgtgatcgtcacttgacaatgcagatcttcgtgaagactctgactggtaagaccatcaccctcgaggttgagcccagtgacaccatcgagaatgtcaaggcaaagatccaagataaggaaggcatccctcctgaccagcagaggttgatctttgctggaaaacagctggaagatgggcgcaccctgtctgactacaacatccagaaagagtccaccctgcacctggtgctccgcctcagaggtgggagtgcaaatcttcgtgaagacgcgtcactggtaagtaccatcgcccttgacgtggagcccagtgagcacgcatctgagaatgtcaaaggcaaagatccaggacaaggaaggcatccctcctgaccagcagaggttgatctttgccggagaaacagctggaaggatggacgcaccctgtctgactacaacatccagaaaagagtccaccctgcacctggtgctccgtctcagaggtgggatgcagatcttcgtgaagaccctgactggtaagaccatcactctcgaggtggagcccagtgacaccattgagaatgtcaaggcaaagatccaagacaaggaaggcatccctcctgaccagcagaggttgatctttgctgggaaacagctggaagatggacgcaccctgtctgactacaacatccagaaagagtccaccctgcacctggtgctccgtctcagaggtgggatgcanatcttcgatgcaaatcttcgtgaagaccctgactggtaanaccatcactctctgaagtggagccgagatgacacccattgagaatgtcaaggcaaagatccaagacaaggaaggcatccctcctgaccagcagaggttgatctttgctgggaaacagctggaagatggacgcaccctgtctgactacaacatccagaaagagtccaccctgcacctggtgctccgtctcagaggtgggatgcagatcttcgtgaagaccctgactggtaagaccatcaccctcgaggtggagcccagtgacaccatcgagaatgtcaaggcaaagatccaagataaggaaggcatccctcctgatcagcagaggttgatctttgctgggaaacagctggaagatggacgcaccctgtctgactacaacatccagaaagagtccactctgcacttggtcctgcgcttgagggggggtgtctaagtttccccttttaaggtttcaacaaatttcattgcactttcctttcaataaagttgttgcattccccannnnaaannanaaananccaagaataaaggaaaggcaattccgtccgtgatcagcagagtgtttgctcttgggcgcgcaaacagctggcaagactggtcgtaccctgtactgagctacgcaccatccagaaagagtccatttttgcacctggtactccgctctcatgatggtggcgatgcaaaatcttgcgatagaagacgcgtcaactgggcaattgactcagtcagcccctctgacgtgtcggaagccgcgaggttgagcacacaatcngcggacactgtcaaaacggctaaaagagtcccttttgacagatcggacaggggcatttacccttccacttgaacccctttcaaggaagggttttgaactcctgtgtggtctgagaaaaaataccaggccgtggtaaaggactggggcccgcatactcccgttgattccttggagcgtaccataacggtccctatgtacacatgtcagttcctaacacccctttgtctatcctcttggcgctggcgtcccggctcctttccatacaaaacaggtcggggggacaacttgcccaagaaatttttattcagggttgtaagtagaaacccgccttggaaccttgtggggtttcgaaatggaaaccccaatgtttcatgaacgattccgtgccggaacacgagtattgggtgaaagccccacagatagtgttggaatcctatcgtccaaattttttgcacaggaaaaactttggttcccacaacgcggcgcgacacaaaagagaacttcctcccaaggacactcacaactggggcaaacagcgggcgcaatcttctccccattatacccg

SEQ ID NO: 540603 - DNA, 175 bp, Homo sapiens
ttcacacggcacatttggacatttccagaactaccatgagatggtttagacgggaattcatgcaaaggaggggtcaaaagtggtatagtgaccccgtccacgtgctccgagctgacgaccttggaggccgcggggagctggactgaggaggaggctagcacaagcgcgagagcag

SEQ ID NO: 540604 - DNA, 531 bp, Homo sapiens
  misc_feature (28)..(28): n is a, c, g, or t
acggtcgaaccagtagcgttctgaacanaatccagtatggcacgttcatgaggtcacttactgagatcgtatcgaaacgacgtgagttccattagcgagcgtcagatatcatatttacgccccgtcctctgcaagatgtaccagaaacttgacaattccgaaatggccgagggatggccaagcaaaaagctggcaacttcatatgtacctgcagaaacccaaaattggccgttattgtcatcacgaatcagaggtatcaactggacgtgacgcccaaaaggcttcgaacaggtgtcgccacgcttctttcggccttcgtcaaaactcttcacatggaaacctttgtgacagctcaacgacggcttcgattaccatgctgaggattgtacgagccatatattgcatgggggtaccccaatctgaaagtcacgttcacatgaactaatctaccaagcggttggttatggcacaaatcacattaagaaggcgaatttgcttttgacagaataacgcctttgattcgctcgaatc

SEQ ID NO: 540605 - DNA, 250 bp, Homo sapiens
aaactgatgattctactgctgtagatgaatggttaaaacgagctagttaaacagagccatgtttgccagggagcctccaaccctaagccactggacggggccagagatgccagcagcctctgtcgcccttagtcatataaccaaaatccaaccttatcacaaccggggctggaaaggaaggtatttggaatacacctccggttatgttgctccagtaaaatcttgccaaaagaagcagtcttcttagagg

SEQ ID NO: 540606 - DNA, 872 bp, Homo sapiens
  misc_feature (477)..(477): n is a, c, g, or t
  misc_feature (626)..(626): n is a, c, g, or t
ggcgcgcctttctccgctgcaacgggccgtccccgtcctcctccccagccatggcgtcacgttcgcgggcttcttgctacatgctggcggctgtgtcaatgccgcgttcatcttcttccgccattgtggcacattatagcattggatgagctgaagactgattacaagaatcctatagaccagtgtaataccctgaatccccttgtactcccagagtacctcatccacgcttcttctgtgtcatgtttcttgtgtgcagcagagtggcttaccactgggtctcaatatgcccctctttgcatatcatattgggaggttttatgagtagaccagtgatgagtggcccaggactctatgaccctaaaacatcatgaattgcagatattctagcatatggtcagaaggaaggatggtggcaaataagcttttaatcttctagacatttttttactacctattatggcatgatctatgttnggggagctcttaagaacaaacacagaagaatttgtccaagttaagtgcatgaaaagccaccaaatgaaggggatccttctccagcaagatcctgtccagggagtagcctgtgaatctgatcagttactttaaaaaaatgactccttatntttaagtgttccacattttgtgctgtggaacgacgtgtttcatattgttatctcagattaagatttaaatgggattaccgtcataaattaacttcacggggtacccccggtgttgacgggttggacttggcctttctaaggaaggccagaatccttgaggagggtaaaacggcgcggcagaacatggagcgttggtataggaacagtgtggggcccttggggcagacagcgggcaataaaagggga

SEQ ID NO: 540607 - DNA, 766 bp, Homo sapiens
  misc_feature (1)..(1): n is a, c, g, or t
  misc_feature (4)..(4): n is a, c, g, or t
  misc_feature (6)..(6): n is a, c, g, or t
  misc_feature (11)..(11): n is a, c, g, or t
  misc_feature (13)..(13): n is a, c, g, or t
  misc_feature (15)..(16): n is a, c, g, or t
  misc_feature (22)..(23): n is a, c, g, or t
  misc_feature (35)..(35): n is a, c, g, or t
  misc_feature (40)..(40): n is a, c, g, or t
  misc_feature (50)..(50): n is a, c, g, or t
  misc_feature (52)..(52): n is a, c, g, or t
  misc_feature (57)..(57): n is a, c, g, or t
  misc_feature (61)..(65): n is a, c, g, or t
  misc_feature (81)..(81): n is a, c, g, or t
  misc_feature (85)..(85): n is a, c, g, or t
  misc_feature (88)..(89): n is a, c, g, or t
  misc_feature (98)..(98): n is a, c, g, or t
  misc_feature (107)..(107): n is a, c, g, or t
  misc_feature (116)..(116): n is a, c, g, or t
  misc_feature (119)..(119): n is a, c, g, or t
  misc_feature (126)..(126): n is a, c, g, or t
  misc_feature (135)..(135): n is a, c, g, or t
  misc_feature (139)..(139): n is a, c, g, or t
  misc_feature (141)..(141): n is a, c, g, or t
  misc_feature (155)..(155): n is a, c, g, or t
  misc_feature (174)..(174): n is a, c, g, or t
  misc_feature (184)..(184): n is a, c, g, or t
  misc_feature (205)..(205): n is a, c, g, or t
  misc_feature (207)..(207): n is a, c, g, or t
  misc_feature (211)..(211): n is a, c, g, or t
  misc_feature (220)..(220): n is a, c, g, or t
  misc_feature (222)..(222): n is a, c, g, or t
  misc_feature (224)..(224): n is a, c, g, or t
  misc_feature (226)..(226): n is a, c, g, or t
  misc_feature (229)..(229): n is a, c, g, or t
  misc_feature (232)..(232): n is a, c, g, or t
  misc_feature (238)..(238): n is a, c, g, or t
  misc_feature (244)..(244): n is a, c, g, or t
  misc_feature (263)..(263): n is a, c, g, or t
  misc_feature (272)..(273): n is a, c, g, or t
  misc_feature (277)..(277): n is a, c, g, or t
  misc_feature (286)..(286): n is a, c, g, or t
  misc_feature (312)..(312): n is a, c, g, or t
  misc_feature (328)..(328): n is a, c, g, or t
  misc_feature (335)..(336): n is a, c, g, or t
  misc_feature (348)..(348): n is a, c, g, or t
  misc_feature (350)..(350): n is a, c, g, or t
  misc_feature (381)..(381): n is a, c, g, or t
  misc_feature (390)..(390): n is a, c, g, or t
  misc_feature (401)..(401): n is a, c, g, or t
  misc_feature (405)..(405): n is a, c, g, or t
  misc_feature (409)..(409): n is a, c, g, or t
  misc_feature (411)..(411): n is a, c, g, or t
  misc_feature (418)..(419): n is a, c, g, or t
  misc_feature (426)..(426): n is a, c, g, or t
  misc_feature (449)..(450): n is a, c, g, or t
  misc_feature (501)..(501): n is a, c, g, or t
  misc_feature (512)..(512): n is a, c, g, or t
  misc_feature (514)..(514): n is a, c, g, or t
  misc_feature (549)..(549): n is a, c, g, or t
  misc_feature (569)..(569): n is a, c, g, or t
  misc_feature (637)..(637): n is a, c, g, or t
  misc_feature (641)..(641): n is a, c, g, or t
  misc_feature (671)..(671): n is a, c, g, or t
  misc_feature (682)..(682): n is a, c, g, or t
  misc_feature (706)..(706): n is a, c, g, or t
  misc_feature (731)..(731): n is a, c, g, or t
nagngnatccncngnnatgagnntcttctcaaggnctatntgtgaaagcngncccangggnnnnngggcagcaaggatgcncaanagnntctggggcngatgggganagcagcggnggnctggganggggggatnggcnanagggaggggatgcntaagggggggggggggagngggggcggtngggggggggggggggggtggngngggncagcaaagngngnanaanagngggggngatggntaggcggggagggaggaangggggcagnnaggngggggacgngggacgggggggggggggggtgggtnagggggggcccggggnggggctnngggggcaggggntnagggggggggggcggttgatggggggggganggggggaanggggggggccngggncaangngcctggnncggggcnggggtcagggaaggggggcgcgnncggggtccaggccaggggtgggggggggagggaagggtggggcgagggggncaggtcggggntnctggggcgtggggggaggggggggggtttcgaagnggggggtgggaagagggggnggggggggggcggtgtcggaggtggtttggggggggcactacgccatcgggaaaggagtcacatgtgntgcntgcaggagccttcattctatcacaaacgcngcacactgcangcctgcggcatgtggttgtgggantctcgagtccgggccgctgtctatnaacaacgctcaacgtgtgtcctgatgtatgtgctt

SEQ ID NO: 540608 - DNA, 105 bp, Homo sapiens
  misc_feature (78)..(78): n is a, c, g, or t
  misc_feature (80)..(80): n is a, c, g, or t
  misc_feature (83)..(83): n is a, c, g, or t
  misc_feature (86)..(86): n is a, c, g, or t
gccaaacatacctgggaataccttttatttttttttaccttggggtgatggttccaaaccataaatgtggttatagtnancanatnacccttctgtcgtcttctc

SEQ ID NO: 540609 - DNA, 141 bp, Homo sapiens
gccttctcgtaatcataaagtcaccagctgcatgcagaccctcccaggagagtcacgcctgccctttgaagctttgaagctccgcaattatttctcccctctagctttgaagatccttcatcgctcaccgcattttcaatc

SEQ ID NO: 540610 - DNA, 808 bp, Homo sapiens
  misc_feature (2)..(2): n is a, c, g, or t
  misc_feature (4)..(4): n is a, c, g, or t
  misc_feature (40)..(40): n is a, c, g, or t
  misc_feature (77)..(77): n is a, c, g, or t
  misc_feature (132)..(132): n is a, c, g, or t
  misc_feature (177)..(177): n is a, c, g, or t
  misc_feature (183)..(183): n is a, c, g, or t
  misc_feature (230)..(230): n is a, c, g, or t
  misc_feature (294)..(294): n is a, c, g, or t
  misc_feature (303)..(304): n is a, c, g, or t
  misc_feature (306)..(306): n is a, c, g, or t
  misc_feature (400)..(400): n is a, c, g, or t
  misc_feature (414)..(414): n is a, c, g, or t
  misc_feature (466)..(467): n is a, c, g, or t
  misc_feature (528)..(528): n is a, c, g, or t
  misc_feature (560)..(560): n is a, c, g, or t
  misc_feature (568)..(568): n is a, c, g, or t
  misc_feature (596)..(596): n is a, c, g, or t
  misc_feature (614)..(614): n is a, c, g, or t
  misc_feature (632)..(632): n is a, c, g, or t
  misc_feature (668)..(668): n is a, c, g, or t
  misc_feature (678)..(678): n is a, c, g, or t
  misc_feature (701)..(701): n is a, c, g, or t
  misc_feature (743)..(743): n is a, c, g, or t
  misc_feature (745)..(745): n is a, c, g, or t
  misc_feature (791)..(791): n is a, c, g, or t
gngncctggcgccgcccgccgggtctgggtctgccgcccnggctggcgtcccctggtgtgctcttggctctttgccncctctgcctcctgggctcccgccttcctcccccctgcccctcccccgtcgcgggnctgccgggtgccggccctgccgcctcctgggcccgttccccgccnggcgantctgtggctcccgtgtgagtgggggtcctgctcctttgtgtgctccnccctggccccgttctttgcgcctgtccctccgcccctgccgccgcccctgcctggctctggggnggcggcggnngnggccgcggcggctgcccccacttgcggccgccttctcctgcttgtggccggcacatgtggcttttgttctctggcccgatgctgctgccctccnccgcccagtctccntcccctgccccccccccccgctgcccccgtgggggctgtccggcctttgccnngcccggctgcccttggcccctgcctacctggccttcccgcgccggcccgtcctaccctgcnctccctgcccccttcctgtgtctgtgggcgcnctgtgcgncttccttcgcccctcctgcgtggttttntcggcctgtggccgcccnccgtctgtgctgtgcctncgccgccgttggcccgggccccccggtggtgctgtntggctggccnggctgttcctgccccttcccggnccgccgttcccttcgcgcgcccctccgccgccctaccccggngnccgtggtcgcctgccccccctgttgggggcctgtttgccccccctnccccgttcttcgttccc

SEQ ID NO: 540611 - DNA, 730 bp, Homo sapiens
ggcagtcagactggtccgggagcgttatccctaagactgcctgtgctctggggggatcccggcccagtggtctgggctggtagagggcaccgcctcatgtgcgtcatactgcttcgtgaaggcgctggtgcgcgtgttcaagatctacctgaccgacagatacacctacccataccgcggctggtctaggtaggccgctatcctggtggcgatgatacggtgcgcgcgcgatgggtgggcggcaggcacgttcgaggcctagcaccggggctgccctgtaccttggcggcgagcgagaaccctgtccgcgtcgggtgcggcgggttgggttggtgcttttgggcccattggcgggcggggaaagccggtaggaaaacggaccttgttggggcggagggtggcactgcctggccctgggtggggggcacggggcgccgttccgccaccgggttgtgggggggggcctggcccttggccaatggccccccaattgagggcctggggcaaggatagggggggcaaataccgttttttggggccaaggggtcagattgggcgttcccccggtcggggaaagtcgtaggcactctggggggccacgctcgtctaaggctacctggcaggcttgggcacgcaggctcgggctaggagtcctgctgggctacgtagtactccccgggtaatcacgatgtgccgcatagagtagagcgccggcggccgactagacttg

SEQ ID NO: 540612 - DNA, 371 bp, Homo sapiens
aacaagttgctaggtatgtaacttcctagaaactccaaaggcaggaaaggtagccatggtcctcaaaccaaagagccctctctgttggtcctctgatctttgagtgttagctcaagctctccagttgtgtacacagataaaggcctggtagtaagtggtttgctttgtgaggtatgaggatccctggtaaattcagcagcatgttgtttttggaaatctgtccacaagattagaacactgcaaccaaactcattactaatactgcttatttaactattgtccaaaagagaaagggaagaagaaaaatatccccactctactgcgaggttctaggctttcctataagttatccaaatagtctttttttaatc

SEQ ID NO: 540613 - DNA, 273 bp, Homo sapiens
  misc_feature (4)..(4): n is a, c, g, or t
  misc_feature (24)..(24): n is a, c, g, or t
  misc_feature (65)..(65): n is a, c, g, or t
  misc_feature (164)..(164): n is a, c, g, or t
  misc_feature (211)..(211): n is a, c, g, or t
  misc_feature (261)..(261): n is a, c, g, or t
  misc_feature (264)..(264): n is a, c, g, or t
gaanattcccaaatgaagaaaaanagtggctccctagactcattgcccagaggaggcctatgaanatcttagcaagtctcccccgaggttttcctagaatagatgtctctacgtagttaataaaaacatacattcaagttttgcagctttttgctccactttanactttaagttgaacgtttacacttcccattccaagatctttctaaanatgtttctgaagagaagaatatcccaacatcagcctgggtgacaaaagcnacntccgtctca

SEQ ID NO: 540614 - DNA, 879 bp, Homo sapiens
  misc_feature (526)..(526): n is a, c, g, or t
  misc_feature (879)..(879): n is a, c, g, or t
tttttggttctggttgaattttgggtcaagaaatgttctccaatccatgaagcaacgcctgaaaaggacagggttctataacaaaataatggcaaatgttccgtctccatcctttctttctttttcgtgggtagtggtggtgctagtggggtgtggtggtggcttgttttttttgttgtgttctgccctccctttctctctccgtgtgtagcccctcgacagaccagcggggcgaggaggaacgccatactcagcttttcgcagagagtcttgtatacaccgtggtgcggagcacaagacgcacacagtacacacacgcgaggcgaaagagtgatgacaacagaggtgctctatgcgcggaagagaacgcacgagactagcgtgtactcacatgggatcacacgtcgtgtgtgccctctgttgcgaaaggagcacagcgtgatggaatgcgcatagagtgtgatagaagcagctccaggtccacacgtcggtgcatggtggacgccaaacgataaggtgcaccccnacggtggttgtgatacaattacgagcagcgaaaacacaagtacctcacaggggtgaaatgtaggaggcaccctgttgcagcgaagcccaagaaaagggggagcaggagagaggcgtagatggatcaccaagtagtaagaaaacaggggccctagtggaagacccacaaagaaaacaggcgtaattcgaaccaagaaaagagatcaccccccccccggttgagagacataaagagtagcacatccgacaggcagagaacggttgagcacaacaaggataccaccccaacaaatgggcgcataaaacccagagcggaggcattgtgcggcacacggtgtggaataaacaccaccn

SEQ ID NO: 540615 - DNA, 106 bp, Homo sapiens
atgaggagtccccctggccaaaagtctgtaaggttaccccaatggacagggaccaatggaaactgaagggggcttgaagacatttttacaaaccaggcaggggcca

SEQ ID NO: 540616 - DNA, 732 bp, Homo sapiens
  misc_feature (68)..(68): n is a, c, g, or t
  misc_feature (169)..(169): n is a, c, g, or t
  misc_feature (174)..(176): n is a, c, g, or t
  misc_feature (178)..(178): n is a, c, g, or t
  misc_feature (180)..(181): n is a, c, g, or t
  misc_feature (205)..(205): n is a, c, g, or t
  misc_feature (225)..(225): n is a, c, g, or t
  misc_feature (233)..(233): n is a, c, g, or t
  misc_feature (237)..(238): n is a, c, g, or t
  misc_feature (255)..(255): n is a, c, g, or t
  misc_feature (271)..(271): n is a, c, g, or t
  misc_feature (285)..(286): n is a, c, g, or t
  misc_feature (292)..(292): n is a, c, g, or t
  misc_feature (295)..(295): n is a, c, g, or t
  misc_feature (302)..(302): n is a, c, g, or t
  misc_feature (305)..(305): n is a, c, g, or t
  misc_feature (312)..(312): n is a, c, g, or t
  misc_feature (319)..(319): n is a, c, g, or t
  misc_feature (345)..(345): n is a, c, g, or t
  misc_feature (350)..(350): n is a, c, g, or t
  misc_feature (353)..(353): n is a, c, g, or t
  misc_feature (360)..(360): n is a, c, g, or t
  misc_feature (373)..(373): n is a, c, g, or t
  misc_feature (376)..(376): n is a, c, g, or t
  misc_feature (381)..(383): n is a, c, g, or t
  misc_feature (391)..(391): n is a, c, g, or t
  misc_feature (395)..(395): n is a, c, g, or t
  misc_feature (399)..(399): n is a, c, g, or t
  misc_feature (403)..(404): n is a, c, g, or t
  misc_feature (406)..(406): n is a, c, g, or t
  misc_feature (426)..(426): n is a, c, g, or t
  misc_feature (439)..(440): n is a, c, g, or t
  misc_feature (444)..(444): n is a, c, g, or t
  misc_feature (464)..(464): n is a, c, g, or t
  misc_feature (489)..(489): n is a, c, g, or t
  misc_feature (493)..(493): n is a, c, g, or t
  misc_feature (523)..(523): n is a, c, g, or t
tggttccgtaggttcctcgtgagggggggggccttcgtaccggactggctgaggggcaaggcggaagnaatcaagagactatccagcggctccttgaggagaatgaccagctgatccgctgtattgtggagtatcagaacaagggccgcgggaacgagtgcgtgcagtnccagnnngngnnacatagaaatctcatttatttggntaccattgcagatgccagtncaaccagnactnnaaaagcaatggaataanctttcaaaagcaatanaataatcttccatnnggctgncgngaggagnaantgaatgnaatccanctcttacaaatggagacagggtcttnaccanctnaactggntaaaacatgaatnaancctcnnnggctcttnaaancgtnaaanngngaagaaagctactacttagntgtattctcatgnnaatnttttttaaataattaagcanatcccttaataagttgagcccaggntgtnctcttttcttgacttggagccatgttgganttacaagacatcacttggattgtcaagtctaacttttaggttcaaacctgagaggaaactcagtagtggttggccggaattgggaggattcttgccttgtaaccttctaaatggccatgtaactgtgggcgtcttcctattaagtttgaaatggtgtcccccttgattgccgttttaggatgctttgaaataaagcttattttctttaa

SEQ ID NO: 540617 - DNA, 586 bp, Homo sapiens
  misc_feature (68)..(68): n is a, c, g, or t
  misc_feature (169)..(169): n is a, c, g, or t
  misc_feature (174)..(176): n is a, c, g, or t
  misc_feature (178)..(178): n is a, c, g, or t
  misc_feature (180)..(181): n is a, c, g, or t
  misc_feature (205)..(205): n is a, c, g, or t
  misc_feature (225)..(225): n is a, c, g, or t
  misc_feature (233)..(233): n is a, c, g, or t
  misc_feature (237)..(238): n is a, c, g, or t
  misc_feature (255)..(255): n is a, c, g, or t
  misc_feature (271)..(271): n is a, c, g, or t
  misc_feature (285)..(286): n is a, c, g, or t
  misc_feature (292)..(292): n is a, c, g, or t
  misc_feature (295)..(295): n is a, c, g, or t
  misc_feature (302)..(302): n is a, c, g, or t
  misc_feature (305)..(305): n is a, c, g, or t
  misc_feature (312)..(312): n is a, c, g, or t
  misc_feature (319)..(319): n is a, c, g, or t
  misc_feature (345)..(345): n is a, c, g, or t
  misc_feature (350)..(350): n is a, c, g, or t
  misc_feature (353)..(353): n is a, c, g, or t
  misc_feature (360)..(360): n is a, c, g, or t
  misc_feature (373)..(373): n is a, c, g, or t
  misc_feature (376)..(376): n is a, c, g, or t
  misc_feature (381)..(383): n is a, c, g, or t
  misc_feature (391)..(391): n is a, c, g, or t
  misc_feature (395)..(395): n is a, c, g, or t
  misc_feature (399)..(399): n is a, c, g, or t
  misc_feature (403)..(404): n is a, c, g, or t
  misc_feature (406)..(406): n is a, c, g, or t
  misc_feature (426)..(426): n is a, c, g, or t
  misc_feature (439)..(440): n is a, c, g, or t
  misc_feature (444)..(444): n is a, c, g, or t
tggttccgtaggttcctcgtgagggggggggccttcgtaccggactggctgaggggcaaggcggaagnaatcaagagactatccagcggctccttgaggagaatgaccagctgatccgctgtattgtggagtatcagaacaagggccgcgggaacgagtgcgtgcagtnccagnnngngnnacatagaaatctcatttatttggntaccattgcagatgccagtncaaccagnactnnaaaagcaatggaataanctttcaaaagcaatanaataatcttccatnnggctgncgngaggagnaantgaatgnaatccanctcttacaaatggagacagggtcttnaccanctnaactggntaaaacatgaatnaancctcnnnggctcttnaaancgtnaaanngngaagaaagctactacttagntgtattctcatgnnaatnttttttcgaacctgtttagctatcatatccttcttggttgtccaaggcaacgtttaggtacaacggtagcggaacccagccagtgttcgccctattatgttgtattctagcctcgaccttgtctatgcaattaaacctatat

SEQ ID NO: 540618 - DNA, 306 bp, Homo sapiens
tccaaagtggactctctgtcgtctcaagagcttgcaggaaaggagatcgccctgccaatgagaaggttgcgcctcatttaatgaagctataaccctatgtagaaagtctctttcgggggcagaggctaactctgggtgccaagccatatatataagggaatagtagattgttaacttcgtgttttccctcccagtgcatgatcctaaacaacactggctgttgcatcctcattctctgagggagccatcaatgagatttccctaattccatctgagctagcaacactggagcaagacgaataagga

SEQ ID NO: 540619 - DNA, 201 bp, Homo sapiens
tccataatgtgtgccaggcgacagaggaagaccccgtctcaaaaaaaaaaaaaaaaaaaaaaaggcccaaattggcccaataatttaaagtccataagttacaagggggaaacacattagtcgggggtgtaagggggttttccttttttaaaaaagggattttaaccctcttccctcttcccatacacaaaaattaattcc

SEQ ID NO: 540620 - DNA, 417 bp, Homo sapiens
  misc_feature (65)..(65): n is a, c, g, or t
  misc_feature (104)..(104): n is a, c, g, or t
  misc_feature (275)..(275): n is a, c, g, or t
  misc_feature (329)..(329): n is a, c, g, or t
ctggtcaaaacaaaaagtaaacataaaccaaaaatgttagaacttgtttatcccaagtgtggctncttgcagcagcagtactgaacatcatggaggttgggggnaggtgttagaaatacagaccctcggccgggcacggtggctcactcctgtaatcccagcacttttggaggccgaggtaggtggatcacgaggtccggagttcgagaccagcctggccaagatggtgaaatcccatctctactaaaaatacaaaaattagctaggcgtggtgncgcttgcctgtagtcccagctacctgcgaggatgaggcaggagaatcgcttgancctgggagtcagaggttgcagtgagccaagattctgccattgcactgcagcctgggcaacaagagtgaaactctgcgtaaaaaaaaaa

SEQ ID NO: 540621 - DNA, 355 bp, Homo sapiens
  misc_feature (247)..(247): n is a, c, g, or t
  misc_feature (254)..(254): n is a, c, g, or t
aggggtgagccaccatgcttgacagaaattcttctcctttattgcctgtagaggctaaagattgatagtccagagatgcttgaactccttgccaggtaattttatgtagcttattccccattccatttctttgctcatgacacaggccattcagaaagtcctatgaagagtaaatagatggcccgatttccagttttgctgtttctatatccaattcttaaaaggtataagaagcatggactttcanaatccanaattatagagatagccctcatctttactccatatagcctgatcacagtgtccacagtgatcgtgctcgggttatataatccctcgtgccgtattcctacag

SEQ ID NO: 540622 - DNA, 1931 bp, Homo sapiens
  misc_feature (1096)..(1099): n is a, c, g, or t
  misc_feature (1103)..(1104): n is a, c, g, or t
  misc_feature (1106)..(1106): n is a, c, g, or t
  misc_feature (1110)..(1110): n is a, c, g, or t
  misc_feature (1112)..(1112): n is a, c, g, or t
  misc_feature (1366)..(1366): n is a, c, g, or t
tcgccctctgaccgcaggtgatcttgctgtaaacgtgacagctcccgtctgattacaacattcataatgagtccctgtcctctggtccgtcttacatgtggcatgcttatttcgtgtataccctgtactggtcacatactcactctcgtaattggtccgagatgcactccatagtcaatgtcaaggcatagatcctatgacactgaacgctactccctcctgagccagcagaggttgatctttgccggaaagcagctggaagatgggcgcaccctgtctgactacaacatccagaaagagtctaccctgcacctggtgctccgtctcagaggtgggatgcagatcttcgtgaagactctgactggtaagaccatcaccctcgaggttgagcccagtgacaccatcgagaatgtcaaggcaaagatccaagataaggaaggcatccctcctgaccagcagaggttgatctttgctggaaaacagctggaagatgggcgcaccctgtctgactacaacatccagaaagagtccaccctgcacctggtgctccgtctcagaggtgggatgcagatcttcgtgaagaccctgactggtaagaccatcaccctcgaggtggaagcccagtgacaccattgagaatgtcaaggcaaagatccaagacaaggaaggcatccctcctgaccagcagaggttgatctttgctgggaaacagctggaagatggacgcaccctgtctgactacaacatccagaaagagtccaccctgcacctggtgctccgtctcagaggtgggatgcagatcttcgtgaagaccctgactggtaagaccatcaccctcgaggtggagcccagtgacaccatcgagaatgtcaaggcaaagatccaagataaggaaggcatccctcctgatcagcagaggttgatctttgctgggaaacagctggaagatggacgcaccctgtctgactacaacatccagaaagagtccactctgcacttggtcctgcgcttgagggggggtgtctaagtttccccttttaaggtttcaacaaatttcattgcactttcctttcaataaagttgttgcattccccannnnaaannanaaananccaagaataaaggaaaggcaattccgtccgtgatcagcagagtgtttgctcttgggcgcgcaaacagctggcaagactggtcgtaccctgtactgagctacgcaccatccagaaagagtccatttttgcacctggtactccgctctcatgatggtggcgatgcaaaatcttgcgatagaagacgcgtcaactgggcaattgactcagtcagcccctctgacgtgtcggaagccgcgaggttgagcacacaatcngcggacactgtcaaaacggctaaaagagtcccttttgacagatcggacaggggcatttacccttccacttgaacccctttcaaggaagggttttgaactcctgtgtggtctgagaaaaaataccaggccgtggtaaaggactggggcccgcatactcccgttgattccttggagcgtaccataacggtccctatgtacacatgtcagttcctaacacccctttgtctatcctcttggcgctggcgtcccggctcctttccatacaaaacaggtcggggggacaacttgcccaagaaatttttattcagggttgtaagtagaaacccgccttggaaccttgtggggtttcgaaatggaaaccccaatgtttcatgaacgattccgtgccggaacacgagtattgggtgaaagccccacagatagtgttggaatcctatcgtccaaattttttgcacaggaaaaactttggttcccacaacgcggcgcgacacaaaagagaacttcctcccaaggacactcacaactggggcaaacagcgggcgcaatcttctccccattatacccg

SEQ ID NO: 540623 - DNA, 134 bp, Homo sapiens
cgctctcttctacagcctcctcgattgaggacacattcgttgggtatctgaccggcatcgtttggggtgccggctaccgcatgaccctgttacgacgatgtgcggccatgcgcggttacaacaccggcgatgat

SEQ ID NO: 540624 - DNA, 1892 bp, Homo sapiens
  misc_feature (751)..(751): n is a, c, g, or t
  misc_feature (1057)..(1060): n is a, c, g, or t
  misc_feature (1064)..(1065): n is a, c, g, or t
  misc_feature (1067)..(1067): n is a, c, g, or t
  misc_feature (1071)..(1071): n is a, c, g, or t
  misc_feature (1073)..(1073): n is a, c, g, or t
  misc_feature (1327)..(1327): n is a, c, g, or t
gatatggagtcgcagttcttgtttgtggattgctgtgatcgtcacttgacaatgcagatcttcgtgaagactctgactggtaagaccatcaccctcgaggttgagcccagtgacaccatcgagaatgtcaaggcaaagatccaagataaggaaggcatccctcctgaccagcagaggttgatctttgctggaaaacagctggaagatgggcgcaccctgtctgactacaacatccagaaagagtccaccctgcacctggtgctccgcctcagaggtgggagtgcaaatcttcgtgaagacgcgtcactggtaagtaccatcgcccttgacgtggagcccagtgagcacgcatctgagaatgtcaaaggcaaagatccaggacaaggaaggcatccctcctgaccagcagaggttgatctttgccggagaaacagctggaaggatggacgcaccctgtctgactacaacatccagaaaagagtccaccctgcacctggtgctccgtctcagaggtgggatgcagatcttcgtgaagaccctgactggtaagaccatcactctcgaggtggagcccagtgacaccattgagaatgtcaaggcaaagatccaagacaaggaaggcatccctcctgaccagcagaggttgatctttgctgggaaacagctggaagatggacgcaccctgtctgactacaacatccagaaagagtccaccctgcacctggtgctccgtctcagaggtgggatgcanatcttcgtgaagaccctgactggtaagaccatcacccttgaggtggagcccaagtgagcacgcatcgacgaatgtcaaggcaaagatcccagactaaggaaggccatctcctcctgatccacgcagaggttgatctttgctgggaaacagctggaagatggacgcaccctgtctgactacaacatccagaaagagtccactctgcacttggtcctgcgcttgagggggggtgtctaagtttccccttttaaggtttcaacaaatttcattgcactttcctttcaataaagttgttgcattccccannnnaaannanaaananccaagaataaaggaaaggcaattccgtccgtgatcagcagagtgtttgctcttgggcgcgcaaacagctggcaagactggtcgtaccctgtactgagctacgcaccatccagaaagagtccatttttgcacctggtactccgctctcatgatggtggcgatgcaaaatcttgcgatagaagacgcgtcaactgggcaattgactcagtcagcccctctgacgtgtcggaagccgcgaggttgagcacacaatcngcggacactgtcaaaacggctaaaagagtcccttttgacagatcggacaggggcatttacccttccacttgaacccctttcaaggaagggttttgaactcctgtgtggtctgagaaaaaataccaggccgtggtaaaggactggggcccgcatactcccgttgattccttggagcgtaccataacggtccctatgtacacatgtcagttcctaacacccctttgtctatcctcttggcgctggcgtcccggctcctttccatacaaaacaggtcggggggacaacttgcccaagaaatttttattcagggttgtaagtagaaacccgccttggaaccttgtggggtttcgaaatggaaaccccaatgtttcatgaacgattccgtgccggaacacgagtattgggtgaaagccccacagatagtgttggaatcctatcgtccaaattttttgcacaggaaaaactttggttcccacaacgcggcgcgacacaaaagagaacttcctcccaaggacactcacaactggggcaaacagcgggcgcaatcttctccccattatacccg

SEQ ID NO: 540625 - DNA, 276 bp, Homo sapiens
ttgcaggaagagagaactgtcaggtgttataacctgtgaacttttcccaggaaggtcaaagcaggacaagaccatctctctgcaggtgagggcatgacacaacaaaagacatttgactgggcttcttgccaggatcaacattaagcccagggctctgtgaatcacatactacactggctctcctgcccagccgtcagtcccacgggagggctaagattgggagttgcagagaaaaccaatttattctaaacattaagctgatgggagaaacaaatt

SEQ ID NO: 540626 - DNA, 671 bp, Homo sapiens
  misc_feature (176)..(176): n is a, c, g, or t
gtggaccgctgcggcttggagtgtgtgatggatcctgaacccagtgtgtggggggtggaggcggctcctgcgatcgaagggtgacttgagactcagcctggcctgcactgccagtgatggtgccctgtgggggtgcttgggcgctcctgccttgcctgtccattgcgttgaccatntccgtgcgtctgtgtcaggacgggtgacctgacttgaacggtttgattgttgtgagttgtgttaacataggtccaggcaacaagcatggggcattcccttgggtgatcctacacaactggtcagggcaatgtcaacattgggcaatttccaagaatgtggccagctggcggcaatttggaaatttggcaccaccgtttcaacggttacaccccagcggcaaggccaatgccactggtggcacaatgcccaagattggcgctttacatttttccgccgacgccttcttagtggcaacctttagggagggacattttttcaccagcgagttttggccagttttccaagccgaatgaaggaactttcaacacagtggacactggacaaaaccgttctttcacaagcaaacggcgcaactcggccagcacggggttttcaccggtggacaaccacgacacaatggggttattattagggcgcccctttgtttcccccga

SEQ ID NO: 540627 - DNA, 369 bp, Homo sapiens
  misc_feature (8)..(8): n is a, c, g, or t
  misc_feature (141)..(141): n is a, c, g, or t
agtaatcnttccacctttagcttccctgaggagcttgagaccacacctgattaatggctttctttttaaatttttagtagagatgggaactctatgttgctcaaactggtcaccaaactcctggctttgagtgttcctccntcttcggcctcagattgctgggattactggcatgagccaccgaacccaactacctcactgttttaaaaagcaattttttttttttttttttttttgagacagagtcttgctctgtcacccaggctggagtgcagtgttgcaatctgagcccactgcaccctccacctcccaggagaattgcttgaactggggagctggaggttgcagtgagccatcgtgccacttcac

SEQ ID NO: 540628 - DNA, 1912 bp, Homo sapiens
  misc_feature (751)..(751): n is a, c, g, or t
  misc_feature (791)..(791): n is a, c, g, or t
  misc_feature (1334)..(1335): n is a, c, g, or t
  misc_feature (1339)..(1339): n is a, c, g, or t
  misc_feature (1342)..(1342): n is a, c, g, or t
  misc_feature (1346)..(1346): n is a, c, g, or t
  misc_feature (1348)..(1348): n is a, c, g, or t
  misc_feature (1350)..(1350): n is a, c, g, or t
gatatggagtcgcagttcttgtttgtggattgctgtgatcgtcacttgacaatgcagatcttcgtgaagactctgactggtaagaccatcaccctcgaggttgagcccagtgacaccatcgagaatgtcaaggcaaagatccaagataaggaaggcatccctcctgaccagcagaggttgatctttgctggaaaacagctggaagatgggcgcaccctgtctgactacaacatccagaaagagtccaccctgcacctggtgctccgcctcagaggtgggagtgcaaatcttcgtgaagacgcgtcactggtaagtaccatcgcccttgacgtggagcccagtgagcacgcatctgagaatgtcaaaggcaaagatccaggacaaggaaggcatccctcctgaccagcagaggttgatctttgccggagaaacagctggaaggatggacgcaccctgtctgactacaacatccagaaaagagtccaccctgcacctggtgctccgtctcagaggtgggatgcagatcttcgtgaagaccctgactggtaagaccatcactctcgaggtggagcccagtgacaccattgagaatgtcaaggcaaagatccaagacaaggaaggcatccctcctgaccagcagaggttgatctttgctgggaaacagctggaagatggacgcaccctgtctgactacaacatccagaaagagtccaccctgcacctggtgctccgtctcagaggtgggatgcanatcttcgatgcaaatcttcgtgaagaccctgactggtaanaccatcactctctgaagtggagccgagatgacacccattgagaatgtcaaggcaaagatccaagacaaggaaggcatccctcctgaccagcagaggttgatctttgcttcgggcaccttgcacctgtggctccgtgtcacaagtgggatgcagatcttcgtgaagaccctgactggtaagaccatcactctggaggtggagcccagtgacaccatctgaaaatgtgaaggccaagatccaggataaagaaggcatcccccccgaccagcagaggctcatctttgcaggcaagcagctggaagatggccgcactctttctgactacaacatccagaaagagtcgaccctgcacctggtcctgcgtctgagcctgaggggtggctgttaattcttcagtcatggcattcgcagtgcccagtgatggcattactctgcactatagccatttgccccaacttaagtttagaaattacaagtttcagtaatagctgaacctctgttcaaaatgttaataaaggtttcgttgcatggtaagcataaaanncagnaanaaanananaaaaaaaaaaaaaaatgggggggggcgtcaaaaggccccaggggggccgcaataggaccgccgttgtttgttgacaatgggtgcggaccacaacaagcggaggggtgagataaaagggcaatgggcagggcgacggtgtaaaccccaccatcgagggccggcgggggaacaatcggcgactggcgaaagctgggcgaacgagcgaccgatgactgcgggggggcggcaaactatggggaataagccctccatcctaaaagatgaaggctttagcgaaaatactagcaaaagtcttctgcgcgcgtgaatacagggcgtggtgccaccaaacgccggcctataagacatggggctgcagaaacatgcggacaaccacggccaggtcatccgaggacatttgccccccgcgcgagatagaaaatccctgtcccaaaagaaaggccaccctgatggagatcacgtgaacggaggactgtggccgaggaagcttggactggcccgccgagaggccttgaagcagcagtactgtgaacaacgtgtcgcgcgcgatgacatgaccgac

SEQ ID NO: 540629 - DNA, 1872 bp, Homo sapiens
  misc_feature (751)..(751): n is a, c, g, or t
  misc_feature (1037)..(1040): n is a, c, g, or t
  misc_feature (1044)..(1045): n is a, c, g, or t
  misc_feature (1047)..(1047): n is a, c, g, or t
  misc_feature (1051)..(1051): n is a, c, g, or t
  misc_feature (1053)..(1053): n is a, c, g, or t
  misc_feature (1307)..(1307): n is a, c, g, or t
gatatggagtcgcagttcttgtttgtggattgctgtgatcgtcacttgacaatgcagatcttcgtgaagactctgactggtaagaccatcaccctcgaggttgagcccagtgacaccatcgagaatgtcaaggcaaagatccaagataaggaaggcatccctcctgaccagcagaggttgatctttgctggaaaacagctggaagatgggcgcaccctgtctgactacaacatccagaaagagtccaccctgcacctggtgctccgcctcagaggtgggagtgcaaatcttcgtgaagacgcgtcactggtaagtaccatcgcccttgacgtggagcccagtgagcacgcatctgagaatgtcaaaggcaaagatccaggacaaggaaggcatccctcctgaccagcagaggttgatctttgccggagaaacagctggaaggatggacgcaccctgtctgactacaacatccagaaaagagtccaccctgcacctggtgctccgtctcagaggtgggatgcagatcttcgtgaagaccctgactggtaagaccatcactctcgaggtggagcccagtgacaccattgagaatgtcaaggcaaagatccaagacaaggaaggcatccctcctgaccagcagaggttgatctttgctgggaaacagctggaagatggacgcaccctgtctgactacaacatccagaaagagtccaccctgcacctggtgctccgtctcagaggtgggatgcanatcttcgtgaagaccctaactgttaagaccatcaccctcgaggtggaagcccagtgacaccattgagaatgtcaaggcaaagatccaagacaaggaaggcatgcagaggttgatctttgctgggaaacagctggaagatggacgcaccctgtctgactacaacatccagaaagagtccactctgcacttggtcctgcgcttgagggggggtgtctaagtttccccttttaaggtttcaacaaatttcattgcactttcctttcaataaagttgttgcattccccannnnaaannanaaananccaagaataaaggaaaggcaattccgtccgtgatcagcagagtgtttgctcttgggcgcgcaaacagctggcaagactggtcgtaccctgtactgagctacgcaccatccagaaagagtccatttttgcacctggtactccgctctcatgatggtggcgatgcaaaatcttgcgatagaagacgcgtcaactgggcaattgactcagtcagcccctctgacgtgtcggaagccgcgaggttgagcacacaatcngcggacactgtcaaaacggctaaaagagtcccttttgacagatcggacaggggcatttacccttccacttgaacccctttcaaggaagggttttgaactcctgtgtggtctgagaaaaaataccaggccgtggtaaaggactggggcccgcatactcccgttgattccttggagcgtaccataacggtccctatgtacacatgtcagttcctaacacccctttgtctatcctcttggcgctggcgtcccggctcctttccatacaaaacaggtcggggggacaacttgcccaagaaatttttattcagggttgtaagtagaaacccgccttggaaccttgtggggtttcgaaatggaaaccccaatgtttcatgaacgattccgtgccggaacacgagtattgggtgaaagccccacagatagtgttggaatcctatcgtccaaattttttgcacaggaaaaactttggttcccacaacgcggcgcgacacaaaagagaacttcctcccaaggacactcacaactggggcaaacagcgggcgcaatcttctccccattatacccg

SEQ ID NO: 540630 - DNA, 566 bp, Homo sapiens
tctttctatatctgaatctatgaccgtatctatttgacacctgtttccgtattcatctctatgcctctgtctctctatatctatgtatctatgcccatatctgtgtctgtacctaggtccatttccattcctgtttcatatctgtatctagatttcctttcccattgcctccctcccttttaatcctggctccatttcaggtgaaaaaccagtatctggctcatagttgaccatatttgtgggaagaataaattcatcattaagtacattcattgatcttctcaattaattcttagtatttctcatgagaaaacaggagacatgaggtttgtaaatctgatttatcactttttattttcttttttttcttccttttttcttttgagatggaatctcgctctgttgcccagggtggagtgcagtggcgtgatctcagctcactgtaaactctgcctcccgggctctagcgattctcctgccgcagcctcccaagtagctgggattacagatgacctgctcgcacgcctggttaattttgtatctttcgtagcgacggtaacggagat

SEQ ID NO: 540631 - DNA, 1003 bp, Homo sapiens
  misc_feature (751)..(751): n is a, c, g, or t
  misc_feature (791)..(791): n is a, c, g, or t
gatatggagtcgcagttcttgtttgtggattgctgtgatcgtcacttgacaatgcagatcttcgtgaagactctgactggtaagaccatcaccctcgaggttgagcccagtgacaccatcgagaatgtcaaggcaaagatccaagataaggaaggcatccctcctgaccagcagaggttgatctttgctggaaaacagctggaagatgggcgcaccctgtctgactacaacatccagaaagagtccaccctgcacctggtgctccgcctcagaggtgggagtgcaaatcttcgtgaagacgcgtcactggtaagtaccatcgcccttgacgtggagcccagtgagcacgcatctgagaatgtcaaaggcaaagatccaggacaaggaaggcatccctcctgaccagcagaggttgatctttgccggagaaacagctggaaggatggacgcaccctgtctgactacaacatccagaaaagagtccaccctgcacctggtgctccgtctcagaggtgggatgcagatcttcgtgaagaccctgactggtaagaccatcactctcgaggtggagcccagtgacaccattgagaatgtcaaggcaaagatccaagacaaggaaggcatccctcctgaccagcagaggttgatctttgctgggaaacagctggaagatggacgcaccctgtctgactacaacatccagaaagagtccaccctgcacctggtgctccgtctcagaggtgggatgcanatcttcgatgcaaatcttcgtgaagaccctgactggtaanaccatcactctctgaagtggagccgagatgacacccattgagaatgtcaaggcaaagatccaagacaaggaaggcatccctcctgaccagcagaggttgatctttgctgggaaacagctggaagatggacgcaccctgtctgactacaacatccagaaagagtccaccctgcacctggttaggatgcttcggtaccgagctcgagtctatca

SEQ ID NO: 540632 - DNA, 496 bp, Homo sapiens
tctttctatatctgaatctatgaccgtatctatttgacacctgtttccgtattcatctctatgcctctgtctctctatatctatgtatctatgcccatatctgtgtctgtacctaggtccatttccattcctgtttcatatctgtatctagatttcctttcccattgcctccctcccttttaatcctggctccatttcaggtgaaaaaccagtatctggctcatagttgaccatatttgtgggaagaataaattcatcattaagtacattcattgatcttctcaattaattcttagtatttctcatgagaaaacaggagacatgaggtttggagaaggagaatttaatgggaagcagaggctgtaagtagggtgatttgttgtcctaggggtgactttagggtttaacgcatcagccctgagccaacactgtaagcaccatgaattacagttttttttgtgtttgtttctttgagacggagtcttattctgttgcc

SEQ ID NO: 540633 - DNA, 2200 bp, Homo sapiens
  misc_feature (828)..(828): n is a, c, g, or t
  misc_feature (1365)..(1368): n is a, c, g, or t
  misc_feature (1372)..(1373): n is a, c, g, or t
  misc_feature (1375)..(1375): n is a, c, g, or t
  misc_feature (1379)..(1379): n is a, c, g, or t
  misc_feature (1381)..(1381): n is a, c, g, or t
  misc_feature (1635)..(1635): n is a, c, g, or t
atcctcacctgtgtgctccagccccatctgtgtgctcatctccacctgtgtgctcatcctcacctgtgtgctccatccccacctgtgtgctcatccccacctgtgtgctcatccccacctgtgtgctcatccccacctgtgtgctcatccccacctgtgtgctccgtctcagaggtgggatgcagatcttcgtgaagactctgactggtaagaccatcaccctcgaggttgagcccagtgacaccatcgagaatgtcaaggcaaagatccaagataaggaaggcatccctcctgaccagcagaggttgatctttgctggcaccctgcacctgatgctccatcgcctcagaggtgggagtgcaaatcttcgtgaagacgcgtcactggtaagtaccatcgcccttgacgtggagcccagtgagcacgcatctgagaatgtcaaaggcaaagatccaggacaaggaaggcatccctcctgaccagcagaggttgatctttgccggagaaacagctggaaggatggacgcaccctgtctgactacaacatccagaaaagagtccaccctgcacctggtgctccgtctcagaggtgggatgcagatcttcgtgaagaccctgactggtaagaccatcactctcgaggtggagcccagtgacaccattgagaatgtcaaggcaaagatccaagacaaggaaggcatccctcctgaccagcagaggttgatctttgctgggaaacagctggaagatggacgcaccctgtctgactacaacatccagaaagagtccaccctgcacctggtgctccgtctcagaggtgggatgcanatcttcgtgaagaccctgactggtaagaccatcacccttgaggtggcctcgaggtggaagcccagtgacaccattgagaatgtcaaggcaaagatccaagacaaggaaggcatccctcctgaccagcagaggttgatctttgctgggaaacagctggaagatggacgcaccctgtctgactacaacatccagaaagagtccaccctgcacctggtgctccgtctcagaggtgggatgcagatcttcgtgaagaccctgactggtaagaccatcaccctcgaggtggagcccagtgacaccatcgagaatgtcaaggcaaagatccaagataaggaaggcatccctcctgatcagcagaggttgatctttgctgggaaacagctggaagatggacgcaccctgtctgactacaacatccagaaagagtccactctgcacttggtcctgcgcttgagggggggtgtctaagtttccccttttaaggtttcaacaaatttcattgcactttcctttcaataaagttgttgcattccccannnnaaannanaaananccaagaataaaggaaaggcaattccgtccgtgatcagcagagtgtttgctcttgggcgcgcaaacagctggcaagactggtcgtaccctgtactgagctacgcaccatccagaaagagtccatttttgcacctggtactccgctctcatgatggtggcgatgcaaaatcttgcgatagaagacgcgtcaactgggcaattgactcagtcagcccctctgacgtgtcggaagccgcgaggttgagcacacaatcngcggacactgtcaaaacggctaaaagagtcccttttgacagatcggacaggggcatttacccttccacttgaacccctttcaaggaagggttttgaactcctgtgtggtctgagaaaaaataccaggccgtggtaaaggactggggcccgcatactcccgttgattccttggagcgtaccataacggtccctatgtacacatgtcagttcctaacacccctttgtctatcctcttggcgctggcgtcccggctcctttccatacaaaacaggtcggggggacaacttgcccaagaaatttttattcagggttgtaagtagaaacccgccttggaaccttgtggggtttcgaaatggaaaccccaatgtttcatgaacgattccgtgccggaacacgagtattgggtgaaagccccacagatagtgttggaatcctatcgtccaaattttttgcacaggaaaaactttggttcccacaacgcggcgcgacacaaaagagaacttcctcccaaggacactcacaactggggcaaacagcgggcgcaatcttctccccattatacccg

SEQ ID NO: 540634 - DNA, 128 bp, Homo sapiens
gaggtagatacactaactactctaatgaattatagtcaatccccacgtacaactcactaaataccatcctacccttgacagtgaaagggaaatagatatttactatctccatctcttaccagatagct

SEQ ID NO: 540635 - DNA, 1716 bp, Homo sapiens
  misc_feature (344)..(344): n is a, c, g, or t
  misc_feature (881)..(884): n is a, c, g, or t
  misc_feature (888)..(889): n is a, c, g, or t
  misc_feature (891)..(891): n is a, c, g, or t
  misc_feature (895)..(895): n is a, c, g, or t
  misc_feature (897)..(897): n is a, c, g, or t
  misc_feature (1151)..(1151): n is a, c, g, or t
atatgatttaacatagaaaacagcttataagtttggctgcaccgattgcgcgactacaacatccagaacgtctctgacttgcacatcgctgctcgcgtctcagaggtgggatgcagatcttcgtgaagaccctgactggtaagaccatcactctcgaggtggagcccagtgacaccattgagaatgtcaaggcaaagatccaagacaaggaaggcatccctcctgaccagcagaggttgatctttgctgggaaacagctggaagatggacgcaccctgtctgactacaacatccagaaagagtccaccctgcacctggtgctccgtctcagaggtgggatgcanatcttcgtgaagaccctgactggtaagaccatcacccttgaggtggcctcgaggtggaagcccagtgacaccattgagaatgtcaaggcaaagatccaagacaaggaaggcatccctcctgaccagcagaggttgatctttgctgggaaacagctggaagatggacgcaccctgtctgactacaacatccagaaagagtccaccctgcacctggtgctccgtctcagaggtgggatgcagatcttcgtgaagaccctgactggtaagaccatcaccctcgaggtggagcccagtgacaccatcgagaatgtcaaggcaaagatccaagataaggaaggcatccctcctgatcagcagaggttgatctttgctgggaaacagctggaagatggacgcaccctgtctgactacaacatccagaaagagtccactctgcacttggtcctgcgcttgagggggggtgtctaagtttccccttttaaggtttcaacaaatttcattgcactttcctttcaataaagttgttgcattccccannnnaaannanaaananccaagaataaaggaaaggcaattccgtccgtgatcagcagagtgtttgctcttgggcgcgcaaacagctggcaagactggtcgtaccctgtactgagctacgcaccatccagaaagagtccatttttgcacctggtactccgctctcatgatggtggcgatgcaaaatcttgcgatagaagacgcgtcaactgggcaattgactcagtcagcccctctgacgtgtcggaagccgcgaggttgagcacacaatcngcggacactgtcaaaacggctaaaagagtcccttttgacagatcggacaggggcatttacccttccacttgaacccctttcaaggaagggttttgaactcctgtgtggtctgagaaaaaataccaggccgtggtaaaggactggggcccgcatactcccgttgattccttggagcgtaccataacggtccctatgtacacatgtcagttcctaacacccctttgtctatcctcttggcgctggcgtcccggctcctttccatacaaaacaggtcggggggacaacttgcccaagaaatttttattcagggttgtaagtagaaacccgccttggaaccttgtggggtttcgaaatggaaaccccaatgtttcatgaacgattccgtgccggaacacgagtattgggtgaaagccccacagatagtgttggaatcctatcgtccaaattttttgcacaggaaaaactttggttcccacaacgcggcgcgacacaaaagagaacttcctcccaaggacactcacaactggggcaaacagcgggcgcaatcttctccccattatacccg

SEQ ID NO: 540636 - DNA, 545 bp, Homo sapiens
  misc_feature (253)..(253): n is a, c, g, or t
tggaagatacagatagggcagagatccctgactccaaattcataattgagtaattttcctgtgattttgttggattaaagcagaaagccctgtggatttctttaatccctgcctcttgctttgtctcatgcctcagttccctgcaacccaatccatttttcttcattaggattatgaacacactgctgcctctcttaaaaaacaacaacaaaacaaaaacctgttactactgttgttactagggactgttgcnggaggtattggtaggggaaggctgctcttcttgcttgtctgctatttagtacagtccctcagtcctacctccatttagaaagtgtgaaaatatctattagggaggacttagtgaaccacattactatagaattcaaggctataggccctgattaaaagtgaacatttaggtcgagcatggtgctcacacctgtaatcccagcacctcggaaggccaaagtaggagaattgcttgtgtccaggagttcaagaccagcctgggcaacacagtgaaaccccatccctacaaaaaa

SEQ ID NO: 540637 - DNA, 606 bp, Homo sapiens
gggtgttgtatgtactggacacactgtggcaccttcactgtgcgcccacgtattgggatggcctcaggcgacatagggtatgtcttcgagtccggccgacaatagacttgccgggcctcttacaatctctctctctggggtcaactttactttgtgtaaggcacagactcctgcttatctcatagtgcctctcagttgaagaagtttccgtagcacgtgtttttggctctgaactcaacgtatgctgagaataagtgtcctagacagactgcacctgctgaactgcgctaatacggatatatcaagtcctcgtggaagactctctcattgcgcttaacgcaccgtacagtcttcctacttaagataagacactcgttccatagacactggcacttctgtgagttctcgcgggaactgcctggacacctgagctcctaggctaagtaccctgttgtacactatacgggcgcttatatagaacctgcctaatacagggcagatgcagattcctatacacgcacacactatcacacactcgcgcatagcctattggttggcgtcagagccctattgtataccgtcccaggctctgggccccttaccgcg

SEQ ID NO: 540638 - DNA, 2014 bp, Homo sapiens
  misc_feature (413)..(413): n is a, c, g, or t
  misc_feature (429)..(429): n is a, c, g, or t
  misc_feature (446)..(447): n is a, c, g, or t
  misc_feature (642)..(642): n is a, c, g, or t
  misc_feature (1179)..(1182): n is a, c, g, or t
  misc_feature (1186)..(1187): n is a, c, g, or t
  misc_feature (1189)..(1189): n is a, c, g, or t
  misc_feature (1193)..(1193): n is a, c, g, or t
  misc_feature (1195)..(1195): n is a, c, g, or t
  misc_feature (1449)..(1449): n is a, c, g, or t
atcctcacctgtgtgctccagccccatctgtgtgctcatctccacctgtgtgctcatcctcacctgtgtgctccatccccacctgtgtgctcatccccacctgtgtgctcatccccacctgtgtgctcatccccacctgtgtgctcatccccacctgtgtgctccgtctcagaggtgggatgcagatcttcgtgaagactctgactggtaagaccatcaccctcgaggttgagcccagtgacaccatcgagaatgtcaaggcaaagatccaagataaggaaggcatccctcctgaccagcagaggttgatctttgctggaaaacagctggaagatgggcgcaccctgtctgactacaacatccagaaagagtccaccctgcacctggtgctccgtctcagaggtgggatgctnatcttcgtgaagaccntgactggtaagaccatnncctctcgaggtggagcccagtgacaccattgagaatgtcaaggcaaagatccaagacaaggaaggcatccctcctgaccagcagaggttgatctttgctgggaaacagctggaagatggacgcaccctgtctgactacaacatccagaaagagtccaccctgcacctggtgctccgtctcagaggtgggatgcanatcttcgtgaagaccctgactggtaagaccatcacccttgaggtggcctcgaggtggaagcccagtgacaccattgagaatgtcaaggcaaagatccaagacaaggaaggcatccctcctgaccagcagaggttgatctttgctgggaaacagctggaagatggacgcaccctgtctgactacaacatccagaaagagtccaccctgcacctggtgctccgtctcagaggtgggatgcagatcttcgtgaagaccctgactggtaagaccatcaccctcgaggtggagcccagtgacaccatcgagaatgtcaaggcaaagatccaagataaggaaggcatccctcctgatcagcagaggttgatctttgctgggaaacagctggaagatggacgcaccctgtctgactacaacatccagaaagagtccactctgcacttggtcctgcgcttgagggggggtgtctaagtttccccttttaaggtttcaacaaatttcattgcactttcctttcaataaagttgttgcattccccannnnaaannanaaananccaagaataaaggaaaggcaattccgtccgtgatcagcagagtgtttgctcttgggcgcgcaaacagctggcaagactggtcgtaccctgtactgagctacgcaccatccagaaagagtccatttttgcacctggtactccgctctcatgatggtggcgatgcaaaatcttgcgatagaagacgcgtcaactgggcaattgactcagtcagcccctctgacgtgtcggaagccgcgaggttgagcacacaatcngcggacactgtcaaaacggctaaaagagtcccttttgacagatcggacaggggcatttacccttccacttgaacccctttcaaggaagggttttgaactcctgtgtggtctgagaaaaaataccaggccgtggtaaaggactggggcccgcatactcccgttgattccttggagcgtaccataacggtccctatgtacacatgtcagttcctaacacccctttgtctatcctcttggcgctggcgtcccggctcctttccatacaaaacaggtcggggggacaacttgcccaagaaatttttattcagggttgtaagtagaaacccgccttggaaccttgtggggtttcgaaatggaaaccccaatgtttcatgaacgattccgtgccggaacacgagtattgggtgaaagccccacagatagtgttggaatcctatcgtccaaattttttgcacaggaaaaactttggttcccacaacgcggcgcgacacaaaagagaacttcctcccaaggacactcacaactggggcaaacagcgggcgcaatcttctccccattatacccg

SEQ ID NO: 540639 - DNA, 1997 bp, Homo sapiens
  misc_feature (411)..(411): n is a, c, g, or t
  misc_feature (625)..(625): n is a, c, g, or t
  misc_feature (1162)..(1165): n is a, c, g, or t
  misc_feature (1169)..(1170): n is a, c, g, or t
  misc_feature (1172)..(1172): n is a, c, g, or t
  misc_feature (1176)..(1176): n is a, c, g, or t
  misc_feature (1178)..(1178): n is a, c, g, or t
  misc_feature (1432)..(1432): n is a, c, g, or t
agcctgctactccagagtattgaagcataaggtagtgcactgcttttgaacatagaggttgatcttagtgaggagcatgctgtgatatatggatgcgtcctgtgtgactacaatatccagaaagagtgagcctgaatctggtagttctggcttagagttgggcatgcagatcttcgtgaagactctgactggtaagaccatcaccctcgaggttgagcccagtgacaccatcgagaatgtcaaggcaaagatccaagataaggaaggcatccctcctgaccagcagaggttgatctttgctggaaaacagctggaagatgggcgcaccctgtctgactacaacatccagaaagagtccaccctgcacctggtgctctcttcagaggtgggatgcaaatcttcgtgaagacnctcgactggtaagaccatcactctcgaggtggagcccagtgacaccattgagaatgtcaaggcaaagatccaagacaaggaaggcatccctcctgaccagcagaggttgatctttgctgggaaacagctggaagatggacgcaccctgtctgactacaacatccagaaagagtccaccctgcacctggtgctccgtctcagaggtgggatgcanatcttcgtgaagaccctgactggtaagaccatcacccttgaggtggcctcgaggtggaagcccagtgacaccattgagaatgtcaaggcaaagatccaagacaaggaaggcatccctcctgaccagcagaggttgatctttgctgggaaacagctggaagatggacgcaccctgtctgactacaacatccagaaagagtccaccctgcacctggtgctccgtctcagaggtgggatgcagatcttcgtgaagaccctgactggtaagaccatcaccctcgaggtggagcccagtgacaccatcgagaatgtcaaggcaaagatccaagataaggaaggcatccctcctgatcagcagaggttgatctttgctgggaaacagctggaagatggacgcaccctgtctgactacaacatccagaaagagtccactctgcacttggtcctgcgcttgagggggggtgtctaagtttccccttttaaggtttcaacaaatttcattgcactttcctttcaataaagttgttgcattccccannnnaaannanaaananccaagaataaaggaaaggcaattccgtccgtgatcagcagagtgtttgctcttgggcgcgcaaacagctggcaagactggtcgtaccctgtactgagctacgcaccatccagaaagagtccatttttgcacctggtactccgctctcatgatggtggcgatgcaaaatcttgcgatagaagacgcgtcaactgggcaattgactcagtcagcccctctgacgtgtcggaagccgcgaggttgagcacacaatcngcggacactgtcaaaacggctaaaagagtcccttttgacagatcggacaggggcatttacccttccacttgaacccctttcaaggaagggttttgaactcctgtgtggtctgagaaaaaataccaggccgtggtaaaggactggggcccgcatactcccgttgattccttggagcgtaccataacggtccctatgtacacatgtcagttcctaacacccctttgtctatcctcttggcgctggcgtcccggctcctttccatacaaaacaggtcggggggacaacttgcccaagaaatttttattcagggttgtaagtagaaacccgccttggaaccttgtggggtttcgaaatggaaaccccaatgtttcatgaacgattccgtgccggaacacgagtattgggtgaaagccccacagatagtgttggaatcctatcgtccaaattttttgcacaggaaaaactttggttcccacaacgcggcgcgacacaaaagagaacttcctcccaaggacactcacaactggggcaaacagcgggcgcaatcttctccccattatacccg

SEQ ID NO: 540640 - DNA, 86 bp, Homo sapiens
gaacaggatgttgaaaagaaaaaataaagccctcctgccgactgattccaagtccccaggagggcttggaatcagtcggcagtcat

SEQ ID NO: 540641 - DNA, 1939 bp, Homo sapiens
  misc_feature (24)..(24): n is a, c, g, or t
  misc_feature (265)..(265): n is a, c, g, or t
  misc_feature (567)..(567): n is a, c, g, or t
  misc_feature (1104)..(1107): n is a, c, g, or t
  misc_feature (1111)..(1112): n is a, c, g, or t
  misc_feature (1114)..(1114): n is a, c, g, or t
  misc_feature (1118)..(1118): n is a, c, g, or t
  misc_feature (1120)..(1120): n is a, c, g, or t
  misc_feature (1374)..(1374): n is a, c, g, or t
aaattttataggacgattggcttngttgggtgagcttgttgtgtccctgtgggtggacgtggttggtgattggcaggatcctggtatccgctaacaggtcaaaatgcagatcttcgtgaaaacccttaccggcaagaccatcacccttgaggtggagcccagtgacaccatcgaaaatgtgaaggccaagatccaggataaggaaggcattccccccgaccagcagaggctcatctttgcaggcaagcagctggaagatggccgnactctttctgactacaacatccagaaggagtcgaccctgcacctggtcctgcgtctgagaggtggtatgcagatcttcgtgaagaccctgaccggcaagaccatcaccttctcgaggtggagcccagtgacaccattgagaatgtcaaggcaaagatccaagacaaggaaggcatccctcctgaccagcagaggttgatctttgctgggaaacagctggaagatggacgcaccctgtctgactacaacatccagaaagagtccaccctgcacctggtgctccgtctcagaggtgggatgcanatcttcgtgaagaccctgactggtaagaccatcacccttgaggtggcctcgaggtggaagcccagtgacaccattgagaatgtcaaggcaaagatccaagacaaggaaggcatccctcctgaccagcagaggttgatctttgctgggaaacagctggaagatggacgcaccctgtctgactacaacatccagaaagagtccaccctgcacctggtgctccgtctcagaggtgggatgcagatcttcgtgaagaccctgactggtaagaccatcaccctcgaggtggagcccagtgacaccatcgagaatgtcaaggcaaagatccaagataaggaaggcatccctcctgatcagcagaggttgatctttgctgggaaacagctggaagatggacgcaccctgtctgactacaacatccagaaagagtccactctgcacttggtcctgcgcttgagggggggtgtctaagtttccccttttaaggtttcaacaaatttcattgcactttcctttcaataaagttgttgcattccccannnnaaannanaaananccaagaataaaggaaaggcaattccgtccgtgatcagcagagtgtttgctcttgggcgcgcaaacagctggcaagactggtcgtaccctgtactgagctacgcaccatccagaaagagtccatttttgcacctggtactccgctctcatgatggtggcgatgcaaaatcttgcgatagaagacgcgtcaactgggcaattgactcagtcagcccctctgacgtgtcggaagccgcgaggttgagcacacaatcngcggacactgtcaaaacggctaaaagagtcccttttgacagatcggacaggggcatttacccttccacttgaacccctttcaaggaagggttttgaactcctgtgtggtctgagaaaaaataccaggccgtggtaaaggactggggcccgcatactcccgttgattccttggagcgtaccataacggtccctatgtacacatgtcagttcctaacacccctttgtctatcctcttggcgctggcgtcccggctcctttccatacaaaacaggtcggggggacaacttgcccaagaaatttttattcagggttgtaagtagaaacccgccttggaaccttgtggggtttcgaaatggaaaccccaatgtttcatgaacgattccgtgccggaacacgagtattgggtgaaagccccacagatagtgttggaatcctatcgtccaaattttttgcacaggaaaaactttggttcccacaacgcggcgcgacacaaaagagaacttcctcccaaggacactcacaactggggcaaacagcgggcgcaatcttctccccattatacccg

SEQ ID NO: 540642 - DNA, 307 bp, Homo sapiens
cccgcttagaagatcatagcagatgtacagcaacaactgatcctagtgtagatcagttgagctgacacaataagaacacctgaggcgtgctgctggccaggtgtggccaaatatcaatagcttaagtctaatccggacagccagtgcttcctcgagtcaatcatttgactatgtaaatggcagtcaagccagtaccagcattggggttggcactgagggaggtactaatttagcagccaacaatgctaatcgatactcaactgtcagtctgcaggaagaccggctagggtacttcatcttacatcct

SEQ ID NO: 540643 - DNA, 204 bp, Homo sapiens
cgcatatctggctccccaggacaaagtgtggccaggagtgtcgtactctgcaagcacacggataccccggagccgtgcgtattctatgacctccttcacattctgtgctgtgtagattttggtgacagggttgtaggatccctttctcatgagctctggaacagtgaagctctcatattggaaggaaggatcatctaccagatg

SEQ ID NO: 540644 - DNA, 205 bp, Homo sapiens
ctaagtaatacgtcacaaacatagtataaaggcgaattcatatggtcatgtgtatatatatacattgtcatgatatgtgtgtatatattcatatatatcaaacaccatttagtatagcaaaaatggtataacttaatgatataattctaagagtgaacagaaaaacattacagagtataaccaaaaagaatatattcatgcattt

SEQ ID NO: 540645 - DNA, 141 bp, Homo sapiens
ggtctatccatgccttctcgcctgcactcatgaaaccccaataaatatcctcatgtcatacataaagtgtatgacatgagttggctgagatcatagggttgggtgtcctctgagcacgtgcaggcggagggaagacagaaa

SEQ ID NO: 540646 - DNA, 126 bp, Homo sapiens
atttctcagggactatgagatctagttggataactgctcaagtgaaggagatcacatgatggaagaggtttgggatactggcctaagacatacagaaacgtgagttgggtttaggggacagctgtg

SEQ ID NO: 540647 - DNA, 115 bp, Homo sapiens
ggctcacactggttgctggtcagcgcctcccaggatgggaagctcatcatctgggacagctacaccaccaacaagcctcaagacccgcgagggcaacgtcagggtcagtccggga

SEQ ID NO: 540648 - DNA, 402 bp, Homo sapiens
  misc_feature (25)..(25): n is a, c, g, or t
  misc_feature (397)..(398): n is a, c, g, or t
aaaagggtcctgtcaaggtcctacnacaggagaagaaggcttgggctcctcttgtaaagtataaatttaaaatatgtattttaaagtgttaagtaaaataatgcacatttaaaaattaaacacgcccaagtatagtggctcactccctagaatccccaacactttgggaggccgaagcaggaggattgcttggaccccaggaattcaagaccagcctgagcaatatagcaagacctcacctctacaaaaaataactgggtgtggtagcctgcatctgtagtgccagctacttgggatgctgaggcagaaggattgcttgagtccaggaggtcaaggctgtagtgagccatgatcacaccactgcattccagcctgggcaacagagtaagaccctgtnntcaa

SEQ ID NO: 540649 - DNA, 1471 bp, Homo sapiens
  misc_feature (264)..(264): n is a, c, g, or t
ggtcggagatcagccacgagctgtcgggtgattatcatcatgctccatctgagtggactatgcacgcgcgaccttcctctcccagaatgagcgattgctcgcagtgctgtagcccggagtcccttgagaggtcctcagtgatgacctatacgtgacacgtctcggtcgggaagacgcactgatcacaaacgatgtgctgtgttcgcatactcgtgtctcgcatcttcatgtctgccgtctcattgagcactattggccagtcgncgcactaacttcctggtcaccacctagtattgccacagagtatgctaacaaaactgaacaagtacttccttgcacacaaagcactggcatgctgtgggacgatattcatgacgttcatttcaagaagacggtatgcccaaagtcctacgcgcaggagaacgctggtgcacgggcacatgtgacctgacgtccattgcagggcatacacacgcgaacgtcaccgtgattttgcaaagggtcgtgcattgcctccacatgtaggtcagacccacgtaaaccacgcaagtggagacacacatatgcaggatagtgactatcgcgaacaggtatcgtgcggcctatcttgacgtaggacggtgacgcgatagtcgtatttgcattcattgcttctccaaagacatttggtagacacactcactttaaatgggctagtacgcctcgctcgacttggagcccagggccgatgctatttcacccttgtgaaagaaatcctttgaagacaaccattaaaagaaacgatcactattggggaaagacttcgaataatgactggtgaaagtgtcttttttgtgaagaatgctttgagaattgcagccaatttgggcttcccttgtttttgacacaattagaacgcaagggcgaccttctcctttgggaatgcaaaataagcccaactttgaaccgcttcccaccccgaaagagggagtcaacttggggaaaccgtggggaggggacccccggtctttcctgggggccttggggtttggttgacccaaaggcaagggatttcttggggccccaagttccccccagtggttgaagaagccaagcaagatgtgccgggtcattccaaccgagttcctttggcccaaggcccccacacaaagcggttttacaaaagcgtttttcttttgggcctccctttttcaagggcccccccaagggagccctcttcaccccccaatttcatttcccaccccctggttataccctttaaattccccaatgtgaagaaaccccttgggatggcccttgagggcttctttttccaggttcacccctttgtggatgcaatggacacaacacacccaatgttccgggaaaccatgggagcatttacacaagttggcagcagatgagcccctgggtttgcccacaagtctcccattctgtggtccacaagggaggcagtttaagggtccactag

SEQ ID NO: 540650 - DNA, 129 bp, Homo sapiens
  misc_feature (2)..(2): n is a, c, g, or t
tntctgtcaaaacgtttattgcaaaatggagtcttagacaaaggaaagcaaagaaaagttcacatcaaatgaaatgtatgcaccacttggatttctgaaatcactgtggactttgagctggaatatcaa

SEQ ID NO: 540651 - DNA, 222 bp, Homo sapiens
catttctgaaacgggtgcgtgccaccgccgcaaatttccagatgatggtctgtggctgcctgcaatacgactttctgcatcgctgaaaactgcccggcagcctggttgatatcacggcaaacatccgtcgccagctccagcatactttcggtgatatcgtgctttacctctccggccgtgatcttatttttaaccgcgtcaatcagcattgacgagtcgtgg

SEQ ID NO: 540652 - DNA, 748 bp, Homo sapiens
tacatatacttcatggaatggatacatagccataaaaggaatgagatctttctgtcctttgtaacaacataaatggagctggaggtcattatcctaagtgaactaagacaagaacagaaaaccaaatagtgcatgtttccacttacaaatgggaagtaaacattgagtatatatagacacaaagaagggagcaacagacaatggggtctaattgagggtggagggagagaggagagtgaggatttaaaaaaatactatccggtactatgcttattactgagtggtgaaagaatctgtaacaaaaccctgtgacatgcaatttactatataacaatccttgcacttatactctgaactaaaatagaggttgaaaagtaaaatcaaggctattatgaccatgtgctatcctcttttctataatctagttcagttacattaggtaggcattatttctccctgagtgattgagaatatagcccattgaagcccttaggcctgatattaccttagagatgttttaaattaaaagattcattctgtaatagaaatagaattatttaaagtgtggtatttcctctttgattacttcaagtcatgtcctattcttatattttacatgcactgtataggtactaaaatgattctataacattagtgtgcgacatatgtctatatctataacagcacagggtattatgtgcttcaatcttgaagcaaaggggtactttatagggtccagaaacgttgc

SEQ ID NO: 540653 - DNA, 203 bp, Homo sapiens
acgatacaaagaactacaaaggctgggcctaggaaacaacaaaatcacagatatcgaaaatgggagtcttgctaacataccacgtgtgaggagagatacatttgggaaacattaaactaaaaaaatccattcagggttaccaggttgaatacctccagatatcttccttcattctatttcaattgcaagatggggtaatattt

SEQ ID NO: 540654 - DNA, 237 bp, Homo sapiens
cagagccaccaaggaggccagaggcaccaggaggaaccaggtagggggacacgatgaggaccattgaggctcatcgagactgagtgccaggcttgtgagctactatgtggagaggtccacatgccagggatatgcagctgtggaactagagtgaagcacactctgaaggggcaactctagcaggcaccagacacaaggagtgcctgcgcagagacaggctagcagaagaggaccaag

SEQ ID NO: 540655 - DNA, 776 bp, Homo sapiens
cccacgcgtccgaccacgctgtccggatagatgtctgggtgcatacttctaaaggataggaattctcctgcacctgctcatgtggcaatggatagcactgtgcagcctctcagcgcaggatggggcctataatcaggcttggcttggaggcctgacaggtgatctgacatccatctaaatcaaatttatttaaattcatgggaaatcacttcctgcaccgcaaactgagacgattgcattttgtgagtctctatggatctgatgtggagaaaggactgtaaccccattaatgtggggtgtatatggaagtgcatgtagagcgtcctgccctttgaaatcaggactgggtgtgtgtcttccctggacatcactgctctctccaggtcattctcagtgcccgggggtctccttccctcaggcagctccagtggtgggttctgaaggtgtgctttcaaaacggggcacatctggctgggaagtcacatggactcttccaggagagagaccagctgaggcgtctctctctgaggtgtagtagggtctaacgcgggtgtgtgctgggctccaaggaggaggagcttgctgggaacacacgacaggagaagtactgactcaactggcactgaccatgttgtcataattagaatacaagaagaagtggtcggaaatgcacattcctggataggaatcacaggtcacccaggatctcacaggtagtctcctgagtagttgacgggtagcggggactagttacgcggtagttagtgtggtctgta

SEQ ID NO: 540656 - DNA, 572 bp, Homo sapiens
  misc_feature (550)..(550): n is a, c, g, or t
gaaggaaaaaatgcttaatgagtgaagatagcactgaaacatgttgacttttactctaggtttgtttttagatggggttagtattttcccctacgtaatgtacatgtctttaggccacagtattaggagtttgatttttccctgccccaccctcaggtaggtggcagtggtcattgtagcttaatcagacccctgttaagttcctgggcatttcaaggtaaattcacgtcttccttctcacagaaattgaatagacctctcacacacttatttacctccacccaacaaccatgtatccttgggccctttctagattttctctgcttggtgctcatttctactacttgacaagctattctgtacctacttcccacataaacagtgcccaattgttttaattaaaagaaaaaagaaattcctgatattgtccttcccctattagaatcaaaaagtgtcactcactcaagagatgtgaaccatccttgatttagcacgcaaactccactggctcaaaagaaatgacatcaaaagggaaaaaaggtaaaaatgnctggattggacttgcgagggaa

SEQ ID NO: 540657 - DNA, 293 bp, Homo sapiens
ggtatggacctctgttgccttctgggcccgtgttggtgaccctgttgcccctctgccctgctgtggtgagctgaattatttcttggtccgtcccttctagggggcttctcgcttaacctcctgtgttccctgcatgacagctctagctttatactagggcacaaaatttccctctattcttacactcatctgactctggctacatcttttcgagtttccagcttaaagtgtctatctcctccatgacagcctcctactgattaccgtacaggggatacctctaagagatcgac

SEQ ID NO: 540658 - DNA, 335 bp, Homo sapiens
tgacaggtactcatcgaacagcatccaggtctgtgtcctaccccgcagatgatagcacatagccagcgtaacaggctagcactcgcagcggtacatggtgtcgctaatagtggaccaggtagttgcacttggcgtacttgtatgcagtcgtgggtcccatacacgtgacagggtgttacggggcttgcacacctgagggtacaccatgctgctgtcacacagagcatatgagaatcctcagatatcatggaaacaagaatccagatccctgtcatctctgagtagacagaggctccatttggaagagtgtgggttacctctgtccctccccattc

SEQ ID NO: 540659 - DNA, 1169 bp, Homo sapiens
gtacccgtgacggtctccgtgctgcgaagtatctcgctagctctgtcgcccgaatacgcggtgcttctggagaagcttgtgccagacagtcgtgcttagaagagactcacctatgctggagcgtccattgtgtgtcattctcgtggaggaactctagttccactaagtgtagatctagataccctgcttcgaagcaagatgaagatagggtgagatcactaagacagataggacccatcgagagctagaggatgcgcttggcaatgggaagatcctgaaaattgggcagaagggtacttcgaaagagcgtgaagttccgtaatagcaatgatcttacatgtaccgccatctatcatggtgtctctgcggagtcatagaagcaagcatggagcaggcacatccaggatggagacatcaacgcctgtagtaggggaagactgagaacggaggagcctctagctttcttgacagcagagtgggtcctctgatcacgaagcaggcaagacgaagccgctagagaatgggagtgagggggaccacgcgaatcgacgggcgtgatgcgtagagacagcgccaagcgagggataaggcgtctcggacggaacctggcacagcttggagatctcgccgaaggcgctccatagctggagggccgatccaaaggcaggggattcccgtaaaccgtggttcccgcatttgtgaggacacggaaagggccagcgatttatcagcaccaaccgaattccccgtaagctaggccaaagccacgcgtggaaacggcagggtaacgaaatgaacaatcagcccaaagggttgttacaacaccaaaggttgtggacagtttgtaccaagaaggactgacggaaagtttttgacaatgtgcgttggcataagttcgctataaaagcgaattggcttggggcccccgttgaaagaagtaaagggaaatgaaacccaggggctttcgaaaggttcctgggattttttccagcaaggaaatacaggggcaatatgcgttggttttaagttaaaaataacgtgggttttttaaaattcgaacagaagattgtgcacatagaaaagaggagcgtcactgagggggcaactgtataagtatacagggagagtgagacgcggaagaacagagaggggcacttttggacaattgg

SEQ ID NO: 540660 - DNA, 367 bp, Homo sapiens
gcacgcgaggtgtcacccgagcccagaggagcactacctgtgcccccacaccctcttctcaaccacctccacggccacgctgtgtcccataggcagcacgcgatgggtctctccctttccccctttccaggtcaggggagttggacacagggcaagtgtttggttttaaagcgacaggcctttggggcaacacattattgagactcactgtgaattccccgggagtcagactgtgcttgtgctcttcctctctggagggccatgggccattagcaggagcttcacattgagccccaagccagaacccccttcctttacagagagggctttattgcgcacattgggtgccttttagctttgtgtgttg

SEQ ID NO: 540661 - DNA, 532 bp, Homo sapiens
ctgcgagcagtacgcaaggagccccccgccgggccagcgcccgcgggccctccccagggcaagccccgccagcaacctctctgaacagggtggcacccatcccaggaaaaaactaccggaaccccccacagggtctgagcccacgcgccgagcacaacagttcttgcggcgccaagggcgggagaaaaagggaaaaccccagcatccagcctcccacccagaggaacagaaaggggaaatccccccctgagttttgtggcagcagcggcattgccccgttggccgcaaacaggttcgccgcgcttagttgtggattctcgaaatccctccctcgaaaatcagtttacatatttcatgatgaattcccgcgacggtggaccataataacccctctttgtttcctaaaacaacagcccccttcaaataatctctttccaaacagacaagcagactaccgaaccactttggcaaatctctaaacactccatgataatttcagcctctttcttgcacacaaattatcaaaacaaat

SEQ ID NO: 540662 - DNA, 1190 bp, Homo sapiens
tgtttctgccttcattgtcgtcctgttctgtgtgtcattcgatttctctactgttctctcttgttgatcttattcttttcaatctgcttttcgtgcgtgtctctgtgattcctaccgcccttcctcggtactgttttaggtgtttctttatctcgtggcttttcatgatgcctcgcgggggggtcctatacacactgtctcggggttagcccctggtggacgtgcccccctcttgtggaatcttttccggtccctcagtggggccctgtcctctagacgcacgggagccccttcaccggttcccttgtctccattatcccggacgtgcccttgggccttttttgtgttttcaaccccagacaccaccagcagcagaacaccccttggcgcaatttctggccctagcgtgagcgccttgtctctccatccctactcccgtccatgtgcgccccggtggccccgcgccagcccacggccatccgctggagcccacaaccaccggctttcttgtgggcgccccgggtagctcccccgttttgctctttcaaggaggagggtgaatccccaccagcgctttcccgaaggcccccggagcccttgggccccgcggaccaatccgagctgggccccagaccaaccggaggccgaaattggagagagctcggacgaggaacccggtggaatcccagggcccaacggcttcggcggcacccggattgccagaaggtaccagagcctccgaagggccccttcgggcccggaaaggccctgcagcgcccccgccccacacccggtcaacccgcctcgccttgggcctggccgggagccccagaagccccacccggaagccccagcctgcgctggagccccaccgctggagcccagagcctcccccaggaccccgaggaagatcccgggagacctggggcttccgaagaaagctttgctcccaatggagagtgtagcctgagggctggtgttgcctgcctcccctgtgcttgtgccttgtccccaaattaatcctttcagaatgtagcactcacgccctaataaggagcgaatcctacatccacccaggcgggcgctttggccctcccttccttaagcccccgtcctgtgtccttctgaaaagaggtgcagtcactcacacctgcttgcgctcaccatccatccaaagttatttcacccga

SEQ ID NO: 540663 - DNA, 323 bp, Homo sapiens
taaagagacagggtcttgctctgttgcccaagatggagcacagtgacgtaatcagggttcactgcagccttgacctcccaggctcaagggaacctcccaactccggcttctgagtaactgggaccacaggtgccaccaggcctggctaatttgtgtgtgtgtgtgtgtgtgtgtgtgtgtgtgtgtgtgtgtgttacacaccgggtcttaccatgttgcccaggctgatctgtgtgagtgtgtgtgtgagtctgtgtgtgagtgtataaaacaaaccgggtctaaccatgttggccctgctggttgggtactggggagctcca

SEQ ID NO: 540664 - DNA, 720 bp, Homo sapiens
  misc_feature (337)..(337): n is a, c, g, or t
ctaattttttcccccaccggggccacttctggtgggagttccggtcgcccccccccgggcttgtcttgccccacggaggtttccccccccaccgcacacttctggactggcgctgtgataactcccacgctccacagttttctccgacacttcactgcctgttgcctctgtttggaaggccacgcgagtcttccctgtgagagtttttaacgtattgggggccacaaaaattctggaaaagacttatcggaggtcccctctgacacccccaacgcgaattatcaggggaacaccacgccacagtgggcctatggggcacatcacgccaccacgacanctgaagcgggagaaaatgcccacacttgtaattggggctgttaataagaaactcctggctgttgggccacggcaccacagtggctcaaacgctgtatattcccacgcacctcttaggaaggttgaggcggactggagtcaccctcgaaggtccacggagtttgagaccacgcctggcccaaacaatggtggtaaaccccgtcttctactataaaatacccaaaaaattatgcccaggcgtggtaagcgggcaccctgtaatccccgctactcaggaggctgaggccggagaatcacttgaaccggggaggcagaggttgccatgaactgagatcatgccactccactccagcctgggcgaccagagccagactccatctccca

SEQ ID NO: 540665 - DNA, 361 bp, Homo sapiens
  misc_feature (99)..(99): n is a, c, g, or t
tcctagcctttccatgagcaggcaactcccacttcctacacatgaacaagcccagaacagccatggttctacctaacccaagctaggaggcagcacagntttgacccctgcctcctctttccctctcaacctccccccaacactcaccacagccctggccttggggagaagccgcttccaccggaaactaaaaatcaagccactggggagatttaagtgggctggtggccaggacaggtatcacccccacctacaaaacctgccctacattcaccactcacacatgccttcatgggcccttctgaattctcttctccccagtcaggcagaggctctcaaaaggggcgtgcagacaaatcct

SEQ ID NO: 540666 - DNA, 337 bp, Homo sapiens
tggtcaattttttgtacttgaggtttgtccttgagaagaaccttttaggccgggtgcggtggtcacaccttgtaatcccagcactttgagaggccgaggcgggcgggatcacgaggtcaggaggatcgagaccatccctggctaacacggtgaaaccccgtctcctactaaaaaatacaaaaaattagtcgggcgcagttggcggctgccttgtgggtccctggctactcgggagttgaggcaggagaatgttgagccggggaggcggaagctttgcatgagcctgagatagaaccacttgcactccggcctgggcgaaagagcgagactccgtctc

SEQ ID NO: 540667 - DNA, 302 bp, Homo sapiens
atgacgtggctttctggggtataaaatgtagccgatttctgccacctcatgggctacactcttgactcaacgtcatttacgtgggtacttgtcgtcttactttgtagaccttcattcaggatttgctgaagatgctgtatataggctgagcaagatgtggtgatgttgatcggtgtttatcgattacagaacaggctcctctagaaggctctgatgcaccgctaggtcctttgagttttagtctgtggctcgtagtgttctggctagcagttttgttgatttcactattgaggttttgggct

SEQ ID NO: 540668 - DNA, 1912 bp, Homo sapiens
  misc_feature (43)..(43): n is a, c, g, or t
  misc_feature (238)..(238): n is a, c, g, or t
  misc_feature (540)..(540): n is a, c, g, or t
  misc_feature (1077)..(1080): n is a, c, g, or t
  misc_feature (1084)..(1085): n is a, c, g, or t
  misc_feature (1087)..(1087): n is a, c, g, or t
  misc_feature (1091)..(1091): n is a, c, g, or t
  misc_feature (1093)..(1093): n is a, c, g, or t
  misc_feature (1347)..(1347): n is a, c, g, or t
ttcggcggtctttctgtgagggtgtttcgacgcgctgggggtnttgtgctttcatcacatttgttaacaggtcaaaatgcagatcttcgtgaaaacccttaccggcaagaccatcacccttgaggtggagcccagtgacaccatcgaaaatgtgaaggccaagatccaggataaggaaggcattccccccgaccagcagaggctcatctttgcaggcaagcagctggaagatggccgnactctttctgactacaacatccagaaggagtcgaccctgcacctggtcctgcgtctgagaggtggtatgcagatcttcgtgaagaccctgaccggcaagaccatcaccttctcgaggtggagcccagtgacaccattgagaatgtcaaggcaaagatccaagacaaggaaggcatccctcctgaccagcagaggttgatctttgctgggaaacagctggaagatggacgcaccctgtctgactacaacatccagaaagagtccaccctgcacctggtgctccgtctcagaggtgggatgcanatcttcgtgaagaccctgactggtaagaccatcacccttgaggtggcctcgaggtggaagcccagtgacaccattgagaatgtcaaggcaaagatccaagacaaggaaggcatccctcctgaccagcagaggttgatctttgctgggaaacagctggaagatggacgcaccctgtctgactacaacatccagaaagagtccaccctgcacctggtgctccgtctcagaggtgggatgcagatcttcgtgaagaccctgactggtaagaccatcaccctcgaggtggagcccagtgacaccatcgagaatgtcaaggcaaagatccaagataaggaaggcatccctcctgatcagcagaggttgatctttgctgggaaacagctggaagatggacgcaccctgtctgactacaacatccagaaagagtccactctgcacttggtcctgcgcttgagggggggtgtctaagtttccccttttaaggtttcaacaaatttcattgcactttcctttcaataaagttgttgcattccccannnnaaannanaaananccaagaataaaggaaaggcaattccgtccgtgatcagcagagtgtttgctcttgggcgcgcaaacagctggcaagactggtcgtaccctgtactgagctacgcaccatccagaaagagtccatttttgcacctggtactccgctctcatgatggtggcgatgcaaaatcttgcgatagaagacgcgtcaactgggcaattgactcagtcagcccctctgacgtgtcggaagccgcgaggttgagcacacaatcngcggacactgtcaaaacggctaaaagagtcccttttgacagatcggacaggggcatttacccttccacttgaacccctttcaaggaagggttttgaactcctgtgtggtctgagaaaaaataccaggccgtggtaaaggactggggcccgcatactcccgttgattccttggagcgtaccataacggtccctatgtacacatgtcagttcctaacacccctttgtctatcctcttggcgctggcgtcccggctcctttccatacaaaacaggtcggggggacaacttgcccaagaaatttttattcagggttgtaagtagaaacccgccttggaaccttgtggggtttcgaaatggaaaccccaatgtttcatgaacgattccgtgccggaacacgagtattgggtgaaagccccacagatagtgttggaatcctatcgtccaaattttttgcacaggaaaaactttggttcccacaacgcggcgcgacacaaaagagaacttcctcccaaggacactcacaactggggcaaacagcgggcgcaatcttctccccattatacccg

SEQ ID NO: 540669 - DNA, 101 bp, Homo sapiens
tcctcccattacaccagcccccacacactcacacagcacacttacgcacagatcattgcagcggatgcgatggggctatgacagaagcctcagtgctcgtt

SEQ ID NO: 540670 - DNA, 1782 bp, Homo sapiens
  misc_feature (947)..(950): n is a, c, g, or t
  misc_feature (954)..(955): n is a, c, g, or t
  misc_feature (957)..(957): n is a, c, g, or t
  misc_feature (961)..(961): n is a, c, g, or t
  misc_feature (963)..(963): n is a, c, g, or t
  misc_feature (1217)..(1217): n is a, c, g, or t
atcctcacctgtgtgctccagccccatctgtgtgctcatctccacctgtgtgctcatcctcacctgtgtgctccatccccacctgtgtgctcatccccacctgtgtgctcatccccacctgtgtgctcatccccacctgtgtgctcatccccacctgtgtgctccgtctcagaggtgggatgcagatcttcgtgaagactctgactggtaagaccatcaccctcgaggttgagcccagtgacaccatcgagaatgtcaaggcaaagatccaagataaggaaggcatccctcctgaccagcagaggttgatctttgctggaaaacagctggaagatgggcgcaccctgtctgactacaacatccagaaagagtccaccctgcacctggtgctccgtctcagaggtgggatgcaaatcttcgtgaagacgcgtctactggctaagaccatcgcccttgacgtggagcccagtgagcacgcatctgagaactgtcaaggcaaagatccaggacaaggaaggcattcctcctgagcagcagaggttgatctgtgtgccgggaaacagctggaagatggacgcaccctgtctgactacaacatccagaaagagtccaccctgcacctggtgctccgtctcagaggtgggatgcagatcttcgtgaagaccctgactggtaagaccatcaccctcgaggtggagcccagtgacaccatcgagaatgtcaaggcaaagatccaagataaggaaggcatccctcctgatcagcagaggttgatctttgctgggaaacagctggaagatggacgcaccctgtctgactacaacatccagaaagagtccactctgcacttggtcctgcgcttgagggggggtgtctaagtttccccttttaaggtttcaacaaatttcattgcactttcctttcaataaagttgttgcattccccannnnaaannanaaananccaagaataaaggaaaggcaattccgtccgtgatcagcagagtgtttgctcttgggcgcgcaaacagctggcaagactggtcgtaccctgtactgagctacgcaccatccagaaagagtccatttttgcacctggtactccgctctcatgatggtggcgatgcaaaatcttgcgatagaagacgcgtcaactgggcaattgactcagtcagcccctctgacgtgtcggaagccgcgaggttgagcacacaatcngcggacactgtcaaaacggctaaaagagtcccttttgacagatcggacaggggcatttacccttccacttgaacccctttcaaggaagggttttgaactcctgtgtggtctgagaaaaaataccaggccgtggtaaaggactggggcccgcatactcccgttgattccttggagcgtaccataacggtccctatgtacacatgtcagttcctaacacccctttgtctatcctcttggcgctggcgtcccggctcctttccatacaaaacaggtcggggggacaacttgcccaagaaatttttattcagggttgtaagtagaaacccgccttggaaccttgtggggtttcgaaatggaaaccccaatgtttcatgaacgattccgtgccggaacacgagtattgggtgaaagccccacagatagtgttggaatcctatcgtccaaattttttgcacaggaaaaactttggttcccacaacgcggcgcgacacaaaagagaacttcctcccaaggacactcacaactggggcaaacagcgggcgcaatcttctccccattatacccg

SEQ ID NO: 540671 - DNA, 291 bp, Homo sapiens
  misc_feature (17)..(17): n is a, c, g, or t
  misc_feature (36)..(36): n is a, c, g, or t
  misc_feature (186)..(186): n is a, c, g, or t
tgtacagggccaggtgnactgtgtctcacacctgtnatcccagcacttggggagaactagttaggagtgtatgctgaggccaggagttcgagaccagcctgggcaacagagaccctgcctcgacaaaatctttagaaatcaaccaggtgtcatggcacgtgcctgtagccccagctacttgggagntgaagcaggaggatagctagagcccaggagttcaaagctgcaacgacctatgacagcaccactgcactccagccaggaatgaggcagagacagagaccttacctc

SEQ ID NO: 540672 - DNA, 1892 bp, Homo sapiens
  misc_feature (751)..(751): n is a, c, g, or t
  misc_feature (1057)..(1060): n is a, c, g, or t
  misc_feature (1064)..(1065): n is a, c, g, or t
  misc_feature (1067)..(1067): n is a, c, g, or t
  misc_feature (1071)..(1071): n is a, c, g, or t
  misc_feature (1073)..(1073): n is a, c, g, or t
  misc_feature (1327)..(1327): n is a, c, g, or t
gatatggagtcgcagttcttgtttgtggattgctgtgatcgtcacttgacaatgcagatcttcgtgaagactctgactggtaagaccatcaccctcgaggttgagcccagtgacaccatcgagaatgtcaaggcaaagatccaagataaggaaggcatccctcctgaccagcagaggttgatctttgctggaaaacagctggaagatgggcgcaccctgtctgactacaacatccagaaagagtccaccctgcacctggtgctccgcctcagaggtgggagtgcaaatcttcgtgaagacgcgtcactggtaagtaccatcgcccttgacgtggagcccagtgagcacgcatctgagaatgtcaaaggcaaagatccaggacaaggaaggcatccctcctgaccagcagaggttgatctttgccggagaaacagctggaaggatggacgcaccctgtctgactacaacatccagaaaagagtccaccctgcacctggtgctctctgagaggtggtatgcagatcttcgtgaagaccctgaccggcaagaccatcaccttctcgaggtggagcccagtgacaccattgagaatgtcaaggcaaagatccaagacaaggaaggcatccctcctgaccagcagaggttgatctttgctgggaaacagctggaagatggacgcaccctgtctgactacaacatccagaaagagtccaccctgcacctggtgctccgtctcagaggtgggatgcanatcttcgtgaagaccctgactggtaagaccatcacccttgaggtggagcccaagtgagcacgcatcgacgaatgtcaaggcaaagatcccagactaaggaaggccatctcctcctgatccacgcagaggttgatctttgctgggaaacagctggaagatggacgcaccctgtctgactacaacatccagaaagagtccactctgcacttggtcctgcgcttgagggggggtgtctaagtttccccttttaaggtttcaacaaatttcattgcactttcctttcaataaagttgttgcattccccannnnaaannanaaananccaagaataaaggaaaggcaattccgtccgtgatcagcagagtgtttgctcttgggcgcgcaaacagctggcaagactggtcgtaccctgtactgagctacgcaccatccagaaagagtccatttttgcacctggtactccgctctcatgatggtggcgatgcaaaatcttgcgatagaagacgcgtcaactgggcaattgactcagtcagcccctctgacgtgtcggaagccgcgaggttgagcacacaatcngcggacactgtcaaaacggctaaaagagtcccttttgacagatcggacaggggcatttacccttccacttgaacccctttcaaggaagggttttgaactcctgtgtggtctgagaaaaaataccaggccgtggtaaaggactggggcccgcatactcccgttgattccttggagcgtaccataacggtccctatgtacacatgtcagttcctaacacccctttgtctatcctcttggcgctggcgtcccggctcctttccatacaaaacaggtcggggggacaacttgcccaagaaatttttattcagggttgtaagtagaaacccgccttggaaccttgtggggtttcgaaatggaaaccccaatgtttcatgaacgattccgtgccggaacacgagtattgggtgaaagccccacagatagtgttggaatcctatcgtccaaattttttgcacaggaaaaactttggttcccacaacgcggcgcgacacaaaagagaacttcctcccaaggacactcacaactggggcaaacagcgggcgcaatcttctccccattatacccg

SEQ ID NO: 540673 - DNA, 1556 bp, Homo sapiens
  misc_feature (978)..(979): n is a, c, g, or t
  misc_feature (983)..(983): n is a, c, g, or t
  misc_feature (986)..(986): n is a, c, g, or t
  misc_feature (990)..(990): n is a, c, g, or t
  misc_feature (992)..(992): n is a, c, g, or t
  misc_feature (994)..(994): n is a, c, g, or t
gatatggagtcgcagttcttgtttgtggattgctgtgatcgtcacttgacaatgcagatcttcgtgaagactctgactggtaagaccatcaccctcgaggttgagcccagtgacaccatcgagaatgtcaaggcaaagatccaagataaggaaggcatccctcctgaccagcagaggttgatctttgctggaaaacagctggaagatgggcgcaccctgtctgactacaacatccagaaagagtccaccctgcacctggtgctccgcctcagaggtgggagtgcaaatcttcgtgaagacgcgtcactggtaagtaccatcgcccttgacgtggagcccagtgagcacgcatctgagaatgtcaaaggcaaagatccaggacaaggaaggcatccctcctgaccagcagaggttgatctttgccggagaaacagctggaaggatggacgcaccctgtctgactacaacatccagaaaagagtccaccctgcacctggtgctctctgagaggtggtatgcagatcttcgtgaagaccctgaccggcaagaccatcaccttttttttttttttttttttttataaaaaaaaaaaaaaaaaaaaaaaaaaccggcaagaccatcactctggaggtggagcccagtgacaccatctgaaaatgtgaaggccaagatccaggataaagaaggcatcccccccgaccagcagaggctcatctttgcaggcaagcagctggaagatggccgcactctttctgactacaacatccagaaagagtcgaccctgcacctggtcctgcgtctgagcctgaggggtggctgttaattcttcagtcatggcattcgcagtgcccagtgatggcattactctgcactatagccatttgccccaacttaagtttagaaattacaagtttcagtaatagctgaacctctgttcaaaatgttaataaaggtttcgttgcatggtaagcataaaanncagnaanaaanananaaaaaaaaaaaaaaatgggggggggcgtcaaaaggccccaggggggccgcaataggaccgccgttgtttgttgacaatgggtgcggaccacaacaagcggaggggtgagataaaagggcaatgggcagggcgacggtgtaaaccccaccatcgagggccggcgggggaacaatcggcgactggcgaaagctgggcgaacgagcgaccgatgactgcgggggggcggcaaactatggggaataagccctccatcctaaaagatgaaggctttagcgaaaatactagcaaaagtcttctgcgcgcgtgaatacagggcgtggtgccaccaaacgccggcctataagacatggggctgcagaaacatgcggacaaccacggccaggtcatccgaggacatttgccccccgcgcgagatagaaaatccctgtcccaaaagaaaggccaccctgatggagatcacgtgaacggaggactgtggccgaggaagcttggactggcccgccgagaggccttgaagcagcagtactgtgaacaacgtgtcgcgcgcgatgacatgaccgac

SEQ ID NO: 540674 - DNA, 1478 bp, Homo sapiens
  misc_feature (900)..(901): n is a, c, g, or t
  misc_feature (905)..(905): n is a, c, g, or t
  misc_feature (908)..(908): n is a, c, g, or t
  misc_feature (912)..(912): n is a, c, g, or t
  misc_feature (914)..(914): n is a, c, g, or t
  misc_feature (916)..(916): n is a, c, g, or t
gatatggagtcgcagttcttgtttgtggattgctgtgatcgtcacttgacaatgcagatcttcgtgaagactctgactggtaagaccatcaccctcgaggttgagcccagtgacaccatcgagaatgtcaaggcaaagatccaagataaggaaggcatccctcctgaccagcagaggttgatctttgctggaaaacagctggaagatgggcgcaccctgtctgactacaacatccagaaagagtccaccctgcacctggtgctccgcctcagaggtgggagtgcaaatcttcgtgaagacgcgtcactggtaagtaccatcgcccttgacgtggagcccagtgagcacgcatctgagaatgtcaaaggcaaagatccaggacaaggaaggcatccctcctgaccagcagaggttgatctttgccggagaaacagctggaaggatggacgcaccctgtctgactacaacatccagaaaagagtccaccctgcacctggtgctctctgagaggtggtatgcagatcttcgtgaagaccctgaccggcaagaccatcacctgaggtggagcccagtgacaccatcgagaatgtgaaggccaagatccaggataaagaaggcatcccccccgaccagcagaggctcatctttgcaggcaagcagctggaagatggccgcactctttctgactacaacatccagaaagagtcgaccctgcacctggtcctgcgtctgaggggtggctattaattattcggtctgcattcccagtgggcagtgatggcattactctgcactatagccatttgccccaacttaagtttagaaattacaagtttcagtaatagctgaacctctgttcaaaatgttaataaaggtttcgttgcatggtaagcataaaanncagnaanaaanananaaaaaaaaaaaaaaatgggggggggcgtcaaaaggccccaggggggccgcaataggaccgccgttgtttgttgacaatgggtgcggaccacaacaagcggaggggtgagataaaagggcaatgggcagggcgacggtgtaaaccccaccatcgagggccggcgggggaacaatcggcgactggcgaaagctgggcgaacgagcgaccgatgactgcgggggggcggcaaactatggggaataagccctccatcctaaaagatgaaggctttagcgaaaatactagcaaaagtcttctgcgcgcgtgaatacagggcgtggtgccaccaaacgccggcctataagacatggggctgcagaaacatgcggacaaccacggccaggtcatccgaggacatttgccccccgcgcgagatagaaaatccctgtcccaaaagaaaggccaccctgatggagatcacgtgaacggaggactgtggccgaggaagcttggactggcccgccgagaggccttgaagcagcagtactgtgaacaacgtgtcgcgcgcgatgacatgaccgac

SEQ ID NO: 540675 - DNA, 1122 bp, Homo sapiens
atggggcctgagccaaggcggtgggtggagcggcgaggtgggcggagtgctgggcctgcggcgggcgagctggatgcggctgcgccttgtcctggagctctggctggtggcggcctgtgaggaggctgctagcggtctggctggcgtgctggtgcccgtgactgagcgtccggaggtggcgggacagaggctgcctgtgtgtgtgacccccgatggcgccggagtagtgttggtgcggcgccatgcactgactccatcgcggcagtcctcaactgagaactctggagaggcacctggagttgctctagggtcgtaactcagcctttgaaacaacgggatgaaagccataaatggaagaagcgattatcctatgacagatggacaactactgcatgcaatgcagggcatgaattcttgggatacagcaccagctgtttgaacggccggaaacgagatttgggatgccttgaagtgcttgcttgcacatgcttttgagagccattgatcatgaactggcacagagcaactcattgatggtgcaaagcataacattagccaacatggtgcacttacaggagtgctacgatgaactggggaacagatatcagcttccagtgtattgcttggcaccggcaatcaacatgatagaggcaaaagagcgacatagagactctggatattcctgagccagcaccaattctggatctgattgtccagcttcgtttgcgcctttccacaggcaaagacctcgagcttgtggttcgacgcacagacacagtattcaccatgacgagacggttgcattgcacgcaacggatgaaccaggtagacagggggataaactggaagagaccctcagggaccaacgtcagttcgaaaacttaggatcccagggagaacttgctgacaagggaactaggcagcagcaccagtgctcagacctagacaccagtggcacggtaagcagggccgagtggagggacaaagtccagaaccgatagaagcggcgcggaacacactcagggagagaacagcgagagcaaccgagagcagcaggggccagaagacctagttgaccgcgacgtagagccaggacacaaacacagggaagactcaccagtt

SEQ ID NO: 540676 - DNA, 527 bp, Homo sapiens
  misc_feature (11)..(11): n is a, c, g, or t
  misc_feature (34)..(34): n is a, c, g, or t
  misc_feature (93)..(93): n is a, c, g, or t
  misc_feature (121)..(121): n is a, c, g, or t
  misc_feature (160)..(160): n is a, c, g, or t
  misc_feature (240)..(240): n is a, c, g, or t
  misc_feature (325)..(325): n is a, c, g, or t
  misc_feature (424)..(424): n is a, c, g, or t
  misc_feature (436)..(437): n is a, c, g, or t
  misc_feature (440)..(440): n is a, c, g, or t
  misc_feature (456)..(456): n is a, c, g, or t
  misc_feature (463)..(463): n is a, c, g, or t
  misc_feature (465)..(465): n is a, c, g, or t
  misc_feature (491)..(491): n is a, c, g, or t
  misc_feature (494)..(494): n is a, c, g, or t
ggccccgggcngcgccctcccccgcggccaggcncgggagggacccaggagcggccgccggccgcagcccagggcccggagggaggaggagcngccgcacgacccaggcagcggggagggncccgcagcccgggcgagcggcccagagacagggcccgcnggaccagggcccgagggcccgcaccggccgccccagccccggcccccaggcggggacagcgacggccggaagagggaganggaggagagcgagggacacccgcgcggcccccgcggggcccggggcggggagaaaggggaacgggcgacaggcgcgccccggganggggccggagcggggcgggggacacccccgggaggggacggcggcgccgcggaggccggcaacgaggacagcgcggccggggccaagcaggggcgcgcngagaggccccgnngcnccgccaacccagaacnggacaancngaggagccaggccagccaggggcggnggngccaccggcgggagcgggagaaggtccacgacc

SEQ ID NO: 540677 - DNA, 584 bp, Homo sapiens
gatatggagtcgcagttcttgtttgtggattgctgtgatcgtcacttgacaatgcagatcttcgtgaagactctgactggtaagaccatcaccctcgaggttgagcccagtgacaccatcgagaatgtcaaggcaaagatccaagataaggaaggcatccctcctgaccagcagaggttgatctttgctggaaaacagctggaagatgggcgcaccctgtctgactacaacatccagaaagagtccaccctgcacctggtgctccgcctcagaggtgggagtgcaaatcttcgtgaagacgcgtcactggtaagtaccatcgcccttgacgtggagcccagtgagcacgcatctgagaatgtcaaaggcaaagatccaggacaaggaaggcatccctcctgaccagcagaggttgatctttgccggagaaacagctggaaggatggacgcaccctgtctgactacaacatccagaaaagagtccaccctgcacctggtgctccaaccgtctaagagttcagatccagttttgaggagtagaccctcactgatcagaacagccgcctcgaagtcgatccaatgta

SEQ ID NO: 540678 - DNA, 1294 bp, Homo sapiens
  misc_feature (24)..(24): n is a, c, g, or t
  misc_feature (265)..(265): n is a, c, g, or t
  misc_feature (716)..(717): n is a, c, g, or t
  misc_feature (721)..(721): n is a, c, g, or t
  misc_feature (724)..(724): n is a, c, g, or t
  misc_feature (728)..(728): n is a, c, g, or t
  misc_feature (730)..(730): n is a, c, g, or t
  misc_feature (732)..(732): n is a, c, g, or t
aaattttataggacgattggcttngttgggtgagcttgttgtgtccctgtgggtggacgtggttggtgattggcaggatcctggtatccgctaacaggtcaaaatgcagatcttcgtgaaaacccttaccggcaagaccatcacccttgaggtggagcccagtgacaccatcgaaaatgtgaaggccaagatccaggataaggaaggcattccccccgaccagcagaggctcatctttgcaggcaagcagctggaagatggccgnactctttctgactacaacatccagaaggagtcgaccctgcacctggtcctgcgtctgagaggtggtatgcagatcttcgtgaagaccctgaccggcaagaccatcacctgaggtggagcccagtgacaccatcgagaatgtgaaggccaagatccaggataaagaaggcatcccccccgaccagcagaggctcatctttgcaggcaagcagctggaagatggccgcactctttctgactacaacatccagaaagagtcgaccctgcacctggtcctgcgtctgaggggtggctattaattattcggtctgcattcccagtgggcagtgatggcattactctgcactatagccatttgccccaacttaagtttagaaattacaagtttcagtaatagctgaacctctgttcaaaatgttaataaaggtttcgttgcatggtaagcataaaanncagnaanaaanananaaaaaaaaaaaaaaatgggggggggcgtcaaaaggccccaggggggccgcaataggaccgccgttgtttgttgacaatgggtgcggaccacaacaagcggaggggtgagataaaagggcaatgggcagggcgacggtgtaaaccccaccatcgagggccggcgggggaacaatcggcgactggcgaaagctgggcgaacgagcgaccgatgactgcgggggggcggcaaactatggggaataagccctccatcctaaaagatgaaggctttagcgaaaatactagcaaaagtcttctgcgcgcgtgaatacagggcgtggtgccaccaaacgccggcctataagacatggggctgcagaaacatgcggacaaccacggccaggtcatccgaggacatttgccccccgcgcgagatagaaaatccctgtcccaaaagaaaggccaccctgatggagatcacgtgaacggaggactgtggccgaggaagcttggactggcccgccgagaggccttgaagcagcagtactgtgaacaacgtgtcgcgcgcgatgacatgaccgac

SEQ ID NO: 540679 - DNA, 1705 bp, Homo sapiens
  misc_feature (369)..(369): n is a, c, g, or t
  misc_feature (870)..(873): n is a, c, g, or t
  misc_feature (877)..(878): n is a, c, g, or t
  misc_feature (880)..(880): n is a, c, g, or t
  misc_feature (884)..(884): n is a, c, g, or t
  misc_feature (886)..(886): n is a, c, g, or t
  misc_feature (1140)..(1140): n is a, c, g, or t
tcgccctctgaccgcaggtgatcttgctgtaaacgtgacagctcccgtctgattacaacattcataatgagtccctgtcctctggtccgtcttacatgtggcatgcttatttcgtgtataccctgtactggtcacatactcactctcgtaattggtccgagatgcactccatagtcaatgtcaaggcatagatcctatgacactgaacgctactccctcctgagccagcagaggttgatctttgccggaaagcagctggaagatgggcgcaccctgtctgactacaacatccagaaagagtctaccctgcacctggtgctccgtctcagaggtgggatgcaaatcttcgtgaagaccctgactggtaanaccatcactctctgaagtggagccgagatgacacccattgagaatgtcaaggcaaagatccaagacaaggaaggcatccctcctgaccagcagaggttgatctttgctgggaaacagctggaagatggacgcaccctgtctgactacaacatccagaaagagtccaccctgcacctggtgctccgtctcagaggtgggatgcagatcttcgtgaagaccctgactggtaagaccatcaccctcgaggtggagcccagtgacaccatcgagaatgtcaaggcaaagatccaagataaggaaggcatccctcctgatcagcagaggttgatctttgctgggaaacagctggaagatggacgcaccctgtctgactacaacatccagaaagagtccactctgcacttggtcctgcgcttgagggggggtgtctaagtttccccttttaaggtttcaacaaatttcattgcactttcctttcaataaagttgttgcattccccannnnaaannanaaananccaagaataaaggaaaggcaattccgtccgtgatcagcagagtgtttgctcttgggcgcgcaaacagctggcaagactggtcgtaccctgtactgagctacgcaccatccagaaagagtccatttttgcacctggtactccgctctcatgatggtggcgatgcaaaatcttgcgatagaagacgcgtcaactgggcaattgactcagtcagcccctctgacgtgtcggaagccgcgaggttgagcacacaatcngcggacactgtcaaaacggctaaaagagtcccttttgacagatcggacaggggcatttacccttccacttgaacccctttcaaggaagggttttgaactcctgtgtggtctgagaaaaaataccaggccgtggtaaaggactggggcccgcatactcccgttgattccttggagcgtaccataacggtccctatgtacacatgtcagttcctaacacccctttgtctatcctcttggcgctggcgtcccggctcctttccatacaaaacaggtcggggggacaacttgcccaagaaatttttattcagggttgtaagtagaaacccgccttggaaccttgtggggtttcgaaatggaaaccccaatgtttcatgaacgattccgtgccggaacacgagtattgggtgaaagccccacagatagtgttggaatcctatcgtccaaattttttgcacaggaaaaactttggttcccacaacgcggcgcgacacaaaagagaacttcctcccaaggacactcacaactggggcaaacagcgggcgcaatcttctccccattatacccg

SEQ ID NO: 540680 - DNA, 131 bp, Homo sapiens
  misc_feature (86)..(86): n is a, c, g, or t
gtatgtcgaggtattcggatagtctagaaagtgttgtggaaagaatgtatatttactcctacgaatataattacaaagtgaatttnttgtcatgttggtttgagtgtgtacccggagaactagggggaatc

SEQ ID NO: 540681 - DNA, 341 bp, Homo sapiens
  misc_feature (327)..(327): n is a, c, g, or t
aatgtgtatttataaggtattatttccaatgataaaaaataaaaggcataacactttagatgatagaccatttttctttttaaataaggcctgatttttcaaaaagcattgaataggttggtttttaatttccaaagctggccggtttttaaggttccataaaaacaaaaaaaatggtaaggaaggaaggtcaaatcccttttgaaagactcatgggggtacaaaagcaaccatttgggggtatcaagggccaagaactaaaaaaacattcctggtttttttaacattcctttcctgggcctcattaactaatggacataaataaancatctttatttcaa

SEQ ID NO: 540682 - DNA, 705 bp, Homo sapiens
  misc_feature (24)..(24): n is a, c, g, or t
  misc_feature (265)..(265): n is a, c, g, or t
aaattttataggacgattggcttngttgggtgagcttgttgtgtccctgtgggtggacgtggttggtgattggcaggatcctggtatccgctaacaggtcaaaatgcagatcttcgtgaaaacccttaccggcaagaccatcacccttgaggtggagcccagtgacaccatcgaaaatgtgaaggccaagatccaggataaggaaggcattccccccgaccagcagaggctcatctttgcaggcaagcagctggaagatggccgnactctttctgactacaacatccagaaggagtcgaccctgcacctggtcctgcgtctgagaggtggtatgcagatcttcgtgaagaccctgaccggcaagaccatcacctgaggtggagcccagtgacaccatcgagaatgtgaaggccaagatccaggataaagaaggcatcccccccgaccagcagaggctcatctttgcaggcaagcagctggaagatggccgcactctttctgactacaacatccagaaagagtcgaccctgcacctggtcctgcgtctgaggggtggctattaattattcggtctgcattcccagtgggcagtgatggcattactctgcactatagccatttgccccaacttaagtttagaaattacaagtttcagtaatagctgaacctctgttcaaaatgttaataaaggtttcgttgcatggt

SEQ ID NO: 540683 - DNA, 1234 bp, Homo sapiens
ccacgcgtcgcccagcccgggccctgccggcccggctgcgcacgcgactgccccgctccaggccccgtctcctgcgccctatttggtcattcgtgggggcaagcgtgcagggagggcgaaacgttgcgcggccgacagggagaagccggagaccggacgccgagcatgcgcacgagtgacgcacgcctctcgccgtccgccaccctcgagctggtcagcccacgcacgctgccagcatcactgccctcggcaacaatgggactcgcgcgcgcgaggtgcttgcggccgacgctgctcctggcggcaccgcttgcaggttgctaagccgcctgctggcgggccgacccatgaacagcgccagcgcatggacgcgccactctgccaaccctagcagaataactgggccttccacacaacatccaggtgctcacagctcacacaggagactctccaaccatagtgccttcctgagccataagcaacctgcaacacgttaccaacaatatcacctgactgaaaacgcaccacaaacgcaccaagattgcccactcacgactcccacgaaactacacaaccggtacaaccaaccaactagaaaaccactacacgccgacacatcaataattaacaacacacacacacccaagaggcactagcatccaaccaacacacaaactacttgacccttccataccccacaccataaacaagatactaccaaccacaaacaccaacccaacggctagataaacaccaccaaaccaccaactcgtcaacaatacctccacacacacaaacaaaccattacaccccttaaacccccaaccacacctacgattacccaaacgacacaatactacgctaggacctatcaccttcccgctctcccccaactcccacaacacccaatcccatcctcccaattaccacaagaacgccaaaactcaaacgtgaatccaaacactactgactacctctcatagcccacaaaacgcaccagcaaacttcgaccttacaaccgccatccaaaatctcaaccaaaattcaatattacaaatatgccacacacaaaaacatgctaaaaaccaccacataacacaaccattacacaaaaaataaacccaacacatccaccactacaaaccatcctacataaagacaaaccatcatgcacaccatagacaaaaacaacaacatacaaatacacaaaccaacaaccaatacagacataaca

SEQ ID NO: 540684 - DNA, 1708 bp, Homo sapiens
  misc_feature (24)..(24): n is a, c, g, or t
  misc_feature (265)..(265): n is a, c, g, or t
  misc_feature (567)..(567): n is a, c, g, or t
  misc_feature (873)..(876): n is a, c, g, or t
  misc_feature (880)..(881): n is a, c, g, or t
  misc_feature (883)..(883): n is a, c, g, or t
  misc_feature (887)..(887): n is a, c, g, or t
  misc_feature (889)..(889): n is a, c, g, or t
  misc_feature (1143)..(1143): n is a, c, g, or t
aaattttataggacgattggcttngttgggtgagcttgttgtgtccctgtgggtggacgtggttggtgattggcaggatcctggtatccgctaacaggtcaaaatgcagatcttcgtgaaaacccttaccggcaagaccatcacccttgaggtggagcccagtgacaccatcgaaaatgtgaaggccaagatccaggataaggaaggcattccccccgaccagcagaggctcatctttgcaggcaagcagctggaagatggccgnactctttctgactacaacatccagaaggagtcgaccctgcacctggtcctgcgtctgagaggtggtatgcagatcttcgtgaagaccctgaccggcaagaccatcaccttctcgaggtggagcccagtgacaccattgagaatgtcaaggcaaagatccaagacaaggaaggcatccctcctgaccagcagaggttgatctttgctgggaaacagctggaagatggacgcaccctgtctgactacaacatccagaaagagtccaccctgcacctggtgctccgtctcagaggtgggatgcanatcttcgtgaagaccctgactggtaagaccatcacccttgaggtggagcccaagtgagcacgcatcgacgaatgtcaaggcaaagatcccagactaaggaaggccatctcctcctgatccacgcagaggttgatctttgctgggaaacagctggaagatggacgcaccctgtctgactacaacatccagaaagagtccactctgcacttggtcctgcgcttgagggggggtgtctaagtttccccttttaaggtttcaacaaatttcattgcactttcctttcaataaagttgttgcattccccannnnaaannanaaananccaagaataaaggaaaggcaattccgtccgtgatcagcagagtgtttgctcttgggcgcgcaaacagctggcaagactggtcgtaccctgtactgagctacgcaccatccagaaagagtccatttttgcacctggtactccgctctcatgatggtggcgatgcaaaatcttgcgatagaagacgcgtcaactgggcaattgactcagtcagcccctctgacgtgtcggaagccgcgaggttgagcacacaatcngcggacactgtcaaaacggctaaaagagtcccttttgacagatcggacaggggcatttacccttccacttgaacccctttcaaggaagggttttgaactcctgtgtggtctgagaaaaaataccaggccgtggtaaaggactggggcccgcatactcccgttgattccttggagcgtaccataacggtccctatgtacacatgtcagttcctaacacccctttgtctatcctcttggcgctggcgtcccggctcctttccatacaaaacaggtcggggggacaacttgcccaagaaatttttattcagggttgtaagtagaaacccgccttggaaccttgtggggtttcgaaatggaaaccccaatgtttcatgaacgattccgtgccggaacacgagtattgggtgaaagccccacagatagtgttggaatcctatcgtccaaattttttgcacaggaaaaactttggttcccacaacgcggcgcgacacaaaagagaacttcctcccaaggacactcacaactggggcaaacagcgggcgcaatcttctccccattatacccg

SEQ ID NO: 540685 - DNA, 162 bp, Homo sapiens
gaaccaggctcagcatggagaatagaccaactgcacagctcagcagaggttgggacatcccgctcgacgagagagtctcgcggagaagtgaagcaaagaaacttatcttctaagtcatcaatgcttttctctaatttagttactgacctctcaatatcagaa

SEQ ID NO: 540686 - DNA, 416 bp, Homo sapiens
ggcgtcacgataagtgaagagaggtcttgagagcgacaatggattcctcgggcgtacgctgatccttggttaatttggagatcgacaaaacaccaaataccacatgttctcatttataaatgagagctaaacattgagtacaggtgaacataaaaacaggtactacagacactggggactactggagagggtagaagggaagaggggaatggaccgaaaaactacccatcaggtactatgctctctcccgggcaacagggccatccatacccaaattcttagcatcacataatatacccatgtaacaaacctgcacttggaccccctgagtctataataacattggaaattattttaaaaagaaaaagaacacaatggaaagtcgatgataaacctagcagaaatctactcatatt

SEQ ID NO: 540687 - DNA, 328 bp, Homo sapiens
tgctaagtgaaggaagccagtcacaaaagaccccatattatatgatctcatttatataaaatgtccagaataggcaaatccatagaaaccgaaagcagattagtgtttgtctaggactagagggaataaaggggtggggtatgggagaacagaattgatgagtgactgctaatgaatataaggtttcttttggagatgatgaaaatattctaaaattaattatggtgacgggtgccctgctaaatagatatactgaaaacccttgaattgtaccctttaaatgcgaattttatagaatacaaattatatctcagtaaaactgttttta

SEQ ID NO: 540688 - DNA, 352 bp, Homo sapiens
ggtttcacgggcctcccagtccccagcacaccccccgcccaccccgccaagtgtactgtactccccccccaggataaaaaagtgtttgttagggaaaaaaaagggaaaggcaggagccggcccaagcccagggtccctgtttgggccccaaaaagcatttaaccaggccccaacccttcaagggaaaccaaggcctcacccagacattcttgagggaaggaaaagccagactttgggtttgttttttgggggaataatgggtttttttttttaatgtttctttgggaattttgtttgttggcaaattcggggtgatcttttttcataaaaaaaaagaaaagatttaattgga

SEQ ID NO: 540689 - DNA, 128 bp, Homo sapiens
ccccattttctcatctacaaaatggagattataaaaccaacctcagaggaggagttcaggcctgactatgataaccaatgaaaaataactaaatgcagagcagaaggccaatgaaagttcccttgtac

SEQ ID NO: 540690 - DNA, 165 bp, Homo sapiens
atccaaagaaaccttcaaggttttggggggggggggtttccccggggggggaattggttccccccccgcccttttttgaaaaaggggttttttttttttctccccccccccccccctttgggggggggtttccccatccctcccaattaaaaggtatggttttta

SEQ ID NO: 540691 - DNA, 463 bp, Homo sapiens
ggctctgactgtctctctcttgcctgattgctggaagaagaggcatgccggcctctggtgtccaccctccaacccccacaaagttacctcccttagggaggtggtgggggcaaatgactgtcactccctgtgcatggtctgaccccaggctcctcccccagcacggttcggttcctcctctgtagcctgggaagacttctctgtccacctcccaaggggctggagcagtacaagttgttgcaggacagcagcctgaaaagaagggctggttgttcctgcccatattgggagagatgggagcatcctaggtcactggcttttgctgctgtaatggggacccctcccccatctacttaccaccaccctttcccaaccccaaccatgttttttgtgtgtcaattgtgccatttttattttattcctttccctactgtacacggagaaataaaggtgtagaaataca

SEQ ID NO: 540692 - DNA, 184 bp, Homo sapiens
gtagggccctatcctgaagatacagtccacagagactatcacattcacatgaatgcagcagctgcaactctaactatccatctccaagatggaatggtcacaaacacaatgcctcactagcctcaacaaagatcatcccgaacacccagtgacccgtaagtatcaggtagtggcatgccataat

SEQ ID NO: 540693 - DNA, 693 bp, Homo sapiens
aatatcactacacttgatctcatgccagcggcttcggtgcttgactgtattgactggcaagggttattccacaacacagatggagtaaccggagtagcaagccgagccagctatatatacccactagaagagtgagtgatcaaacgcggataagctatgcttttcttcccaagaagtatccatctctgagccaatagaaatggaacaaagtatcttgcaaggactctaaacaggttactgatgcatcacatcagagatgtttaccagagttgaaaacaagaataaatgttctagctgctcagtatcagtctcttctaaatagctacggtgaacccgtgcgatgatacacagtgctactttactccaacttattaccaaatttgccacagaatattgtcacactattgaaggaactgcacaagtatattgaaacttcggagctatgcggtggtgctcacaattgttatattttccatgagactttttggggcgaaccttagaaatctgttgatccacttgggaggcttaacactattgacacttttgactgccagttagaaatgctactggtacctccgtccctgccttatttgtgcctgacggattcactttgagtaactggtgaagcggaaaatccacagcgtcaagaagaggccagcctccgcgtgttgggacactcggtcaagcaggaat

SEQ ID NO: 540694 - DNA, 994 bp, Homo sapiens
tgaggcctgcctgaccgaccttcagcagggctgtggacataccatgattctctcgcgtggcgtgtcgctggtgctgtctggccgtggtaccttgctagcctgcaatggattcaagttcgaaactactggcaacttttgaagagactatcatccagcgaggactaaagtccatcaaaaacatccgagaaaatgtaccaagtctatgaaaatggtagcggcagcaaacatatgcccgagctgcagagagagctgaaaccatgctcgactactactggcattgggatcatacagctcctgtatgaacaaacgctgactatcaacggcggccatgacagacaacgaagcaaacaccctccttactcgcgcgtgtccatcagatcgcaggcactgctgctggctgctcatctcattccatccacttgctcacaacacatgacaccgcgaggcttgcctacaacctcaacacccagcccctggcgcaacgcaagctcattgccttgcctcggccactcggctgaccacaccatccagagagccctacctctatcccgcacctccatccctgacccacgcttcccccgactggcccactccaaccgcacagctggcgcccgcaacagccccccccaccattctcctgcgacgcattcgtggttcaacatccatctcgacccactatgaaccttaccctaaccctccctgggcacatctgatccttctgccctttcaaccgtcatccccctcaaagtcctcctccacaccccctcccaccgctcctgtatcaatatcacccccttctaccgacccagcaccgccaaccatccacacaatcgtcacacccccccctaaaccaccccgacctgcacaagctcccggaccaagcccctccaaataacctccataacgaataccttgcactcaccgaaccgtgagaccaacaaacaggtgccaacgcacaaactcacactgggcccacacacccaccaacacaaac

SEQ ID NO: 540695 - DNA, 391 bp, Homo sapiens
caaagtgctgttctattcaatgtctgtaatctgtagatgacataaccggctaggtcagggctcgatctttaactccgaggtccatggtgtggcgctgggctgtctgcctgtggatgtcatatctgccatttagttttgaattggtccatctttggaagcagaaattgggcataagacaatatagtgagtggtctcctccgttagtggcgcatgcctgtaatcccagttacttgagaggctgagtcagcagaatcacttgaatccggtaggcgaaggctgcagtgagccgagactgcaccattgcactacagcctggtcaacaagtgcgaaccgccatcacacacgcaaacaaaggagcacactatggtaggctgcttggcagttaggagct

SEQ ID NO: 540696 - DNA, 130 bp, Homo sapiens
agagattacactttgaacctcatagggtactgctaaatatactttaaaaagtcatctaataaatgttttagaaatacaacagaatagctgatagaaaaaaaaattgataactaagttgcccgcaatcgaa

SEQ ID NO: 540697 - DNA, 362 bp, Homo sapiens
ccatgtgggcttcacgggttgaactcctgacctcaagtgatccaccggcctcggcctcccaaattgctgacattacaggcgtaagccacctatgcccagccttttgtccctgtatcttagtcagcccgtgaggtaaacatcaccgcagcttaagattaacgaaagtagggctcggatagctaacggttggccgcatagacaaagcaatggtagaatctggaagtgcagatatcgagcatcatggccacttactaatgtggtccattttaggtatttgacagattggtggaaaggcagcctagaggataatctctaatctaaacatttacattaactcagggatgcgcaacaggggggtaccg

SEQ ID NO: 540698 - DNA, 239 bp, Homo sapiens
ggtctggcctcggttattccgtatggcatcaaaggctgccttggtacagttgcccagtgtggcatgtgcagccccgggctgagtgtgtagcagtcatctgataccagccatcatgagcagcttcttaggcacaggtgctggagacgatgccagtgcccctggtgtgcagggatgatggcgtaccatgcacagagcctgcagctggccgtgtcactcttgtcaaggtgacatgtgttggg

SEQ ID NO: 540699 - DNA, 1108 bp, Homo sapiens
  misc_feature (559)..(559): n is a, c, g, or t
  misc_feature (562)..(562): n is a, c, g, or t
  misc_feature (590)..(590): n is a, c, g, or t
  misc_feature (605)..(605): n is a, c, g, or t
  misc_feature (626)..(626): n is a, c, g, or t
  misc_feature (639)..(639): n is a, c, g, or t
  misc_feature (667)..(667): n is a, c, g, or t
  misc_feature (677)..(677): n is a, c, g, or t
  misc_feature (695)..(695): n is a, c, g, or t
  misc_feature (707)..(707): n is a, c, g, or t
  misc_feature (716)..(716): n is a, c, g, or t
  misc_feature (724)..(724): n is a, c, g, or t
  misc_feature (726)..(726): n is a, c, g, or t
  misc_feature (759)..(759): n is a, c, g, or t
  misc_feature (766)..(766): n is a, c, g, or t
  misc_feature (786)..(786): n is a, c, g, or t
  misc_feature (802)..(802): n is a, c, g, or t
  misc_feature (809)..(809): n is a, c, g, or t
  misc_feature (812)..(812): n is a, c, g, or t
  misc_feature (822)..(822): n is a, c, g, or t
  misc_feature (832)..(832): n is a, c, g, or t
  misc_feature (845)..(845): n is a, c, g, or t
  misc_feature (850)..(850): n is a, c, g, or t
  misc_feature (853)..(853): n is a, c, g, or t
  misc_feature (858)..(858): n is a, c, g, or t
  misc_feature (871)..(871): n is a, c, g, or t
  misc_feature (877)..(877): n is a, c, g, or t
  misc_feature (882)..(882): n is a, c, g, or t
  misc_feature (891)..(891): n is a, c, g, or t
  misc_feature (893)..(894): n is a, c, g, or t
  misc_feature (909)..(909): n is a, c, g, or t
  misc_feature (917)..(917): n is a, c, g, or t
  misc_feature (937)..(937): n is a, c, g, or t
  misc_feature (952)..(952): n is a, c, g, or t
  misc_feature (969)..(969): n is a, c, g, or t
  misc_feature (991)..(991): n is a, c, g, or t
  misc_feature (994)..(994): n is a, c, g, or t
  misc_feature (1007)..(1007): n is a, c, g, or t
  misc_feature (1009)..(1010): n is a, c, g, or t
  misc_feature (1012)..(1012): n is a, c, g, or t
  misc_feature (1016)..(1016): n is a, c, g, or t
  misc_feature (1020)..(1020): n is a, c, g, or t
  misc_feature (1025)..(1025): n is a, c, g, or t
  misc_feature (1029)..(1029): n is a, c, g, or t
  misc_feature (1033)..(1033): n is a, c, g, or t
  misc_feature (1035)..(1035): n is a, c, g, or t
  misc_feature (1040)..(1040): n is a, c, g, or t
  misc_feature (1058)..(1058): n is a, c, g, or t
atcctcacctgtgtgctccagccccatctgtgtgctcatctccacctgtgtgctcatcctcacctgtgtgctccatccccacctgtgtgctcatccccacctgtgtgctcatccccacctgtgtgctcatccccacctgtgtgctcatccccacctgtgtgctccgtctcagaggtgggatgcagatcttcgtgaagactctgactggtaagaccatcaccctcgaggttgagcccagtgacaccatcgagaatgtcaaggcaaagatccaagataaggaaggcatccctcctgaccagcagaggttgatctttgctggaaaacagctggaagatgggcgcaccctgtctgactacaacatccagaaagagtccaccctgcacctggtgctccgtctcagaggtgggatgcaaatcttcgtgaagacgcgtctactggctaagaccatcgcccttgacgtggagcccagtgagcacgcatctgagaactgtcaaggcaaagatccaggacaaggaaggcattcctcctgagcagcagaggttgatctgtgtgcccgganaanacagctggaagatgggcgcaccctgtgntgactaacaacaatnccagaaaagatgttctcaccnctcgacactcttnggttgctccccgtccttcaagaggggtngcgggattgncaagattctcttccgtcnatatgacacctntgatctagngtgagagnanccattccacctcttccgtagcgttgggaggccncaggttntaccaccacacttctgacgnaattgtttcaaagcgncaaaagnatncccaaaagantaaaaggganacgggtcatttanctgcnctngtatnccaagacaagacncgtttngtatnctcttttgncnngagaaaataacaagncttggganaggaataggtgtgacgtcancccctcgtgtcttgnatgttatcacaacattncccaagaaaaaagaagttcgcnacnctttagacaaccntnngnttanctanccgtncttncaananaggtngggtggaatagacaaaanttctttcccgttagaaatgaacaccttcatctgagggacaaaagaagcca

SEQ ID NO: 540700 - DNA, 317 bp, Homo sapiens
gaccggtacagcaggactcgttcaggttacttcatggcagctatcccacagacgcagaagcgtgcgtgatactatcctcctagccaaatgctcaactaagaccaagtcctcgctggactgctcagggtgccagacctcatccattccaaaatatgcccggtgctatccgcccagctgctcctaggccaccatttagtactatgagaccagcttcttcacaggttccacgagtcatgtcaacacagcgtgtggctaacacatcaacacagacaatgggtccacgtcctgcagctgcagccgctgcagctactcctgct

SEQ ID NO: 540701 - DNA, 142 bp, Homo sapiens
ggccttttttggggtactgcccctgtgtgccttttgccaacgcctcctgtccccccctaagcctggtgggggtgaggggctccgggtcccttctgtatataactcccctcccccagaaaaataaatgtccctgccaacgtca

SEQ ID NO: 540702 - DNA, 1282 bp, Homo sapiens
  misc_feature (24)..(24): n is a, c, g, or t
  misc_feature (265)..(265): n is a, c, g, or t
  misc_feature (320)..(320): n is a, c, g, or t
  misc_feature (377)..(377): n is a, c, g, or t
  misc_feature (408)..(408): n is a, c, g, or t
  misc_feature (704)..(705): n is a, c, g, or t
  misc_feature (709)..(709): n is a, c, g, or t
  misc_feature (712)..(712): n is a, c, g, or t
  misc_feature (716)..(716): n is a, c, g, or t
  misc_feature (718)..(718): n is a, c, g, or t
  misc_feature (720)..(720): n is a, c, g, or t
aaattttataggacgattggcttngttgggtgagcttgttgtgtccctgtgggtggacgtggttggtgattggcaggatcctggtatccgctaacaggtcaaaatgcagatcttcgtgaaaacccttaccggcaagaccatcacccttgaggtggagcccagtgacaccatcgaaaatgtgaaggccaagatccaggataaggaaggcattccccccgaccagcagaggctcatctttgcaggcaagcagctggaagatggccgnactctttctgactacaacatccagaaggagtcgaccctgcacctggtcctgcgtntgagagtggtatgcaacgtgagacctgaccgcagacctcatctggaggtggagcccntgacacctcgaaatgtgaggccagatccagntaagaggctccccccgaccagcagaggctcatctttgcaggcaagcagctggaagatggccgcactctttctgactacaacatccagaaagagtcgaccctgcacctggtcctgcgtctgagcctgaggggtggctgttaattcttcagtcatggcattcgcagtgcccagtgatggcattactctgcactatagccatttgccccaacttaagtttagaaattacaagtttcagtaatagctgaacctctgttcaaaatgttaataaaggtttcgttgcatggtaagcataaaanncagnaanaaanananaaaaaaaaaaaaaaatgggggggggcgtcaaaaggccccaggggggccgcaataggaccgccgttgtttgttgacaatgggtgcggaccacaacaagcggaggggtgagataaaagggcaatgggcagggcgacggtgtaaaccccaccatcgagggccggcgggggaacaatcggcgactggcgaaagctgggcgaacgagcgaccgatgactgcgggggggcggcaaactatggggaataagccctccatcctaaaagatgaaggctttagcgaaaatactagcaaaagtcttctgcgcgcgtgaatacagggcgtggtgccaccaaacgccggcctataagacatggggctgcagaaacatgcggacaaccacggccaggtcatccgaggacatttgccccccgcgcgagatagaaaatccctgtcccaaaagaaaggccaccctgatggagatcacgtgaacggaggactgtggccgaggaagcttggactggcccgccgagaggccttgaagcagcagtactgtgaacaacgtgtcgcgcgcgatgacatgaccgac

SEQ ID NO: 540703 - DNA, 359 bp, Homo sapiens
aagtgtcagatccagagtctgaagtaagaccacgttctcttcttaggcctgggcaagttactcttccaggtcatcaattgtcataaccagtttagcaaccgtcctctctgcaaattcagcacgggtctcagcctcttacagtttgtcagacagaagtttcatttcttcttcatatttgtcctcctttacagaatacttttcagatgcaacctccagagatatcagatagtaagataacattcttgagttcttcttccaggtcaccacatttaagttcagacacctccgcacgctcctctgccctctccagctcaccctccaggatgaccagctaacaaactacctcctcgtatttgcgg

SEQ ID NO: 540704 - DNA, 1231 bp, Homo sapiens
tccttcgttactggagccaggcctacacgccagcaaccatgtccacgggacctgcagctggtatcgatcttggcaccaccatactcttgtgtgggtgttttccagcacggacaaagtcgagatacattgccaatgatcagggaccaccgaaccactccacccctatgctcgcctttacggacactgaacggttgatcgcgtgatgccgcaaagaatcaagctagcaactgaaccccaccaacacagccctccgactgacaaaccgctctgactggacgccgactcagacgactgctgctcgctccaggtctgactactgaaacacttgcaccctcctcatgcgtcggcgcacactgcactgctggccacgcgccccaaggctccaaacgctccccactaccaacgggcaccagcacccacacaacgcctaccatatcccaccacgcacggcagccctccctccctggctctcatcgcaccaccgcactcgacggcgcaacactcgacaagcaccgccataccctccgcggcaccgacgcgcccaccgcaagtgccacgtgcgcccgaccccgcgccaagccaccgacccacacgctgcacctcctccagagccaccagcgcatacccaccaggcatccccgagcaccccactctgcacgggctcaacaacagaccactgagcaacctcactacacagacacaaaactgcccgccaggcccacagccttacgcagcaaaagaacaacaaaggccccggcccaccaaagacaccgcgcctccccaaccggacacagagcaccgctgcgccactcttcgaagccgcaccaccctgccaaccaactggagcgactgcgccactcaccccaccgcaacgcataaaaggagctcaacacaacaatcgcccccaccacagccaccacccgccgcgacagcacgaccacaataaacgccacagcttcaccccactaattgcaccggcgtgagcgcacaaccagggggggggcacacgccccaggactgctgcgtaacgcacaaacaggtccagcgacttcgcagccggggcaggaaagccgcccatcacctggacgcagcacagacggaccggagccagacgccgcggagacggacaccagcgacacgcgccgcagcgcgaccgccacaaccgtgcaggccgcgagacggcacagcaacccgcaaggacaaaggtgcagaaaacaggagaacgcgcaaa

SEQ ID NO: 540705 - DNA, 1376 bp, Homo sapiens
  misc_feature (24)..(24): n is a, c, g, or t
  misc_feature (265)..(265): n is a, c, g, or t
  misc_feature (798)..(799): n is a, c, g, or t
  misc_feature (803)..(803): n is a, c, g, or t
  misc_feature (806)..(806): n is a, c, g, or t
  misc_feature (810)..(810): n is a, c, g, or t
  misc_feature (812)..(812): n is a, c, g, or t
  misc_feature (814)..(814): n is a, c, g, or t
aaattttataggacgattggcttngttgggtgagcttgttgtgtccctgtgggtggacgtggttggtgattggcaggatcctggtatccgctaacaggtcaaaatgcagatcttcgtgaaaacccttaccggcaagaccatcacccttgaggtggagcccagtgacaccatcgaaaatgtgaaggccaagatccaggataaggaaggcattccccccgaccagcagaggctcatctttgcaggcaagcagctggaagatggccgnactctttctgactacaacatccagaaggagtcgaccctgcacctggtcctgcggggggggggggggggggggggggggggcgggggggggggggggggggggggggcacctggtcctgctctgagaggtggtatgcagatcttcgtgaagaccctgaccggcaagaccatcacctgcctggaaggtggagcccagtgacaccatcgaaaatgtgaaggccaagatccaggattaacagaaggcatccctcccgaccagcagaggctcatctttgcaggcaagcagctggaagatggccgcactctttctgactacaacatccagaaagagtcgaccctgcacctggtcctgcgtctgagcctgaggggtggctgttaattcttcagtcatggcattcgcagtgcccagtgatggcattactctgcactatagccatttgccccaacttaagtttagaaattacaagtttcagtaatagctgaacctctgttcaaaatgttaataaaggtttcgttgcatggtaagcataaaanncagnaanaaanananaaaaaaaaaaaaaaatgggggggggcgtcaaaaggccccaggggggccgcaataggaccgccgttgtttgttgacaatgggtgcggaccacaacaagcggaggggtgagataaaagggcaatgggcagggcgacggtgtaaaccccaccatcgagggccggcgggggaacaatcggcgactggcgaaagctgggcgaacgagcgaccgatgactgcgggggggcggcaaactatggggaataagccctccatcctaaaagatgaaggctttagcgaaaatactagcaaaagtcttctgcgcgcgtgaatacagggcgtggtgccaccaaacgccggcctataagacatggggctgcagaaacatgcggacaaccacggccaggtcatccgaggacatttgccccccgcgcgagatagaaaatccctgtcccaaaagaaaggccaccctgatggagatcacgtgaacggaggactgtggccgaggaagcttggactggcccgccgagaggccttgaagcagcagtactgtgaacaacgtgtcgcgcgcgatgacatgaccgac

SEQ ID NO: 540706 - DNA, 815 bp, Homo sapiens
  misc_feature (411)..(411): n is a, c, g, or t
  misc_feature (625)..(625): n is a, c, g, or t
agcctgctactccagagtattgaagcataaggtagtgcactgcttttgaacatagaggttgatcttagtgaggagcatgctgtgatatatggatgcgtcctgtgtgactacaatatccagaaagagtgagcctgaatctggtagttctggcttagagttgggcatgcagatcttcgtgaagactctgactggtaagaccatcaccctcgaggttgagcccagtgacaccatcgagaatgtcaaggcaaagatccaagataaggaaggcatccctcctgaccagcagaggttgatctttgctggaaaacagctggaagatgggcgcaccctgtctgactacaacatccagaaagagtccaccctgcacctggtgctctcttcagaggtgggatgcaaatcttcgtgaagacnctcgactggtaagaccatcactctcgaggtggagcccagtgacaccattgagaatgtcaaggcaaagatccaagacaaggaaggcatccctcctgaccagcagaggttgatctttgctgggaaacagctggaagatggacgcaccctgtctgactacaacatccagaaagagtccaccctgcacctggtgctccgtctcagaggtgggatgcanatcttcgtgcaagacccgtgactggtaagaccatcagctctcgacgtggagccgagtgacagcattgcacgaatgtccagggcaagatccacgacacacggaacggcactccctactgaaccagcactactgtcgcacccgctcgccggagtcacatgctggacagatgcgcgctctccctgtcacgact

SEQ ID NO: 540707 - DNA, 662 bp, Homo sapiens
gctctcatgtgcctgctcgtcgcgtatgagatctgtctaaaggccttgagatggaaattgctgaagtaccgtcgtgattactgggggataacgatacgcgtcgacaccaggacatcttccaatcttagtgcacatatagacatcatccgcaacgtggatagggtagattcatcccgagaatggttgcaattggttgagtgtagtcaggaacaatggtgtggctcacagcgcgagactgcgagcccgtagtctcctgcaatagtcaccattcgggcgggataggcctgctgggggcataggttggcgctcacgtaacttaccattgcatctgtgctcacgtgccttctctgcaagggcggccgtatggattacaacaacctccacgcctctaatgcgcataaccaggggtttcgtccttcagtactccgggggggtggatggctcgggggctctccgctagttttggcggagaggcgcacgtggcaccattggatggcacgaatcgagtggagcggactcgtccgtctcgtccctgcgtgatggattgcgccaaggtgggtagccttgcttgcctgggtagcctgtgggcccgccctgtggggagtcgcccttggttggccagatcgatgcccttgtggggctcctcgagtgactgagaaccg

SEQ ID NO: 540708 - DNA, 1375 bp, Homo sapiens
  misc_feature (3)..(3): n is a, c, g, or t
  misc_feature (6)..(6): n is a, c, g, or t
  misc_feature (16)..(16): n is a, c, g, or t
  misc_feature (22)..(22): n is a, c, g, or t
  misc_feature (27)..(27): n is a, c, g, or t
  misc_feature (44)..(44): n is a, c, g, or t
  misc_feature (49)..(50): n is a, c, g, or t
  misc_feature (59)..(59): n is a, c, g, or t
  misc_feature (254)..(254): n is a, c, g, or t
  misc_feature (540)..(543): n is a, c, g, or t
  misc_feature (547)..(548): n is a, c, g, or t
  misc_feature (550)..(550): n is a, c, g, or t
  misc_feature (554)..(554): n is a, c, g, or t
  misc_feature (556)..(556): n is a, c, g, or t
  misc_feature (810)..(810): n is a, c, g, or t
ttnttntttttttttnttcatntcttntttaattatcccttatnttttnntatcctttnactctcgaggtggagcccagtgacaccattgagaatgtcaaggcaaagatccaagacaaggaaggcatccctcctgaccagcagaggttgatctttgctgggaaacagctggaagatggacgcaccctgtctgactacaacatccagaaagagtccaccctgcacctggtgctccgtctcagaggtgggatgcanatcttcgtgaagaccctaactgttaagaccatcaccctcgaggtggaagcccagtgacaccattgagaatgtcaaggcaaagatccaagacaaggaaggcatgcagaggttgatctttgctgggaaacagctggaagatggacgcaccctgtctgactacaacatccagaaagagtccactctgcacttggtcctgcgcttgagggggggtgtctaagtttccccttttaaggtttcaacaaatttcattgcactttcctttcaataaagttgttgcattccccannnnaaannanaaananccaagaataaaggaaaggcaattccgtccgtgatcagcagagtgtttgctcttgggcgcgcaaacagctggcaagactggtcgtaccctgtactgagctacgcaccatccagaaagagtccatttttgcacctggtactccgctctcatgatggtggcgatgcaaaatcttgcgatagaagacgcgtcaactgggcaattgactcagtcagcccctctgacgtgtcggaagccgcgaggttgagcacacaatcngcggacactgtcaaaacggctaaaagagtcccttttgacagatcggacaggggcatttacccttccacttgaacccctttcaaggaagggttttgaactcctgtgtggtctgagaaaaaataccaggccgtggtaaaggactggggcccgcatactcccgttgattccttggagcgtaccataacggtccctatgtacacatgtcagttcctaacacccctttgtctatcctcttggcgctggcgtcccggctcctttccatacaaaacaggtcggggggacaacttgcccaagaaatttttattcagggttgtaagtagaaacccgccttggaaccttgtggggtttcgaaatggaaaccccaatgtttcatgaacgattccgtgccggaacacgagtattgggtgaaagccccacagatagtgttggaatcctatcgtccaaattttttgcacaggaaaaactttggttcccacaacgcggcgcgacacaaaagagaacttcctcccaaggacactcacaactggggcaaacagcgggcgcaatcttctccccattatacccg

SEQ ID NO: 540709 - DNA, 184 bp, Homo sapiens
cattcattccatcgccttaacgattgcgcgtgttccgttcattatcccctggtacgtccatgtaattaacccatgttccacgacgcatacatcatcgtcaaatcaacacacaaagtccacatattttaagtacacccccctcatgcaccaatccgggggcggccgtccaagacagtgcgcgata

SEQ ID NO: 540710 - DNA, 1360 bp, Homo sapiens
  misc_feature (177)..(177): n is a, c, g, or t
  misc_feature (200)..(200): n is a, c, g, or t
  misc_feature (525)..(528): n is a, c, g, or t
  misc_feature (532)..(533): n is a, c, g, or t
  misc_feature (535)..(535): n is a, c, g, or t
  misc_feature (539)..(539): n is a, c, g, or t
  misc_feature (541)..(541): n is a, c, g, or t
  misc_feature (795)..(795): n is a, c, g, or t
atctttgtgaagactttgactggtaagattattatttttgaagtggagttgagtgatattattgagaatgttaaggtaaagatttaagataaggaaggtatccttcttgaccagcagaggttgatctttgctgggaaatagctggaagatggatgcaccttgtctgactataatatntagacagagtttatcttgtattnggtgctctgtcttagaggtgggatgtagatctttgtgaagaccttgactggtaagaccatcacctttgaggtggagcccagtgacaccattgagaatgtcaaggcaaagatccaagataaggaaggcatccctcctgatcagcagaggttgatctttgctgggaaacagctggaagatggacgcaccctgtctgactacaacatccagaaagagtccactctgcacttggtcctgcgcttgagggggggtgtctaagtttccccttttaaggtttcaacaaatttcattgcactttcctttcaataaagttgttgcattccccannnnaaannanaaananccaagaataaaggaaaggcaattccgtccgtgatcagcagagtgtttgctcttgggcgcgcaaacagctggcaagactggtcgtaccctgtactgagctacgcaccatccagaaagagtccatttttgcacctggtactccgctctcatgatggtggcgatgcaaaatcttgcgatagaagacgcgtcaactgggcaattgactcagtcagcccctctgacgtgtcggaagccgcgaggttgagcacacaatcngcggacactgtcaaaacggctaaaagagtcccttttgacagatcggacaggggcatttacccttccacttgaacccctttcaaggaagggttttgaactcctgtgtggtctgagaaaaaataccaggccgtggtaaaggactggggcccgcatactcccgttgattccttggagcgtaccataacggtccctatgtacacatgtcagttcctaacacccctttgtctatcctcttggcgctggcgtcccggctcctttccatacaaaacaggtcggggggacaacttgcccaagaaatttttattcagggttgtaagtagaaacccgccttggaaccttgtggggtttcgaaatggaaaccccaatgtttcatgaacgattccgtgccggaacacgagtattgggtgaaagccccacagatagtgttggaatcctatcgtccaaattttttgcacaggaaaaactttggttcccacaacgcggcgcgacacaaaagagaacttcctcccaaggacactcacaactggggcaaacagcgggcgcaatcttctccccattatacccg

SEQ ID NO: 540711 - DNA, 693 bp, Homo sapiens
  misc_feature (24)..(24): n is a, c, g, or t
  misc_feature (265)..(265): n is a, c, g, or t
  misc_feature (320)..(320): n is a, c, g, or t
  misc_feature (377)..(377): n is a, c, g, or t
  misc_feature (408)..(408): n is a, c, g, or t
aaattttataggacgattggcttngttgggtgagcttgttgtgtccctgtgggtggacgtggttggtgattggcaggatcctggtatccgctaacaggtcaaaatgcagatcttcgtgaaaacccttaccggcaagaccatcacccttgaggtggagcccagtgacaccatcgaaaatgtgaaggccaagatccaggataaggaaggcattccccccgaccagcagaggctcatctttgcaggcaagcagctggaagatggccgnactctttctgactacaacatccagaaggagtcgaccctgcacctggtcctgcgtntgagagtggtatgcaacgtgagacctgaccgcagacctcatctggaggtggagcccntgacacctcgaaatgtgaggccagatccagntaagaggctccccccgaccagcagaggctcatctttgcaggcaagcagctggaagatggccgcactctttctgactacaacatccagaaagagtcgaccctgcacctggtcctgcgtctgagcctgaggggtggctgttaattcttcagtcatggcattcgcagtgcccagtgatggcattactctgcactatagccatttgccccaacttaagtttagaaattacaagtttcagtaatagctgaacctctgttcaaaatgttaataaaggtttcgttgcatggt

SEQ ID NO: 540712 - DNA, 678 bp, Homo sapiens
atcctcacctgtgtgctccagccccatctgtgtgctcatctccacctgtgtgctcatcctcacctgtgtgctccatccccacctgtgtgctcatccccacctgtgtgctcatccccacctgtgtgctcatccccacctgtgtgctcatccccacctgtgtgctccgtctcagaggtgggatgcagatcttcgtgaagactctgactggtaagaccatcaccctcgaggttgagcccagtgacaccatcgagaatgtcaaggcaaagatccaagataaggaaggcatccctcctgaccagcagaggttgatctttgctgggaccagcagaggctcatctttgcaggcaagcagctggaagatggccgcactctttctgactacaacatccagaaagagtcgaccctgcacctggtcctgcgtctgagccttcgcctcagaggtggcatgcagatctttgtgaagaccctgacaggcaagaccatcaccctggacgtcgagcccagtgttaccaccaagaaggtcaaacaggaagacagacgtaccttcctcaccacagtatctaaaaagagccctccttgtgcttgttcttgggtgtgatgggggaggtgtcttagttttccctatcttttaagctgttaacaagtttcattgcactttgaataaagttcttgcattcc

SEQ ID NO: 540713 - DNA, 217 bp, Homo sapiens
ccatatcagcctcgctccatctgggacctcaaacacgaggccctaacgcatcctggtcctctccccagctccccagtacaccctccatccctcaccttcctccactctaagggatatcaacactgcccagcacaggggcccagcaatttatgtggcttattataccatttcttaatcaagatgcacatttcatgtcattctctcaatcaaagctctg

SEQ ID NO: 540714 - DNA, 1234 bp, Homo sapiens
  misc_feature (29)..(30): n is a, c, g, or t
  misc_feature (40)..(40): n is a, c, g, or t
  misc_feature (42)..(42): n is a, c, g, or t
  misc_feature (46)..(46): n is a, c, g, or t
  misc_feature (48)..(48): n is a, c, g, or t
  misc_feature (50)..(50): n is a, c, g, or t
  misc_feature (58)..(58): n is a, c, g, or t
  misc_feature (65)..(65): n is a, c, g, or t
  misc_feature (74)..(74): n is a, c, g, or t
  misc_feature (78)..(78): n is a, c, g, or t
  misc_feature (80)..(80): n is a, c, g, or t
  misc_feature (84)..(84): n is a, c, g, or t
  misc_feature (86)..(86): n is a, c, g, or t
  misc_feature (97)..(98): n is a, c, g, or t
  misc_feature (102)..(102): n is a, c, g, or t
  misc_feature (114)..(114): n is a, c, g, or t
  misc_feature (117)..(117): n is a, c, g, or t
  misc_feature (122)..(122): n is a, c, g, or t
  misc_feature (127)..(127): n is a, c, g, or t
  misc_feature (146)..(146): n is a, c, g, or t
  misc_feature (150)..(151): n is a, c, g, or t
  misc_feature (155)..(155): n is a, c, g, or t
  misc_feature (162)..(162): n is a, c, g, or t
  misc_feature (399)..(402): n is a, c, g, or t
  misc_feature (406)..(407): n is a, c, g, or t
  misc_feature (409)..(409): n is a, c, g, or t
  misc_feature (413)..(413): n is a, c, g, or t
  misc_feature (415)..(415): n is a, c, g, or t
  misc_feature (669)..(669): n is a, c, g, or t
gccttccttatcttggacctttgccaatnnaaaacggcantngggncntnttttgggncgctttntgtcggcantttnanaatngnagcacctcgtnnaaantctttgttgtgnaanccttnccccncaggtttatcccattttgnccannatanaattttnaaggcaaagatccaggacaaggaaggcatccctcctgaccagcagaggttgatctttgccggagaaacagctggaaggatggacgcaccctgtctgactacaacatccagaaaagagtccaccctgcacctggtgctcttggtcctgcgcttgagggggggtgtctaagtttccccttttaaggtttcaacaaatttcattgcactttcctttcaataaagttgttgcattccccannnnaaannanaaananccaagaataaaggaaaggcaattccgtccgtgatcagcagagtgtttgctcttgggcgcgcaaacagctggcaagactggtcgtaccctgtactgagctacgcaccatccagaaagagtccatttttgcacctggtactccgctctcatgatggtggcgatgcaaaatcttgcgatagaagacgcgtcaactgggcaattgactcagtcagcccctctgacgtgtcggaagccgcgaggttgagcacacaatcngcggacactgtcaaaacggctaaaagagtcccttttgacagatcggacaggggcatttacccttccacttgaacccctttcaaggaagggttttgaactcctgtgtggtctgagaaaaaataccaggccgtggtaaaggactggggcccgcatactcccgttgattccttggagcgtaccataacggtccctatgtacacatgtcagttcctaacacccctttgtctatcctcttggcgctggcgtcccggctcctttccatacaaaacaggtcggggggacaacttgcccaagaaatttttattcagggttgtaagtagaaacccgccttggaaccttgtggggtttcgaaatggaaaccccaatgtttcatgaacgattccgtgccggaacacgagtattgggtgaaagccccacagatagtgttggaatcctatcgtccaaattttttgcacaggaaaaactttggttcccacaacgcggcgcgacacaaaagagaacttcctcccaaggacactcacaactggggcaaacagcgggcgcaatcttctccccattatacccg

SEQ ID NO: 540715 - DNA, 900 bp, Homo sapiens
  misc_feature (900)..(900): n is a, c, g, or t
tcgtccactcagtgctcaatggtgcccaggctggagtgcagtggcgtgatctcggctcactacaacctccacctcccagccacctgccttggctcccaaagtaccgagattgcagcctctgcccggccgcaccccgtctggaaagtgaggagcgcctctgcccggcgccatcccatctaggaagtgaggagcgcctcttcccagccgccatcccatctaggaagtgaggagcgtctctgcccggccgccatcgtctgagatgtggggcgcgcctctgccccgccgcccgtctgggatgtcaggagctcctctgcccggccgcgacccgtctgggcaggtgaggagcgtctctgtctggccaccccgtctgagaagtgaggagacctccgcccgggcagccgcccctgtctgagaagtgaggagccccttccgcccggcgagtcaccccgatctgggcaggtgcggagccgtctacgcccgggctatgttgcccggtcggggcagggcaggtggggcggtcagccccccgtcctggcgttggccgccccgtccgcgaggtgcgcgtggcgggcggcatcatgcccccggcccgggcacagccgccccggtcctggggagcggcgtttgggggggcgccttctgcccctgggccggccccttacgtggctaccgatgatgggacgccccttttgcctgttccatcgcacccaattttgggagtgttgttccccagccagctcgatttggcgcacgggggccactgctgcgacttggcgcgtcttcggtggcataccacaccggcgggccacggtcggcgccagattcgacgacatcgggactgcttgcgcggctcctgctctccacgcgcagttgcccttgcgcgccttccatctgcgcctn

SEQ ID NO: 540716 - DNA, 1528 bp, Homo sapiens
cgagtgtcaggactgccccatgcgctccctgtttgtcgcgcctggttatactcgctattggtgtcgcctccccctggcgtgtgtagacgcgtcgtcgcgtcggctgcttagtgggtgcccagcttatggggtgtcgccacaaggctggctttcgtgatccagtgtgatgttgtcggtcgagttcgctcgtgcgtgtatattgttttcgtcctgcggtggggcgacagcacacgccggcgcgtccgcttctgttgctcgttgggcggtgtattgtaagttggtgggaacccccgcctttgttgtgtggtttgtggaggccttccgccccgcgggtgtgtgttgaggattgccttgccgtgtgtgagtcgctctttttgtatggtagggtgatactgcacctccacggtggggaggtacatttctgtcttgttggtgagggccaccaatggccggaaggggggctttgctcccagcggggtgccctccctcagcgcgccctgtctgtgtgggaggaccacaggggcgcgccttctgtcgcgcccaccgtggtggttctgtgttcttgtcgttggggtcctccactgcgagagagggggcaccagccggtggcctctttcttcgccgctttcacgctcgggagaagagtgtctctcgccctctggtagggggtgtgtcgcctctgggggggcgtttgggtagtaggagtgatatccacgcttttaatagagagggtgtaggacacacctcggtgatatggagagtgtggtggtgtgcagcacagccggttgggttgtgagagtgtgttgggacgactaaggtgtgtggtgtgtgtgtgtgtgcacagacaggttgcctcacggccgcgcgacgcggccctgtggtctctctcttcactacgctcttctgctcacatcaggaggtgttgtttcttctggcgcgccctctgtggctctcgtgagacactctcctacggcggcgctctctctctctctccccgtgagagcgccactctgtgtgtgggggggtgtcgcgactctctctgagatatgttttctcacacagagaggtgtgcgcgctctgtatgtctccgctagtgggcccctctgtgcgcccccctctctcttctgtgtgtggtctgtgagactgtggtgagagacacacaggtgctcatcgcgggcaccaccacacacctctctctctccacaggcccctctgacacagcacacagatgagtctatactgcgcaccctcgtgagacacagccactctctctctctctttgtctatagagaagtctctatatgttataattttgtgcacttttattaaccaccttctatgcgccctcgcgcctctttttgggggacacacaagttggtgtccctcgttcctctgcggggtggggccctcggcacgaaacccctgcctcgaagagaccccggttttctcgcccggtgcacgggccgcccccgcccccccccccctgcctcgcagttagttttaccattaaaaccttgttttggtttta

SEQ ID NO: 540717 - DNA, 377 bp, Homo sapiens
gggaggcgtctagaggatcccatgctcaggcaggtacgaggacttcaggtctaaaacaccaaaagcagatggcaacaaaagccaaaattgacaaatgggatcttattaaactaaagagcttctgcacagcaaaagaaactaccatcagagtgaacagacaacctacagaatgggagaaaattttggcaatctcctcatctgacaaagggctaatatccagaatctacaatgaactcaaacaaatttaccagaaaaaaacaaacagccccatcaaacagtgggtgaaggatatgaacagacacttctcaaagacttaactcttttttttatttttttttgggaaacagagtctcacccggtggtcccgggccggagag

SEQ ID NO: 540718 - DNA, 100 bp, Homo sapiens
catcgagctcggtccgccaagcactcttttcttcattggtcatgtatgacacataagctgtttttttctgcaattggccagccagactgacgaaattgta

SEQ ID NO: 540719 - DNA, 252 bp, Homo sapiens
ggggggaggggagggggagggggggggggggggaggggaggggggaggggaggggggggcgatgaggggggggggggaggaggagggggagtgggggggggggggggggggggggctggggcggggaggcggggagggggggacgggcgggcggagggggaagcgcgctcggggtcatacacctatcccccattctcctcctatccctcaacccggacatcattacgggggtttcctcttaaaaaaaaaaaa

SEQ ID NO: 540720 - DNA, 335 bp, Homo sapiens
  misc_feature (3)..(3): n is a, c, g, or t
  misc_feature (29)..(29): n is a, c, g, or t
  misc_feature (101)..(101): n is a, c, g, or t
  misc_feature (206)..(206): n is a, c, g, or t
ttnttttccaaacaaacatggattctctnccgggtgcagtgctcagcctttaataccagccttccactttgggagtctgaggtgggagtattgcttgagcncaagagttggagaacagcctgggcaacatggtgagacctggtctttacaaaaatttttttggccggacgcaagtgtcacgcctgtagtcccagcactttgggagnccgaggcgggttgatcatgaggtcaagagatcgagaccatcctggccagcatggtgaaaccccgtctttactaaaaatacaaagattagctgggagtggtgcgtgcgcctgtagtcccaactacttggg

SEQ ID NO: 540721 - DNA, 144 bp, Homo sapiens
  misc_feature (95)..(95): n is a, c, g, or t
ggcaccatgtgctggcacttaaactggactttccaggctgcagaactgtgagaaagaaatgttggtgtttataatccacccagtttatggtattntgttatagcagctcgaatggactaaggcacccagaataaaccatttttt

SEQ ID NO: 540722 - DNA, 817 bp, Homo sapiens
tcctggcagaaaccaacggggataggattcaaaactaggtgacaaactcatggagaaatccaacctgggctgaatggtctggagaggctggctactggttatcaactatcacaagataaagcactcgggttatcacctgcccatatcctccttagtggtcacccaagactatttggactctgatgtgggttaattggataacttttctggctccactttacaaggtttggtttcctacatcttattacctggggacacaaaatggggcagatgtggttggagagctggatggacaataaaacgggagaacatctagaggaatttggagacgggaaagaaagccaaagctggattttccaatctctatggctggatctccaacctggcagaaaaagctggatatataggaaatcttcttccatattgtgatgaagtcactccatttacgacataacacacaagggaatcaccgtggcttttttttttaaacccaggaagagttgtgcgggggacctgtgcccaatccggtgtgatacagatccgtgagggaataatcagggatgggcccagtggcagtgtgtcaactatcacaaggtaggcgcgcgcagaattttggaggagggagaccctccaaatttctgggagaacctttgtgttggccactcggaaaaacaggttccggggaattccactattttcacatgtggaagggggccctatggggagtgtccccaagatgtccagatccgaccttattctctcccaaagggtcaatggggttggtacattgtagcagggtgtattttccaggtcacat

SEQ ID NO: 540723 - DNA, 902 bp, Homo sapiens
tgctcagtggtctcattggcgcgaggctgctgccccagggcccatgtgccctgatgggtgtttacaccctcccgcggctattttgccagcttggtgcccgcccgaccccggggaatctcttttctcgggatagccccggggttccccccccgcccccgtgctcctttcgcgccgtttgcaggactttcttccccgtcagcggttctccgccatgcacgcgtttcgagacccccacgggagcttacacccggccccaaggccctccgatagaactccccctcttccttgggccaaaatggcggttgatattcctcttgggccaacagtctccccccggttacaccatttctgtagcccacgattgatgatcaccagactgtgggaccctcccccgacttgtccccccccagcagggaaccaccacaacgagaccctaagtgcaaacaccactgaggacagtctaatttgccacacacttttccccatataacaaaaaggggcaaattccgtggctcctaatctcccccccctgattttttctaagaaatcggccctttcgtgataaaaaaagaagtaatcttcccccactgcccgcccctggcaagaaacaacacccgggtggcccctcgtcccacaaaaaccccggcccctttcctttttgctcaccatgttcccctcactctctttatcccccgactctcccctccactacaccccctatttcctcgccttacgcgctataaaaccacgatccagtagacttctatcatccgcactacactatagccccgcctagaggtcaacccctagccccctcgacccgaggctcatgtcgagctccacttgtagcgagcaaccgtcgcggcataacttcatatagcatcacaggataagaagtacat

SEQ ID NO: 540724 - DNA, 811 bp, Homo sapiens
gtctccttgcggtttccttatcgcacgtttccgaaccgaggggattggctactcgcctttggcttggcggtctcttgtgctcggtggtgtccgaataactgctggaaggcccctcggtttctctggaggggagcggggcggtagcgagtattatgtgacgtggagcaggctgctagcaacagttcggaggtgcctgtagtggctgattaagaaacgagtttgtaacagattgcctgggtgatggagtgtgacgttccaaaaccaggattttccttgtagtctgtatttgtacgcaggcaatgtactaggacgatatgacttatagcacagctgcttttggccactgtcctctggaatggctggaggagtatatattgttcaaccagtattcgaacagtatgccatgggatcagaaggaattacacagaaaagatgcacgtggtacaagaatcagaagacaagaacacgtttatactacatggccgttaggcctggcgcagtggctcacgcctgtgatccagcactttgggaggccgagcggttggatcaggtggtccggagttcaatacagtctgacaatcgtgaaccctgtgctatagaaccactaagtcgccaggctggggaatagcctgaatccactagtggaagctgagcagagattcttgaccggaggccaggggacgcacaacacgtggcacggtgcaaacaccttaacagggagacccaccggacatctggtgtaccactcccatcaaagtcaggggtcacaaccggagccgggggaaacactcatgacgcacgcaccaccaac

SEQ ID NO: 540725 - DNA, 368 bp, Homo sapiens
ggccagctgatattgtggaggcgggcgtggtggctcacacctgtaatcccagcactttgggaggccaaggcgggtgaatcatctgaggtcaggagttcctgactaacctgggcaacatggtgaaaccccgtctctactaaaaatacaaaaatcagcctggtgcggtgatgcgcacctgtggtcccagctactcaggaggctgaggcaggagaatggcatgaatctgggaggcagagcttgcagtgagccaagatcacaccactgcactccagcctgggcgacagagcgagactccatctcaaaaaaaaaagaatcagtaaaagatataaaggagaaaaggactgaaccacaaataggcaatcaagctt

SEQ ID NO: 540726 - DNA, 239 bp, Homo sapiens
  misc_feature (209)..(209): n is a, c, g, or t
tacattccatgctatcaaaaatggcaaagaattggaaaataacattatgccaagaagacgtcaaggtgctatttcaaactttaaaaaacaaaacaaaacagatgccacttttgacccatgagagagaaaatattcattattaaagtagaccagactgttcctcagtcccttaaacactctacagtttgaatgatcaaaaaagcctcttnagtgtgcatgtccaagcctgacgttcctgc

SEQ ID NO: 540727 - DNA, 907 bp, Homo sapiens
  misc_feature (23)..(23): n is a, c, g, or t
  misc_feature (66)..(66): n is a, c, g, or t
  misc_feature (93)..(93): n is a, c, g, or t
  misc_feature (119)..(122): n is a, c, g, or t
  misc_feature (125)..(125): n is a, c, g, or t
  misc_feature (128)..(128): n is a, c, g, or t
  misc_feature (133)..(133): n is a, c, g, or t
  misc_feature (219)..(219): n is a, c, g, or t
  misc_feature (266)..(266): n is a, c, g, or t
  misc_feature (283)..(283): n is a, c, g, or t
  misc_feature (303)..(303): n is a, c, g, or t
  misc_feature (305)..(306): n is a, c, g, or t
  misc_feature (312)..(312): n is a, c, g, or t
  misc_feature (318)..(318): n is a, c, g, or t
  misc_feature (340)..(340): n is a, c, g, or t
  misc_feature (349)..(350): n is a, c, g, or t
  misc_feature (358)..(358): n is a, c, g, or t
  misc_feature (643)..(643): n is a, c, g, or t
  misc_feature (710)..(710): n is a, c, g, or t
  misc_feature (907)..(907): n is a, c, g, or t
acagggttggtgggaatgtaaantggtacagctgatttggaaaacagtctggcagctcctcaaaancttaaacagttattatataacccagcnattccacgcctgggtatataccaaannnnccnganaccangtccacacaaacccttgtatacaaatgttcacagacgcattatacataatctccaaaagtggaacgggcccaaacatccatcagtngaggaatgaataaatattgtctgtctagacagtgaattactattcancaataaaaggggatgangtactgatatgatgtgtcangnnagattntttttnttttctttatgctttttgtttnttgccaatnncaaaatancccacacattttatgatttcatttataagatatatccagcataggcaaatctataaagacaaagtagatgagtagctgcctcagggtggttgttaggtaatggggagtgactactaagtatgagagtatgagatttctcatggagtatgacatttctattctttatttcggtaaaatattcataacaaatttcaccatttcaaccatttttaactgtgcaattcagtggcattaagtccattttttctttattcttcttcccactatcatttctaaactcatcanggcaggcatggtggctcacactgtagtcctagcactttgggaggccgaggcgggcggatcacctggngtcaggagttcctgaccagcctggccaacatggcaaaaccctgtctctactaaaaatacaaaattagctgggcatggtggtgtatgcctgtaatccccactactcagggagctgaggcaggacaatcacctgagcccgagaggcagagactgcagtgagcagtctcaaattccaggctcaagcgatcctgccatctn

SEQ ID NO: 540728 - DNA, 1263 bp, Homo sapiens
tggggggaaaaaaagggggggtgtataaaaaaaaaaaagtgttttttttttttattattatggagggaaaaaaaaaaacattttttctataaaagagaggagggggggggggttttttttttttatatataaaagagaataaaaaaaaaaaaaaagggggggggcgcaccatacaaaaaatatacccgggggggcgcgcacaaaaataccgggcgccacccccattttgtgtggtgaaaaggggcggcgcccacacagaggggcggcgcttttaaaaacagaaggaggggcgggggcggtgaatatataaacagcacgcggcgcggcggcggcgaagaccacagaggcaagcacgagcgggagacaacagtgagaggaggaacggagaacctctctagtgcgaggggagggcgtgcgcccaacagagggcggccacacaacacctcacaccaaagaaaatataataccccaaaccgcagagaggagagagcatacaacacaactaacaagaaggaaggatataacaacggcgcggcagacaccacacacgagcggaacacactagaggaggagcaggcgcgagaacaaacagggcaggcgaaaccgggcacagacactcgacacaaacaacagaaataatcaatacacgagagcggagagacaaactatagagcagaaaacacacagacgaacagacaacacacaccaacacgcacgacacaaaacaaacaacacaaaacaaacacaacgaaaccaagcaacaaaaacacaaagcaacacaacaaacaacgaaaacaccacaaagaaaaaaaaaaggaaaacagaccaacagaaagggcgaaaagaagcagcgaacgcaacaaacacaacaacggaaaccaaagagaaaagcagcaagaagagacaagacaacaagaaacggaagtaaagaagcaagagagacgagaaggaggaagagacgggcgaagggctaggaaagaccaaaagagcagagaaggagaagaagagaaccaaacgagaaaacacgaagaacgaaaaacgcaaccagaaccaacaatcaaaagagaggaggagaaaaagagaacaaagcagaacgagacgaacgacaaggaaggagaaagataagaaaggcagaggaaaagagaaataagaacgagcaagaagaagaagaagggacagaagagggagaagagagagagaagagagaaaagaaaaaagaaaagaaaaaacacagaagagaacgacaaagacaaacaacaaaga

SEQ ID NO: 540729 - DNA, 286 bp, Homo sapiens
  misc_feature (87)..(87): n is a, c, g, or t
  misc_feature (114)..(114): n is a, c, g, or t
  misc_feature (147)..(147): n is a, c, g, or t
atttttttttaaggagaatggcccagtctttttctaagtccatataggggaggtgatagtattgttttggtgtaaattatgtaatgnaaatttttttaattttcgctttaaaanttttttattttgttttattttgaatgatgagcnttggtgcccccccttcccctttttttgtcccccaaattgagatgtatgaaggtttttggtttccttgggagtgggtggaggcagccagggtttacttgtacattgatttgagaccagttgaataaaagtgcacccctta

SEQ ID NO: 540730 - DNA, 183 bp, Homo sapiens
ccgagatggcaccactgcactccagcctgggcaacagagcaagactctgtctcaaaaaaaaaaaaaaaaaaagaaggtgtgtgtgtgtccttttttcttctcattctattgacagctggtttggccttgttttccattttttaatatttctgatgattgtcccatttcaatacgcaaagagct

SEQ ID NO: 540731 - DNA, 612 bp, Homo sapiens
  misc_feature (1)..(1): n is a, c, g, or t
  misc_feature (555)..(555): n is a, c, g, or t
ngcgtctgtgaataatgctgcaagtgaagcatgagcgtacaggatacctcaagcatactgatttcatttcctttggatatatagcccagtagtggaatagctgaattgtatgataatcgctattttcaagttttttgaggaatctccatactgttttccatagaacagtagtgtacaggccaggcccggtggctcacgcctgtaatcccaaaacttggtggggggccgaggcaggcgatcacgaggtcaagagatcaagaccatcctggtcaacacagtgaaagcccatctctactaaaaatacaaaaaaatgagctgggtgtggtggcacgtgcctgtagtcccagctactcgggaagctgaggcaggagaatggcttgaactcgggaggcggagattgcagcgagcccagatcacgccactgcgctccatcctgggcaacagagcaagactctgtcctcacaaaaaagaaaaataagtaaataaactctgtcttaatcactcagtaacttatgtatacttctctttggttggaaatgtagtactgctcatatntcagaacaccgtcttcgagggtgttctgaaatattggtgttgaggctggtggtgata

SEQ ID NO: 540732 - DNA, 925 bp, Homo sapiens
gccggctcagcctctcacttgtcagaggccggggaagagaagcaaagcgcaacggtgtggtccaagccggggcttctgcttcgcctctaggacatacacgggaccccctaacttcagtcccccaaacgcgcaccctcgaagtcttgaactccagccccgcacatccacgcgcggcacaggcgcggcaggcggcaggtcccggccgaaggcgatgcgcgcagggggtcgggcagctgggctcgggcggcgggagtagggcccggcaggaggcagggaggctgcagagtcagagtcgcgggctgcgccctgggcaagaaggccgccctcggtccagcaaaacctgtgctgccaccggccggatgaagcccgcgtggtctcgctgctgtgggcgccgcgcttgctctgcgggccaacgggaagccttctgccggccgcggggtcaggcgggccacaaaggtgtgtttggctgactttcaaggcatcccttgtacaaaatgcctacttccatgaattgtccagccgaagttgagctttcaggagggcacgcctggctgtgtgaagaagtgagggaaggagtcctcctcagctttggaaaattgaagcagaaccagaaagttaataggagaggcatgtgtgcaaaaactggacaaaaccccgggacagggattctgatgggattctgaatagggccttgaggaatggagatgccaaacctctggtgctgccagatctctaccagtgtctggatggaagcatccccagtacggacctggtcaaaatgaaccttctgggagtggacagtgtgtgttggtgttcaccaccatgcaacctggcttggggccctcctttcactggaaggacacgggcgatgagccctttttggtttacacgattatccacacctcttaaaagtttttatacacga

SEQ ID NO: 540733 - DNA, 729 bp, Homo sapiens
ggagtacactctaaaacactgatcaatagtatattatagtaagatacagtaaaccagtaacacactttattatcgattatcaagtattatgtactgtacagaatggtgtggtgctgtgctatccaggaacacatttattatcattatcaagtattgtgtactgtacagatatgatgtgtgctgtgctatccaggaacacatttattatcataatcaagtatgtgtactgtacagaatgatgtgcgcgtgtgctatccaggaacacatttattagtcattagtcaagtattgtgtactgtacagaatggtgtgcgcgtgtgctatccaggaacacatttattatcattatcaagtattgtgtactgtacagaatggtgtgcgctgtgatatccaggagacacatttattatcattatcaagtattgtgtactgtacagaatggtgtgcgctgtgctatccaggaacaagtttattatcattatcaagtattgtgtactgtacagaatggtgtgcgcgtgtgctgttaatgcaacgtggcgagcacaggtagacttttacacgaagctatcacttagacacactgcagtagcaatagcaagtcggccatctaggcaacatgtttctcagggcccattccttatcatcttcatgggaccgacatcctatatgcagtgtgtcaattgtaccaagattgtccttatgcgatgccctgacttattatttgcaagg

SEQ ID NO: 540734 - DNA, 994 bp, Homo sapiens
ggatgagatgatcagggaggctgagattcgatggcgatgggcatggtcaattatgaaggagtttagtacagatgatgactgcaaagtgaaggccccccgggcagctggcgatgcccgttctcttgatctctctcttctcgcgcgcgcacatctctcttcaacactcccctgcgtacgcccggttctagcaaagaccaattgattgacgtgagaatctgataaagcaacaggtagagattttgtcccaaaggctgcgatgatgtgctctttctctcttcttgccctgaggtctctctcgggtatgccccctcatctcttccttttgccctcgcctcgttcctatccatcgtctttcagaggcctgatgcgattcatgaatgttgagagccctcccacaggatccccttggggagcctctgccctcctccagcccggatggcatctcctccatctgggtttgtgtacctcttgtttcgtcatcttatttcgggtgctgtgggtggctgcacaacccctgtacctgggacctgctgggagaggacaagaggccctcccccaggcagaagagcatgccctttgccgttgcatgcagcattgcctgtgataccacgtgcagatcccagagctgtaggggcaggcgtgccaaaaagaggcattcaaaggactgaccggggcgttgaggaatagtgggttgactggattgtggccatgaggcgtccaagggaccaggcacagaaggggactgccgtggacaacaatcacatcccaatggctgttgtccgaaaccatggaatgggttctgaagatatgccgggcggggacggcattgccccccgcaattgaatcgccaactaaaggtcgagagctaaccgggaaaaccaaggccacaaaaaaccacgcaaggcacaaaagaggggagacggagagacgacaatccaccgaaaagaagaaaagagaaaaaaaacagaatcagaagagaaacacaaacaacacg

SEQ ID NO: 540735 - DNA, 200 bp, Homo sapiens
tccgggatatacctttcctttcccccttgggaataatacccagggaaagagagaggtaggtacgggaccggccacccaccagccaatatattggcggccggcgggaatatccacattaattcctaatggtggtctaatcaggaattcggctattggaaccttcctcaaaccaaggaaacctttccggatgggaaccccat

SEQ ID NO: 540736 - DNA, 992 bp, Homo sapiens
  misc_feature (843)..(843): n is a, c, g, or t
gcaagaacctagggatcagagtgcctgcgggaaatatcccgtcggtatcatcatcggtgctggatagaaggataaagcagtcaggcattgtgcgccatgcggtgggaccacctagcaatctagaccgatcacgtggatattcatgcttgcctctataactcctcgcgccacatggcgctgccagaccagggtgcgctacatgcgaggttcgagctgcttcagcaatgaacctcaaccgtggcaagtccccatcggacttggatgacacgtactgacgacacagagctgagagcagtgatggaaatctggggggcctgaaagcacgtcatccacgaagcgtgaagtaacgtggtccgcggctgaaagggagacgtgagcgtatcccttaccaaaggggcctgggcatgcctgtgcaattctggtccttggttaattatactgtagtatgtactaactcgtgcagcgaattgtgccaggttggtcgtctaccatcgactcatggctggagagggcttgatgagacctgaaggttatacggataccgaaggcttgtgagacaaagtcctcggcgcgaaggcaagattttagggtccgtgcttgggtctagagcgcgtcactacgctagcgctggtggagtcctcacttcatacaagactccacgtgttgcgattaccactttgattcttgatctagggctgttttgtctccaggctcaagtgaaaaccctgaaagttggtttggatcctgcaagggaattaggcgcgcctctagggagtccctgggttcgtcgagaccgaagaaggtcgcctaggattaggtgatccgggatcgatgaaaacgagntgtaaaggccctggggtgcaaggcaagagctgttgagctaggtcgtccacttgaatggcctttgagatgggccacatacaatgagctgggaagaggccacgggagcgggctgcaagaagaacctgggggcaagcaaacacctcgattta

SEQ ID NO: 540737 - DNA, 281 bp, Homo sapiens
tctcatcatccagtccccgtctgggtggtctgtcgtcatctgtgtgacgccagcttcccctgccatcatcaccaattcgcctgggaggcctatcatcatctgcattacgccaggaaggacggtcatcatctgttcctctacgagaaaatctatcttcatcgggaccacgtctgggccctctgtcatcatccaggccacgcctggggatacgatcatcatccggtctaagagaagactctctctcttcatcgtcaccccccaagcgcctcagccgtcgacgc

SEQ ID NO: 540738 - DNA, 117 bp, Homo sapiens
tctacatgtgtaccgtgcacaccaatgaacattcatcaactggccctggagtgaattcttccgaaccctcatagcggcactcctctacctgatcacctccattgttgtccttgtttg

SEQ ID NO: 540739 - DNA, 87 bp, Homo sapiens
tcgatacggcttttgtttcattaagtatgggtcttattcagaagaaatgggcagtgtttgttgttcaatcccttctgtcgtcttctc

SEQ ID NO: 540740 - DNA, 436 bp, Homo sapiens
aactgctgacttcccagttttgctgagtccagcttgccaagcataatagggggccaggtgcagtggctcagcctcccaaagtgctgggattacaggtgtgagccacagcacccagcctgggacatgtgttttaagggtgcaggccactagctaagcaatgaacatgtccttatctcagcagccttttgctacctcttcttttgtggtatgtccccatgtcactcagccattaccagtctcagccacaggttcagaacaatttgtggaatcccctattagcttctgaaatatttgtcactacaatgagtaggtgcccaaactaaacacagaagatttctgtttccatgacgtgcccatgaaaactgaaaatttcgagccagaaatcaaatgtttacaaatgcaaataaaattctgtgtttgttgtaccttttaaaaa

SEQ ID NO: 540741 - DNA, 214 bp, Homo sapiens
tacagagtctttgcaactcggcatttctatgaggttatcaaccacaccttgactcgtctttgtgtgtgtgtgtctgtgtgtgtcttgtgtatagtttctctgtgattggaaaccctgtgcgggatgacataggagaatctgttccattagtcttgtctcctaacaggataagttgaggcaatgtgaaggggaatgtgtgcccttagagaaactg

SEQ ID NO: 540742 - DNA, 495 bp, Homo sapiens
  misc_feature (1)..(1): n is a, c, g, or t
  misc_feature (20)..(21): n is a, c, g, or t
  misc_feature (358)..(358): n is a, c, g, or t
  misc_feature (387)..(387): n is a, c, g, or t
  misc_feature (402)..(402): n is a, c, g, or t
ngttcgtaactcagccactnnaagggaagctccaaatccatcacagtcaaagtctctgactggatattaccctgaattctactagttcctccaattccattttctcccatggaatcacgaagagcaagacccactctgttccagaagccctataagctggaggtggacaactcgatgtaaatttcatgggaaaacccttgtacctgacatgtgagccactcagaactcaccaaaatgttcgacaccataacaacagctactcaaactgtaaaccagggtaacaagttgatgacttcacactgtgggacagtttttccaaagatgttcagaacaagacttccccattcatgataagggntcccacccctctttaacttgttccttggntcatggcctggcctnttttcacttgggcagggttattgcagttcattaggattttcacatgtagtaggtttctgaggggttaaccaccagagttttcaggttatgtta

SEQ ID NO: 540743 - DNA, 103 bp, Homo sapiens
catacctctttcccgaatcccgcagtattgtgaattgctcagtaagaaaaatgtgtctgtgcacaacaggagactagaaagaaacctcagtgcctccagtgaa

SEQ ID NO: 540744 - DNA, 252 bp, Homo sapiens
  misc_feature (163)..(163): n is a, c, g, or t
ggataagagaggtagaggtatatgtcaaggcagagccctatgaggaaggaagagttttcaaagaatacgaggaacatagtgctgagagtggggctgccttcagcaccgtagaccgaaggtagaggaggatatttcgcatgtgggaggtcctgtgtgcgttcantccacccttttctgcctgcttcttcctcgaagtgcctcaacctgtagatgctcactctcctgcccttccctcaacccatctgggtctaa

SEQ ID NO: 540745 - DNA, 392 bp, Homo sapiens
ggagagagagagaactagtctgagttttggtttttctctttttaaaaccctcatcaatagatggagcactctacagaaatagtcaaaccaaatctacaaaatgtcagtatcaggcgggggttcaaagccaaagtgatgttgggactgtaagggtgaacatattagtgggcggatgacagcagataagtgaggaaagttgacccaactaattgacgtgaagtccggggaaccctgtggctacaaaaaatgttgagccgtaaatgccgtcggaaatggtgaagggagactcgaagtactctgaggcttgtcaggagggtaaaatagagacccagtaaaattgtcaatgagcagtgcttgaattattgggtatcggtggtttctattagactatg

SEQ ID NO: 540746 - DNA, 893 bp, Homo sapiens
  misc_feature (63)..(63): n is a, c, g, or t
  misc_feature (76)..(76): n is a, c, g, or t
  misc_feature (98)..(98): n is a, c, g, or t
  misc_feature (104)..(104): n is a, c, g, or t
  misc_feature (108)..(108): n is a, c, g, or t
  misc_feature (115)..(115): n is a, c, g, or t
  misc_feature (122)..(122): n is a, c, g, or t
  misc_feature (140)..(140): n is a, c, g, or t
  misc_feature (144)..(144): n is a, c, g, or t
  misc_feature (162)..(162): n is a, c, g, or t
  misc_feature (174)..(174): n is a, c, g, or t
  misc_feature (183)..(183): n is a, c, g, or t
  misc_feature (186)..(187): n is a, c, g, or t
  misc_feature (202)..(202): n is a, c, g, or t
  misc_feature (205)..(205): n is a, c, g, or t
  misc_feature (209)..(209): n is a, c, g, or t
  misc_feature (212)..(212): n is a, c, g, or t
  misc_feature (220)..(220): n is a, c, g, or t
  misc_feature (233)..(234): n is a, c, g, or t
  misc_feature (236)..(236): n is a, c, g, or t
  misc_feature (246)..(247): n is a, c, g, or t
  misc_feature (272)..(272): n is a, c, g, or t
  misc_feature (274)..(274): n is a, c, g, or t
  misc_feature (295)..(295): n is a, c, g, or t
  misc_feature (303)..(303): n is a, c, g, or t
  misc_feature (306)..(306): n is a, c, g, or t
  misc_feature (308)..(308): n is a, c, g, or t
  misc_feature (312)..(312): n is a, c, g, or t
  misc_feature (330)..(331): n is a, c, g, or t
  misc_feature (333)..(333): n is a, c, g, or t
  misc_feature (343)..(343): n is a, c, g, or t
  misc_feature (348)..(348): n is a, c, g, or t
  misc_feature (372)..(372): n is a, c, g, or t
  misc_feature (383)..(383): n is a, c, g, or t
  misc_feature (433)..(434): n is a, c, g, or t
  misc_feature (436)..(436): n is a, c, g, or t
  misc_feature (450)..(450): n is a, c, g, or t
  misc_feature (455)..(455): n is a, c, g, or t
  misc_feature (462)..(462): n is a, c, g, or t
  misc_feature (475)..(475): n is a, c, g, or t
  misc_feature (487)..(487): n is a, c, g, or t
  misc_feature (493)..(493): n is a, c, g, or t
  misc_feature (497)..(497): n is a, c, g, or t
  misc_feature (500)..(500): n is a, c, g, or t
  misc_feature (508)..(508): n is a, c, g, or t
  misc_feature (511)..(511): n is a, c, g, or t
  misc_feature (514)..(514): n is a, c, g, or t
  misc_feature (521)..(521): n is a, c, g, or t
  misc_feature (539)..(539): n is a, c, g, or t
  misc_feature (542)..(542): n is a, c, g, or t
  misc_feature (548)..(548): n is a, c, g, or t
  misc_feature (557)..(557): n is a, c, g, or t
  misc_feature (571)..(571): n is a, c, g, or t
  misc_feature (574)..(574): n is a, c, g, or t
  misc_feature (576)..(576): n is a, c, g, or t
  misc_feature (585)..(586): n is a, c, g, or t
  misc_feature (588)..(588): n is a, c, g, or t
  misc_feature (606)..(606): n is a, c, g, or t
  misc_feature (612)..(612): n is a, c, g, or t
  misc_feature (623)..(623): n is a, c, g, or t
  misc_feature (633)..(633): n is a, c, g, or t
  misc_feature (642)..(642): n is a, c, g, or t
  misc_feature (652)..(652): n is a, c, g, or t
  misc_feature (655)..(655): n is a, c, g, or t
  misc_feature (661)..(661): n is a, c, g, or t
  misc_feature (664)..(664): n is a, c, g, or t
  misc_feature (669)..(669): n is a, c, g, or t
  misc_feature (682)..(682): n is a, c, g, or t
  misc_feature (697)..(697): n is a, c, g, or t
  misc_feature (705)..(705): n is a, c, g, or t
  misc_feature (713)..(713): n is a, c, g, or t
  misc_feature (720)..(720): n is a, c, g, or t
  misc_feature (726)..(726): n is a, c, g, or t
  misc_feature (731)..(731): n is a, c, g, or t
  misc_feature (733)..(733): n is a, c, g, or t
  misc_feature (739)..(739): n is a, c, g, or t
  misc_feature (741)..(741): n is a, c, g, or t
  misc_feature (747)..(747): n is a, c, g, or t
  misc_feature (752)..(752): n is a, c, g, or t
  misc_feature (765)..(765): n is a, c, g, or t
  misc_feature (769)..(769): n is a, c, g, or t
  misc_feature (771)..(772): n is a, c, g, or t
  misc_feature (775)..(775): n is a, c, g, or t
  misc_feature (777)..(778): n is a, c, g, or t
  misc_feature (789)..(789): n is a, c, g, or t
  misc_feature (798)..(799): n is a, c, g, or t
  misc_feature (808)..(808): n is a, c, g, or t
  misc_feature (885)..(885): n is a, c, g, or t
ggcggcactgaagtgtctactgacattaggaagatggtgccccggccttggagtggctccccnggcccggagcgcncgccgccttcgtccccggcgtncccccngacnctccccnatccggnttccagccgccccgcgcnaccnccgccccgcccccatgcncctccccccgcngcccgcccngcnncggcccgcccccccncgncccncgncccccacncgccgaaccccgnncnacgcaccccnncgcggcgcgatgggacccccctgancncactccggtagccaccccctnacccacgnccncnatgncgccccccctttgccctnncnaccccccccnccttnccccccccggcgcccccgcctctnccccccccccncactgcccccccacccacccaccccccacccacccaccgcgcacccttcnngnccccgctcgatccnccgcnccttccnacccccctccccnccccctgtgggnccggcnctgncgnctaccccngtnggnggcctgncgcgctggatgttcttcnggngccganccgccctgngcctgggtgggctnttncncgaccgctnnanccgccgccttttcactgncgcctncgagggatcgncccctccacncactttttncgcaaccccnccntttagnctnggacnttttaggtgttcnggcacaatgggtctnatgtttcnacctgagntgccgantcccanatttntnttccgncncattcnttttnggggttccccttnttcnannatntnnggccccgcggncctccactnnccgcacacnattcgcacccactttccaaccgccgtggggcccccccccggcgggggcgcacctcgtggcccaattgggggcacttntcctccca

SEQ ID NO: 540747 - DNA, 402 bp, Homo sapiens
tacaagtacaacgcatcaatcttttataacactaaattatgtctgagcagttaaatgagagcagactatttatatttccggctcttcttatcttacaggcagatctcttcaattctctaccctggtttggtacaccagactagtgcccctgtttgtggtgctgggcgtcgctgcgatccaagacctggtggacgaggtggctcgccataagatggatgcggagatcaacattaggacggtgtgacgtctttaaggatggcagggttcacagttgcttagtggaaagacattcaagtgtggagacgtcattcgtcgtgataaagagttgatgttgttccagtcttgatattctccggtctgtcgaggctctgacgcctaaaagagccatctggtatgtgtgaa

SEQ ID NO: 540748 - DNA, 193 bp, Homo sapiens
tgccacagagaaacgcgccaagatcgtaagaagctgagactccatcggtaaaggcgacgaagtgctgaccaccggcgtgctgatcggtcgcgtgaccaaatgtggcctgacaccggcatcatcgccatcgcgctgaacgacaccacggaagtgatgatcaagcgtgacttcgtggcggccgttctgccgaaag

SEQ ID NO: 540749 - DNA, 166 bp, Homo sapiens
gcggtacgacagtccgtgccgaactcggcaacgtgcccagcgatagaactaagatcgagaacgttcccagaagcatctgacgccctctgtggactgaacgagtgcttagtctgataacttttcaggtaggaacagctccgcaactaacttccacactcaggatgcc

SEQ ID NO: 540750 - DNA, 243 bp, Homo sapiens
cacgagggtggagggactgaagcccaaggacctagtcggccaaccgtggcgcttggccttcgcgctgcaggatgccggctggtggctgcggcaggacatcatctggcacaagccgaacccgatgcccgagagcgtgcgcgatcggtgcacgaaggcgcacgagtacctgttcctgctgaccaagaacgagcggtactacttcgaccaggacgcaatccggacgccgtacagcgctgaaaccaa

SEQ ID NO: 540751 - DNA, 151 bp, Homo sapiens
  misc_feature (122)..(122): n is a, c, g, or t
tcctaaacggtctgttaccggatcattaccacgctaagcgtgaaacgatcagcggagcgtgggaacgatcaacttcctataatccaggatcatgtgcggcagaaaccggcttgagtccttgngtgatcaatgctattggtcctctcgcacc

SEQ ID NO: 540752 - DNA, 728 bp, Homo sapiens
gcacaaaaagaggtgatgacaggacactctggtggaccgaatcttgcgagccgctaggatgtcgctccggattcgtgagtcttcgctcgtagcacgttggcgctgcgtctgtgccgcttggcctctacgtacctgatacccctcttgaatactggcagcactctggactcattgatctacatttggaggactgtcgtggctcctttgtctacacaggaaggaataggaattcaaagtactgtgagcgtacgtgggagaccgtctatctatccgtcgctcacgttttggcccgcgggctgtagatgttcggctacgccagtccaggatgggtgtccctgtgccagtcttgcccactgtgtctatgcacatccccctcgacctcagcaccggagggcattctccgattgccaagaagaccaggacatggagtccgacgcgggaggctggtatcgtcacgctggccatcctcatctggccccaacgttctcctacattctctagaagagactgctcttcctgccctacctggtcttcagcatcctggccacggcactgttaccatcaggctgggaatccccctggttaccattcccatggccttctcccttgagagacagtttcgacagccaggcttcagcaaactgccccagaggactgccaagctcaacctcctgctgggacttgctatgtctttggcatcattctggcgaccagcaggcagtctggcg

SEQ ID NO: 540753 - DNA, 218 bp, Homo sapiens
  misc_feature (17)..(17): n is a, c, g, or t
  misc_feature (22)..(22): n is a, c, g, or t
  misc_feature (37)..(37): n is a, c, g, or t
  misc_feature (40)..(40): n is a, c, g, or t
  misc_feature (46)..(46): n is a, c, g, or t
  misc_feature (51)..(51): n is a, c, g, or t
  misc_feature (83)..(84): n is a, c, g, or t
  misc_feature (86)..(86): n is a, c, g, or t
  misc_feature (96)..(96): n is a, c, g, or t
  misc_feature (120)..(120): n is a, c, g, or t
  misc_feature (139)..(139): n is a, c, g, or t
  misc_feature (146)..(146): n is a, c, g, or t
  misc_feature (198)..(198): n is a, c, g, or t
tattagccatctgtatntgttntaatttccttctttntgntccaantttgntgggtgggaggaggatttagtctcttcctganntngaagagctcntttactatttcgggaaataacganttggattgtcaaccattanagctatnttttacacacttttcaacttctgtttttgttataagaatgtgtatgattgtnacatgtccaagtataaccat

SEQ ID NO: 540754 - DNA, 112 bp, Homo sapiens
ggcccaagaaattttctgtttgtcatggaaaagtaaaagtggaatattaaaacctttcagtttagttctgtaaagtccggaatttttccaaaaaattaaaaaatgggctgga

SEQ ID NO: 540755 - DNA, 624 bp, Homo sapiens
  misc_feature (587)..(587): n is a, c, g, or t
ggagcacgtgcccagccagggacggaccctcattcctcccaggggccccagacctctgtctctctcggataagtctccatctctgcctgtctctgtctctgactctgcatctgtctgttactgacgcactcagcaaggcctcctgccctgagagaggctccgcccactacctgccactttccccatccagctgagtctttgtgccacgaagactgcgtgcagaaggtgactgtctcagtgcagcatgctcatctcaggtggtgagttggggtccacgacggtgaggaccctctgcagaggagggagctcatctgagacacttatattttactcacacctgatcctcgtcagcaggcactcgactccttgaacttatggccgccatgtgctccccgaatgtcctgtgtgatgacatgaggaagctgaaggcccgaatgcaccaggccatagaaagatgctatgatagcatgcgacgactgtgagggctacctcggagacagtgacggctgattatgacgagcagcacccagagctcacatgtctacttagaacagaatgagatgtgatacggtgccgaggctacagantccactgtccacgatgttgatgaatcccgaacccggg

SEQ ID NO: 540756 - DNA, 1103 bp, Homo sapiens
aaactaccccataaaagaccaacacatggcgacagcgaaacagtactcatatcaacattgtcgtcattggacacgtagattcgggcaagtccaccactactggccatctgcatctactaaatgcggctggcactcgacaaaagcaaccattgcaaaaactttgacgaagagaggctgctgcaactgggcacaagggctccacttcacacgcactaaattgacccttgagagctctatgcgactaacaccctgcaacaggcctgaagccgttgcaacccgctggatactccacccacttgcactactcctcccctctgatggcgaacactatctgacagacaccagaacacacgactacctatctgatgaaacgataactccatgtctagcaacttgccaccctccaagagaaaccaacaagcacggacccctctaaactccacacaacacatccagcatggaacttcaacccacgcgaggaacccaacatccatccaaggcgagccatgacaccctcgcatggccctagaactcccccttggacctccagcgtccagaccctcgcaacaggagcggtagctcaggagaccagaacacttcccgcaaccgcacctaggagataactcacacaccaaacgcacaacaagcgaaacccagccacacccccgaacgcacaaccaaagtagacccactaaccgtacgaaccataaacacaaaccaacactggagaccatgcaggaagaaaagcaacaccgataccacctcgaaccccgagcacgcctccaccacaccacacaaccagcgcaaactcccccaccctagaaacacccacacccaccatcaacacagctcccaagaacagaaccaaccacctgaaacgcaacacacccgccccacccccagcaacacacaacacgaccaacccaatacgactcaacagccaaaacaccatccgcgacacaccaaaccccccccggaaccaccgcgaccagcaccaccacagcgcccccagaacccaacaatgagcacagagacaccgcgactgcaacacaaacacacaaccccagaacccacccaccacaagcaaggacaccaaaccaaag

SEQ ID NO: 540757 - DNA, 904 bp, Homo sapiens
tacacgcttaattcacttaattttcctggtataaaaaccctatgtggtacccacagcgggagccgagagatccgcttgcacggaaaactcgggtgggggtctagacgaagggggtcaggtgaactccggatagggagactgggtgaatacagtctctattccagaaggtcgggggctcaggtagctgtaggtctctagaaagggcatcaaagggggcctgggcaaagtttgcccagggtgggcaggtgcagccccgggctgaggtgtagcagtcatcgaataccagccatacagtgagcagcttctataggcacaggtggcggagacgagtgccagggccccgggagtgcagggatagaggctgtaccaggcaacaagagccgaaaggaggcctggtgcaaccttgacaaggggacacgtgtgggggctaggccagatctaggtaccccacagaagcctacatgcaacaacgggggaccgacggagaagacgcttgggcccaaggatgtgatgtggcccacacgagaattggaggagagagaacacacactcacatgtgagaagcacatataaagaaccccaaaaacatagacagttgcgcctatagtgagtagacccgcccgaaattgaggccaaaacaacaaagtgacccgtaatgaaacacccgtgagagaggcccaccgtgggaccggggcaacagcagaggaggacagacgacgacaccatgagcaactgtgggggacaataacaactcatcacaacaacaaacatctcacgatacccctcatgagacgaaacgacagggggccccacgcaggagaaaagaaaaaatacacgagagggaaccacccttacgaattgacctaaaaacggggggccacggggaaaaaaaacgaaggacacg

SEQ ID NO: 540758 - DNA, 142 bp, Homo sapiens
catggcgcactgagtaggcgccagctgcgtgcagagcagtcgcctcgcaggagacagggcgtgtgagccctgtggcaaagcccctctctcttttagtcttagagtatgctctgtgatgaacagttacagcttcaaggaagga

SEQ ID NO: 540759 - DNA, 143 bp, Homo sapiens
cggggccgggcggcaccgcggtgcgcaagcgcaaccgttcggtgggtcggggatcggtcgcctgagaggtatcacctcttctgggctcagggatggacaccaagaagcgccgtggctctacgccatcatccgagttccgtgca

SEQ ID NO: 540760 - DNA, 111 bp, Homo sapiens
gaacaagcatgcaaccagcatctgcaagttaatcactggcatgtagttggaattatccccagctcagctgcttctccttctagacaagtgaggattctctgagagcaagag

SEQ ID NO: 540761 - DNA, 125 bp, Homo sapiens
tctcatagacggatccccatcagaaaagagacagaaatagcctatcagtgtcagtaatctagattataagcaaaactagcaatatagtcaggtagggcagtacatatcatacacggtgcacttcg

SEQ ID NO: 540762 - DNA, 440 bp, Homo sapiens
  misc_feature (66)..(66): n is a, c, g, or t
tgcagttcagcctgggcaaggcagagtgagactctgtcaaaaaaaaaaaaaaaaaaaaagaaaganaaagaaagaaagaaagaaagaaagaaagaaagaaagaaagaaagaaagaaagaaagaaaaagaaaaaaagaaaaagaaaatcagtgataggtgagacagctcatgcctgtaatcatagaactttggaggcagaggtgggaggatcacttgaactcaggagttcaagaccagcccagataacatagtgagtcttcttatctactgaaaagtatttttaattatgctacagtgctagtgtgtgcctctggtttcagcttatttggcaggctgaggtagaaggatcacttgagcatcggagatgaaggctgcaatgagctgagatggtaccactgcactccaggctgggagagagagtgagactctacctcaaaaaa

SEQ ID NO: 540763 - DNA, 6313 bp, Homo sapiens
gatgaccattgctacatgtgcaaagtgcaaaagtgttcacaagatctctcttcaagatttgcagaagggtacagggaaggacggtatgtatgtctgcttccagtgcagcctcggtgcagctcctcccaattttcattttgtgagcaataatcccagtgcgactcatgttggaaataaaactgaaaacttctcaagttctgtcaatagcaaatttaaggtaaggaactttaagccaggcaaatactattgtgataaatgtcgattctctacaaaggacccgctgcagtacaaaaagcacacccttcaacacgaggagattaaattcatttgttctcactgcagctacatttcgtatacgaaaggagagtttcagaggcatttggtgaaacacacaggcatatttccttatcagtgtgagtattgtgactatggtgctattagaaatgattatattgtcaaacacacgaagagagtacatgaaagggcaggtgcgaaacggccagtcaaagctgttgccaagctggagccaaaaagaaccggaacttcaaaacaaaacccagagcttctaaaagcttccaatccacggactacatttcaaaataagtggtcagaccaactgtcaggtttctctctccatgcaaataaagacaaaatgcacaatatcatgttgttacctgaaccaaaggaataccaaaaagatgtagtttgtattccaaataaaatgaccctgtctgagccaaatgaagtcaacctatttgagaacaaaaatgttgaagtagaagtgttatcccctgcaaaagaacctgttcagccaggtatgccattgacagttgttgcaccagcagaactagttgtccctgcaaactgtttagcccagttgatagacgtgaaggttgtcaatggtacacagcagcttgttctgaaactgtttccgctggaagaaaataattgccttgaagctgggagggataatggaggtaattctgaacgtatggtgaaagagaagggttcaaatgaacaagaaaaagtactttctgcagaaaaaacaaagtcactgacagttgacgggaatgttggaaaactcgtaggcattgatagttttcaaccttcagttcagaaacagcttaaaaatgtgaaatgggtaaggtcttatgattttattatgccaaattctagtgtgcacaacaatggaaaatccttcattaattcggaaacaattgaggattttcagaaaaaaaataatttgtatccacatagaactgcttttccttccgttgccttaaaaggtcattctctagcatctgtatttaaaaacagtgttttacgtagtcttggagctgcatcaaacccttttccatataaagctgctgtttgttttgctgaaagtggaagaaatttacacagtaactcacagcagttactcccatttgctgcatcacctgcaacctgttccttctctggagaaaagggcttattgcctgtaagtgaaaatgacttggaatctacaagtaaagtcaatattcctgtaaaagtggtttcctctaataggaagcaggaagataaccagacagaggaacacaaggcagtttcaactgtaggccagatttcctctcaacataagagtgagtatttacatataaacataactggagaagatagatctcaacagcctggggataagcctttggaattaaagaattctgaaaggactaacaacactaatgatggcccagtcatctcatcagtattttctctgagctctggatctgaaaatgtccccgagggcattaagtggaatagctcaacgtctaaaataaagtcaattgaactgttgcgcagaaagatagctcagttaattgagtcctgtgggaagccgtcatctttggcttcaaatagtgcacatcgtcgctctgtagggcaggcatcaaagggaacttcaaaagctacctctgaaggtattcaagaaatcaacgtgtcactcactggtcttggccattccacaggtactcttcagaaacctccgaatgatggtggtattactggtaatagacagcttactcatcaacaaatatatccacactttgcagatggcagtaataggaaaaccaaaagcagagtggtccaggaggctcatgttgccacgccagtgttaatccccaaaggggctgtgttgagggtcttaattcctctgagaatgcccacatcatagaggctacatgtgaagcacctgtcagcataccttgcagtgaaagacagttaataaaaccaattccattttgccctgtgagacaggcggactcagacttacagcctttaagaagtgaaagggggccaatagatatgtccccaaatatcgagacacctctgcggcctaaactgagaaaagagagtgctgtctgtagcaccatccatagaaaaactggcctcttgtatggacagcaaggaagcagtgaattaaataagcaagggagactgctttccagaagtctttctataagtagaaataaaaccaaacaagtacacttatccaggaagaaaaacaaaattcaagctgaacctagccgctgtctcaaggatccttcaatttttcaggtagcaaggcaactaagactgatagcagctaagccagatcagttgattaagtgtccccgtcggaaccagccagtcattgtgttaaaccaccctgatgtggactcgccagaagtgaccaatgtgatgaaggtaataaataaatacaaaggcaatgtcctcaaagttgttttatcagagaggactaggtgtcagctaggcatcagacggcatcatgtacgcctgacctaccagaatgcggaagaagccagtcaaattaaaaggcaaatgatgttgaaaatgaaactcaaaaatgtctctccactgaaccaaaggaatacaggtagtggattccttgcctgatgattcttcacagtgtgtatttaagtgctggtcttgtgggcgactgtatgaagaccaggaagagtggatgagtcatggccaacggcatttgatagaagcaactagagattgggatgttctttcctccaagggcaaataagtaaacagttactctttaaagcaagttatcttttagtttattctggtttggagtccctccaccaagattcagtagaagaaatacagactgtagaaatgagaggactgctaattcttcagaactgtaggaatattgggagctaggagtctgaacctgaagtatgtgattggaccccagaatgtatttgaaggctctgaaattgtacatgcaaattggtacatatgcatttttctggagagagcctgtgaaactgaacagattttcagtgggatctgagacttttctttgtttagcaccccgttttctgagtacatactgatctttcataatccattcagaggggcagattgagaatgttttacacatgctcttcatataaatgctacagaaaaacctttgttttggtgtgcacatccattttgtttttgctttaatttgtgttctgagtatttggtgcacaatggaaattatattttctactttactgtcttcaatttggttatagagaaatggccattcttttactccctccctggttttgtaatactcccgagtgttccgtatagcacaaagagttttgcttttactggccattttaaagaatgttttcaactgcttgcctgaatttactcctttcacagcaagtgttagaagaaagataacattttcaaatacttagcttttgctttctttaaaatacattggtttatgacatatgggaagggaacgtacctttttgcaaagacaaaaagagattacaaaaggaaaatatctaaaactattttctctttgcccttaccactcccagaaacataagtgaccaatttaaaatgctagggaacaggcttacaacataggtaaaactcgcaaacacagttcaaggtaggctcataaagttgtgaaaagggtttcatatgccctttagttttcatttgggattcatccaaagaccatgggtggatgctgtcttctctcttcttgatccctttgattcatggacactagactccctttgccatttcttctgaaccggccctcctgtggactagcacaacttccttgcccactgtttcttcctttctgtgcctttgagaccccttaaggttttccctcatgcgattactagaaaatggcaggaatcaacaaaatggagacctcccactgtttttgctaaagttacaggaacacgatccctagttttcattgatagtaacgctgtttctaatttgtcttaaccacattcatgcttaccctgctgctcagctttctcagggaagcaactccaggaacactccttccactcccctctctaccaacagatgtcaggactgtcatttatctacacatttgtgttctttagaaaaaggcccaccccctgcacaagcacagcctcttgggcagataggtggctgggtcagtgcttaagacaggattctagtcttcacttgcctgtgcagctgggcgctgaccttccaggtagagcacagatggcacaaccccgaggcagccccaacttgcatttccctccctccaggggctattcctgtcttaggcgatttgtggggtgcagtgaatgaaactaaagagttgttgcacctgaaaaagacaccagtgattgtttattgggtagtcgattggagactttgatttttttttttttttttttcacatgggaaagtcttagattccagtagatggaattgcaatcctttgcagtttgttctcattacagataatcaacatttcttttgtataattcaatacatgatcatcaagttaattggtaaatttttattgaaatttaaaacttgcatttttatatatgtgtatgtgtacacataaaaatattttttaccatatgaaaattgcagtagctaattttctgatttcctattttataatgatacatgggctggaaaaatgtagaacgtttttatattctagaaatttattttggaagtacatttttataagggtctaatctcacttttggaaaatgaaagcacaggaatgatggggtctggtttatgtgaacaagtgagtagaaacccctttggatcattttattactgcatttttatttggtgctttttaggaagtagatctttggtaccacttcactacgtaaagtagagcattcgaagttttatccatgttatatattgtactcctgtggcatgaaaaatagctcccaagatatagagaggagaggagtgaagaaaaggctgtggtttttttttgttttgttttgtttgccacttttttatctcctattcctcaccacatagtgctttttcctgaaaagctggactgagaattggccttgaatcaggtcagagtgttaactgtcaacatgaagtattttcacttcgcagcatcaactttcaagcataagtaaaaacacaacttgcatactttgatggagcttaattgtgtgagtagaatatgtagcaaagctttttaggattttcagaactagaatactttttaaggaattaaaagtgtttctggaagtcaaaaatgggaaagcaaaaagtagctgtcctccctaaagagctttagaagatagcttaacctgtaggtacatgttatgaaataaacacatttctaacaatacaagggagtaggggcagacctgtgttgagtatttgtgtgggttcttaattttgaaggacctccaatcactacattttgttaatactgccaataaaatcattttcaacttattttttaaagtaggttttcttactttggtggaccagaagtgagagattgttatatttaggatataggcaaatacagtaaaagttaaaaaaaaaaaaaacctgacccaaagtatactctgatagactatattatattcaattttgtatccccagtcgagaacatcttgtaagccttcattaagggccacctgctgtctgttgaactagactgaacaaaatatattttctcacaagctccatccctttttctttaggacatgttatatataatccatctcagaagttgaagatgtgatgttgctcggcctttggaataatttttaaatctgtaaatgtctatatgagcagaaacaaaacattgtgtaacatgttttaagcattattgtaattcctgtgttaacagtttgtgtgtctgctgctctggttttgaaacatgtttgtatatagatacaggagttggcataaattttgttaaataaagcaacaaaaattttctttgccctttgaaaaaaaaaaa

SEQ ID NO: 540764 - DNA, 171 bp, Homo sapiens
ggtgatctgagaggccccggtcacaacaggcgaggagggtacttactattgcgaagcaggaaaagtcatccctattgcctggtggtgccggcacttaatatgatggggtggaattggtcagtataccgctcgtgctggtgcaaaattaaataaatatttctcttaccttat

SEQ ID NO: 540765 - DNA, 5880 bp, Homo sapiens
gatgaccattgctacatgtgcaaagtgcaaaagtgttcacaagatctctcttcaagatttgcagaagggtacagggaaggacggtatgtatgtctgcttccagtgcagcctcggtgcagctcctcccaattttcattttgtgagcaataatcccagtgcgactcatgttggaaataaaactgaaaacttctcaagttctgtcaatagcaaatttaaggtaaggaactttaagccaggcaaatactattgtgataaatgtcgattctctacaaaggacccgctgcagtacaaaaagcacacccttcaacacgaggagattaaattcatttgttctcactgcagctacatttcgtatacgaaaggagagtttcagaggcatttggtgaaacacacaggcatatttccttatcagtgtgagtattgtgactatggtgctattagaaatgattatattgtcaaacacacgaagagagtacatgaaagggcaggtgcgaaacggccagtcaaagctgttgccaagctggagccaaaaagaaccggaacttcaaaacaaaacccagagcttctaaaagcttccaatccacggactacatttcaaaataagtggtcagaccaactgtcaggtttctctctccatgcaaataaagacaaaatgcacaatatcatgttgttacctgaaccaaaggaataccaaaaagatgtagtttgtattccaaataaaatgaccctgtctgagccaaatgaagtcaacctatttgagaacaaaaatgttgaagtagaagtgttatcccctgcaaaagaacctgttcagccaggtatgccattgacagttgttgcaccagcagaactagttgtccctgcaaactgtttagcccagttgatagacgtgaaggttgtcaatggtacacagcagcttgttctgaaactgtttccgctggaagaaaataattgccttgaagctgggagggataatggaggtaattctgaacgtatggtgaaagagaagggttcaaatgaacaagaaaaagtactttctgcagaaaaaacaaagtcactgacagttgacgggaatgttggaaaactcgtaggcattgatagttttcaaccttcagttcagaaacagcttaaaaatgtgaaatgggtaaggtcttatgattttattatgccaaattctagtgtgcacaacaatggaaaatccttcattaattcggaaacaattgaggattttcagaaaaaaaataatttgtatccacatagaactgcttttccttccgttgccttaaaaggtcattctctagcatctgtatttaaaaacagtgttttacgtagtcttggagctgcatcaaacccttttccatataaagctgctgtttgttttgctgaaagtggaagaaatttacacagtaactcacagcagttactcccatttgctgcatcacctgcaacctgttccttctctggagaaaagggcttattgcctgtaagtgaaaatgacttggaatctacaagtaaagtcaatattcctgtaaaagtggtttcctctaataggaagcaggaagataaccagacagaggaacacaaggcagtttcaactgtaggccagatttcctctcaacataagagtgagtatttacatataaacataactggagaagatagatctcaacagcctggggataagcctttggaattaaagaattctgaaaggactaacaacactaatgatggcccagtcatctcatcagtattttctctgagctctggatctgaaaatgtccccgagggcattaagtggaatagctcaacgtctaaaataaagtcaattgaactgttgcgcagaaagatagctcagttaattgagtcctgtgggaagccgtcatctttggcttcaaatagtgcacatcgtcgctctgtagggcaggcatcaaagggaacttcaaaagctacctctgaaggtattcaagaaatcaacgtgtcactcactggtcttggccattccacaggtactcttcagaaacctccgaatgatggtggtattactggtaatagacagcttactcatcaacaaatatatccacactttgcagatggcagtaataggaaaaccaaaagcagagtggtccaggaggctcatgttgccacgccagtgttaatccccaaaggggctgtgttgagggtcttaattcctctgagaatgcccacatcatagaggctacatgtgaagcacctgtcagcataccttgcagtgaaagacagttaataaaaccaattccattttgccctgtgagacaggcggactcagacttacagcctttaagaagtgaaagggggccaatagatatgtccccaaatatcgagacacctctgcggcctaaactgagaaaagagagtgctgtctgtagcaccatccatagaaaaactggcctcttgtatggacagcaaggaagcagtgaattaaataagcaagggagactgctttccagaagtctttctataagtagaaataaaaccaaacaagtacacttatccaggaagaaaaacaaaattcaagctgaacctagccgctgtctcaaggatccttcaatttttcaggtagcaaggcaactaagactgatagcagctaagccagatcagttgattaagtgtccccgtcggaaccagccagtcattgtgttaaaccaccctgatgtggactcgccagaagtgaccaatgtgatgaaggtaataaataaatacaaaggcaatgtcctcaaagttgttttatcagagaggactaggtgtcagctaggcatcagacggcatcatgtacgcctgacctaccagaatgcggaagaagccagtcaaattaaaaggcaaatgatgttgaaaatgaaactcaaaaatgtctctccactgaaccaaaggaatacaggtagtggattccttgcctgatgattcttcacagtgtgtatttaagtgctggtcttgtgggcgactgtatgaagaccaggaagagtggatgagtcatggccaacggcatttgatagaagcaactagagattgggatgttctttcctccaagggcaaataagtaaacagttactctttaaagcaagttatcttttagtttattctggtttggagtccctccaccaagattcagtagaagaaatacagactgtagaaatgagaggactgctaattcttcagaactgtaggaatattgggagctaggagtctgaacctgaagtatgtgattggaccccagaatgtatttgaaggctctgaaattgtacatgcaaattggtacatatgcatttttctggagagagcctgtgaaactgaacagattttcagtgggatctgagacttttctttgtttagcaccccgttttctgagtacatactgatctttcataatccattcagaggggcagattgagaatgttttacacatgctcttcatataaatgctacagaaaaacctttgttttggtgtgcacatccattttgtttttgctttaatttgtgttctgagtatttggtgcacaatggaaattatattttctactttactgtcttcaatttggttatagagaaatggccattcttttactccctccctggttttgtaatactcccgagtgttccgtatagcacaaagagttttgcttttactggccattttaaagaatgttttcaactgcttgcctgaatttactcctttcacagcaagtgttagaagaaagataacattttcaaatacttagcttttgctttctttaaaatacattggtttatgacatatgggaagggaacgtacctttttgcaaagacaaaaagagattacaaaaggaaaatatctaaaactattttctctttgcccttaccactcccagaaacataagtgaccaatttaaaatgctagggaacaggcttacaacataggtaaaactcgcaaacacagttcaaggtaggctcataaagttgtgaaaagggtttcatatgccctttagttttcatttgggattcatccaaagaccatgggtggatgctgtcttctctcttcttgatccctttgattcatggacactagactccctttgccatttcttctgaaccggccctcctgtggactagcacaacttccttgcccactgtttcttcctttctgtgcctttgagaccccttaaggttttccctcatgcgattactagaaaatggcaggaatcaacaaaatggagacctcccactgtttttgctaaagttacaggaacacgatccctagttttcattgatagtaacgctgtttctaatttgtcttaaccacattcatgcttaccctgctgctcagctttctcagggaagcaactccaggaacactccttccactcccctctctaccaacagatgtcaggactgtcatttatctacacatttgtgttctttagaaaaaggcccaccccctgcacaagcacagcctcttgggcagataggtggctgggtcagtgcttaagacaggattctagtcttcacttgcctgtgcagctgggcgctgaccttccaggtagagcacagatggcacaaccccgaggcagccccaacttgcatttccctccctccaggggctattcctgtcttaggcgatttgtggggtgcagtgaatgaaactaaagagttgttgcacctgaaaaagacaccagtgattgtttattgggtagtcgattggagactttgatttttttttttttttttttcacatgggaaagtcttagattccagtagatggaattgcaatcctttgcagtttgttctcattacagataatcaacatttcttttgtataattcaatacatgatcatcaagttaattggtaaatttttattgaaatttaaaacttgcatttttatatatgtgtatgtgtacacataaaaatattttttaccatatgaaaattgcagtagctaattttctgatttcctattttataatgatacatgggctggaaaaatgtagaacgtttttatattctagaaatttattttggaagtacatttttataagggtctaatctcacttttggaaaatgaaagcacaggaatgatggggtctggtttatgtgaacaagtgagtagaaacccctttggatcattttattactgcatttttatttggtgctttttaggaagtagatctttggtaccacttcactacgtaaagtagagcattcgaagttttatccatgttatatattgtactcctgtggcatgaaaaatagctcccaagatatagagaggagaggagtgaagaaaaggctgtggtttttttttgttttgttttgtttgccacttttttatctcctattcctcaccacatagtgctttttcctgaaaagctggactgagaattggccttgaatcaggtcagagtgttaactgtcaacatgaagtattttcacttcgcagcatcaactttcaagcataagtaaaaacacaacttgcatactttgatggagcttaattgtgtgagtagaatatgtagcaaagctttttaggattttcagaactagaatactttttaaggaattaaaagtgtttctggaagtcaaaaatgggaaagcaaaaagtagctgtcctccctaaagagctttagaagatagcttaacctgtaggtacatgttatgaaataaacacatttctaacaatacaagggagtaggggcagacctgtgttgagtatttgtgtgggttcttaattttgaaggacctccaatcactacattttgttaatactgccaataaaatcattttcaacttattttttaaagtaggttttcttactttggtggaccagaagtgagagattgttatatttaggatataggcaaatacagtaaaagtt

SEQ ID NO: 540766 - DNA, 1191 bp, Homo sapiens
tgggagctatttttcatgccacaggagtacaatatataacatggataaaacttcgaatgctctactttacgtagtgaagtggtaccaaagatctacttcctaaaaagcaccaaataaaaatgcagtaataaaatagctcccaagatatagagaggagaggagtgaagaaaaggctgtggtttttttttgttttgttttgtttgccacttttttatctcctattcctcaccacatagtgctttttcctgaaaagctggactgagaattggccttgaatcaggtcagagtgttaactgtcaacatgaagtattttcacttcgcagcatcaactttcaagcataagtaaaaacacaacttgcatactttgatggagcttaattgtgtgagtagaatatgtagcaaagctttttaggattttcagaactagaatactttttaaggaattaaaagtgtttctggaagtcaaaaatgggaaagcaaaaagtagctgtcctccctaaagagctttagaagatagcttaacctgtaggtacatgttatgaaataaacacatttctaacaatacaagggagtaggggcagacctgtgttgagtatttgtgtgggttcttaattttgaaggacctccaatcactacattttgttaatactgccaataaaatcattttcaacttattttttaaagtaggttttcttactttggtggaccagaagtgagagattgttatatttaggatataggcaaatacagtaaaagttaaaaaaaaaaaaaacctgacccaaagtatactctgatagactatattatattcaattttgtatccccagtcgagaacatcttgtaagccttcattaagggccacctgctgtctgttgaactagactgaacaaaatatattttctcacaagctccatccctttttctttaggacatgttatatataatccatctcagaagttgaagatgtgatgttgctcggcctttggaataatttttaaatctgtaaatgtctatatgagcagaaacaaaacattgtgtaacatgttttaagcattattgtaattcctgtgttaacagtttgtgtgtctgctgctctggttttgaaacatgtttgtatatagatacaggagttggcataaattttgttaaataaagcaacaaaaattttctttgccctttgaaaaaaaaaaa

SEQ ID NO: 540767 - DNA, 143 bp, Homo sapiens
gttacagaagtttcgttccagacatggtcctggcttctgctcggaagcgaggcaggcatcgtaggaggtgagagttcctcaggtgaccgtccaagccggtccacctgacagccttcctaggatcaaggctggcatgacttaca

SEQ ID NO: 540768 - DNA, 170 bp, Homo sapiens
  misc_feature (6)..(6): n is a, c, g, or t
aaaaanggggggttttttaaaaaaaaaaattccccccccccctgggggggtttttttttttcccccccccccaaaggggggggcccccccccgggggttggggggggattttttttttttttggggcccttttttacccccccttttttttgtgggcggggttttcccca

SEQ ID NO: 540769 - DNA, 694 bp, Homo sapiens
cgtcgctctttacttgcagtccccggtcctgtgtccggttccccagttcgggggcactttggtggtttaatccccgcaggttttgtgtacactcccgtacgccctttggtgaggagacttttaaatggttcttttgatctcttgtatctggatgcacgctccggagttattgaggccacccgttagtttcacgttatctccaggttaactgggagaggttctgtggcccgctgtgttatctgtacctgcccaccacaggatgtaccccttcccattgaagaattttgaagctgttggttgtcctgcgtgcggcggcccagtgtacctataaccctggtgtgtttcgtggcctccatttgttttgcctgggcacaatgttagtatggccctgtgtgcactcagccagtgggacacacacctgtagagtggccagcgagggctgtgtctagctatgaagtgtggatctcaagagccctgtccagtagagtagaagtcttcctttcccagtgtgctttgcccttcgtttcttaccctgctggggaaagtaccaccgtggataccccttttctgacccagagagaagccaaatctccacggtcaaaatagtgccccaaacggttgagttttgactgcttggaactggaatcctttcagcaacagattttctttgcctcaaataaaagtgcttttgtga

SEQ ID NO: 540770 - DNA, 177 bp, Homo sapiens
tatctagagtatcccctccacacagcactaggatgcagccacggacacgcaggtggctggtcagcgcttgtgctggttctcactactcttccagatttattctctccaacaaaaatgtcggagcttgtgcaacacgggattatccagtcatgctcatttgatgttctacttccacgg

SEQ ID NO: 540771 - DNA, 351 bp, Homo sapiens
gggttagacttgttgcttcctgatcatgacggatgttgagcatggtttcatttgtttattggacatttgtatattgtcttttgtgcattgtctattcatgtccttagcctactttttgatgggattgtttcttttttcttgctgatttgtttgaattccttgttgattttgaatattagtccttcatccaatgcatagtttgtgaagattttctcccatgctgtgcattgtctgtttgctccttacttcttttgctgtgcagaagctttttagtctaattaagtcccatgtatttatctttgtttttgttgcatttgcttttgggttctctgtcatctgggtaccgagctc

SEQ ID NO: 540772 - DNA, 401 bp, Homo sapiens
tagttgggattacaggtgccccccgcccccacaccatgcctggcttaattttcgtatttttagtagagatgggcttttaccatgttggccaggctggtctcgaactcctgacctcagatgatcctcccactcggcctctcagagtgctgtgattacgggtgtgagccaccatgcctggccattcttaagatcaaatggctacaaagttggcggctcaaggaactgaactagacattggaaccatctagggctcagtttataaccgatatgctatacggctgatgggagagtcaaatgaggacatgtgacacgtgtatgtagacacttctcatgaaacgttagccatctcatataactgagatagaacattctgcggacactgggatggcctagtagagcag

SEQ ID NO: 540773 - DNA, 158 bp, Homo sapiens
gcactgcaatacgaatcatgtctggtcgccgtaaaggccgtaaatgctcgatgaacggtggggctaaccgccatcttaacgtgctctgcgataacatccatggcattacataaccagatattcatcgctaggctctgctcggtggcttaaagcgcatt

SEQ ID NO: 540774 - DNA, 161 bp, Homo sapiens
  misc_feature (102)..(102): n is a, c, g, or t
ggacgagcctgctccgacttgttgttgtgtcgtgtccctgtgttgtgtctgcgtgtagatttatttgtttatcccgctttagggttcgcggaacctctgtgncgcttgttattttggggaagtcaatattctttaaacattgccggggctcatcatccatc

SEQ ID NO: 540775 - DNA, 209 bp, Homo sapiens
  misc_feature (16)..(16): n is a, c, g, or t
  misc_feature (26)..(26): n is a, c, g, or t
  misc_feature (43)..(43): n is a, c, g, or t
  misc_feature (46)..(46): n is a, c, g, or t
  misc_feature (72)..(72): n is a, c, g, or t
  misc_feature (79)..(79): n is a, c, g, or t
  misc_feature (111)..(111): n is a, c, g, or t
  misc_feature (115)..(115): n is a, c, g, or t
  misc_feature (138)..(138): n is a, c, g, or t
  misc_feature (145)..(145): n is a, c, g, or t
  misc_feature (155)..(155): n is a, c, g, or t
  misc_feature (167)..(167): n is a, c, g, or t
  misc_feature (173)..(173): n is a, c, g, or t
ttataaatcaaaaatngtcaaggttnagcatattctgatatgnagntcacaaggtggtatcgttttagattnctatganggctttcatttgtacatccctttgaataaatntatncagatttaaaatgttttgaattnaacttgnttagaaaagnctaatgattaanacaatntttgaactactgctatttataatttgttacctctaa

SEQ ID NO: 540776 - DNA, 134 bp, Homo sapiens
  misc_feature (40)..(40): n is a, c, g, or t
  misc_feature (71)..(71): n is a, c, g, or t
  misc_feature (99)..(99): n is a, c, g, or t
cggtctgttctcagattcctaatcattccagaagtattanacgtcattgctgcaaacctcggcaggtgctnatcgaggggcttaatgaccaccacaggnagctcagaccccaaccctggatcccaggagaaagg

SEQ ID NO: 540777 - DNA, 813 bp, Homo sapiens
agtgtcgcacgaaagcccttcactccaggccgcaattaaggttctaggtacgaggcctgtgctgtgctgtgatgaggttgcagcgcagcttcgtggagcatagtgctgcagtgactgcagtgcaagctggcacgggcaccggccgacccttggaaagccggggtccccggagttgcagctcccgtgagctccgtgctggctgtgctccacctgtgcgaaagatgatcccgtgagtgtcctagtgtgacccacgcagcctgtgcggcgctatgttgcggggcctgcttttttgggcaatggtgctggctttgccaatgtgcttcgagatctacggacgcggacaccaaggaggtgttcgcgggcaagattagtgcctaagtctctgctgctcaagccgcaccagagggagaagatgtccattggaaatatccattcaccgcagcctcgcccaccagcacgtcgtaggattccacggctttttcgaggacaacgactatcgtgtatcgtgggtgtaggagctctgccgccggaggtctctcctggagctgcacaagaggaggaaagccctgactgaggcctgaggcccgatactacctacgtgcaaattgtgcttggctgccagtacctgcaccgaaaccgagttattcatcgagacctcaagctgggcaaccttttcctgaatgaagatctggcaggtgacacataggggatttgggactggcaaccaaagtcgaatatgacggggacaggacagaccgttttggactcttattaactagctccgaggtgctggcacgaagggccagctcacgt

SEQ ID NO: 540778 - DNA, 116 bp, Homo sapiens
ccgttcgatactggaagcgatgtacaagaagctggagaagcgatgagaaacttatttctatgggacagagtcttttttcttttaactgtggaaggaatgtctatataaaaccgtga

SEQ ID NO: 540779 - DNA, 264 bp, Homo sapiens
ttttttttttggcggggggggggttttttttttggaaatatttttttagtttaattacccctttggggggttgggcaaaattaaaattttttaattttaagggttttcccccggggtttttgggggtggggaaaaaaaaaagggaaaaaagaaaaaaagttttttcccggggtttgtttttttttttaaaaagaaagaaaaaagaattttttcctggccctttttcagacttgccgtttaccgcctttaagggttttcccccga

SEQ ID NO: 540780 - DNA, 284 bp, Homo sapiens
cacccaggcgcacttctgcacccggcccacttctagtagctgatggtcttaccagtcaggatcttcgtgaatacccgtgacatggtaaggcaccatcactcttcgcaagtggagccgagtgacaccagttgagaatgtcaaggcaaagatccaagacaaggcaaggcatccctcctggaccagcaggggttgatctttgccggcatccaccgcctggaagatggctcgctccctgttcctcgacttactgcatccagcaagtgcgcctggggtgcgcaccccgg

SEQ ID NO: 540781 - DNA, 231 bp, Homo sapiens
atacatggtgagaagatgaaccgggagatatggagtccctggcgagtgtgagtcctagcattgcaggaggggagaccctggaggagagagcccgcctcacttgatgcctgcagattgaataaccacgaggcttaggaggaggaagttctccaatgttctagtctccagagcactatgctcaagaagccctgtattcaggaggctaccatttaaagtttgcagatagagctg

SEQ ID NO: 540782 - DNA, 865 bp, Homo sapiens
  misc_feature (21)..(21): n is a, c, g, or t
  misc_feature (35)..(35): n is a, c, g, or t
  misc_feature (89)..(89): n is a, c, g, or t
  misc_feature (92)..(92): n is a, c, g, or t
  misc_feature (110)..(110): n is a, c, g, or t
  misc_feature (158)..(158): n is a, c, g, or t
  misc_feature (167)..(167): n is a, c, g, or t
  misc_feature (173)..(173): n is a, c, g, or t
  misc_feature (218)..(218): n is a, c, g, or t
  misc_feature (242)..(242): n is a, c, g, or t
  misc_feature (257)..(257): n is a, c, g, or t
  misc_feature (308)..(308): n is a, c, g, or t
  misc_feature (486)..(486): n is a, c, g, or t
  misc_feature (488)..(488): n is a, c, g, or t
ggcaagcgcagacagacagancttgagagagcgcncgcgagatggcagcctccatgatcacctcgccgattgtggcgccgacgagcgtnccntccctctcccgccggggntcctccttcgccgtcgtctgcagcggtggcaagaagatcaaggtcganaagcccctnggactnggaggcggcttgacagtcgacatcgacgccaacggcaggaaggtnggcaagaagggcgtgtaccagttngttgacaagtacggngccaacgtcgacggctacagcccaatctacacgccagaggaatggtctgantctggtgaccgctacgccggcggaacgaccgggcttcttatctgggccgtcaccctcgccggcctcctcggcggcggcgtcctcctcgtctacaacaccagcgctctcgccggctaagagagcatctacgtgtaacacagggccgggtctctgcttgcatgcacgtctctgtaatctncntagctacctcctgtgaatgtatgcaatcaacgatgcaaagtaattgatccgaacaaaaaaaaaaaaaaaaaaaaaacaaaaaaaaaaaaaaaaacaaaaaaaggggggggggccccccaaaatcccccgcagagggggccccccaattatacgacgtctccccgcaaatgtcgcgtgcgaccaaagagggggcccccacttgatagaggcggcacccctattataaagacgcgcgaacaggcgcaggggggcgcgaggagaataaacacaggcgggagcataggcgggggacacactgctgccaagcggcgaccaccggggagaaaacacccctcaacgcggggggggggcacacatcaggcggcccacttcacaga

SEQ ID NO: 540783 - DNA, 216 bp, Homo sapiens
tccccttcctgtcagatcagtatacagttggaggtaaactaccccatcctcaaaccccggaaagcaaagcaaatcaggaaaaaaagtggaggttagcaacacccctgtggccccaaaggacaaccattttgttaattattgattccagtgacctgactccctgcaagttatcgcctgtaacatttgtaataaaggttttttgacatgaaaactgga

SEQ ID NO: 540784 - DNA, 669 bp, Homo sapiens
  misc_feature (21)..(21): n is a, c, g, or t
  misc_feature (35)..(35): n is a, c, g, or t
  misc_feature (89)..(89): n is a, c, g, or t
  misc_feature (92)..(92): n is a, c, g, or t
  misc_feature (110)..(110): n is a, c, g, or t
  misc_feature (158)..(158): n is a, c, g, or t
  misc_feature (167)..(167): n is a, c, g, or t
  misc_feature (173)..(173): n is a, c, g, or t
  misc_feature (218)..(218): n is a, c, g, or t
  misc_feature (242)..(242): n is a, c, g, or t
  misc_feature (257)..(257): n is a, c, g, or t
  misc_feature (308)..(308): n is a, c, g, or t
  misc_feature (486)..(486): n is a, c, g, or t
  misc_feature (488)..(488): n is a, c, g, or t
ggcaagcgcagacagacagancttgagagagcgcncgcgagatggcagcctccatgatcacctcgccgattgtggcgccgacgagcgtnccntccctctcccgccggggntcctccttcgccgtcgtctgcagcggtggcaagaagatcaaggtcganaagcccctnggactnggaggcggcttgacagtcgacatcgacgccaacggcaggaaggtnggcaagaagggcgtgtaccagttngttgacaagtacggngccaacgtcgacggctacagcccaatctacacgccagaggaatggtctgantctggtgaccgctacgccggcggaacgaccgggcttcttatctgggccgtcaccctcgccggcctcctcggcggcggcgtcctcctcgtctacaacaccagcgctctcgccggctaagagagcatctacgtgtaacacagggccgggtctctgcttgcatgcacgtctctgtaatctncntagctacctcctgtgaatgtatgcaatcaacgatgcaaagtaattgatccgaacagatggtttatgtgtatgtacgtaacgctgtaacgatatacttcctactttggaaactggtacaagggcggcatctctggcagcccaaacaacaacccaacacacacccacaacaaaaccaaagggc

SEQ ID NO: 540785 - DNA, 343 bp, Homo sapiens
  misc_feature (85)..(85): n is a, c, g, or t
  misc_feature (227)..(227): n is a, c, g, or t
  misc_feature (233)..(233): n is a, c, g, or t
  misc_feature (241)..(241): n is a, c, g, or t
  misc_feature (247)..(247): n is a, c, g, or t
  misc_feature (250)..(250): n is a, c, g, or t
  misc_feature (256)..(256): n is a, c, g, or t
  misc_feature (303)..(303): n is a, c, g, or t
  misc_feature (315)..(315): n is a, c, g, or t
gagcccagaggttgccaaggacccctctgacatccggcctgcttcttctcacatgacaaaaactagcccccatctcaaatcattnttaccaaaaatctctccctcacttaaaacggtaagggccctttctccctcacttcttcttcaaatcctttaatcccaatcaataggccaggggcaggtttggaggggtggggaatttaaaacccaaaaaccccaaggcttancggccnggggaatnggaaanttnaattanggccaagggtttccttaccccggtacccaaaccccctttaaacccantaaaacccccantttccttttaaaatttttaaaaccttaa

SEQ ID NO: 540786 - DNA, 374 bp, Homo sapiens
gggttttccccggaaagtgttccaaagcagggccgcaagggcgggcccttccgcctccccggcccccttcgttgtgggaaaacaggtttcgagaaacccaaagttttcgccttgggggtccccccccaggggctggggttgcccgtcccaaaaagttttccccggggggggggtttgggggggaagggcccccccccggtccccggtttccgcctggccccccccccccctttgggctttggcccttttttccccggggggccccccccctttgggggcccccgggtttttttttcccccccccccccccccccccttgggtttttttttggtaatgttggggggggatggattaattaaggggtttttttcca

SEQ ID NO: 540787 - DNA, 1407 bp, Homo sapiens
  misc_feature (1121)..(1121): n is a, c, g, or t
ggccccctgcccctcgccgcccgccgactgcctgtggccgggccgaggatgcggctgcagcggcctcggcggccaggcttgctcccctcctggcactgcctgctaacttcgcccgcgtacgtccccggttcgccctgcctgggcctgcccgtctccccggcgccctccgggtcgggtcctccaggagcgccaggcgactgagccgccgatgatgcccatccggccgaatcgtccgacgcgcccgaggctccacgagctgacgcccagagaccccgaagacacaggagccacagacactcaaggcggacaatgcatgacgcactcgtgcacctacgatgggcacggacacatggcatggctggggacgaccagaggcccacgggagcgcggaggcacatgggggcaggagcaggacaagagcgccaagtacccagaatggagacaccggacgcccattggcattcccagaagggacaggaaaagcctatgggacagccagacgtggcccgagacccacacacaccacaggtatagagagacccatggccggaagagagcaaggccatggaggattggccggaacggaaaggccacgagggagcacattaggctggctagcaatgggacaaaggacaaagcacacagagagataagagacagacaccactatgaggggacacatataatgacacgaaggcaatattggccacaccaattggcatacaacgggaattggataaacaaaacacaccacgcccaccaggaactagcccgggggaccaacagaaggagccccattggacagaaccgtcggaaaaaacgaccaccaggacacccccaagacagaagagacgacggcgaaaagaaaaaaggacaccacccgatgaggagagacaaaccaagactatgacgacgttacacaaagccgggaggaccaaagcacgcggcaagcatcttgattgcaccattcggcgacaggaccgtagcgagccgggcgagaggaacctcagggcaaggggaccacacatgcagccaaagagggaacacaaagagacccctagggcacaggaccacccatgccattcgaacacccacatatggacgaacacagagacaagagngagagatgggaaacacacaaacaccaccacagaaaagacacaacaaagggacagtacacaaggcgagcacaccagtgcgaataaggcagtaggcaaccagactagaacaccgaggcaagaggcatagaccccatagaccaagaacaaagacacaaaagtattccagccgcaaaaaaaaataaccgaacagaaacacgagaaagagcaaccaaagagagtaagaaggagcaacaacagtagatgaaacagcagacacacacaatcgggaggagagaaggacacccac

SEQ ID NO: 540788 - DNA, 180 bp, Homo sapiens
ttcttgaatgcttgtcaaattaagaaagttaaagtgcaataatgttgaagacaataagtggggtgtatctgtttctaataagataaactttttgtcttgctttatcttattagggagtgtatgtcaggtataaaacatactgtgtggtataacaggcttaagtaaatactttaaaaagga

SEQ ID NO: 540789 - DNA, 159 bp, Homo sapiens
agtcggattgtgggttttcctcgtctcatcggtgatcgcctatcccgcgatgtacctgttccagatctattcatcaacacattggccgaatcagccaatgcaaggactaccctagcgtcatctcaggttatctgggaaagaactggggcttttttatcg

SEQ ID NO: 540790 - DNA, 2161 bp, Homo sapiens
taagccagtggctgcctttttctgagcccgggccggggccgaaggcgcccgtaggccctcgggactcccagcactgcagagggtgtgaggtctgacatccaagacacgttgtttcgtatttctgaaggaagaactcaagctccgggaagtgatggctggggatggggcgggcaacttggggaccgagtgtacgatccacgcctaaggttgagggcggccgagctagccaggcagccgtgaccccagtgcttttcagacgtttcttagcttccagagcccaacacatacagctgatacacgcagaccagatctggtcaggtcctcggaagctgagtccagagcgatgctgctgaagacagtgctcttgctgggacatgtggcccaggtgctgatgctggacaatgggctcctgcagacaccacccatgggctggctggcctgggaacgcttccgctgcaacattaactgtgatgaggacccaaagaactgcataagtgaacagctcttcatggagatggctgaccggatggcacaggatggatggcgggacatgggctacacatacctcaacattgatgactgctggatcggtggtcgcgatgccagtggccgcctgatgccagatcccaagcgcttccctcatggcattcctttcctggctgactacgttcactccctgggcctgaagttgggtatctacgcggacatgggcaacttcacctgcatgggttacccaggcaccacactggacaaggtggtccaggatgctcagaccttcgccgagtggaaggtagacatgctcaagctggatggctgcttctccacccccgaggaggcggcccaggggtaccccaagatggctgctggcctgaatgccacaggccgccccatcgccttctcctgcagctggccagcctatgaaggcggcctccccccaagggtgaactacagtctgcaggcggacatctgcaacctctggcgtaactacgatgacatccaggactcctggcggagcgtgctctccatcctgaattggttcgtggagcaccaggacatactgcagccagtggccggccctgggcactggaatgaccctgacatgctgctcattgggaactttggtctcagcttagagcaatcccgggcccagatggccctgtggacggtgctggcagcccccctcttgatgtccacagacctgcgtaccatctccgcccagaacatggacattctgcagaatccactcatgatcaaaatcaaccaggatcccttaggcatccagggacgcaggattcacaagggatcctggatgcctaagggatcctgcgtccctggatgcctaagggatcctgggacgcaggattcacaaggaaaaatctctcatcgaagtgtacatgcggcctctgtccaacaaggctagcgccttagtcttcttcagctgcaggaccgatatgccttatcgctaccactcctcccttggccagctgaacttcaccgggtctgtgatatatgaggcccaggacgtctactcaggtgacatcatcagtggcctccgagatgaaaccaacttcacagtgatcatcaacccttcaggggagtgatgtggtacctgtatcccatcaagaacctggagatgtcccagcagtgaggagctgggacatgtgacaggctgtggtggcaccactgagcctagaccatggagccttggcatgcccagggcaagtggggaggttctctgctccccaggcctgctcggtgactgaccccatcatacccaaagtgcaatctcacggccaggttctatgccctgtccaagcgtaaaccctcttggaaacttcttttggggcaattttcctgtggccttcctggcctctacttccatgtgcgcagccccacagacgttgctgagcaactcgccagcctcctgagctccatgcccatcaggactctagcctctgaccttgctgttgactctgaaatcaggatttggaagttttcgaattaggagtagagagatctgacctcttgccaggaatgcccatggatcgtgtgattggcttttctacccatagagggccttgcagcctgataccacctgggagtgagggtcacaaaggagaccttggctccctcaggtcaccaataaacctgttctttaatc

SEQ ID NO: 540791 - DNA, 2089 bp, Homo sapiens
taagccagtggctgcctttttctgagcccgggccggggccgaaggcgcccgtaggccctcgggactcccagcactgcagagggtgtgaggtctgacatccaagacacgttgtttcgtatttctgaaggaagaactcaagctccgggaagtgatggctggggatggggcgggcaacttggggaccgagtgtacgatccacgcctaaggttgagggcggccgagctagccaggcagccgtgaccccagtgcttttcagacgtttcttagcttccagagcccaacacatacagctgatacacgcagaccagatctggtcaggtcctcggaagctgagtccagagcgatgctgctgaagacagtgctcttgctgggacatgtggcccaggtgctgatgctggacaatgggctcctgcagacaccacccatgggctggctggcctgggaacgcttccgctgcaacattaactgtgatgaggacccaaagaactgcataagtgaacagctcttcatggagatggctgaccggatggcacaggatggatggcgggacatgggctacacatacctcaacattgatgactgctggatcggtggtcgcgatgccagtggccgcctgatgccagatcccaagcgcttccctcatggcattcctttcctggctgactacgttcactccctgggcctgaagttgggtatctacgcggacatgggcaacttcacctgcatgggttacccaggcaccacactggacaaggtggtccaggatgctcagaccttcgccgagtggaaggtagacatgctcaagctggatggctgcttctccacccccgaggaggcggcccaggggtaccccaagatggctgctggcctgaatgccacaggccgccccatcgccttctcctgcagctggccagcctatgaaggcggcctccccccaagggtgaactacagtctgcaggcggacatctgcaacctctggcgtaactacgatgacatccaggactcctggcggagcgtgctctccatcctgaattggttcgtggagcaccaggacatactgcagccagtggccggccctgggcactggaatgaccctgacatgctgctcattgggaactttggtctcagcttagagcaatcccgggcccagatggccctgtggacggtgctggcagcccccctcttgatgtccacagacctgcgtaccatctccgcccagaacatggacattctgcagaatccactcatgatcaaaatcaaccaggatcccttaggcatccagggacgcaggattcacaaggaaatctctcatcgaagtgtacatgcggcctctgtccaacaaggctagcgccttagtcttcttcagctgcaggaccgatatgccttatcgctaccactcctcccttggccagctgaacttcaccgggtctgtgatatatgaggcccaggacgtctactcaggtgacatcatcagtggcctccgagatgaaaccaacttcacagtgatcatcaacccttcaggggagtgatgtggtacctgtatcccatcaagaacctggagatgtcccagcagtgaggagctgggacatgtgacaggctgtggtggcaccactgagcctagaccatggagccttggcatgcccagggcaagtggggaggttctctgctccccaggcctgctcggtgactgaccccatcatacccaaagtgcaatctcacggccaggttctatgccctgtccaagcgtaaaccctcttggaaacttcttttggggcaattttcctgtggccttcctggcctctacttccatgtgcgcagccccacagacgttgctgagcaactcgccagcctcctgagctccatgcccatcaggactctagcctctgaccttgctgttgactctgaaatcaggatttggaagttttcgaattaggagtagagagatctgacctcttgccaggaatgcccatggatcgtgtgattggcttttctacccatagagggccttgcagcctgataccacctgggagtgagggtcacaaaggagaccttggctccctcaggtcaccaataaacctgttctttaatc

SEQ ID NO: 540792 - DNA, 202 bp, Homo sapiens
gacgtacgccgagtgcggaaaaaggccgcacctgctacaacaacacacagatcaatctcgacgccgtttcgcggtttaccgccagtgtccttgaccagtgtccttgaacaggtgggtattcagaccaccgcacaaaccacggtcacggctcactaccacataacccacacgcttgacggcgcggtcgatcatgaacgggtgg

SEQ ID NO: 540793 - DNA, 851 bp, Homo sapiens
ggtgatcttctgttctagggagaacagtgtctcatttgcagaaaggcagacaggcacctgcggtatttgtgacatgccatgacaagtctctgaataagaagtcaggctgaccactgggcgacatctacagaacaaagaacggcatgtgaattctgtgcacgaatgaagctggaggacagtaacttttacaaagacatacccagtgtccggcgcgtgtctcacaagtggacttttcctgaactattaactcccagccctacccttgtcacgttattcttcagcgagacagtctcaagcacttacacaaagtggcctacattccaatttatggcggtatacgtggccaaactaggcaccatccttccaacgctcacacacagacccagtgcgactcatggaacaagttgcctgctcctcggtccctttgacgacacacgacactacacctcgctcctgacggcgcaggacgtacactactaacgggctcctctccatgcttggccgtactcggggcccatacgcccttattaccttcggctcacgaagcacttcctaatttagtaactgtgggcaattcgctagggacatcttataccggccactgcgatgggcctttacctccaacagcctttgtacatcctaaaagatcttctcacaggaatttaccacgtagtaagacatggccgtatgtacccgtgcaggggccaacgtacagttcaggacattcacgtcgtaatcacccaggctcacgcttattgtcaactgcaacttggttcacagtgcatagttgggatttcccccttccatgtgcctaacttgggcaacatcgtgggcttcccaggcacaggtcc

SEQ ID NO: 540794 - DNA, 145 bp, Homo sapiens
cctgcaagccgacactagagtatccccgcggcagctgactggactgaacccctcctccctactctcctgtgccccaggacccctgcctgctggggaaggggctcctggggtatgaaagtataagactggaagacaccaagtaccg

SEQ ID NO: 540795 - DNA, 176 bp, Homo sapiens
ctggacgcaggatatgcaggaactctgtactttctgctgtgatctacaactgctccaaaaaaataaattcttctgtaaaatatatctatgttgtccctcagcgtctatgggggactggttcaatggacctcctagagataccaaaatccacagatgctcaagtccctttctgttgt

SEQ ID NO: 540796 - DNA, 1006 bp, Homo sapiens
  misc_feature (404)..(404): n is a, c, g, or t
  misc_feature (1001)..(1001): n is a, c, g, or t
gagttggagtctctgtcacccaagctggagtgcagtggcgcgttctcggctcactgcaacctccgcctcctgggttcaagcgattctcctgcctcagtctcccgagtgtctgggactagaggcgcgcaccgcacgcccggctaatttttgtatttttagtagagacggggtttcactattttggccaggctggtctcgaacatctgacctcaagtgatccgcccacctcggtttcccaaaatgctgggattacaggcgtgagccaccgcgcctggcccgggtgtcttttttcgaaaggataaattggcataggtgggatttcctcctcaatcttgagaaaatggccgagtgattagacaaataatagtaatgttttgcaatatcttgaagtgtacctcttgttnccagttttggtgttttcttaaaaaggagcattcttcggaaagttaaaatgtcacgtcttaatttcagttttcctaatcaagatttgataattgaagagtgttttcttatctagttcttaatctggctcactatacagttgaagacactgaagcccagggaagtttttttgcagtacataggtttcctgaatattttctatcagaatgtccttgttcctattattagactgggaaaaagaaattagactgattaaaattctatttggatgaaattaacagcttttggcaagacgtttgtagtattgacttactatctgaatttagcgttggtaacggaaagcgacctgtaaaacaagaaccaagtacgctggaagccgccttgcagggggcaacactgggtttggcttcagctgtgcaacttggagcattttagcttggtaacactgatcccctttcaggtgagtattgggcttgtaatttgaatttgaatgagaaaccgtaatgtggctactggtaaggtaaaacggataaatgccccagaccaaaacagctcgctttcttgctgtccaatttctattaaaggttcctttgtttccnaaggt

SEQ ID NO: 540797 - DNA, 1208 bp, Homo sapiens
  misc_feature (1143)..(1143): n is a, c, g, or t
  misc_feature (1146)..(1147): n is a, c, g, or t
  misc_feature (1152)..(1152): n is a, c, g, or t
  misc_feature (1157)..(1157): n is a, c, g, or t
  misc_feature (1159)..(1159): n is a, c, g, or t
  misc_feature (1168)..(1168): n is a, c, g, or t
  misc_feature (1176)..(1176): n is a, c, g, or t
cggccgccattcccctcccccacgctggcgggtaaggctagagaacggtttcaaggaagacgcatgcgcatgaaataattataaaccgctaagactccgaagttcaatattcgcgggaaggcgcaggcgcaacaaaaagcccggcgggtttatgggtgggggtgctgagcccaaaacccaagcgtgtaataatccgccggcgggaggtgggctggctcttgaaattacgcatgcgccagagctctttgtgacgcaacggggcggtgcgggcagctggctgcgcgtgcgcagaactcgcacaagggaccttatttaggttgcgcaggcgcccgctggccatttcgtcttagccacgcagaagtcgcgtgtctagtttgtttcgacgccggaccgcgtaagagacgatgatgttgggcacggaaggtggagagggattcgtggtgaaggtccggggcttgccctggtcttgctcggccgatgaagtgcagaggtttttttctgactgcaaaattcaaaatggggctcaaggtattcgtttcatctacaccagagaaggcagaccaagtggcgaggcttttgttgaacttgaatcagaagatgaagtcaaattggccctgaaaaaagacagagaaactatgggacacagatatgttgaagtattcaagtcaaacaacgttgaaatggattgggtgttgaagcatactggtccaaatagtcctgacacggccaatgatggctttgtacggcttagaggacttccctttggatgtagcaaggaagaaattgttcagttcttctcagggttggaaatcgtgccaaatgggataacattgccggtggacttccaggggaggagtacgggggaggccttcgtgcagtttgcttcacaggaaatagctgaaaaggctctaaagaaacacaaggaaagaatagggcacaggtatattgaaatctttaagagcagtagagctgaagttagaactcattatgatccaccacgaaagcttatggccatgcagcggccaggtccttatgacagacctggggctggtagagggtataacagcattggcagaggagctggctttgagaggatgaggcgtggtgcttatggtggaggctatggaggctatgatgattcanggnnatgangtggnangatgggcanatgattgnagaaactcaaaggtcagaaagttgtccaatcg

SEQ ID NO: 540798 - DNA, 603 bp, Homo sapiens
cggccgccattcccctcccccacgctggcgggtaaggctagagaacggtttcaaggaagacgcatgcgcatgaaataattataaaccgctaagactccgaagttcaatattcgcgggaaggcgcaggcgcaacaaaaagcccggcgggtttatgggtgggggtgctgagcccaaaacccaagcgtgtaataatccgccggcgggaggtgggctggctcttgaaattacgcatgcgccagagctctttgtgacgcaacggggcggtgcgggcagctggctgcgcgtgcgcagaactcgcacaagggaccttatttaggttgcgcaggcgcccgctggccatttcgtcttagccacgcagaagtcgcgtgtctaggtgagtcgcggtgggtcctcgcttgcagttcagcgaccacggtgggtaccgtttttgcgaggattgtttgtccccatatctctgggagggccacggggaccttggcgagctgcaggctgccgtcgagagccgcgagtggttcgctgaatctcggcaccgccgctgaggcctgcaggccgcgccgactctattgtgtgagaagtcggaggaggcggagcggaagcggccgc

SEQ ID NO: 540799 - DNA, 2430 bp, Homo sapiens
tggcgaattcggcacgagggccacgcagaagtcgcgtgtctaggtgagtcgcggtgggtcctcgcttgcagttcagcgaccacgtttgtttcgacgccggaccgcgtaagagacgatgatgttgggcacggaaggtggagagggattcgtggtgaaggtccggggcttgccctggtcttgctcggccgatgaagtgcagaggtttttttctgactgcaaaattcaaaatggggctcaaggtattcgtttcatctacaccagagaaggcagaccaagtggcgaggcttttgttgaacttgaatcagaagatgaagtcaaattggccctgaaaaaagacagagaaactatgggacacagatatgttgaagtattcaagtcaaacaacgttgaaatggattgggtgttgaagcatactggtccaaatagtcctgacacggccaatgatggctttgtacggcttagaggacttccctttggatgtagcaaggaagaaattgttcagttcttctcagggttggaaatcgtgccaaatgggataacattgccggtggacttccaggggaggagtacgggggaggccttcgtgcagtttgcttcacaggaaatagctgaaaaggctctaaagaaacacaaggaaagaatagggcacaggtatattgaaatctttaagagcagtagagctgaagttagaactcattatgatccaccacgaaagcttatggccatgcagcggccaggtccttatgacagacctggggctggtagagggtataacagcattggcagaggagctggctttgagaggatgaggcgtggtgcttatggtggaggctatggaggctatgatgattacaatggctataatgatggctatggatttgggtcagatagatttggaagagacctcaattactgtttttcaggaatgtctgatcacagatacggggatggtggctctactttccagagcacaacaggacactgtgtacacatgcggggattaccttacagagctactgagaatgacatttataattttttttcaccgctcaaccctgtgagagtacacattgaaattggtcctgatggcagagtaactggtgaagcagatgtcgagttcgcaactcatgaagatgctgtggcagctatgtcaaaagacaaagcaaatatgcaacacagatatgtagaactcttcttgaattctacagcaggagcaagcggtggtgcttacgaacacagatatgtagaactcttcttgaattctacagcaggagcaagcggtggtgcttatggtagccaaatgatgggaggcatgggcttgtcaaaccagtccagctacgggggcccagccagccagcagctgagtgggggttacggaggcggctacggtggccagagcagcatgagtggatacgaccaagttttacaggaaaactccagtgattttcaatcaaacattgcataggtaaccaaggagcagtgaacagcagctactacagtagtggaagccgtgcatctatgggcgtgaacggaatgggagggttgtctagcatgtccagtatgagtggtggatggggaatgtaattgatcgatcctgatcactgactcttggtcaacctttttttttttttttttttttctttaagaaaactttcagtttaacagtttctgcaatacaagcttgtgatttatgcttactctaagtggaaatcaggattgttatgaagacttaaggcccagtatttttgaatacaatactcatctaggatgtaacagtgaagctgagtaaactataactgttaaacttaagttccagcttttctcaagttagttataggatgtacttaagcagtaagcgtatttaggtaaaagcagttgaattatgttaaatgttgccctttgccacgttaaattgaacactgttttggatgcatgttgaaagacatgcttttatttttttgtaaaacaatataggagctgtgtctactattaaaagtgaaacattttggcatgtttgttaattctagtttcatttaataacctgtaaggcacgtaagtttaagcttttttttttttttaagttaatgggaaaaatttgagacgcaataccaatacttaggattttggtcttggtgtttgtatgaaattctgaggccttgatttaaatctttcattgtattgtgatttccttttaggtatattgcgctaagtgaaacttgtcaaataaatcctccttttaaaaactgccaaaaaagcaacgaaaaaaaaaaaacacatgggggggggcccggcccgagaaatttaaaaacctcgtggggggggaccagggggatggaaggccccacggccaaggacccgggcgaaagggcgggcccccaaaaaaggcgggggcgcggtcgacaccagggggggccggcccacggccggcac

SEQ ID NO: 540800 - DNA, 2631 bp, Homo sapiens
tggcgaattcggcacgagggccacgcagaagtcgcgtgtctaggtgagtcgcggtgggtcctcgcttgcagttcagcgaccacgtttgtttcgacgccggaccgcgtaagagacgatgatgttgggcacggaaggtggagagggattcgtggtgaaggtccggggcttgccctggtcttgctcggccgatgaagtgcagaggtttttttctgactgcaaaattcaaaatggggctcaaggtattcgtttcatctacaccagagaaggcagaccaagtggcgaggcttttgttgaacttgaatcagaagatgaagtcaaattggccctgaaaaaagacagagaaactatgggacacagatatgttgaagtattcaagtcaaacaacgttgaaatggattgggtgttgaagcatactggtccaaatagtcctgacacggccaatgatggctttgtacggcttagaggacttccctttggatgtagcaaggaagaaattgttcagttcttctcagggttggaaatcgtgccaaatgggataacattgccggtggacttccaggggaggagtacgggggaggccttcgtgcagtttgcttcacaggaaatagctgaaaaggctctaaagaaacacaaggaaagaatagggcacaggtatattgaaatctttaagagcagtagagctgaagttagaactcattatgatccaccacgaaagcttatggccatgcagcggccaggtccttatgacagacctggggctggtagagggtataacagcattggcagaggagctggctttgagaggatgaggcgtggtgcttatggtggaggctatggaggctatgatgattacaatggctataatgatggctatggatttgggtcagatagatttggaagagacctcaattactgtttttcaggaatgtctgatcacagatacggggatggtggctctactttccagagcacaacaggacactgtgtacacatgcggggattaccttacagagctactgagaatgacatttataattttttttcaccgctcaaccctgtgagagtacacattgaaattggtcctgatggcagagtaactggtgaagcagatgtcgagttcgcaactcatgaagatgctgtggcagctatgtcaaaagacaaagcaaatatgcaacacagatatgtagaactcttcttgaattctacagcaggagcaagcggtggtgcttacgaacacagatatgtagaactcttcttgaattctacagcaggagcaagcggtggtgcttatggtagccaaatgatgggaggcatgggcttgtcaaaccagtccagctacgggggcccagccagccagcagctgagtgggggttacggaggcggctacggtggccagagcagcatgagtggatacgaccaagttttacaggaaaactccagtgattttcaatcaaacattgcataggtaaccaaggagcagtgaacagcagctactacagtagtggaagccgtgcatctatgggcgtgaacggaatgggagggttgtctagcatgtccagtatgagtggtggatggggaatgtaattgatcgatcctgatcactgactcttggtcaacctttttttttttttttttttttctttaagaaaactttcagtttaacagtttctgcaatacaagcttgtgatttatgcttactctaagtggaaatcaggattgttatgaagacttaaggcccagtatttttgaatacaatactcatctaggatgtaacagtgaagctgagtaaactataactgttaaacttaagttccagcttttctcaagttagttataggatgtacttaagcagtaagcgtatttaggtaaaagcagttgaattatgttaaatgttgccctttgccacgttaaattgaacactgttttggatgcatgttgaaagacatgcttttatttttttgtaaaacaatataggagctgtgtctactattaaaagtgaaacattttggcatgtttgttaattctagtttcatttaataacctgtaaggcacgtaagtttaagcttttttttttttttaagttaatgggaaaaatttgagacgcaataccaatacttaggattttggtcttggtgtttgtatgaaattctgaggccttgatttaaatctttcattgtattgtgatttccttttaggtatattgcgctaagtgaaacttgtcaaataaatcctccttttaaaaactgcactccgtcttgtctgtgcttcagtgtcatgtggactgagtcttggtgctctgtgcccacctggggcctagggccacatctctggcttggcagttgaggctgttgcgtagatgtcttcagtcttccctccagtgcaactgaaggtaaactcgtctttggggccctggtggaagggctgtatgtcatttggctgcacaggacctgatctgaactgcctgtaactcattaagcacttgcacaaaacaaagggggaggcgccagtgccctcactgcatgcctgcatgtctttgaggccttcatgcttggctcccaaggtgccggaggcaagggaggtgtgatgaatatgtgggtttcttctagctcataagctcattgggttccgatg

SEQ ID NO: 540801 - DNA, 2409 bp, Homo sapiens
tggcgaattcggcacgagggccacgcagaagtcgcgtgtctaggtgagtcgcggtgggtcctcgcttgcagttcagcgaccacgtttgtttcgacgccggaccgcgtaagagacgatgatgttgggcacggaaggtggagagggattcgtggtgaaggtccggggcttgccctggtcttgctcggccgatgaagtgcagaggtttttttctgactgcaaaattcaaaatggggctcaaggtattcgtttcatctacaccagagaaggcagaccaagtggcgaggcttttgttgaacttgaatcagaagatgaagtcaaattggccctgaaaaaagacagagaaactatgggacacagatatgttgaagtattcaagtcaaacaacgttgaaatggattgggtgttgaagcatactggtccaaatagtcctgacacggccaatgatggctttgtacggcttagaggacttccctttggatgtagcaaggaagaaattgttcagttcttctcagggttggaaatcgtgccaaatgggataacattgccggtggacttccaggggaggagtacgggggaggccttcgtgcagtttgcttcacaggaaatagctgaaaaggctctaaagaaacacaaggaaagaatagggcacaggtatattgaaatctttaagagcagtagagctgaagttagaactcattatgatccaccacgaaagcttatggccatgcagcggccaggtccttatgacagacctggggctggtagagggtataacagcattggcagaggagctggctttgagaggatgaggcgtggtgcttatggtggaggctatggaggctatgatgattacaatggctataatgatggctatggatttgggtcagatagatttggaagagacctcaattactgtttttcaggaatgtctgatcacagatacggggatggtggctctactttccagagcacaacaggacactgtgtacacatgcggggattaccttacagagctactgagaatgacatttataattttttttcaccgctcaaccctgtgagagtacacattgaaattggtcctgatggcagagtaactggtgaagcagatgtcgagttcgcaactcatgaagatgctgtggcagctatgtcaaaagacaaagcaaatatgcaacacagatatgtagaactcttcttgaattctacagcaggagcaagcggtggtgcttacgaacacagatatgtagaactcttcttgaattctacagcaggagcaagcggtggtgcttatggtagccaaatgatgggaggcatgggcttgtcaaaccagtccagctacgggggcccagccagccagcagctgagtgggggttacggaggcggctacggtggccagagcagcatgagtggatacgaccaagttttacaggaaaactccagtgattttcaatcaaacattgcataggtaaccaaggagcagtgaacagcagctactacagtagtggaagccgtgcatctatgggcgtgaacggaatgggagggttgtctagcatgtccagtatgagtggtggatggggaatgtaattgatcgatcctgatcactgactcttggtcaacctttttttttttttttcagtttaacagtttctgcaatacaagcttgtgatttatgcttactctaagtggaaatcaggattgttatgaagacttaaggcccagtatttttgaatacaatactcatctaggatgtaacagtgaagctgagtaaactataactgttaaacttaagttccagcttttctcaagttagttataggatgtacttaagcagtaagcgtatttaggtaaaagcagttgaattatgttaaatgttgccctttgccacgttaaattgaacactgttttggatgcatgttgaaagacatgcttttatttttttgtaaaacaatataggagctgtgtctactattaaaagtgaaacattttggcatgtttgttaattctagtttcatttaataacctgtaaggcacgtaagtttaagcttttttttttttttaagttaatgggaaaaatttgagacgcaataccaatacttaggattttggtcttggtgtttgtatgaaattctgaggccttgatttaaatctttcattgtattgtgatttccttttaggtatattgcgctaagtgaaacttgtcaaataaatcctccttttaaaaactgccaaaaaagcaacgaaaaaaaaaaaacacatgggggggggcccggcccgagaaatttaaaaacctcgtggggggggaccagggggatggaaggccccacggccaaggacccgggcgaaagggcgggcccccaaaaaaggcgggggcgcggtcgacaccagggggggccggcccacggccggcac

SEQ ID NO: 540802 - DNA, 1748 bp, Homo sapiens
tggcgaattcggcacgagggccacgcagaagtcgcgtgtctaggtgagtcgcggtgggtcctcgcttgcagttcagcgaccacgtttgtttcgacgccggaccgcgtaagagacgatgatgttgggcacggaaggtggagagggattcgtggtgaaggtccggggcttgccctggtcttgctcggccgatgaagtgcagaggtttttttctgactgcaaaattcaaaatggggctcaaggtattcgtttcatctacaccagagaaggcagaccaagtggcgaggcttttgttgaacttgaatcagaagatgaagtcaaattggccctgaaaaaagacagagaaactatgggacacagatatgttgaagtattcaagtcaaacaacgttgaaatggattgggtgttgaagcatactggtccaaatagtcctgacacggccaatgatggctttgtacggcttagaggacttccctttggatgtagcaaggaagaaattgttcagttcttctcagggttggaaatcgtgccaaatgggataacattgccggtggacttccaggggaggagtacgggggaggccttcgtgcagtttgcttcacaggaaatagctgaaaaggctctaaagaaacacaaggaaagaatagggcacaggtatattgaaatctttaagagcagtagagctgaagttagaactcattatgatccaccacgaaagcttatggccatgcagcggccaggtccttatgacagacctggggctggtagagggtataacagcattggcagaggagctggctttgagaggatgaggcgtggtgcttatggtggaggctatggaggctatgatgattacaatggctataatgatggctatggatttgggtcagatagatttggaagagacctcaattactgtttttcaggaatgtctgatcacagatacggggatggtggctctactttccagagcacaacaggacactgtgtacacatgcggggattaccttacagagctactgagaatgacatttataattttttttcaccgctcaaccctgtgagagtacacattgaaattggtcctgatggcagagtaactggtgaagcagatgtcgagttcgcaactcatgaagatgctgtggcagctatgtcaaaagacaaagcaaatatgcaacacagatatgtagaactcttcttgaattctacagcaggagcaagcggtggtgcttacgaacacagatatgtagaactcttcttgaattctacagcaggagcaagcggtggtgcttatggtagccaaatgatgggaggcatgggcttgtcaaaccagtccagctacgggggcccagccagccagcagctgagtgggggttacggaggcggctacggtggccagagcagcatgagtggatacgaccaagttttacaggaaaactccagtgattttcaatcaaacattgcataggtaaccaaggagcagtgaacagcagctactacagtagtggaagccgtgcatctatgggcgtgaacggaatgggagggttgtctagcatgtccagtatgagtggtggatggggaatgtaattgatcgatcctgatcactgactcttggtcaacctttttttttttttttttttttttttttttttttttttttttttttttttttttttttttttttttttttccctctccatttctgtcttcagcatcagacctaaataaccaacatcagcatacaacaaacc

SEQ ID NO: 540803 - DNA, 2197 bp, Homo sapiens
tggcgaattcggcacgagggccacgcagaagtcgcgtgtctaggtgagtcgcggtgggtcctcgcttgcagttcagcgaccacgtttgtttcgacgccggaccgcgtaagagacgatgatgttgggcacggaaggtggagagggattcgtggtgaaggtccggggcttgccctggtcttgctcggccgatgaagtgcagaggtttttttctgactgcaaaattcaaaatggggctcaaggtattcgtttcatctacaccagagaaggcagaccaagtggcgaggcttttgttgaacttgaatcagaagatgaagtcaaattggccctgaaaaaagacagagaaactatgggacacagatatgttgaagtattcaagtcaaacaacgttgaaatggattgggtgttgaagcatactggtccaaatagtcctgacacggccaatgatggctttgtacggcttagaggacttccctttggatgtagcaaggaagaaattgttcagttcttctcagggttggaaatcgtgccaaatgggataacattgccggtggacttccaggggaggagtacgggggaggccttcgtgcagtttgcttcacaggaaatagctgaaaaggctctaaagaaacacaaggaaagaatagggcacaggtatattgaaatctttaagagcagtagagctgaagttagaactcattatgatccaccacgaaagcttatggccatgcagcggccaggtccttatgacagacctggggctggtagagggtataacagcattggcagaggagctggctttgagaggatgaggcgtggtgcttatggtggaggctatggaggctatgatgattacaatggctataatgatggctatggatttgggtcagatagatttggaagagacctcaattactgtttttcaggaatgtctgatcacagatacggggatggtggctctactttccagagcacaacaggacactgtgtacacatgcggggattaccttacagagctactgagaatgacatttataattttttttcaccgctcaaccctgtgagagtacacattgaaattggtcctgatggcagagtaactggtgaagcagatgtcgagttcgcaactcatgaagatgctgtggcagctatgtcaaaagacaaagcaaatatgcaacacagatatgtagaactcttcttgaattctacagcaggagcaagcggtggtgcttacgaacacagatatgtagaactcttcttgaattctacagcaggagcaagcggtggtgcttatggtagccaaatgatgggaggcatgggcttgtcaaaccagtccagctacgggggcccagccagccagcagctgagtgggggttacggaggcggctacggtggccagagcagcatgagtggatacgaccaagttttacaggaaaactccagtgattttcaatcaaacattgcataggtaaccaaggagcagtgaacagcagctactacagtagtggaagccgtgcatctatgggcgtgaacggaatgggagggttgtctagcatgtccagtatgagtggtggatggggaatgtaattgatcgatcctgatcactgactcttggtcaaccttttttttttttttttttttaaaagaaacttttgagtttaaacagggttttttggaatcacagggtgggtggatattagggcgtaactcaaagggggaaacctcgggagtggtgtataaaagactttaggggcaggtattttggatacacagacttcatcttagagtgtgtaacacgtgacaggttgtgtaaactatatatggtaaactgtaaggtccaggttttcaaaggtaggttataggaatggaacttacgcccagaaggcgtattagaggaacaggcgtggaatttaggtaaatgttgtgcccttggccagttaaattggacactggtttgggttccctgtggagggaaggtttaattttaggcacacaattgggggggtgttactataaggcgaacattgggcggtgtgtgaatcacgtgttattaaaacggggggcaaattaagcgctttttagtaaggaagtgtggcgcacacaatagaattgtggtgtgggtgaaaagggcgagaaacaagtgatgattgatggtggaggggaatctttgtagaaaaaagtgtgcgcatatggggggatt

SEQ ID NO: 540804 - DNA, 1969 bp, Homo sapiens
tggcgaattcggcacgagggccacgcagaagtcgcgtgtctaggtgagtcgcggtgggtcctcgcttgcagttcagcgaccacgtttgtttcgacgccggaccgcgtaagagacgatgatgttgggcacggaaggtggagagggattcgtggtgaaggtccggggcttgccctggtcttgctcggccgatgaagtgcagaggtttttttctgactgcaaaattcaaaatggggctcaaggtattcgtttcatctacaccagagaaggcagaccaagtggcgaggcttttgttgaacttgaatcagaagatgaagtcaaattggccctgaaaaaagacagagaaactatgggacacagatatgttgaagtattcaagtcaaacaacgttgaaatggattgggtgttgaagcatactggtccaaatagtcctgacacggccaatgatggctttgtacggcttagaggacttccctttggatgtagcaaggaagaaattgttcagttcttctcagggttggaaatcgtgccaaatgggataacattgccggtggacttccaggggaggagtacgggggaggccttcgtgcagtttgcttcacaggaaatagctgaaaaggctctaaagaaacacaaggaaagaatagggcacaggtatattgaaatctttaagagcagtagagctgaagttagaactcattatgatccaccacgaaagcttatggccatgcagcggccaggtccttatgacagacctggggctggtagagggtataacagcattggcagaggagctggctttgagaggatgaggcgtggtgcttatggtggaggctatggaggctatgatgattacaatggctataatgatggctatggatttgggtcagatagatttggaagagacctcaattactgtttttcaggaatgtctgatcacagatacggggatggtggctctactttccagagcacaacaggacactgtgtacacatgcggggattaccttacagagctactgagaatgacatttataattttttttcaccgctcaaccctgtgagagtacacattgaaattggtcctgatggcagagtaactggtgaagcagatgtcgagttcgcaactcatgaagatgctgtggcagctatgtcaaaagacaaagcaaatatgcaacacagatatgtagaactcttcttgaattctacagcaggagcaagcggtggtgcttacgaacacagatatgtagaactcttcttgaattctacagcaggagcaagcggtggtgcttatggtagccaaatgatgggaggcatgggcttgtcaaaccagtccagctacgggggcccagccagccagcagctgagtgggggttacggaggcggctacggtggccagagcagcatgagtggatacgaccaagttttacaggaaaactccagtgattttcaatcaaacattgcataggtaaccaaggagcagtgaacagcagctactacagtagtggaagccgtgcatctatgggcgtgaacggaatgggagggttgtctagcatgtccagtatgagtggtggatggggaatgtaattgatcgatcctgatcactgactcttggtcaaccttttttttttttttttttttttaaaaaaaatttcggttaaccggtttcggcaaaaacaagctgtgggattaaggctaccctagggggaaatcaggctttgttttgaaagacttgaggcgcccagatatttctggatctacagctatctcagtctgaggagtgtcacagtgaaaccctgagtaacctaatacctgttcatccttagtcccacgctttcctcaacggtagtctgcggatgtccttagcagaaaggcgtattaggtaaccgccgctgaactctgttaattgtccctgtgcccgtaattgaccctgttcggtgccgttaacacatgtcttttttcgcaccttttg

SEQ ID NO: 540805 - DNA, 429 bp, Homo sapiens
  misc_feature (6)..(6): n is a, c, g, or t
  misc_feature (29)..(29): n is a, c, g, or t
  misc_feature (214)..(214): n is a, c, g, or t
  misc_feature (237)..(237): n is a, c, g, or t
  misc_feature (241)..(241): n is a, c, g, or t
  misc_feature (270)..(270): n is a, c, g, or t
  misc_feature (272)..(272): n is a, c, g, or t
  misc_feature (278)..(279): n is a, c, g, or t
  misc_feature (285)..(285): n is a, c, g, or t
  misc_feature (291)..(291): n is a, c, g, or t
  misc_feature (314)..(314): n is a, c, g, or t
  misc_feature (318)..(318): n is a, c, g, or t
  misc_feature (321)..(321): n is a, c, g, or t
  misc_feature (327)..(327): n is a, c, g, or t
  misc_feature (330)..(330): n is a, c, g, or t
  misc_feature (332)..(332): n is a, c, g, or t
  misc_feature (334)..(334): n is a, c, g, or t
  misc_feature (336)..(336): n is a, c, g, or t
  misc_feature (341)..(342): n is a, c, g, or t
  misc_feature (351)..(351): n is a, c, g, or t
  misc_feature (354)..(354): n is a, c, g, or t
  misc_feature (356)..(356): n is a, c, g, or t
  misc_feature (362)..(363): n is a, c, g, or t
  misc_feature (367)..(367): n is a, c, g, or t
  misc_feature (372)..(372): n is a, c, g, or t
  misc_feature (380)..(380): n is a, c, g, or t
  misc_feature (382)..(382): n is a, c, g, or t
  misc_feature (386)..(386): n is a, c, g, or t
  misc_feature (392)..(392): n is a, c, g, or t
tgcccngagtgcggcaaaacctttactgntcgttcaaatctaactattcatcaggtcatccatactggagaaaaaccttacaaatgtccggaatgtggcaaggtcttcagtcacaagtcatccctagtaaatcactggagaattcatactggagagaaaccttacaaatgtaatgagcgtggcaaggtcttcaaacacaggtcatatctcatgnggcaccagcagactcataccggngagnagccctatgagtgcagtgaatgtgggaangncttctnngagagngcagcnctgattcaccactatgtcatccncacnggngagaanccntntnantgccnngagtgtggnaangntttcanncacngatcntacctcangnggcnccagcngattcaaacaggtgagaagccaatcactagtgaattc

SEQ ID NO: 540806 - DNA, 909 bp, Homo sapiens
ggtcgttggggggctctggattggggtgcccccgccccttggcggggggccaccgttttccgtcgttgtgttcgctggggaggccgtgcggggcagcgtccaggtgggcctgtctgcactagttactgagccccttccggcgggggtcgtatattctttttccatcgcccactctctcgcgcgtgcggtgtgcccaccccactgttatcttttggtgtcccccccccgcccgctgtgtggtgtgactcactccccccccctcgcgctgaggcacaaattaattgattgggtttgtccacccttctttttgttagtccggcgcgcccctccactcctactcagacgatgtttctctgttgggtctccctccccccggtgattgtttttggcgggcgcgacactacacgggggtgacacacattctgtgggcgcgctctgcggaccactccctctctcacccagctttgtttttttgtggctgccacgcactacgaccgtctctttctgtgtggtacgcacctcccaccctcactactccctctctgctgctcgcaccccgcctcgattatagagacgtgcgggggcggttctttcccgcccctccacagtggattgtgtgttcagctagcgccctccgcacggcggtggtgggtgcttctcccgcccaaatgatcttcggtagatgggagggcggcaattcatgctgtcgtgctagtatataattgctgccacccgggatcgacgaaacacatattaactgcgataggagaaagcaattttttctgcctcttgaccccctctccctctttttcccccacaaattttttttttgattacaccccctcgtcccctctttttttttcccgccttttcccccctattttttttcccccttttttttttccccca

SEQ ID NO: 540807 - DNA, 533 bp, Homo sapiens
cagcacctccaagttggctgagactttaacagcgggacagcctgaaggtaggcttgactggtcacagatttctactctttcccaagcaatgacaccaaaaggatattggccaatccctttcccccttcattcttcttggggggctttggggaatggaagactctttctggttttcctgctgtctgggatggagtagcagatgccaaggaagggcgtggagaagggagaggaaggtatgataatatttagttttcttcttttcatgcttaaacagatagaaggaattttcagagcaaaatctggtttcaagtgtatggccatttttcaattaaagtcacttattaacctctatgtacataagcagaatctcctgagtctctctgaagacacaaagagaaaagatttccttcctccctccgactctctccaaatccccaagggacactcataagcgggtggagagggtgaaaagctcacaaatgtgaaggcagaagtcaccttgcacctttctggcacgaaaactttgaagtctt

SEQ ID NO: 540808 - DNA, 298 bp, Homo sapiens
acgtgctgactgtaagccagtataataagataaaacaaaaggtacttgtaataatagtcattaaaatatgctattgcatgcatttagaaaccaagacacaaataaaaatatacccagcagtattgtctatttagagcagctagaaacctatcagagctttcacaagatttgtctacttcactagtagctgctataaaggtaggtagaagtttccatacctatacagtaatattatatttaaaaatagtaaaatatgtatattcatagtataggacaaagcaagcctagctatattttt

SEQ ID NO: 540809 - DNA, 1690 bp, Homo sapiens
tggcgaattcggcacgagggccacgcagaagtcgcgtgtctaggtgagtcgcggtgggtcctcgcttgcagttcagcgaccacgtttgtttcgacgccggaccgcgtaagagacgatgatgttgggcacggaaggtggagagggattcgtggtgaaggtccggggcttgccctggtcttgctcggccgatgaagtgcagaggtttttttctgactgcaaaattcaaaatggggctcaaggtattcgtttcatctacaccagagaaggcagaccaagtggcgaggcttttgttgaacttgaatcagaagatgaagtcaaattggccctgaaaaaagacagagaaactatgggacacagatatgttgaagtattcaagtcaaacaacgttgaaatggattgggtgttgaagcatactggtccaaatagtcctgacacggccaatgatggctttgtacggcttagaggacttccctttggatgtagcaaggaagaaattgttcagttcttctcagggttggaaatcgtgccaaatgggataacattgccggtggacttccaggggaggagtacgggggaggccttcgtgcagtttgcttcacaggaaatagctgaaaaggctctaaagaaacacaaggaaagaatagggcacaggtatattgaaatctttaagagcagtagagctgaagttagaactcattatgatccaccacgaaagcttatggccatgcagcggccaggtccttatgacagacctggggctggtagagggtataacagcattggcagaggagctggctttgagaggatgaggcgtggtgcttatggtggaggctatggaggctatgatgattacaatggctataatgatggctatggatttgggtcagatagatttggaagagacctcaattactgtttttcaggaatgtctgatcacagatacggggatggtggctctactttccagagcacaacaggacactgtgtacacatgcggggattaccttacagagctactgagaatgacatttataattttttttcaccgctcaaccctgtgagagtacacattgaaattggtcctgatggcagagtaactggtgaagcagatgtcgagttcgcaactcatgaagatgctgtggcagctatgtcaaaagacaaagcaaatatgcaacacagatatgtagaactcttcttgaattctacagcaggagcaagcggtggtgcttacgaacacagatatgtagaactcttcttgaattctacagcaggagcaagcggtggtgcttatggtagccaaatgatgggaggcatgggcttgtcaaaccagtccagctacgggggcccagccagccagcagctgagtgggggttacggaggcggctacggtggccagagcagcatgagtggatacgaccaagttttacaggaaaactccagtgattttcaatcaaacattgcataggtaaccaaggagcagtgaacagcagctactacagtagtggaagccgtgcatctatgggcgtgaacggaatgggagggttgtctagcatgtccagtatgagtggtggatggggaatgtaattgatcgatcctgatcactgactcttggtcaaccttttttttttttttttttttttaggggttggagggaaaaaaccccggggggaatccttctaaagtcaacctg

SEQ ID NO: 540810 - DNA, 335 bp, Homo sapiens
  misc_feature (6)..(6): n is a, c, g, or t
  misc_feature (29)..(29): n is a, c, g, or t
  misc_feature (120)..(120): n is a, c, g, or t
  misc_feature (143)..(143): n is a, c, g, or t
  misc_feature (147)..(147): n is a, c, g, or t
  misc_feature (176)..(176): n is a, c, g, or t
  misc_feature (178)..(178): n is a, c, g, or t
  misc_feature (184)..(185): n is a, c, g, or t
  misc_feature (191)..(191): n is a, c, g, or t
  misc_feature (197)..(197): n is a, c, g, or t
  misc_feature (220)..(220): n is a, c, g, or t
  misc_feature (224)..(224): n is a, c, g, or t
  misc_feature (227)..(227): n is a, c, g, or t
  misc_feature (233)..(233): n is a, c, g, or t
  misc_feature (236)..(236): n is a, c, g, or t
  misc_feature (238)..(238): n is a, c, g, or t
  misc_feature (240)..(240): n is a, c, g, or t
  misc_feature (242)..(242): n is a, c, g, or t
  misc_feature (247)..(248): n is a, c, g, or t
  misc_feature (257)..(257): n is a, c, g, or t
  misc_feature (260)..(260): n is a, c, g, or t
  misc_feature (262)..(262): n is a, c, g, or t
  misc_feature (268)..(269): n is a, c, g, or t
  misc_feature (273)..(273): n is a, c, g, or t
  misc_feature (278)..(278): n is a, c, g, or t
  misc_feature (286)..(286): n is a, c, g, or t
  misc_feature (288)..(288): n is a, c, g, or t
  misc_feature (292)..(292): n is a, c, g, or t
  misc_feature (298)..(298): n is a, c, g, or t
tgcccngagtgcggcaaaacctttactgntcgttcaaatctaactattcatcaggtcatccatactggagaaaaaccttacaaatgggcaaggtcttcaaacacaggtcatatctcatgnggcaccagcagactcataccggngagnagccctatgagtgcagtgaatgtgggaangncttctnngagagngcagcnctgattcaccactatgtcatccncacnggngagaanccntntnantgccnngagtgtggnaangntttcanncacngatcntacctcangnggcnccagcngattcaaacaggtgagaagccaatcactagtgaattc

SEQ ID NO: 540811 - DNA, 272 bp, Homo sapiens
aacaacaacgtaactatactaacatctcagacgctcaggaaatagaaaccgtctgaactatcctgtgccgtcattattctactccaaatcgccctcccatccctacgcatcctttacataacagacgaggtcaacgatccctcccttaccatcaaatcaattggccaccaatggtactgaacctacgagtacaccgactacggcggactaatcttcaactcctacatacttcccccattattcctagaaccaggcgacctgcgaacctatga

SEQ ID NO: 540812 - DNA, 345 bp, Homo sapiens
gtgggacccagtccacagctattactgcgccaactgacctgaagttcactcaggttacacccacgagcctgagcgcccagtcttacaccactccaagtgttcaggctcatctggatatcgagtgcgggtgacccccaaggagaagaccggaccaatgaaagaaatcaaccttgctcctgacagctcatccgtgtatgtatcaggacttatgttgaccaccaaatatgaggtgagtgtgtatgctcttaaggacactatgacatgcagaccagctcatggagttgtcaccactctggagaatgtcagcccaccaagaaggactcgtgtgacagatgctactgagac

SEQ ID NO: 540813 - DNA, 200 bp, Homo sapiens
cttagaagtcttgccgagcccagatatggcagccctgggggtgccaggaacgacttcttcaaggacagccctttgcggtagcctcttttgaaaaaattgcagaggtcaacagttaccagaggactggacctgagcagatttccttaaattttcaaagaaaagggaggagaagaatgtctgtctctctgtaagtcagagag

SEQ ID NO: 540814 - DNA, 1969 bp, Homo sapiens
  misc_feature (1)..(1): n is a, c, g, or t
  misc_feature (180)..(180): n is a, c, g, or t
  misc_feature (1714)..(1714): n is a, c, g, or t
  misc_feature (1877)..(1877): n is a, c, g, or t
nggggaagcgaagagacagaaagacaagagaggcagagatgaggaaagaattggatgtgtgttgacagtgattgatgaagtcgtgtggattgcacatggagtagagtgaggttctgttcttgatcgatcgtcatgcactgtgaggatgtcgttggcatgtcttggatttgcatggattcnatgatctgatcgtgtcgatcgtgtgacatgattgtcgattgttagtgcaatctttgatatcttcatcgaatcgaatcacatctgtggtcaagcgagatgattcgacatatgctgatttcttcttcagtggagttcgtttgacttgtctgctgaagtttgttctgtgtatgcaaactactgtgtcatttatgttcgatttgatcagtttgcattcgtccatatgacgaatttattgtatgagggagtgcaacacgctccacatcgcgagcgacgcgaggggggaggtagaatcatataaacggaacgcgttgttgttgtgtgtgagccacgcccctgccatgtggtgtgcgctgtctcgggagtggagcccgtcgccacgtcaccgcacccgcgcgcgggtgtgtggttggagccgcccccgccgctgctatcggcagagaccccccccccgcggcgggctgcggagttgagcgaacatgcgcgctgccttgacgggatgaagtttgttctgactaccttattggtacgcgccacggggggtcgccgcgatggtgtatcagcacaggtgtgttgtgctcaccatccccggggacgaactactgcgtgtgtgtggagcgccacctgtttgtggcgccgctcatttttttgttggggcagcaccgacccccgtagttagtagccacaacaaaagggtggtgttgtgacgccacacaaagaaaagcacacccgcgggcggggtgtggggttgcctcccggcgcttcgctcggagggagtgtgttcctccgccccgcagggagatgttgtttgtgcggttggcagcacagcacacaccgaccaggaggctgggctcaccagcggggggagctgttcctcgtcagctgggtgtcgtctctggtctggtagcacacagtagtaactatgcccgcagaatgtggttttgtctactgttgtggggtagaagccacccccaccgcaacacggtgggggtccccctcggcggtagtcgtctgcttccgcctcgatgccgcgcggaaagcaggagggtgttgtttctctcgtctacagaagaggggtgttttcatcgccacacacacagcagcaactgttgggagggccgaccagaaggagcgcagacccgcgggcggaagaggtggctccccgtctccccccgcgctggatgtacttctctcgcgcgggggggcacacacaacgtggtggtgtatccctccgcagcacaacacgacgactgctgcgcatctgtgggagccctcttctcgcggggcgcggtgctctcaccacgcgcagaggacacgacgcggctagcgcagcgcctgctctctttgcgcacacacgcggtcgcacacacacgcacttcgtcgcgcgcacacatattttcgcgcgcgcggcgcgcgcgcacgagggagcgctcgtctgctctttcacacgcacgcacagcgtcgtctttgtaggcggcgcgcactcttgttgtgcgcacgcagcgcgccctttgcgcgcacactctactctctcccngcgccaccggggttttacacatccccacacttttttatcacacacacatgtacaccgcgcgcgccacactgttgtggatgtgagcccaaatccacccttgtgctcttataagaccccacgggagcccaccgcctgttttgctgtgtggctccacccccgggantacccccccacccactggttttttatggcccccccaccccccacacctttttgttgggggaaaaataaacgggttataaaattaaaacaaca

SEQ ID NO: 540815 - DNA, 283 bp, Homo sapiens
acattgttgctcgtcaacctgggcagcatatattaccacatatcgtcggcatatactgtcgctacgatgggcagctcatcagacaaggcgctacctgccaaacgaggcaagggctggagcgcacaagttctatagggtcctgctgaagggtgcaacgtgatggaatgaggtcattgtgcccgccggttgttcgtgattagctgtctctaacaattgttcataccataattgttcatcattgttctcaactaggggctctccccaatctggggacccttcctta

SEQ ID NO: 540816 - DNA, 93 bp, Homo sapiens
ggatttgctggtgcagtacaactaggcttaatagggactcgaattcgagcaggaaacagggaaactttggaatttgaaatatcacacccaaaa

SEQ ID NO: 540817 - DNA, 386 bp, Homo sapiens
cgaacaggacaagccaggagagggctatgggtcccactctacagatgagaaaggacagactgcagaaatgttccataaccgtcttataagtacaacagctcgaagtagtccactaggcctggaagccaggtctatgagactacaacgcctgtgccattgtgcatcacataccatgagtagacattaacataccactgaggtaattcctaccatattattaccaccttatgtggctttaaatcgactcattctttttaaattgagctttgtcacaggggtaatatcaatgagatcttgggttttgatgagctacttatttttctaatacccattgaaataaaaccacgatcattaactgtgttaaaagttcggcaatgtaccaccta

SEQ ID NO: 540818 - DNA, 982 bp, Homo sapiens
cgactctcagcccagtctttaaatcctcgagacctggaagatactagagtgatggtggctatccatagaagtaagatggaataatagagcgagtaatagaatggtgcgagaatctcgggacaattatgtaagatatgatatcctagtaatagccgttgcaactatttcacctgaatacttgagtgtcctaatgctcctcaggcctggcagaactatcttcattatcgtcacaacgtcaataccttgaatgtaatgggcccatgtgcgatgcgttcaccccctggaatcccaacaacttatggggagggctggagtgtgcaggcggatctactttgaagtgcctaggagatgtggaatacagaccatggaccatgtggtgaaaaccggagattcatgcatggagaggcatgggttaatcgggcttggtgtgcctgaacctgtcggtatcgcagtcatccatcaggtcgtgatagggtgacatccaggctgtctgcttgaaaacccagagaggctgatagtgtatgtctagtgtccctattcggtctatgtgggctagacaatgccattatgcagcaaagataggtgtaaggacagaaagtgcctctcaagtgccgcaactggtgtcagaatcaaggagatagggactacagtgtacttggccgcatgtatgagccaatgaaccatctggagatgtgacgggtcgaagcgagacgctcactcgcgaggcgcccgactggcgagtggcacggtccccaaaggggttctcctccagaaaatgaatcctaggacgaaaggcagagcacctccctggaataagcggtaatggggacagggccggggcatcccagaacaccaacacgggggaaggaaccgacagagcctttgacaaaagggggagtgtacaaggcgacggcacaaaaaaggcgggcaacaccgggagggagcacggcagcaaacaggctggggcacgacacaagcaccc

SEQ ID NO: 540819 - DNA, 298 bp, Homo sapiens
tagggaggtaagcaaccggtctatagacacatagctaatctgtggcgtggaagagatctgctgtctgagctcaagtctgtcttgggctaccagaacgccacaggttctctactttgcctctgactcattttctgttgtgggtaaatggctgtctattggacttgcaattgatccccatactgggcatataaaatccagatggacccctgtatatattcgtgttctccatagcttgctaattaaaggacaaagcgcgagaacttgtgatacattttctacaaagaaacaggagatttta

SEQ ID NO: 540820 - DNA, 203 bp, Homo sapiens
  misc_feature (21)..(21): n is a, c, g, or t
  misc_feature (26)..(26): n is a, c, g, or t
  misc_feature (33)..(34): n is a, c, g, or t
  misc_feature (39)..(41): n is a, c, g, or t
  misc_feature (44)..(44): n is a, c, g, or t
  misc_feature (47)..(47): n is a, c, g, or t
gagcagtcatcctcccccttncccgngcagggnncaggnnntcngtnctgggggtggtgggcggacaataggatcactgcctgccagatcttcacactttatatatatatatatatatatatatatatatatatatatataaataaaaatgccacggtcctgctctggtcaataaaggatcctttgttgatacgtaaaaaaaa

SEQ ID NO: 540821 - DNA, 992 bp, Homo sapiens
gggtcgcttccctgcgcaaagtgagcagtagccaacatgtcagggtgcggagtcatattcacaaaaccgagggcgatgaagacagcagaggaagaacaagacgagaaccttgaacggcaagtggagactatgaatatttgatgcctccaaggttatgtttgaatctcaagagtgaagatgagtagacacgctttggacattacaggagatatcatcagcatagcagaggatgagtgacctcagggttacacctttgaggacactccagcaagctagaagacctgttgcggaagggtccgcgcaaaggagaccaggaagcgagcactcagcaggttcagacgctgaagcctccaccagaaggatatagggatgaatctcctgtaggcgcagttttcataactctgggtccaagaaaaggtctcctcaacgcctccttccaatatagagctctcatcggggcaacacaaacatgacccagtgaaaatccaaagaacccgggacccttttaaataccaaggtccaggcggcttgccttctgcttagcggtgtaccaatgagggctctcaagatctaatgcggagatcgcccagattgataccttggacgcacaagaggcaacacaagaacgagctaaaaacgggttgattgatcccaagggttagattgctccattgggtttccaacgccgtggggtatctgctggaggaaagagcaattaccttgaggcctccctggttcgagtacccatgaaggatcagctgcagtattggagagccaacccagattacagtgtctgctcatcaactgcttgtaatgacttgtgtcgcatttgtgcagcttccaccgatgagaactcttctatttgtggggtggtcacagaaaaatctgagcacaacatcggagctccagtcacccgggtagaccctgtgtagaggcctaggaaagtaccaacagcagaaccggcatgatccacatattcaagagacatagga

SEQ ID NO: 540822 - DNA, 381 bp, Homo sapiens
tatccactcacgcattatttcaaaggtttagggggtggaaaaaaaaaaattggtgggaaaggttctttatcaactcgattttcctccccactttaagaacagaacaagcatctttcattttaatgagctgtggaaaaaagaatattttttttgaagaacaaaagggtggtaataaaatgctgggggcgtagacaaaattttgggcactttgtagttttgcttactgatctttaagactcaacagggacttattgtgggcaaaactgttgggttctgatccctacccagccagctacatcactgacttccagaagccaccaaaacattgctatgacttcagctttcaagggggaaaaagaatttgccaaccatcccttttcc

SEQ ID NO: 540823 - DNA, 180 bp, Homo sapiens
  misc_feature (21)..(21): n is a, c, g, or t
  misc_feature (26)..(26): n is a, c, g, or t
  misc_feature (33)..(34): n is a, c, g, or t
  misc_feature (39)..(41): n is a, c, g, or t
  misc_feature (44)..(44): n is a, c, g, or t
  misc_feature (47)..(47): n is a, c, g, or t
gagcagtcatcctcccccttncccgngcagggnncaggnnntcngtnctgggggtggtgggcggacaataggatcactgcctgccagatcttcacacttttatatatatatatatataaataaaaatgccacggtcctgctctggtcaataaaggatcctttgttgatacgtaaaaaaaa

SEQ ID NO: 540824 - DNA, 176 bp, Homo sapiens
  misc_feature (9)..(9): n is a, c, g, or t
tccctaagngacgattcataggactaattccttttcgaattctatgctttttcctagctgcaaggccagagatagcgtgattatgacgtctctttccaggcacccctcttcctctatgagtcagactagtcttaccaaaaccagaattctgttgaattccccatcgcacttagaca

SEQ ID NO: 540825 - DNA, 715 bp, Homo sapiens
ctgcctggtttaccgagctgtgcccagacataccagccttatacaaagactggattaaagagatgatctacgtgctccttggtcggcaggcccaacaggctgggaaataattgagttggaagcactggcgggtccgggggggtcttgaaccacatgggtatacagcgcgctgtagtggcagagctataacctaggaatcctgtctagactatgtaagaacagatacaagattgcacgcatctatggaaaagactagatctaggacatataggaagagccgacaccccctctttgcctgtgtattagttgtttgtccaagaacgaacacaatttcatctttaattaggcccacagaaccctctagaaccctatggagattaactgctagaccaaggaggtacatgctctttggccactagataataaccttgttcagagagtgaacagtgcaacacccatacatagcctcaaagcacacaccatttaggcatggcgtcaagctcaacacgctcttcctaaaaaaaaaaacagcaaacagattattatcctaagtcggccggttgagttcaatgcaactagtgactggagcaggcttaagcatgcggccccgattcaggctcactgggccaattccccttttgggagtcgaatgccattcattgcccagcgttttaaacgtgtgactggaaataccgaagggccccaccgacgccct

SEQ ID NO: 540826 - DNA, 283 bp, Homo sapiens
cacgaggtcgataaccacattagcctgtaggctatagatctgtatcgcctattaaaatctgtccaaaactcccccgaaaactgaccaggtgcagtggctcatgcctataatcccagcacttcaggaggccaaggcaggtggatcacttgaggccacaagttcaagaccagcctggacaacacagcaagccgctatctctacaagaaaaaaaactaaaaaatttaataaaaaagggccgggtgtggtggctcacacctgtaatcccagcactttgggagactca

SEQ ID NO: 540827 - DNA, 391 bp, Homo sapiens
  misc_feature (28)..(28): n is a, c, g, or t
  misc_feature (66)..(66): n is a, c, g, or t
gagatctccttcacaacatacagtctanatgtaccatagatctatgaaaactggaaactacaaatntctagaagaaaatatagaaaaagtcctaatgactttgggttatcgaagatttcttagaaatgacaccaaaagcacctcatcaaaattaaaaaacgtatgctcttcaaaagacatattaagagaatgaaaagaaaagcaagagactagcagaaaatatttataaaacatatctgttaaaggtcttatatttagaatatataaagaactccaatactcaatagaaggaaaacaatcaacccaacttttaaaaatgggcaaaagacctgaacagttcttcacagatgtacaggtcttttgcccatttttaaaagttgggttgattgtt

SEQ ID NO: 540828 - DNA, 133 bp, Homo sapiens
ctccccacacctgtatagctggaacatctccatatactatatggacatgagctggcttgaaaatggcctcgtagtgactcgtcatcaatcccgtctcggagcaggtagttaacagcataatacttgcctttac

SEQ ID NO: 540829 - DNA, 827 bp, Homo sapiens
ccggagggggcccttcctctgccctctctgggggggccttcttttggtgcacctggattatgacggaactgtgagtaatattgcgatgagctcagggcgcttcttggtgggtcttgcgctgcgacacctctgtgggggtcaccactgggtgcgcctctaagcacgccgtctcacggggagcaccgaagagtcactgtgcgagtgacccttgcgtgctctctcggtaggtaacacacgtgtggtcaatcacacagggggttaacgttcgcctccgtgaaaccccggcaaggtgttgtcaccattcgattgtgcgccccccacgtcctatagggcggtatgattgtaaaccacgcactaggagttggctagcgaagactaataatgtgtctgttccgtagcttgtgcctcccacccgtggagccactagtcgcttggcgcttctccaccgtgttttcacggggaggcaggttcctacacgggtctacccacttggggggtattttttatgcccccccactggcggggacttattaacagacaacccatgcttggtgtatttctggccggcccgctagtttgtgcgggggactgatgtcgtgttgcacagcgtgtgcgtgtgtgctcgtgtgtgtgctgtgctgtgtgttctcgtgaccctcctcgtccgccactggtacagtcccaaccctgtccccacgatcccgctattccctccaccataccagaaacactcccacgggactttggggaataggctgaggaccaatacctgctgtcactccagaggacattttttttagccataaaattgagtgtcaactaattta

SEQ ID NO: 540830 - DNA, 206 bp, Homo sapiens
ctactcttagttatactcggggcaagcagactaggatataggtgttacttctataaagttacctatctgtttctaaatgctgtaaactaaactaacacaggtaacccggaaaacagtggcaaattccaaaatggcttaatacctgtaaacacactattgactgagccaggtactttatcgatgaaattcagacatacaatgtaaag

SEQ ID NO: 540831 - DNA, 378 bp, Homo sapiens
acaaccctggaccaacggtcttctgctgcttactgtctcaagggatcacctatatctcactgcctcgagtgatctcacctcttacttctcatgtgccagatgttaagatgaaggaggaatacaacacatactccagcctcagcctgtatagttgtcacaccctggggactcgacttttctgggaccggtctttattatcagactggccaagcctaactccataggttaaccggacacgtacgggctactataaactacaaacaattgtgtcctccccaactttcgctatgttcctatttgcttctaacactttgccgctgtttcactttttcctcattcgtctctaagttgaaggctttgctgggagggggccgcgcg

SEQ ID NO: 540832 - DNA, 168 bp, Homo sapiens
acagctaccgaagaaaatcactggaaccgggaagcagaggcttcagtgagccgagagagcgccaccgcaccgcagcctgggtgacagagcgagagagactcagtccaaaaaaagaacgaaaagaagaagaagaaaaaaagaacgggcccaaatactgctttgtcgctg

SEQ ID NO: 540833 - DNA, 81 bp, Homo sapiens
ggctaagcacggaggctgtttataggctgggccgcatattacaatgctcagggctccactgcacccttctgtcgtcttctc

SEQ ID NO: 540834 - DNA, 126 bp, Homo sapiens
agcggcccatccagccattcaagtttcctttccagaagcacggctacggcctttcattcatatgttcttctaaagatagtctacattgggaaacgtatgttaaaagcacgtatttttaaaattgtg

SEQ ID NO: 540835 - DNA, 875 bp, Homo sapiens
  misc_feature (51)..(51): n is a, c, g, or t
  misc_feature (85)..(85): n is a, c, g, or t
  misc_feature (95)..(95): n is a, c, g, or t
  misc_feature (107)..(107): n is a, c, g, or t
gcgcctgttctcacgtgctcacaggcagttaggcagaagtgatccccgtgnctctgccaaagacaagcctgttgggttgaaagangaagaagaangaagaagacaanaaaaaaactcaggcaaagtcacagcctcaaaatttgtttcactgaaaaaacgcgttgacgtggcacgaccgtgtgacaagatgaactggaccggtggattggcttgatgatgaccacttctctaagttgaaggagtcattcagtgtttcaccatcgcgactctgctgggaacagggacacccgggactaagcattttggtgaccagatcgagtgaatgcaggtgcttggaaatgaccattcttcaaaggcgacaggacacccaagtgcctaaaggatgtgccatgtgagcaattggaagatctcaaagacattgccagacggctgcttggcaggactctggcgaagacaagataactccccgaagaaataattctcacccacatcattagacagttctcatgtacttgagcaacaagaacaacttagatccatatcaaaatgattcagacaccagcgaaacaacttcacatccagacttcgcgaaacactcaactgtaatatttaccagacacatatcacacccttgactaaacaattccccatcagcatgacaaataatacacacaaaattagaataacaagctccaacacccaaccatccactcaaatttctccacaactccaagacacaaaaaatttaacaaagaccactatgacaagacagaaaatctattcagataaaccaccattaacacttaaaaagctttaatatataccactcaaaaaacccattaacacatgacctgaaacaaatatcactatcaaga

SEQ ID NO: 540836 - DNA, 308 bp, Homo sapiens
cgctcccccaatgatggtctcagctcccgagtagctaggattacaggcacccaaccactacggctggctaattgtggtattcccaggttggtctcaaactcctgaccccaagtgatctccccacctcatgcctgtaatcccaccactttgggaggccaaggcgggcagatcacgaggtcaggagatggagaccagggtgaaaccccgtctctactaaaaatacaaaaaattagccggtcgcggtggcgggcgtctgtagtcccagctactcaggaggctgaggcaggagaatggcctgaacccgggag

SEQ ID NO: 540837 - DNA, 957 bp, Homo sapiens
ggccgggtcgccaccggcccgctggtggatccctgctcccgcacctccattatgatctgactggtggtgaccatcttctttaacctcttccccgcggctgagccggcggtgctgagtccgagggctgtgtggccggtagcttgggctcggtgatgactcgggcgtgcccgctggaccggtagtctgctccggtcacaggagggcaccttcctggccgtgaccgccagtgacggcgtgcagtcgtgtgtgcctggtgggcgagatcgtgcgggtcgctgcgagaggagcggtctcttgatgtcggtgcgcgcgtgaagctggtgcaggcctccgaggatctgctcgcgtgtggcactagtgggcgtagctggttgaacgcccgttctatctgggcgtctgtgtcaagtatgtggcctccgtggtccgggggtggccattggttttggcaggggcttggacgtggtgcgcacctcgcgggcgctcatcggagccacgaacccgtgctcgactgccccgaccgggcagcaatccgcggggattgtctgcatcgaggttggctaagaaccgtgattcacggtagcgactcggtggccgagtgcccagcgtgagatcgctctctggtccgcgcagacagagctctctgtctgggaggagagcgcgtgggcactggcgtgtttgagtagaaccggatgattgcgcgtactagaggcttgcacactccaagactccgtccagggcccaagatggccgggattctggcgcacccagaacgcgcctgggagaaccctttggacgggtgtgacattcactgtctgacattgatgtgggtgggcaggcttccaaaaccgggaacagaggcacgaccgaggagtgtcagagcgggagacgtggaaattctgcaattctgttgcgacacgggccagcgtaaaagctcgttttaaaaaacaagagaagagg

SEQ ID NO: 540838 - DNA, 108 bp, Homo sapiens
  misc_feature (60)..(60): n is a, c, g, or t
ctagctccaaactattctgtgaccatgactcacacggagggccacctggccaggctctcnaggctcatgctgtgaccatgactcacgtggagggcacctgcaaggctc

SEQ ID NO: 540839 - DNA, 766 bp, Homo sapiens
  misc_feature (326)..(326): n is a, c, g, or t
cacgagggggccattgagataagaaccccgggatttccgggcattaaggtcggggggcctacccactccttccactaagaggccgtgccccatacaagccccccggaccccacattgtctggacaagtatgcacccgccccagaagccggactagccccaccattcaataagatagctagtgggccagcaatcagttgtggaaggacaacgacaggacgacacgcgggggcggggggggacggacccacaccactgaaaaaggggaaaacagacatgcaaaaccccaagacacgatagatgaagcaccccctctgcgaaccccctngcacccgcggagcgacaaacacttccacttctgtattctgtcattagacataaaaaaagattaagaggagagtgaagaaacccacatatattatccaaacgagaagggagacaataagccggccccgctgtttaccggatcacaagggggggagtgtgctctctcttgaattaccactatgagtggtgagagagagggagcgcgtaagtagggggagggccggcgcgagcgcgcgcggagtgacggatccccgcacgcggagtgaagatatttatctcatctggtgtgagcagagacacccgactacggacagacatggctaaagaaatcgaaaggaggaggagaacgtgaggacagtaagcgcatcctcgcgaccaaaccgaccagtatcgcccccgccgccccgccgccccccgcggcgatgatgctcgttctcttct

SEQ ID NO: 540840 - DNA, 191 bp, Homo sapiens
cttttgcttggggcctgttctttgccacctgggcaaaggtcaatcgcagaaggtcagacggtcagaacgggatgtcgtcgtccatgtcgtcaaagcccgtggccgacttcggcgcgggcgccggtgcagggcgcggtgccgctgccgggcgtgctgcaggacggctgaccggtgccggggcttcctggttg

SEQ ID NO: 540841 - DNA, 135 bp, Homo sapiens
tgactcctcctgactagcctgactgggcggggggcttggagactctcctaccgagctcccaggcgctcgggtttgcataccagagagctgagaggctgcctcacagtcgctgtcgggctagtgggggggtcccgg

SEQ ID NO: 540842 - DNA, 393 bp, Homo sapiens
gcacatcactagcagttctgtcatcgatccagtactctccctccatgttcacggccatccctcctgtgatgttcagactgatatatatcctatgtagcagcttttaccagcagcaccgtgcttccagtcagcatacaattaaatgtggccagctacagccatggaaacccattgctctggatagtggccttcatgtatagcctgcatgtagcaaagttgacatggaggcagatgccgttgttgagcaggtgtcacactgctggcgcttaaggcgaggcagtcgatcagcagcaatgtcaggataccatagatcctcttgaatatgggtgtcagtgattgggtctatccgaagggtctggtatatcgtagctagtgcttgcagatacatgaaac

SEQ ID NO: 540843 - DNA, 365 bp, Homo sapiens
cgggcggatcactcaaggttaggaatttgagaccagcctggccaacatggtgaaaccccgtctctattaaaaatacaaaaattagccgggcgtggtggcagttgcctgtaatctcaaggctgaggcaggagaatcgcttgaacccaggaggcagaggttgcagtgagcccagatcgcgccactgcactctagcctgggggacagagcaagaccccgtctcaaaaaaaaaaaaacaaaaggcgggaaaggtttgcgccttgggttaaccttcccacaggtgggcataggaatgaggttaaaagggctctacattctaaatttcggagaagggaaatatggctagaaggggcaagcctaatagaatc

SEQ ID NO: 540844 - DNA, 549 bp, Homo sapiens
  misc_feature (480)..(480): n is a, c, g, or t
tacagaacttgagggagtgcaactttgagggtatgggcactcttttaccctgagtctggctcctgaagggcttgccggcctgtatgttctgccttccaccccaggccgctccctactgcttccagcagctcttggaactcttgtttccaacacctttttttgagtctcaacataaacattagattaagccattgtggtctcttcctctgtgccttgattgcccagagcctcctaagggccaggagtggctccttgagaggaagagtgatgggagctatgggaggaaggatggaggctggatcatcaggcgcgagctggttctttcaggactttgtgtatccctcatcctgattctacaggggtcctccccttcagactccttctttgcccctgaggggtgggattaggtagtgattagggcatggctggagtcagctgccaaggttcaagtctgggctgtgccacttagcagcttagtgnacctggcagattatgctgcctctctgtgtctctgttcccttctctgataaccacaggaccatcgttata

SEQ ID NO: 540845 - DNA, 111 bp, Homo sapiens
gtagtcatgtcggtccgccatcattgttcatagttgctggatttggtctgagagaccgcgtgggagatcaggaaaccctgcacctgggtgcagtcgattttgcgcaaaagg

SEQ ID NO: 540846 - DNA, 550 bp, Homo sapiens
  misc_feature (34)..(34): n is a, c, g, or t
  misc_feature (36)..(36): n is a, c, g, or t
  misc_feature (67)..(67): n is a, c, g, or t
  misc_feature (351)..(351): n is a, c, g, or t
aagttatgccagcacgaaacggtagccacatcgngngtgtctttcaatcgacagtcataccagcgtnggctcaagcacacacacagtcagcctgtcccgctaccctcacagacccccaccatctacacacaggctcacaaacacacccacactctttcacacctactttccaacagccacacgcagcgtcccacacacagctctcctagtacacactcattctcacagtcacctttacccctccgcactcttttcagctgaaacatatgtgcatgtacagatagacacgtaaaacagacacatacaacacatgtgcacacacagaaaggctcaaacacacacagatacacncacacacacacagaactgctctcacacacacaaatatgtgtacacacacacgcagaaatgcttaaacacatacagatacacgcacagagaattgctcaacacacaatatgtgtacacacacagacatgtgcagaatgctttacacatagatacacactaacacaggctcaacatacactttacatgtacactcgacaca

SEQ ID NO: 540847 - DNA, 288 bp, Homo sapiens
cataccatcggaccaattctatcagcgcatatagaataagtactgtaagtataaatcacgtgaagagattctcctaccgcaatacgcatgcgtcagacttaacagactgaactgacaattaacaggccaagctctacaatcaatcaactaagtcattcttaccctctctgtcaacccatcacaggcaatgcgcatcaggaaaggttcctataagtaaacggaatgtcggtatatcttaccccgacctgtttctcactcagcatcacctctgaggcatcaccaccagga

SEQ ID NO: 540848 - DNA, 156 bp, Homo sapiens
gagctatttataattagagttggatcacccattcatgctctataaacctgaacattgtgtcatataatctaagagtctcagaattgaacaaaagaaaaaaggaaggagggaaggaaggaaagaagggaagaagagaatgagagtggacaaagcaaa

SEQ ID NO: 540849 - DNA, 481 bp, Homo sapiens
  misc_feature (386)..(386): n is a, c, g, or t
  misc_feature (402)..(402): n is a, c, g, or t
  misc_feature (452)..(452): n is a, c, g, or t
  misc_feature (466)..(466): n is a, c, g, or t
attcggcacaggtggaattaaaagttcctgaccttggccgggcgtggtggcttatgcggtaatcccagcactttgggaggctgaggcgggcggatcacctgaggtcaggagtttgagaccagcctggccaacatggtgaaaccttgtctctactaaaaatacagaaattagccaggcatggtggtggacacctgtagtcgtagctactcaggaggccgaggcatgagaatcacttgaagtcgagaggcggaggttgcagtgagctgagatcgcgccactgcactccagcctgggcgacagagcgagatgccatctcaaagaaaaaacaaaaagttcctgacctttccacacaggtccttcgtggtccgcggattccagagtggttnttagctttctatttantatcacacagtttttccttattttaagttattgcaaagggttcttttgcnggggattgttgagntttttaccaccttga

SEQ ID NO: 540850 - DNA, 312 bp, Homo sapiens
ctagtcttagaagtctcaatagcacattccacctgggcacaagagagactccatctcacaaaataaaaaagacaaaaaagaaaaatttcgggggtctcctgaggctcctagaggggattttttctttccccggctctcggagggggcaaaaccattgggggactcttttagagtgccctgctgggtttgaaaggtggggagaggggcggtggtttaaaacgcggtcggggatgggggaaacaggaaaagactgaaatctgagagctatacagggtctcaaactactttcggcctgtcctttttcctgaaagc

SEQ ID NO: 540851 - DNA, 171 bp, Homo sapiens
ctccacctgggtgggacgcgcccatgtgcactcttgaaacagaggggaagagaatatcatgtgtgtggagggagggggcacaattcaccatcttctgactgtcagaaattagaaaggaaataatgatcaataacggttaatgcctactaagcactagaaggtccaggtatg

SEQ ID NO: 540852 - DNA, 229 bp, Homo sapiens
tgctgactgagaccaggtctcggcctcctcggactcctgctcagtcctatacgggcgcacgtggcagggctgaggtggtcgctcgccgtgcgcgtgcgctgaactgcagcaatcaccagtcgctgttgtctcccttgggcacagagcttcagtttgacgaggacgacgggtgaggggaggattgaggaagaggtgctgctgaggaagacgtggattaagattgccatga

SEQ ID NO: 540853 - DNA, 957 bp, Homo sapiens
tgggtaccgcgtcccggcagcctgatcgccgggagcccacgccacctgcgcggcacagcccggaatggaccagcagctcccgggagaaccgagcaccccaagtctcatcgggggcgaccggcgagtccctcaaacgcagacaagttaatacggggacaaagccggcagcagccgcagcaagtctgaagatctcgcggctcgcggcgcgcttgaaggacaagaggaaagtgcgtcgcacatcgctggcgtgcccggaaggtcgggacaggtcctcggatggagggcaggcgtttcacgtgtgtggacacctccagcgatggaacaaatgcgagatatgcccaccagaataggcccctgcggtcagtctcctcaggggacatcgctctaccacctagctagctgacgcctcgaaagccccacaagcttcgcgagagacttccggaggacgtctacatggccctagccgcctctggacgcggttcgtctgcattcgcgagccaagacttcgagaatgatttacacaatggcatgtgcatgattttatcttttcctgggaaagtgaagtgtcaattgggttgctcaatatttcatgactgccaaggatgcattgaagatattgtatttagtaggtaatgagaagagtaccgtgtccagcggaaggagggtcggcaataaatctatattgtttctcaagaaagcatatctctgggggccgctggccccctcggctcctgtacacagctcagcttgaactcgtgtagcctctcaaatgaagaaggtggcctgtttatttaggactttgtggaatagcaaatcacagtgctgttgttaatgcctgagagaacgcactttaggggtagacttataccttgaagtgaaggagctgggggaggaacgaagcattcttaagtagaagcattttaaaataaggcagaacgcctttgatcgtaaactaca

SEQ ID NO: 540854 - DNA, 190 bp, Homo sapiens
gggtgtagttggcagagaggttatcatagctcagtaatctgaagtcctctccatctctccacagagtagtagtaaaggattcacccagatgcatgtaaaacctgggtagttgagaaatgcaagtgaaaaactagcctttttagccacaagtccctgtgtgtgttcgcatcgtgtttggtttggtttaagg

SEQ ID NO: 540855 - DNA, 915 bp, Homo sapiens
ggagctgtcgggaacgtatcagatcgccagtcgtggatgaccagcgctaacttatctccaacaatgagtccactgtgccatgtctgggccggcgccgctgtgtggccccggtagagctatggtgcagacgcgtcgtgccgacccgtgctacgatcgaggcttgtgtcgcatcctgggtgagctcgtgctcctcgagtggtgaggcgcgtcccatcggcatacttcctggtcacacagctcagtgaaggtccaggcgttgggactaagactttacgagtcggacctcgcgcgaagcaagcctgcgagtctgagaggaaccgtggcgtcgatgataggcgttgcccattagccttcccgatagtcatggtgagctaagatgcgcattgggcagcccgctggtgatgccaggcgctgcccatgggagccctgtcccaggagcccatggagaatgccaactgagtatggtagacatgacgagaggaccatgtgatcgcacctcgttccagaatgctggatcgccctgaaggttgtacccgacactgaatggggatgcttcccggaggaacctcgagaggaccttaagaacacccatggcatgaccgatagactgtacaggtctttgaggagctggatgcagccattgggtcctgtttggaacagtgagcatggcaactcctttgtgagcagaaggccgctgaggctccagccgaaagagtcagatggaactggaggacccggcttctgggctgggtgttgaccaagtcaggatctggggcccagtccccatgtgagacgcagcagagggcggtcttcagcatcctgtcagacccagcacgagtacagctttgttgtccctttaggccccaaaccttccccatttgcaaactgtactctccgtgaaacctggtgctgggc

SEQ ID NO: 540856 - DNA, 1152 bp, Homo sapiens
tctggtacggggactaagatggaagcgtgttttggggggtcgcgggtccgggacttgggggcgggggggtccgggccccagggacagtttataccggcattccatccactcccagattccttcatgggatccgggcgtctggcactttacagaggtgtccaactcacggcggacccagaaaccccaggggtgaccgggaccctcagtccctgcggggtaaagttccgagggcggagggggtgatggccgaaaacagtgcggggactcctagcggcctcctggggcctcgtttccgacaaaatctcttcgcatttagtgcgagttcaacaacgagataccagtgcgggggtgcctctgggggaattacgcgtgatttcccagattttgtgaagcaagtctctcggccaaatgggtggattggatggaggagacgctttctggggacgatgggacacaggttatataggtcctaaaagcttatccattccatgggtgtggcccaggggccattggtacagccgggggctcgaaatatgaacctcttggtgggaaccccatgggtcatcggagaggctatcgctggatggagaagagcttcctccggtttatcggtgggccatggctgggtggtagcctatggaaagccccttcgtggggccactggggttcacgggggcatcactggggctcaagccctcggcttgcagaaaaagtcctggggcgacaagcaggccagtggctaaagacaagaccggagggcccgcgacctctagcagaaccgcgtgcatcgcagtgccggaccaaccggatatgtccccggtttctttaacaacgggcgttgtacaaattggccagtgtgtcccgcaaaaacgggtggctcgcacacacgggggcccctgtgttctccacgcggaggaacaccacgtgtgtgttttttggcctcccatttgatatcgaggggggtctgggatgtggaacaaccggagtggctttttccccaacaagtggattgggccccatatagtacatttggggacactggtgcagagtacaaaatgaagcactcctttgggacggcaaacaattttccgaaccggctgcaaaacatatacaaccgacaaacaacacaacacgcctcgtcttcgtcggcgg

SEQ ID NO: 540857 - DNA, 1514 bp, Homo sapiens
  misc_feature (196)..(196): n is a, c, g, or t
ggtacggatccctattggagcaggctctgataacgaattccaaggagcgaccgctcagatgcgatgatactgacgtccacatgtgagattacgagtgccaatcggtgtcttcgcaccgtggtcacaatcaattcctgtcgagatagcgtacgacctagcgagagagtatccgggttacttaccgtctgctagcgcncctggagactatacgatagtggcgtcagcgaagtgcacgccttgtatcacgcagaaagcagaaggcccatcaagcgcagttcggggacttgcacatcgtttgagccggggacatgtgtctgacccgtaggtgcactgggtcgacgtgctgttggaaccattagtagatggctcgctgtcactaggtcggtgacgaactcgaatggggattgtatcttgggagacgcgcaaaggtatctgtctgcacaatggtttacctatgagaggggctcatgttaggtgagaattgcatggggtcaccgtagtggaaaacgatgtacccttgtattgcgtgccttgaagtcgatttacggtatgtagtgcagacgtcgggagttgcagtatagcaagaaatggggggacggtggacgatagttgattcacaaggcttcgtttggaagggttccaatacacgacagggagaggaagtgttgcgagggggtaacagacatataggggtaaccaatacttagaaaacgaatctcgaggatcccatgagaggaggtgtcccattccaattttttagataagagaggcaaaagcgtggcaattcttcgggtaattaggcaacgggtttcgagggcatccaagcgacggacaccagcacagggagaacattttgtcgtcgaccaacggacaaataggacaacgtcggggtggacaacttctcggaaacgaggggctgtcatcaggaccagttctacagataagttgaagacgcagaaatttgtgggcgagctagtagttgtaggacaaggccaattttgggcaaagtgagaatagaatttccccgtagaggattttcagttaaacgaagcccacaatgtggccggttatatatgacgggggtaccttcggggcaattgggtctgtatggccaagacagttggcgaaattaaaaaggaattataagttcctggattcccttatatagggggttgtgtggagatagaggcgtccacacaagttggcgaaatataggggaacggagagacaaaaccggccgaccaatggggacctttggtgggagaagggactgattggcgtatctggaggaagaggagactagtggaaaggcgggaaaaaaccaacatgcggaaagtgccatagttccaagtgagccggttgaaacaagtatacggtcgttagacgaagtgggcacacccgagtgtttagggctccactgttgagagcaccgagggggtacaaaaagatatcaatttgcggctccaggaagaacaaggttcgatataacttctaggatcggagaggaggtcaaa

SEQ ID NO: 540858 - DNA, 1017 bp, Homo sapiens
cagcaagagcactagaggaagagagagaccctcactgctggcggagtccctgccacactcagtcccccagcacactgaatctcccctcctcacagtttcctagtgttgaccccttgaacaggggaggggcctaaggatgccggaccttgtcatgtagccactcaataaagtaccctgtgctcaagaacgaacatacccaacgaatgcacgcagcggcctcaacagagcctccttgagtgccagcggagagctctctgcccgggagcttgcagcgcgtctaccgccagcgcagccgtagtccacagaggaggcctgaacacgaagccgccctgcgagcacccaggacaggggccccaggccaaatgcctcgacgagacgccagccaaacagcggggaaacccagcaggcccggaccgagcgtcagtcgcgaggacaaagccctcccgaccatcaaggacggcgtggggacgagcacatgcatggcaaaggggcaaaatacggctcgcggccgccacggcaggagccacaagcaggggccaccatgggatagcgcgatcgaatatagatagaccccaagactagaaggcaggaggccacactggatgaggtggaaggtccaaaaccaccacacggggaacgtaaactaaaaacgagaccgtggtgtggccacaaagcaaaccactgggacaggccacacacgtgggcgcaagagcggtaccctcctgcgtgcaatccgcaatcacccgcattcaccaaaatctacgagaggaagcaagcgtcatcacagtataaaacacaacaccacggagacatgcacggggaccaatgcatcagtgcaccgaaacggcacagaaagcaccaccaccagaaatacgcaaaggccaggaacatcgcgatgagccacagcacagccgacagtaacactgggatgacacccaaggaacagcaacacagcaggccggagtgaacaagggggagatggacagagagtgcacgtaacccaccagaccagagact

SEQ ID NO: 540859 - DNA, 911 bp, Homo sapiens
ggtactcgacttggtctgagacgatgatagagctgccttctggttgaagatgtggcgagtgaccaaactgagcctcagcctgtcgccttcgccccagagggaaaaccatctatgagaactcctctccgatgaacttacactggcagaccggtgccctcaccaactctggaaaaagatccccacgcttgctcctcgctgaccccatcactgtgcaagctggggctgccggaaggcagcaaacaactacatctccagatggatctcgtaaataacacgaggacagacttatcttcagaacatcttcagtcattcctcaaagtggctagaacacttgtcacgcatgaatcagatgagcagcctctagatccagatgccccaaattagctctactcctaaaaacgtctgaggcagcagtagacccactgggcaatctatatggttaaaaaacatcgtcctctgtaccatactccacaggggacagcaaacaacgacatgatatcagacggcccgttacagatacaacatggcagagcacacacagacatatcattcaacctggccctttgagacacagacgatctggtgagagaggaggggaacacctgcatggcagaacaggcttcgacacgaagctcggtcgctgttatctgcaggaaagctaatcttaacaaggcacatctccggacacatctcattagagcgaggcataccacaacataccgcatgatgaacacaactaccatggactccagacggacaagcctgtaagcagatccactagcacgtcgtggcatgaaaggcactcacaaacaacagaagagaaaagcacacacataggcaaccacaccacggaccagtggcatagcccaacaacaggaccgacaacagacataccgcgcaacacacggacc

SEQ ID NO: 540860 - DNA, 417 bp, Homo sapiens
agcagctctctactcagagcataatagcctcaggatattgagataacttactcatttgcatcgatctccagcgctcgtgtcaaggagaaaccatatcactgatattgattctgtattcgcagtgccaatattgaatagtgatctatacattgtgtactgtgttggcgacctgaaatccagagcattgagtaaaattctaatggcgaataatacttgacctagtatggatatacacagcactcagaaccccatttgtattcgtcagggggtcggagaccacctgttctggggttggagcagttcaaatgcgtagtcctcggtcgtactagtctgtctgcctgaaaacaaaggcaccctactgcgcttgttgctgtgcttctggagaatcctgctgtgcttggacaattaaagaacaaa

SEQ ID NO: 540861 - DNA, 355 bp, Homo sapiens
ggaagatttggaattggggttttaaaaattcccggaaagcaagttgatgcccagaaatcagggcaaacccattttttgttaaaccccttgggaaacccagaaaattcctgggcccccccttaatggccatctataattttacccctttatccaagattttcctaaggggaaaattatttaaaaaggtctattaaattgaaatttaaatcttgccccctatatcatggcaaaatgtgaaataaaaaaaaaaaacgtgaattttttagctaagcttgccagattgaaaaacaagggtcctttttttttgtaaagggggataaaacccctgtaaatgaaaaaagacctttttaattta

SEQ ID NO: 540862 - DNA, 249 bp, Homo sapiens
gtgaaaataaactccatctctactaaaaatacaaagaattagccaggcgtggtagtgggtgcctgtagtcccagctactagggaggctgaggctggcctggaggttgcagtgagccaaggtcacgccacttcactccagcctgggcaacaagagtgaaactccgtctaaaacaaacaaaaaaaaaagacttcacccaactaactgtgcttgtggagaaagaggttgcatccctgttccagtcatggcca

SEQ ID NO: 540863 - DNA, 411 bp, Homo sapiens
  misc_feature (17)..(17): n is a, c, g, or t
  misc_feature (258)..(258): n is a, c, g, or t
  misc_feature (321)..(321): n is a, c, g, or t
  misc_feature (354)..(354): n is a, c, g, or t
  misc_feature (371)..(371): n is a, c, g, or t
  misc_feature (388)..(388): n is a, c, g, or t
tctggcatatttaatgnagcataatggcctctgggatcatccattttgtggcaaatggtgggatttatttatatattagggctgaataatattccattgtaagaatatacactattttcgttatttactcatccataaatgatggacattaatgttgtctccatgtcttggctatagtgaataataccataatgaacataggagtatagatatctttccaagatcctgatttaaattcctttggatatatactgagangtgggattgctagatcatgtagtagatctatttttaattttttgactgatctccatgcttttncctagtgactacaccgatttacattcccatccnatagtgtacaaatgttntccctgtttctcccatnatccttggccaaccactccatta

SEQ ID NO: 540864 - DNA, 176 bp, Homo sapiens
cttttgggtaaataatgacattaaggcagaaatcaagaagttctttgaaactaatgagaacaaagatacaacataccagaatctctgggatgcagctaaggcagtgttaagagggaaatttcatagcattaaacaccacaccagaagttagaagactcaattacacctacatcaca

SEQ ID NO: 540865 - DNA, 223 bp, Homo sapiens
tacaatcgagctctgtacccccgctggccaatggcagtatctgccagcggaatggcattgtgcccatctgtggatgctgagatcctccctgatggggaccatgacttgaagcgctgccatgtatgtgaccgagaaggtgctggctgtgtctacgaggctctgagtgaccagcagatctacctggaaggcaccttgcttgaagcccatgatggtcaccccaggc

SEQ ID NO: 540866 - DNA, 522 bp, Homo sapiens
  misc_feature (65)..(65): n is a, c, g, or t
  misc_feature (432)..(432): n is a, c, g, or t
caagatctgctcaatgttaagtggcactgtacattgagaacgccacctacatgatgctgctgaantacgaggagagccggatttctctgcctctgcctaccttttcttccctgaaactgagagaaactaacctggagtcacttcctctggttgacacccactcaaaatgaacactcctgattaagacggttgagaccagagattgacaggtgatcaattgagacttctcagcatcacgatgaccttgaataaaaattgcacacacttggtgctacagtgcagtaccagcaagatggaaaaaaaaatcgtatcttgggaaaacagctttcaagtgcctttactgcagttttcagtgagcgcaagatagatttggaatagaaagaagctcagcacttaacaactgacaccccaaaagacgtagaaaaggtttanaaaataatctagtttacgaagaaatcttgtgctagaatactttttaaagtatttttgaataccattaaaactgcttttttccagtaaata

SEQ ID NO: 540867 - DNA, 588 bp, Homo sapiens
gcttatctagaggatccctcgaagctggcggtttggagtgtgaggacccggagcgagagctgaagaagcagaagcgggcagcccgcttccagcacggacactcccgccgcctgcgcctcgagcccctggtgctgcagatgagcagcctggagagcagtggggctgaccctgactggcaggagctgcagatcgtgggcacctgccctgacatcaccaagcactacctgcgcctcacctgtgcccccgacccgtccaccgtgcgccctgtggcagttttgaaaaagtcgctgtgcatggtcagaaaaaaaaaaaaaaaaacacaaaaaaaagcaaacaaaaaaaaagtgccactggaaagagaagcaggactacgcgtttgcctgcgagcagatgaagtcgatccggcaggatctgacggtgcagggcatccgcaccgagttcacggtggaggtgtacgagacccatgcccggatcgccttggagaagggtgaccatgaagagtttaaccagtgccagacgcagctcaagtcgctgtacgccgagaacttgcctggcaatgtgggcgagttactgactaccgaatcctct

SEQ ID NO: 540868 - DNA, 162 bp, Homo sapiens
tgagctcggtacccatcatatgccacgcatgcagccctcctgtaacctctactgtctacctacgcctaatctactccacctcaatcacactactccccatatctgacaacgtagaaagtatattgacagtttgaacattcaagaacccagccccattcctcc

SEQ ID NO: 540869 - DNA, 122 bp, Homo sapiens
tgtacatgcgtattgatgtctgccttctgcggttgtggacatacttctggtgggcactgtgccggaaacttgagcgatgaaatcacgtgagctgcatgcaacttagaaaggcatggcctgtc

SEQ ID NO: 540870 - DNA, 572 bp, Homo sapiens
  misc_feature (326)..(326): n is a, c, g, or t
cgggccctatacccgggattgggccaaaatttggtccaccttggtttccacgtgaccagggtttcttagatcctcatgaagttccctcgcggttggtggaagggccggctttacggccaggagggccttttcccaggaaaccacgtggagaaaatttgagctgggccctgggaaaagcctttttttttgcccgcctatttgcctgccggcctggtggggagccaggccctgccaattaaagccttgtttacctggggtgcaatagcctaaaagtccagtcctttggcctccagtcctgcccaggccctgggtcaccaggttattgntgcagcccccgcccctgggccctggttttcctccaacatcacacccggtgcccattttccatttttgtgtgtgtcaaagggggctaacagcagaatttccctccccactgccatgtgattaaaaaatgggttttgagtcctgtgctgttggcaaagtgccaggcccagttggggaggggggggtccttaacaagggggactttgctcattttgttttccctaaggcaataaacctttgcccggtga

SEQ ID NO: 540871 - DNA, 798 bp, Homo sapiens
  misc_feature (240)..(240): n is a, c, g, or t
gtctctcttgcaccctgccgtcatgtctaagttcagaagtctccgtaaagagcccggtaacagctgaggaagctcttcattgggagggtatgaagctttgaaacaactgatgaggagcctggaggtacgccgatttggagacaagtgggcgcaacgctgcatcgcgtacctgtgatggttaatgaagaagcatcgcaaaacaaccaatagcagcatcctagggtgcgttgggagatttgntacacatcagtgcgcactgctggcaggcaggctggcagtgcagaacctatggaagtgccaacggccgactacaaggttgcgcatggcaaggagttgtgtgggaacccaaaagagcatgcgttgtcgtccgagagacaagatacgtctagaagaccgaggggttgcctcacatttgaatccgtggtgggaacaagaggatgatctgggttcgggttgggcaatctaaacatgagacgacgacttgaaaggaagcaattcagcgctaaacggacgagtatactcttgtggaagctaggttcattcgcgcaatagacagtctcgacagggtggactttgacaacttcgatgaacgtggagcgcggatggcaaagatggggccaacaggaacgaatgggggcgtaggtgcgcgttattgtaaccgttatcttgtgactggagcgcatgggacttccctgttggtggattaaggattggggccatttccccggcaaagagttaaccaattaacttggtggcaatggggccggataaaatgttgtaaataattctgggaaaaag

SEQ ID NO: 540872 - DNA, 1540 bp, Homo sapiens
  misc_feature (804)..(804): n is a, c, g, or t
tcctgtggtttgtcgatgcccgtctgtcggcttgtggtggcctaatgcctgtgtgtgcttctgtgtgtcgttgcgtgtagcgcgcgccgcttgatttgccgcgcgtacggcgttgtgtgtgtgcgcccgccttttgtgggctggttaatatccgctgtgtggttttgtcgtcgcgagctttgttttctacacagtgttgctccccggggcgccccacagttgtgtgtagtcctgtttacttcccgtagtaggctgccgctctgtgtggcggtggctttccggtggatacccacactgtttgtgtctctgtgggccgaccgcttgagacttgtcttgtcccggcgcgttttggatcccccttgtcgcccggaccctcctgttgggttggagcccctgtgagcccgctcgttcgctcgaacgcgcccttctcattccttgggggtcgcctttttcgtggacacgtccttttctcttgtgatcgcccccggggcccgtggtgtgcccaaagccgcgacagaggcgtttctccccggggatggggcaccttgttgtcccgcggagctattctttggggaggtcgtcctacctcggcctgcccaggaagcacgcctgttgtgtgcgaggtcgaccccctttttcggaagggggcgccactataagggcggcctgggacctccccctgctggccacctcacgggcgcggtttcccaccccctttgtttggctgccccaagcaacccggccgcacaccctttggtgggacccatctggctgggctttcttgggaaggcccccgggtttccncgtggagctcccctttttcccttcccccgatattttttgtgggagaaaagaaagtggcgaaactttggccgctttttcccacgcggagaaaaggtttccggtaaacacggccccgcgctggaaagggaggagcccccccacgatacgcacactcgcacggagcgacacacagggagcccccacatcgctgagagtttctacggagaggccgcagggttcccctcgagggggcccggggcccctggagactccacagaaggttggaaccccgcgagcccctcgagagggcgacacctctgggttgttccgcggggcctcctgtttcttggaggaaaaccacttcacgcttcccacccgcaacacaccacactgtgggggttcttcgccttcggaagaagaagccgcgaagcacgcgaaagtggagacgcttttcggagttctcgggctcccacaaaactatccacgtgcccgccacaacgaacttttaactgccctggctgtcccaaggagtgaataatgtatggctcccacccccacgaggtgcacggatcaataagggacacgcgggggccacgggcacagcggcgtcgctcctctgctcaacacacaggagccaccacaacccctgccacgcacagccctgggagaccctgccacagcacagccctgggaaaaaggctgtggcctcaagggcgcctccccagtgcccagaaaataaagtccttttggattttga

SEQ ID NO: 540873 - DNA, 1030 bp, Homo sapiens
ggttcccgggaagcgggactccaaagtgggtcgcagtcgaagccgctactccacggagggcaacgtagcgcgttcccggtccacatcccgtggcagcgagaacgcaggcgccgaagacaagggtccaagggtcctccggcgagaagcagatcgggaggaaagcgagcccggctcggagaatacctcggacaccggaaaggactgcttccccggatcctcccagagaatgacacttagcattcgcacaattcttctctttcccccttatctcggcactcgggacatggacaacgaaaggcacgcattggacgggcacacacaggaaacggacacagccacaacctgcaaacacccacactgacgcgcacacatgcgaaaccgggggccgagacacttttaccctgtggcacgcaccacacgacactttttctccaccacgcgcgccccaacacaccaccagaggcagtgccaccgcgtacactgctcgtccgcccccctccggaccatgaaacaacgctcatcaccaagcggcgggcgcaactaacaaggcgcccatacccccactatgtggcaacctccaccgcaccgaacaaaagcacgcgcggcaaacacatcacacagggggccgagcacaacagggcgcctactcccttgtggtcaacacaaacttggtgccctctataaattgtgcgcccgcacatctaaccacatcttgtggtttccctattcaccctttaccgaagacgaaaacacgtcggtcaagagctggcgaactaaccagctctcttaaccccaacaacgtgggtcccgcacaagtggtatacacccacataagtatgtggccaacacaatctctccgcgagtcaacacccacacaccatggggggtcatgcgggagcactttatctctaccaccacaaccactcgagaaacacgaccccattgattagttgcgcagcatcatcttactccaccaatctatgggggcaccaagctttggcaacggacacacctttggtcgccacccgtt

SEQ ID NO: 540874 - DNA, 93 bp, Homo sapiens
caggcttattagaaggaatgaactaagggtcgaccatgattatttctctaagacggttggttagtaaacagtacctgctctcgaaatgagaac

SEQ ID NO: 540875 - DNA, 287 bp, Homo sapiens
  misc_feature (31)..(31): n is a, c, g, or t
  misc_feature (48)..(48): n is a, c, g, or t
  misc_feature (59)..(59): n is a, c, g, or t
  misc_feature (70)..(70): n is a, c, g, or t
  misc_feature (81)..(82): n is a, c, g, or t
  misc_feature (84)..(84): n is a, c, g, or t
  misc_feature (91)..(91): n is a, c, g, or t
  misc_feature (129)..(129): n is a, c, g, or t
  misc_feature (131)..(133): n is a, c, g, or t
  misc_feature (150)..(151): n is a, c, g, or t
  misc_feature (190)..(190): n is a, c, g, or t
  misc_feature (196)..(197): n is a, c, g, or t
  misc_feature (209)..(209): n is a, c, g, or t
  misc_feature (211)..(211): n is a, c, g, or t
  misc_feature (217)..(217): n is a, c, g, or t
  misc_feature (232)..(232): n is a, c, g, or t
  misc_feature (240)..(240): n is a, c, g, or t
  misc_feature (255)..(256): n is a, c, g, or t
  misc_feature (277)..(277): n is a, c, g, or t
  misc_feature (284)..(284): n is a, c, g, or t
aatcgagtagtactcccgattgaagccccgngcgtataataattacancacaagacggntgtcactcatnaactgtccccnngnttaggcntaaaaacagatgcaattcccggacgtctaaaccaaacnannncacaccgctacacaacnnggggtatactacggtcaatgctctgaaatctgtggagcnaaaccnnagtttcatgccnancgtccnagaattaattccccnaaaaaccnttgaaataggacccnnatttaccctatagcacccccnctacccncta

SEQ ID NO: 540876 - DNA, 296 bp, Homo sapiens
gctcgacattaaaacaaggatttaaaaaatggatcgaattatcccagcactttggaaggctgaggtgggcggatcatgaggtcaggagatccagaccatcctggctaacatggtaaaaccccatctctactacaaatacaaaaaacattagccaggcgtggtggcgggtgcctgtagtcccagctactcgggaggctgaggcaggagaatggcatcaacctgggaggcggaggttgcagtgagctgagattgcgccactgcactccagcccgggcaacagagcgagactccatctc

SEQ ID NO: 540877 - DNA, 1025 bp, Homo sapiens
agtgccattatggccgggggggggaaaaaaaaaaaaaaaaaaaaaaaaaaaaattgtgggccgcctgggccccaaaaattttaaaacaatggtggggggcggcggggccccaatagggtaacgtggacatgtgggcataggactggtacccaaaggagaaccccgggcgcatggataacgtcgtgggcgttctcacaccaattaaaaaaagcgccgggggcggaacacgggtcgtgtcttgagaacacactcccaaacagggaggcgtccgaagcggacataaggggactctacacaaggggagagcccacggagagccgcagaatacaaaattaaacgcccacggacgatgtgaggtcatcgagaaacaatggtacggagcacaacagaaagacgaaatctggcggagacgacaggcagacgaaccacacaaaaacaggaactaggagcaacccaagaacaagccgaacggcgcacacgcgaccagtgggacccagaagagcataacaaatatgagcgccaccggctagaacaacgagcagcgccaacaataggctcaaacaatagtgcgcaccgctagcaaacagaacaccaggagaaaaacccacacacaaaagatctgcacaaaagcaacacaaaacatctagccaacaccaccgccagcagacgcgataggacaaggagcacacgcagaccagaggaccatcgtgaggacaagcacatggcagaccaagacgcagaaacagacagcgggaacacacaacagcacgagcagaacacgccgaagtgggtcgagaaacggcaggcacacgggcacaagcagaccaaagaacagaaccaagagaaagtgaccagaacacccggcgaaaacacacccaggagcaaaacagctacataagcgagacaaacgtgacaaagaccgaggagaacaagcacaaaacaggaagaacgaaagacaacaagaagataaacaaaggccaccacaagcatacagcaagcagccaaacgagaaaacaacaacaact

SEQ ID NO: 540878 - DNA, 215 bp, Homo sapiens
atcactagtcaagacacagtactagggataggtttaaaaaccaaacagattctgggagtataatctcggttcagtgcgttgtgtaaagtagcactatatctgtaacgccaaacaatccaatgccattcctaggaacctaccctacagaaacaccagcttaaggtgactaaatgatacatctctagcacatttaagacagcattgtctgtaagagc

SEQ ID NO: 540879 - DNA, 864 bp, Homo sapiens
ggggagcgagagcgccaggagagagaagctcggtgggagcatgagaatccatcttcatcctagccggctccgcccgtgtttgcgtggaactgagcctgttgcgatgtgtcattgcataggagaataagcagtgcttatggtcgaggactcttttcaggcaccgctcgactcgtgtaaacgatctagcctcatcaatgaaccagactaagtggcgcgaagcatgcgctgttcgtttggacattctggcaacatgggttcgcaagcgcgatgccacgaatccatgcttgcaatactcagagctcattgcgagctggggactcagtccagtcgctgtgccaggatctatgaggagtggcaggccagcttcccaggacgacgcatatgcgctggacatatcttcgtgttccagaggccagctatggctgagtcagccttgcggggcacggaggccgtggcaggacaggcggcctagtccttacttagccacatcgttccgactagcgcccttacgtgggggtcacgtgaacgcgaataaccagtcgctctatacacttaccaataagataggcgatccccacaacagaagcttacaggcactggctatcctatgacattgccccaatgcaccccgttgtccccttgtgtttggcagcagatcgccgtatggggaagaagccccacaccaaacgaagcccacgaaatcccgggcaagcgtctcccggggacacccccctggcaccgagcgacccagccacgtaacctacggtacgccctcccgctgggcacactacccacgaggcacccgcgcaactccacccggagcaacgacacccctgggggcacagggctccaacaaacacagga

SEQ ID NO: 540880 - DNA, 172 bp, Homo sapiens
ctacagctcctgatgaattataaggtgaactacattcaggtgtctaataggacccctgctaaaaagcaacctgcaccctgctcttgagttcagcggttcgctggggatgaaggcagacactggggccctagtgcaatgggcgtcagcacattgcaggtgtcagggacggaag

SEQ ID NO: 540881 - DNA, 1395 bp, Homo sapiens
ggaaggctgcatagtgactgacaaaattctacgagagtgaatcctgcacagatagtgacagaggagcttaacactgaagacatcctcagtacacagaccccctgaccatgactgtgaaaaaagaacccagagaggacacgaaagggccccaagaaagggactgctgactctgggcaaataccaaacagacaggtgtccattagctggcttcttccaggagggacataaaccctgccatctcctggatagaatccagagaccttggcacgtggtcaaagggacgaccagaccaagcaaatggtacctcctccacgttaactagtggtaacgtttcaattctaagatactccaaccatcacactggtaatcaacaaagacctggataccaatacatacctggtgaggggacctaatacgtacttatcctaggaaacttataaaccaaaaaagcggcccagttcactcgtgggggcagaccacgggagtggcacaaaacaacggcgtggataaaacccgtttcctaaacttgagccgtaataacacaaacgccaccatagcatcatcatggacccctaggtcacctagggaagaaacggggaaatattaacgtcaccacgacacattctaataccattgggagaacgccaaggtatcacatcacaggaaacactattcataccaaatctgtcaacgggaccccatgatcaatgatgaggccactaaacacacccaacctggttgcccgatccccaacttccagagcactaaatggccccctggaatacccggacaatccatgcgggcaccagagaaaactctatcttcaccctaatacatttggattacaccactccttggcttatttggtataacgaacagtacccatggttagaggagacagtccacatccaatgcacttacacaaattcccatggtggcactaacacgttacacgccaaccgttagcttcctaacacataaagataaccgaaacaactacatgggaccccaccataacactaacctggcaacgccagaccctccacgcacagcccaacaaaagctacgggaggaccacacacgccgcacgccgaacaaacccccgagaaaacacaacaccccagataacagcaacacgggacccccaccaacccaccgacatagaagacgcccggcacactcacagaaagctcgaggaccacacaggaccagaggcacccgcaaacgcctgcaaacaccacaaagaccccggaaagaccagaccacgaacagacaaacgaaaaaaaacgaaccacgcccatagcgaggagaccgcaccgcggagaccgacccacaacacgaacagagagaagaaaaacaacggcccacaccaaaaactcacacgacagacgcacg

SEQ ID NO: 540882 - DNA, 5298 bp, Homo sapiens
gccaagggtcccccagacgggcgggggctccttgcggccggctagctactctccccgcctccctgcgccctcgccctccgccccgctgtacccgcagagcgcgcggcccagcgcagccccttttggcaccgaggtttccaggtgcccagcgcgaaggcggagccgggttacagccgcctcctcggcgccacagagaagacccccgggagttcggcggcccaggcgctccggctctgcgtcccgagcctcccccggctctccgcgctcctccctctcggcgcgcccggcgcgaagcctgcgattcgtgagccgagcgcagagcgcagagccgagtggcgcacgctgggcagtggcctgggcaaccccaaacgcagccagagccctcacccgagtccgctggcccgcgcactcccggaccatgactgccgagggacccagcccgcctgcccgttggcacagacgcctccccgggctctgggcggcggcgctgctcctgctcggtctgccgcgcctttcggtgcgggcggatggaaagctctttgtgctggagtctcagaatggctctcagggcctacaactggaggctgctcggctttcctgcaagagcaggggcgctcacctggcatctgcagacgagctgcggagagtggtacaggattgctcctttgcggtgtgcaccactggctggctagcagatggtactcttggaacaactgtgtgtagcaaaggaagtggagaacagcaaatcatgagagctgtcgatgtgagaattgagagcaacccagttcctggtggcacatacagtgccctttgtattaaggatgaagagaagccgtgtggagacccgccttcgttcccacacaccatcctgcagggccgcaccggcttggaaatgggggatgaactgctgtacgtgtgtgccccaggccacatcatgggccaccgggagaccgccttcaccttgctatgtaacagctgtggggagtggtacggcctggtgcaggcctgtgggaaagatgaggctgaggcacacattgactatgaagataacttccctgatgacagatctgtgtcattcagagagctcatggaggattcccggacagaggcagatgaggacaggggtcagggagactcctctgaggaggctccaaaacaggaccgtctggtctccatttctgtggggagagaaaacatagcccgggataaagtctttgtgccaaccacaggctcgcctggtgctgggagcagtgtccctgcagattcaccaggatcacggctgctccagaagcacttgttctggtttcctgctgaggctttccacaagcctgggttggaaaaggaggtggatgatgacaccaaaaagcagttttctgctggagacaaccacagtggtgtaaaattggtcccaggtgaacctgaaaccaaggtgatctacggcaacactgatggtccctcggggccatttgtgggcaagaatgacagcaaggcaggagatccagtggtgagcagcagtgatgagtcctggttagatggctaccctgtgacagatggggcttggaggaagacagaggcagaagaggaagaagatggggacagaggggatgggtcagtagggctggatgaaaacgtcctagttactcctgatcagcccattcttgtggaagttaagaagcccaagagtagcaccctcacaccaagcgagggcatgacccatagttcagttcttccatctcaaatgctagatgtggaagctttggcgctcagacccgtgaatgcttccgagactgagggcattggggatggtgacttgacgaagtaccagtcaactctaccctggagattcatcacagaggaatctcccatggccaccctgtcctatgagctcaccagctccaccctggagatattaacagtgaacactgtcaagcagacacctaaccacatcccctcaacgatcatggcaaccacccagcctccagtagaaaccactgttcctgagatccaggatagcttcccatacctgctgtctgaagacttctttggacaggaaggccccgggccaggtgcaagtgaggagcttcatcccaccttggagtcgtgtgtgggggacggatgtcctggcctcagcagaggccctgtgatcgccaccattgtcaccgtcctgtgcctactgctgctcctggcaggtgtggggatggtgtggggctaccgcaagtgccagcacaagagctctgtgtacaagctgaatgttggccagcggcaggctcggcactaccaccagcagatcgagatggagaaggtctaggcacctttggagtgggttctcccaaagccacttgggaggaaaataactgtgacacatcacacgataattcactagagcatgacacaggtggactggggctcatcattttttcctcagccctttgttttataggctgagaagtgtctctggagcacctgggagggcagggaggctttggtgacatcatcactcatgtcaatgtctcctccaccatctgccctggaattgactacactaatcccagacctgtgcttgggccctgtttccagtgtgaggtcaaaaatcgcctcttccttcatcacagtattatctttttttttttgagacagagtctcatgctgttgcccaggctggagtgcagtgtcccgatctgagctcactgcaacctctgcctcccaagttcaagcaattctcctgcctcagcctcccaagtaggtgggattacaggcatgcaccaccatgcccagctaatttttttatatttttagtagagatggagtttcaccatgttggccaggctggtcaagaactcctgacctcaagtgatctgccctccttagcctcccaaagtgctaggattccaggtgtgagccacatcacagtattacctttttgaagaaagaaaatcaccagcttcatgccctgaaattttataaatagtcatgataaaccaagtgtatgagagcagtattatctaggacatggatattgaattattgggagaggaatatggaagaataatgggttgtttccttttaatgttgtgatgttgctgagggcagatgaaccaagagccaggacacagtctagaagctttgaggtttcttttttcattgtttcttgaaattagaatttaagactgacattttgttgggggagttgaggagtgaagaaacacacatccccctctgttccctccattctgtgggacagtctgtcatttattttattttattttcaatatttcatggttaaggatttgccattattttttaaaaacaaagttagctttgtaccagtaagtaccatttcctctcagaagcagtggcctagttgtccttgaccagtctgtgcctaggaatgtcttggaatttttgccaggactaacaaaactcagtccttggtttcctctctcaggattaaccatttctctgaactccagtaagagagaatgacacgggagaaaaaaaaaagaaatgttttcagagggccgaacaccaggttatcaagtatgggcacatacttgatggagaagcagaagaatctgtgaaagaatatgaaatgatctgtgctgatctgttctctagtgtggaaactgggagctctgtggaaacagaatccatcctgtctgttgggtaacccatttcgtagcatctaaatcatcttagggtggctcagcgaggatggtttatggcagtggttctcaaagtgtggtcctcagaccagtagcatcagcgtcacctgggaatttgttggagatgcaaattctctagtcccaccctggactcaggaaacaggaaccctgggagtagggcccagttctgtttttaacaagccctccaggtgattttgatatgcactcaagtttgagagcctgttggtttataataatctcaaatgtgaacttcgaggccagctgaagccctaaaggcacagatgagtatgtggtgtgtgttgtgtggaagtcaggcatggctgtgtgcagctgaggtggcatttgaagctgcctaaatgccacctgcaatagtctcctgtatgttggcacagaaatgaaacatgttatatttttctaatatgaatcaccttcttagaaatagttatcagtggtaaaaagtgatgaatgcaacacatttattttgagacaccatagcagtctaagtgtttttgtgtggtagagggaaatcctgatcttttttatgattgaaaaattgttggtggtgttttacctaaggaaaaaaaacattcgcaacatgttttctaccctgccacctcttttcagcaagctttggaaaagtaataggcgaagtagctgtaaagagaggcagcataatcaaagatcttattccccatagttgggtaaaataaagcctgaaggtaccaactagaatacctgtgcatcagacgaagtcaagaacaataggaataaaatgctttctgcatgtagccaaagcaaaacataatagaataaaagccagagactgtatatatttataaattagatcctaatctactgcaagataacttttctatttttaactatataaaataacctctgtctcagcattgggactgtgttagcaactattattgtggaataacccagaacattggatttataccaacaaataggcaatattaatacagtgtattaataaatttattacaaattattaatacagtgtattaataaatttattacaaattattaatacaggtaaatgttttatttgtagacatggactgtgaaataaacccaacacatcagtttttaagttcttattggtgtggtatcctctaaattaatgttatagaatctaaaaattcatgttgaaagggaatgattaaaacaatgtaaatctaaattgtatgtcatgcatgttttgagaatggtgaatgtttaatgctcatgaaaattgggggagggggttctattaacacaaagcttctgagatatttaaaataaataattattgccccaaaaaaaaaaaaaaaaaaaaaaaaaaatttggtggggccgcctggccggcaagaaaaggttttctaaagaacatttcgtgtggggcgcccctggccccatttatgggtaaggtcacacttgggcccaacactggtccccaagagaaacctcgtgggccaagactcgtgggtgggttcttcccccataaaaaaacgcccgcggcggaaaccgacgtgccggaccaatccaggggggtccgacgcataccggtccacacaggggccagaactattaccgccgccggagggggggc

SEQ ID NO: 540883 - DNA, 101 bp, Homo sapiens
ctatgagcatgagggactcctgcactactatcacttagatcacagtgcatgatgttgcctgggttcccaccacagcctccccacaagatcaccacagtacg

SEQ ID NO: 540884 - DNA, 869 bp, Homo sapiens
catggtggctcacacctgtaatcccagcactgtgggaggccaaggcaggtggatcccttgaggtcaggagtttgagaccagactggccaacatggtgaaaccccgtctctactaacaatacaaaaattagctgggtgtggttgcgcctgcatgtaaatcccagctactggggacgcagaggtgagagaatcacttgaactcgggagatgaaggttgcagtcagcagcgatcgcgtcactgcactccagccttggggaaagagtgagaccccgtctctgaatgaatgaatgaatgaatgaatgaatgaatgactgaatgaatgaaagaaacttgcctttagtcaaataagggacacaacaaaattctaaactaaatccaatgtctttgagctctacaccatcacgccacaagcactctagcccactgcttcttaattgacttgtgatggattcctatcctgtctaccaacttgccaatgtgaatattccttataagtactatcactgagtcacagagggcaagacgagaagacacgcccaacgaggcccaacagcgggacggagcaagccaacgacaaggcagaccacaaggcacaagcgcacgctcatacaaaccagggcagcaggcagaacagtacacagcgagcacagaaagcgagaacagggaaggaagagaggcgaacagccaagagaacgggccggacacaagagaacagaagggcacatagaaaggtcaggaggagagcaagcgaagcggaaggagaaagcgaaagggacgcggcgaagacgggcgaacacgacgcagagaagcggacgacagagaaaagcagaggaggcgcgggaagaagagaagcgaagccagaggacacc

SEQ ID NO: 540885 - DNA, 251 bp, Homo sapiens
acttgatgctgctggtcgctctagagatcccctgcattcccgggactgtttgggtcagtgaaggtcccatctggcagcctgatcctgtatgcgacatctggtcatactcccgcttggtgggaggctcctggcttgcggagtacgagggaacaggacctggctctggagcccacctgggggtggctgagagcccagcactgccaccatacttcttggcctctctctgctttgtccctcccgatttgcagggt

SEQ ID NO: 540886 - DNA, 443 bp, Homo sapiens
aatagttaggagtgtcgtgatcatgatactctataatctttaaaatgcgcaactataataactacagagattcactggaagtataaagaaaatcttgccgggcgtggtggatcacacctataatacccacactttgggagggcgaggcgggtggatcacgaggtcgcgagatcaagagcatcctggtcaacatggtgaaaccctgtctctactaaaaatacaaaaattagctgggcgtggtggcgcgcacctgcggttccagctactcaggaggctgaggcaggagaactgcttgaacctgggaggcagaggctacagtgagccaagatcgtgccactgcattccagcctgggcgatagagtgagacttcatctcacaaagaataataataataataactattttttaaaagataaaaaaaggcaggtgtggtagctcacgcc

SEQ ID NO: 540887 - DNA, 246 bp, Homo sapiens
cggagatgataatgatgtatcatgtaggtgtatgcatcgggtagtctgagtaagtagagggcattccggataggccgagaatagtgttgtgggaagaaagttagatttacgccgattaatatatagtgaaatggattttggcgtacgtttggtctagggtgggtatgaacaatagtgcaggtctgaacaacagtgcaatggatatcggcgtaggtttggtctacggtgggtatgaacaacagtgca

SEQ ID NO: 540888 - DNA, 154 bp, Homo sapiens
gcttcttcagagcaatacgccgccgtttgtgctgcaggacacgtggagtacaagacgctgaatcttgggtgctttgggcctaggtttcttaccttcattatttaagggcttgcttgcaacatactggcggacatcatcttctttagagagattg

SEQ ID NO: 540889 - DNA, 131 bp, Homo sapiens
tggtgataacctggccgtcaggcagatcgatagctcgtctaccagtggaggagctggaagcagacgtggccatctcttgctcgaagtccaggacgatgtaacacagcttctccttggatcttggcctcgtg

SEQ ID NO: 540890 - DNA, 206 bp, Homo sapiens
atccatgcccttgagctcggccagttgccgggccaccagcgagacataggcgggcgagttgagtttgccgcggtgcggtgcaggggccagataggggctgtcagtttcgatcaggcagcgctcgatgggcaccatgcgggccacgtcgcgcaggtcgcccgcgttcttgaaggtgaggatgcccgagaaggaaatgtgaaagcccc

SEQ ID NO: 540891 - DNA, 327 bp, Homo sapiens
ttgggcaaacctttttttttttccaatttgggaacctcccgggaaaccggtttccctaaggatcccccagtccccataaatgtgggttggaggcctgggaaagacccctaaaggaccccccaaggtttatgggacggggttaaaaccgttttgggcctttttggaagtcccaccttccccaacccgggggggggttctaaaatatgaattgagggttaaaaaattttccccttggattccctttgggaaaaggtttttttttatggggcccccgaggggggtttcctttttttttttttcctggggccccacccaaaaaaaagttta

SEQ ID NO: 540892 - DNA, 282 bp, Homo sapiens
cctatgaccaactacagaagattatagtggctatagctgaagttgtataaacagatccgcaagattataaactgcgtgactcctatgtacctgtagttttttctacctagtgtagcaacactacatattgagtctcctcaaacacaattctgccttataacaactcttcattcattttctttaacctcaaggctttaatattcccacacaaaacatcaggtgcaacactggccgggcactgtggctcatgcctcatacatcccagctgatcgggcagcatga

SEQ ID NO: 540893 - DNA, 402 bp, Homo sapiens
gacgtctctgcctactcatttacttcacttccgactcttggcaacttcagcactaaaggcactcctgccgtcagcatgattttcaatccctcctcaccagctacactctacttctctcccaagaaaggtcatgctcacgccctgaacttagcatgatggtggggagtggggagattctggtgacaggaggaaaggggcaggaaacagcaagaccaaggcagcaagaagagaaaaattagcctgatggaggcatacacaaacagatgaacacctgtgggacaaggggttatgaaagcaactaaataaagcaccgtctagttcttagattaaaattagtcaagaacaaaacttctaatcatataagctccagaatcctgacagtagcttgcatttttagagtca

SEQ ID NO: 540894 - DNA, 900 bp, Homo sapiens
agcggactataacgggagcagccacggcgaggcagacatgcgcactttgaactcgcggtgcgatgaaggagtaggtggtgggatctcaccgtgggtccgattaccctaattctctggccttgctgtgtttgtacgctatcatcgagacattactgagaatgggctagttacgtgataagggcgttggaagacagagactccaggaaaaaaggctcaagagcaaacggcaggtatatcactggctcggcaagaatacgaccgggctatgacgagtttgcccaaggtgggaccggtattcgatcgaacaactaagaattcgtatgagatcagaccgctaggtcataggcactgtagtggcgctgccgtagatgccgtgtggtgatacatgtggcaagactcattcctggaagatacctacacctggcataagtgtaactggaacatggagtaaggaaaatgcgtccaagaaagacattgataaggtaagaagcgtagttacgccctcgttcatcgttgcatacttagtcttaattcgtgggagactgaaggaatttggatttcatctcagtcaatggctatcccaatatggccgggtgtgtaggtgtcaggtccagagattcatcaaaatctctgatctcgggaaagaacatgtgaccaatgagaagtgactagtctagaagcgatagccttggatacccttgttatctcgagtgacgtctagagattactctaacagttgtaccagtgttgggtgattccaggtgaatcgtgggatctcttgtgaaataaccatagattgtatgccttttctcgtaattctacttggagccaacgttggaagttgaattagggttttcaagcatccaaaattattctgcagttccgatttcttaagccaat

SEQ ID NO: 540895 - DNA, 137 bp, Homo sapiens
  misc_feature (42)..(42): n is a, c, g, or t
gctctacgaggatttcagtactgccaggtaccacactcatancaccaagaaccaccaacacactcatacacagacatacagacacacacaccagatatgcacactcacacatacactcagtatgtgggtgtgtgtga

SEQ ID NO: 540896 - DNA, 272 bp, Homo sapiens
aggccccccccccccatgggggggttttgggattgataaactgtggaacctcccccctgggctccccaaagcttattaaccccttaactgtatcggggcggggggggtgtgggcatggaaaaagcctgggctgtttttgctatatgtaaataaagcccttgggtctttatttttgattaatttgttctgattttttggtttgttttttaaggacctgtaatgaacaaatgtcgggatatcccatccccaataaaaatgttgtttttttttta

SEQ ID NO: 540897 - DNA, 190 bp, Homo sapiens
agccccataaaaccagcagtcactgtaaaattggaaagggaagaactggcagaagcgtcttgcgggggctgccggcagcccccgcaagacgaggaggaggatttcggtaaggaggccgaagaggaggcctaaggcagagcccccgatcacctcaggcttctcagttccctttagccgtcttgcgggggct

SEQ ID NO: 540898 - DNA, 123 bp, Homo sapiens
ttgtcggatgtggtcatgtggacatccaggacacacgaggactacattgaatttgccagcctggatggctccaactcgccacgttgtgctgagccaggacatcccgcacatccgtactggccg

SEQ ID NO: 540899 - DNA, 239 bp, Homo sapiens
ataatcagctcggtaccgggcagtacggatgtgggctttaagtaggaagactgtcctggctcatgcctgtaatcatagcactttgagaggctggggccagaggattgcttgagaccaggatttcgagaccagcttgggcatcacagcgagaccccttctctacaaaaattttttttaaaatggagtcaggcccacgtggcacattcttgtagtcccagctactcgggaggctgaggtgg

SEQ ID NO: 540900 - DNA, 375 bp, Homo sapiens
tcccccttgagcccctcgcttcccgacgtccgttcccccctgccgccttctcccgcacgcgcgcgctccgaggcgaccacgaggaaaaggagtcgtatcgatgtccgtatccagaactcatctcgaccttggctgatgcaagtacgggtgatgacgtgcttcctgctggcactgagcataatatccatataagaattcaccagagaaacggcaggaagacccttactacttgtccacagggatcgctgatgatcacgataaaaagaacatagtgaaggcgtctacgcaaaaagttgcctgcacatggtactgtaatggaagcatccggaatatggagaagtaattcacgctacagggtgacaacgcaagaacatt

SEQ ID NO: 540901 - DNA, 398 bp, Homo sapiens
ttctgtctcagcaacttccgtagtttacagactttggagagcccaagctaactaggggcagaagtggtacacccacacagcacagctgctttataaaagtgtggctagactgcttctttaagcagatccctgatcccactcttcctgactgggtgacacctcccaaccagtgtctccagccaccacctaccacctggttgtttgggccagcaaccaggtctgtacccctctgggacagagctcccagaggaaggggcaggctgccatctttgcagttttgcagccttcactggtgataccctcaggtactggaaaacctaaggcgactagggactagagcagatgcccagcaaaccccagcagccctgtgaaaagtggccagactgtaaaaaggaaaa

SEQ ID NO: 540902 - DNA, 289 bp, Homo sapiens
agcagctgcacgcatgctgcaggtactctaaggatcccccatgattagatgtgaatcaacggggttccgatttgccgatatttctttaacgtcgttgcatgctaccttatgaggatagccatgtgtagggttgaccgtgcgtgtaatcatgacttgttgagtcgcttgtacatatagggctgttaattgtcagctcactgtcctggtctgacgcaggcgtatgcggcggagaatgtttccatgtatacctaatactaacattagttcttctatcgggtgatagattggt

SEQ ID NO: 540903 - DNA, 158 bp, Homo sapiens
tgccaaagccattgggggtttgcaggaacccccccgcccccctgctccccaatgttggaggccagcgataataaggccctgttggtttgttgaccgctgggctcgttggtgacccccccagccccgctttgtaaccagggaatacccagtctttttta

SEQ ID NO: 540904 - DNA, 241 bp, Homo sapiens
gccctttgggccctttgggccccagggggtgtgggcccttggggcccccccccccccagggggcccggggggggggggggcccctcctttttggggggttttttcccaaatttttccccccccccaagggttttccccccccccccctttcctttttgccccccttgggggggggggggctttggggccccccccttttttttttcccctataaaaatccccttgtcccccccccgaaaga

SEQ ID NO: 540905 - DNA, 108 bp, Homo sapiens
cattctccactggctgcttctgcatttatttgccttttttctttttctcttgctctaaggggtggtggccaccactgtttagaatgacccttgtggaacatgtgaact

SEQ ID NO: 540906 - DNA, 125 bp, Homo sapiens
  misc_feature (50)..(50): n is a, c, g, or t
gggagtcaatatctctctggaggtatgatctgtatctaacaacctaagancactaaagatctagactgataatgacttcagcaagtctcaggattacaatccagtacaaaatcagcagtactttt

SEQ ID NO: 540907 - DNA, 258 bp, Homo sapiens
cgaagtcacccgcgatacggtcacagactgggtgtgtatacgtaggaagcagtatatcaaaataagcaaagggtgagtcctcctttgtttttttattagaaacgctgtgacttataccaatataatgagaacactggagtgactttacacttgtcaaaaaaggaggcttgtcatgaatcaacaagcgatttcgcggcggaagttgctaggcattgccgggcttggctggatgtttgatgcgatggacgcgggtgaact

SEQ ID NO: 540908 - DNA, 184 bp, Homo sapiens
cgagagctgtccatcttctccttacacctagacaggtgtctcctctatcttagagtggccatcaatttcagtcacaatcatttagtcaatattgaacccctctgccagtaagccaataggcaaacgctcctcttcgtctgatccgtcctaatgcacggcattcctacttctcctatctctccca

SEQ ID NO: 540909 - DNA, 84 bp, Homo sapiens
caagaaggtttgcagttaagccaagattcattgcattgccacttgcacttccagccttgggcgacaaaagcgagattccacctt

SEQ ID NO: 540910 - DNA, 176 bp, Homo sapiens
ctttcggcgccgagccctgaagcagctgcccaagccaccgggtgctgatcactaacgggggcggggcacccctgcttacctggacaaaccagaggatgtggcatacacggactgctggacttcctgcagggcgctccacgctgaagcccagcactgcatgcatgggggtgggctgc

SEQ ID NO: 540911 - DNA, 788 bp, Homo sapiens
accagcccggcaagatgttgaaaccctgtctactaaaaatacgaaaattagccagtggtgcgcacatgtagatcccagactactggggaggctgcaggcaagagaattgcctgaagctaggaggtggaggttgccggtgagccgagatggggccactgaagcacagacctgggtaaaagagcaagactctgtctcaaaaaaacgaaataaaataatatattagacacatgtaaattaaattagtgatgtatcacaaaagatcaagaagatgacggaaaggtctgccaaaagggatgtctcctattcattttgctagcctaaatctttgtagtatgccctatgattttgaacacattggtaaaaatagataacagctactagagacagaatgaagcttatttctctttggctttttaaaacatttgaattcttttctgtaaaaattactgatactcagcaggtaaaggcagaatttataaaatttgtgaacagcagcatgggtatgatagagttctaaacatcttggattttaattcactcaatgatgaataataggctttagttaatctaaaagtgaattccttccaattgcatatggtaccaaacactttaaaactattttacatgaatactcattagaatctatattttttagagaacaaagattcgcctttactccaaagtttcattattttaacctttgtttgtctcaaggaaggtttggaataatttagaacatttaaacagtttcttttattctgtgtaatttcattggcttcctaaaaatc

SEQ ID NO: 540912 - DNA, 218 bp, Homo sapiens
ggagctcattgaggcgtattgtacagattcgcttaacttggtcaggggtagaggcccgtggtctcactcagcccaaaataggccaaagattcctccgtggttttagcatgagcggctccatatgtgctccctatcctgggggccggggccggtgtgttccttccagggggttcccactcgtggggggtcttcctcagtgtgtccatctgacccatctt

SEQ ID NO: 540913 - DNA, 174 bp, Homo sapiens
atagagaatgtgctaggaacttttctccctccccaaacaaaaagaaataaaaataaacaaatacaaaaatcagaatcgagtatactaactacagctcaacaattgaatcaaatgtcactgttttgtaaatactttatccataacgaaagatataaacatggcacatcttccaat

SEQ ID NO: 540914 - DNA, 447 bp, Homo sapiens
  misc_feature (151)..(151): n is a, c, g, or t
  misc_feature (160)..(161): n is a, c, g, or t
  misc_feature (171)..(171): n is a, c, g, or t
  misc_feature (179)..(179): n is a, c, g, or t
  misc_feature (193)..(193): n is a, c, g, or t
  misc_feature (206)..(206): n is a, c, g, or t
  misc_feature (209)..(209): n is a, c, g, or t
  misc_feature (212)..(212): n is a, c, g, or t
  misc_feature (242)..(242): n is a, c, g, or t
  misc_feature (245)..(245): n is a, c, g, or t
  misc_feature (388)..(388): n is a, c, g, or t
  misc_feature (425)..(425): n is a, c, g, or t
tctctagcttatccctgcacaattattagagtgaatgaaaaaccactttcctgctttccattgttataaattctaagcttaagataaaagtggttctttacatgactgaatcaattacaatttatgggctagagcaaataggttgaagacnatcatcctnncagctgattnggtggaantaggaattttcatngggaaatgtaaanacnacntttccccaacaaatggtccattgacctttnctnctgttttttgagaagagttttcatatggctgggaccacatttttaagcttttaattgttttttttttcccattgtccaaaaagttaagcaacaagtggccacactttttacgtgactacaacccggagttctgcaaagaaggnaatatttacctgggtccttgaccaagttatccccccnttccatgggtacctttaatttg

SEQ ID NO: 540915 - DNA, 138 bp, Homo sapiens
ccaaaaaaaaaaaaaaaagggggggcgcccccggtttaaaaccgggggggggggggggggaaaaaaaaaaacctccaaaatgggggaaaaccaaattcggggggttaaaaagggaccaaacaaagccctttttttcca

SEQ ID NO: 540916 - DNA, 812 bp, Homo sapiens
gtgaacttggcgtagtcttgttgggtgctgtcctagatgcgcccccagggtgacggagacacaccctctgtggggatgggattggggtggcttctgaggagcaggtggactggcctgagctggtcctttctgggtaccctggtgcccttgcctctagccgggtgggctcgtcttgcttgtgtggtcctagccatgtgtcatagtagggcgtggcctcttacagatcttcatgtgaaatggggctgtggttgagagctgggggcctggagggtagtcacagcacgagggacataggcccgactgctgaaagctggcaaggtttagcagtaggcgcccctgaagagtagtttaggagtaagaaggaatggagttcaggaataccctcacaggctctgcatgtgacatcagggctgccccgcaagttttggcaccctgagcctggaaatccaaggaaggcctggtgcaaggggcctcagggccgagggcaaagcaaggcccgggaagagccgagagtgccatccctgtccgggagcacgctgcgtcgttactagagagaagcccctcagtggggtgcgtggtctcacgtgcggcttaagttgggcaggcaatgggcttgtgaccaagttatcactcaggagcttgaatggagccgatcggggaagtcccacggcggggagggcatagtggcgctttagagccctgggcctgttgtcaggtgacagaaggcttgatccctttcggcacactgtcttggacccctgggggcgaggttaggctgcacaggggcagaggcgcacagcctgacgagctga

SEQ ID NO: 540917 - DNA, 249 bp, Homo sapiens
  misc_feature (21)..(21): n is a, c, g, or t
gtcatcaccttcactaaaagnaagtacagaaagaaaggaaaggaggaagagaagacaccaaaacacccagaaaacatcatacaaatgtcagtggcatggcatatgtaatatcagtatatcaaagagatgtctgcactctcatgtttatcacagcactattcacaatagccaagatttggaagcaacctgtgtccataacataaaagtgcaaactgaggatcaagctagaataattgactcaggtggtgt

SEQ ID NO: 540918 - DNA, 138 bp, Homo sapiens
ctgtaaggtgctcgggacatttgtatagcttctttggagaaagggccattcgagtcctttgcccgagtttaatttggactattcgatttgttttttgagattgagttgtgtggagcccgtttcactccatcattaatt

SEQ ID NO: 540919 - DNA, 140 bp, Homo sapiens
  misc_feature (2)..(2): n is a, c, g, or t
anctcctttaatcacagctactgatgaggctgaggcagaaaaattttttgaaactgagaggcagagtttgcagagagtcaagataatgccattgcaggacagcctggtcatcatgagcaaaactccaaaacaacaaggtg

SEQ ID NO: 540920 - DNA, 997 bp, Homo sapiens
  misc_feature (997)..(997): n is a, c, g, or t
gtgctcgcgtggaggcccagccagcctcatggtggcatggcagactgtggcagtcacgacgacattcacaggtcaagactaaacgagtctgaaatgcagatgtgagtggtctgaaatgcgcgagtactattctttatagaattgattcgtggaaatgctacctacaccatgcatatctcaaaccaagaaagaactttgtgaaaaatgatgcctgaggcatgataatttcacgaatgaagaccgatcttattctgcgatatggactcgggagagatcagtatgctaaaaagacctgtgcttttgcattgtgcaccaagacagcccatgctgactgaattgtgactgccctatcagtatcttcagctacagcacaggaatctcgtttccatcagtggccacttggctattagcatagctgctattatagcgatttctgacttttctttacaatgcttctgagggaagtaatttgaccactttagcaatcttccctatctatccatcattcttactataattccatatccgtggtcgatcggacaagagtctagccaactggttgccaatctactcctcttggccattgcgtgtaccatgcacacggtgtgatagcgagcgacttagtccgaacgtgtcataatgtgatacccatgttataagaaggttctccacatttggtttggagtaaggtggatgtctaacaagaaaagcagtcagaggcttctccaggttctttttcagattgtactggcattgccatgtcataagtctgtcttaaccccaaatgagggcgactccttaccggattcaagtttgcttaaactggggcaataatccaacagcgtccgaccaaagattaggcaaagatgcctggattgagcatgatgttcgcgccgaattggccattcatgtgtccctggcacatcgtgggaattggcaaaacgggtctggtggctgtgactctatccctctgtgatgactcttgactgcggagaan

SEQ ID NO: 540921 - DNA, 658 bp, Homo sapiens
ccctcaatcctgtcggtttaaaaagagaaatgtttatccggctgctctctttttttcttccccgggccccccacaccgcctcggtggagaataatattttttttctgtgaacacccccccccgcggggggtttgtgtgtggggggccccccgtggagacaccaacgcggggtgattcccgcccgctccttatattgtgagagaatttgtttatatacaatatatgtaatccccgtctgtttccccacctctctttatatatactcttttctcccccccgcgctgggcccggatataaagagatgtaaatatatgtagaggagtattttttctaccacgggaaaccacccccgaaccacccctccttctttttttttttcttttcttttgttttttttatattttaacacactctcttttatagagagagagatattatagaagggagaaattttgtttttccccccggaagtttggtggtccccgcccctctctctcctggtttcttgttttcttgtttgtcaccactctcccactcttgccccctttttctcagagaggggggggggggggggaaacacccgtgtttcccgccgttcctctcccgaggaacaaattgttgtgtggaaacaaaaaaaaaagctcccctctttttttta

SEQ ID NO: 540922 - DNA, 891 bp, Homo sapiens
  misc_feature (461)..(462): n is a, c, g, or t
  misc_feature (465)..(465): n is a, c, g, or t
  misc_feature (525)..(525): n is a, c, g, or t
cttacttgcagtaccatgttgatacttgaataaccatctgaaagtggtacttgatcatgttacaccatcattaaaggatgtgtattgcactttatttatggcccaccagtctcccccaagattagtacagaaatatccatgatcatacattacttacgtatgtgtgtacttggtttatacagctcctttgaaaactctgtgttaggaatatctctaatatacatagaaaacactacagtggtttagaagattactaatttatacttctaacgtcagttcataagacgcttgtcgtatgaaatgaccttcttaaatattgagttggatacgacgtgctacaggtaatagggactttaggaagcccttttatatgctaaaggagcatctatcagattacgttagaacatttgctgtcaggcacatattgtagatgacactaggtgcaatagcagggatagatnngtnggtgagtagtctcatgccttgagatctgtggtggtcttcaaaatggtggccagccagatnaaggatgtagtatctcatagttcccaggtgatattggttcgtaggtagaagagagtattataactcatgtgttgtttgacagcgttatagagttgagaatgttcgctaagggttgattcgtatatgtgtaagtggttcgttggttccagtgctatatgtagattgtttttggatggtgttacatattatatgttgctagagacatgtaatcctggatttacccttcttgaatataatccctggatgagatttatctatcataaatgcagaataatcaaatacacttataagcaagttaagtgtcctccaggcaattctgtattccagacttgggaagatgtacagttgcatgttgtgtgatcaaac

SEQ ID NO: 540923 - DNA, 1288 bp, Homo sapiens
  misc_feature (269)..(269): n is a, c, g, or t
agcgggggggggccgtgccgggcgccatcatggacgaggactactacgggagcgcggccgagtggggcgacgaggctgacggcggccagcaggaggatcgattctggagaaggagacggatgatgctggaggttcagcgaagaactgcctgcataaattttctcacctcgggatctatatcgatggaaccacatccgatcttcaacgacatctgaagcaggctattttcatgcgcaggatgggatctcgcagatgaattgttagtccangcctcttatcttcgataaacttgacacctgcgtgtggccctagggacgtgtgaacactgcgtggctccgagctggcgtcagtactagacgaggtgtctgagccatgtgcacgcgtatcacgggataactaggtgggagacatagccacgttgtcacagacagttttggctggcactcacaaagctgatgtgtccgcacgccctctgcggaaaaagctatgataatcgtcatgttgtctcactggggacagggaaaggaaggagaacccgcaaagctggttggccatggagggacactagggcatggactttggccagcgacatacgcaaccgtgttgggtccgagcgaaccctttttctctttggaaatagacagaccatggggacctggacaaacggcgcccaagtgccaggaaacgtggatttgtagaagtagccctggagaaacctttatcgacacggtttataaggaccggccgtttaggtttctccttgcaacggcgacggcggggtaacccaaggggcggggaaagggaggtccaccaccgagggggtgggtgggttccccaactaaggcaatgttgggcgcgaggcgcaagggcggtaatgagacaacggattggtgtcgctccgggaaagaaaggtgggcggtcccgagaaatcccctttcattccgttaacgggcgtttagccacatctcttgttaacgaacgtggtggatagcggaaagaaaacacgtaaaaacaacggccttttgagcaacaacaagacaccatttgctgtccccacctggggaggatttttcggcagcaagagagcgaaagtcgtgtttggtgtagtccccgaccggcgaggagcgaaggcgcagaccgaaacacgggtaaacccgcatgggttgtgtccgggccccgcaaggaggcccccgaggtggcacatttgcgtctccctgtgaggcctgggggggacccccagcgcgcgaatggggacccgccccacggtggggtggtggcggctgcccca

SEQ ID NO: 540924 - DNA, 740 bp, Homo sapiens
  misc_feature (666)..(666): n is a, c, g, or t
  misc_feature (681)..(681): n is a, c, g, or t
ggcgctggcgcggctccaagaagatgcgcatttgctactagcggcggacgcggacggacccaggccggtcctcacgcgcccagcacgcgccgctcccggctaacccggagcgcgcacctgataggccgagcggccagagctcgcgcatcccagcgcatcactcttccacctgctccttagagaagggaaagatgacgtgagtcgagctcgagagtccagtcctagctcctatggcactccaatgcgatgcgaaaaggacaggcactgagtaagctggggccgcgtggcgaggcctgtccgcgaatgcaagccatccaggtagatgttcccgggcactatgcgcgttggtcatgtgagaagtacagagaggagaccacagacgcacatgctgccaaatcaccgtaatggagtaacttcgcgtggaccgaaccagaaggagtaacgcagaagaatcatacgcggtgtctcgccgaagaatcctcgcgtagaaaccatcgcgaacagactcccagtgcaacggtaaaactcacaggtgggcatgactcactagatatacaactaggcaagacaggacgcgaaagcagggaaggaggcatcatcagcatgggaggtccatcgtgcaggcaatggacgcaagatgaaccacagtgtccgtagcctgaccgngactaccgttcactngcgtacgtgaggcaacagcttcccttgccctgcggacgtggaccagcatttagcttccg

SEQ ID NO: 540925 - DNA, 690 bp, Homo sapiens
  misc_feature (573)..(573): n is a, c, g, or t
  misc_feature (618)..(618): n is a, c, g, or t
  misc_feature (650)..(650): n is a, c, g, or t
  misc_feature (677)..(677): n is a, c, g, or t
taaaaccatagtgagataccatctcacatcagtcaagaatggccattattaaaaaactgaaaaacagcaaatgtttgtgaggatgaagagaaaagggaacacttatacactgtttgtgggaatgtaaattagtacaacctctgtggaagacaggatgggtatttctcaaagaactgaaagtaggatctaccatttgacccagcaatcccactgttgagtatctacccaaaggaaaataaatcattttatcaaaaagacacctgcacttgtatgtttattgtgacactattcacaatagcaaagtcgtgaaatcagcctaagtgtccatcaatgaatgattggataaagaaaacgtggtatatatactccgtgaaatgctactcactcataagaaagaataaaatcatgtctttgcagcagcatggatggatttggaggccattattctaagtgaaaaactgcaatggaaaatcaaatactgaaggggtgcgttgcccctccacacctgtgggtgtttctcattaggtggaatgagagacttggaaaagaaaaagcacagagacaaagtatggngaaagaaataagggggcccaagggaccagcgttcagcatacgggnggatcccgctgggcctcttgagttcccttagnatttattggtcattcctggggggttcncggaaagggggat

SEQ ID NO: 540926 - DNA, 219 bp, Homo sapiens
ttcagacgctggagtccaacgaggcaggatcattgagacaggagttcaagaccatcctgggcaacatagcgaaacctcatctataaataaattataaaacaaaaatgagccgtgtatagtggcacatgcctgtggtcccagcaactcaggaggctgaggtaaatggattgcttgagcttgggaagttgaggctacagcgagctgtgaccacaccaccgc

SEQ ID NO: 540927 - DNA, 388 bp, Homo sapiens
gcagcggaatgcccgggaaacaggaaacggcggtgggcgcggtgacaacgcacagtggcgatgaggactatcccaggggacaggaatgaccgggccaagggctcggcggggagctgcagttgccgagggggcagtgagagtcgagcacagagtccttcacggagcatgaacacacgctgggcgcgtcagcacaattccgcgtctccgtcttccaaaggaaacagtacatgatctgtcacatccagctgccagaggagaaaagcctatcaaagacagttacaccccacatatctctcacacacacacacacacgcacacacacacacagagatctaacgtattcaaactccagcccttgcgcgtgatggctccttggggtctgcctgcc

SEQ ID NO: 540928 - DNA, 155 bp, Homo sapiens
ttccgcgccttccgctgctcctttccctgagcaccttcatcaccagaggcttgaaggaaccccgtccatgtggtagggccatggcactgttcctggttgcaccttggaccgacatgcatgtccgtgctctcgggattgtcgtactctgtatggca

SEQ ID NO: 540929 - DNA, 666 bp, Homo sapiens
agcgggtgcagcgcgcgcagaagatcgcgcagcgtctatcggcgcctctactccgagagctcacgccgcgttctcctcggccgcctctggcgccggatgcacggacgtcctggccatgcctctgccttgaatggcaggcggtaagcctggacgtctaacgttaggggacgcacggagcaggatccaggcaggcaggagttgcagagatctattactgagatgaagcggttggaagaaatgtcaaatatgtctcagagctctggagtccagcgaccaccctccagaaccaaaagcccaaacagaagggacacgaagatgacagccagggcaaagagcaacgtacgggaacacggtgctgcgactacagaaacagcttgtcaagctgtggcgagacgcccaaggacaggcacccagctattaccagataccgagtacacaggaacctgaacaacagatgtgaaacctcggcagtgcttcaaaggtcagcatggacacagagtatagaacaaaaatgggatgccctggtcaatcaagcaggaggtgatgagaggcactgtggcaagaggcaccgaggtacattcacatgggttaacccatcacccttatcccaatgatactcacgggataatgtaaatgttcggcggacatagtgtggactcaggaaaa

SEQ ID NO: 540930 - DNA, 132 bp, Homo sapiens
gttgtgggaccgtttgttaacacggtgacactgtgggtctgacttttttcttcgacacgtccctttcctgaagtgtcgagtccagtcctttgttgctgttgctgttgctgttgctgttgctgttggcatctt

SEQ ID NO: 540931 - DNA, 226 bp, Homo sapiens
  misc_feature (116)..(116): n is a, c, g, or t
  misc_feature (198)..(198): n is a, c, g, or t
cagtgagggtaggaagaggaggtggcgcagtggcagaataagcaggctgttgtacagggactacaccatctctcaagccatagtaaggccttgcctgaggcagagctatcaggganctgcagaagtggtctcctgtgggagggctctgactgtgcgactgaccaaagagcttccattccctgagcatggtgaacccanggtcctcagttctcaaccctccaggggt

SEQ ID NO: 540932 - DNA, 186 bp, Homo sapiens
ggtggcaccagattgtgacaggttggagtgagcatggctcatggatcagtgcagctctgaactcctgggcataagcgatcctcttgcctcagcctcccaaggtgttgggatcataggcataagccaccatccccagcccattttttttttcttttaacttgcttcggtgagcaaggactccttact

SEQ ID NO: 540933 - DNA, 326 bp, Homo sapiens
gtcttcaggatgcgttataactaaactctctccggagacagagttcctaacgcttcagtgaagtacagagactagctgacttcacacaagaaccagaaggacctggtgtcctctaccgcatgatgaacaaactggacaccaatcagtgatggtcagcttagattctcacaatctcttaatcagatcggtggcctagctactgcctgccatgactccttcctcaaggctgtccctacccagaagcggacctgaggaccccttggtccaggccttcaaacccaccccctttccttccagcctttctgtcatcatctccacagcccacc

SEQ ID NO: 540934 - DNA, 555 bp, Homo sapiens
tcatgagtcgttgatatgatattataggaagatgcgatagtgtcgatgagtaatagaatcacgaggcatgtcgtagcaccttcgtgaacaggctataacccactctacagcatatccctctggtagtccatcattgagaacactggcagcaattttgaaatgaaaaaaaaaggaaggaggaaaaaaaggagctattagccccttttatttattctctgtttaaaatcaaacagaaaacaaacatcaatggttatacactaacatcttcaaagcacatcgttggtacaagagatagactaagaccaaaaatgtgtttacggagatccaaacataagtgagtgagagtgcctctcacacagctctccgatggtactcaggaggagccacttcataatcgcgggcacggagcaaagttgcagaattcttggccaggtactttaggaaatcgtgaagataatcgagtaataaagcaaggctcttctcatccagaggtgtataagccaacattgctccaattcgtacaactaatctcaggagatgtggcgctccatacac

SEQ ID NO: 540935 - DNA, 381 bp, Homo sapiens
cgaggaattagaagtagatagaaaccgacctggattactccggtctgaactcagtatcacgtaggactttaatcgttgatcaaacgaacctttaatagcggctgcaccatcgggatgtgctgatccaacatcgaggtcgtaagccctattgttgatatggattctagaataggattgcgctgttatgcctatgttaacttgttccgttgttccgctgttagcctcagttgactattgtcgttcgtcttgtactggtgtcgtctgagtcatgtactgctcctaggttggttacttgctccgatgtactgtgtcggaggttgagttgtgctcccaggttacctgatgctcgaagtcctgatcatggtcatatactgtattcct

SEQ ID NO: 540936 - DNA, 149 bp, Homo sapiens
tagacgtggaacacaaagcgtcctttttctttgcaggacggttgaacgaaaactctcttttttactaccagttgacgctcctccatctacggggtgtgcggagtcttgctcggaacggtcatgggcatatttcagaactggaacaaatc

SEQ ID NO: 540937 - DNA, 502 bp, Homo sapiens
  misc_feature (58)..(58): n is a, c, g, or t
ttatggggcaattctggacttcactgacagaataggaccacttccaccagtctctganccctgatcttagagcaagcatcctggaccttctccggaatcgatgcagcatggagaaagagggcaggatactgttcgactgcagcttgagttgtctcctggtttactcctgaaccatgtgtggtgtttaatgagagtgcccagagtcatactgtacacagtatatggctctgagtttgtctataaaacattcattatcacaagtggctagagtgcactatgtagcaaaggctatacctatatatcttctacaatacaacatgttagctttctatcttcaaaccaaattgtttatcagtgttttcaataaaagtgccctgtcattctttcaaatatcatgctctattttgttacaaatatcagatacacgccaaggccagtagatggagccaataattccagacagcaggtcagtagatagcacatcagtagatggagcccatta

SEQ ID NO: 540938 - DNA, 456 bp, Homo sapiens
tgacgtgacaccgtgctaacaactgcgctccgcatatgctccactcttgatgcgcatgggccaagtagcacgcacagccattccgtacatcgtccacctccacgttctgtggcgtactctttcacgctctgccaacacctgggcgatgttggcctgaaaggcctggcccatcatgatgtccatcttctccaggttcaggttcatcgggtcgttgtccttcacgaagaacaccttcatctcatgcttcaagatctccggcctttcctgctccgcattgagcattgctcgtttctggctggtccccctgttctgcaactctgggctcggcttgactgcagtgtgtcctcggggtgggggcggcttcttgaggccgtgtgccgtaatactccaagtccttctagtccctctgctttaacttcatcaccagcttcacagtgtaggagctccccaccgtcg

SEQ ID NO: 540939 - DNA, 596 bp, Homo sapiens
  misc_feature (37)..(37): n is a, c, g, or t
  misc_feature (68)..(68): n is a, c, g, or t
  misc_feature (285)..(285): n is a, c, g, or t
  misc_feature (291)..(291): n is a, c, g, or t
  misc_feature (375)..(375): n is a, c, g, or t
  misc_feature (384)..(385): n is a, c, g, or t
  misc_feature (407)..(407): n is a, c, g, or t
  misc_feature (427)..(427): n is a, c, g, or t
  misc_feature (467)..(467): n is a, c, g, or t
  misc_feature (469)..(469): n is a, c, g, or t
  misc_feature (474)..(474): n is a, c, g, or t
  misc_feature (479)..(479): n is a, c, g, or t
  misc_feature (483)..(483): n is a, c, g, or t
  misc_feature (501)..(501): n is a, c, g, or t
  misc_feature (511)..(511): n is a, c, g, or t
  misc_feature (526)..(526): n is a, c, g, or t
  misc_feature (531)..(531): n is a, c, g, or t
  misc_feature (558)..(558): n is a, c, g, or t
taggcattctttttttaatttgagaaggaggttcgcnattgtcgcccaagccggagtccaatggtgtnattccggctcactacaacctccgcctctgggttcaggcgattctcctgcctcagcctctggagtggctgggattacaggcgcacgccaatccgcccggctaattttttatttttagtagagatggggtttctccatgtgggtcaggctggtctcgaactccctacctcaggttatccacccgccttggtatcgcaaagtgctgggattacaggcgtnacacantccccggcctttttttttttttttaaaaaaaagagaaaaaaaaaaattttacaagggaaaaagaatcgaatccagggcacctanaggataccnncacagggaggacaggaacagantcctaggatctgtgccttcnagccgatgcccttagaatgggagttgtgttcttgggtgtntngtctnctgtnaacnctcccgaaagaactcccncactggactnaacaattgaaaaganaactntgggtttctttttggaagcccgccgcngggtgtttggatgccgaagggtagtacggcggggctct

SEQ ID NO: 540940 - DNA, 122 bp, Homo sapiens
cgaactaaagatgtatatggatgctaagtgcccatcacttctctctgtctatacctgccccatctgagacacccattgctcaccatcagatcaacctttgattattccatcataatgtatta

SEQ ID NO: 540941 - DNA, 208 bp, Homo sapiens
ttctcctccttggttttcttcctcttcggtgacttctttcttctcctcttggtctttctctttttcatcctctgttttgactctcttggctttcttgaagttggaagagttcttgcggccccctctccctcctcttcagaatcggaaaactcttcctcacaggcaattcgtttggcagaggagcagatccagatgcgcttgtcagggt

SEQ ID NO: 540942 - DNA, 137 bp, Homo sapiens
cctgggggacctgttcggactccagtatctgtcgtcgcagggtcctgccctagtgcctatgtccttgctcggggccatggagacactgcggcagtacggcggcgcctctgtctgaagaagggggtccgtctgtctga

SEQ ID NO: 540943 - DNA, 385 bp, Homo sapiens
  misc_feature (33)..(33): n is a, c, g, or t
  misc_feature (148)..(148): n is a, c, g, or t
  misc_feature (176)..(176): n is a, c, g, or t
  misc_feature (180)..(181): n is a, c, g, or t
  misc_feature (191)..(191): n is a, c, g, or t
ttttaaaacacgctgctgtcctaaacaaatccngtttaaaggaattttaaagagatgcattttactatatcaaagaacatacgtgtatttgcctaaacactctgtacctttgtaatgataaaacttcccccttctttacggtgaagcntattctgattaagcctagactgtgttcntttnntttttttttntttttggtctgatgatgaatttgtgaactctatctttggtatatcttttattaaactgcactgttttgtttagtcaaggtaattaagtaattatgtatttgaataacttggtgtgtcttgagtgttgtggtatgaaaagcattgtggtctttctacactaatgaagtgcaaataaaattttgtatttatgaatg

SEQ ID NO: 540944 - DNA, 243 bp, Homo sapiens
ctgttgaccacgtgcacacgctttctctagatggctatctctacaactattctcatctgtagtttacaatgtgtagccaattttctttcatctcaaaacgctctggctgcaggctgctcccattgagtctgtgcttttaggacaagcaatgataggctctggggagggttaacctgaacagagagaacggaatgataagatcgtgcctgcgtggtacctctcaagtttcctgaaactaaaaac

SEQ ID NO: 540945 - DNA, 365 bp, Homo sapiens
taagagtctgaagtcattgcagcattaactcaaaagtccacagccgtaaagtctcatctgagacaaggctagtcccttctgcctatgagcctgtaaaatcaaatgtagttagttacttcttagatgcaatgggggtatagttattgggtaaatacacctgttccaaatgggagaaattggccaaaatgaaggatctacaggccctgtgcattgtcacaatctggcaggaggattgtttgagtccaggagtttgacaccaaccggggcagcatagtgagacctcatctctacaaaaactaaacaaaaattagctgggcatggtagtgtgtgcctgtagtcccagccacctgtcgggctagtcgggg

SEQ ID NO: 540946 - DNA, 288 bp, Homo sapiens
  misc_feature (29)..(29): n is a, c, g, or t
  misc_feature (99)..(100): n is a, c, g, or t
  misc_feature (102)..(103): n is a, c, g, or t
  misc_feature (107)..(107): n is a, c, g, or t
  misc_feature (249)..(249): n is a, c, g, or t
  misc_feature (268)..(268): n is a, c, g, or t
  misc_feature (280)..(280): n is a, c, g, or t
cctctcctggctcccaaaaatgctggctncgggcggggcgggggccgaagacgaaacgcccctcccaaaaacgccagcggctgggagatacgctctaanngnncccnttcagggaagagcgatacgcgctgatggattgagggagattagggatgaagctcttcttggatttggatattgctgatcggaattctaattagatctgggttctgagtggaattatgatttgcgctatttggggatggcttngataggagaggaaaaatcngataggagctgnggcagagg

SEQ ID NO: 540947 - DNA, 1548 bp, Homo sapiens
  misc_feature (235)..(235): n is a, c, g, or t
ttatacattgttcccatttctagttgacgattatttcttgggtttgaggttatcatcagccgcactctagcgcggtacggcgatcctatccacttatggcacgtcacgagcgcgcacgccagtctgtgtagggaccgcaacagagaatcgtcagcctggctgttgactggcgaggttgtcctgtgtatgaggagacttcagagagacgtagttgaacactcacataaaactcaantcagacagttagacagaccagtggtcgaagtcagacgattggtccaggaatcgtggagtttgagcggcagactctgggaggcagacgcggggggcagtcccaagcgtaaagcattgaaatagcgggacacgtatgcacgctgcctgtcttcgttgaggaacacacaaacatagacagagaaagagaagagccatcagaggggacgagcccagcgcatgccaaaccggatatctttgctccccctgacggagcggggcctgcccgggaccctcatattgcgcgcgtgtttctcccccttggggtcctctgtgtgtctctggtcttgtccccatttgcgttttgtgtactctctcgtgtagtctcagtgtacagtctgtccgtgtctctgtataatacacgttgtctaggggtactcacagtgtagcacccggtctcgtgttgtccttgacaacacggggtgtttacacccggagttgctgccgccgaacacaaagtactgagttgctgaagacccttccgtgggggccactgtctcctttgggcgtacaaagacccataccacttcttttaactcttgtgctgagcagaaaactgtgaagacacttgtgtgatctgtgatgcgaatccattaacatatctgtacccatcgggcgcgcatgaggtgctccctatagctttgtggtggtctttttcgcgttgggggttgtctttagggattgtctctaaattagggaagcgatttgtcccccctgtgtggtgtggttaccaccgccttaagggcgggccacaccgtggcattgcgggctttgggccttggggcgaaggggccatcaccgaattttggccggtttggggaccctttgcggctttttgttctagcccccacacattgtcatagtgtcttcccccgggtgctctacaatcattccacgacacccccactccttttctacatttgggtttggcccaaacccaaaaatgggcgggggggccacaagccgcccttggttggtaaccgggccccccggtgggcttcccctttccgtcgcccccgtttgcgaccaatttcggtgttttgacggggggattcctttggcctcttttttggttctaaaaccaaacccccctttttggcgggggggcccccttgtgtcccaactttcaatttccacacatttggtgacacccctttggtggccttttgatatcgggccccttgtggcgttgtgcggcccctctggggtttgcccctcttgtgtatgggctggggctatccacactgtgtcgctgtttctacacggaggttattttgg

SEQ ID NO: 540948 - DNA, 315 bp, Homo sapiens
aagtcctattctaggatcttcatcagactttgactgtcggcgatgtggagctttcctcgctagttgctgagttacgaacagtgcatacatagagcccgctatgcttagtcgtagtatgggggatagacagatcttgtcctgattgctgacactatcccatttcttgtccccgaatactgcgccggttggtttgagttcgcgaagcacgatcgcgtcgaggttatctcctgatcggtcattggtgtctgctgggtgaattctggggaggtctgggccatggagtagattcagggtgtctgggtcactgcggctggc

SEQ ID NO: 540949 - DNA, 524 bp, Homo sapiens
tacagactgaccgcggggaagttgcggagatgtgaccccggcccggaggaggctacatgcgggattacaagcggttacaagaggacccacctgtggttgtcagtgggcaccatctgaaaacaacatcatgcagtggaatgcagttatattgggcccagaggggacacctttggaagagttggtactttaacactagtaatagaatcttctgaagaatatccaaataaaccaccaacggtaggtttttatccaaaaggtttcatccaaatgtgtatgctgatggtagcatatgttagatatccttcagaaatcgagggagtccaacatatgattgtatcttctatcttaacatcaattcagtctcggcgtggatgaccgcgaatcctaacagtccagccaatagccaggcagcacagctttatcaggaaaacaacgggagaatttgagaaaagatgttccggccatgtgttgaacaacgctggaatgattcataatagacaagtggtcgtgtaactctttttcaa

SEQ ID NO: 540950 - DNA, 642 bp, Homo sapiens
agcgttcgtagacgagcggaacttctgctccttcttcatatcccagcagtactcagctcacttaaaagaatctttggtccttaagctgtggttcaaacacacatgattaccatcatccatgatctgaaaatttctcttccaaaccttcccgctttagtggaggaatgagaccaagtaaggaaacacatgtctggcaaagcatgaggatggcccaccgtctgctcaggaacatggcagttttgtgttaggaaacagacaagggtaatggatgggcagcgtactctgtggtacgagataatgctctccgtgtgatatgaaagttaaacaagggaggccttgaagtgctcgtcatagctttcgtggcattaagtctacaccaagcacctcgaggtaaaatcctcactgtcctcgggctgctggtggcctctgagctgtaacttgaggcatggcatttatcggcttccaaagggaagtgcttcatagcagtttacataaacggtatggattgtggagctttaaaaaagttctaatttgtaacatgtatgtaccacggcatgcacatatcattctttttctccttttacaagaagaggtgcttgagacgaagtgatgaatgttatatattacgctggaatggacttg

SEQ ID NO: 540951 - DNA, 396 bp, Homo sapiens
tgaattttcctcccagaatatttagaaatgtagaagcgataacagttcacagccaggtaaaatttaactggtggcttaatgactctgcacctttttctcttgagttctgcctaatttgtctgccttttctaccacctaaaaagattttttatttttggggtgtttttttttatatggtggtaggggggggtatttctatgtcaagagcacagccttgatgatctcagggaaaaattttaatcactgtgtataatgatactgaaccttgattaataacagaaattcaggatgtaaagccacagaatgggatttattaatgtgggatacctcagactgtttgttttctttctgggaagaaaagtgtgttctataatgaataaatatagagtggtttta

SEQ ID NO: 540952 - DNA, 187 bp, Homo sapiens
tgatgggtggagagcattcgtggaatacgagagacaatgaaagtctagaagacaagccatgctgtgctcataacaggatggactggtctgctcgccatctagtacatccctgtctggagggaggtggttggaggtcttcagtttcatggatcagtcgccttcctgctaagttatttgttagggtcct

SEQ ID NO: 540953 - DNA, 121 bp, Homo sapiens
  misc_feature (1)..(1): n is a, c, g, or t
  misc_feature (88)..(88): n is a, c, g, or t
  misc_feature (111)..(111): n is a, c, g, or t
nggacggccgagagctgtttgtgctgggagctggtggcacggtgcagggctcttaagaacgcggcttgggcgcggactggtatccggnggactgtgacttggcagggtccnccatggggcc

SEQ ID NO: 540954 - DNA, 195 bp, Homo sapiens
aaaatatatatgtatcctgtgggtatatacccagtaattagattctagagtagaatggtataactagtctgtaaggtcttaagagagaaatgccacactgtctttcacaatggctagaactaatttacactcccaccaacagtgtacaaacattcctttatctccacaacctcaccagcatgttatttttagact

SEQ ID NO: 540955 - DNA, 652 bp, Homo sapiens
aaaaatagacaagagaatgctgtcaatattggtgtactgtaatgtgaatctatgctggtgaaaacaaaaaaaaaaaaaaaaaaaaaaaaaaaaaaaaaaaaggggggggccgcctttttatttttttgggcggggtggggagacgtatacacctacgacgcagactttgaccgtgagaaagtgccgcgcccgggataataagatttctccggtgtgacagagcacaccccccattatgggccaaccccttctggtggcgaacacgtccccggggaggggggccgcctaagggggcgtcacaccccaaaggggcgcggcgtgggcgccccccacctaaaaccttaaaaaagccgcgcgaggggcttacggcaaattgaaacacaaccgtgtgaacaaacagggggggggaaactaggtatacgaaggggaggttagcaagaggggtggggctcacaccaattaagttggaagaagacctaacagggggttggtgaaggagaagacttaccccttttgtgtgccaaatgatttacaccagaaaacgtgggtggccacaatttggggggaccgcctgaaatgggagaactctcgggggcgcgaaccaaatttttgttgttcccccttatattaaacaccctgttgctctttttac

SEQ ID NO: 540956 - DNA, 344 bp, Homo sapiens
  misc_feature (178)..(178): n is a, c, g, or t
  misc_feature (196)..(197): n is a, c, g, or t
  misc_feature (245)..(245): n is a, c, g, or t
  misc_feature (247)..(247): n is a, c, g, or t
  misc_feature (254)..(254): n is a, c, g, or t
  misc_feature (269)..(269): n is a, c, g, or t
  misc_feature (276)..(276): n is a, c, g, or t
  misc_feature (282)..(282): n is a, c, g, or t
  misc_feature (286)..(286): n is a, c, g, or t
  misc_feature (299)..(301): n is a, c, g, or t
ctcacagcctttttggccttttcccttggggaggggccccctgtagtatttgccttgatttggtggggtccagtggatgtgaatcctgtaaatagcttgggctcagactcctttgggtggaaagggtgggtgcaggaggcaaaccctccccccaaagccccctggggagattttcctntttttatttaactgtaanngagggggatcccaggtttggggatgggggaccccttgggccccagganantggttgnttcagggggacccangcccccngccctngccnggaatcagggttnnngcatttgattaaatgtttccagaaataaagaataattttgcca

SEQ ID NO: 540957 - DNA, 1149 bp, Homo sapiens
ggaaagcaatggaaccatgcgattcatgaaacttgccccaggacatacagctatggttgtcccaggtcctgctgcgaggaggctggcaggtcctgctcgtgctggacactccattacttacccgtatattcctgatgggcctgggtcctctacttccaccactacttcccagccatgctacttctcaagcatgtagacatggcattctgtgtgtgacaccctccatgctggatctgtgcctggggcttggcctcatggccccatggtgaggggcatacatgtggcgggaatcctgagcactgctcctgggaaacttgctacaagattctacctcattccaccctcttggctatacgggatggttggtccccatggcccaggaaccccaaagtccaaatggcaggactaagtgtggctggacatcatgggacattatgagggccacatgcgcaagattccagcctgggatccaggaactaacccaggagagccagatgggaagacagcacctggagcatctggccatgagggaagcagcataaggcagcccgaagacacttcctgctggttcaccatggaccccagactcctgggattgccgctgtacatcggacccacgcccttggcgagcgccggggcgagagccagagctccgatcaccagagaccaccggaacggacagcagccaacaggggacagaaacccaacagtgccacagcgactgggaaagatgcgcgccaaccgggacggaccgcggtcgaccagtacgccaatgaaaagacacacgagaccacaatccatgagaccataaaaaccgaaaaaaaggaacagacttacctggtacgtaaaagtccctaaacaacatgccaaaggttacatggacaattaaactgaggaatacagtagcagggttggacacgtctagagcaccaggctattgaactacccatcaaagaacctttcagcacctcggtataagccttagagtaaacgacaaatcgactccacacagttatgaccccactaacagataagtgaaatgcaattgtggagcacagaacagaaaaactggataaataaaccagcacaaggaagaacacaccgacacgaagccagcgcatgctcacggaacagaagcatcactcacca

SEQ ID NO: 540958 - DNA, 292 bp, Homo sapiens
tcgttactggcattttgcacatcatgttataagactctggatctaatttaatgttttgggatagggtctcaccttgtcactcaggctggagtgcagtggggtcatgactcactgcagcctcaaccttctggcctcaagcaatcctcccatctcagcctcccaagtagctaggaccacaggcaggcaccagcatgcccagctaatttttttgttttttgtttttttgtagcagcaaggtctccgtatgttgcctaagctggtctcgaactcctgggctcaagcaatcctccca

SEQ ID NO: 540959 - DNA, 844 bp, Homo sapiens
gtcatccacatcaccggcgctattttaaaacgccaacgtgcacaaaaggccacaacgttcccgaggaaccctgcggaagccttgtgtgaccaagactctgccggagaagggtccccccggggaatgtggtcaagccgggaccatggccccgcgcccggcgagcatgtgtttccagggcctacgccatttccaattccgcgaagcaaaatccacgtccggccgcgcccacagaatcgggcaaccaataaacgacttgggaccaaaagagaggctgtctagcccgctgccagcccatgccgatggcagtacacccccacctgctattggcaagacgggccacgcccagccggtagggaggcgaacttcaaccacccagatggcacgagcatttcttgtcacagaagagttgatacgtgccatttgttcaatagtcaaatacgcagaggaaaggtggctgaacactgtggcgcgcgccttctctggcttcgcccggttcctccgggaacctgacatctttgttaataaataggggggctctctccagttttcacacgtacgcgcacagcgggccaaacgaattccccctcatcatgacaaggaccccacaaaatcggtcttctggaaaaaaacatcgggcggtggaaaaccgccccgcaatacggttaatcgtctcatcgtatcttggttgctccccgcatatacattgcacgtgcggggttccagtaagcggcccttcgtcacaggtcgctccatcggacatggcccctcccgatgtcaatcggcggggcccccggggtggcgcccaaaatacttcgctaaaaaaaaagaacccacaaacatgaca

SEQ ID NO: 540960 - DNA, 351 bp, Homo sapiens
tcggagtgtactggagagtcgtcatgactagcatcttgagtgtcagatggatcacagtgtcatatggctgccggtcttatgatgtcttgcgtgctttagatgtcggctctaggtgagagttaggagtgtattgcccccatccctcccacgtccataagtatggcgccatatgcgaactctgtgcccaatttaatgagaatgtggcaaaggacagcgcggtgccaccttagtagcaggaatgtcctgtctccttcccaggctacagatggagtcagtagtattgatctcatctcatcttacatgcaaacagacactgttcccttaatttccccagtgccagaggcatacgag

SEQ ID NO: 540961 - DNA, 476 bp, Homo sapiens
actgatcccaggacaggatatggtcttgagcaaaatgtgcggactcctgcgaagggggggcccactctgtatacgtggactcctgactgttacgccctcttgtgtttcccaaacatgaggacgtcaggtgggcctccaggcccttgtgtgcaatgagaccggcactttcaggcgcctaagtgccaggaaatttgcgtacgggacctattctaaaaacgtccatgagagtaactaagacactatggcgcgtgctcacttgccaatgatcgagtgtggtgactggcgctcacaccatatactttgactattgcctctatcgagccgttttgaactgaagacttgctgacatgttctgcacacatgctgctatcgaggcccgagatccatagctgctttgaccctctggccaagcacatgctcagtgctgatctgtccggacatagatacctatgcagctactaggctaagctgtcaca

SEQ ID NO: 540962 - DNA, 308 bp, Homo sapiens
ctgcaccaattccgcgtgtgtatggtctctccccacacaagacaattctccaacactacctaggtatcccaaggttcaacccaatgcttacactatctacctcggggtagcatcagagcccacaggttaagggctcattcccctgcacccaattccggtgtgtaggttctctccccacacaagacaattctccaacactacctaggtatcccaaggttcaacccaatgcttacactatctacctcggggtagcatcagagcccacaggttaagggctcattcccccaggctgtccctaccatcacttc

SEQ ID NO: 540963 - DNA, 503 bp, Homo sapiens
  misc_feature (188)..(188): n is a, c, g, or t
aagggacggaagccgaagtggccctgaggggctctcctgtcctttgcgtggggtgtggaatcctgctgcacctgtcccttttgctggctcagggaagtgtctttttgcccacatttctgtggggaaaggtttttaatcctttgagggttccatcttcctgtttaggccatgcgcccagaaacttggantgatctttctttaatagtgaccccctgggcccctgaagagtaacatggctcccctggcccccaaagagggatggaatcaccaggccggggggcttttataacccttaggaaaaagcaaatcaaccctttttcatcttgggctcttccaaaactattggagggattttttttctttctaaacagggaaaataatgttccaaaagcatcttttttgttatttgtttgcatccctccccccccccctggggttttaaaatgaagaaaaaaacccatccctttttggccaaaaacttttaatgattaaaaacccaccca

SEQ ID NO: 540964 - DNA, 235 bp, Homo sapiens
cctcaggccgctgagcctgaggcagatggaggagctggatctggatctggactgattcagagagcggggatcagcggcgccatgccatggtgaagggactccgtgatcgagcgggagatgcccagcagtcgatcctccacgatggagcgacggacctcgggcttcatgatgacgatcagctccaccggaccgtcgaaccgccaggtgacgtcctttcggtccaggatggtgccca

SEQ ID NO: 540965 - DNA, 128 bp, Homo sapiens
ggccggcacaactgcggaggcacgggggtgatgtggcgatctacacagaagattcacctgggctcaaatgtaggccctgttccagtagtggttatgagtcttcggttcatcgcttctgtatttatgtc

SEQ ID NO: 540966 - DNA, 587 bp, Homo sapiens
atgaatggctccacgagaggcttcacgctgtcatcttacgtgtcttaaccagtgcacatttgacctgcccgtgaagacggtcgggcatgacacagcaagacgtagaagaccctatggagactttaatattcattcaatgcagacagtacctaacaaactccatcaggtcacgtaaagctgacacaaaccgtgctattataaaatttacggttgtggtgcgactctgcggagcaagaacccaacgctccgagcagtacatgcgtaagacttcaccagtcaaagcgaactactatactcgaattgatccaataacttgaccaacggaacaagttacctctagggataacagcgcaatcctattctagagtccatatctaacaatagggtttacgaccttcgatgtctggatcaggacatcccaatggtgcagccgctattaaaggtttgtttgttcaacgattaaagtcgtacgtgatatgagttcagacacggagtaatccaggtcggtttctatctacttcgattcctcgatgtacgaaaggacagagaaataaggctactacaagagcctccccgtaagtgatata

SEQ ID NO: 540967 - DNA, 678 bp, Homo sapiens
ctgccagtgatatgatgcctaaatacctcaagttgtcaggggtgtggtggactcagatgatctccccttgaatgctggcccgcggagacctcgttctagccaaccataaatctgccttaaggctgattaggaacgaagccttgtctcgtacacacactgctggactactgatcaagaagcatggcggatggagtaacatacgaatgagtacgtgttgaggaagagaatttgggtaccaacatcaagctgggtgtgacttgaagacctacgtcgaagtcgagacacgtcttggctaatacgtttcattaggctatccagtcctatcgtcgagtcatccagactggacacttacgtaggcctagcagccagtaatggtggcacacaggaactgaaaggcaagagaacgaatgtacaaaatcttacgttcattggggctgggctccagacagaagagagagggcgtgaagtcgttctccaattgtgatgagcgagtatctgagaaaggggctatgaaggttatttacactcacagaacctgtggagtgaagtacgtgtaattgcaggccctgtcccgaatttgagtgggacagaggttccaggaagtgtgtgccaaggaaggagtgaagtatcgatgaaagtgagaaagcctaaggagagtccgtgaaggaggttgagaaa

SEQ ID NO: 540968 - DNA, 138 bp, Homo sapiens
tgctgggattacaggcacgagccaccgtgcccagcctatttgaatcttttgaaatgatcaaattatctttgcccctcatgctgttaatgtggcgagtaactttactctgtttttctaatatggtacccccccacatta

SEQ ID NO: 540969 - DNA, 1605 bp, Homo sapiens
tcttgctttcctatgggatctatgtggggggctcatcgtgaacataacaacactgcctcagctggcttctaatgtctttttgctctcgagaggtgcctactcaattcactcctctttgcgactccttttgttgtgcctcccctcgttttgtcacgacgtgcgaagttggtttgtgaactagtctcacagtagcatgtgttctcatctccttcccacgtggctggtcctgtgtggagtgtcccccccccacagcgaaagttgtggttgggctccccacgtttttgttatctttctggttgcacaagagatgggcgcatctcatcagtgcgtcgccgttttaatatctccagagagccccgttggcaccatagtgcctcctttggccccgaatagatttctcggcgcaatattcttctcgctctgaaaattgtctacttgggtgatcaaagagtttttcaaaaagggcgcccatgcactactggggtataatagtcccggaaggaatttctttttggggagtaatttggccccaaactagatcctccggcccttgtgatttcccctgcctcattcttgaacattttttgtgcctccgtttgtgggccagaaaccttttgggttcctccaagaaacctctgtggcggcttttttcaaccgccacaaaaacttggccgccccacatttggggaaaaattgttgccaccgatcttgggggacacatatcttcgcgcccacagtgttggtgcccacctttcagagtgttttttgtatgtggaaagcaacaccaaatccacaattgtttggtgcgctttttcactattcttcttcgtcttgttttctgtgccacagccttgtccccgcaagatttgtgaataccaccccgagagttattatatatttcggggggggggcttaaacacactttttccccctccggtgcgcaaatcctcggcgggagacacgcggggcgccctccctagggggggaaagagagagtctcgggagatttacaagagaccgtctctttccctctgccacagtttgtcacaccgcggggggccaccttgagaggacctcttcttgagaggcgctctgtgtcttgagtttggccccctcttgggccctcggcgtgtcacaacacacccctctgtgtcaccacagccacacttcgccacaagcgccacacacaccccacacacaggggcctccacactgacgcccacacacacccgcgttccacaggcacaggcacacccacagcttgggcactatttcacacctcgcttgtgcacactcgagactcttgtggcacggccacaaggaaccttggacagggccacagaaccgctgggaaccaatcacccacggcccagggaatgggggtgggggtccctgaagctcacatgttggtgcccccctttcccttgtctgagagtggccgagaggcctgaataacccctgagccctaatttgcacagtctccccagcaacacaccagggagacccgaagtagctacccggatgatgaaacctggtgttccaacgagttctttcttgttacctttttaaaatttcttttttataaaagtaatattttattgttgg

SEQ ID NO: 540970 - DNA, 162 bp, Homo sapiens
aaaagaaagcatcttttcgaatgtcataaacttaatgtcacaaactgaagctttagcaactctgaaacctttttcattatatatatatatatatattttttttttataaacagtgttagaggccagtttggggtcatttaactacaattcaaacttctcagg

SEQ ID NO: 540971 - DNA, 419 bp, Homo sapiens
gcccgttataagacggccggaggttcaagtgggtctggagagtccgacttgaggaggttctgggcccggagaggccgctggaagggaaaaactgggcctggaaaggccgttgtcagcacatgacgccccattggcctgaagagtgccacttgtcaggcgggagctgggcctgcctgaagcgtccgagaggcaaggagctttggactcgggaggccgcaagttgaagcaaacagctagcttgggcgtggagagtccgctgtgaggcaaaggcttgggccttgtgcaggctttcgggagggcaggaggctgggcctttgtcgaggcctgcagaggccacggaaagtcaaaagcggggctggggaaggccgccgggaggctttagcttgggctgggccgaaagagggcattgggaggcagga

SEQ ID NO: 540972 - DNA, 956 bp, Homo sapiens
aggagaatctcttgaacccagaaggcgaatggttgcagtgaaccgagatcatgccattgtactctagcctgggtgacaagagcaagactccgtctcaaaaaaaaaaaaaaaaaaaaaaaaaaaattaaaaccgggtaaagggggtctcattgtgtggcctaggccggtttggacctccggggctcagtttgattctctttaccttggaacctccataaattgtgtggggaatttaccgggttgttggagacagtgtgcacctggggcccgaaaattagcctcaggttttcgtgaaagacaaaattcttgaactctatttggtaattcctttagcgttcacgtggctcgtggctttcacagaaatttaaccattacagggttttgccacaccatagtattcgtgcccagctttaagtgttcttttttattcccagttatttccccccaaaaggttgggttctacccttggcattccccaaggattcctcaaagcgtcttaaacagatacagcgaaattaggtccttttagaccagggttagtagagatattatttcccgatgtacaaaaccttagttaggaagagggagagtacaagggttatcttagggggggtcacattttttcccctttataagatccctttagggcagtcagaagttattgcggcaaacaattggtagggcaagttgaaacacacggttctaccctaaccaactcagggaaaaacacctttggacgtataacatcagggatacttcctagggataatagaggccccctttaaaatttccacggcaacttcgtggagaaattcctgactaacaacgacaatatacacattacttgtggggggaaaataattcattatattattaattatccaacccccagtgtattcggaaaacgaaataggattccatagaggtcactattggcaacactatatgagaacgct

SEQ ID NO: 540973 - DNA, 363 bp, Homo sapiens
  misc_feature (117)..(117): n is a, c, g, or t
  misc_feature (352)..(352): n is a, c, g, or t
cgcatagcaacatcataacccatactgccatgaccacagctctgattctctttttttaattattaaaatatgcacagcaaagtgacccagacatatattgacctggttatatatatntgtgtgtgtgtgtgtgtgtgtgtgtgtgtgtgtgtgtatacattcttctttcctccatttcttctatcatggtttatcccaagcgagtggatatagttccctctgctatacaaaaggacctaattgcctatccattctaaatgtaatagtttgcacctactaaccttaaacttagcaaccatgagtccattctctatatctatgagtctgtctctgttttgtagacaggttattntgtgccacatt

SEQ ID NO: 540974 - DNA, 139 bp, Homo sapiens
  misc_feature (62)..(62): n is a, c, g, or t
ctactgctcgaattcaagcttctaacgatgtacggggacatgccattgccaatttcctgggngacagagcgagagtccatcttaagaaagaaaaggggaaatgcaaagctattcagtagggatctcaaggtttttgaaa

SEQ ID NO: 540975 - DNA, 851 bp, Homo sapiens
gattccaaccccgcttcgctttccgcatgtcccgctttgcgctcccggcctgggcatcccgctgtttccctctgcgtccgggcctgcccttttcgggggcacagtgtggtctttccaccccgcgagacagcggggcgagggggcgcgggggccagtgatagaggctgatgcccccaagcacggacgccagcgtgggggtggaggttcttccagctgccctgagcctgtgcgaagggggaggtccttccccagttcccacagatgtggggaggcaagagaggggaagcgagcgggtcggggctcctggggtctctgaattaccctctgccctttgtcccaacactcaggtagcgggaaggatgaccagctcaaggaaaagacctcaatttgtgcccaaggtggtgcccgatgttgctctgcgagtcctgaaggtggctgtgcaatctcatcctctacgtgcgcgaggtctacccgtgggcatcttccagaaacgcaagaagttacacgtgcggggtccaagatgttccttgcaccgggagctgaattcagtatattccagggacaacgctgcacttggtgttcaagccacctcgttggacaaagactgctgtggacgcacacgcgggggggcgggatgcggataaagaagcaccgcaagtggaaaaattcccgctttgagatcacccaaggctccccattggtgtggcattcaacttcagactcgcgtgggggcccatggtgaccaagtggcccggggcttactctggaagatacagctggtgaatgccgcgtggacaacaaccccacggggttcttcaagtctggtgccacagagaaagcgcgctctcaag

SEQ ID NO: 540976 - DNA, 1398 bp, Homo sapiens
  misc_feature (220)..(220): n is a, c, g, or t
atggcacatgcagcgcaaggtagtgtctacaagacgctaacttcccctatcatagaagagctaatcagccagaagcatgatcgacgctctacaatcaacgatattgaccaaaacgaatcgaagctggctgacctggattgccctaagttccttgacactcagaatcagaagcaatgcaaataatgaacaacacagagtcacagaagaatagaggttcatnttaaaagaagaccgagtcggtccaaagaaccgaagtaccgacagacaccctgcccatatcctagacgtctgagccgattacaaaacgaaggggcttagatgcggatcgagtcgccagcccgagaagccaggcttggagcaaaagaacccaccgatgatttaatctggaaagccttaatctagttgattcgccctggagcaagcgagcctgggagcggagagtctaaacttggggctcggaagcatagctatattcgccccatattgatgttgccctaaggaagccaggggcgaaagccgtggcgaacttccctaggaaccgttatttgaatctaagtatcggagaatgggacagcgccagatatggattttctccccatggacttgttttatctacgagagattccgaagcggacattttaaccaactggggaacaaccgagcgaataagatgccagaaaaccccctaccaaaaaaaatagggccgaatgggagactttttgaaaaacttattggaactccccagaactcgggacgatataattcccagggatctcacactggagacagcgcagacaaacgaccagatggcctgaaaatttttagataaccgaaccataatgcaaagttatcaccgaagagatagaccaaggatgaaggcaatggccaagagggagaaccgtgaaccgggcatggctaagcgcaataaaaagaggaaaccccgctagaaaaactacgttgaggaaacggggaggtcccccaaaaatggacctccctagtaaaacatgacgccagaaaagggctgccgaacaatggaaagcctgaaagggggggacggagctttctggagacacagcaaacctgatctggaagaaagggggtttcgcttaagacccttgaagattaaactgacgcgaacttgcacagcgcgacgttataaagtcggccatcaggccgccaagagcggtctagccggacaaccagatgtgcaaacggcggtaacacgcggagggagaaccgcggggacctagattcaagacgtcggaagactacaacgcacccgctaaaggagaggagccccggttcgggacacactctgcaacgtagagcaagcggcctaaaaacgcgacgcagacgacctggcagacaaaacaaaaaaagcaacgacaaacgggacaa

SEQ ID NO: 540977 - DNA, 475 bp, Homo sapiens
  misc_feature (275)..(275): n is a, c, g, or t
  misc_feature (282)..(282): n is a, c, g, or t
  misc_feature (285)..(285): n is a, c, g, or t
  misc_feature (288)..(288): n is a, c, g, or t
  misc_feature (312)..(312): n is a, c, g, or t
ttcggcacggcgggtcattggtgggccagcttctttttcggtaagtccaccctcccgttcttggccacggtgttggagtccgcagacactcggaacctccccaggcctccagcagcatgaccgcctgtgcgctggctcgggacgcccggtacacgcagcccggcggtcagtccagcacagccagcgctggctctccgtcctgacctgagcggttaccaccagccccaggcctgcggagggcctagtccatccagtgttctgctttgtttcttttntcatttntcntcnccttttcgcattctcctgttccgnattgacgaccccaggtcttgaggacagcctgctgtgaggggactagtacttgtagactctgcatccccagggtgccccacttcggatggtggcccttctgctccaggcctccctagccacctctgccctaacccgaattcctcccttgggtccccatttctga

SEQ ID NO: 540978 - DNA, 985 bp, Homo sapiens
agcggcgtcagaagtcggatgcggtggctcacacctgtaatcccagcactttgggaggcccaggcaggcggatcacttgaggttaggagttcaagaccagcctggccaacatggtgaaaccccgtctctactaaaaatacaaaagttagccgggtatggtggtgcatgcctgtaatcccagcttcttgggaggccgaggcacaaagagtcggttggacccagggagacggaggttgcagtgaagtgaagatcgcgccattgtattccagcctcgggtagacacgagtgagactgctgatctcacttaggagactccataaaattattctagtagagtttcgaactgaatgtgtcggactcgattggggacgtgcctcttactgaggcggggcgccttgtatccctggcattttggctcccatctaaacgacgtggagtgctggatggtgacgcagagagggtatagattcggggagctagaagcggtcagcaaccgggcggtagtcaaagactcggttacctccgctacatcctctacttgccaatatttcttccgaaatacactttcttccccttttcttttccaaagtaagatttaacccaaacccatacctactttaccttccacctagtcaccttaaacattaactccacagtgatctttcctacaaaattctcctcttttgaatcacttgatccttttgataaacaacacgtccagtagcctaactaactggggttctaagcacagaacctcttgtgtgaagcagctccagaagatcatcccactgaactctcacaatggccccatttccctttgagctggaccatgtattgaactacttgagtcaacacaccgttcacccttgacataataccataaacatcgcatcctaactaagggtagatacacatacccatcttctttcacacccaatcatttcatggaacaattatcacactaaccaaggttcccccaccctac

SEQ ID NO: 540979 - DNA, 295 bp, Homo sapiens
ccgtctttcaactgcggtaggagtttgagatcagccaggcaacctggtgaaacccgtctctactaaaaatacaaaattagctgggcgtgatggtgggcgcctgtaatcccagctacttgggaggctgaggcaggagaatcacttgaacccgggaggcggaggttgcagtgagccgagatcgcaccattgcactccagtctgggcaacagagtgagattccgtctcaaaaaaaaaagaaagggaaaaaaaatagcattatacctcttccttgtcccaaccgcagttgaaagacgca

SEQ ID NO: 540980 - DNA, 473 bp, Homo sapiens
ttccttgagcgccacaacttacccggttcggtggcaggcatccgcaatcccagctacttgggagcgctgagcacggacgaatctgcttgaaacccgggggcaccgaggttcacagagcccatactgtgccccggcaactccacctgggcacacgagtggaactccatcgtccacaataattatatatataaatcaaatggaaagttaatataaaaaataccgtaggccaatcctggtggctcaagcccgttatctcagcattttgggagcactgaggtgggaggactgcttgagccccggagatatcaggcccgccttggccacatagtgagacccccctctctaccaaaatataaaataaaaaatttaaaagagctgcttaagccccggacattgaggttcatgagcgtcatcacacccctgtgactttagcctgggtgacagagaatgaccccgtttcgaaaaaacaaaaa

SEQ ID NO: 540981 - DNA, 402 bp, Homo sapiens
  misc_feature (78)..(78): n is a, c, g, or t
cataatccaaaccatgtcaaataactttttaagacatagacagtacaaaaagatgtaaatagaacaacaaaaagttanaaagttgggggatgaagttaaagtgttgagttttcattagtatgctcttgccttgttagttctttttgttgtttatgtaattagtgttgagttgtcattagtttaaaataatggattatgagatatttgcaagtatcattgcataccaccagagaaaattaccttcagtaaaaggaagacagggagaaaggaaagaaggaagagcaggccacaaaccagaaaacaaataacaagatgacagtaataaattcttatcaataataacattgaatgtaactggactaaactctccaatcagaagacatagagtggctgaactgattt

SEQ ID NO: 540982 - DNA, 980 bp, Homo sapiens
agcggagtcctccagccgcccggggaatacctctagttcttcccggccgccgccgccgccgccgccgccccgccttccttcctcctcctcctgtcgttctcctctctccccgcccccggccccagcacggccgtgcgcgcccgagccagaacaccaactactaggcgaggcagcccaacaacgcgaggcaacatgccaccaacgaaggaggaggaggaggacgagcacaagaggtcagcaggcagcagacagccagcagcagggacaggatcaacaatcatacatacttactcgcctgtctgtctggtctgggctgactgatgctggactgactaccatactcaacgaaccaacactagtatatcattgaaggaacggaacgacaacagccaccagcagcgtgcgaagctcagccagctaaccgtaccgtaccgaccgtctagcactcacagcatcgcgccgtgacatgcacgtgcacgcaagacaatggcaagtcccagcacatgccgatgtaggtttagaatgcatgcatcgacctcagaagagaacaacacgtcgaactcctcgagtcaagtctgttcttgacctctgcatgtaaaatacagcacacaccgatatcagtcctgatcatctatctgtagcgtggccgtcgtcgtgactggtcaaagcagaacattaaagaaagttactccttaacactgaccctaaacccaaatcacagcactcaacgagataccaacatacgagtaaactggacaacatagctcataaaacacaaccatagaacatggcaccttccatatatgagagcgcacaagcaaaacagaccgagcacgaagaggaacaagaaggatgggaaagcgaagaacacggtgcacggcaacatccttccacgtacaactcaaacatagacgcacacagcgagtataaagacaggcataatggaaactgtaaatacagaaaataccaacaagcacccg

SEQ ID NO: 540983 - DNA, 1166 bp, Homo sapiens
ccatgactccgtagcccttcagcagtcatggtgaggcaaggcgagttatgcagttgaacgcgactattcgtgaacaagagtctatattctcctatgataatcgtcccatacaattatcgtacgcttgaattataatcaattgcgacagacgcacagagtaatctaattcaatattataatggtcgtgtcattacgaatgatccacaggtaaattctccgcaggcgtagtgcgatcatctatccactgatgcagtgtgcatagccactaaggcactagaaatcggtcgcttgaaagcagtcgagggcaactaatatcgtgtacctaatatcaaacaactcactaggtaaggggtcgcctatccaccgtaagcgtacattcggctacttgaatttatgcatcatcaacgaacacgcgctagggacgttcatctaataacatgtgcttagctaccatccaactactaccactgggccactcgatagcataccttcatcccaaaactgcgctggaggttccaaaaccaaacttgtaatagttatggaacttagacgtgttaccatcggtaataggtctttttccaataatgtcaaaaggtataaaccggtcctttaaatcgggaaacttctcagctataaatgagattttccactaaaaagacccccatggttgcgggagagggccccgcccatttcgggcttgggggttccacattcaggtgagctgtggcccgacacaagtaaacttctgttaaaacacctaagtgtcggggcttaactgggtaatgagagtaaccggcctttctaacgagcgtccgatttgcttacaaaacacacccgctggagcgaaaataggggccaattagtcgccttaaacccccattatacctttgtggtgaccttaaggtggccctaattgggggggcccatacaagtgggataaaaccaaaggcgtccgcaaagtggtagcccttaaccgaaccacagagcagggaacgcttaaaaaaattccgggtccagtttggacataaaccttcttttcaaagttccaatgcccaacattatcgcccccctccggtaacgttaacccaaggccactttctcacattcggaaaaacgcgcctgggagaagctttacacccggggcgcacagtcaatttccttcaatg

SEQ ID NO: 540984 - DNA, 387 bp, Homo sapiens
cggggccccaagacccccattttcccggacgccaaggagtccagcccggtgtttgaaattaagggcatcgtcgagggcatcctcaaacggcctcctgacgagcaacggctgtacaaggatgaccaacttttggatgatggcaagaccctgggggagtgtggcttccccagtcaaacagcacggccacaggccccagccccagtgggggtggccttccgggcaaatgaccccttttaggccctgtgcatcgagccgttttccagcccgccaaagctgcccgatgtgatgaagccccaggactcgggaagcagggccaatgaacaaaccgggcagtgagggcccccaaaaggcccctttcccccaataaaaaagatttgggggtctgca

SEQ ID NO: 540985 - DNA, 792 bp, Homo sapiens
gcatgtgcatgcggcggccaaggctttgctagccatggccagcagtggactgaaaaccgctcggtaattccttttgcagcgaggtgccgtgcttggctgcgcagtatcatcggattaatcagtctggtcctgtaaactcgtctgtgttgacatctgttcagtctggtgatcgctactcgtctatcaggacttcggcgcacgttactgacagtaaacgttgcagacaggccaagccattgtgctgagctgacccgattaccacggtgtcacaatataaccttggctgtcagtcctgtctacttcgttctatcccatgcgtcaggacagaatggaacaccgaacacatctttcgctccttctgcgcccattcactattctaccaattgcggaattaaatgaaataacttcaattctgaacacgttatgcaacattacactatcttgctgctctcgtgtgtctacacgtacatcctcttgcgggttcccttttttccccctttcttctttataccccacattcccgcgctaactggccttccaagagtgcccccttagggctcctacaccgacctctctccaaacggtccttccccatgtgtctcgctatggccattcctgagggcgacaagcccaacttcgacccttcaccaccgccaacacaacacctcttccgcctacacaacatattcgcccacacatatcccaaacacttccccacccacactgtgaacttcccacaacccgcctcacaccacacttctctcccacattaccccaaatgcccctcttacc

SEQ ID NO: 540986 - DNA, 300 bp, Homo sapiens
  misc_feature (9)..(9): n is a, c, g, or t
  misc_feature (120)..(120): n is a, c, g, or t
  misc_feature (136)..(136): n is a, c, g, or t
  misc_feature (192)..(192): n is a, c, g, or t
  misc_feature (195)..(195): n is a, c, g, or t
  misc_feature (216)..(216): n is a, c, g, or t
  misc_feature (233)..(233): n is a, c, g, or t
  misc_feature (262)..(262): n is a, c, g, or t
  misc_feature (294)..(294): n is a, c, g, or t
caggccctncaaggagtactgataccttttgattgagtcctgtattccagttgacatgataaggacttacatctttatatgcctacttagactgtaacttcaatatctacatcacttggnggtgcttatttacgtnttctttcccaaccagactataaagttcttgaggacgggatagctttagcgcctagnaanatgtgtggcatcacatctgcntggtgctcagtagcgantcaaaggacttccagacatatccaacagnaattcaacaaaattggtagaagatatggtganggggct

SEQ ID NO: 540987 - DNA, 264 bp, Homo sapiens
ggggggggggggccccccccacctataaaggagtttgttttttcctcccaccccggaaggggtttttttttcccccccggggggggggcttcttctcaccgagggaggcctttttttttcccgggcacctcttgggcgggcttttttctccccccctcctcaccaaatttgttttttccccttttgggggggggggtttttttttttttttttaaaaaaaaaaattttttttttcccttaaaaaaaaaaaacacccggggggga

SEQ ID NO: 540988 - DNA, 339 bp, Homo sapiens
tttggtagttatagcccctcaatagtttaagaagactgttacaatttgcagcatttcaatgatctctaatatgtcaggtattagcaccatgacattctcattcccttaaaaaaacactcattcaaatctaggtagaacttccaactttcatcaacacattatcacacaaaatttatttagtctttttcacaattgcatcagaagacacataagtatattttaaacatattatcagtcagtccgacatagtgtggttttaccttatttctgtctgcccataattaagaaatcttgcatcgatttcatttgtcccccttgttatttgcacacggtctctca

SEQ ID NO: 540989 - DNA, 768 bp, Homo sapiens
tggctggcttatgacctgacaaatttattggaaaaaagctctgtaccttctacccttctaccgaaaaaaggcggtcttgcagggttggcacctgtccacacctgtcatctggggccttccccggggctaggctgatgtgggagcagatgccctcatcctaatgtcgcagggcctgtagcaggagccatcacaccaccttgtttgatgatgacacctagttcttcaatctcacacgggacttcatccccctttctggagaaagacaggaggttccctgaatacaccgacacctgtgggggggccccagttaggatgacatccccgtggttaaaaggtaacaaacggggagacccaggcatatcaggctcccacgtggtcttgaagtaccatcgggtgggttgtagccgctcgtggaccactttccccattcactcggacagacgaagatctctaaaggtgggtgtggcatctgctaacactgtcctgtggataaccaagggcaggccccagaagggccagaagtgtgctccgaaggcttttcccccagcaggccaatgggttgcccatatacggtctacatttgggcccgttcccgaagcctcacgttttgtgagcccactgttcacccgtccatgttgtgcccatagacatcgtgtggcccatgaagtgtggttgcccttcctttccaaggacccagcgcgggttcccacttccaacttaactcgtggcccttgtgggtggggagcccctcacttatggcccccatgt

SEQ ID NO: 540990 - DNA, 188 bp, Homo sapiens
ccatatatctcagacactcttctaacagcatttcgggcatgaaaaagatgtactctctgatgatgagttatggaaggaaatgatgtactctctgagatgaacattcgatatgctagatgcccaaaacggatctacggatgatgagttatggcatgatgaacaagggcatatggatctgggaatttcag

SEQ ID NO: 540991 - DNA, 972 bp, Homo sapiens
ttccggtgtgtctgttccgttttccggcctctgtgcctggtcgtccttgtgctctgtgctgcttcctgtgctgtccctgttgtgcccttctccagccattctggcctctgtccttgcggacctgctgtgacctgtgtgagcgtctagctctgcttttgctcccaggggctctgagggtgctcccagactccttccgtgcttgctcgatgctgcgcggcccttactgtgggctaccgctgcttggtgccgcagtgggcccgtcccgtgcctgtcacaagggtgcgaggctcatcaccatgcgagatcaaccccgacgtgtgcccgccatcaccgcagtcgcgatgatggattctcgtctggcatgaatggacaaggtcacccttgtgcttggacgctgttctccaggatcatcatcccccagcaggagcaagcaagttatgactcgtggacaccatcctggacatggtcttccctcgaccatctagaaggaccggtacctgccggacacgcttctcctggaggaatgtcggctctgctatcggaagggtgacagtcgcttctggctgacgaacgtgatctgcccaggtgctccagacttcctagcacaccgtgcgacgggagcagccatgctttatgagtgcacacactaccaatcgttcctggaatacagtggaggtggtggacggcacatggaggaggccatcctacaaggccctccagacagtcgaaacagggacctgagtgcacccctcggcccccatgtcgggctctactcacccagcctggtacagaaggtgcctgacgtgctcctgctgaccttctgcggtcgccgggactgtgtcctatatgcaaagcacacctcgcctgaggcttgcgcctgacatgctaacctctcgaactgcaacacctggattgttcttttgtaagactcaatcattgacttctgtactaatacctggcctagctatatta

SEQ ID NO: 540992 - DNA, 293 bp, Homo sapiens
  misc_feature (57)..(57): n is a, c, g, or t
  misc_feature (63)..(63): n is a, c, g, or t
  misc_feature (254)..(254): n is a, c, g, or t
  misc_feature (288)..(288): n is a, c, g, or t
gcaatagtcaggagaaggtagcattggagtcctggtttgattcgaaggatgaagacnaagaancaagggaggaacaaatgaagaaccatctttgttcatgaataggaatattcaagattataaaggtccaggtctcctaaaattgcctatggatttaatccattttcaatggattccacagatttattgaatgaacaagcaggtgttatatgagtacaaggcttttcccaatgcttttaatataaggaaggttnggcaccacctatgtgccagtttatgcagacagtnttgtg

SEQ ID NO: 540993 - DNA, 204 bp, Homo sapiens
aatgtgttcatgctaccactcgcaattcatctttccattttcgtctgcgtatagtatatgcgttaactaggctttaaatgactgcacttctccctgcgtcgatggatttcaaggtcttaaaatacacctatcgtgtataatcgtctttttagaaagatcgtccttcaaagttattttaaatcacccggacagaagaaaactgct

SEQ ID NO: 540994 - DNA, 136 bp, Homo sapiens
atgtctgagttatcttaacagcataaggaagacttgccctcttgcctatcaaagagacatagtttggaggggcagaagtgggaccacaacacagatgcagttttcatttgtattgggcaaaggtgacaaataacaa

SEQ ID NO: 540995 - DNA, 1119 bp, Homo sapiens
gaagaggaggaggaagaggcattctacgaagacctagatgatatattggagtccattactaatagaatgattaagcagtgagctggcaagatttgcaactggatcaaatccagccagcattttatcatcgagcagccaccagtcattggcaatcaacacaacatcaatatcgtgtgcttttcttgtgcatgggcagttctgtgcaggttttcaatcagcaatacaatttctccataagtagtttcagtaagcaataggtttgaggacattctgagcttatttatgtgttacaaaaaactctctgacattcttaatgcaaaaagcgggtaaagccaagaactaaaatggccaacaagacaagtgatagtctttagtccatgaaatttgtgtccagtcttctcactgctcttttcagggatagtatccaaagccaccaagaaagcctttctgttctcaggtccagcaatgagtttatgcgctatgcagtgaatgtagactctgcagcaaagtacagacagctaaaggaaacagggcatgtgagtggccctgatggccaaacccagaaaagatctttcagaaactctgagacataactcgagtcttgctattggagatacacttcaattcctacttcagtggaaagagtcgggaaagaaagagaaaggaaagagcatctacacagcatgtgcaaggaaggcgaaaaacaagaaaaatatacagatggctgtgaaacagaacaaacgagcccaaattcagaagaaaaacacaagcacaggaaggttccacaggacacaggaaggaaacagcagaaagacagagagccaaagcaaccacaaaacagaaacaggagcagggaaagacgacggtccagcagcaccaatagacaaaaaaggcacacgatagcgaaaagccgctgagaaaaaggaagaacaagaaaggccagaaacagggaccgcccatcaaaaagaaaaggaagagggaacaacgaacgagacaacaccaggagaacacacaagacaaaaaagccaaacaaagaaagcgaaaggaaaaaaaaacgagaatacgatggaacaagaagaagagaagaagaagaagaagaaagccagaaaaaaacacaga

SEQ ID NO: 540996 - DNA, 641 bp, Homo sapiens
ccacgcgtcgatgcagtaacaaaagcacacaacgattatagtaactataagatacaataaaacaaataaatgtgaaagtagattcatgaaaatagcagtaacaaaagcacacaacgattatagtaactataagatacaataaaacaaataaatgtgaaagtagattcatgaaaatgtattcctttaaaatatgttttcctacaggcctatttaacaagatgtttcattttactgtatatttgtagttcatcataaatgttgctctaatcagatggcttaaaagccatttttattatatatatgtagtgaactaatatatgaaataagtcaaatgtagctcccacaaggtacaacttcagtggtcaagatggcactgttctgattcatgtacgcatgcgtacatcattctctggaaatcaaaaagataaacagagcgatacacaaagctttcttttctaacttttccaagcaaaatctaaaatgtcgatgacatttttctggctgtgatcttaacaataattcatatctaacatagtattacgtctaggagatgctttctctctagctagttcagaccattccactctgtgctcagcattgcctatccaatgtctcacttgactttccgcacatcctcggtc

SEQ ID NO: 540997 - DNA, 93 bp, Homo sapiens
gaaaagtgatggggtggcaattttataaagtgttgctgtgcgggtgttttatcggagtgagaaaattaaaattgtgggtttggaagtagtaga

SEQ ID NO: 540998 - DNA, 200 bp, Homo sapiens
ggatggtatggctcagcttcccaaagtgtggggattacagtttgtgagccaccgcacccggctccaataaaactttatttacaaaaacaagccgtgggccagacgtgccctctgggctgtagtttgctgactcctgccctagagcagatatacataaagggcaatgagaagcgcgtgcaaaaatacattctccttcagtg

SEQ ID NO: 540999 - DNA, 1077 bp, Homo sapiens
agcggctcgcccccccggagccgacaaatggccgcggcggcctcaggtgcggcgtcactcagacaagggggcgggtggaggaggaagcggccaagtccacagtcctgctccggtgccgccgagcaccgcccacctcagctgaccagccctgtccgctactaggcctcgcctagaggagggaaaggccgtggcgtccgctccctccgcggctcatggcgacgacgcttggcacatccgggaccctcaggccgctgcagtcgcgtcgccggctgctcgggccccagccccggccgctgtggtgactccgccgcgcctcgccgtcgcccccgtcccgcccgccgccccagccgccagggacatgtctaacctcggaggccgtaggaacgggcctgtcgaagtgcgcctgacaggtgaagggggcgcggcgtggccgggctgggcagccgcgaggtgggcgagctggcaggggtgcttgtggccttgggacgggccagggtcgcgatcagtggtgagttgggggtctggaggtgtgggaaggcctagttcagagagagcaattggaaaaccacttgtaccggtttggacatcgtttaacaaagccgaggatgactcggcggctggcgagggtggtgtatatgtggcagtgggagggtacaccagcttcgcatacgcagagcggatttcaggtcggaaagtctaggtcaaggagcccgacgctgacctcccggggactcggcgaacagcccactgggctaccgaccaggtgagatcgtgcaacaggatgaagagctcccgtgccgaggaatactcgaattacggcttagccatgacatgcgctgcagctaaacacctcgttaaaacatagtagcgccttaacgcggaacggctgatgcatacaggtgataccccagtggtatgcgtacccttgtgcaaatcaatcccgacgttatgtcccacgaagttacaaagagcccttgacatcccactgacccgaccgtgcacaatccgcgatgccccatagcttaccacaatcgtacaacattacagggtcatcatctgaaccgaagggcaaacaac

SEQ ID NO: 541000 - DNA, 924 bp, Homo sapiens
agcggctcgcccccccggagccgacaaatggccgcggcggcctcaggtgcggcgtcactcagacaagggggcgggtggaggaggaagcggccaagtccacagtcctgctccggtgccgccgagcaccgcccacctcagctgaccagccctgtccgctactaggcctcgcctagaggagggaaaggccgtggcgtccgctccctccgcggctcatggcgacgacgcttggcacatccgggaccctcaggccgctgcagtcgcgtcgccggctgctcgggccccagccccggccgctgtggtgactccgccgcgcctcgccgtcgcccccgtcccgcccgccgccccagccgccagggacatgtctaacctcggaggccgtaggaacgggcctgtcgaagtgcgcctgacagggacatgccacccccgttttaggagaacttgtatttggtttgagcaaggacattggaatcacggcgttatcctaccttcaccatttacccctgataaatggtccacgtttatatttggagtctcattctattgcccatgctggagtgcagtggcaacagcgtgcagtgagtgatcccggctctctgcagctttgacctcctggctcaagtgcttttcccaccttggcttcccaagtagctgggactacaggaatcatattgacccggtcatgcacaatgagaccaaaagatcctctggacgcgacttaccgatcaactttcctggagaagaagcctgactacaggaagggctgcccaggcttgatgacaactccgtgacggttgcacattatacatcctctcctcatccagccacccaggaccctaccttactggcacgagtaagggtgacttgacgactcttggaagcaagaatccttaacaatcgggactatccactgcaccacaccaacca

SEQ ID NO: 541001 - DNA, 240 bp, Homo sapiens
gaggatcccccaaactgacgcgatttaggatgatcggctggcagctatgttcagagaatttacccagcaaaataaagctaccctgtgttgaccctgggtatccggcgccttactttcctggttgcacaatacaggatttcagaaagcaggtcaactatcaggtggatcggaggatttcatagagaattccctaaattctttacattccgagcaagggataagtttgaggaggatcgtatc

SEQ ID NO: 541002 - DNA, 137 bp, Homo sapiens
gcggccgcctactactactactactgctcgaattcaagcttctaacgatgtacggggacatgtcagccttctgatgatcccactccaccccacctcaacttatttaacttcctaattaaatcagactgtttgaaaaa

SEQ ID NO: 541003 - DNA, 699 bp, Homo sapiens
gcctcgagaactctggctcttcctgggcgtgagggggaagtgaggtgttcttgccattgccagcctaatgcgcagtgctttctgcgctctggtaacagggagtgagtgagcccctcagacctgcactctggggtgtctccgtgcttatcaaaggttcttaatagtgtaatgcttgtagaaacttgaaacgtcatcacggagacactggaagttctatcccaggggtggagagaataagaggaagtgctcgcggtagattgggagcagcaaggggcctcccgagaaaggagcccgcacctcaggcatgacggccttaatcgtggcctccctggggtgggtggggttctcgtcctccctccctccctcctcctggggtgggagggcggctcctgttcccattctctgtgttccctggaggcagggtatcacaaaagcatttgtgaattggctttaggtgcagggagaccatgcgcatctcaggtactcttccccagtcatcgccttccataggcacaccctagatccagcctcaggagactaacgaagttttgagaaagagcaggtggtagagcagcagcttcgtgctctcagcggtggcgtggctggcatgttctctagcgttgtggtgccaccttcccttcttgtcccaggttataaggctggtcttctcttggggatcataacgtgggcccgaagtcc

SEQ ID NO: 541004 - DNA, 338 bp, Homo sapiens
ggtcgactcagaatttaagaatacctttatcctgattgttttgcctcaaaatgacatttgctaacaccatcaaaaagtgggcaagggatatgaatagacgtttcctacagaaaatgtacaaatggtcaacaaacatgaaaaaatgctcagcatcactaatcatcagggaaatgcaaattaaaattacaatgagatagcatcttattcctgcaagaatggccattattaaagtaaaaaaacaatagatattggcatggatgtggggaaaagggaacacttgcatactgctggtagaaatgtaaattagaacaacctccgtggaagattgcttaaagaac

SEQ ID NO: 541005 - DNA, 851 bp, Homo sapiens
cgcggtgcgcgacctcgtcccgaagcctgtggatacaccctctcgaagagcccgttgtggccctccgtaaaggtcgaatccctcacagttgcatgtgggcagtgtccagcccaaggattccctcgctctggttctctgcccctattgtggaaactcggtcccacgccttcccacgttgtctgggatgaggtgtccccctttctccccactagaatgtcaaataacttacggaggggtcttcctgaaacccgcagaggaaaaattcaggcaacgcctcgcgtgatcccataattgagaattgcgcatccaccatctagcatccagggtggcccaagggaaagaacatggaccaacgaaagattctccaggggacacgaccgtaaacttacagggcattaccattcttgaagacagtgattgcttgacaatttcaccacacgattctttggggcctttacctacaggggatttcggaaaagtgtgcccttacttcgggattccctggagccagtttgggaccttcctgggaggaagggtctcgatttcccttttacgccaggttttgctacacggaggtggtcccttaagcacaggaagcaccagagtttaattgggcggaccggaaggcgggagcaggaacaccccggcgaacattttgacgtagcaaaggagagggaaaaacctaatatagacaactgtgcgccccctcagagagcacacaccgagaggacggttttacgggccgcaataatggggcaccatagtcccgttccaactctaagcgtgtattacccacttcgctttttccccaatactttacagattcacgaaccgaccgtcagggcccggct

SEQ ID NO: 541006 - DNA, 325 bp, Homo sapiens
aagggaaacttcttttttttaaaagtggcccggcccccttttaaaaagtgaatccccatatgtgaggtaaaagttattcccccaaccaggataaacttttccttccccctttgctcatttggggtaaagggggaaaaacctatttgggccccttgccctcttaagattatgtaccccagcccctttgggagggtcttaaaaaatttttttgaaaacttgtccctttccccgccccccccctgccaccaaaatgaaagttgcccctttaccccgattttttttttctttttggtttatgtctattctaattaaaaatgtataaata

SEQ ID NO: 541007 - DNA, 519 bp, Homo sapiens
  misc_feature (11)..(11): n is a, c, g, or t
  misc_feature (22)..(22): n is a, c, g, or t
  misc_feature (57)..(57): n is a, c, g, or t
  misc_feature (507)..(508): n is a, c, g, or t
attcctcaaancctcagtagtnaaaagacccaccccattccgaatatgggcaaaagncccatgaagagacatttcacccaaaaaagataccacagatggcaaataagccacatgaaaagatgtcccaaaatccatttgcccatcagggaaatgtggctacacatcgatgacaatgacctaaaataaaatgaggcaacacccaaatgctggcaaggatgtggaaaaactcgatcattcacacattgctgttggaaatgtaaaatcatacagctactctggaaagcggtttagcagtttctttaaaaaaacaagcaaacatgcaactatcatatgacccatcaatttcactccccggcaatctcttgaaaattatgctcagtgaaaaaagccaatcctgaaagtttatatatttattattccattcatatagaattgctgaaatgacaaaataatggaaatagagaacagatcagtggttgctttgagttaagaaggggatggggtganncggaaagtagg

SEQ ID NO: 541008 - DNA, 140 bp, Homo sapiens
tttttccccctttcccccccccccaaatttttggggggggggggttttcccccccccccccctttccctttttttgggggggttaaccccgctgcccccggggccccccctttttttttttttttttttttttttttaca

SEQ ID NO: 541009 - DNA, 383 bp, Homo sapiens
  misc_feature (101)..(102): n is a, c, g, or t
  misc_feature (109)..(109): n is a, c, g, or t
gtccgccgcatcccctttattgcatttaatttttgtgtgtgtgttgttccttcgtccattagggaaaaaaaaaattgggcagcgggtctttttataacatnntcttttnccccctcccccttttactgacagggggtgaaaggtgttctttgacattatttccaaaagagacagttttcttttaccccatccttgtcaccccaactttagctccgtagtcattaccgggggggaggttttgtttacaaacttaatagttccattaacactgctgcaagtatgtcatacccagaatccaacagtgcaagggggtgtccatccagcgcagctaattcaaatggggcctggctgagtaagatcaaaccttctcttcttggacattg

SEQ ID NO: 541010 - DNA, 316 bp, Homo sapiens
tctcttgctccgcacctcgacaatatcccatcaacgaccgatctaagtcacccacccaaggaatgtatacatctaactaacctcaaaacaactgataaccatacacaacactaaaggacgaccctgctctcttatactattatccttcatcatttctattgccacacctaatctcctcggactcctgcctcactcatttacaccatccacccaactatctattaacctagccatggacatccccttatgagcgggctctgtgcttgtcggttttcgctctaagattaaaaatgccctagcccacttcttaccacac

SEQ ID NO: 541011 - DNA, 449 bp, Homo sapiens
tgaaaaaattctgggggcccggggggtgggttgtaaacccccttggggggggtctcaatccctccttttttggtcaaaattttttttttcggggtccctccagaagtggtggggagagggggggggggcatctccatatattgcttccccccgaggggtttaaaggagaggggtccttctcaaccatattagtagacttttcggcatctcagaaagcagaagggttcccctaaaattcgtgtggaaaaaatttatttataattatttagtgcgggtgtgtatgagagaacaagtgtgtagtggggaccccataacgaggagtgtaaagagggagtgtttcacgagtggtgggtgatatgtgaccatgggggagtatagaatcgcgaagataaggttggaggagttattatcgggaaatagggcccgagaaaggtgtgttggggaaaaag

SEQ ID NO: 541012 - DNA, 286 bp, Homo sapiens
ggaaagcagtacaggaaatagccagtagcagtgtcaaatgatgttatatagggcaagaaatgatgtgcgaccagtaagtagtaggaatcagcgcgtgataagctatacaagagcccacgcatcagtaggatcctgcgccgaatcaaccctgacccctctccttcataaattattcagctgcctacactattaaagtttaccacaaccaccaccccatcatactctttcacccaacagcaccaatcctacctccagtcgctaaccccactaaaacactcaccaagag

SEQ ID NO: 541013 - DNA, 288 bp, Homo sapiens
catgcgaagtgagaatatgcatgtcatgtgcacaagtctactaagggaaccatgtgatggaatcggataatttactgtgcactccatcactccacttaatcacccattcttagttttatcttggggccccaagcgtggggaattcctcaagatgtcctcttgcagcttttgagtctgtgactctggcgtgcttgaaaaacgtaactgttgtgaggagtgttatctcattgtggcgatgataagcatttccgggatgtacagtgatggtgagcatatactaatgtgtaa

SEQ ID NO: 541014 - DNA, 482 bp, Homo sapiens
  misc_feature (44)..(44): n is a, c, g, or t
actagacgatcccttagctcgatcaacccggaagccttttgtantgacgttcttttccctctattttggcacccagatcattttcttcttttttgaaatggagtctctctctgtcacccagcctggagcccagatatgtggtcccagctcactgcagcctttgcctcccaagttcaagtgattgtcctgcctcagcctcctgagtagctgggaccgcgggcacacgccaccacactcggctaatttttgtacttttagcagagatggggtttggccatgttggccaggctggtcttgaactcctgacttcaaatgattcacttcccttgtcttcccaaagtgctgggattacagtcgtgagccaccatggctggccaacccgacctcattttgatgatgatctggagaggtgaggggtcccaccaaggtgctgagtaaatttctagggcttctaagtctcagaagtcctggttggatgatct

SEQ ID NO: 541015 - DNA, 499 bp, Homo sapiens
  misc_feature (9)..(9): n is a, c, g, or t
  misc_feature (465)..(465): n is a, c, g, or t
  misc_feature (479)..(479): n is a, c, g, or t
  misc_feature (499)..(499): n is a, c, g, or t
tggcagctnggacatcagtgcaagtacagagactcagccatggttctgcagaggatcttcaggctctcctctgtccttcggtcagcagtctctgtgcatttgaagaggaacattggtgttacagctgtggcctttaataaggaacttgatcctgtacagaaactcttcgtggacaagataagagagtacaaatcaaagcgacaggcatctggaggacctgttgatattggcccagagtatcagcaagatctggacagagagctttataagcttaaacaaatgtatggtaaaggagagatggatacatttcctaccttcaaatttgatgatcccaaatttgaagtcatcgacaaaccccagtcctgaggaacatacaaaatccatgtggtaatttgtcatgaattagttgtacaactaatcaaaaaattcaaataaacattcattttccctttaataaggtgttcngagggacccaggtnaattacaagcagcgggtgan

SEQ ID NO: 541016 - DNA, 942 bp, Homo sapiens
  misc_feature (89)..(89): n is a, c, g, or t
gccaatccagcgagtggtgaggccgcgcctcctccttttacatttcggttgagttgtgtcctcgcgcccgtctcgtaagtggggtggtnttcctcgcgccgagactgatatactagaggagaggacagggggtgttgtcttcttgtctcggtcccgcgctgcgtctttgttctcttggttagaacatctctctcgtcgtggtcgctgtctcttgtcttctgtctgtgttgtgttcttgttttctttgtggtgcgagaatagagaggaagtggtttccccaccgcattttctctcccctccctctcgccacgagagagttattcacttcgctgacaccacatttccccccgcagagagctcgcgctcatcagacaaatgtgtgtctctctcgtcgccaccctctctcctgtagagataatgctatcatctccacagcatacagagtgtccccccctctcaatgcaacacacacacacacagtgtgtgtgtgtccccatttcccccactcactcaccatgtcacacagacagaaacacacactctctggcagtcttatctattaatactctctttcccacacgcgagaagaaaaaaaatttctttctgtgtgtgttgcccacctctctatattgcacgagagagcacacaatatttgcgtgggttgtgaagaatatagatgaagagcacaacccagctttttgtgaacaacatgttttttggtttctcttttaacagaccgcactgtttgttgttcggtaattcttgtttgtagggtcgtgaggaaagtttaagtatgtggtgtccccccctcggattaagaatttaggaggttttgaattacgactttttttttttttttctttttttttttttcccagagaacaattggggaagaaccccggaaaaaacccccaagggggaaaaaccacaattttttgccca

SEQ ID NO: 541017 - DNA, 436 bp, Homo sapiens
cacgaggctggcgcaacggttcaccggcttcgcatccgcgggagtcgctgcaccggcgtcgagtacaccaccgccgagggccggcaggtgacggcggcggcccgggagatcatcttgtgcgcgggcgcaatcgggtcgccgcatctgctgctggcttccggaatcgggccgccgaaccatctccggtccttcggggtcgacgtcgccctggagttgcctggggtcggtgcgaacctgcaggatcatccgatcgttccgctggtctatcgcgccgcgcgtcccgtgccggccggccggtacaaccacggggagctgctcgggctcatccggcgccacgcaaccggcggaccgccggagatccagatcttcggcgtcgactccgcggacgttccgggcctcggcggagccgatggatacgtgctgggagtctccgtca

SEQ ID NO: 541018 - DNA, 209 bp, Homo sapiens
  misc_feature (3)..(3): n is a, c, g, or t
  misc_feature (12)..(12): n is a, c, g, or t
  misc_feature (18)..(18): n is a, c, g, or t
  misc_feature (22)..(23): n is a, c, g, or t
  misc_feature (33)..(33): n is a, c, g, or t
  misc_feature (43)..(43): n is a, c, g, or t
  misc_feature (47)..(47): n is a, c, g, or t
  misc_feature (58)..(59): n is a, c, g, or t
  misc_feature (62)..(62): n is a, c, g, or t
  misc_feature (68)..(68): n is a, c, g, or t
  misc_feature (83)..(83): n is a, c, g, or t
  misc_feature (89)..(89): n is a, c, g, or t
  misc_feature (95)..(95): n is a, c, g, or t
  misc_feature (107)..(107): n is a, c, g, or t
  misc_feature (124)..(125): n is a, c, g, or t
  misc_feature (135)..(135): n is a, c, g, or t
  misc_feature (151)..(151): n is a, c, g, or t
  misc_feature (157)..(158): n is a, c, g, or t
  misc_feature (160)..(160): n is a, c, g, or t
  misc_feature (165)..(166): n is a, c, g, or t
  misc_feature (174)..(174): n is a, c, g, or t
  misc_feature (189)..(189): n is a, c, g, or t
ggngggtttggnggaggnttgnncttgagttcnttgcacaccncctnccaggtttggnncanggccgnttccagaaccatggnaggagnaagaanccattcatgggnaccacctgtaagaaagnntccaattgtnaaaggaagaaggaggnttaatnncnggaanngattttgnagttggtggggtatnaataaaagttattttccctg

SEQ ID NO: 541019 - DNA, 112 bp, Homo sapiens
ccattccaacccaaagccttcctgtgcagacatgtgggagctgcctcggggggaattgccataggaaggagagcctgtacctctgggaggctgagcccttctgggcttaggt

SEQ ID NO: 541020 - DNA, 390 bp, Homo sapiens
gttcctgtttactagaaatccagcttctatggtgaaaagaaaaagtaaattacatttttcacatttccaaacaccatccatttccgtgacacacacaggttctccttgccaagaaaagtcagtggttgtctgttctggaagggaagtaagaaagtggcattttttatttcctgaagaaaaaaaaattaaataggtcaaatacataaaacttccatgaaaagagccacacttcatttcagccattaaagaaaaatgtgtttaaattccccaaaggaaccctatgctctacactgggaaaggcttattcactgctgactttcaagaagcaggaactgggttcctgcttcttgaaaggctgaggcaggagaatcgcttgaacctgggaggcgg

SEQ ID NO: 541021 - DNA, 1768 bp, Homo sapiens
  misc_feature (429)..(429): n is a, c, g, or t
attggctattggtgtacgcagctagctgtgtgtggtgggctcgccttcgcgggggtggtggacatgtctctggttggttagttgtctgacgcctcctttgttctccgcgatctctagatgtgtttcttgctctctgcgtctctctcttcgtgtgtgagttggtactctctttctgtattatctcttggtggaaccatccgtcgcccccaggggaggttggtacgactccttctctctttgtgtgggaatgttgtgctctagccagcgcggtcgttttcgactacccgggcggtgggctactcactctccgcaaacccgttggttgtttttgatgttagaattggcggcgtgtattgtgtttgctccgcctacacatagggtttgcgcccacatgtgtttgtgcccaccagtgttatctgagatgccgtntcttctttggggcgtgtgggggaacacctccgtgcgcctccctcattcttttgggtgagattctttgctcacctcatcacgggcgggcgtcacacccgatctctctgctgagaggggcctgaaatgtttttgttgtgggggccccccatttgaccccactatcagggcgattttttgttccgtcgtgaagatgtttgttgtgggcgccagttgttcttgttcgcggtccgttgtggactatcaactcctggcgcctcagaaggtgtgtgcgtttctctgctctgtggggtatttctttttcgttgaggtgatttcttgtacactcccctttttccctcagcgctttttatacgtggtgatgaatatacccccccgtcggggggtggtgttggtgtgtccccggatatatataccgcaccttggtgttccgcccagcgcggattttgtggagagactccccccacttctctccgagaagattgggggttgttttccattttggttggttgccccgccctttttttttcggcgccctctcagacacggtctagtgtctctacccgctttatgtctatgcgctgtctttccctgtgtgggcctggggggacacacacatctcgtggggctcaacagagttttatggggaacaccctgggggctaaaaactgctcacacgacctggtgatagagaccctctacgcgcccacactgtggggcgcacacacacacagggcgatatctttgaaaaccacccgcggtgagacctgttcttcttctcacagaaatgtgagtctctccctcttgttgtctttcttgtggagaggctacacaggatatggccacaggccacatgtttaatcgtggagatctctctcccgagagagccaaaccaccctttttacacacacgctgtagataggtgggggacacatctcattcgcaacacgcccttgtgggttctcgagcgccttatacccgcgtgtacttggcgttgttgtggcttgcccacacaggcgccccagccattccaagaatattggggtatttagagagaggaaagaataccttgttagaatagaactgaagcccaagaaagtttataccagtacccagccagcaagagccagagacccacccccagtgcacactccctggcctggtttgctggtaggcccagaactctgtttgctggctaacaccggagccaccctggtggcgagtgtggcacggtgacccattggcaccaccgctaagaaatttattggcacgagctttaccaataaaaaaaaaactggcttttcctaaaaaaaagaaaaaaataaactcgaggattaatgtt

SEQ ID NO: 541022 - DNA, 1162 bp, Homo sapiens
gggtctgctggctcgtgccacagggtgcaggtgttgcaggggctccctgtgtccggctgcctgcggtccccctgctcctggaccctgggggctccccctagcggccgttgaggagccggcctctgctggctccaagagaagggccgcatggacgccggagacactggagagacggcctgagagggcctcgacggcgggagggactaccacagggcaccaatgtgcacagaactcacccatgcacaatctgggcgttgaaggagtaccctttacacatgggaggaactcttacttacaccaggctttggggaccaatttggccaacgaagaagccttggtgaaagcaccaagggggtgacccaaacccagtttgcgtgtcgtccccttgggaacctctgtggaaaacagtgtggccacaaaggacctaacacagcaggtccgtggagacaaagggtaaccattaccactaactcacgtggtggcacactggtccggtcatcacacccgtcattgtgccccgcacacggtgacaatacttgggagcgtggccacttgtggtcaatgtgcccacttcccaagcaacggcgaaacgctgagacccaacggaacaagtcaggacacacgggaaaattcccaaggcaattcccagcgcagacattgcacccagtgttttcgcaagcacaaaatgggcccaacttgactgttgccagttcttgatcccaacatcagtcttcggggcaaaagtcacaaacagcacacatcagttaacggcgaaagttttttgctcaaggaacggcgcacgcgaaagcaggcgaataaacaaaaagggtccgtcactggagacgcgcacattacaaacaaaggatacccccgaataattccttccccacccccagggcaattctaagaaagcagagaccaagagccacgtggccacaaaacaggagtggtgcggaacacagatcctaaccagtaacaaacaaccccgggataggcatgaaacccccagcactgcacaaaactccggccaacaaccgaacagcgacatgcacgcgacatcaacggcaagacaccttggcagcgaacgtcaggacttaccaaatggcaccgcgcgaacggaccacgcgacgaaacactgaggcagagtggaaacacagaggtc

SEQ ID NO: 541023 - DNA, 484 bp, Homo sapiens
  misc_feature (404)..(404): n is a, c, g, or t
  misc_feature (406)..(406): n is a, c, g, or t
ttatcgcccaacactcctatcaccaccatagagctgaccatattttcccacctcttttcaagcttcggatcctgctgatgttgagcaaccaacagcctctacctatctccgcttatatgtcccacaggctcctctaaccgtagatacccaaaacaaaccactcagggacgctgttcttcctgccacaaacactcagtcagtgaaaacggccctgctggccacaagttgttcaaggcagaaatctgccagtcatccctgtccacatcactccctacttctagttcatgccctttccacttcttgaatcacttgaaatcttctcaagcaagctgtttaatcctccaaatctctttttcttttttgagacggaatcttgctctgttgcccaggatggagtgcagtgntntgatctcggctcactgcaaactccgtctcccggcttcaagagactctcctcctcagctcctcttcagcatcgggatct

SEQ ID NO: 541024 - DNA, 573 bp, Homo sapiens
  misc_feature (381)..(382): n is a, c, g, or t
  misc_feature (403)..(403): n is a, c, g, or t
tgtaaataattagcaagcaaaagcgtttctgtgacttcaggtaccagcttaaagagcactagggatggggaacgaatgccaaatcagactccacctagagcaccaggaaacagcttgtaccctggtagggaaatggtgtcgctgaaaggggaggctgagccagtgcgagactgaacttgtgcagccttagccaagacaaagcagtgtttttcagcagacggctgatgggacaggaattgaagaagagaattgactcgtatgaacaggacagggtgaaaatgctgggaattataatgggaaacaaaactatctatgttcatattttgtaatatttcatttgttaagtttatatccccccctttttggggggggggggggggnnaaaaaattttttaaaattttnaaaaaaattgggtttttttttccctttttttaaacaagtataatcatatcgtcggaggttaagattatgaaattttaaaatctctattcaagatgatgttcactccaaatacactacagaatttagtcaacattttatataatgtttcaataaatgtttctttcaataaa

SEQ ID NO: 541025 - DNA, 575 bp, Homo sapiens
  misc_feature (404)..(404): n is a, c, g, or t
  misc_feature (406)..(406): n is a, c, g, or t
ttatcgcccaacactcctatcaccaccatagagctgaccatattttcccacctcttttcaagcttcggatcctgctgatgttgagcaaccaacagcctctacctatctccgcttatatgtcccacaggctcctctaaccgtagatacccaaaacaaaccactcagggacgctgttcttcctgccacaaacactcagtcagtgaaaacggccctgctggccacaagttgttcaaggcagaaatctgccagtcatccctgtccacatcactccctacttctagttcatgccctttccacttcttgaatcacttgaaatcttctcaagcaagctgtttaatcctccaaatctctttttcttttttgagacggaatcttgctctgttgcccaggatggagtgcagtgntntgatcatagcttgctgcaagcttgatttctggctcaagtgatcctcccatgtcagcctctcgagtagctgaggcaggagaatggtgtgaaccccagaggctgagcttgcagtgagccaagactgtgccactgctctccagcctgggttgaaagcaaaactgtctcaaag

SEQ ID NO: 541026 - DNA, 575 bp, Homo sapiens
  misc_feature (357)..(358): n is a, c, g, or t
  misc_feature (377)..(379): n is a, c, g, or t
  misc_feature (410)..(411): n is a, c, g, or t
tgtaaataattagcaagcaaaagcgtttctgtgacttcaggtaccagcttaaagagcactagggatggggaacgaatgccaaatcagactccacctagagcaccaggaaacagcttgtaccctggtagggaaatggtgtcgctgaaaggggaggctgagccagtgcgagactgaacttgtgcagccttagccaagacaaagcagtgtttttcagcagacggctgatgggacaggaattgaagaagagaattgactcgtatgaacaggacagggtgaaaatgctgggaattataatgggaaacaaaactatctatgttcatattttgtaatatttcatttgttaagtttatatctggnngaaaaaaaaattttttttnnnaaaaaattttttaaaaaaaaaaaatttgggnntttttccccttttttttttttttttaaacaagtataatcatatcgtcggaggttaagattatgaaattttaaaatctctattcaagatgatgttcactccaaatacactacagaatttagtcaacattttatataatgtttcaataaatgtttctttcaataaa

SEQ ID NO: 541027 - DNA, 363 bp, Homo sapiens
tattggattcttctcaaaaagcggcttacagtcaactacagtccaaatttgctccttggaagactcctgaatgcaggtttctgatgatgtcagaaagactgtgctgttggattagacagaaaacttctaggactctaattaaaaggctgatgtggtcataaagattgctaacccagtatgaagcaaaacaagagttaattgcatggactgagctaatagaggactgaactgattcttttgtggcttttttggtttgaaacattgctgattctttttgttgttcagtgtcaaattttttttctcttgagctatttgtagcccttaacaattgagtatactcttgtaaataaaatttaaagcaaa

SEQ ID NO: 541028 - DNA, 1009 bp, Homo sapiens
  misc_feature (336)..(336): n is a, c, g, or t
cttagcggccggcgttgaattccgggaagtgggatgcttcaggctcgctccgtgcgggtatgtggcgctaatgtcacttgggatggttgcgcaaggacatcgcggcggacactgacaaggaagcggggaggaacgggggtggggagagactgctgatgggactcgggaagccgggaagggccgagctgaataagcctaaggggccgggtcgcaaggagtgtcgtggtagcacgaggcctcggctcagtcggagcgccaggcctcagcggtccagggcggggagctgctgcagtcatcaccatggcatgcctgaggaacgcgaactgttgggcaacncgtgtgtggccatctcgctcgatcatctttacgctgtgggccgatactgcgatgtgacgctatcctgtggagcgtgatgtcccgacacggtgcggggcgccggaaggatggagagaaagactagagacccggattgttgacagcgctgtgatgccgcttgattcatgtgtgggtggccatggtttagaaatgtacctagccttcctttctaggttcctccccggagggcggggtgacgggtgcggcgccgaaatcgcaacaaaaaacgctgctcgacgggatgtaagtaactgtctcagcttaagttgctgccttttagcttacaggtttgtatcgataacctgtaagttgtggactcgttaggttaaatcccttcagtgtgcttggaaaacactatttacaacgtggtatagcgaaacatacttaacaaggcacttcttgagcactgcttgttttggaaacgcgtttttagacttcgcaaatttctggttaacacttgttaactcttgttcaagttcctggcagaatgaacctgaactcactcacgggttcatgacatgtggggtctgaaagtcgacggtttggaacaaaggcggggattagggccagtgtagacaggtgtgggtcagaactccgtggacctcggagagatacaccggcacactggcttcca

SEQ ID NO: 541029 - DNA, 366 bp, Homo sapiens
cttctacctatgtggagtatacagtgtctggaactgactgagttgctaaagaggccacataggctgccaagtcgcacctgctggcagaggttgcagtgacctgcacggtgttcccacagcccgtgacctcacagtgctaaccagaaggtgccaatgaagcattgctcacaccagtgttggacccagatgcaccttcgtccactacacttggcgcacctggactctctatagctggctcacccccagactaccatgtgttactggcagcttctacaggataccagatgcaccggacgcactacgacctgtgccacactttcatgggtgaggtctaattggggacactgtcatgaggtgtcgtccccc

SEQ ID NO: 541030 - DNA, 255 bp, Homo sapiens
catataattacaataatttaaaactaagcatacaccggattaaaaatcataaaagtcataaagatggcgagatatgtctattaaagtgaagggaaaggggtcatatgtttctccaagattaaactttaaaagacttctgtttggcttttgaagggaagggtgtcattcctgggtgtactgattctgttgcccacaaactttaagagctaaactcccattaaactgatagattgagacatttcatatttttcatct

SEQ ID NO: 541031 - DNA, 343 bp, Homo sapiens
aaaaaaccccggggccggtcccccccccgggtttttccctaggcccgggggggggataccattttcccccgggaaccgctttgccccctgggccccttttggggcccccaaaaaaccaggttggcccaaaaagccggggggggccgggccgggattcccggggatttggccccccccggggccggcccatttggggcaaaaaggtaattgaaaggccctttttttccggggtacccccgggattttaaaagggattttccttttttttttaaaggctttgggtttttttcctggccccctttggtttttttttttttaaaaaggacccccccttttggctgga

SEQ ID NO: 541032 - DNA, 477 bp, Homo sapiens
  misc_feature (11)..(11): n is a, c, g, or t
  misc_feature (206)..(206): n is a, c, g, or t
  misc_feature (214)..(214): n is a, c, g, or t
  misc_feature (220)..(220): n is a, c, g, or t
  misc_feature (222)..(222): n is a, c, g, or t
  misc_feature (226)..(226): n is a, c, g, or t
  misc_feature (261)..(261): n is a, c, g, or t
  misc_feature (279)..(279): n is a, c, g, or t
  misc_feature (306)..(306): n is a, c, g, or t
  misc_feature (308)..(308): n is a, c, g, or t
  misc_feature (318)..(318): n is a, c, g, or t
  misc_feature (337)..(337): n is a, c, g, or t
  misc_feature (354)..(354): n is a, c, g, or t
  misc_feature (364)..(364): n is a, c, g, or t
  misc_feature (385)..(385): n is a, c, g, or t
  misc_feature (401)..(401): n is a, c, g, or t
  misc_feature (403)..(403): n is a, c, g, or t
  misc_feature (468)..(468): n is a, c, g, or t
tgaaaatcagnagcaaaagaaagagaacaagagcattacttgatctcatgaaaacccatatcataacacctggaccttgctgaatcgaatgctgccgcctaaaaaacgggaggagttgccctgcttagaggaacagtagctggaatgctgcgaagagacgcccctgatgtcccagcaggcaccgctgaaagctaatgagaaaatantggaattngaatananagcncctgagccgcctatgctaaataaagaatcaaatanagaggaagagctccctanatgcacacagatgcattccttatccananagctgcaacncgagaaatttccgtacatnaagcagtcgaaggctcngatccccaanattagtggataagcggccttnaagatatgctgcaaantntcgagatagcgaacgattgtaaatgagcatgccgcgcgcaccgattaagcttcggcgttcactcnctagaagat

SEQ ID NO: 541033 - DNA, 1089 bp, Homo sapiens
  misc_feature (209)..(209): n is a, c, g, or t
gagtgtgttcaggcggctcggactgagctcgaactttccttatcccatttgatatgttggcagaaatacattgcctgtgctgttgtcttctattcatccaatggacgttcgttcttgatatccagtgtgtaaatgaatctggaagaagcgtacgcttcaggaccaggactttgtgacgtctgtattctcaaggacctcgtctccataanagaattctagttgccatgatattgcgcctcgcttttccccactcccaaaacgaaaagcaatgtgcatacatgtatacccctgtgaatgagcaaataattacaatcataaggaaacatttaagcaaagggcctggcgaagatacggacaaacggaaccgcccaaaggtgcctcgggttgtatacgcttgacgagtcctctggatagggcaccgtctgagtcgtagcattaaaactccggacgagagcaaccggacgaacaaaagacaacgtcgcctttccaagaacaacggggcaaaaataacggaaacgcaaggagacgcaaggcaagaaatctttacaacggtcaaacaacatcttcgggccaaagcacacggaaggaaaaaaggctggagtacaccaaggcagaggagcattcggggaaaatggcttaagacgtaaaaacgggagagaacaatcccctggacggaatggggccaacgaatacatttggtgccgttgggcacgaaataacattgggggaacgccaggtttatatggcacggaaacgtaacggcaaaatcggggactttaatgtgcccatgcgagattttggaaaacacgcgaaaaagagttggtcccgctgtcacagaggatgagaacctaagaacaaggcgaatagtttctccgagtagaagtgtaagtccccccattggacctgttgtcaacgggaaagagacacgtttggaaaaatgtgccttgggacgcgttaaacaattttcttgggttgtgcgttggaagggcaaaaccttggagccgtttttgtcagttcccacacaacgaaattgcagcccccctgtgtttcgcctttaataaaattaaattctctaaaagaagacaacga

SEQ ID NO: 541034 - DNA, 813 bp, Homo sapiens
  misc_feature (25)..(25): n is a, c, g, or t
  misc_feature (63)..(63): n is a, c, g, or t
  misc_feature (73)..(73): n is a, c, g, or t
  misc_feature (80)..(80): n is a, c, g, or t
  misc_feature (90)..(90): n is a, c, g, or t
  misc_feature (99)..(99): n is a, c, g, or t
  misc_feature (106)..(106): n is a, c, g, or t
  misc_feature (157)..(157): n is a, c, g, or t
  misc_feature (164)..(164): n is a, c, g, or t
  misc_feature (175)..(175): n is a, c, g, or t
  misc_feature (239)..(239): n is a, c, g, or t
  misc_feature (686)..(686): n is a, c, g, or t
  misc_feature (750)..(750): n is a, c, g, or t
  misc_feature (786)..(786): n is a, c, g, or t
gttttattaaaaatattatctccanacatctttcttttgagctgaaagagcccccatctgcgntgcctgcgcncaccgcnttcacggcanacacaggtnctgaatnaattaaacgctcaggctctggccccaccccagctttcagagcccacaagcngactgtncaaagtcaatnatttaaaacccaaaccctgggcacagtgcctggcagtgtcagggtcacccactccccttaagtnagccactatacatgttcatcttctgacaggcggggccaggacagacgccaggcacaggaatcagggcctggggtccctggaccacagccaccccctcccctgcctccccactgtcccctggggcttgggagaggcagactgctcagaggaaataacctcaacaaataaattaaacaataaatagccccggtgggccgagggctcctccagggggtcacaccatagataacagagttggcggcgggtacggctcgcgtgggcgggcgggcgcggaggccaggacttgcattgtgtgtcccggacgtgccctgacgcacaccgcagactgagggcgggaggtgggcttgggaccctgcgccggcggaaagagctccgggtgggcaggcagatgggaaggctgcctccggacacagcagcccagaggggcgtctggggttcaagtatccncccagggcaggcgggacctcgaccggagcgtctttggacagacagagcttgagaaaaccaagtnccgcgggatcagcgttcaaaaggcactcaaagcgangtcaccaggggtcagaggtcactgctt

SEQ ID NO: 541035 - DNA, 417 bp, Homo sapiens
cctgctccccgaggagggaggcgtgggtcctgtgtctggctgcaagacgtggagtgactgttcgtcccgtgtgtccctgacattctctcgtgtaacccatgaaaagactgagaccctgtggtgcctcccgctttccatccgcattccatggcaggtgagtctgattattcgaaggaggctggagtgtgggcggaggggcagcgcctggtttccccatcagatttgctcagggtccctccagtattcgatgccgaagaggctgtccccttggaggcccacgcatactagccacggactcctcacgtccatgccgggatttgcgccctggaaggagccgaccggttgcctctcgccaacatgcagcacttcccttcctttccatggagcacggttcctgtcccgggggtcaatattggc

SEQ ID NO: 541036 - DNA, 1025 bp, Homo sapiens
atctgcaggaaaagttgcttagtgttttagcacaataagaatttttattactcaggagttggagaccagtctgggcaatacagtgaaaccctgtcgctactaaaatacaaaaaaaaaaaaaaaaaaaaatttcccggggttgggggggggcgccgtgttaatctcccgggttacttgggcacggcgttgaggcagcgaaaacgtgctttgacccttgggaaggtggggaggttgtgctagtggacccgagagttgtgtgccaatgttgacctctccagtcctggggtgacaagagcaaaaacctcatttcttcaaaaaaaaaaaaaaaggggattgtttataactatatttccctgagaaaaaggggttttgggacacctggtgttctgggttcttttttaaaagggcctcttctctataaggggttcccagtgacgaaatatattctctaagaaactgtggcatttcgattgggggggatcttcaaaaaaggctctattcagagaacgggcgtcttccttgtgggcacaaatattagaaaccctaaggtgtggggcgtgtgttgctccccccacagttgcttgggggtattgttttacaaacgccctgtggcgggtgcttgcccacaactttagaagagaaactactgtgataaagttcgggggggagagtccctcccacgctggggaggggaacacaccccctctgtcaagagaatatagggggacagggcggacaataaacacacggtcccgacaatttttccacagaacgacaaagggtaccacgggtaagacaaacaccgtatacccaatatggggacatcgccgggtgtgaggaccccaggaataaacgggggagtcccctacactgggaccacacacgagggcggggtaaacaaaagcagttacacgggccggagaaatatggggctgcgcgaacattaaatatccccggggaagacaccgagagggggaggcccttaacgagcaaacacacaggggcgaaacaccgggcgaccgacg

SEQ ID NO: 541037 - DNA, 101 bp, Homo sapiens
ctgtggaagacgggtgacttgggaaagaagaagtgaggcctccagcgggacatccatggagggccgagggacccaggtccccctcggatcccaactatctg

SEQ ID NO: 541038 - DNA, 312 bp, Homo sapiens
  misc_feature (143)..(143): n is a, c, g, or t
tccttggtgagcaaggtaaagtgtgaagcctccctccctgggaaagattaccagcccacatgtttgtggggcttccttgagggaggcaaggattcatgtcagggtgattctggtggccctgtggtctgcaaatggacagcttncaaggagttgtctcctggggtgatggctgtgcccaaaagaacaagcctggagtttacaccaagggtctacaacatatgtgaaatggattaagaacaccaaagctgccaacagctaaagcccccagtattttttcagtctctataccaataaagtgaccctgttttcaca

SEQ ID NO: 541039 - DNA, 376 bp, Homo sapiens
cccttttagggggaaacccctttcggtgggcaagggaaccccaaccccatttttttggacttaattttaaggtggggggaacccaccccctaacctttgggttccccaccaaaaagggtggccctcccctttttttatggttaatgttttaaccccgccggccagggaagggaaaaaaaaataagcttccccctggggtttttgggaatgaggtaaggctttgaatttggtttgatataaaaaaaccttttttgggctaaaaaacctttttaaaacccattttgttggtggggggaatttttttttgcccgggccccttccccccccaaacccttttgaagagggtctggggtttttttaaaaagttccctttgta

SEQ ID NO: 541040 - DNA, 207 bp, Homo sapiens
cctccttggttgcatggtagagatgacctgctgtgtgtcattaatgcatgtagccattcagattgcttctcctttggttggtgattaccactagtctcctgtattgacctcaagtgcctgtcctacatagtcgacagaagtggtaccgcagctcgatacttcgtaaatcattagctcagtagctgttttcctgctgttgaaaatgcc

SEQ ID NO: 541041 - DNA, 327 bp, Homo sapiens
tagatggagtttcattcttgttacccaggctggagtgcaatggtgcgatctgagctcactgcaacttccacctcctgggttcaaatgattctcctgcctcagcctcccaagtagctgggattacagacgcccgctcccacgcctagctaatttttgtacttttagtagagatggggtttctccatgttggccaggctggtcttgaactcctgaccttgagtgatccacccaccccagcctcccagagtgctgggattacaggcttgagtcaccgtgcctggcgcttggttttcttataatcttcattattctttgctgggcctacct

SEQ ID NO: 541042 - DNA, 1513 bp, Homo sapiens
ttccgttgtcctccttgttggcggtcgttttggcatttgtctggactgattacttggtagggagccccggagcgctgggtcagcatcatccgtgactgactgagaacggcgcgagaggagctcttccccggctgcacagaggcgtggcctgaggctcggcggcgcccagggtacccaggcccggcccggcaatacaggacatcctactactggaccccgctccgctcacagagatccgactggcgcgcgcgccgagcctgcacgcgccccggcccccagcgcccacttgctgcacgctcttgcagcgcacgctgcccctgctcttacgttcgtccctgcgcacccggcacctggcggcgctcctccctccgccctgcagcggcctcacgccccactgcccttggttccccaccgcactcgctcgacctcgcctcgccacccacacccttttgcaccccccctctaccacaaccccctcccccctgccccctcgccctaacctcgcaccccactccccccactcgcaccccctaaccgccccacccccatcaaccttcctccccccttcacccctaacccacctccctcccccaaccaactcaccaccctctccctctccacccacacccccatcaacccacaaactcctcccgccttatcgcgcgggcccccctgacgtcccccgtgtgttcctcccccccgcccccgcgcacccgggcatcccccacccacgccgccccgcttagcgccgctcgccgcgacgctccgctcggctccccacgcccccctcagcgcgcgtccccttccggccccccgtgaccccctctgtccgctttcccctcctctgctccgacccgtgctctggcccggcttctcgcgccttccaccccctccgcgcttctcgcggttgtttctctctttctcttcgctgcgcgttcgtggccgctcctctcggccacacccccccccttacgcctccttcccactcccatcctcccaccccccctcttccacccccccacatctccctcaccacccccatcctccccctccccaacacccacccccctccaatcactcctactctcccccccgctctacccccccctcttaccccccccttccccccccctttccccgtaccagctcttcccgcccgcccccccactccgcgccctccggtgcgctcgcttcgccctctgccgccgcccgcccctctcactccccaccccgctgcgcggccctccctcgtcgcaccgcggtcgtcctccaccctcactggagctgcgcctgcgtggcccccgcccacaaccacccccctccccccccttcaccactccctccatgtccgccacaccccccccccgcgtttcctctttgtctcccccctcacctcatctcctcctcccctcccgcttccttaatccctcttcctcctcctcatccctcacctcacctgtccctcctcccccctactttctccgcccccacctacaccaccctcccactacac

SEQ ID NO: 541043 - DNA, 173 bp, Homo sapiens
atactgctctcataacatgatctgatggccttggtccaggccctgtggatctaatcaaaagcatcattccctagtcccattgcagaagaaacgctacttcacctctcagcggatgaggagtgcgtgtggcggcagttgcaggtaccagagatgtactgaattttcagacgcgg

SEQ ID NO: 541044 - DNA, 134 bp, Homo sapiens
atcctaagcagcggtagcttgaggctggagctgggtggcgggcgggtacgggaccgtggagagctgagaggtcaggccaggcgtcgtcgagtgagcagcgtgctgcgtgtggacctggccgcttagcacatgac

SEQ ID NO: 541045 - DNA, 420 bp, Homo sapiens
tgagagggtagaccctagctgttttatgaactaacaaaagctgtcctttatcagtaaacagtatctccttcgaaaactaggtacctgaaagtcaatatagtaggatataaaaaattctaaaatttatctaatagcaaatattgtatctcatgaatccagtacacatcatcaattataagatgccccagtaattatatttacccccaaaaaagaaaaaaaaaaccactgccaaataaattgtgaagtacatcaattgcaaataattccaaatttgagacaggttaaaagtagaggaaagtacattttaagatcaataaaatacattaatttaaagccacagacatttactacatttcttctccaaaatcctcactttcacttttgcaatctttaaccactaaaaaattatcctttcaagag

SEQ ID NO: 541046 - DNA, 681 bp, Homo sapiens
  misc_feature (565)..(565): n is a, c, g, or t
  misc_feature (567)..(567): n is a, c, g, or t
tggcacgaggacttctcttctttactaataaatgttctttgtggcatattattatttttccataatagggcacttctgtctgccttaagaacctgttttggtagatatgctttctcctcaatgattttcttaatggcatctgggaactcatttgctgcctcttggtcatcaggagctgcctcttctgttatcttaacatttttaaagccaaacttctttctaatattatcaagccatcctttgctggcattaaattctctagatttagatccttcaccttccttttgctttaaattgtcatataatgaccgccttttctccaatcatattagagcctataggtacgtctttcttgtagcaatactgcacccacataaaagttgcatttttaatacgagataaaaaggtatatcacaaaaagtgtaaggtttgctggtatagatgcagtaatggcttcataaattttcttaatttttttttaacagtggtccttatgctggattcatttatcttgaaggatgggcaactacagctgcagaccagtacacatcaagcaatttaactntntcttggaatgtcatgactttgctccttgggagcactttcagcgtcactagcgggacttcatatgggtcccttgggtattattgcaagggtttatgttgtacctaaacatgatga

SEQ ID NO: 541047 - DNA, 268 bp, Homo sapiens
tgagacgaccttacagcactagccttactcagctatccattatagcttggcccttaagaggccatgatgaggtgatgaaaaaattattggaggacaggagcgtgataccttcctgggtttttttttggcagccttcaaatcttattttcttgccccacaaggtgagcggctacccctgaaactcttttttttaaaggattaacctatcaattggaaaaaaaactaatgggggaaggggataatccctgattccagggtggccttctga

SEQ ID NO: 541048 - DNA, 192 bp, Homo sapiens
ctgcttagaaactgagatatctgaacttatatttggttagtgtagttcaagtgaattggtctctaaatgcaccttgtgtagaccaacgcctttcgttttaactattatcatacaccatttgttggacagacttggtccctgccttttagtccctgccttgcacactgctcctttcaagaaggcaggaactgg

SEQ ID NO: 541049 - DNA, 211 bp, Homo sapiens
ttgagtattgattcagtgctcacattctacatgtgcaaaacgaatctatcggatcgtactacaaccacagcaggtaccaggacagttaagcttgagttccttctttcccgtcaatctgtagagctagccaggtctttcgtacagttatagttgggttattccgtgttaatccttgttggtgcccatgtgcgtccacttagtccaggcttcg

SEQ ID NO: 541050 - DNA, 277 bp, Homo sapiens
tagctcccaacaagaggagagtgaagaggaaggagttcggatggaaacgggtgtagaagttaaggacatagaatgggtcatgtcacaagcaaatgtgtcgagagcaaagccaggtccgagcccggaagaacaacagtaaggatatggtaaaggcgattagggaattaccaaggtaacaatagggaaccaccttttttgggtgtctcaaaggagtactgcagctggtttgaaattgtactgtttctatcataaataaagttatggcttcttgtggatg

SEQ ID NO: 541051 - DNA, 189 bp, Homo sapiens
gagatggctggagtgatgggtgggagctagatctgttctagagagagcagactccaagctctctatgctggctcccagctagtgggaatcctttagagcttgttcttcaactctacacgttcaaaaatgctactatggagtcgtttggagacgggggagatgggaaaactgagcctctcatcttgacca

SEQ ID NO: 541052 - DNA, 630 bp, Homo sapiens
cagtaagttatctttgaatatgtagtatctatatgactatgcgtggctggaaccaacatgaagaatgtagagtaatgaaatggaggatctctaaagagcatctgatcttgtgctgtataaaggataaagaaggatgatgtctttttattaaaatatttcaggttcttcagaaagtcacacattacgaagagttaaaatgttatcaaaatagtctaaggccatggcatccctttttcataaattattgattatttaagactaaaagttgcattttaacgcctattttaccgtagctaattatttaatgtccagttgtcttggatatataggctatttggctaaagactgtatagcatgacacataaaatatatctttataaaagtggaagtatgtatattacaaaaagagacatccaaattctttttttaaaagcagtctactagatggtgatcccttgagatatggacaggatggcctataagggcgactggcatttaaaaaaaatcccgcaaaacttcgcaaagatggctattgatacttggggagggtgcttggctttatgaatatatgatcgggcatcaaggaaagaacaatgcgtcaaaaaatgttggtgagactcaggaaaaaaa

SEQ ID NO: 541053 - DNA, 1289 bp, Homo sapiens
gacatcagctctgcccttcgaatttaccctgacactggcagagctcaacctgacgcagcaacgagactgggcgatgtcaggagatgcattgcgtgctccagggcctgcagaccaccactcctgcaagagtccagaagctgagccatccagaaacatgctgcctgacggggagccggaatgcgcgggtcctgaatccagcaacacatacgctattctcatgaccacaacaccatgacaggacgctgcaaccatcaagcagacaaaccatcaaagagagagagactagcgcagagacccatgcacaagacatgcctcatagcacagacacggcaccatcacagagagaaacacacaccacgatgacaaagaaccatggaaacacaacagcgatgcaagaccatggacagcatacatcagccagcgcacatcctcgcgccacatggcaccacgacaagtcgacagaaccgacaacacacccagatgagcacacaaaccccccgagtgaacaatccaacgaaggacaacccacaaaggacacgagcgcacgatgtaccacacggcgagagacaaccaaacggaggaaacaagaacaaagcaaggacacgcaccgcactacacaacaccgcaccgagcccaatgggaccaggattcacacgaaggaatagccatcacgatagacgacacagaccggagaacacacatcggaacacaagggcaaccaatcagcagccccgacattgagccacgacggagcaagtaggacgacaacgaggaccaagcagaatacaacaaacagcaccaatcgcacgacaagcaccgcccgctacaccatgcgcgactcgaatcgcacccacacgtacccagaagacccacacagacccagtggcacacacgaagacgacaacccacagtaacgaagcgccagcgagcaccaccgaccgaacatgccgccacacaaccgccaaacaacgaacacaaaacaaccactgcacaaagggcaaaacaatgacgacacaccaatgagcagcagcaagcacaacaccacacaagccacagcggagcgacgcacagcagcacagagacgaacacacgcgcagaagcaacacgacgagcaaaagcacgataggggaacagggaaagcacaagcgacaccagacaaacacacaccgagacacacaagaagaacccgcggcacgaaacaatccacgcgagagaacagcaactacaaacaacccacacacaccaagcagggaaccgaagcacgaagacgaacacaacagaagacccag

SEQ ID NO: 541054 - DNA, 524 bp, Homo sapiens
ttgagtagagaccccctgttccccacacagtcctttgaggtttggagggtttagacgaggctcccaaaagtttaacggccattcccgctccttgaggatcgccttggcctcattgaaatttttgaaggcccgtttggaaaccacctttagggaggtgggggcccgtttcccccttcaaatggagcggctaaaggggttttttttgccccttatgttaaagttggcccaaccccgggcagagggtcggggccgggccccgggttttaaggcccttttgaacatcaaggtcaagttgggggttgggtttcccccctccccccgcctgttgggagagggggggggtttttttttttggtgttgctttggccagcagcacttccatgcaacccttccaaaagcccccccccccccggatagtggatggcaaagtggtttttgagcccaatgcccccaaattttttgggctttaaccccccaaaagcggggtcccctttggggggcggggggccaataaaaagtttagg

SEQ ID NO: 541055 - DNA, 911 bp, Homo sapiens
gtcctctaagaacccagcacacgaacatcggaatcacctagagactacttaattctggcgcagtggacactggagtactacggacaggctctaagcctgccttattcgacaccgagttggtgccaggcaggccattccttctaggtgacacgagcacacttgtaagaacgtcatcgtcccagaccatgcattgagtaataatcttgttcactgaatgtaagtattcgctatcattaactcgggaaggctatgggcgaatcggtgacataggtttgcccgctaattagattcgggtggctcccctgataatgcgtgtatcctcgcgcattatagacgacacactaacactactgagctcttaacgcgtccctctctccgtactctcgtgctctgcatcgtgctatatgtggagcgtcggagcaaggaacagggttgaactggtctaccctgccttacggagtggaactacacccatcgcgggagcctccgtgaggaactagctcatacgtttctcctttagacctagcaggtgtctcctctactatggaggggcgcagtccaatttcatgcacaacgagattatcagagtgatataaagccccctggcgataaccggaagaccaaacgctccctctgtcgtctgatcggtgcctaatcgacagcagtcctagttctcctatctctcgcagtcctagtcggctggcgatcactatactactaagagagcgcaacgtcaagagcagcttcttcgacgcggccggagggaggagacccccattctatatcgaacacctatactgattgatcggtcaccctggaggtgtatatgcttatcctagcaggcttcggaataatctcccgataattgtacttaataatccgggacaaaaaaacctttgggtaataggatg

SEQ ID NO: 541056 - DNA, 864 bp, Homo sapiens
cgaggtaggtggatcacctgaggtcgggagttcgagaccaacctgaccaacatggagaaaccctgtctctattaaaaatacaaaaaaaaaaaaaaatagccgggcattggtggcgcatgccttgtaattcccgagctactcaggaggctgaggcagaagaattgaacccaggaggtggaggttgcagttgagctgaaatcgtgccgttacttctccaacctggacaacaagagcgaaactccgtcttaaaagtggaccaggacaggaccagatttgggagtcatggtccgggtgtccttttcactacaccatgtttgagctcaaacccccaactctcattccccaggtggctgacccagtccctgggggaaagcccgtggatttcagaaaagagcaagttcgtggatctgggaacccttttcctttcctttcccgtggctttgtaacttccaccaaacccatcagaaaggagaaaggacaggagaactcaccttcgtgcctcaagtgtgaatcagaacccttaccccaaccacgaatgttggcccttggccttgcgggggcttttccaaccttcaagcctgtgggataatgctgttggcctcaatcttataacatgcattggctcttggtacatgtcaccacctttcccaagttctccctcttggccctatgccattcattcgggggaactcctgggaaattttcagttactcaagccctggggccccaccaccttaaggccactcctcccaaaggacagtctaggaagcctgggcaggaaaagcacacgagcgggcaaaatgcagttaaaggggcgctgaacggggagacaggggtcatcatcgatcctactttcacttgcca

SEQ ID NO: 541057 - DNA, 853 bp, Homo sapiens
caaacttcttgttctcaataccatcccaccgtttacatatggacaacacctttgtgtgagaaaataaatgcgcctgcttaacacatttctcgctgtatactgaaaatttcccaacataaggggataaattctgcgcaaccaaatgtgtttcgcccgctttgcacaccccctcgggtaaattgaacacacacaaatttctatgcggaaagacgccctctcgattgcatcccctattccagcccacacccttctgcgccctattttagtgcgcccacaaaggatttgcctgccccacactcttaattcgtaatatatgccccaacaatgatctccttgatcatactctccccccctttccggcatttttttctccccccaaccagcaggtttgttcaacttcttctagaaaaacaaaaccgtaataatttatttcagagaaataccctagacaacattgggtgtaatatgctcgaacacccactttttgagataagaaacttcttcccaaccagatcgccccctcaaacaccccctgcaaatactgtttctattagagaaaccctttattcacatgacgacccaaaaaacaggttatcccctcaagacgtgtctcaaactatccgccggtttctcatcttttcttttcaccaacaaaaatgtgtttatacaccctcaaaatcatgttaggagaaagacattacttagttccccctccccaccctttataagatttgccccctattctgcccccctagacccccccctcgaaatcgcaaccctgacacccttttaaaaaaaaccaaaaccctcagtttttggacaacaagaggcgaaaaccccaaaaacaaaaaca

SEQ ID NO: 541058 - DNA, 961 bp, Homo sapiens
  misc_feature (215)..(215): n is a, c, g, or t
  misc_feature (224)..(224): n is a, c, g, or t
  misc_feature (266)..(266): n is a, c, g, or t
  misc_feature (287)..(287): n is a, c, g, or t
  misc_feature (289)..(289): n is a, c, g, or t
  misc_feature (331)..(331): n is a, c, g, or t
  misc_feature (346)..(346): n is a, c, g, or t
  misc_feature (392)..(392): n is a, c, g, or t
  misc_feature (416)..(416): n is a, c, g, or t
  misc_feature (460)..(460): n is a, c, g, or t
  misc_feature (464)..(464): n is a, c, g, or t
  misc_feature (715)..(715): n is a, c, g, or t
  misc_feature (717)..(717): n is a, c, g, or t
  misc_feature (733)..(733): n is a, c, g, or t
cgcctggaccgtaggcggggacatggggtctctggttgcgtgcagtgcgccatgagagcaggtcttcgggaccggccatcgtcccggtcttaacaccagcgacttccagaagctgaagcggaaatattgaagtccagggagggagcgccccgggccgcgtccgccccgtcccacactacgcccccgccccactcccggggcctgttaatctgagnccgatccgngaccggcctccttgcgtctcccattcccaagattgtcccgcntctgccaatccccgccgtccntncagcccacgacctgccgcgccgaggagcggcatctgtcccgnttcccgattgggtcngtcgtctctctccgcctagcgacagattccttctattaagggattngctcgctgagttctaagctctaanatgggtcaactcctttgttttccgcctagcgacaagggatttgntcgnacggcattggctccatcccctagtcgctggacagctctttttttgattggctcaaatcctgtaaagggcttgaccagtctctacatagtcaccgtccgcttttcctgagttctccctcccaattggctccagcttcctgggggcgtggccaagccctcctcttcccagaattggcccggggccttcaatttacgttctttacactacggggactggggtcgtctttgcccacgtcccgacaacttgttccncntgaccccctcagggantggccccaaactgtccctgcctctggcaccccctttcattggttccatccatccccacaacagcctgccaatcgaagcccgtccctgcatccaggatggtaccagctcccgcccctctgccccccacctccacaggtgaccttaaagggccctcagtccacccaaagtgaggggcaggggccctcactctccggccctggtgtgggataaagactgaggggcttggga

SEQ ID NO: 541059 - DNA, 948 bp, Homo sapiens
  misc_feature (215)..(215): n is a, c, g, or t
  misc_feature (224)..(224): n is a, c, g, or t
  misc_feature (266)..(266): n is a, c, g, or t
  misc_feature (287)..(287): n is a, c, g, or t
  misc_feature (289)..(289): n is a, c, g, or t
  misc_feature (331)..(331): n is a, c, g, or t
  misc_feature (346)..(346): n is a, c, g, or t
  misc_feature (392)..(392): n is a, c, g, or t
  misc_feature (416)..(416): n is a, c, g, or t
  misc_feature (460)..(460): n is a, c, g, or t
  misc_feature (464)..(464): n is a, c, g, or t
  misc_feature (715)..(715): n is a, c, g, or t
  misc_feature (717)..(717): n is a, c, g, or t
  misc_feature (733)..(733): n is a, c, g, or t
cgcctggaccgtaggcggggacatggggtctctggttgcgtgcagtgcgccatgagagcaggtcttcgggaccggccatcgtcccggtcttaacaccagcgacttccagaagctgaagcggaaatattgaagtccagggagggagcgccccgggccgcgtccgccccgtcccacactacgcccccgccccactcccggggcctgttaatctgagnccgatccgngaccggcctccttgcgtctcccattcccaagattgtcccgcntctgccaatccccgccgtccntncagcccacgacctgccgcgccgaggagcggcatctgtcccgnttcccgattgggtcngtcgtctctctccgcctagcgacagattccttctattaagggattngctcgctgagttctaagctctaanatgggtcaactcctttgttttccgcctagcgacaagggatttgntcgnacggcattggctccatcccctagtcgctggacagctctttttttgattggctcaaatcctgtaaagggcttgaccagtctctacatagtcaccgtccgcttttcctgagttctccctcccaattggctccagcttcctgggggcgtggccaagccctcctcttcccagaattggcccggggccttcaatttacgttctttacactacggggactggggtcgtctttgcccacgtcccgacaacttgttccncntgaccccctcagggantggccccaaactgtccctgcctctggcaccccctttcattggttccatccatccccacaacagcctgccaatcgaagcccgtccctgcatccaggatggtaccagctcccgccctgccccacctcaaaggtcctaagggcctgtcacaaggtgggcaaggcctaattcggcctgttggaaaagtaggttggactgaagtgaggggcttagataag

SEQ ID NO: 541060 - DNA, 512 bp, Homo sapiens
  misc_feature (18)..(18): n is a, c, g, or t
cccgcataaattaggccntaggcacagaaccaactctgtttctatttctataaaattctagaaaatgcaaactaaaccataatgaccagagaatattagtggtttcctagggatgggatgtgggcaaagagagacgaaggaaggagggattaccaaggaggacagggaaacttcggggatgagggatatgctcattatcttgactggtgatggttttacaggtgggccaaaactaatcaaactttacacttcatctatatgaccagctatcatatgtcaattatacctcaataaagctgtttaattgacatatgatagctggtcatatgtcaattaaacagctttattgaggtatatctactggaaagtaaaactttttaattatagactctatcatcacgtgcatagaaaaatccaaaggattctacaaacaagctactagaaccactgactgcatcaagatgcaggtacaaagttaatattcaaaatcaactatatttctatacaagagc

SEQ ID NO: 541061 - DNA, 348 bp, Homo sapiens
gggctctgtgtggtgtttcaatgttctcagcgcagctggggagagtattttcggctggtgaatattctagccctccttccactcctcgtgtggtaggtcatgtctagcagccagtctgtatcttctgggaccttgtcagatgtgctgcatctcgctaccttctggatcagaatctacattgtagcaacgatttcctgtgatcatccttgtgtatacagaagtttaataagttgtgtcatgagcactcttttgagatcctaggcccaggatagcaaataccgagtctgcatccttccactgtcctgcggtagtatcagacattactagctgatctagccgatccatttt

SEQ ID NO: 541062 - DNA, 305 bp, Homo sapiens
gatgcacagcacacacttttgaaggatttcagatcatgaagaaaaattggtttggggctgctctgctcggcagtctggtgcttgctggatgcggacccttgagtcaggtggactcggaaggtcacacagaaaacccggtgtttcctgaagtggacaaagcgacttttcacacgggctcttacccgaatatcgacaatctgcgtcaggtccgggaaggcgtgacacgcgatcagttgtatgacctgctgggtcgcccgcactttgccgaaggtttcaaggtgcgggagtgggattaccgtcgacgc

SEQ ID NO: 541063 - DNA, 287 bp, Homo sapiens
agtcatgatggattaaagacttaaatggacacacctatatcctagcactttgggagcccaagcttggagtatcacttgagccaggaattcaatgaccagtctggacaatgcagtgagatcccatcgctacaaaaaaaaaaaaaaaaaaaggcttgggggcatgcagggttatccccagttccttggactgctgaggtaggaggattctttgagcccaagagttcaaggctgcaaggagcatataatggtccttacaacacccttagcttgagtaaaagagttgcacc

SEQ ID NO: 541064 - DNA, 271 bp, Homo sapiens
ctcctagtggaagcccaagggcctttgaaaacctcctgctgccccctgtttccctgggctgaaaggggaagtgcatatgtgtaacggggactggttcctgtgttttagggcccaaaccttaacaaatgattgattttccctgggcaaaacaggaaagcaaataaagcagggaaaaggaaaaacagcgtttttttttacaaaaaaaagggtgggagggtgtggttttggcccttataggaccctgtgccaataaacaaacatgcatccgtca

SEQ ID NO: 541065 - DNA, 270 bp, Homo sapiens
atagaaagcgagggctgtcctttacaaattcttggttctgcaacttcctagcgtgactttgggcttgggcaagtttcttagccgttctgagccttcatttcctcatctgtacaatgagattatagtacctatcatctaccttcagattgctgacagcagatttgaataaatatgcaggtagctatacaaaagtagatgatccaaaatggtagcactacctcacaactgagtcatgacacgagtcgagattatgtacactctatcatgtgt

SEQ ID NO: 541066 - DNA, 911 bp, Homo sapiens
  misc_feature (34)..(34): n is a, c, g, or t
  misc_feature (171)..(171): n is a, c, g, or t
  misc_feature (201)..(201): n is a, c, g, or t
  misc_feature (267)..(267): n is a, c, g, or t
  misc_feature (482)..(482): n is a, c, g, or t
  misc_feature (893)..(893): n is a, c, g, or t
  misc_feature (895)..(895): n is a, c, g, or t
  misc_feature (911)..(911): n is a, c, g, or t
actcttgtccttctgtccggcccccacagctgcngctcacttatcctgccatactgggaaaggggttcccccacgatggcttattctgggtccagactttccccaggtagggaaagcggaaggtagaaggctttttttgctggctctagggttcttctagttcgaggcctngggtccccatcctctggaaccagggggagncctggaaggagttcactgtagacccgtcccatggggaaagaggctgcggacttgctgctgctgctnctcccagtggcctcttctgggtgccaggagaggggaaggacctttgtctgggcgttaaccaagggctggaaactttacctggtacctaaaggtttcatttgggatcagaccggagacccttgggttctcccgtctcaccacccctttctacagaaagcacttggaagattgtttcagggtgtctccagggtccctctgtaaccatctgctgtggnaatgcaggaccctctgtgacattctttatcccttcttccccgggttggtggccatggagggtcttgtctgctgtgaatcgactctggatgctgtgagcttgatgctggccagggaagcagaggatgtgagaggcagaggcaggctcctggggctgagctccttcctctgcatcattctgggcttggcctggacagcacccgccagtgagagctgtgggcctcaccctctggcagctgagccaagcactgtcattcttggtgccatcttcccctgccgcaccggcagtctcagcccagcccccacctttgggttgtaggttgggctcccaagcaacacagaccactcttccccttgcccctcccccagagggacttgactttctttctggactgtttgtattgaaacaaaantngtgttaaaataatgcn

SEQ ID NO: 541067 - DNA, 605 bp, Homo sapiens
  misc_feature (100)..(100): n is a, c, g, or t
  misc_feature (114)..(114): n is a, c, g, or t
  misc_feature (198)..(198): n is a, c, g, or t
  misc_feature (233)..(233): n is a, c, g, or t
  misc_feature (276)..(276): n is a, c, g, or t
  misc_feature (283)..(283): n is a, c, g, or t
  misc_feature (300)..(300): n is a, c, g, or t
  misc_feature (315)..(315): n is a, c, g, or t
  misc_feature (369)..(369): n is a, c, g, or t
  misc_feature (378)..(378): n is a, c, g, or t
  misc_feature (387)..(387): n is a, c, g, or t
  misc_feature (389)..(389): n is a, c, g, or t
  misc_feature (429)..(429): n is a, c, g, or t
  misc_feature (467)..(467): n is a, c, g, or t
  misc_feature (486)..(486): n is a, c, g, or t
  misc_feature (496)..(496): n is a, c, g, or t
  misc_feature (505)..(505): n is a, c, g, or t
  misc_feature (538)..(538): n is a, c, g, or t
  misc_feature (593)..(593): n is a, c, g, or t
gcgccctttttagagtgtttgccacaaatttatttcataagaaaaacttttttgcgttcaacaacacaagaataaaggtatgcacagggtttgaggcggngagcagtgtggtangcccagcaggaagaagccccctatacttctctaaagcctgggtgcctgcttgaggagggaaggcaggaacccaggggcaggggngggggtctcttcagcaattatgatgacgcactgtnacctcctggcccagggttcccaggatactgagggaggggcccngagactntgaacccagcggcggcngaatgcctgtgtgcngggcctcaacaaggcctcgcaggacctcagtgcaaggggagaaggaaaaaaganaaaaaaggngacagaaananaaagatagaactggtggttggggttctgggcagcccaggngtcagccccggcaagcagatggtaccgagcatgagacngtgagggacgggccgccancacagggtgntaacacaanctgcgaaggcctggggtgagtcccaggagtcgngaaccacatggcaggcagcccggagccgccggatgcgcgttccgcgtggctgttnactcgcaatcct

SEQ ID NO: 541068 - DNA, 102 bp, Homo sapiens
ggcgggcatttagtggctataaatttggcctctaaacatgggctttgagctggtgtcccagaagattctgggtacggtggtggtcttggttctcatggggtt

SEQ ID NO: 541069 - DNA, 868 bp, Homo sapiens
  misc_feature (5)..(5): n is a, c, g, or t
  misc_feature (152)..(152): n is a, c, g, or t
  misc_feature (163)..(163): n is a, c, g, or t
  misc_feature (178)..(178): n is a, c, g, or t
  misc_feature (220)..(221): n is a, c, g, or t
  misc_feature (223)..(223): n is a, c, g, or t
  misc_feature (226)..(226): n is a, c, g, or t
  misc_feature (229)..(229): n is a, c, g, or t
  misc_feature (232)..(233): n is a, c, g, or t
  misc_feature (239)..(240): n is a, c, g, or t
  misc_feature (242)..(242): n is a, c, g, or t
  misc_feature (245)..(245): n is a, c, g, or t
  misc_feature (252)..(253): n is a, c, g, or t
  misc_feature (269)..(270): n is a, c, g, or t
  misc_feature (276)..(276): n is a, c, g, or t
  misc_feature (281)..(281): n is a, c, g, or t
  misc_feature (286)..(287): n is a, c, g, or t
  misc_feature (293)..(293): n is a, c, g, or t
  misc_feature (300)..(300): n is a, c, g, or t
  misc_feature (305)..(306): n is a, c, g, or t
  misc_feature (312)..(313): n is a, c, g, or t
  misc_feature (323)..(323): n is a, c, g, or t
  misc_feature (333)..(333): n is a, c, g, or t
  misc_feature (337)..(338): n is a, c, g, or t
  misc_feature (344)..(346): n is a, c, g, or t
  misc_feature (354)..(354): n is a, c, g, or t
  misc_feature (356)..(358): n is a, c, g, or t
  misc_feature (361)..(361): n is a, c, g, or t
  misc_feature (363)..(363): n is a, c, g, or t
  misc_feature (365)..(366): n is a, c, g, or t
  misc_feature (368)..(371): n is a, c, g, or t
  misc_feature (375)..(375): n is a, c, g, or t
  misc_feature (378)..(378): n is a, c, g, or t
  misc_feature (385)..(385): n is a, c, g, or t
  misc_feature (387)..(387): n is a, c, g, or t
  misc_feature (394)..(394): n is a, c, g, or t
  misc_feature (402)..(402): n is a, c, g, or t
  misc_feature (404)..(404): n is a, c, g, or t
  misc_feature (410)..(410): n is a, c, g, or t
  misc_feature (412)..(412): n is a, c, g, or t
  misc_feature (418)..(420): n is a, c, g, or t
  misc_feature (422)..(422): n is a, c, g, or t
  misc_feature (427)..(428): n is a, c, g, or t
  misc_feature (431)..(431): n is a, c, g, or t
  misc_feature (434)..(434): n is a, c, g, or t
  misc_feature (438)..(438): n is a, c, g, or t
  misc_feature (444)..(444): n is a, c, g, or t
  misc_feature (446)..(446): n is a, c, g, or t
  misc_feature (614)..(614): n is a, c, g, or t
  misc_feature (617)..(617): n is a, c, g, or t
  misc_feature (850)..(850): n is a, c, g, or t
  misc_feature (852)..(852): n is a, c, g, or t
  misc_feature (868)..(868): n is a, c, g, or t
ttatngttcgatacttttaaaattttttgggggagtatttgttattgtttttggatagtttggggatttatttaaatgttaatttataattgtttttttcgtttgtgtatttttgttgtatttgtattggttttttggggatggtgtttaangatttttattngtttaattatttgantttatagggttgggatttttaaatattgttgttagtttgttnngnccntcntcnnattccnncnccntccctcnnaccacaccccaactanntttccntcctncttannaacccntccaaantttanntcttanntaaatttccnattccccacnacannctacannncctcctcntnnnctntnannannnnttcntanactaatnanttccaanattctttnancctctncnattctnnntntctannatntcntctncaatcnancaccctctgtgacattctttatcccttcttccccgggttggtggccatggagggtcttgtctgctgtgaatcgactctggatgctgtgagcttgatgctggccagggaagcagaggatgtgagaggcagaggcaggggggtgggggggaggggggggggggggatganggngggggtggggtggagaggaggggggagtgagagctgtgggcctcaccctctggcagctgagccaagcactgtcattcttggtgccatcttcccctgccgcaccggcagtctcagcccagcccccacctttgggttgtaggttgggctcccaagcaacacagaccactcttccccttgcccctcccccagagggacttgactttctttctggactgtttgtattgaaacaaaantngtgttaaaataatgcn

SEQ ID NO: 541070 - DNA, 341 bp, Homo sapiens
  misc_feature (100)..(100): n is a, c, g, or t
  misc_feature (114)..(114): n is a, c, g, or t
  misc_feature (198)..(198): n is a, c, g, or t
gcgccctttttagagtgtttgccacaaatttatttcataagaaaaacttttttgcgttcaacaacacaagaataaaggtatgcacagggtttgaggcggngagcagtgtggtangcccagcaggaagaagccccctatacttctctaaagcctgggtgcctgcttgaggagggaaggcaggaacccaggggcaggggnggggaggccaaggcgggagggttattagttgaccatcctgggcaacatggagagaacctgttcctacagaacttttaaaaagatttaaggccagttgaggtggctcacgcctgtaatcccaacactttgggaggctgagacgg

SEQ ID NO: 541071 - DNA, 935 bp, Homo sapiens
ggctggatgtccaggctgcgggcgctgctgggactcgggctgctggttgcgggctctgcgcctgccgcggatcaaaagcctagactcatcgcctgtcgctcgggagccacctggtggggaccgcagtggctgaaactcgtggtggccgtctgggactcacgaatggtcatgggtgagcacggatggtgaagtacctgagcctatggagtggcaggcccatgccgtggatcaggagctatttaacgaataccatttcagcgtggaccaacttatggaactggccgggctgagctgtgctacagccatcgtcaaggcatatcccccacgtctcatgtccatggagcccgccctacgtgtcctggtcatctgtggcccggggaataatgggcggagatggtctgggcaatgttgctcgtacaactaccagctcattcagggtaacgagccaaatgcatctattactctagaggggcatacctcgatcgcccgtgcattgcacgagcgatttgggtgacccagtgtcgagaacaatggactatccctttccttggggaaatgtccgcagagccatgacgattgatgaagcctgtattgagctgctgggtggattgcatctttgggttcagcttctgagggccgatgcttcggggaaacctgttccccacacgcaattcctcgaagttggttcctcgaaaaggtgacttcaccttgttggccccatttgccccagcattcgacacatttcccctccagcgaatgggggaccgtggacggaacgtgggacaactcggtttggaacgggcatcccagcaccccaggacttttgcctccagtgctcccctctctcgaggcccccgcacagaaagtcccttggaaccccaagcttaacgcggggacaggtaaaccgaattaacctcggcgcggtcacttcttga

SEQ ID NO: 541072 - DNA, 138 bp, Homo sapiens
actttttggcatgtcaggcctgaagatcctgtgtacttctctcagcgtgttgtttttggggaaacgttcaagctttaccccagtgtgagacaatttcattagggcgcatatacccaaataaacctgtttttcatatta

SEQ ID NO: 541073 - DNA, 1696 bp, Homo sapiens
gcaagccggagccctggggttgggcagcactcggttccgtgcaactttcaagtgagttgcgaactccgccctgtaggccggtgctggtggcccggcgcgctggaaccgcggcgacccgctccagcgcgggaccagcagcaagggccgagcgccaggttctccgcggcagaaagggcgggtgggagctgtaactgccccggccgcggggcgcgcccgctcccaagtcggcttcctccccgccggggccgctttgcctcgggtctccccattctccaggtcccctgaactgcacagtcggaggccgtgggcggcgggctctgcctccgccgagggacagccggatcgcccctctgcttcccgcaactgccctgatcaccccccgtcccagcccttgagtgaacgtccttctgagcggcttcctggggtcctccccacgtcccaaaggccggcaagatggtgtcctggatgatctgtcgcctggtggtgctggtgtttgggatgctgtgtccagcttatgcttcctataaggctgtgaagaccaagaacattcgtgaatatgtgcggtggatgatgtactggattgtttttgcactcttcatggcagcagagatcgttacagacatttttatctcctggttccctttctactatgagatcaagatggccttcgtgctgtggctgctctcaccctacaccaagggcgccagcctgctttaccgcaagtttgtccacccgtccctgtcccgccatgagaaggagatcgacgcgtacatcgtgcaggccaaggagcgcagctaccgagaccgtgctcagcttcgggaagcggggcctcaacattgccgcctccgctgctgtgcaggctgccaccaagagtcagggggcgctggccggcaggctgcggagcttctccatgcaggacctgcgctccatctctgacgcacctgcccctgcctaccatgaccccctctacctggaggaccaggtgtcccaccggaggccacccattgggtaccgggccgggggcctgcaggacagcgacaccgaggatgagtgttggtcagatactgaggcagtcccccgggcgccagcccggccccgagagaagcccctaatccgcagccagagcctgcgtgtggtcaagaggaagccaccggtgcgggagggcacctcgcgctccctgaaggttcggacgaggaaaaagactgtgccctcagacgtggacagctagggtctgctgcatctgcccccttcttacctcgtgccctgcagggctccagggctatttggagggaccttgggctgcacatctggcctgcctgcaccagctgcctgggccccaccctcctgactcctgctgatggttaagggccgggagcagatgctgccaaggccacatgcagggatgcacccacaatgtaccaaagcaggctgggcccagggttctatttattgccttgctctgccctctcccttccccggttgtgggacaagagccctccctgaacccctgcaaccctccctgaacccctgcaaatgaaaccaaacgtccacctgggtgtgttcattccttcctgtccttcaaagtacttgatagcctttcataaggcctggcacatgtgtcctggttgtgtgtgtgtgtgttggtgagtgaggtcaggtttgcgagtgttttgataaataaatacataaaggggca

SEQ ID NO: 541074 - DNA, 1063 bp, Homo sapiens
gcagcacaccccggcacctcctctgacggcagctgcgcctcgacaagcgcagtgcctgcagcgcacgccggagtggctgtagctgcccggctgcggctgcctgccctgcgcgggctgtgtggctgcgggcctgcgcccccggctgctggccagctctgcacggctgcgggcatctgctgtggcccggtgctctgcaaacgctgcgtgcgggcggcatggggataacgcggccatggtgccgccgagatcggcctccgacagggatgagggagttggtgggtccaaggtggaggctgctgggcgcgtgcccccatgacttgaatgactgtaaccattggcacattccaaccccgactcaggattctacccagtggcacctttacaggtccatgggaaggatatacaaggggaaaagagttgatgtaaagtattatacaagtgtgtaactgtgaggataaacgtataataatcaccagagaggaataattaatgagggagaaatgatggaatggacaagatggtccaaagaacgaataaaataaggaggacttaaaaaagcaagaggatttagacaagaaagagcaagaagtaacgaagcgtagtggcattcaccagacacaatcttacggggaaaaacagggatctgaacaccccccttggacacgcgcaccaccaaccacgagcagctcgaatatctggccaccagtgtgacacgaaccaccaaggagccacatagtgacgaatttgacgactgacaccacgcacgccgggagagacgccacgcattcagccataatcgcccaataattttatgcagacaacgagtccgccggccacatagggctggcacagtaccggctattctttgctacgggcacattctggagggcatctcccaagaaaacccagacgagaggataccgaaccgcgattcatgtgcacctcgcagtggaacaataatgggacgcaacacatcatgttgggatatgacaatccacggagaacacgactctccgttaatcacccagagaggactcaacacaagacaaaagcaacacaatca

SEQ ID NO: 541075 - DNA, 1552 bp, Homo sapiens
gcaagccggagccctggggttgggcagcactcggttccgtgcaactttcaagtgagttgcgaactccgccctgtaggccggtgctggtggcccggcgcgctggaaccgcggcgacccgctccagcgcgggaccagcagcaagggccgagcgccaggttctccgcggcagaaagggcgggtgggagctgtaactgccccggccgcggggcgcgcccgctcccaagtcggcttcctccccgccggggccgctttgcctcgggtctccccattctccaggtcccctgaactgcacagtcggaggccgtgggcggcgggctctgcctccgccgagggacagccggatcgcccctctgcttcccgcaactgccctgatcaccccccgtcccagcccttgagtgaacgtccttctgagcggcttcctggggtcctccccacgtcccaaaggccggcaagatggtgtcctggatgatctgtcgcctggtggtgctggtgtttgggatgctgtgtccagcttatgcttcctataaggctgtgaagaccaagaacattcgtgaatatgtgcggtggatgatgtactggattgtttttgcactcttcatggcagcagagatcgttacagacatttttatctcctggttccctttctactatgagatcaagatggccttcgtgctgtggctgctctcaccctacaccaagggcgccagcctgctttaccgcaagtttgtccacccgtccctgtcccgccatgagaaggagatcgacgcgtacatcgtgcaggccaaggagcgcagctaccgagaccgtgctcagcttcgggaagcggggcctcaacattgccgcctccgctgctgtgcaggctgccaccaagagtcagggggcgctggccggcaggctgcggagcttctccatgcaggacctgcgctccatctctgacgcacctgcccctgcctaccatgaccccctctacctggaggaccaggtgtcccaccggaggccacccattgggtaccgggccgggggcctgcaggacagcgacaccgaggatgagtgttggtcagatactgaggcagtcccccgggcgccagcccggccccgagagaagcccctaatccgcagccagagcctgcgtgtggtcaagaggaagccaccggtgcgggagggcacctcgcgctccctgaaggttcggacgaggaaaaagactgtgccctcagacgtggacagctagggtctgctgcatctgcccccttcttacctcgtgccctgcagggctccagggctatttggagggaccttgggctgcacatctggcctgcctgcaccagctgcctgggccccaccctcctgactcctgctgatggttaagggccgggagcagatgctgccaaggccacatgcagggatgcacccacaatgtaccaaagcaggctgggcccagggttctatttattgccttgctctgccctctcccttccccggttgtgggacaagagccctccctgaacccctgcaaccctccctgaacccctgcaaatgaaaccaaacgtccacc

SEQ ID NO: 541076 - DNA, 84 bp, Homo sapiens
ccaaagcaatttgaaagcataatttttgtgccaagaataataactgggtgagaaataaaagcattaatttttcagtgtttccca

SEQ ID NO: 541077 - DNA, 899 bp, Homo sapiens
gcaagccggagccctggggttgggcagcactcggttccgtgcaactttcaagtgagttgcgaactccgccctgtaggccggtgctggtggcccggcgcgctggaaccgcggcgacccgctccagcgcgggaccagcagcaagggccgagcgccaggttctccgcggcagaaagggcgggtgggagctgtaactgccccggccgcggggcgcgcccgctcccaagtcggcttcctccccgccggggccgctttgcctcgggtctccccattctccaggtcccctgaactgcacagtcggaggccgtgggcggcgggctctgcctccgccgagggacagccggatcgcccctctgcttcccgcaactgccctgatcaccccccgtcccagcccttgagtgaacgtccttctgagcggcttcctggggtcctccccacgtcccaaaggccggcaagatggtgtcctggatgatctgtcgcctggtggtgctggtgtttgggatgctgtgtccagcttatgcttcctataaggctgtgaagaccaagaacattcgtgaatatgtgcggtggatgatgtactggattgtttttgcactcttcatggcagcagagatcgttacagacatttttatctcctgatcaagatggccttcgtgctgtggctgctctcaccctacaccaagggcgccagcctgctttaccgcaagtttgtccacccgtccctgtcccgccatgagaaggtaccccacggggaagcgggaacgggaggcttaggggtgggtatgagggaaagagccctggacctgggatttaggatgctggggacaccggggttctatcccagtcctgctgctattgaggggcaggaccttgacagggcccagcctacctcatcttctggg

SEQ ID NO: 541078 - DNA, 839 bp, Homo sapiens
atggcacatgcagcgcaagtaggtctacaagacgctacttcccctatcatagaagagcttatcacctttcatgatcacgccctcataatcatttccttatctgcattccgtaggcctgatatgccctttgccttaacactcacaaggaaaactaactaatactagacatctcagacgctcaggagatagaaaccggtctgaactatcctgcccgccgtcatcctagtcgctcatcgccctcccatcccgtaggcatccttttacatagcagatgaggtcaaatgaggccctcccttaccatcagttcatttggccaccaatggtgactgaaccctacgaggtacaccgactacggtcggacttaatcttgcgactcctacataattcccccattattcctagaaccagggcgatcggcgactccttgacgtctgactatcgagtagtactcccggattgaagacccgcatacgtataatagttacatcacaagacgtctgcactgcatgagctagtccgcacattaggcctaaaattcggatgcgattcccggacgtctaaatccaggaacaattgtcaccggctaacacgaacgggtggtatactaacggtcaatgcttctgagatctgtgggtgcataaccacagtttcattgcccatcgtcctaagaattcaattcggcctaagaaatcttgagagagagggcccgtatttaccctaatagaacccctgtgacccctttatgggcaaaaaaaaccaggatagaaaaagctgttgcggggcccgcccgcaaagttttaaccattttggggggggccagagattactgccgaagggca

SEQ ID NO: 541079 - DNA, 790 bp, Homo sapiens
  misc_feature (614)..(614): n is a, c, g, or t
gcaagccggagccctggggttgggcagcactcggttccgtgcaactttcaagtgagttgcgaactccgccctgtaggccggtgctggtggcccggcgcgctggaaccgcggcgacccgctccagcgcgggaccagcagcaagggccgagcgccaggttctccgcggcagaaagggcgggtgggagctgtaactgccccggccgcggggcgcgcccgctcccaagtcggcttcctccccgccggggccgctttgcctcgggtctccccattctccaggtcccctgaactgcacagtcggaggccgtgggcggcgggctctgcctccgccgagggacagccggatcgcccctctgcttcccgcaactgccctgatcaccccccgtcccagcccttgagtgaacccctccctgaacccctgcaaatgaaaccaaacgtccacctgggtgtgttcattccttcctgtccttcaaagtacttgatagcctttcataaggcctggcacatgtgtcctggttgtgtgtgtgtgtgttggtgagtgaggtcaggtttgcgagtgttttgataaataaatacataaaggggcaaaaaaaaaaaagggttcccgaggctcaacntcacatcaacacaaacaataaaaccaaagaggcgccgcacacagcatgtactcgtgaggggaccacaatagccgcccaccctcttcttacacgaggcccaccaaagagcacattaaccacacagtcgcctaaaaccccctcacagagaaagatcgtactatgagaaccactttcgg

SEQ ID NO: 541080 - DNA, 253 bp, Homo sapiens
  misc_feature (3)..(3): n is a, c, g, or t
ganccagtgtcgattggggtccctcgctcattgggggtggaatacgaggttatcaactgagttgtgtagtgtagatcccagtagtagctgcatccagaatatgctcgtccgatcaaggtgtctgatctgtagtggaagatccgaaagtccgccatagtcacaaacagtattacaggatcagagcgcatcatgagagtagccctctggtcgtccttcgttcccttcatttcagatttctacttgtcgccaagca

SEQ ID NO: 541081 - DNA, 1902 bp, Homo sapiens
  misc_feature (1726)..(1726): n is a, c, g, or t
gcaagccggagccctggggttgggcagcactcggttccgtgcaactttcaagtgagttgcgaactccgccctgtaggccggtgctggtggcccggcgcgctggaaccgcggcgacccgctccagcgcgggaccagcagcaagggccgagcgccaggttctccgcggcagaaagggcgggtgggagctgtaactgccccggccgcggggcgcgcccgctcccaagtcggcttcctccccgccggggccgctttgcctcgggtctccccattctccaggtcccctgaactgcacagtcggaggccgtgggcggcgggctctgcctccgccgagggacagccggatcgcccctctgcttcccgcaactgccctgatcaccccccgtcccagcccttgagtgaacgtccttctgagcggcttcctggggtcctccccacgtcccaaaggccggcaagatggtgtcctggatgatctgtcgcctggtggtgctggtgtttgggatgctgtgtccagcttatgcttcctataaggctgtgaagaccaagaacattcgtgaatatgtgcggtggatgatgtactggattgtttttgcactcttcatggcagcagagatcgttacagacatttttatctcctggttccctttctactatgagatcaagatggccttcgtgctgtggctgctctcaccctacaccaagggcgccagcctgctttaccgcaagtttgtccacccgtccctgtcccgccatgagaaggagatcgacgcgtacatcgtgcaggccaaggagcgcagctaccgagaccgtgctcagcttcgggaagcggggcctcaacattgccgcctccgctgctgtgcaggctgccaccaagagtcagggggcgctggccggcaggctgcggagcttctccatgcaggacctgcgctccatctctgacgcacctgcccctgcctaccatgaccccctctacctggaggaccaggtgtcccaccggaggccacccattgggtaccgggccgggggcctgcaggacagcgacaccgaggatgagtgttggtcagatactgaggcagtcccccgggcgccagcccggccccgagagaagcccctaatccgcagccagagcctgcgtgtggtcaagaggaagccaccggtgcgggagggcacctcgcgctccctgaaggttcggacgaggaaaaagactgtgccctcagacgtggacagctagggtctgctgcatctgcccccttcttacctcgtgccctgcagggctccagggctatttggagggaccttgggctgcacatctggcctgcctgcaccagctgcctgggccccaccctcctgactcctgctgatggttaagggccgggagcagatgctgccaaggccacatgcagggatgcacccacaatgtaccaaagcaggctgggcccagggttctatttattgccttgctctgccctctcccttccccggttgtgggacaagagccctccctgaacccctgcaaccctccctgaacccctgcaaatgaaaccaaacgtccacctgggtgtgttcattccttcctgtccttcaaagtacttgatagcctttcataaggcctggcacatgtgtcctggttgtgtgtgtgtgtgttggtgagtgaggtcaggtttgcgagtgttttgataaataaatacataaaggggcaaaaaaaaaaaagggttcccgaggctcaacntcacatcaacacaaacaataaaaccaaagaggcgccgcacacagcatgtactcgtgaggggaccacaatagccgcccaccctcttcttacacgaggcccaccaaagagcacattaaccacacagtcgcctaaaaccccctcacagagaaagatcgtactatgagaaccactttcgg

SEQ ID NO: 541082 - DNA, 139 bp, Homo sapiens
ctattgttgaaggcagtgggtactcaggtgaattcctgttaataaatgaatcatatgctagcagaatagaacatgaatggtacaggtgtaccatctgacattgaacttggagatagtttttcgacgctgaagggtaacc

SEQ ID NO: 541083 - DNA, 364 bp, Homo sapiens
cgggggacctcccctgggagatcaatcccctgtcctcctgctctttgctccatgagaaagatccacctacgacctcaggtcctcagaccaccagcccaagaaacatcacaccaatttcaaatccggaccccactggaaatcggactgtccaactcacctggcagccactcccagagcccctggaactctggcccaaggctctctgagtccttccccgatcttcttggctcagcggctgaagattgatactgcccgatcacctcggaagccccctagaccatcacggacgccgagctttgggtaactctcacagtggaagaagacaggaatgtcaggccgctgagcccaagctaagccatcatat

SEQ ID NO: 541084 - DNA, 1677 bp, Homo sapiens
gcaagccggagccctggggttgggcagcactcggttccgtgcaactttcaagtgagttgcgaactccgccctgtaggccggtgctggtggcccggcgcgctggaaccgcggcgacccgctccagcgcgggaccagcagcaagggccgagcgccaggttctccgcggcagaaagggcgggtgggagctgtaactgccccggccgcggggcgcgcccgctcccaagtcggcttcctccccgccggggccgctttgcctcgggtctccccattctccaggtcccctgaactgcacagtcggaggccgtgggcggcgggctctgcctccgccgagggacagccggatcgcccctctgcttcccgcaactgccctgatcaccccccgtcccagcccttgagtgaacgtccttctgagcggcttcctggggtcctccccacgtcccaaaggccggcaagatggtgtcctggatgatctgtcgcctggtggtgctggtgtttgggatgctgtgtccagcttatgcttcctataaggctgtgaagaccaagaacattcgtgaatatgtgcggtggatgatgtactggattgtttttgcactcttcatggcagcagagatcgttacagacatttttatctcctggttccctttctactatgagatcaagatggccttcgtgctgtggctgctctcaccctacaccaagggcgccagcctgctttaccgcaagtttgtccacccgtccctgtcccgccatgagaaggagatcgacgcgtacatcgtgcaggccaaggagcgcagctaccgagaccgtgctcagcttcgggaagcggggcctcaacattgccgcctccgctgctgtgcaggctgccaccaagagtcagggggcgctggccggcaggctgcggagcttctccatgcaggacctgcgctccatctctgacgcacctgcccctgcctaccatgaccccctctacctggaggaccaggtgtcccaccggaggccacccattgggtaccgggccgggggcctgcaggacagcgacaccgaggatgagtgttggtcagatactgaggcagtcccccgggcgccagcccggccccgagagaagcccctaatccgcagccagagcctgcgtgtggtcaagaggaagccaccggtgcgggagggcacctcgcgctccctgaaggttcggacgaggaaaaagactgtgccctcagacgtggacagctagggtctgctgcatctgcccccttcttacctcgtgccctgcagggctccagggctatttggagggaccttgggctgcacatctggcctgcctgcaccagctgcctgggccccaccctcctgactcctgctgatggttaagggccgggagcagatgctgccaaggccacatgtaccaaagcaggctgggcccagggttctatttattgccttgctctgccctctcccttccccggttgtgggacaagagccctccctgaacccctgcaaccctccctgaacccctgcaaatgaaaccaaacgtccacctgggtgtgttcattccttcctgtccttcaaagtacttgatagcctttcataaggcctggcacatgtgtcctggttgtgtgtgtgtgtgttggtgagtgaggtcaggtttgcgagtgttttgataaataaatacataaaggggca

SEQ ID NO: 541085 - DNA, 834 bp, Homo sapiens
accagggggggccccccacaacccctctcccccggggggaacacccccgcgctgtgtaagaaaagaacctgtccacacgcgcggggaaaaatatcccccccgcgagatagctctggaagcacaaacaccgcgggaaagacatacctgaggcacccctcctctcccacatacatagcccgcgcgcgccgaggtgatcatcagcaggggagaaatgcaacacgccactgtccgatacatgcgcgcttcgagagacagagagcagacggtgtctggagtagacatataccttcccaccccgcagcgcggagctccccccagcacggtcacagaattaagcagtacatccggcacacacgactacattgttggaaaggaagaaaacaccaaagagagagggtccccccacgacgcgcaggatcttctctccggcgtaattctcacacagaagtacagtgcctcggcgcacgctacacacacgccaccctatgcttggcaccggggccgcccacctcgcttcgcagcgcgcccacagaggggcacacccccacctggtgcggaaaggacaaaaaaatacggtggccacccaccttttccatcaacagaagaaatattggacacacacgcaaataatactcgccctcatcaaaatatctcttcccgtaacccccttctgtcttcattacagtacacacactgtgtcaagaatcaccctctgagataatcgtcaggcaagactcatccaccactaaattctgataatcgtcatacatacaaaggccgccctcttatctgacaccgccactaaaaacaatctctttccccccccacataaca

SEQ ID NO: 541086 - DNA, 446 bp, Homo sapiens
  misc_feature (48)..(48): n is a, c, g, or t
  misc_feature (61)..(61): n is a, c, g, or t
  misc_feature (65)..(65): n is a, c, g, or t
  misc_feature (67)..(67): n is a, c, g, or t
  misc_feature (85)..(85): n is a, c, g, or t
  misc_feature (100)..(100): n is a, c, g, or t
  misc_feature (110)..(110): n is a, c, g, or t
  misc_feature (122)..(122): n is a, c, g, or t
  misc_feature (130)..(131): n is a, c, g, or t
  misc_feature (147)..(147): n is a, c, g, or t
  misc_feature (164)..(164): n is a, c, g, or t
  misc_feature (166)..(166): n is a, c, g, or t
  misc_feature (187)..(187): n is a, c, g, or t
  misc_feature (193)..(193): n is a, c, g, or t
  misc_feature (201)..(201): n is a, c, g, or t
  misc_feature (216)..(216): n is a, c, g, or t
  misc_feature (258)..(258): n is a, c, g, or t
  misc_feature (268)..(268): n is a, c, g, or t
  misc_feature (306)..(306): n is a, c, g, or t
  misc_feature (343)..(343): n is a, c, g, or t
  misc_feature (347)..(347): n is a, c, g, or t
  misc_feature (362)..(362): n is a, c, g, or t
  misc_feature (386)..(386): n is a, c, g, or t
  misc_feature (433)..(433): n is a, c, g, or t
ctagctgctgagcctcgggctggaccacgctgctaaggcctagggtgnccggcgcctccancgcnanatctgccgcctctacgantacacaaagccaaanactaactgtngggtgtgcctgngactgctnncccatcgcacaaagcntcccccagctgctgggncntgccctggccatcagcctttnccagtngcgatgancatgagcaagctgtngccctcaatcaaacccaggacttcctgaacacaacctcaggnaggcctatgnaggttctaggcacaaccagctcaacctatctggctaanacagctagctaggtcgatctaacatgacgagggaggnagcnagcgggccagcaccnccgggcctggccaggagcccaggntggcaagaacggatagctgtgtggcgccatgagagcgagctctgctntcagtcgctagct

SEQ ID NO: 541087 - DNA, 1883 bp, Homo sapiens
  misc_feature (1707)..(1707): n is a, c, g, or t
gcaagccggagccctggggttgggcagcactcggttccgtgcaactttcaagtgagttgcgaactccgccctgtaggccggtgctggtggcccggcgcgctggaaccgcggcgacccgctccagcgcgggaccagcagcaagggccgagcgccaggttctccgcggcagaaagggcgggtgggagctgtaactgccccggccgcggggcgcgcccgctcccaagtcggcttcctccccgccggggccgctttgcctcgggtctccccattctccaggtcccctgaactgcacagtcggaggccgtgggcggcgggctctgcctccgccgagggacagccggatcgcccctctgcttcccgcaactgccctgatcaccccccgtcccagcccttgagtgaacgtccttctgagcggcttcctggggtcctccccacgtcccaaaggccggcaagatggtgtcctggatgatctgtcgcctggtggtgctggtgtttgggatgctgtgtccagcttatgcttcctataaggctgtgaagaccaagaacattcgtgaatatgtgcggtggatgatgtactggattgtttttgcactcttcatggcagcagagatcgttacagacatttttatctcctggttccctttctactatgagatcaagatggccttcgtgctgtggctgctctcaccctacaccaagggcgccagcctgctttaccgcaagtttgtccacccgtccctgtcccgccatgagaaggagatcgacgcgtacatcgtgcaggccaaggagcgcagctaccgagaccgtgctcagcttcgggaagcggggcctcaacattgccgcctccgctgctgtgcaggctgccaccaagagtcagggggcgctggccggcaggctgcggagcttctccatgcaggacctgcgctccatctctgacgcacctgcccctgcctaccatgaccccctctacctggaggaccaggtgtcccaccggaggccacccattgggtaccgggccgggggcctgcaggacagcgacaccgaggatgagtgttggtcagatactgaggcagtcccccgggcgccagcccggccccgagagaagcccctaatccgcagccagagcctgcgtgtggtcaagaggaagccaccggtgcgggagggcacctcgcgctccctgaaggttcggacgaggaaaaagactgtgccctcagacgtggacagctagggtctgctgcatctgcccccttcttacctcgtgccctgcagggctccagggctatttggagggaccttgggctgcacatctggcctgcctgcaccagctgcctgggccccaccctcctgactcctgctgatggttaagggccgggagcagatgctgccaaggccacatgtaccaaagcaggctgggcccagggttctatttattgccttgctctgccctctcccttccccggttgtgggacaagagccctccctgaacccctgcaaccctccctgaacccctgcaaatgaaaccaaacgtccacctgggtgtgttcattccttcctgtccttcaaagtacttgatagcctttcataaggcctggcacatgtgtcctggttgtgtgtgtgtgtgttggtgagtgaggtcaggtttgcgagtgttttgataaataaatacataaaggggcaaaaaaaaaaaagggttcccgaggctcaacntcacatcaacacaaacaataaaaccaaagaggcgccgcacacagcatgtactcgtgaggggaccacaatagccgcccaccctcttcttacacgaggcccaccaaagagcacattaaccacacagtcgcctaaaaccccctcacagagaaagatcgtactatgagaaccactttcgg

SEQ ID NO: 541088 - DNA, 1657 bp, Homo sapiens
gcaagccggagccctggggttgggcagcactcggttccgtgcaactttcaagtgagttgcgaactccgccctgtaggccggtgctggtggcccggcgcgctggaaccgcggcgacccgctccagcgcgggaccagcagcaagggccgagcgccaggttctccgcggcagaaagggcgggtgggagctgtaactgccccggccgcggggcgcgcccgctcccaagtcggcttcctccccgccggggccgctttgcctcgggtctccccattctccaggtcccctgaactgcacagtcggaggccgtgggcggcgggctctgcctccgccgagggacagccggatcgcccctctgcttcccgcaactgccctgatcaccccccgtcccagcccttgagtgaacgtccttctgagcggcttcctggggtcctccccacgtcccaaaggccggcaagatggtgtcctggatgatctgtcgcctggtggtgctggtgtttgggatgctgtgtccagcttatgcttcctataaggctgtgaagaccaagaacattcgtgaatatgtgcggtggatgatgtactggattgtttttgcactcttcatggcagcagagatcgttacagacatttttatctcctggttccctttctactatgagatcaagatggccttcgtgctgtggctgctctcaccctacaccaagggcgccagcctgctttaccgcaagtttgtccacccgtccctgtcccgccatgagaaggagatcgacgcgtacatcgtgcaggccaaggagcgcagctaccgagaccgtgctcagcttcgggaagcggggcctcaacattgccgcctccgctgctgtgcaggctgccaccaagagtcagggggcgctggccggcaggctgcggagcttctccatgcaggacctgcgctccatctctgacgcacctgcccctgcctaccatgaccccctctacctggaggaccaggtgtcccaccggaggccacccattgggtaccgggccgggggcctgcaggacagcgacaccgaggatgagtgttggtcagatactgaggcagtcccccgggcgccagcccggccccgagagaagcccctaatccgcagccagagcctgcgtgtggtcaagaggaagccaccggtgcgggagggcacctcgcgctccctgaaggttcggacgaggaaaaagactgtgccctcagacgtggacagctagggtctgctgcatctgcccccttcttacctcgtgccctgcagggctccagggctatttggagggaccttgggctgcacatctggcctgcctgcaccagctgcctgggccccaccctcctgactcctgctgatggttaagggccgggagcagatgctgccaaggccacatgtaccaaagcaggctgggcccagggttctatttattgccttgctctgccctctcccttccccggttgtgggacaagagccctccctgaacccctgcaaatgaaaccaaacgtccacctgggtgtgttcattccttcctgtccttcaaagtacttgatagcctttcataaggcctggcacatgtgtcctggttgtgtgtgtgtgtgttggtgagtgaggtcaggtttgcgagtgttttgataaataaatacataaaggggca

SEQ ID NO: 541089 - DNA, 1522 bp, Homo sapiens
gcaagccggagccctggggttgggcagcactcggttccgtgcaactttcaagtgagttgcgaactccgccctgtaggccggtgctggtggcccggcgcgctggaaccgcggcgacccgctccagcgcgggaccagcagcaagggccgagcgccaggttctccgcggcagaaagggcgggtgggagctgtaactgccccggccgcggggcgcgcccgctcccaagtcggcttcctccccgccggggccgctttgcctcgggtctccccattctccaggtcccctgaactgcacagtcggaggccgtgggcggcgggctctgcctccgccgagggacagccggatcgcccctctgcttcccgcaactgccctgatcaccccccgtcccagcccttgagtgaacgtccttctgagcggcttcctggggtcctccccacgtcccaaaggccggcaagatggtgtcctggatgatctgtcgcctggtggtgctggtgtttgggatgctgtgtccagcttatgcttcctataaggctgtgaagaccaagaacattcgtgaatatgtgcggtggatgatgtactggattgtttttgcactcttcatggcagcagagatcgttacagacatttttatctcctggttccctttctactatgagatcaagatggccttcgtgctgtggctgctctcaccctacaccaagggcgccagcctgctttaccgcaagtttgtccacccgtccctgtcccgccatgagaaggagatcgacgcgtacatcgtgcaggccaaggagcgcagctaccgagaccgtgctcagcttcgggaagcggggcctcaacattgccgcctccgctgctgtgcaggctgccaccaagagtcagggggcgctggccggcaggctgcggagcttctccatgcaggacctgcgctccatctctgacgcacctgcccctgcctaccatgaccccctctacctggaggaccaggtgtcccaccggaggccacccattgggcacctcgcgctccctgaaggttcggacgaggaaaaagactgtgccctcagacgtggacagctagggtctgctgcatctgcccccttcttacctcgtgccctgcagggctccagggctatttggagggaccttgggctgcacatctggcctgcctgcaccagctgcctgggccccaccctcctgactcctgctgatggttaagggccgggagcagatgctgccaaggccacatgtaccaaagcaggctgggcccagggttctatttattgccttgctctgccctctcccttccccggttgtgggacaagagccctccctgaacccctgcaaccctccctgaacccctgcaaatgaaaccaaacgtccacctgggtgtgttcattccttcctgtccttcaaagtacttgatagcctttcataaggcctggcacatgtgtcctggttgtgtgtgtgtgtgttggtgagtgaggtcaggtttgcgagtgttttgataaataaatacataaaggggca

SEQ ID NO: 541090 - DNA, 881 bp, Homo sapiens
atcacgagggccggctatactgtagagctacggacgcgagcgacaataaccgggatcggggagatgcctactatgatccacagactatcggcattcctatgaatatcagcgggagaacagcagttaccgcagccagcgcagcagccggaggaagcacagacggtcggaggaggcgcagaacgtgacattatacgccgactcatcttacgatgaaatcgttagcaccttaggagaggggaccttcggccgagttgtacaatgtgttgaccatcgcaggggatgcgcgggctcgagttagccctgaagatcattaaagaatgtggagaagtacaaggaatcatgctcgactatgagatcaagcgtgctagagaaatatcaatgagaatagaccctgacaagcaagaagcctctggtgtccagatgtttgactggtttgactaccatggccacatgtgtatcatccttattgagcttacctgggccttagcagccttaccgagtttcctcaaaagaccaagcaagcctacacctgaccgcatactcgccagtccaccaagatgcgccactagtggccttccagctgtgccaggctgtcaaggttcctccagtgataacaagctgacacataccagacctcaatggctgaaaagtattctgttatgtgaattgcacgactatgagctcacctacaacctagagaagaagcgagatgagcgcagtgtgaagagcaacaggtgtgcgggtggtagacttgggcagtgcccacttggaccatgagcagccatagcacccattgtctccgactcggcgattaccgagcaccagaagtcatccttggagttgggctgctcacaggctttgggcatgaggtggagtataag

SEQ ID NO: 541091 - DNA, 161 bp, Homo sapiens
agtaagctttttagggccctttgccaataggtagtcattcaatctggtattgatcttttcacaaataacagaactgagaaacttttatatatacctgatgatcacataaaacagatttgcataggatggccatgatgccgttatgttaatatttaacttgt

SEQ ID NO: 541092 - DNA, 313 bp, Homo sapiens
cggaacttcgggacccgcggtgttggtaccgggaatccagcgcgtcgacataccaagtattatagtggtatatctcagaagtggccccagtgtaattatgggtatctgtcatggatcacaatattatcatagtaagtcttgtgatacaaagtctgttccacttcccaagtaagcctacatatatctccaagtaggagtatgtccttcagggaacaaagaaaacggatcttcttttgagctgtaagagcacaccagtcaagaatgtatcggcaaaatttagtaatactgttcatactgaacttgaatcttacga

SEQ ID NO: 541093 - DNA, 1085 bp, Homo sapiens
gcaagccggagccctggggttgggcagcactcggttccgtgcaactttcaagtgagttgcgaactccgccctgtaggccggtgctggtggcccggcgcgctggaaccgcggcgacccgctccagcgcgggaccagcagcaagggccgagcgccaggttctccgcggcagaaagggcgggtgggagctgtaactgccccggccgcggggcgcgcccgctcccaagtcggcttcctccccgccggggccgctttgcctcgggtctccccattctccaggtcccctgaactgcacagtcggaggccgtgggcggcgggctctgcctccgccgagggacagccggatcgcccctctgcttcccgcaactgccctgatcaccccccgtcccagcccttgagtgaacgtccttctgagcggcttcctggggtcctccccacgtcccaaaggccggcaagatggtgtcctggatgatctgtcgcctggtggtgctggtgtttgggatgctgtgtccagcttatgcttcctataaggctgtgaagaccaagaacattcgtgaatatgtgcggtggatgatgtactggattgtttttgcactcttcatggcagcagagatcgttacagacatttttatctcctggttccctttctactatgagatcaagatggccttcgtgctgtggctgctctcaccctacaccaagggcgccaggcaccagctgcctgggccccaccctcctgactcctgctgatggttaagggccgggagcagatgctgccaaggccacatgcagggatgcacccacaatgtaccaaagcaggctgggcccagggttctatttattgccttgctctgccctctcccttccccggttgtgggacaagagccctccctgaacccctgcaaccctccctgaacccctgcaaatgaaaccaaacgtccacctgggtgtgttcattccttcctgtccttcaaagtacttgatagcctttcataaggcctggcacatgtgtcctggttgtgtgtgtgtgtgttggtgagtgaggtcaggtttgcgagtgttttgataaataaatacataaaggggca

SEQ ID NO: 541094 - DNA, 1407 bp, Homo sapiens
  misc_feature (1229)..(1229): n is a, c, g, or t
caaaaaaaaaaaaaaaaaaaagtaaaaattccctttggatgctcaagtttttttttatttccttacttttaaacaattttttttttctttaatttataagaaattggtgtctccgtgggccattgggtggctcacgcccgtgttaatctcagcacttggggaaggctgaggcgggaaggatgtgctggaaggccaaaagtttggacttagccccggcccaaccattaacaagaacccgtgttcttcttatttctctttttaaaattatttaaaattaggcgtgggtgccaggtgattctcagtgcccgtgttaatctcccagccactttgtgggaaggcccacggggggcaaagacactccactctgtgagaggtctcgaggagagtttgtgaagacaccagagcgcgtggcttaacacgtgtggtgtgaaacaccccgtgttctctctttacttaaaaaaatataccaaaaagtttaaccataaggccgtgtgggtggccatatacaccctgtgccatatccccccagctttaacctccgaggagaggctctgaagcgcccgagggaagaatataagctctggtgcacatctgtgggtgtgtggccggagaaggtttgtgacgagtgtgaaatccccagagaatcctccaccccaatgtggccacgtggacaacgccctggggggccacacaacaagaatgtgcgcaggaactctccgggtgcttcccaaagaacacaaacacacacacacacaacacagacacacaccaacaccacaacaaccaacaagaggagggcgcgcggcgcgcgcgctcccaccaaaaaaagaataaccaccaccaccagagaggggcggccccccaacaccgacaacaacgcgcagtggtagcaccccccaggaccttgacagtcatgtcgtacccacaccgacggggggggccccccccaacaaaaatgagaagcgaagccactcaccacatttaaaacaaaaggtccaagcacaccacacgaggccgccgtcgcggcttataccaccaaccacgctgctcgtcgcagcatcagtgcgatacacaacaacggcgacaaccacgtggggaagaacacaccactagatagaacgaaagacacagcccccccataccaacctgacgaggggaggagcacgcacaacacaaagtggcgcgagccaaacaccaccctcctctcgacgacagacgaactgatacancagccctccagaggggagaacacatatcacccaccgctgtcaacgaggcgagcgaaactaaacgcgggggaatctaacaccacacacgcgacgacatcatgtcattcagtgatgcaggaagaagaaaaaatgtgtcgccaccgcacaggaactataagcacgagaacaaaatattaag

SEQ ID NO: 541095 - DNA, 714 bp, Homo sapiens
ggatattggctgtcttgagtaggacttatgagtaggtgggccatcgactcctatgatgatcgaggatgagggataagaattaagcatgctgcctggatgcctattcactatgtttatgtgctatatcctttctgtaataaatcagtttccttgtcacggtttctgttccctctgagtgcttgatgcttctgctgccttccccttcatgctgtctgctgctctgtttgctgttcatgtcccttatcccttccatcgttgaaggtgagactttcattatggggttcttgccaggcccatgttgtagcataaccccagggaatctttttaattgaagtcctagggtttactctagtatagggaggttatgatggtacctatctatctcaggcacatatctgtgtgataggatagtgttcttctagtctcctttgttcaaggttaggtagtattaaatccagttggtttctgtctttgaaagttagactgctaccctgttcttcctgctgcctctacatttaccaactctggaagcaaggcttggcccaggctcctctgtgcattaggagggtttgggagtggggctgggctggcccagagttcctgggcatggagccacgtcataagcttgggggatgggagggtacacaggcgatctcctagagtgtgtgtgccactgcacctctgagcagtactgcctaggtcctgtctgctgct

SEQ ID NO: 541096 - DNA, 695 bp, Homo sapiens
ggaggccgcgcgcacagagcgagctcttgcagtctccccgctccccacaatgaaatcaagttattttctcattcccaaataataacatcaactactatgcctaaaaaggaataatactatcagatgataccattaatagctactctcataaccctcaaaaaaccaatccactcttagaccaagtattgtgcctagttgccatactagtctttgccgcctgcgaagcagcggtgggcctagcacctacttagtctcaatctccaaggacagtatggccctagaactacgttagcataaccgtaggagcctactccaattgctaaaactaatcagttggccgagagcgaattatagttactaccgagtgacatgacttgtgccagatagaaacagagtaatttggaattcagtcacaaacaccgcagagcctaattattacgcatcatcccccttactattcttttgtaaccaaaattcaacaacacacctatttagcctgttgccacaagcctttttcactccgaaccccacttaagaaagcgcgccttccgtgattagctaagctaccctgggcgttcctaaccccgtcgaaggaattcaatgtggaggaccaaggtcaactttcattccaggtggaaaccactattcaaggagacaagaaattataagccgtcctgctaatacgaattctagct

SEQ ID NO: 541097 - DNA, 350 bp, Homo sapiens
actacatacttccggacttttcctcatttacctacttccatatttccataaaccaaaataaatttgtttgggggttttaaaattttttcttcgcataacgggaatcatcttgcaactggattctttcactccatgatatgccttaaatttctttccttcccagacctgaaagggtcaccccatccatttaaactcctgcataatccatagtatggatccatcatggttaattaaataatccccccatggatgaatgttaaaataatgctaagttttcttgttacatgcattgctgcaatgaaatccctgtacatgcttctttgtgaacatgtgcaagtattcctgtagca

SEQ ID NO: 541098 - DNA, 1808 bp, Homo sapiens
  misc_feature (380)..(380): n is a, c, g, or t
  misc_feature (384)..(384): n is a, c, g, or t
  misc_feature (562)..(562): n is a, c, g, or t
ggacgttgcatttccttctatgtaggcagaaatggtatcagaatgtacgccgatctccattgctcccagaagtgcgtcgctctctagtagcaagtcaccttcatttacgcatttggttcattctgtagtcggtaagatgtcgtgcagcgtaattctgagcccaagaacatacactctgtgaaaactctgtggacgtggagggtggattgcatgcactgtgcggatacaggggccttcccctgtacaataaggtcagtggggcacatggggagatcttattgaggatttgagacaactcgaatataggccatggcatggcggttagaagaacagttgagcttcatttctatctcaatttagagaatgagcttgctcacgtnttgnattgggcatatactctatggcaagaagcacgaggccaagaacgattaccatgattcgattgggaggtcttatttcaattcatagcaattgtctcttcccagtggggtatcgaccatgcaaggaaaacatatctgtagttcgtagagagagatcctaataggtagtatgaaacgacgcngttaaacaatttcgatgcaacgaggctttggtaggggtgggttggtcctcggtttccccctcggtaatacagatcgtgtgtttgtctttgcgttcgctaatgtgtttcgacatattcgtgccaccgcactcgcgaatcaatttcttttacacaaatgtacatatggtgggagggcagtgttattacacgcatgtaatgtacacctcgtggccgaaatgttgggacactatgagtcgagtcgcggcttgggaagagagggatggttcggaaatttacgaaaaaacagttaattatttattgttttcggggggcacgaattttatagccctaccaccaccattggtggtatctcgtcgccaaaaccttggtaatgtcctccaatctcaccacattattctatggcgccccacggcaacaatgtattgaaataaattggcactgcgggtcacaccaggtatagggatgtgtcacccccgaggcacaaagggctttcaaagtggggagaccattatgacgcgcactttctcaacacctgtggcgtccacatacattaacaggggggggtgggatacaatatggcgcacaagcaagaaaacggattgtgatttattaggggacgagtttagaagggttggggcggagaaaaagtttgaaacagtgggagagcaaaaagagatagagatttgaggggctgtaatctgaaagaccaacacatatgttcgttgggagaagaaggtctctagagggcgagtgggcctcacaacttataatttgtggaacattgctgtgtgggttttggaacaatttgtgtggaaacttatgggcgacacatacacaaggttccacaagtcgggccgagacagaacaccgctgtggaccatggaggggaagagaagtcgccctacacgagtagaagaggagggccccaaagaggcgcttttcgccaccaataggccagagggaaaagattctcgtacgcaagagcagcggccgagaaaacaattaaaacccacacgcgggagaattttgcggacaacacaccacaatatcggagaacaggagatgtgttcgacccccaagaacaacgacgccgcggagggacccagctcattcacaagagggggaggcatcatattgaccaagcactctacgggagagagagcgacaatatggcgcgaagagacaggcggaagcaactcactatatgaggacgctcactttgtgcgatgtcaacaactcggacgca

SEQ ID NO: 541099 - DNA, 311 bp, Homo sapiens
gcacattatgctagtaaaataagccaggtacaaaatataaatactctatgattccactcacataaagtatctaaagtagtcaaaatcatagaaagtagaaaggtggttgccaagagctggtggaagagagagaggaaattaacgctcaatgggtatagagtttcagttttgcaagatgaaaaagttctagagatctgctatacaacaacatgaatatatttaacactattgaactatatgcttaaaaattgttaggatgataaatgtaatgtttttttcaactacaacaaataaatagggcaaaataatta

SEQ ID NO: 541100 - DNA, 365 bp, Homo sapiens
  misc_feature (38)..(38): n is a, c, g, or t
  misc_feature (100)..(100): n is a, c, g, or t
  misc_feature (185)..(185): n is a, c, g, or t
tttgttttcaggtggggcccccccgttttgtttccctngaatccaagtcaggaaaaccggggggttcctgccctccccccccccctcaagaccatccccngggttgccgggttgccccctgccattttgcaatcagccctgggggcctgtgaagcctggcccccctgcctgccgggggttcttgnagcccccccctattccagggtccccatttccctgaagcttccaggggagcagctggggggaccctgatttgtgagctttggaaagtttgcttaaaattttgaaaggcaggaactgctctgtttttgtaactactcaaggccccctgtcccatgaaggaatgaataaaaagttttttctga

SEQ ID NO: 541101 - DNA, 264 bp, Homo sapiens
aaaaaaaaaaaaagtgggtttcacaagtgtcagggtggagtgattcccagtgggatggttgtggccttagtttaagctgaataaataatttccatttggggcagttattttgctttttgtaaaaccgtggcccattgtctcctgtaatgactgttggttcaggcatgttgtactttgtaggggccaatgtgcctttgtttgtggccaaagcctcccattgaccaacttgttaatttttttgtatattaactagctgtaacctta

SEQ ID NO: 541102 - DNA, 735 bp, Homo sapiens
cttagggaacaagcattaaactgacactcgattctgtagccggctctgccaagagacagtggcgtcggggtgatatgagggcaggggtcatggaacgaaagccttctggttttagacccacaggaagatctgtgactgcgctcttcggtcagagcacacgttgctgggcgtgcgcttgaaaagagcctaagaagagggggctgtctggaatggaaccgcaacgccataggtgagggctgtccatgccttcccgcttcaacacctggagcacattctggaaagtttcctagagaaagccagaaacaatacttttatagataaatccagaggccagacgggctaatggggctttactgcgactatctggcttaatcctccatacaaccttgccataccagcccatcagtcctctgagacaggcaagcccaagaaagtcaggggcctatgtgagccaaagaggagagaaggtgatgcctcagcccagtgttctctgcacccgacctcgcttgtggccttcggaacttgatttgcaccgcaggaaaatgggcaatgaaaagccctccctaactggcttctcagttccactctgaccatgcccactgcacagcagccaccctgcagctcccagatgaggcctcactctgtcaacccaggttggggtggagtggcacagtcaacaagtcactataaacctcaagctcctggggctcaagtgatcctgccacctcagctcct

SEQ ID NO: 541103 - DNA, 198 bp, Homo sapiens
  misc_feature (118)..(118): n is a, c, g, or t
tactatctcgctggcgcccgctgatggcggcgccgctatgcactcctcggcctcttcctacttccggcgtctacgtcgccggctccgttcccacccggtccctctcgaccctactcgntacgatgcgccacttcacgcgctgactactcgctcgcgcgcagatctgtcctgctgctccttgcacatggctccctctct

SEQ ID NO: 541104 - DNA, 993 bp, Homo sapiens
tgagcgtggactattctactatacctcacaaagaccttggaacactatacctattattcggggcatgagcggtacgcctcctagggacatgcgtctaatcctcctttattcgggccgagctgggccagcctggcgaccgtctagagtagcgaccacagtctatcatatcgtgatcgtcacatgcccatgtcggttgtgttgtcaatcttcttcatagttaatcacccagtcattatcggggagtgcttatggtaactgtaactagtttcccctatagtaattcggtgctccccgcataaatgtgcgtatcgcctcgcataatatcgaagcagtaagcgttctgcatcgtcttatctcccatcgtactcctattctctgactcggcatctgttgataagtggaggccggagcaggaacaggttgaacagtctaccctcccttagcagggaactactcccaccctggagcctccgtagacctaaccatcttctccttacacctagcaggtgtctcctctatcttaggggccatcaatttcatcacaaacaattatcaatataaaaccccctgccataacccaataccaaacgcccctcttcgtctgatccgtcctaatcacagcagtcctacttctcctatctctcccagtcctagctgctggcatcaccatactactaacagaccgcaactcaacaccacttcttcgacccgcgaggaggagacccattctataccaacactattctgatttttcggtccccttgagtttattcttatctaccaggcttcggaataatctcccatatttgtgacttactatctcggaaaaaagaaccttgggtctacggtggctggcataatcaagggtccaaggatcgggagcccaatttagggtaacgtgacccggttttccgcgcaaatctccccggaatttggcccccgacaaaaatggggccacaatttcgcggggcggacacacacaacactccacag

SEQ ID NO: 541105 - DNA, 167 bp, Homo sapiens
tctgacggatcccggcagctatccggttcaatgagttgttgaaagtctgctgggtgcagtaagtacagaatacagaacatcaatgtttaatagttaatacggtaggcacagagacccagtcagtctacctgggttgctttactggacggctgatgaactaggtacta

SEQ ID NO: 541106 - DNA, 117 bp, Homo sapiens
aattagacatgcatcctaaaagtcacttatgtcattatgtattagttctatagcagctaattgaggtgtattcacatatgcacaagtcacctttacagtgtacaagtggtaaactaa

SEQ ID NO: 541107 - DNA, 675 bp, Homo sapiens
ggggaaggatggcaatgccaggggaactacgctgcttgaggttctggactgcatcttaccaccaactggtccaactgacaggcccttgcgcctgcctttccaggatgtttacaaaatggggggaattggaactgttcctgttggccgagtggagactggggttttaaaacccggtatgggggtaacctttgttccagtcaacgttacaacggaggtaaaatctgtcgaaatgcaccatgaagctttgagtgaagcttttcctggggacaatggggccttaaatgtcaagaatgtgtttgtcaaggatgttcgtcgtggcaacgttgttgttgacagcaaaaatgacccaccaatggaagcagttggcttaactgttaaggggattatcctgaaccatccaggccaaataggcgccggttatgcccctgtatggaattgccacacggttaacatggcttgcaggtttgttgagctgaaggaaaggattgatcgccgttttgttagttgaaagatggccctaatattttgaagcctgttgaggttgccattgttgaaatggttcttgtcaggcccatgtgtgttgggggtttttaagattatcaaccttggggtcgttttgttgttcgcggattgagcacggaaggttccgctgggtgttatcggcatggtccaggt

SEQ ID NO: 541108 - DNA, 429 bp, Homo sapiens
cggagtttctccatgttggccagactggtctcgaactcctgacctcaggtgatctgaccgccttggcctccgaaagtgctgagattacagttgcgagccactgtgcgtggccagaactttttaataagagacttgaagctgggtgtgacggtgcacgcctctagtcccagctactcgggaggccaagacggaaggatcaccttgaggccaggagtttaaggccagcctgggcaacatagcaaaacctagtccctagaattaaaaaaaaaaaaaaaaaaaaaggaaaataaaggagacttgaaatttttgaactaaatagtggtgatggctacacattgtgaatgtaattaacaccactgagttaaacacttaaaatggttaaaatggcaaattgtatgttatacctattttactacaataaaaagtata

SEQ ID NO: 541109 - DNA, 353 bp, Homo sapiens
tggaatgtttatggtggttcagaagaatgatgactcctctttgctgagaactgttcatccttcttcaagaagaagcttgccaggccgggcacggtggctcacgcctataatcccagcactttgggaggccgaggcaggcggatcacaaggtcaggaattcgagaccagcctgaccaacatggtgaaaccccatctctactaaaaatacaacaattagccaggcatggtggtgcatgcctgtaatcccagctactcagaggctgaggcaggagaattgcttgaacctgggaggcagagggtgcagtgagccgagatcgtgccattgcactccagcctgggcgacattctgtctc

SEQ ID NO: 541110 - DNA, 137 bp, Homo sapiens
ttgcatggacggcgcaaaagtgcacgcaccctgctatatgcttacgtacacaaacaataacaagctttgtacaaaacaataacataataagacgaatcgactcactgcatatcaataaacaacacgcgtcggacgcg

SEQ ID NO: 541111 - DNA, 143 bp, Homo sapiens
tgggtgattacaggatctatcctaacaggtgtggcttaactggtgtggatggtatgcattgagggtcgagagaggactgacagtggtctaacttaaatggtaataactcactgaattaaattgtgagtgattttgcagctgaa

SEQ ID NO: 541112 - DNA, 160 bp, Homo sapiens
gatagggagatccacgaaacttacttcttgacagactgtcaactgacgcaatccaaatcgtatggtattgtatcttagttccaggaagtccccatacgataaaacaggaagacttcttctctgctcctccatttgtttctatgtcctcttcatcatcgaa

SEQ ID NO: 541113 - DNA, 443 bp, Homo sapiens
tggatgaattccccctaaaaaaaaaaaggtgttgatttgttgttgccccccccttattaattcattaaatttctgggtttgggttgtgcccccgggtgcctttacttaaaagattccctaaagccgcccattgccctggggaccctggcccccaaaaacttttttttttatatcaagggtgttccggctttccctttttttttttagccgtaaaaacctgttggggtgtgtaaatggggcctttccctattggaaagggccttttggccctctgcatttataaatgtgtggggccccccgtttgtgtctttttccggggtggtcccccagagcccacccccccttttgaaatgggcttttacaaaacaagaaagaaacctcctttactgtgtgaagaaatggaacccgctttttataaaattgccaccctttttttcccccca

SEQ ID NO: 541114 - DNA, 144 bp, Homo sapiens
gacacacaatctctagacgccctcggcttactgatcttccttctctccttaatgacattaacactattctcaccagacctcataggcgacccagacaattataccctagccaaccccttaaacacccctccccagatcaagccc

SEQ ID NO: 541115 - DNA, 150 bp, Homo sapiens
ttagaggatcctggacgcaatggggaacggatccacgggctcctggaggctggccggccagcttggtatctgaaggcaacatccacgcggacaagatccgggaaaaggcagattccatggagaggaggcacaagaagaatcaagacgcag

SEQ ID NO: 541116 - DNA, 1223 bp, Homo sapiens
ttgcgcttcccaagtgaggcaatgcctcgccctgcttgggctcgcgcatggtgcgctcacccactgacctgcacccactgtctggcactccctagtgagatgaacccggtacctcagatggaaatgctgaaatcacccgtcttcttcgttgctcacgctgggagctgtagacaggagctgttcatattcggccatcttggctcctccccgcacaatagatggagtctcactagattgcccatgctgattttgaactcctggactccagtgatcctcctgccttggcttcccaaagtgcttggattggagacatgaaccactgcacctggactttcagacctttaaatgtattatactctcagttaatcttttgtagataggacgagggagagccccagagaaagcctggcagcatcaatgaacgatttcgtacaaatgcaaatctcccctccaaagacagctttgcagggctacctctgtttgcagacttgctgaacagccacctcaaaatatgtcacggaagtatatttggggatgaaatactttgatttccctcactcttcaatgcaacatcggactttcctatccagagcaattaggccaaaaaacaaacaaaaaaggtacttaactcacaaagaagtacacattggctcctaattttgccgatgacatgatcttacgtatagaaaaccctaaaagacttcgtaaaaattttccgtgggaacctaataaacataattccggtaaagctttcagcaatacaaccatttagcattaccatacttttcacctttgccgaccacccattaaccatggactatgcactgtgcacattgcgggacacacattcccctttacactaggcacgcaaagtaatttaatacctagaaatatagcgttcactacaggagagacaaactccggcgttttaccccaaatcctcacaagtccctttgttgggtaccgcacttttcacacagcaagcccagccacacgtggtgaaaacggccctccgtggggtgctcacgtgctggttgaccacgctcatcattgtgttcgcacccgtgtgccaaatctgttatcgccaacccgcctgcgttcacttgcgggccctcatcgaaatcattgtccggtttattttcctacatactgacacaaccaacatacattctgtccccccaacagcacaatcacccccttgtcgggcgacacaatgccatccc

SEQ ID NO: 541117 - DNA, 446 bp, Homo sapiens
gggtttatcgatgcatcaaaggctcaactctacggggaagggaatgatgcccaagatctggttgcctctcagacccgaacttcgtcttgagtctccagacgctgcttgcgtggaaatctccacctgacgagtcatgcgtggtacctcaaaccttcatgcgagcactttattaccctaaggcaggcatacctatacattataactataatgtatagttattattggtatactgtctcattagactgcaagttctatgaaggcagtgactttattatttatacctatggtcaagcagtgccctgctcctaataggtggttaataatttattgtttgttttgggatacggagtctggctcggtcacccagatgggagagcagaggcatgatctcagctcacggcaacctcggcctccggggttcaagggattctggtgcctcagagacc

SEQ ID NO: 541118 - DNA, 136 bp, Homo sapiens
ctctgaggactcccctcctcccccaatatatttcttctcctccgtcggcttcagtgcctgaccacggcttcgtgcctgatcaggcttcagtgcctgcccaggcttcagatgcctgaccaggcttcagtgcctgacc

SEQ ID NO: 541119 - DNA, 531 bp, Homo sapiens
tcgacctgcctgtagtcccagctacttaggaagctgaggcaggaggatgccaccatgcctggctgattgttattttttgtagagatggggtctcactgtgttgcccaggctggtctcaaattcccaggctcaagcgatcctcctgcctcagctcccaaggtgctgggattatgggcatgcaccaccgtgcccagttcagactgagttttcggagccaaatgtgaccagaaactcaagacatctgctccacagtcatcaagggacaaagcaggagctttgacggaagtaccaagtatccagacccagccgaggctaccccacaagccagtgccccaccaaggagccacagcttctcctggacccacgctggccttcagctgctgccacgagcccccgggccctacactgttgtggcgtccccacctcagtgccttggaacccaggcctgggctcctagcctgtgggcactaggcaggccctgaccattttcttcttttctttcttttttatttagagacagggaaaaaaaaa

SEQ ID NO: 541120 - DNA, 1599 bp, Homo sapiens
  misc_feature (1599)..(1599): n is a, c, g, or t
gcctacagaaaaaggaaaaaaggccacaaaagttcccatctccactttcagctaaacaataaataaacacagctagcagccaacacaacataacaatgaaataacaagaaaccacaatgcaacataaatattgtagttgtgcagccattaacaacaaaatcaacaatcaacaacattccaactgctgagccacaacaacagagacaacaagaagaaacaaaaacagagaaaacacacaacaacaaacaagacaaaaacaacacacaacaaagaacaacaacaaacacaacaacaaacgaacacaacaacgaacagaacaaacaaacacaacaaacgaaagagaaaccaacacaaagaagaagacgacaacaacgagaagagcacagaagagagagaccaagagagagagccggagggcgggcacggaggagagagagagagagaggacgaagggaggcggggagggaggcaggcgggggggaaacaaagcccgactcaccgaaggaagcgtgcagggtgacgagagggaggcaggggggtgcccgcagacgcgcggcgaaaaagagacagaagagaggagaggcaatcaaaggacggcagagcggagagagagggaggggcaaacagacatgaagcagagatgagagagagcgaggcgaagagcagagacaggtacagggaggaaccacgacaaggagtagaaagggatagcagacagccggacgaaaagaagaaagagacaagagagaaaagagaagagaatagaggacagaagacatggcaggaaggaaaagggaaagaagaggagcgaagggaccggacggcagaagagacagagtaacaggcaagaatgaggcgcgaggcagaggaagaaggaagagaagaagacagacgaagagaagaggcgagaaggcagggacaggaaggcggaggagacgagagcgacgcgggcgactgagaaggggggagagaacaagtcgacgagagggaggaaggaagggagagagcgaggaggtgtggagagctgcgaggacgcagagggcgtggaggagaggaaaagagcgcaaggtggcgtagaagaagggaaggagcgagagtccggagcacgatagacgaggcagaagagtgagggaaggggaaaggaagaggcgggatggaggagatatagccagacgtggaaagcagcgagggagatagcaggaagaaggcaaggggagcaaagaatagatagtcaaagtatgaacaaagcgatgagaaggaggtgacaacgaaactagaggactcacaacaacggaccgatagacaacaactaggacaagagagtggagcagagacaatgcatgagcagagacgaagatcagcgtgaaacgaagagggacgtagggaagagtacgaaacggttcgaagagagagagaaggacgaaggaagagacaggaagtaagagaacagagaagaggcagagaagaggaggagaacgaggagcgaaggagcgggaagaccggacagagcgaggagagagcagctaggagagaatgtacacagcgcatgggatagactagcagcaactaggagagagatgcctatgagcgtagagtaan

SEQ ID NO: 541121 - DNA, 416 bp, Homo sapiens
tatcagtcagagaaaaactgcagtgggacttgaagccctgatgtgctgttcggtcagacttttttttttcctgaattttaaagacagagtttctctattgtaggaaaacatatcttagttattttttattttaaatacattcctctggaggaagaacaaaaagcaaagcaaagaaaaacaaaacatagctttttctatgttgttttatacttaatatctaaagctcttcatgaaagcaagaaattttgaccttaagactattcctgaatatatgtattcttgaatataatatcatatatattacacatatctgttatgaaagcccaaataaactgcacatctatatctattcatactgccacttgaatgaaagcacattcaaggtaaaatgtttctttgaataaaaaagcttggca

SEQ ID NO: 541122 - DNA, 1124 bp, Homo sapiens
gcctgtgaacgaggtgccttccaccgtgattgttaagtttcctgatggccttcccagccatgtggaactgtgagtctgaaaattaaacctcttttataattaaacaaagaaagaagatgacaggcacatcaaaagaaacgtcggacggtgtcactaattgtacgggcgtcggtaaaagacggtgaggacacattcggcccatgtggacttatccggtgttccgtgtaaccagacgtttggctggtggatacaccggtgggtaacaattgagcggtcctccccgtactaaaggatgtcgtgtataattgttgcaatagagcgccgtgggtataaaccgtgtgatttagaaggatgttctgggaaacaatacgaacaagaggcggccacaatcttcaaagcagacgcaggcaacgagaggaggaaaagcctcattaccatcagatcaagggtccacctgccagagaacgggaaggacaccgagacaccacaaaaaagtaagagacatccccagggagccaacaaaacagaggtgtagaagctatgacacagacaccgggacattaggtgagcaaagaaggattcctagaacgtcgggagcacgagagaacacaaagggaatacattcatagcaaaggtcatctcttataattgttacaagagataagaatatgagaacagggaaccaagaagaagcaacaatattgacagaataccaagggacagataaacaacgccaaaaacacacagaaagacacaaaacacagggaacaggcgacacaacaatataagacagcgaacggggagcagggaagccaagaggacgaagagctacgaagactacactccccacttgacgccagtcacgagaagttggaaggactaagtgcaattagaacgactagagaaacaccgagcaccgaagaagaaacaccccaaccatgaagaaaacagaagcgaaaagggagcaccctgatcaagacgcgacggacgaggacggcacatacaggggacgaccgcaagaaggaagagcgacccaggagtaaccaggagacgaacataagagcgaagcataggggaaagaaacaaaggtgcgagaaagaaagcacaaaagacagaagcacgag

SEQ ID NO: 541123 - DNA, 199 bp, Homo sapiens
ccgctctgtgagatgcgaccagatctgcctcttctttgaggtgtactagagtgagatcttccacgtctaactaagcttctactgcgggatcttcctcgtcttggtgtcctagaccgaggactccctctggtggatggtgtgctggaccgtgagcgaccactgcatctaactggggtactagagcgtgagcggccacgtc

SEQ ID NO: 541124 - DNA, 235 bp, Homo sapiens
ctttacaagcatcctgcagcttgttagctccagcatacgcaaatgatgtgcttgactcactgggtattagtcctgacctgctatcctgaggactttgtcaggtacctgcttctccgatagatggccccagatgtgtgccggtgtgttggacgggacttattggcacatggaatattgtgaatggcccgtgtctcaagcgggacccttccttcacaagctaacttcgttcgttcat

SEQ ID NO: 541125 - DNA, 303 bp, Homo sapiens
gggagggggggccggaaaggagcattaatggagcaaaatggcggatcatgtgcagagcctggcccaactaaagaatttgtgccaacagctgtatgaaaccccagaccctcatcaattagggtttatttttttttttttcctctacccccagaaacaagcctgttaattttttttccttttcctctggcgactgtgtgatgaatcctttcttgggtgatcaggttgcggataaacttgtaagggtgttttctgcatacagtgtaagcattgtggccgccaataaacttcaatggttttttctta

SEQ ID NO: 541126 - DNA, 496 bp, Homo sapiens
cggtgttcctttgtcttagacttgtgttcacttgacctagaactcttctgcttacacagattaagtaagattcagtcagactggtgcggtggctcatgtaatccctgcactttgggaggctgcggcgggtggctcacctgaggtcaggagttcgagaccagcctggccaacatggtgaaaccgtgtctctaataaaaatacaaaaaaattagccgggcatggtgacccatgcctgtaatcccagttactcaggaggctgaggcaagagaatcacttgaacccaggagaagtgaggttgcagtgagccgagaccgcaccattgcacttcagcctgggcaacaagaaccaaactccgtctcaaaaacacacaacattcggggcagccatctccttccacaccccatggggagaggaatagggcttggtcagtctgctgctatcactgtcacacaccagcgtggtgcaggctgctgctgatggctgtccagtactgaag

SEQ ID NO: 541127 - DNA, 112 bp, Homo sapiens
accagatgcaagggtcacacgaacagtcctcagtcatttgagcatattgctcgatctggcaaaagatcacgccatatccctttcttgagcctcgtatgcccgtgggggtcag

SEQ ID NO: 541128 - DNA, 882 bp, Homo sapiens
  misc_feature (59)..(59): n is a, c, g, or t
  misc_feature (519)..(519): n is a, c, g, or t
  misc_feature (590)..(590): n is a, c, g, or t
  misc_feature (821)..(821): n is a, c, g, or t
  misc_feature (855)..(855): n is a, c, g, or t
ggattagaaggcagcaaaaaaagctctgtgtctggctggagccccctcagtgtgcaggnttagagggactaggctgggtgtggagctgcagcgtatccacaggccccaggatgcaggccctggtgctactcctctgcattggagccctcctcgggcacagcagctgccagaaccctgccagccccccggaggagggctccccagaccccgacagcacaggggcgctggtggaggaggaggatcctttcttcaaagtccccgtgaacaagctggcaggcggctgtctccaaattcggctatgacctgtaccgggtgcgatccagcatgagccccacgaccaacgtgctcctgtctcctctcagatgtggccacggccctctcggccctctcgctgggagcggagcagcgaacagaatccatcattcaccgggctctctcaatatgacttgatcagcagcccagacatccatggtacctataaggagctccttgacacggtcactgacccccagaagaacntcaagagtgcctcccggatcgtctttgagaagaagctgcgcataaaatccagctttgtggcacctctgganaaagtcatatgggaccaggcccagagtcctgacgggcaaccctcgctttggacctgcaagagatcaacacactgggtgcaggcgcagatgaaagggaagctcgcaggtccacaaaggaaattccgatgagatcagcattctccttctcggtgtggcgcacttcaaggggcagtgggtacaaagtttgactccgaaagacttcctcgaggatttctacttggatgaagagangaccgtgagggtccccatgatgtcgggacctaangctgttttacgctatggcttggattca

SEQ ID NO: 541129 - DNA, 398 bp, Homo sapiens
ttataggctctcgctgtatgttatctcacggactatacagagtttgactttacaaattatgcacgcccctatgtgggattttttaaaaagcaaactggtgtgtcttctcatgtggtctgcacagcccagcctcacagcactattgtaaaccctgctctttctgtctcgctagacagattttaaagtatgtatactttatactggttgttttttgtcgttgttgttgttgtatacagctgaaaccaaccagcacgcccttgatgaccaagaggcgtttctttcaaagctatagggcaccaaacaattgaccatagatgactccgtttgccttcttctgcagacttatttccttcagggacagattttccaacctaagaaactacctaccgtgtgtattc

SEQ ID NO: 541130 - DNA, 923 bp, Homo sapiens
  misc_feature (59)..(59): n is a, c, g, or t
  misc_feature (560)..(560): n is a, c, g, or t
  misc_feature (631)..(631): n is a, c, g, or t
  misc_feature (862)..(862): n is a, c, g, or t
  misc_feature (896)..(896): n is a, c, g, or t
ggattagaaggcagcaaaaaaagctctgtgtctggctggagccccctcagtgtgcaggnttagagggactaggctgggtgtggagctgcagcgtatccacaggccccaggatgcaggccctggtgctactcctctgcattggagccctcctcgggcacagcagctgccagaaccctgccagccccccggaggagggctccccagaccccgacagcacaggggcgctggtggaggaggaggatcctttcttcaaagtccccgtgaacaagctggcaggcggctgtctccaaattcggctatgacctgtaccgggtgcgatccagcatgagccccacgacacgtgtctgtctctctcatgtgcaggcctcagcactcgaagcaacgtgctcctgtctcctctcagatgtggccacggccctctcggccctctcgctgggagcggagcagcgaacagaatccatcattcaccgggctctctcaatatgacttgatcagcagcccagacatccatggtacctataaggagctccttgacacggtcactgacccccagaagaacntcaagagtgcctcccggatcgtctttgagaagaagctgcgcataaaatccagctttgtggcacctctgganaaagtcatatgggaccaggcccagagtcctgacgggcaaccctcgctttggacctgcaagagatcaacacactgggtgcaggcgcagatgaaagggaagctcgcaggtccacaaaggaaattccgatgagatcagcattctccttctcggtgtggcgcacttcaaggggcagtgggtacaaagtttgactccgaaagacttcctcgaggatttctacttggatgaagagangaccgtgagggtccccatgatgtcgggacctaangctgttttacgctatggcttggattca

SEQ ID NO: 541131 - DNA, 424 bp, Homo sapiens
tgactccagaggattccctcgaatcgacggtttctcttccactggtaccaaaacagatacatagaccaatggaagagaacagagacctaagaaataaaaccacacatctacaaccatctcatctttgacaaacctgacacaaacaagcaatggggaaaagattccctatttaataaatggtgttgggagaactggctagctatgcagaaaactgaaactggaccccttccttacaccttatacaaaaatcaactcaagatggattaaggacttaaagataagacctaaaaccataaaaatcctggaagaaatcctaggcaataccattcaggatataagcatgggcaaagacttcatgtctaaaataacaaaagcaatgggaacaaaagccagaattgacaaatggaatctaattaaactacag

SEQ ID NO: 541132 - DNA, 157 bp, Homo sapiens
cacactggtgcagaaggctgggggatttggaggtgggaacacaaggtgtctgcaggatgaagtctatcttttcagtgaagtgcaatggccagtgcccgaaggtgagagtaacagtggggagatatcgaggtgagagatggaaattgttactacacca

SEQ ID NO: 541133 - DNA, 483 bp, Homo sapiens
cagcttttactgcagaactctagccatgagacagcagtacaaactcaccagtttataaaagagggctggatccaaattatttctgacaaaattggaaccattcacataaataaactttgtttatcccagtaggtaattcagtgaaggctgtgaactaaaattttgaataaagcagtttctatagcagtttgattttaaaaacttaccctttctttttttctccagtttcaagttttcaatgattacattttagctacaactggctgagctgtataagcaaaacaaaatctccaagtagctctgaatataccatagacagtgagtcttttctcaataccagtagcttaataataccagattcaaagcagacagaaaagagacaggggtgatggctcatgcctgtaatcccagcactttgtcgggggtgggaggattgcaggaatccaacctgggtaacatagaacccctctctataaaaaaaaa

SEQ ID NO: 541134 - DNA, 148 bp, Homo sapiens
caggttatcctactggcaacgtgacacgtgcagatagcaacgagcaggcttgtttgatgtgcacagcgtcctgcgggtggtgctcgggtgcgacatggcacctacatgctgccgtggtgcgcaacccctgtgctgcagcaggatgcgc

SEQ ID NO: 541135 - DNA, 411 bp, Homo sapiens
  misc_feature (121)..(121): n is a, c, g, or t
agaaggaattcacctggtgtattaaagtgaataatcataaaccactcacctttgttgttattagcagcagaacaatgatgtggttagttaattaaagctgaaaataagctttttgcctggntttttatggcggcttacgcgccgttgaaactttaatcatcacccgccacgcggatcaccactttgccgaagtttttacccttcagcaggccgataaacgtctgtggcgcattctctaaaccgtcagtaatttcttcgcggtagtggattttatcctctttcacccattgccccatctccctctgaaactcatggatgcggtgaccataatcctgagcgataataaaaccttgcaagcgaatacggtttttcagcactgtagccatcaacagaggtaaacgatcccgaccc

SEQ ID NO: 541136 - DNA, 153 bp, Homo sapiens
  misc_feature (121)..(121): n is a, c, g, or t
ggtgcataatatagctggcagtgcggtgcttggtacacctgaaaatgttaggcttatgaaaccttcaagtagggatggtacattatttcatctgcaatgatataaatccttgttattatanctatcccgaggtgtgggctgtgtattatctga

SEQ ID NO: 541137 - DNA, 904 bp, Homo sapiens
acagttccgggagcatctgtcgtgttctgtacggagagagggggaggacctgttcgggtagttgtgacggagagttactggcgtcgttacacgacagtacagtttccgtgatggaacttcagcagatatatattataaggacttgaaaaatacctgtatacaaactactctgccttctatatatctcctggcgacctgcccctgacagcgcgatgtacaatacggtgtggagtatggaccgcgatgacgcagactggagggaggtgatgatgccctattcgacagaactgatatttatattgaaatggatcctccagctcttccaccaaagccacctaagccaatgacttcaggcagttccaaatggaatgacggacagtcctgtatctctttcaggatgcagacatggtactggggcgatatttcaagggaggaaggtaactgacaaattgagggatatgccagatgggacctatcttggtcccgaagatgcctcaaccaaaaatgcaggagactatactttgatttgcgggaaaaggaggcacgaatacagtccatcaagatctatcacccgggctggtcacatacgggctctctgatcctcgaaattcaacacggggaagctcatcaacccctaccacagaactctcgccacgacaaccccaaacttgaagtgcagctacagtaccggggaacaaataccaacgaaccaggggaacgcagcaaactagacgcacaggcaacaacggcaccatacccaaccacacaaacggacaaccacagtagacagagagcgagcacacaaaatccagaaacagagagacgagcaaacaagaccgacactgaccagcgccacacaaatgcacaaagcgccgcacgatcgcacaaacacacacaaccacac

SEQ ID NO: 541138 - DNA, 640 bp, Homo sapiens
  misc_feature (79)..(79): n is a, c, g, or t
  misc_feature (90)..(90): n is a, c, g, or t
  misc_feature (313)..(313): n is a, c, g, or t
gatccccacctgagtctctgcgtaggattgattacgaccataacctccacgcctcggatgggctccggcccgtactgcncaccaggaggnttctttttgcctgtagaacagtcagctggacgctcatggtgcacgtccagcagccacacaatgggtagataagggcttcaacagcacgccggaataacaccgtaatagcctgtgtcccttaccaaggaaacccgcgcccaggcaaaaaaccagtagcctgcgtaacatttacgatgtgtgcagaaactcacctacgttggcgcgtgcaaattccagcatgccngtgtaaaccaacgcgctcgctgtgtgcgcatacccacacacagcgtcttgaccgcagcgaaccactcgctcgcagatgtcggccatgtcgagcccaaaccgcttggctgtcactagagttagccgacgtaacagaacgttgaatgacttgatcctgaccaattcaaacaacgaacaaacgtgtgaacaacccatccagtaacaaccaacgtgaactcggacgctctgtatcgaaatctggacgagtcagcacatcaataccccatacatttcaacgaaaggcacgttcaaaccatgaacagacgattctgactacagaccagtgctt

SEQ ID NO: 541139 - DNA, 281 bp, Homo sapiens
gctgggtactccagtctcctctcagcccagtctttcctcttggacacttccctcatatctcttcccagtctacctcgacccctgtccgtgtcatgcacaagtaacaaccattccagtttttttgtttttttttgttgttgttgtttcgccagggtctcgctctgtggcccaggctggagtgcagtggtgccatcatacctcactgcacacttaacctcctgggctcaagcaatcctccccactcagcctcccaaattgctgggaattataggcatgagcca

SEQ ID NO: 541140 - DNA, 3041 bp, Homo sapiens
cgagttggaagaggtgagtcctgtctcaaaatggaggtaaaaccgccgcctggttgcccccagcccgactccggcagtcgccgtcgccgctggggggaggagggccatgatccaaaggaaccagagcagctgagaaaactgtttattggtggtctgagctttgaaactacagatgatagtttaagagaacattttgagaaatggggcacactcacagattgtctggtaatgagagacccccaaacaaaacgttccaggggctttggttttgtgacttattcttgtgttacagaggtggatgcagcaatcggtgctcgaccattcaaggttgatgggcgtgtagtggaaccaaagagagctgtttctagagaggattctgtgaagcctggtgcccatctaacagtgaagaaaatttttgttggcagtattaaagaagatacagaagaatataatttgagagactactttgaaaagtacggcaagattgaaaccatagaagttatggaagacaggcagagtggaaaaaagagaggatttgcttctgtaacttttgatgatcatgatacagttgataaaattgttgttcagaaataccacactattaatgggcataactgtgaagtgaaaaaggcccttgctaaacaagtgatgcagccggctggatcacagaggggtcgtggaggtggatctggcaattgtatgggtcacagaggaaactttggaggtggtggaggtaattttggccgtgatggaaactttggtggaagaggaggctatggtggtggaggtggtggcagcagaggtagttatggaggaggtgatgtggatataatggattaggaggtgatggtggcaactatggcagtggtcctggttatagtagtagaggcgggtatggtggtggtggaccaggatatggaaaccaaggtggtggatatggtggcggtgttggaggatatgatggttacaatgaaggaggaaattttggcggtggtaactatggtggtggtgggaactataatgattttggaaattatagtggacaacagcaatcaaattatggacccatgaaagggggcagttttggtggaagaagctcgggcagtccctatggtggtggttatggatctggtggtggaagtggtggatatggtagcagaaggttctaaaaacagcagaaaagggctacagttcttagcaggagagagagcgaggagttgtcaggaaagctgcaggttactttgagacagtcgtcccaaatgcattagaggaactgtaaaaatctgccacagaaggaacgatgatccatagtcagaaaagttactgcagcttaaacaggaaacccttcttgttcaggactgtcatagccacagtttgcaaaaagtgcagctattgattaatgcaatgtagtgtcaattagatgtacattcctgaggtcttttatctgttgtagctttgtctttttctttttcttttcattacatcaggtatattgccctgtaaattgtggtagtggtaccaggaataaaaaattaaggaatttttaacttttcaatatttgtgtagttcagtttttctacattttagtacagaaactttaacaaaatgcagtttcgaaggtgtttccttgtgagttaacaagtaaagaagatcattgttaattactattttgtatgaattttgctaaagttaactgtaaagaaacacctgctgacttgcagtttaaggggaatctattctccccatttccaaaccatgatatgaatgggcgctgacatgtggagagaatagataatttgtgtgtttgcaatgtgtgttttagataaataggattgggtatttaaattagcatttgtgaatttaatagcattaagattaccttcaaatgaaaaaaaatctcaaaatttctatttggtttttgtgcattttcttttaaaatgtaatcatatgattttagtgtgttagacttgctgagtcctagctgtgtttagaacagaacatctctattctacatttaccttggtcaaatttgaactgctgccataggttttgggtgtaaagaatgtttactgccctccatttaaattctgaaaagggatggtggatgttttccctctcctacgttagaaaccattcttaaaaacttttgaaaatatagaaccattaagcctgctatatctgagcaaattagtgggtaaccttttttccttttttaaagcacaagaggcccataaatcttgagttatttgcattagtttacattttttgatacaacttttcagaccaagagaataaaaatcatgcgttattaaacccctagctggctggcatgctttcctgtttgtactgtatacattttgctggatgaaaccaagatagtttaggtataattgtccaaaataacctaactgcagcagaaatgtaggacagttgcttagtacaggcttctcacttcctacagacctgaattcaaatttggatagtctgagttattaaattcccaaagacaaagaacacactcttatttcttgtgtatatttcaacataaatcatgttgttaccaatttgttgggaaggccctggttgagaagagttttagataataaggctgtatatatatagatatatatagatatataccaatgtctatatatagagatattttatatatatatatacaggtatatatatgtgtgtgtatatatatatatgtatatacatatatacatatatatatatatatggatatatacatatatatatatatatggatatatacccatgtctactgttttgcttcagctagtgcttacaatttcattcaagtcctgagtatgtgtcctgctgttactccttctttggtagttgaaagttgaattcaagtctttccttctgttttaagaagtactaagcaaacaagcaataaaaaggggaatggcgcatgctagtgtttgaatatgctctcttgttgctctaattctgtgcctccgtgcattaatatttggatgcatgcaatgccacatggaaattggcctcatggc

SEQ ID NO: 541141 - DNA, 132 bp, Homo sapiens
aatgtagaatgccttctcaagtgagatagaagatttgcgtactttccagcacagaaatgtatctgtgtcgttggaccagcctcccccatcaccgtaccattacgggaatcctctccaaagaaggaggagact

SEQ ID NO: 541142 - DNA, 2987 bp, Homo sapiens
cgagttggaagaggtgagtcctgtctcaaaatggaggtaaaaccgccgcctggttgcccccagcccgactccggcagtcgccgtcgccgctggggggaggagggccatgatccaaaggaaccagagcagctgagaaaactgtttattggtggtctgagctttgaaactacagatgatagtttaagagaacattttgagaaatggggcacactcacagattgtctggtaatgagagacccccaaacaaaacgttccaggggctttggttttgtgacttattcttgtgttacagaggtggatgcagcaatcggtgctcgaccattcaaggttgatgggcgtgtagtggaaccaaagagagctgtttctagagaggattctgtgaagcctggtgcccatctaacagtgaagaaaatttttgttggcagtattaaagaagatacagaagaatataatttgagagactactttgaaaagtacggcaagattgaaaccatagaagttatggaagacaggcagagtggaaaaaagagaggatttgcttctgtaacttttgatgatcatgatacagttgataaaattgttgttcagaaataccacactattaatgggcataactgtgaagtgaaaaaggcccttgctaaacaagtgatgcagccggctggatcacagaggggtcgtggaggtggatctggcaattgtatgggtcacagaggaaactttggaggtggtggaggtaattttggccgtgatggaaactttggtggaagaggaggctatggtggtggaggtggtggcagcagaggtagttatggaggaggtgatgtggatataatggattaggaggtgatggtggcaactatggcagtggtcctggttatagtagtagaggcgggtatggtggtggtggaccaggatatggaaaccaaggtggtggatatggtggcggtgttggaggatatgatggttacaatgaaggaggaaattttggcggtggtaactatggtggtggtgggaactataatgattttggaaattatagtggacaacagcaatcaaattatggacccatgaaagggggcagttttggtggaagaagctcgggcagtccctatggtggtggttatggatctggtggtggaagtggtggatatggtagcagaaggttctaaaaacagcagaaaagggctacagttcttagcaggagagagagcgaggagttgtcaggaaagctgcaggttactttgagacagtcgtcccaaatgcattagaggaactgtaaaaatctgccacagaaggaacgatgatccatagtcagaaaagttactgcagcttaaacaggaaacccttcttgttcaggactgtcatagccacagtttgcaaggtcttttatctgttgtagctttgtctttttctttttcttttcattacatcaggtatattgccctgtaaattgtggtagtggtaccaggaataaaaaattaaggaatttttaacttttcaatatttgtgtagttcagtttttctacattttagtacagaaactttaacaaaatgcagtttcgaaggtgtttccttgtgagttaacaagtaaagaagatcattgttaattactattttgtatgaattttgctaaagttaactgtaaagaaacacctgctgacttgcagtttaaggggaatctattctccccatttccaaaccatgatatgaatgggcgctgacatgtggagagaatagataatttgtgtgtttgcaatgtgtgttttagataaataggattgggtatttaaattagcatttgtgaatttaatagcattaagattaccttcaaatgaaaaaaaatctcaaaatttctatttggtttttgtgcattttcttttaaaatgtaatcatatgattttagtgtgttagacttgctgagtcctagctgtgtttagaacagaacatctctattctacatttaccttggtcaaatttgaactgctgccataggttttgggtgtaaagaatgtttactgccctccatttaaattctgaaaagggatggtggatgttttccctctcctacgttagaaaccattcttaaaaacttttgaaaatatagaaccattaagcctgctatatctgagcaaattagtgggtaaccttttttccttttttaaagcacaagaggcccataaatcttgagttatttgcattagtttacattttttgatacaacttttcagaccaagagaataaaaatcatgcgttattaaacccctagctggctggcatgctttcctgtttgtactgtatacattttgctggatgaaaccaagatagtttaggtataattgtccaaaataacctaactgcagcagaaatgtaggacagttgcttagtacaggcttctcacttcctacagacctgaattcaaatttggatagtctgagttattaaattcccaaagacaaagaacacactcttatttcttgtgtatatttcaacataaatcatgttgttaccaatttgttgggaaggccctggttgagaagagttttagataataaggctgtatatatatagatatatatagatatataccaatgtctatatatagagatattttatatatatatatacaggtatatatatgtgtgtgtatatatatatatgtatatacatatatacatatatatatatatatggatatatacatatatatatatatatggatatatacccatgtctactgttttgcttcagctagtgcttacaatttcattcaagtcctgagtatgtgtcctgctgttactccttctttggtagttgaaagttgaattcaagtctttccttctgttttaagaagtactaagcaaacaagcaataaaaaggggaatggcgcatgctagtgtttgaatatgctctcttgttgctctaattctgtgcctccgtgcattaatatttggatgcatgcaatgccacatggaaattggcctcatggc

SEQ ID NO: 541143 - DNA, 3041 bp, Homo sapiens
cgagttggaagaggtgagtcctgtctcaaaatggaggtaaaaccgccgcctggttgcccccagcccgactccggcagtcgccgtcgccgctggggggaggagggccatgatccaaaggaaccagagcagctgagaaaactgtttattggtggtctgagctttgaaactacagatgatagtttaagagaacattttgagaaatggggcacactcacagattgtctggtaatgagagacccccaaacaaaacgttccaggggctttggttttgtgacttattcttgtgttacagaggtggatgcagcaatcggtgctcgaccattcaaggttgatgggcgtgtagtggaaccaaagagagctgtttctagagaggattctgtgaagcctggtgcccatctaacagtgaagaaaatttttgttggcagtattaaagaagatacagaagaatataatttgagagactactttgaaaagtacggcaagattgaaaccatagaagttatggaagacaggcagagtggaaaaaagagaggatttgcttctgtaacttttgatgatcatgatacagttgataaaattgttgttcagaaataccacactattaatgggcataactgtgaagtgaaaaaggcccttgctaaacaagtgatgcagccggctggatcacagaggggtcgtggaggtggatctggcaattgtatgggtcacagaggaaactttggaggtggtggaggtaattttggccgtgatggaaactttggtggaagaggaggctatggtggtggaggtggtggcagcagaggtagttatggaggaggtgatgtggatataatggattaggaggtgatggtggcaactatggcagtggtcctggttatagtagtagaggcgggtatggtggtggtggaccaggatatggaaaccaaggtggtggatatggtggcggtgttggaggatatgatggttacaatgaaggaggaaattttggcggtggtaactatggtggtggtgggaactataatgattttggaaattatagtggacaacagcaatcaaattatggacccatgaaagggggcagttttggtggaagaagctcgggcagtccctatggtggtggttatggatctggtggtggaagtggtggatatggtagcagaaggttctaaaaacagcagaaaagggctacagttcttagcaggagagagagcgaggagttgtcaggaaagctgcaggttactttgagacagtcgtcccaaatgcattagaggaactgtaaaaatctgccacagaaggaacgatgatccatagtcagaaaagttactgcagcttaaacaggaaacccttcttgttcaggactgtcatagccacagtttgcataaagggcaagtattgattcatgcaccgtaatgacaattagatggacattactgaggtcttttatctgttgtagctttgtctttttctttttcttttcattacatcaggtatattgccctgtaaattgtggtagtggtaccaggaataaaaaattaaggaatttttaacttttcaatatttgtgtagttcagtttttctacattttagtacagaaactttaacaaaatgcagtttcgaaggtgtttccttgtgagttaacaagtaaagaagatcattgttaattactattttgtatgaattttgctaaagttaactgtaaagaaacacctgctgacttgcagtttaaggggaatctattctccccatttccaaaccatgatatgaatgggcgctgacatgtggagagaatagataatttgtgtgtttgcaatgtgtgttttagataaataggattgggtatttaaattagcatttgtgaatttaatagcattaagattaccttcaaatgaaaaaaaatctcaaaatttctatttggtttttgtgcattttcttttaaaatgtaatcatatgattttagtgtgttagacttgctgagtcctagctgtgtttagaacagaacatctctattctacatttaccttggtcaaatttgaactgctgccataggttttgggtgtaaagaatgtttactgccctccatttaaattctgaaaagggatggtggatgttttccctctcctacgttagaaaccattcttaaaaacttttgaaaatatagaaccattaagcctgctatatctgagcaaattagtgggtaaccttttttccttttttaaagcacaagaggcccataaatcttgagttatttgcattagtttacattttttgatacaacttttcagaccaagagaataaaaatcatgcgttattaaacccctagctggctggcatgctttcctgtttgtactgtatacattttgctggatgaaaccaagatagtttaggtataattgtccaaaataacctaactgcagcagaaatgtaggacagttgcttagtacaggcttctcacttcctacagacctgaattcaaatttggatagtctgagttattaaattcccaaagacaaagaacacactcttatttcttgtgtatatttcaacataaatcatgttgttaccaatttgttgggaaggccctggttgagaagagttttagataataaggctgtatatatatagatatatatagatatataccaatgtctatatatagagatattttatatatatatatacaggtatatatatgtgtgtgtatatatatatatgtatatacatatatacatatatatatatatatggatatatacatatatatatatatatggatatatacccatgtctactgttttgcttcagctagtgcttacaatttcattcaagtcctgagtatgtgtcctgctgttactccttctttggtagttgaaagttgaattcaagtctttccttctgttttaagaagtactaagcaaacaagcaataaaaaggggaatggcgcatgctagtgtttgaatatgctctcttgttgctctaattctgtgcctccgtgcattaatatttggatgcatgcaatgccacatggaaattggcctcatggc

SEQ ID NO: 541144 - DNA, 939 bp, Homo sapiens
ctcgcgagcgaggcagccatgtattatcccgcgtgatgattatgaggtctgaggcggattatgacccctacgctgtatcccagcgacctatgatatgcacacaggagatccaaaggcgggatcttgcttatgaacgttgcagtatgaacgagcagaaccttgtatcaggatgatcccatgaggtgatccaagagaagcgttgcatccagatattgtccaccaagaacatgttcctcagaatttggatctgcaccagtaagagtggtatcgagctacgaggcctaggtcgatgtgcgtccagtggatgtcctcttgactcaagtagacggtggtactcgaagaatccgatggactaatcatatctgaggaacaagtctgggaccaaagcgtgacgtgacaaagacttcatctcagagaagatatcactctcttgagacctgcaggggctggagagccaaatgtgcctcgcacagagtttgggctccatcgacgtgcttgggtcatatctcgatgactttgttcataccaatagagaattataccataacagggctacatatatactttgccgcaaaagtcatagctgcgcggagaacgcttttcctgtgtggagaagccatgacgcgttgggaaactccgataagttacagacataactgctaagtcatctatcatgacgtagcagttcgtctaacgtggaccgatttggattccctggcttgcccccgtttgaatggtatacccaatcgcaagtgggacttcgtggggaataatgcaattccgagtggacgatttcattcgtaaccaagattcacaacggtacaatttcaagctccagctccccggcttggtaaagaacctgccctgggaaggataggacggaagcgaagaattgacctatgctgcggtgacccaattcctcaagaatcatggtacctg

SEQ ID NO: 541145 - DNA, 1668 bp, Homo sapiens
  misc_feature (185)..(185): n is a, c, g, or t
  misc_feature (287)..(287): n is a, c, g, or t
  misc_feature (1140)..(1140): n is a, c, g, or t
  misc_feature (1667)..(1668): n is a, c, g, or t
ggaacgtgctttggaatgacggtactgatggcctgggtcgggtgaagtccctagatacttttcctcggattaagtgtcgaaactcgtgtgatactcgaggaagggctcgtggtgccgtcagcgtcgatcatggccagagaggacgagtatctgggagcgcctgtggctagcgcgacttctgtctngctcgagctcgagggccaagacggggaaggcctaggacagagcgtcaagtgtgggcaggatgcggggtgcatctctgggggcggcactacatggcttcaacnatagcaaatgactgtgtgcctgtggtcaatatcaattttggtggtgggcagacacaggggacaccgtctgaagagagccgaggcatcaactggaatagtgcatccagcttgaaattctggtctccagccctgtgggaaatgggctggagatgataagtagtatggtcgcaagctctatgggggaagagcttgttctcaggcggtgggtgaaagagttgactgaactcgcacaaagtggtgcttctgcgaattaaggtgcgggaagggacggctcaagtttgtgggatcgcacgcaaattacacggtgggatcattggagagaccttttggagggatgggacttaccacagttagccatgtaacaagagtaatggggaaagtttccaggagcttatacaagaggaaaaacgaatagagcaatcccgcgtataaatggtggtagtgagactggggaaacggttccaaagtttccaaaatgataagttcgttttttcaagggggctatagagagcgaggttcttaaagttcaattccccaaatataggataattccaaggtcttccagtaattaatccttggaatcttaaataaggtaatcctgattatccttttaaaaacagccagtgtgacactggtgtgtgtcgtaaatatccgatgaagccaaactgttgaagctgggacacttcctgagcacacagactctcccttggaaaagcaaggtacgggggaaaagaaaaccccacggggcctacctcctgggacgcccgaggaactaaagcaagggcattcgtgttgccattgaaaaggcaaactacattacacagttcggtcccttgtgacgtgggtccaagtntcttgcgaggggaaggaaactatagaaatgggaacgccaacggtgggaacaacttatgggtgagcacctccaacgtgttatcacacacacaaagccattgtgtaagaaaacattttacaaacaactctcccaatggagacgaacactggtggtatgccacgccgcctctatatgaagatggtgcccaagaggtagggcggcccaaatgtgttatcgaacttatcccaatttttgtcaaggaaaaaggtttggacttggcgtatgtggggacaaaaaaggattacaaacgaggaaggtgaaataaaacccgtatggagggaatacaacaagaggtgaaacaagtgtgtacagcaaacatagcagacgttcaaacagacacaaaatgaaactaatgtaagatgatgtgaatactaggaatgaagaccaaaatagtgaaaagaagtgtagtataataagtaatgatagaagagagttgagagcatatagaaagagataactaggtagaaagatatataaataaatgaagnn

SEQ ID NO: 541146 - DNA, 189 bp, Homo sapiens
actggggaaaagtatagagtgaagttgacataacagtgcatcatgggctttagcataggtcagagtccaggccagcccttcgagcttggcacgcttctaaagcaataatatagacttctctacaatactgtacatctagtaatgacttgaaaaaatgggttgctcccttttaccacgtgtggcagagag

SEQ ID NO: 541147 - DNA, 190 bp, Homo sapiens
aacgaaaaaaaaaggaaaagtaaccttcagagattctaagaagagttgctcattcaaacccaggcccttgcccaaggtgggcccacttagagcgaaacttaccttttgtctggatgggcagagaagtacgtctacccggagggttgccatgtcgaagagtgagaggtccaagtgattctgtgcattgaaa

SEQ ID NO: 541148 - DNA, 480 bp, Homo sapiens
  misc_feature (51)..(51): n is a, c, g, or t
aacagctcacagtctgaggaagatgatattgaaagaaggaaagaagttganagcatcttgaagaaaaactcagattggatatgggattggtcaagtcggccggaaaatattccccccaaggagttcctctttaaacacccgaagcgcacggccaccctcagcatgaggaacacgagcgtcatgaagaaagggggcatattctctgcagaatttctgaaagttttccttccatctctgctgctctctcatttgctggccatcggattggggatctatattggaaggcgtctgacaacctccaccagcaccttttgatgaagaactggagtctgacttggttcgttagtggattacttctgagcttgcaacatagctcactgaagagctgttagatcctggggtggccacgtcacttgtgtttatttgttctgtaaatgctgcgttcctaatttagtaaaataaaagaatagacactaaaaa

SEQ ID NO: 541149 - DNA, 201 bp, Homo sapiens
cggacctacgttggtcgcagtcactggggttacaggcacctccacatgcccgctaactttttgtatttttttagtagagacgggattttgccaagttggccaggctggtcttgaactcctgacctcaggtgatccacccgcctcggcctcccaaagcactaggattacaggcgtgagccaccactcctggactgtgccttg

SEQ ID NO: 541150 - DNA, 283 bp, Homo sapiens
ccccttaaaggtgaccggcccagaagaccgtccctctgccacaccccacaaaaaaaattaggatgaggggggacgactcccgcaatagaaactcaccccaaaggcatgcagggcaaaaccatccagcgtacctctactctcctctgcagcttacatggttggaatgctgagccattgctaggacgatcaggctacaggaaagcgaaatgctcctgctgcgatctgatccaactgaccactcctgctgctcctcccttgcacctcaggcatctccttccaatct

SEQ ID NO: 541151 - DNA, 696 bp, Homo sapiens
  misc_feature (70)..(70): n is a, c, g, or t
gcatgcccacccactgccctgctcccctatcagctgcccccagatgcccggatgtcgtggtcccgatccntcatgacctggttaagaagttaccataaagcgtgttcccaggcccccgtgccccgcgctgcgggaagtttctgccaggacggccttcccccgacatggagggatttccgaaccctcgaagccttcccatgacaacctgccggcacgtatgcccccaccgctggccccacagcctcagagccccaccccacgcaccctttcccacgacacacgccacgggagcccaccacgaaggctcacagctggtgtcctcacctgcccacgaatgtgtacacgctgctcctccccttcataaagcacgcgccacatgtgtgcacgaggccacctcttgagaggagcacgagctccctctgtggctgaatgggactaattaattccccctatgccacgcggagcctgaaggcccaagaagaccccttttagaacctggtagaaaggaaagctgtgcacgcactgctcctcgtccacatgtgtgtcggccagtgctggtgtctgtcgttctccgccgagctgttactggaatgagcccttgtgttcatgggtatcgtcaagcggggttcttgtgttttgtggggcttgggttttggtaacttatttttataagccataaaccctttgtatccctga

SEQ ID NO: 541152 - DNA, 3233 bp, Homo sapiens
gctggtatgttggagcagcggaggcggcgcagaggcgcgtcttgggtccccgcggcggcgccggtgccaagcgctggtttgcggatacccaggcagatctgcagtgcctaatgccatgagtgtggtggttcagcatgtggaggaaaaagctgtgcactcctggtcgcgcatctccacggcagggaagaaggccctggaagaggcactgcttgtctttaacccaatgagccaggatctcagtgccacagaggcccagcttgtggccttcctgcagggcctgcgagatgatggcttccaacctaccatcctgcgcagtggtgatgtctatggctatagttcatgcacagctaatcccccaagccagacgaaactgcaagctcgtgcccctaacccaactgccacatcacctccagccagtgctccccgaactgccatgcggttgcctgcaggtcgggccacactgcttcccatgccgctatctggcagactggccaaagcatccacaccagcccttgccaagcatgctaccaccaacctgctgctgagctctctgaagcaatcaagtgccagccatgcccggggtgcagcagtgggcttccccacccacctttatccaggtgtctaccctgccatgcggctctctgttgtccttgaggccctggttccacttaagactcccatgccctgcttgggtgccaagcacaaggcacagtcactgcagctctcacttgcagactctcctctgaaactgcggaaaagttcagggaagggtccggggaaccctcggcccaaagctcccagaaaaaccacaagcaagggccccaagtgtctgactcgcaaaggccctggggctggaccccgacgaggctctgggcaccagagcaaaaccaacagagccactgggtcccccagtgtccggcgaatgaaagggggctctgccctgggcaccaaaacagcccaggccaaggtagctcgaacactggccaaagctgctcgtgcccaagccaaggtggctcgaacacaggccaaggctgctaaggcccgggccaaggccaaggcagcacaggtcaaggctaaggccaaagctaaggcagcacaggtcaaggccaaggccaaagtcatggcagcatgggccaaggccaaggctaaagccaaggcagtacgggccaaggccaaggtggctcggacccagcccaggggcagaggcaggccaaagggatctgctaaggccagaactacaaggaagggccagaaaaaccgccctgagactgttgggcagaagaggaaaagggctgaggaggcaaaagatcttcctcccaagaagagaacacggcttgggccccgatctcctaaggcatggctagggcctggaacagcaaagctgctgaagttccgtgccataaaggtagataggcggtcctcggatgatgaggtgcggcagcgggctcagcggatcctccgcgtgaacctgtcacctgtaatacggctccagccattgctgccatattcagcagtctgattccttcacacggcaatgtttggggaaactaagcccagctgtctgtgtggctagtggcacagtgtgctatgtccgtggactccacaatcttgaggactcccggtgcctctctagggccctggtgaccaccagcctcctttcagaaaccagagtgggtggggtacggtggggtgggtgggcgggaggggtgttttcatggcgcgatgcactgtgacttgttattcaagttgtatgtctactgttccatctatcacgttttatacctttccaccttccagtctccctgcccaccctccatggtcttctgtgtgtgtgtggctgctggcaggccagcttgaagatatagggaaagtggtcccagaaataggcctgcctatttccgggggttgtgggaggaggcagctcctgggcccctttggagagatgaggggaaattggcttctgtggttgtctgagaggcatcccctgaatgcagaagcagagccactgtgaagtaagacacttccctttgaggctgctctggtttgtgatccagacaggccccattcaggacagtaggccccatgcaggacagtaggttccatggggaaccttgcagctagtgggtttttaggtccaggaatggagcctttgtggtacttccctagggaccaaacagacagcctggctaaaatcttggggcttagcctgggcttttctggtgtgggtccaggcccaaaggggttgaggtgcttctccccactctgctctcgtggcagagagtaactatcctcaacttcgattggtggcaaggtactggtggttgagtcaggaccacagagcttgccctcagtgaccaaataattttctccttggttgggtgaggttttccatgactgcctcatcagcagtgctttctgtatgaatcttaagtgctctctctactcccaggtccagcctcatcatgccctccaacatggtccatatgttaaaatacattgtcacccttcctgctttagagagggggctgggccctgggacctgaaggaggtaactgtcctgcccatctgtagtccatcactggctgcccaggctgaatggcagtgcctggggttggcagggaggggcacacattccccctccctggggtaggggcatcatttcagtgagaatcagatgttttctgtttctgggtttgggccccacaagctgccagctgccctgggtggtggacctgtggagaagctctgtgcttcttggtgccctcctgccccttctgcatcttgtggcatgcttcccctgggtgtgtcctcccttggtttcccaagctctgggaccttgctcccagctgtgctgtcgccccactaccttacatgctacttgcctctgacaactctttcattcatgatgtgaatatggggaatgacctgagagccacactcagctcctcaagggcagcccagcttggggctcacgcctgtaatcccagcactttgggagtccaaggcaggtgggtcagttgaggtcaggagtttgagaccagcctggccaacatggtgaaatctcatctgtactaaaaatacaaaacagccaggtgtggtggcacacacctaaagtcccagctacttgggaggttgaggctggaagatcacttgaacctgggaagcagagtttgcagtgagccaagatctcgccactgcactccaggctgggcgacagagtgagactctgtctc

SEQ ID NO: 541153 - DNA, 1262 bp, Homo sapiens
actgaacggcaacttgagactgggtaccgtggagattctgaatgtgccttggtgtatgtggttttcaaagaatagttaaagattggtattcaacgtcaaagaaaattaatataaagggaagggaaaacaatataaaagaagataaaagagaaaataattacggtgaaggaaaaataagaaaatgagtatgagagaggccagaataacccccacaggaacattacagacagagtaggccacagacaaaagaagagcaaaacccagataagagtggaaacaccaaacccaacgggaagaaataagagaagaccagaaacgcgacaacaaaaacaacgagaaaatacgacaagagagacacggccagtaggccaatgaaaccaatcacgccatagagcaagtcacaacgaaacacacaataacagggaaacaacccagtgcgagcccagcataagacacaacagctaaaggggacaagccaccaaggaaaatcacaaccgacaagaacaagaggcgagacaaaacacgagcacaaagcaaacaacaaacaacgggatacaacaacacgacagcaaaggaggaaaacacagagaaccacaaaaacacagaaaacaagaaaacaaagtcaacaaccggtaatcaacgtgtagtaaaaaaaaaaaatcgcagaaaaagaagtcaatagtggcacgtgtacaagacatcgaggagactaacacaaagaaataaacaggagaaagagagccaaaatagaaaatgagaatagagaaggatcaaaaacatagaagaagacacaaagaaaaagaacatagaagacgcataagatcaatgacgcacgaacatgaagagtaggaagaaagaagaagcaaaagtaattaaactagaataaaaaacagacaatagaaaagaaaaagttcaagaagatgagagcaggtagggtagaggcaatgagagtgcgcacaaactggaagtacatccagcacagagaaacagcaagaagccggggcgcgcgaaaatctaaaagcaacagacggacagaacagaagcaccggagacagaaggacaacagacaaacagcaccagagaacagacagcagatacagaacgagcagctagacaacaaaagcaacacgccagaggcgaaaagaaggaacacgacccacaaacacacagaccggaggagccgcagacacaagataggcacaaaaatcacacgacagacagcaccagaaaataacgacaacacaaaggaaccccagaagaca

SEQ ID NO: 541154 - DNA, 220 bp, Homo sapiens
catggtccgagagaaattagagatgaacattctagaaatcaacgagacattgcgcccccagctggcagagaagaaacagcagttcagaaacctcaaagagaaatgttttctaactcaactggccggcttcctggccaaccaacagaagaaatacagtaagatctataggctcaccatcatgaaagtgatgaatgatatcctaatttctctcggaccaatg

SEQ ID NO: 541155 - DNA, 147 bp, Homo sapiens
  misc_feature (58)..(58): n is a, c, g, or t
  misc_feature (89)..(89): n is a, c, g, or t
  misc_feature (113)..(113): n is a, c, g, or t
  misc_feature (140)..(141): n is a, c, g, or t
ctcgtgcactttcaggagctctgggtgtgctgtatactggagctacgtggaggtgtgntgtggaaaggtagaactcgccattgtcatgngatcccattccaaagctgcttggnactccctcttcaaagaccacgttactnngctgac

SEQ ID NO: 541156 - DNA, 270 bp, Homo sapiens
attcaagttgcgtgagccatcgcgcccggcccatagttttggtttttgtttgtttttttgggatggagtctggctctgtcgcccaggctggtagtgaactggtgcgatctcggctcactgcaacctccgccttctgggttgaagtagttctctgcctcagcttcctgagtagctgggattccaggtgcctgccgccatgcctggctaattttttttttttaatagagacggggcttcgccacgttgcccaggctgatctcgaactcaagg

SEQ ID NO: 541157 - DNA, 760 bp, Homo sapiens
  misc_feature (99)..(99): n is a, c, g, or t
  misc_feature (101)..(101): n is a, c, g, or t
  misc_feature (139)..(140): n is a, c, g, or t
  misc_feature (185)..(185): n is a, c, g, or t
  misc_feature (197)..(197): n is a, c, g, or t
  misc_feature (221)..(221): n is a, c, g, or t
  misc_feature (262)..(262): n is a, c, g, or t
  misc_feature (292)..(292): n is a, c, g, or t
  misc_feature (296)..(296): n is a, c, g, or t
  misc_feature (301)..(303): n is a, c, g, or t
  misc_feature (317)..(317): n is a, c, g, or t
  misc_feature (333)..(333): n is a, c, g, or t
  misc_feature (335)..(337): n is a, c, g, or t
  misc_feature (343)..(344): n is a, c, g, or t
  misc_feature (349)..(349): n is a, c, g, or t
  misc_feature (356)..(356): n is a, c, g, or t
  misc_feature (360)..(360): n is a, c, g, or t
  misc_feature (373)..(373): n is a, c, g, or t
  misc_feature (389)..(389): n is a, c, g, or t
  misc_feature (402)..(402): n is a, c, g, or t
  misc_feature (427)..(429): n is a, c, g, or t
  misc_feature (453)..(455): n is a, c, g, or t
  misc_feature (466)..(466): n is a, c, g, or t
  misc_feature (474)..(474): n is a, c, g, or t
  misc_feature (479)..(479): n is a, c, g, or t
  misc_feature (512)..(515): n is a, c, g, or t
  misc_feature (526)..(527): n is a, c, g, or t
  misc_feature (538)..(538): n is a, c, g, or t
  misc_feature (542)..(542): n is a, c, g, or t
  misc_feature (551)..(551): n is a, c, g, or t
  misc_feature (558)..(559): n is a, c, g, or t
  misc_feature (565)..(565): n is a, c, g, or t
  misc_feature (569)..(569): n is a, c, g, or t
  misc_feature (579)..(579): n is a, c, g, or t
  misc_feature (599)..(599): n is a, c, g, or t
  misc_feature (601)..(601): n is a, c, g, or t
  misc_feature (611)..(611): n is a, c, g, or t
  misc_feature (616)..(616): n is a, c, g, or t
  misc_feature (646)..(647): n is a, c, g, or t
  misc_feature (711)..(711): n is a, c, g, or t
aggcagtaacttttactagtcaataaaaagcagttctaccaatccactggtaattaatacactaaacagagttggaaagaattttactgaaagcaaaananttagagaaaatagacatttatacaaaattataaaatgnntgtaataagaataaaagcatttaaaggaaagcacaaacttaattnatagagccagtnaaagcattaaaaaattaaagtggnaattgaaatatgcaaaaatgtataaacattctacaaaaganggtcattcttttcctgagtatactaaagcnatgngacgnnngggggcgggggggngggggaggcgtggggncnnnttctcnngggcntttgggntctncacactgcgtccntccttcttcatattcntgcgtgggaatcnacatctgttgagagggacccaaagnnnctagagtggggccgccaatccatnnnctaaacctccnttccactnttgtnttatttgcgatcaatttcaaccgcatacttcgnnnncttttcttttnnatctctctatncaancagtcagtnaaactcnntaatanattnttttctcctnccaatattaaattgccatananacctggtctnatgtnaatatcacacatcccaacacttgttgtgannacatgactgactcctaacattgtgtttcctgataacccctttacattggaagggtcaaataatncttctggaatctttagccgctctgcaccaaaatcacaattgtagccatt

SEQ ID NO: 541158 - DNA, 366 bp, Homo sapiens
gtatttttcttgaaacagttagagctcttttatatatttttagtagtgaaatatttgtatacaacacataaatacatataaagatgtattaggcatgctgacggaagtacattttatagatttataaagtcacctccctttttttttctctagcttagactttcagattcttgataacctctttcacaaccctaggcagttgtcagctaaatagccctaaatttgcacattatttaactcagtttgtgaaaatcaaatagcaaattttacctcacttaaggtacagagagaaaaggtctggtggtgctagagggagacgcttttatttttctttcagccaaattaaacataaccgagcgtggcaat

SEQ ID NO: 541159 - DNA, 310 bp, Homo sapiens
cttctatatctacattgcaccttccatatctacatataacctgatacctgtttttagtgtgaggtttaaaaaaaaaaaaagtaaagattcccccttttttggttttggttttggagacacagtctcactctgtcacctaggctgaagtgcaggggcgcaatcatggctcactgcagccttgacctcccaggcttaagcaatccacctgccacagcctccccagtagctaggactacaggtgtgtaccacagggctcagtaatttttattatttttgtagagataggctggagtgcagtgacactatcaca

SEQ ID NO: 541160 - DNA, 125 bp, Homo sapiens
gctgatttcgccagtggtgttgtgtgctgaagattggggaacacactcccctcaggcctcgccatcatggaagaatgccagatgttctggcccgttatagccagtatcgtgccatacagtaatgg

SEQ ID NO: 541161 - DNA, 276 bp, Homo sapiens
gctcggtcccgactgaacactgcgttttcgatcagcagacgacggctatcagagcttgaagacagcttcatgaaataaagcgtgaagacaagattagagaaaaaagaatgcaaaggaatgagcaaacgcttccacaaaatatgggactatgtgaaaagaccaaacctatgattgactggggtccctgtaagtgatggggagaaaggactcaagttggaaaatacacttcaaaaattatccacggagaacttcccccgaaaaccggcactcttcagt

SEQ ID NO: 541162 - DNA, 309 bp, Homo sapiens
ctcatagcaggatccccattgagacagaggcccagtcagttgttcacggttcactcggcagatccaccagccccctgctcccacagcctgatcagattcatcgcggtcctcaccaacccgcagggagattatgacatgagcactggcaagttcacctgcaaagtccccggactctactactttgtctaccatgcgttgcatacagccaacctgtgcgtgctgctgtatcgcactggattcgaagtggtcaccttctgtggccacacgtccaacaccaatcaggtcaactcgggcggtgtgctgctcacg

SEQ ID NO: 541163 - DNA, 753 bp, Homo sapiens
gctgcgcatcccggcgttcgctgtgtgctgccgctttctcctccatctcttttcctccggctccggcggtgcgcatggcgacgcctgtgactggacacgcgagaagcggaagcgagctcagcgtgcgcgtgctgtgcggggctagtgcgacgtggcctgagtgtgcggaagagcttcaaccggcacttgcacttacacagctggtcaaggaccgaaactgtggccacgccccggcgactacttactacgcgctggcgcacacggttgcgccgaacacctcgatgggccgcatgaaattccagcacgcatgcaagcactactacagagcgcgaccaccaagacgcatatattatcataaccctggaatcctacatgggtcgacacgactgcagaaaccccgatggatgaacctgggccttcagaattgccagtgcgaattgaaagaccatactatatcgagatggaggtaagaactttggaatggaaacttacgaagagatgaatagaaagacaagactgatagagccatatgggagaaatgggaagagacataggaacacggcaagaaagaaaagaatgaaatcacatatgaacatcaaaagggggctaaaccacgatggtgaagcccatgggaaagtcaaaaacggagaatacgtggcaagtaaatggaagtaatgcaaaatatcggaaagaaataaatataaaaccatgaaagaaagtggataagaggaagttagcaagaggtcaaaagta

SEQ ID NO: 541164 - DNA, 154 bp, Homo sapiens
actcctccccctactccaccggacctcaaccaggacttcagtggatttcagcttctagtggatgctgcactgaccctggtcgccaaaatctgccatccaggcctctgaatttgtccgggttcaaattgtggccggggaatccttcataaagctc

SEQ ID NO: 541165 - DNA, 155 bp, Homo sapiens
ccgataatcgcacggaggtggcgaccctgctcatggcggccgacaccaggtggatgaggtccccgtaggtgggggtggtcagcttgagggtgcggaaacagatgtcagagagtgcctcgttgtcgatgcaagaggtctcatccgtattctacacc

SEQ ID NO: 541166 - DNA, 300 bp, Homo sapiens
cagagatgatgccactgcactccagcctgggcgacagagcaagactccatctcaaaaaaaaaaaaaaaaagctgctgaaatcgggcagcgcctttcaaattccgggcccaggtgattccgaaactccgggggcaccctggctacggcccttcttaggccctgccataaccctcttcctccatattagcactggcgccattgtctcttacatctccttacccagtttatacaggcgccgtgtaaagagcctcacccatgggaacagtacaacctgccgggggggggaccctcaagagtcga

SEQ ID NO: 541167 - DNA, 293 bp, Homo sapiens
ctggtacaggagcttcgctaccatcctgactaagatggcatgatacccgtgttgcttactagcaatacaaattagctgggggtggtgatgcatgcctgtaagcccagctgatgtgggaggctgaggttaggaaaatcacttgaacccgggaggtggaggttgcggtgagctgagatcacaccactgtactccagcctgggcaacaagaacaaatactctgtctcaaacaaaaaagagcaaggaaggaagaaggtttcaaaaaagaagtccgtgcatgtatgtgggtttcgggg

SEQ ID NO: 541168 - DNA, 367 bp, Homo sapiens
  misc_feature (247)..(247): n is a, c, g, or t
ttctcatcctgctctatgggaggacgcccatgtatgtttcccatacgcccatgtatggctctggctggcgaacagggcatgtacggttcacagacacccctccaggatggtagccgcaccccacactacggctcacagacgcccctgcatgatggcagccgcactcctgcccagagtggggcctgggaccccaacaaccccaacacgccgtcacgggctgaggaagaatatgaggatgctttccacnatgagcccaccccggccccgcaggcctatgggggaacccccaatccccaaacacctggctacccagaccccttgtccccacaggtgaaccccacaatacaacccgcagacgccagggacg

SEQ ID NO: 541169 - DNA, 117 bp, Homo sapiens
aatgtaaatatattgcagtacatcagcgtcatctcttcagctcccttaacacttaaacagatccattactggaatttcttgctagaggagagtagcccaaattctgtgcccatacaa

SEQ ID NO: 541170 - DNA, 1112 bp, Homo sapiens
gcccgcctgtgcccccaccgccctacgtatcccccagagtatacctgcaggctcataagacagatgcacgagagcatcacgtacaagggctccattggacagcccagtgccctgtgtacggcctagccgattgccccccttcttatgcaggcagtcatggcgagctacgaggagagagacaggccactctctttgaccctcagcttcacgatggctcgtgcatctgtgaacgagtggcctccattgtagacgtgtccatggacagcgggtctctggtgctgtcaggcattggtgacctccctgggggctctagcccgtcggaggactcgtgcctgctgggagctgcagggctccggtgcagctccgatggactacgttcgtctttcgctccatccagcgcagcctgtgccggctactgcctcagcctggactgtggcgctgcggggccccgttcgaggcacagccccctgcacactggtgccccccgaggggctgcccgatcctattcctgctctgtccctgaagctcctagccccactgggtgtccccacaggtggcccgaggtggcagtcggtaggacgggctggcgagcctggcgtcgggaccctgcttccccgagctgaggcgggggtcccccttgggcacgggagccgccagacgtagcttctgctacagcctgaggcaccgaactgcgaacgcgatcagtggagagaacaaggttcccacaacgcgtgcctggggcaacccgcgcttacataatcacaggaatccgcacgccagcatgtaggatggcccacgatccaaagggtgaccacgagcgatacgccgcccaccgggacaatgggtgagcacaggggagacaatacccaagggctggtagaagaaaaacggtttgcgatgcagatggaagtccagagtatcgtcagtaagtcggatataacaggcctacaaacaggccaacccccaaagtaagtgcaggcacgcataaaaaaagcccgtgatcaactcataaatgcaatacccaccagcttcgttcaccactcgggcgcacatggtcagtacgaaaccaaggatcacgtccaagcatgatccacccatccggtgaggctttg

SEQ ID NO: 541171 - DNA, 161 bp, Homo sapiens
aggatgtgtgcggtgtttagaggatcccctcagctggccccaagttccggctgcagtcccgtttctgcttctcagctttattcctggaagcacgctcagactccaggtcttcctggaataaagctgagaagcagaaacgggaccttggggccagctgggag

SEQ ID NO: 541172 - DNA, 419 bp, Homo sapiens
gaaagaactggcgataggacatcgcttctcgacgggacagagcgagcgaggccacgatccgcacagagacagcgcatgcaaccaaccgcaaccagcagccacacaacaacgggcaccgagcgcccgacaaagagaaacgacaaaagacacaacacagcgcccacagcgcaccaaagaaagaagagagcgcgagggaaagaccaacagcagccgcgacggaacagagggcccacgcacaaagaaaaacgacgaagagccaacgcgcagcgaacaccgcaaagaaacacaacacaccgcggcccaccaaagacgagaggggggcagagaacacggccgcgcgcaccaccagcagccccgcagaggacacaccgggaggcacaggcgccccagcgcgtgcctcgagacccaccccgagacga

SEQ ID NO: 541173 - DNA, 395 bp, Homo sapiens
ctgcgggggtccgctgctcgggctgtttgcgcgcagactgtggctgctagctggctggttggtcgtctcgtctgccacagcgtgccatgtgctccttctggccgcctggctgatgcggttctgtcgctcctctgacccgctgcggttcctgcagcccatgccggctcgttcgatgagtcacaaggcgtgcctagagcgcaggcttaatgctgggatatcgacaatcaagttgtgcgtggaccttgagataggccagtgaatctgtacatactcatgtccccgaagtcctcgagtacactggaaccggtgtagcaccaggcctgagcagaagatgagcttgtcctcgcctggcttaaacctgtacgccaggcggaggatgaagagctccaggaagg

SEQ ID NO: 541174 - DNA, 101 bp, Homo sapiens
tcggtacctacttttcacagggcagcataaagcccttctaagtaatcattgtttccccatttgattattcaggattcaattggcattcaatccgtgtctct

SEQ ID NO: 541175 - DNA, 409 bp, Homo sapiens
atcatcatcttttggataccatttcacttttttccattgacaacttgtacctattagctatatattacttgtttatttatttgaacatttatgttttttttaatctttcagtagcccattgttttttaattgaaaaagttatacacgcaaatggttaaaacaaattttatacaagagcatataatgataaaaatgtttccttaccaccctagatcttttagtcccctttctcagaagcagctatgtatgctttttcagttttctgttttattttcctgttgttctatttaatacagataccaaatgtgagttgtaataatcagcattgcattacatttttatacacttaatgcattcaaggtgtatatcacattctaaataaatgagatattggtgacattgctattta

SEQ ID NO: 541176 - DNA, 514 bp, Homo sapiens
tcctgcccatgccttgccaccgttccttggccctgtacccctcacagtgtcgtgtgaaggacgtgaagtgtgtggaaggacacttctggcatgataaccagatctggtggcgagacaaacgacagggctggtcctgatgtctcctaccgccagggtgtctgttgtgctgttcggggcctctgctgtcctgctggcttccgctgcgctgccgggggtaccaagtgtttgcgcagggaggccccgcgctgggacgcccctttgagggacccagccttgagacagctgctgtgagggacagtactgaagactctgcagccctcgggaccccactcggagggtgccctctgctcaggcctccctagcacctctccctaaccaaattctccctggaccccattctgagctccccatcaccatgggaggtggggcctcaatctaaggccttccctgtcagaagggggttgtggcaaaagccacattacaagctgtacctccccgtagctgtactcacccg

SEQ ID NO: 541177 - DNA, 328 bp, Homo sapiens
tcacttaggcctcacaaattaaacacaaagcttcagcttcagtcaaatttttaaaaataatttaaaattttaaaaatatatcaaaataaaataatcagaaagtatagacccttaaccctttgtagtactgcctcaagactatttaactcctgcatgactttttgttgtaacttactttttttgaaatgctatattatagagaaatgttgcaaaaaacatatagagtggtcctaaggacacaacacccagcttcccatcatgatgacatcttatacaaatacagtacattaccaaaaccaggaaactgttggagtcagtacagtgaact

SEQ ID NO: 541178 - DNA, 145 bp, Homo sapiens
cgcaggtgtaggtatatcagataaagtagacttaagagcatcaatagtacaaaaataatccagagaaagtcattacataataattaaaggatcaagccaagcaagaggatattacaagtcctaaactttacatgccccgtaactc

SEQ ID NO: 541179 - DNA, 276 bp, Homo sapiens
tacacaaatggtcaattatgtaaatcagggcaaatttggtgctgcagttctggttaaccacacaaccatgagagttgatattgctcccacatctcatgtatattcagatgtcccaaataataccaattagctggcttttatctggcttgcctgatgtcttgtttatcatatgatatggatgattgtttgtattgaatgttaatttataacatcaagcatatagtaaatgatcacattttgcttactattgttcattaaaacaaatccaaccattaa

SEQ ID NO: 541180 - DNA, 397 bp, Homo sapiens
cggacgtagatcatacctagaagaatctatgtttgccgttcatgtagcgctcatttggctatataagtgttgatcagtactaggactggcttcacctctgggtgggaccgaggacttctaggaacttgtctgatcagtgtccatctctgtagttcagttaacactttactcccaacttgcttcatcattgctattgcctcacagtggcaggcagctccttggatttgaaagacttcaactttggaaccacacactttgaattcaaaatggaaaacccattccctggaattagactgcttcattgcaaaagaatgatgtatgtatctttgtatgtccttgcttcttatttcattgatgtaaatctctttaacttaatatgaaaactctccaagtcttg

SEQ ID NO: 541181 - DNA, 119 bp, Homo sapiens
tgaagtccaatgtagaggagatattcttagcagcaaaactctgaaaaaaagcaacatctgagcagcaactatggatgtctatccaactctgcagattgtcttgtcaggcgttcttgcat

SEQ ID NO: 541182 - DNA, 529 bp, Homo sapiens
  misc_feature (35)..(35): n is a, c, g, or t
  misc_feature (71)..(71): n is a, c, g, or t
  misc_feature (78)..(78): n is a, c, g, or t
  misc_feature (98)..(98): n is a, c, g, or t
  misc_feature (136)..(136): n is a, c, g, or t
  misc_feature (138)..(138): n is a, c, g, or t
  misc_feature (152)..(152): n is a, c, g, or t
  misc_feature (180)..(180): n is a, c, g, or t
  misc_feature (244)..(244): n is a, c, g, or t
  misc_feature (250)..(250): n is a, c, g, or t
  misc_feature (285)..(285): n is a, c, g, or t
  misc_feature (391)..(391): n is a, c, g, or t
  misc_feature (456)..(456): n is a, c, g, or t
  misc_feature (496)..(496): n is a, c, g, or t
ggtctccctgcggttccctccgtgtttttttgtgntctttcggggtggcccttttggggttatgggttacntgttagntcgcgtgtccactgtgtggnggtgtctggtacgttgtgtttttcttcctttctggatntnccctcccacttttnattacttttttgtccctcccgccctccnatgcttatgattatatatcccctattacttaaacttgattacacaaagaaataaaagcaatgcnattttncacagaccaattcaataccattctacaatctaaanacaacaaagaactttcagtctcatcagatgtgcattctctctttagatgaaaatgtagcatggttcccgcagcctctccatttctgcccaggtctttccagcaggntgttctctgttgtcaatcttggaactgtctgtatctgatgtgagatgtctgtggtggatgacaantggatcaattcagaagtccaaagaggtacctacaaacttnaacagaattccagactgcaccatatagatgtgg

SEQ ID NO: 541183 - DNA, 405 bp, Homo sapiens
  misc_feature (26)..(26): n is a, c, g, or t
  misc_feature (220)..(220): n is a, c, g, or t
  misc_feature (224)..(224): n is a, c, g, or t
  misc_feature (260)..(260): n is a, c, g, or t
  misc_feature (296)..(296): n is a, c, g, or t
cctcagtgttgtaggttgagcgaatntaccagagtgtgagagaccattgtctcgttggctggcgctcacggacatgcagtcacggtagcgggacaactcacaaaactgtaatttacttaccaaatctcttcctttccatagcctcgcctgcctgacttagagaaagaaagcaataatttacaggcattttgaggtgtctctttctttgggtctttctgtntganaggatatttgtcgaaaaaagagcaaaccgttttaantaaactcccctggaaaaaaccaaacactggcatctnagtggatataaaatgacacttttcaatattaattggaaacaggtctcaaatcatgatactttttaaggcaggcattctttttcggcagtttgatagcagggtaggtcca

SEQ ID NO: 541184 - DNA, 516 bp, Homo sapiens
  misc_feature (493)..(493): n is a, c, g, or t
catttcagatcaaaagaagatagcgtctcagtgtcgtgatgtcccactggaagactgtgctaatatgcattagtaatcgacaaagatcagggagtaaagatcccagaaagaaacagaaagtttacagttgcgacgtatgtaacaagagtccagataatggcttcaggtcaatcgacaaaagtgttgacgtatatagtcaacttatcatggcggggtagagtcactagtgccctggacaaaccgtctcatgcaattcacgacggagggacactagagtggttcgcaaggaacttaggtcgggaggcgcattcaacgatggtgctataaactcgatcagaagggtgctccaagatccgtcatttcgcaagccaagggtcacgtgcttggcctcagtaagacacttagcatagccgtctaagagctgcgatgcgttacataggagaaaagtagaggaacgccaaacccgtgaccaagttagagcgcttagtacaantaacgtagtgccaagctcggggt

SEQ ID NO: 541185 - DNA, 602 bp, Homo sapiens
  misc_feature (5)..(5): n is a, c, g, or t
  misc_feature (80)..(85): n is a, c, g, or t
  misc_feature (118)..(118): n is a, c, g, or t
  misc_feature (122)..(123): n is a, c, g, or t
  misc_feature (126)..(126): n is a, c, g, or t
  misc_feature (129)..(129): n is a, c, g, or t
  misc_feature (136)..(137): n is a, c, g, or t
  misc_feature (146)..(147): n is a, c, g, or t
  misc_feature (158)..(158): n is a, c, g, or t
  misc_feature (167)..(167): n is a, c, g, or t
  misc_feature (197)..(197): n is a, c, g, or t
  misc_feature (229)..(229): n is a, c, g, or t
  misc_feature (242)..(243): n is a, c, g, or t
  misc_feature (246)..(246): n is a, c, g, or t
  misc_feature (253)..(253): n is a, c, g, or t
  misc_feature (257)..(257): n is a, c, g, or t
  misc_feature (264)..(264): n is a, c, g, or t
  misc_feature (313)..(313): n is a, c, g, or t
  misc_feature (448)..(448): n is a, c, g, or t
  misc_feature (496)..(496): n is a, c, g, or t
  misc_feature (539)..(539): n is a, c, g, or t
  misc_feature (596)..(596): n is a, c, g, or t
catcnctctttcctggcatgatctcgttcctctggggtcgggcacaagactccagagctgtttttttttttcacacgggnnnnnnggttctcattctccacaaggggttatggggggnctgnntcntcngggagtnnctgggctgnnctgcaaattcnaccttattnttgcccttgggcctctggttcctttttgtntggggtcatatttacatgtgtaatcggccaangggcactcctgtnnggncatcgtngggnacgtggnggcttgatctggactgcccatggcttcccaactggggccttcgggacanctgcaactcacaaccagtcttttgttgaccttcagctgatttcccagggtacttggcccctcttctttggtctcaggggccccggaagcccaaatgctcctactgaatgtcccaaatgaggaagaagtatcaaanacatcacatggattcccaaacttgttaaggtaaactggacagtcaggngcccaaatcgcaccttgactttaaaaagaccaagagggtaggngcaccctggggcagggtggacttaacagagaattccaccctgaggtcacctcagggncttgcc

SEQ ID NO: 541186 - DNA, 315 bp, Homo sapiens
gtcgctggcagacacacaggctgctctgggggatgagctggtgcgtttaaggacaggccagcactgcattcgcaagcagtggggaaggggagagatgccgaggtggtcagtatcctgactttcagaggcctttttttgtttgtcttaatttttgctagattgatattaaaactcatgtggaggactcaaggatgtttagagacaaagtcccatgacaggacaaagcaccatttttacttctctctcatactgtttcatgattccacatgtagtctttgctcaggagtctttgggaattaggatctttgagcctta

SEQ ID NO: 541187 - DNA, 918 bp, Homo sapiens
cctaattattgcaggaggggctctcttccaagccccaccctaagggttagccctggccaaatcttttgccgtctaggccacagaccaggtttttctgactaaataatgcaataagaggctctaagctgactgagattgcaagggaccctttgccgtcctcccttgtgttctccatgtctttccagatggcggaagagcatgtgccacccccttttcctagacgagatcttgtcctggtgcttgcgcgtgggatcctttggaccgaagagcccaggtatggtctgtggtgtggagttgtccctgctgcctctgcatgaagcccctgcttgttaggcctcactctccatcagaatccctgcctgtcccatctgcaagttcgccccccagacattgtccattcccgcttgccccagagaagctactcggccaaaacctagtcccagaggatctaggtatcttggtgagaccaatatggccatgacctcagtcacttagttatgcgtgtgcggggttctccagcttatacaccccgtgtgttaagtgggtggcaggtgactgatattgtagaacatttgcttcctcaatagggagatcaggccatgactcaaatttccgcagggcaagacacgggaggaggccgccttcatcccagactctcttctagggctttccgccatcaggccctcccacttgagactggtcttctgggaggcactaggcaccatgcctggtccggcaccattccagccatgcccggaattctgcctacctgccagttcaggcttttaaggtgctcttcagggccccagtgtgtgtctctgatgggtcctaaatcaaaagcccgatgttgggtcccctcataaggggggcttggccccggacccgttgggcaagggccggtaggtttccccctggctt

SEQ ID NO: 541188 - DNA, 477 bp, Homo sapiens
gatataaccttgaggaaactcaaaatcctttctccttagccttaaaatagactccacgtccctcccctttctcaccagatatgctcccttttcatttatctaactgtatgctactatttaattgtgtgatgtcttagaagtttcagtggctaatcttgagacagaccaagcctggagacccagctgcaaacctccaaaaattacttcaaaatggctaattaacaacctgaccattgttaaaataatgtcaatccgaggtccaggtggactgaagcccaagatagccaccagaacaaaacacacagacatcatactcagcccatttcttgcatgccttccttatcaagtcttcccttttaaaaaccctaaaaattgctttcccctctaaaaattgaagcagttactttaaatagcaatctggctacttccccctttactagttttgggtaataaatttgctttttattactaaaaaaa

SEQ ID NO: 541189 - DNA, 414 bp, Homo sapiens
ggagctttagatcataaagttataggccttctgccaaaaaggtgcatatatgcacagaaaattttgcatattattgtcagcaagtcacagagcctctgacgctatccaatttaaacagctctggcttggagaaagatgactctgatgaggaggagggcaagccattcctgaaagacaaagccctgactactccaaggctgagccccaggtcaggagagagaacaccggaacaggtccaccttcagacaagaaccccaagattttcaaatgcaggactgtgttatcaccctagacgttaagaagcccaaaagcccccaaaaatagcacccaggagaggacccacctcaaagggaatgattattttccacagaaaagcttgtctatgcctcaagtcagtaaggaaggttgctagcg

SEQ ID NO: 541190 - DNA, 125 bp, Homo sapiens
agatgtagtacagatttactttgaaagaatcgaagtatgtgaatggatggcatgaatggaattgtgaagcacatatgagctctttcagactaccaaggacacagctcatcctatgcttctgggac

SEQ ID NO: 541191 - DNA, 110 bp, Homo sapiens
ctctagaggatcctcaaaagtgcactcttctatatctacaattcaggaaggctgtaaaatgcatttcttgcttgttttagatacctttacaatggggagtgataaattcc

SEQ ID NO: 541192 - DNA, 389 bp, Homo sapiens
ccgtctcccaatccagatgggagcaggacagaaggtctggacacgatgccccaaagaaagtgaaattcctgaatgttctgcaggtaccgagagcagatttagatagttggggaaaattcccgtgatgaattagctaataaatgcagagaaaactgaacaagtaaacaatgagtcaacaacaagtaaacatgaggcaattttttttttgagacaagagtctcactccatcacccaggctggagtgcagttgcacgatctcagctcactgcaacctccgcctgccgggttcaagcgattctcctgcctcagcctcccaagtatctgggactacaggcgcccaccaccatgcctggctacgtaaagtataaaaagcagagatcaggtatcac

SEQ ID NO: 541193 - DNA, 184 bp, Homo sapiens
cacgagggctacccaccaaactgggaaaagaaatcacgcatatcaacattgcacgtcattggccacgtaaattctggcacttccatcactaatggccagccgattgacaaatgccatggcagctatacctgtcccattaagtatttttgcacggacgctgctgatatgggaacgggctccttca

SEQ ID NO: 541194 - DNA, 319 bp, Homo sapiens
caggtaccccagatgctcgcctgggtgagtgggtgctgttccaggctgtcaggtgcgcacctgggggtgcagggtgctgttccaggctgtcagatgctcatctgggcgtatgggtgctgttccaggctgtcaaatgctcgcctgggggtgcagggtgctgttccaggctgtcagatgctcatctcggcgtatgggtgctgttccatgttatcagatgctcgcctgggggtgtgtgtgctgttccaggttgtcagatgctcagctgggggtgcagggtgctgctccaggctgtcggatgctcacctggaggtgaggatgc

SEQ ID NO: 541195 - DNA, 106 bp, Homo sapiens
gggaccagggcgggggctgcggcggggcttgtaatgggggtcccttgctgtggtgagcctgggcgtgtgtcggtgtctggcttttgttgtcgtcgggagggagaac

SEQ ID NO: 541196 - DNA, 338 bp, Homo sapiens
tagcaagacagagtctcgctctgtcgctcaggctggagtgcagtggaacgatctcagctcactgcaacttccatctgccagattcaagggattctcctgcctatctgcctcccaagtagctgggatcataggcacgcaccactatgcccggctaatttttgtatttttagtagagacagtgtttcgccatgttggccaggctggtctggaactcctgacctcaagtgatccacctgcctcagcctcccaaagtgctcggattacaggcgtgagccaccgcaccctgccaacaaattgatatttttaaagtatcttgacagtcgacgcggccgcgaatt

SEQ ID NO: 541197 - DNA, 284 bp, Homo sapiens
cctcaagactgcgcgcgagtgactggcactctccgcccctacctgagatgccgtgcgggccacattgcaagctgtcctctgcctggagaatttctcctcccagctttgtggaacgacacaacaacgccggaccgtggaaggtcaggtagtagcaaaagagctccgtgtgacaaccttgtgacccagtcaacaggacctgagacaggagtaaggttctgagttgacgggctctcatcaacgtctgatccgggacgcattcgcgtgacgcgggtacgcgagcgtcg

SEQ ID NO: 541198 - DNA, 1498 bp, Homo sapiens
aggcgtgcgctgcggcagggggcgtggtcgtgctgtcgtctgctgcgtgctcgcgtgcgcggaggtagacggttcctgtggcgtgtgtgcgccgcggcgtgtctggcggcgggctgcgctcgttcggcggggggtggcccttgggctctctgtgtcgttgctgtccgaggcggggtggctctgctttgattgggtgggtttgtgtcatgggcgccgggcagccgtgcggggttgcgctccatcccgccgtgttgttgcgcgcccccgtgggtgggtgcgccgcggcggctgcttgcgtgcggccgcacgggggaggtggtcggccggctgcttggagcgtggctgtccgcggtggcgcggctatgaatttgtgccgcgccgccgtgttggggttcgtcccgcccgcgtgtcgtgttggtagggtgggcccacgcgcgctcgtggttggttgtgcgggtggcggtggttgggcagggtctgtgcgtctgggtggcgggtcgtgcgggtggtggtgagacgtgggtggggggggccggggctgcttgtgggttcgttatgacgtcgtgggtggtgtgggatggcggggcgcccgttaggtggtgctggggtgggggtcgcggtgtgcggtgggggcggccgcgcgtgcgtgggatgggataggcgctctggtggcgcgtgtgcgcctcagtgttgttgttggggacgggtggtctttggttcggcggcggggtgtggtggccccccggtgggggggggcgccgccgctggtgggcggcgtgttgctgccgggtggatattggcgcgtggggcgccggcgcgcgagggggtggcgcggcggcgggggttgggtgcgctgggtccagggccgcgcgtgggcgggtcgcagcggcagtggctgtgcggcgtggagggggtgcgggcggccccggagtgcttcgccccgagaggttgctgtgcgccccccactcaggggcgcgtgcctccagtatgggggtttgcgtacgatccgggttgtgtgtgtgtccccccgcatgtgatctgcctttcccccccccgccgctcgctgtcgtgtcgcctcgtcttgtttggtggccagcacccgtctgtctcctcacccgtctctctgtgtgctgttccagctcttgggcgcgctctttttatgatagttctcagtgtgagtgtggacaaggacgcgcgtgcgtggtattcagtgcgggccctctctcccgcgtgcgcgggtgcgacgcccctccgcgcccggtgtgtcatgtgtgcctttcttttttgtggcgcccctctgtgtgggttttgttctttgtgtgtcgggtggcccgcttcttgttgtggtatctgtatgtgttgttcttatagacacaccgcacgttgtcttgtgtgcgtgtgccccccccttttgcgcccccaacttgtgtctgtccccagtacttttgcgagagcgccccttgtccaaaagatgtatcaccgcaaacaataaacagaa

SEQ ID NO: 541199 - DNA, 781 bp, Homo sapiens
tctgctctccgttcggagggctcaccttcttgtctgcgctcttcgttggccccctggcggcagaccctcgggtcagggccccgtgaccccgccggctggctcccccgaggggcctcttcccgggttgtctttctggtcgaggtcttccgtgtctgtctgaccttccggataattttcaggggttgtcttcgtgtgtaatccaaaagtggttgcgcgcacccttcagggatcatacttggtcgtcccagcgggcgggtaccctgcggccttagccggcttctatcgcgcttgacgtccagcggggtgtgcttcccgccgggggctactcgcccgcgtcagcgttgtcaccgccgtggtacctctcgggggtgtaaaggctgtgccgtcccacccgggggcctatttgaccccttgtgctgtttgaggggttgcagcggcacttttgacgtgcttgacaatcttttcgtacaccacttcgcagggatactcctcttggacttttcgtccccgtgattcaccaatcgcacatatcctatccccttagcaaagggttacccaacacccacctttatggaaagatgctcccccaccggccgtgttttccccaaaaaaaccatctttcttgatagatgccacattttaatacgccaaccctacaccacatttcgttaagaccgttccacaaaatatgtcggagccccctttttcgttccagccaatttcagcgctctactcacccctttggtcaacgtaccaaaacccaggggctcaaccacaaaac

SEQ ID NO: 541200 - DNA, 480 bp, Homo sapiens
ggagatcggaaagtgaactgatgtcttacctctcccatgtcactccaagtgaaaaatgaaagcatggggcttttcttgcttctgggttagtatgagacatggtgttcatctagagagcaaaatcaacactagacatcacagacagaagtgcccatttcagcaaatccggtaaaaattgtaagttggcatcaagggaaccaatggataccttagggcactgacaattctcaatacatagaaatgcttgagggttgtgtcggttcccctggccacagtttgtcaggttgtttagccagatgccccattggtaaggtagactgaaatctcggtttagggctgaccccaagaaacagtctggttcgtgctttggtatggtggactccagtgtgcatagcagctgctgtcttgctacaagttactcagcttaagttcagattgtgattggtggctcatttcaaaagttttgagattgtactgatt

SEQ ID NO: 541201 - DNA, 143 bp, Homo sapiens
  misc_feature (80)..(80): n is a, c, g, or t
  misc_feature (106)..(106): n is a, c, g, or t
  misc_feature (126)..(126): n is a, c, g, or t
atctaggaggctgaggtgggatcgccccagtactggaggtcagggctgcagtcagccatgatcatgccactacactccancctgggtgacagagtgagaccctctntcaaaaaacctcagtcaatncaaacatacagtatatt

SEQ ID NO: 541202 - DNA, 898 bp, Homo sapiens
gtcagtgtcgttgtgtcaaatgcctagaatgctggtacaaagacagaatatggaagaacctcgtctcactatagttacttttgtcacttggtaatatatgtatttattagagcatgggaatattggtacctgtgtacaagagggtcatttggtgtgagggtgatgagctggtttgtgagtgcactagtatcttgggtcttcctgtatataatgccacgtttaatcttccatacactatagataagactgtgaacattatctttggttacctaatgctgtcctactgatgaggagtgcaaagttgggcataatgtgaactaaaattgagtggaatatgtaagtgggcattttgcaacaaatgaagaggatagcactttatttagatgaaggctggatttctaatctttgaaatatctggaattgtttattgctcagatatttgaagtatgggtgctaacattgcgattgtaaaatgcttggcgtgccatgtttactggcactggagaagacaacaatgggtgatctgggtgatgttttatacaagtgatggtaatgtaccttgcgttgttgagttggcatagcgattgtattaatatcaggattgctccatgaaattcgcggaattagtaccggagaggagtagaagcggaaaggggaggccccacacatgagagtggggggtcggaaggctggtccaatagagtcactattgaggggcgctgtacagaagcgggggctggtattgcacttacggggccgttacactgttttggacaggaacatggctcggagtcacacacgtaggactcaaagagacaaaaagatgagggcgcggaacaacaggtggacgaacacaaacagtccgttaacgcgagacatcgtcaatgcataaaacatg

SEQ ID NO: 541203 - DNA, 123 bp, Homo sapiens
  misc_feature (73)..(73): n is a, c, g, or t
tgacatgatacgactcgagcttagtaccattattttacaattcgcttctgactttctaaatctatttccaggnattcattcatgctacattccaaacactgatttgctttggcccttatcgag

SEQ ID NO: 541204 - DNA, 299 bp, Homo sapiens
ggatctcgtgttcttgtgtggtgcatatatggtgtacagcacttagtagctgtggaggaagatgcagagtcagaagatgaagaggaggaggatgtgaaactcttaagtatatctggaagcggtctgcccttggaggtgggtcgcaaggttcccccaaaaaaaatgtaaaacttgctgctagatgaagatggattgacgatgatgaatgaagaggattgatgatgaagatgattggatggatgatgattttgatgatgaggaagctgaagaaaaagcgccagtgaagaaatctatacgag

SEQ ID NO: 541205 - DNA, 157 bp, Homo sapiens
tcccccaaccggttctttggggtttttttgggggtcgggtttaaaatacccctataaaacctttttttggggttcccggaaatttgggggggtttttttttggttttggcgaggcctttttttttaaggcctcgggggggaaggggggccgcccaag

SEQ ID NO: 541206 - DNA, 822 bp, Homo sapiens
gtagtgttggtgcccgcggggctgcggggctccctgggctgctgcgtgccctggggtctgctgtgcagctgctgcggccctgggcagctcccgctactgtgacacctcagtgcatgtggccttgtctgtcgaatgctctaggcctttccctgatggcctggaaatgtgattgcttgtcatgctgtctgtgtgcatttgctagtgtctggtgcatgtggtggttgctgtgtgtgcttggtcctgtgtgctcttgcagttcgtgcttgtgatgttgccatgttgacctgtgatgcttgcaccccccccagtgctagtcctgtgtgtcatcacctgttgtgcctacctactacttaccttgtgaaccaacaccatgcaatcctggatgtgtgtgtttccatgtgtagtaataaagcaggggtagttgctgccatccttgcacacaggcattgagactatcagttggcgctacctgccacctttggtgcgtgctgttgttgctaacaacggtgatgtgattgaatgctaaaatgtgacggcttggcgtttgcgtgaggtgtcgcgagggttcaaatgacgggcccccaagttgagagattgggggaggagttgttccaattgcggtgcccatgagggagatgcttggttcggacatagttatcccccagagaaagccaataaccccaaaacaatgattgatgtggtttggatccgaaggctatgacaagacaacagtggaggcacatttggccccccttgaacactcaagcttacaatctgtgcgagaacgctaagggcattggtaggttcgaggactaccgtact

SEQ ID NO: 541207 - DNA, 647 bp, Homo sapiens
  misc_feature (598)..(598): n is a, c, g, or t
ccataaatataggctaaggtacgagctggttaatcggccgagggcgttcatcctgacagcacacttcacatgaggctgatgcacagggtgtaattggcttaaaaattctttggtatttttttgagatggagttcactcttgttgccaggctgagtgcatgcacaatcctccagctcagtgcactccgcctcccgggtcaagcgatctcctgcctcagcctcgtggagtagctgggattacaggcgtgccaccaccacgcccagctaattttgtattttagtagaggcaaggtttctccatgttggccaggcttgaactccggactcaggcgatccgcccgctcagcctcccaaagtaaccgggattacaggcgtgtgccactgcgcctggctaaatttcataacagaaccatgacagcagaatctacctttgcaataagaatgtttcccaggagttagagaccagccctgggcatgatggtaaagaccccagctaattatacaaaaaataattagccgggtaggtggagtgcatctgtggacattcgtggtcccagctactaggtaagctgaggcgggaaatcacaagtccaggagtntgaggctgccgtgaccgcataggtgatgacgagcgagaccctgtctctt

SEQ ID NO: 541208 - DNA, 236 bp, Homo sapiens
tccaggttccctcgttctctaagagtgtccctcaccaccccagcccagttttaaggcacctgccttaaagacctgctcctaacagcatgtactgtacttggtgatgtgtatctaacatcacctggtgtgcattagaaatgcggaccctcaggcgctacctagatctattagatcagaatctatattacatcgagattccaggtcatgtgcatgagcctcaggagtcgccctgtcgt

SEQ ID NO: 541209 - DNA, 1085 bp, Homo sapiens
gagacgttcttcgccgagagtcgtcggggtttcctgcttcaacagtgcttggacggaacccggcgctcgttccccaccccggccggccgcccatagccagccctccgtcacctctatcaccggaaccctcggactggccccaaggcccccgccgccgatccagcgccgcgcaagccaccagccagccgacacgcacgacctctccctaaagtcggccgccatgacgaccgcgtccacctcgcaggtgcgccaagaactaccaaccaggactcaggaggccgcaatcaaccggccacgatcaacctgggaagctctacgcctcctaccgtaaacctggtccatgtcttaataacttgtgaccgggatggatgtgggctttggaagaacgtttggccaaatacttactttcagcaaatctcatgaaggaagagggacacatgctgagacaccctgcatgcaagctgcagcacccacaccagggggcccgaactctaccctccaggatcatcaagcaacacgagaccgtgctgcacggcaaacacccgccctgaatgcaacggcaggtgtgccttaccattgggacacacacatggcgaactcaggccacttacggggaaccgggccaaaaactggccaagtggacaaaagtcgcaccccaaagtggtgtgacttccatcggacgacacattaacctggaactgagccaggtgagaggcgatcaaagaatgtggggacccacggtgaccaacggtgcgcaaagagggaaccgcacagaaatcggcggagcgcaaaacatctccttggaaagggcacacctggacgcacgggataatggaagcaaagcccgcgcgcaagttcccccaatacgggggggagacactccggggccaccagggcgcaggactgcacattggggcacgcctaaaccatcataaggtcgtgccacgaccccacataagagcctgcagtgcgaaaccactcagataaacgcgtgccgcgaaacaagccacacaacaagctgtcggcccccgcgaacacaacaaatggggcgccaaaaatgaagcctgcacccacgagggtcacaa

SEQ ID NO: 541210 - DNA, 150 bp, Homo sapiens
gtcgtgtactggaatcctgggcacattcatctccagggggcagaggcaggactcagtatcatcatcctgaggtccgcagtcgcccaacttccatgggcagctgggtgtccggtgccggaactgcacctcagcaccaacctggctatccgt

SEQ ID NO: 541211 - DNA, 424 bp, Homo sapiens
  misc_feature (165)..(165): n is a, c, g, or t
  misc_feature (169)..(169): n is a, c, g, or t
ataaagccgatatcaaagataaataaaatcgctcaaaacgattttccctgtattcactgccgttgcgcaaaatttatctatttgttcaaaaaatgattgagtcttgactggctcatccaatgtggaaaaatgtgacttttatcacataatagtactaagtctgantttnccgggttatctcaaaatggaatacggttcgacaaagatggaagagagactctctcgcagccctggcggcaaactggctttgtgggctttctatacatggtgtggctatttcgtctgggcaatggcgcgttacatctgggtgatgagccggattcccgatgcccccgtgtcgggatttgaaagcgattttaggctctaccgcgggaaatggttaggggcactggtcggatttttatttatggctctggtcggggcc

SEQ ID NO: 541212 - DNA, 404 bp, Homo sapiens
gatgatcatgatgtgcacatgatccgtctcctctccctgcgtatccggtattaggtgatcatgattactagatagaatcatttcttgcgcagagagcctgatgccgagatgcatatttgtgacctgaatcggattacggctctcaccgttgaaaggccgatttgcgggcacttagcgcccgatgagcattaacagactacctgtgaagccctggaggctgtccgaatttgcgccaacatgaacatggtccctagcctgtgttcagaaagcttgcatatcccagaagctctccaccccttacacgatgtgcggataaacggagcgtgcacagcacagctcattgaggtgttcaacaggcatgcttatgagccattaggcctcattgcactggtcggtgctcacat

SEQ ID NO: 541213 - DNA, 469 bp, Homo sapiens
  misc_feature (24)..(24): n is a, c, g, or t
  misc_feature (54)..(54): n is a, c, g, or t
  misc_feature (408)..(408): n is a, c, g, or t
  misc_feature (437)..(437): n is a, c, g, or t
  misc_feature (444)..(444): n is a, c, g, or t
tgagacagaatttctttcttcttncccaggctggagtgcaatggcgcaacttgngctcactacaacctccacttcctgggttcaagcaattctcctgcctcaggctcccgagtagctgggattacagtcttgcgccaccatgcacgactaattttttgtatttttagtagagacaggttttctccatgttggtcaggctggtctcaaactcctgacctcacgtgatctgtcctctcggtcccccaaagtgctgggattacaggcatgagccaccgtgtctccagccaagacaagttttatgttctataaaggatcggcttattatatgcttcttctccatgggaagtaatatattaaaattcatttttatctacagtgtgggcccttgggtgggggaaaagctccccnttcctgctctgaggagtgaactccataantgggggntgccatgggtgctgccacaacccag

SEQ ID NO: 541214 - DNA, 136 bp, Homo sapiens
ttgtgctgcagctgctgctgctgctgttcgatgagtgtcattgcagcagaaggatctgtttgtggaggaaaaggagatcgaggagctgaagtcagagagagacacgctccttgctcggattgaacgtattgaaagg

SEQ ID NO: 541215 - DNA, 207 bp, Homo sapiens
tgaccaaagtagtacccaaatgctgaaatactagtgaggggtcgggtgtggtgacgcttgcctgaaatcccagcactttggaggccaaggcggacggatcacttaaggccagcatggtgaaagccatccctactaaaaatataaaaattagcagggcgtggaggtgcatgcctgtagtcccagttacttgggtactacgctttggca

SEQ ID NO: 541216 - DNA, 213 bp, Homo sapiens
agctcggccctgttaggtgcagtgcagtcttcagctctgtcatggaagctgagagccctggtaaaccactggtgtaagtccaagagtccacaagctgaagaacttggagtctgatgtttgagggcaggaagcatccagtatgcgagaaagataaaggctggaagaatcagcaagtctgttctttctatcttcttctgcctgctttattctagc

SEQ ID NO: 541217 - DNA, 153 bp, Homo sapiens
aaattaacagcccgtcgacatggctagctgaacagccaggcctacagaagccaggcctacagaaggaatgcgaacatttaggtgacctatacagtgggaactcatgtgacagtacttgaggagctgccaatcagatgactcaattctgtcttc

SEQ ID NO: 541218 - DNA, 401 bp, Homo sapiens
tggatgcggctcatgctaggctgcggctggctcgtaatcgggccacaggccgcctcctcattgttcgggccggctcggcagcacatgtgtcaggcgcacatcaggcacatcatccattcgggcttgcatgtggggcaggggtgtttcaggggttggctcagggtcatcttgtctgggtcgcctcggcggtctggtgcagcatcagtgttcctgtccttccggcgcagccggcacagcagccagtcaagccgcagggcgtctttgcatggtgtcagtcaagggtggcacaggtgcattttcatcggacatgggcaggtgcatcctcagggggttgtttgcatcccgtttcgtgcaagactaggccgcatcccaaagcggggcatcctctcacagtcgcacct

SEQ ID NO: 541219 - DNA, 582 bp, Homo sapiens
  misc_feature (205)..(205): n is a, c, g, or t
  misc_feature (217)..(217): n is a, c, g, or t
  misc_feature (378)..(378): n is a, c, g, or t
gtgagatactattgccagtgagtgaggttgagtgagcagacacgcactgattcatctggtcagtgatctcccactcagtcccgagtagctggacacaggcatgtgcacatggccagtaatttttgtattttagtagagacgtgtttcaccatgttggccaggctggtctcgagctcctgacctcaggtgatctgcccacctgggnctcccaaagtgnctggattacaggtgtgagccactgcacccagccaatatttttaatttttaacttttgtgggtgcataggtatatatatttatggggtacatgagatgttttgatacaggcatgcaacatgaaataatcagagggagaatggggcatccattccctcaaacngttatctttaatattacaagcaatccgaattacacactttatataaaaatgtatattactgactgtagttaccctattgtgctgtcaaatagtaagtcttactcattctaactatgtttttgtacctctgttaaccacccttctactctctatgtccatgaattcattgttttggatttagatcacaccgtgagacgtgtgatg

SEQ ID NO: 541220 - DNA, 696 bp, Homo sapiens
agcggtctcagtcgccgctgccaactctcgacactctgtgcttccgccggctccgccgtcgcgttctctgcctgagtcgcaactggaagcaagagatcgccgcgctggctcattgacaatggctccgtgcatgtgcaaagctggtttttgctgggtgacgtactgctcccctgagccgtgatttccttccatcgctcgcggtcgtccccatcactaccagggtcgtcatggtgggcgatgggccagaaggactcctacgttgggcgacgaggcccagtagcaagcgtgtgcatcctgaccctgaagtaccccgattgatgcatggtcgatcgtcaccaactgggacgcacatggtagaagtatctggcatccagcagccttctacaagcgagctgcggcgtggccccggaggagcacccagtgctgctgatccgagagcccccttgaaccccgaatggaccaacagacgagacagatgactcatgattctgttctgagaccttcatagcatcctccggccactgtacgtggccatccagggccgtgctgtcccttctatcgcctctgcggtcgcactcactggcattgttcatggatctctggaagaccggggtcacccacacaggtgtcccatctacgcatgggctacgccctcccccacgccatcctgcagtctggacctggcatggccgtgga

SEQ ID NO: 541221 - DNA, 257 bp, Homo sapiens
ggagatgggatcttgctttattgcccaggctggagtgcagcgtgtgatcatgactctgtcccaggctcgagcatacttctacctcagcctcccgagtagctaatttctgttttttgttttttttttttttgagagggagtctcgctctgtcgcccaggctagagtgcagtggtgtgatcttggctcactgcaagccccacctcctgggttcataccattctcctgcctcagcctccaagtagctgggtctacaggtg

SEQ ID NO: 541222 - DNA, 437 bp, Homo sapiens
gactgtcgaccaggttgcccagggagggtgaaccggcccaggttgcgaatagagcagatgaaacatctctcctatgctgatcagtagtgggattgcacctgtaaaaagccactgcactccaacctggacaacacagtgaaacccgtctcttgaaaataaaaaattaaaagaattttttaggctgggcacagtggcttatgcctgcaatcccagcactttgggaggctgagccaggcagatcagttgaattcaggagtttgagaccagcctggccaaaatggtgaaaccccatctctactaaaaatacaaaaaggcgtggtggctcgcacctgcagtcctagctattcgggaggctgagacagagttgcctgaaccctggagggggaagttgcagtgaacagagatcgcgccactgtactccaatctggtcgacagtc

SEQ ID NO: 541223 - DNA, 317 bp, Homo sapiens
aaaaaaaccaattatggcttattttttattttgttgcagtggggttaactgttaactcatgtaagggtctgtgatttcctccctggttggtctctctctctgtaatcctccttgcaaattttcccccgggcagcgttttttgattaaaggggagctttggccccgtatgcttttatttagccgggacttcccgatggttttaattctcgatgctgtgatgacccccatatggtcttttgtgtttttgagcggctcttctttccttgtttgcccgcgtggctcgttgctgttgccccattaagcttgtgttcgttcca

SEQ ID NO: 541224 - DNA, 365 bp, Homo sapiens
aaggtggcacttgtggggaatccgggggcggaaagtcccgttggtgaacctgctgctcggcctctacccggtcaccgagggcgccatcatggtggccggcaacgatatctctcaggtgaccccggatgccttgcgacgccgtatcggagtggtcttccaggatccggcactgttctccggatcgatccggaagaacatcgcctacgccgaccgcttcatcaagcggttctcccagcagtacgacaccctcgtcggggagcgcggtatcaagctctccggtggccagaagcagcgcatctcgattgccagggccctgctcaaggacgcccgtcgacgcggccgcgaatttagtagtagtagcgacc

SEQ ID NO: 541225 - DNA, 122 bp, Homo sapiens
  misc_feature (7)..(7): n is a, c, g, or t
tcttagncaaaaaaggcaacagatgttttattcttcattgcattttactgtcattcaccagtcgttttacaacgacacatctggcaaacacatggagttacccatcttaatcttttttgagt

SEQ ID NO: 541226 - DNA, 334 bp, Homo sapiens
  misc_feature (59)..(59): n is a, c, g, or t
gtacatttggggggggcccccctcccccctttttttaatttaaaacagcccctttttantgtggggtggagccttcccccttttttggcctcctgggagggtcccctttattttttacccctgccccccccccccggttttgggggggggttttttaaaaaaaaaaaaattaaagccccccaaattagtccgtttgggggccgtgggtttaaagggggttttttttccccccaatttttttgtaaccgttggggggtttcccccccccccgggtttggcccttaaaataaagaaaaaaaacccccttctttattaaagtggccaaaaatgggga

SEQ ID NO: 541227 - DNA, 428 bp, Homo sapiens
agtgagagttgtgcgactctcctttttgcttgaacacatagaagcattgccgggttattcagtgacctagtttcaatattgtgtcccagggaatagagaggcccaaggagagggagagagatggaacagctggttggtggagcaatcagaacaaacatacatttattgattcaatttacagtcttatgtggggtggttcagtcatcccaaagcaattaccatagtaacatcaaagatcacgatcaccaaaacagatataatgaaaaagtttaaaatattgcaagaattaccaaaatgtgacacagacatgaagtgagcacatgctattgggaaaatggtactgacagacttgcttgactcagtgttgccacaaaccttcaatttgtaaggtgcagtatctgcaaaggcaataaagtgatacacaataa

SEQ ID NO: 541228 - DNA, 254 bp, Homo sapiens
aggttgtcaatattgtaagtcaaaatgccagctaaggtgaatgggtattcatagggcatgttcttatgcgttgtacgttccttcaaggtaggcgcaatgtggaatgtggtgttgtaaaccacattcatggaagcgatgtgccttcagagtctcgtggagtgatctcagagataacaccgtgaccgtgatcagccttgtatatgtgcgcacctctatttacacagctcgcgtgccgtattcgtacagcccggggg

SEQ ID NO: 541229 - DNA, 183 bp, Homo sapiens
ccccccccccccccccttttttttaccttttttatttggggcaaagggcttgttccctttttcccccaaccccttttgggttccttttttccccagggggggggaaaaaaaacaaaacttttttttcctcccccttttcatgggccttttttttttgggggcaaaaataaatccccgtcccca

SEQ ID NO: 541230 - DNA, 374 bp, Homo sapiens
ttatatttacaaggggatttagagggttctgtggggggatttaaagttgaactaagattctatctcccacaaccagctatcaccaggctcggtaggtttgtcgcctctacctataaatcttcccactattttgctacatagacgggtgtgctcttttagctgctcttagggagctccgctggtttcgggggtcttagctctggctctccttgcaaagttatttctaggtaattcattatgcagaaggaatagggggtagtccttgctatattatgcttggctataatttttcacctttcccttgcggtactatatctattgcgccagggttcaaattctatcgcctatactttatttgggtaaatgggttcatt

SEQ ID NO: 541231 - DNA, 344 bp, Homo sapiens
taacatgatacaatcgagctctgtacctgtgggtagcagaactagggatcagttgaggttgtaagccatttaccaatgatagttgtaggtaagaagggcagattattagagaaattgtgaaaatatgttgcagtgggcagctcagcagagaaggggctacctgcaaggaggcaagggctggaggaaagttttatagggtcctggtgaagggtgctatgtgctgaaatgaggtcattgtgcccgcaggttgtttgtgattagctgtctctaacaattgttcatacaataattgttcattattgttctcaacttggggctctccccaacctggggacccttcctta

SEQ ID NO: 541232 - DNA, 553 bp, Homo sapiens
  misc_feature (22)..(22): n is a, c, g, or t
  misc_feature (33)..(33): n is a, c, g, or t
  misc_feature (35)..(35): n is a, c, g, or t
  misc_feature (38)..(38): n is a, c, g, or t
  misc_feature (101)..(101): n is a, c, g, or t
  misc_feature (290)..(290): n is a, c, g, or t
  misc_feature (442)..(442): n is a, c, g, or t
gacgccacttctatgcacagtnccaatccctgngnccntatttgaagaagaaggatgaatctccggaaggccacccccgtatctccgtccctagaagagcntgagaaactggacgggctctacgagtgccattctctgtgcctgctgtagcacccagctgcccccagctactggtggaacggagaccaaatatctggggcctcgccagttctttatgcaggcctatcgctggatgattgactcccgagatgacttcaccgaggagcgcctggcccagctgcaggaccccnttctctctataccgctgccaccacccatcatgaactgcaccaggacctgtcctaagggtctgaatcccgggaaagctattgccgagatccagaaaatgatggccacctataaggagaagaaagcttccgtttaactgtttccctgctaaacntgatttataacccgctcagagctgaacataatttatatctaatttgagttcccttaaagatcttggttttccctgaataccgcaatgtataataaaaattttaagaaatta

SEQ ID NO: 541233 - DNA, 420 bp, Homo sapiens
tcgcgacgcgtattatccttacgattatttagtccaataacattgagtatttttcttcttagtcttgaatatcatgaaggtatcagcctgtgacattaaaattttgaaagtccttagtccagatggtatgatacttgaacgttatccaggagcttgtattcaagacgtccttgtaagacgccctttccataaactctcctggccagtcttcctgaaaatacagaaatgacatcacagctgctatgttggattaaggagaggaagaagtcctattcttgtagaagcagagactttgactgtcaacgatgtggagctttcctcgccagtggctgagttacgaacagagcaaacatagagcccgctatgcttagtagtaatatgggggactaaacagatttggtcctgattgctgaaacttcc

SEQ ID NO: 541234 - DNA, 1168 bp, Homo sapiens
cccacgcgtccgggcggagcagaacggattgcacggtcagccatgtcatctgagcctcccccaccaccacagccccccacccatacaaagcttcagctcgggctagctaggacacccctacggagccgtgagcgctcaccagtcccctactagcaggaggacaacgtaggtcccaagcccactgacccactacgccggacgaggaccttctcgcgcgacgtgtgcgcggcttcacagggccccgtctacaaagcgagtactgcaaatgcttctgccggtccaagggccatggcttcattaccccagctagatggcggccccgacctcttcctgcacatctctgatgtggaacggccgagtatgtcccagtgcaaggcgacgaggtcacctatacaaatgtgctccatcccacccaagactgagaagctgcaggccgtggaggtcgtcatcactcacctggcaccaggccccaagcctgagacctggtctggacatgtcatcacgctcctaggaccatgctgcgaagcacccccttgacctgtagcatgtggcaccactccgccccggacgcaggcacgccagacactggaacatgacctaacttccacacgacgacggcgcttcacccgggcattgcctccactctcaacgtatcctcacttgagagcgaacgggcgctactcgcggcgagccacggtgctcaccgatgctagcgccatgctacccggcgcccatcacgacacagcgctactgcccccacttgcccaccaccccactcccacccatctgacagaggccatttacgcagccttcaacaaccgcggcacaccgcacacacccgacgcacataccaaccaacgccaacccacccaacccgacacacacacaacaccaccacaaccacacagggcctccacgctacacatcaatcaagccctcacccacacgacagccaccaccaccccgccatccccgcaccaccgcacaacccacagcgaaccccacaacggcccccccatcaacaggcccaccgcggatgactctaaacccccaaacccaccacacacccacactcccccacacccgacagacgcctaacccgcccgccagccaacccagcccaccactccaccgaccccacgcccaacccccgcgcgctgcacaccca

SEQ ID NO: 541235 - DNA, 109 bp, Homo sapiens
acttcgccgccggcattaacactattctcaacagacctcctaggcgaccagacaattacaacctagccaatctctattttacaccaatccctctggcaaggaacccacg

SEQ ID NO: 541236 - DNA, 157 bp, Homo sapiens
  misc_feature (150)..(150): n is a, c, g, or t
gtcagacagcagcacatgtgaaccgctctactaaaatacaaaaaatgagcggcatgtacaggtgtctgtatccagtaggagctgaggcagagatctctgaactgaaggcgaggttgagtgagcaagatctgccattgcactccagcctgngggacaa

SEQ ID NO: 541237 - DNA, 143 bp, Homo sapiens
  misc_feature (126)..(126): n is a, c, g, or t
tgtgtgtgtggtacactactgtacgacgggacgtatacgggctgtgacctacgtactgttgacgtcctgtacagtacggacgacgtgactactttgactcacggacgacaccgtgggttactacgncacacgacgacgttctc

SEQ ID NO: 541238 - DNA, 605 bp, Homo sapiens
attacaggtgcccaccaccacgcccagctaattttgtatttttagtaaaatggggtttcactatgttagccaggcttatctcagactcctggcctcaggtgatccccctgccttggcttcccatagtgctgggattacaggtgttagccaccacgcccagcctatatgtattttttgagacagggtcttgctctattgcccaggctgaagtgcagtggcatgatcacagctcacaaatgccttgatctcctgggctcaagctatctcctcccacctcagcctcttaagtagctggagctacaggttatctgccaccacactcagctaatttttaattttttagaaagacggggtcttcctgtgttccccaggctggcccaaactcctgggctcaagcaatcctgccttacctcccaaagtgctgggattacaggtgtgagccaccacatctggcccaagtcacccaaattttttacagcttggttggaaggcaatgtagtatattaaacattatgggccctggagtcagaacagatccaggtttgaatacagagtccgcatctattagcttcatgaatttgagcaatttcgtctcacttgtcaaa

SEQ ID NO: 541239 - DNA, 170 bp, Homo sapiens
tggtatcactttataggtaaaatccttatgcaactatgcaaagaatgctcatgaaattaaaacctcttggacgcacaccatctgtatagctctgcgatccgaagacctcccgctatattacaaaatgacatgcttcaaaagaacttaaacttccttggctacagtatcac

SEQ ID NO: 541240 - DNA, 108 bp, Homo sapiens
tcctgatgttgtagcgggacttgttggttcatcttagttaatgtgccaaggtgatctaagttgcctaccttgaatttttttttaaatatatttgatgacataaaggcc

SEQ ID NO: 541241 - DNA, 152 bp, Homo sapiens
ggtacttcgacccattgttggctggcattaaccgctgatgtagtgtagccgacagacccattatagaccatgaactgtaggcttggaccgctaaaatccttatgggattggtcccttaaggttggttataccgttaacgagaataagggggg

SEQ ID NO: 541242 - DNA, 434 bp, Homo sapiens
  misc_feature (245)..(245): n is a, c, g, or t
  misc_feature (249)..(249): n is a, c, g, or t
  misc_feature (255)..(255): n is a, c, g, or t
  misc_feature (285)..(286): n is a, c, g, or t
aatttgtttgtattttttatttacattttatatttttgtacatattgttagggtcagccatttttaatgatctcggatgaccaaaccagccttcggagcgttctctgtcctacttctgactttacttgtggtgtgaccatgttcattataatctcaaaggagaaaaaaaaccttgtaaaaaaagcaaaaatgacaacagaaaaacaatcttattccgagcattccagtaactttttgtgtaagtnactnatcgtnactaaaaagatggtttgtctagaatagttnnaaaaagcccaaatacaaaagtttcctttttttccttttttgtctatgaagttcctgtttcctttttttggcctgtctgatgtatgtgtgaaacaatgttgtccttccttttacagaaattttattttgataagttgttaaaacaaaaa

SEQ ID NO: 541243 - DNA, 183 bp, Homo sapiens
ttcccattgccctcgattcccaacgaatgaataagttttgccaaagcttgctgtaataaagtataaatggggccaggcgcatgttgtgctacagacgcgtaatcctagcactctagtgaggccaaggtcggcagattcgcgtaagcacaggaggtcataggaccagccggtcgacaatcagtc

SEQ ID NO: 541244 - DNA, 265 bp, Homo sapiens
gcttgggcacaggagttcatacactagcctaggcagcagtagcaagaccttgtctcaaaaaaaaaaaaaaaaaatcggggcttaaccaaggcatttatttcccgggggattaagttttaactgtttttgaggaaagctttttttttatttggaaatggcatggggtagatatgaattttacatgaatggtaaagctgggagacttcaaagaaggtttatacttatggcggcaggttctttccaagtttatgggctccctctaagg

SEQ ID NO: 541245 - DNA, 409 bp, Homo sapiens
  misc_feature (103)..(104): n is a, c, g, or t
  misc_feature (124)..(124): n is a, c, g, or t
  misc_feature (271)..(271): n is a, c, g, or t
  misc_feature (290)..(290): n is a, c, g, or t
  misc_feature (299)..(299): n is a, c, g, or t
  misc_feature (312)..(312): n is a, c, g, or t
  misc_feature (339)..(339): n is a, c, g, or t
  misc_feature (355)..(355): n is a, c, g, or t
  misc_feature (407)..(407): n is a, c, g, or t
cattttccttttcaggtatggcagtggatatcagaccgtggagagagaatggggttaacttttgaacaatctgaatccaatccttcctcaaggcccaacaacnnaaaaacaagtacctctttgnttggaagagttaaatttcttgcattcagtacactggccctcatcctcagaggtaacctctacatcggtatcatcacttaaggacttagaagtcctccaggtcatcattttttcccacttcaatcacctgatttgtctgtaaatcagntgagccattacttctaggngtataagtngctttctcaagtntccctaaaaaccaccaaggcaggccanctacatcccactcctnaaatccaaggtccagcctagatgtttcatctttgggctaaatttttcaattnaa

SEQ ID NO: 541246 - DNA, 129 bp, Homo sapiens
cagaggatccccatacagtagtatactagtgcatgaaccacataaaagctggtgcaaaatctgattttgagattaaattattacatagcagcttatcttctgtcaacattttaaagccaaaatcagttt

SEQ ID NO: 541247 - DNA, 869 bp, Homo sapiens
  misc_feature (239)..(239): n is a, c, g, or t
aagcggcacacacagcactcgaacacgggggcgaccagttatcacccacagcgcgtgtcaccactcggggaagaaggcgccgcctcgtgtgttgctgtaaaaaccggctgggaatcgcggtgcccgccgccgcggggtagccacgggccgtcggcacgggggtgctccagcgcaaggtggggtgtaccaaaggccccggacgggaccccgcaccagggggagtttccctgtcgaaagcngcggcacgtgcctaagaaaaaaggcgcttccgggcccaaccaccgtctgttttaatgtggggtaaacaccatttcgtggtttcaaaaacgctggtttgccgccggtcttcgatagaaaaatgggagtaagaaggaaatccccgcggaactcgcgccggttcgtgggagcaccccctcgcccccctgtacgcggggcgccaccccgtcttgctattatggcggacaattcttgccttgcgcccattttttcagacgaaagtgtctccacacgcctgtccctgagctatggggaaaaatgcttaaaagcttgcgtcccaaaccagtgtccctaggagtctgtcttctttatttgggccacacccccccgcgtgttgacgtgctcctcatggatgcttaccaacaggggggggggattatataaagaccccacgcgcacttttatgcgggggcccgggtctgctgatgtgacaccggccttgttctcccccccgtaggtttaccccctgccgaacgattagtccccgggctgtagttccgtcaccagtctaatacccggccgccatctgggggaaaaacacgtttataagggcccgggatagcaaaaaagaaaaatatgaatccttcataaca

SEQ ID NO: 541248 - DNA, 944 bp, Homo sapiens
cgggagagagcaggcgtggtaagggtgggagagaggacagaaagggagaggaacaggacggttacaggtggtgacactgggacgagctggggcaccaactggtagacgtgggggcagacgtggcaaccccgatgggaatgaagcgcactgcgggtatcaacgaaattcctgggaaggttgcataaacacaggcggcaagggatttttcctccgtgcaagcaaggcgggcctctgtaaacacccaaacggccagcgctggggttacaaccacgccgtcgcgggtggtggtggccacaggccccacaaaccgtgggggtacacccatgagcccgttactttaagccccgccgttaatgatcacacttccagtaggcccacgaatcaaaatatattctcaaggggggagaaaaatcacccccaacttttaaacgggcaaactttggttattaataaagaaccactatgggcaaggaggtcattaaactgaggtatattaccgctggacatgtattccccgctcccaggtatcggtcccgtagtaaagtgcccccacccttcattggatcgcgcgcactttcattgtggcgcctcaacagatgtcctccttaataacaaaatacgctctttcttagagcaaatactactagaacataaacaattgagaaacaataacgtgactcgtttacccctttttcaacacactttattacttcgggttgtagttacaacaggccgagtaaattcttttacatcaaaagcgtgcacctacgagtatattggtctgtcttcgcatgccccgcgctcgtatttcgtgtctgccactaaaaattccatgcatatggttacacgaccttttcttatttttacaatttgaaagttcgcctcaaaacgcctttttttaaaaaaaaaaacccaaatacaccaagctttttacaaacataaca

SEQ ID NO: 541249 - DNA, 792 bp, Homo sapiens
  misc_feature (107)..(107): n is a, c, g, or t
  misc_feature (196)..(196): n is a, c, g, or t
  misc_feature (459)..(459): n is a, c, g, or t
aagccagaactccacagggccacggctgggctgggaatggaagccgaggactcggcgcggaggcggctaccaagccggcgaagaatcggcgcctcctcctgtgaggncccggtggctggctcctggaaaggtgggtgagcgacaacggagagcaaccctcggagggcagcaaacagatggaccattaacatggttnaccagagttcctttaattgggcaaggttacaaccaaggtccagatggaaggggtaccagcaattcatgggtgcatcctctcccttccttcatggtggtcctggccattccattagacacaacagggaagagttgggaacatggaaccttcaacatctctttaacagcaacacgttggaatctaaacctctcatagcaaccaggagaggaccaggttaagggttaacaatgtgcaggttcaggacagcaacccagggtaccttnaccaagatttccatccagcaacattcccttataaaggaattccggaaggtggcctttaataacaatgcgcggaagcaatccaaagcgcatttccttcaatccaggtttcctgggagccagggaaactccatctctttccggcgcgcattaacaaggcatattgcgtgaactgggccaaaccttggagtggacgaatccttgggaaccatgattagcccagattggagagatctaacggcatcttgcttacctttaaggggtttcccaaattggcttatgtgataacttcagaataattgatgaccaatatggtccggagggagctcccctgtg

SEQ ID NO: 541250 - DNA, 116 bp, Homo sapiens
atgctttggggtaaaccatggcgtcggcgtcatcatcagaataagaataagcagcaattaacaggcaatacactgccacagtgaggcgggtgtcataccaggtcctggggacctgc

SEQ ID NO: 541251 - DNA, 351 bp, Homo sapiens
gtggagcgctgtgcctttgtcaagataccatctctgtttgatgatttctttctatgctgtttttctacaaaatgttagtaagctctgtcatgcttctagcaaattgtaagactaattatttgtttccacctcataacctgttgcaataaatattactgctcatacagtttaatattgttgtttgttggagaaatgaccgtaaacttgatttgctgttcagtttcaatgattcaggacacccattaaggtgcagttatggtataaataggggaatggcctgtaatgcttttgaggggtttgagggtcccagaggctactggaatggggcgtctcccattcgaccccccgaat

SEQ ID NO: 541252 - DNA, 222 bp, Homo sapiens
gcacaaggagggggggaaagatgtatcagcggctctgcgagcggctcagccagccccatggaactcctatcgtacttcaagcagccggtgatagccaccaggacggcggtgagggccgctgactgcctgcacgtggctctagacctgctgcagaggaagctgcggcccctgtggcgaaggccattcaagtgtcactgagtgtgctgcacgcccgcccagcct

SEQ ID NO: 541253 - DNA, 683 bp, Homo sapiens
agcgggagtggatgaggagtgagtggctgggctggtgctggcgtgctgtgtcagtacccgcgggtgactccccgtctcaccgcttcgcaggcagtaccagctcccgggccgggtgcctgaccgggactgcgggtcctcattgcgcgttcccctggggctccgtgaacctgagcagcaacctgattggcaacccgtgtgtagagggtatcgtgatacggcgcagcctgggccgtcgagccatcgtgcacgcagtattgaattcccactcttgaagcagaactgcaatgcgaacgagcatgtaagggctgtcgctcgtgcaagtcctcacgactcgatactcaatgtgtgtgaaatcacccattcgggagaaaccatgcactgtgcccgagtggactaggactgggacagagctgagacgagtgaaggcgctggtctcgtacttcactccgctggttgctgcgagttgacagcccaggatgggactctcgtcaataacgttgctttgaaagcacgccgtgactcaacttgtttcaactccttcgtaggtaggggcccccttatgtgacccagtggtgtatattacccggtccctttaaatctggtagtgacattgtgtgcttttggcacgtaaatcaagcgatattcgtagacaataaaagcaattatccaacgggcgaacaatc

SEQ ID NO: 541254 - DNA, 339 bp, Homo sapiens
taaaaatataccaaaattggaggcaggtgtggaagtcatacccgtaatgcaacactttgggaggctacaggcacgtaccaccacaaccggctaatttttgtttgtttgtgtgtgtgtgtgtgtgtgtgtgttttgtagagacagagtttcgtcatgttgcctaggctgttctcaagctcctgtgttcaaggaattcgcccacctcagccttccaaagtgctggcattacaggcgtgagccaccatgcccagctatttgtgtatctaagcatagaaaaggtacagtaaaaatatggtattatattcttgtgggaccacaatcattgaaccggatagcttg

SEQ ID NO: 541255 - DNA, 158 bp, Homo sapiens
tacatctatgcatcctcattttaaggactcctgtaacgttaacgtttaagtcggaaattgtagtctagcaattcacttatctgttatagttcattttgattatataaatcctatttctgaaggaatttttagccagtctgtatatggacctaccaaat

SEQ ID NO: 541256 - DNA, 354 bp, Homo sapiens
tagagatccccaggggggacagttcagttcatggcaaaactcgtaagcacattcagcactcacaatagtcatgcactcggataggcaaggtcatgcagaacagtcaagtaaaccatcttaaaagcccagctaatagggtaagtgccagcaaactatggcaggaatagccagcaatactttcccttcttccgcagacatggtagcatggtatcagtgaggaatcacgagaccggggctctagttccaagtcggcccttactagcacggtgtcacttcccctctcagaccctaaatatcacttgacagttaacaacgggacggcggggctacaaatgatctcccgtcgcttcctac

SEQ ID NO: 541257 - DNA, 392 bp, Homo sapiens
  misc_feature (264)..(264): n is a, c, g, or t
  misc_feature (285)..(285): n is a, c, g, or t
  misc_feature (329)..(329): n is a, c, g, or t
  misc_feature (378)..(378): n is a, c, g, or t
ctacctcctccatctccccgaccaagcaatcctcccatgtcagcctcctgagtagctaggactacaggcacaccaccatgcccagctaattttttaaatttttagcagagataaggggtcttgctatattgccctttctggtatcaaactcctcagttcaaacagtcctcctgcctcggctcccaaatttgctgggattgcaggcatgagccactgcgcccagccttgctattattcttttatctcaacccccaatggtgctgntctgtaactatgacagggagntttggcactggcattttttgaccttagctttagtaggtaggaantctgcagccataggttaacagaaaggcaccaattggactattccaaatnggagaattcataga

SEQ ID NO: 541258 - DNA, 200 bp, Homo sapiens
tattttctccagggaaaaacgatcgctatctttcaattgcataatacacatcgactaattcagcaggcaacactgactaatcaaactaacctcgaaacaaatgataaccatacacaacactaaaggacgaacctgatctcttatactagtatccttaatcattattattagccacaactaattatactctcggaccaatg

SEQ ID NO: 541259 - DNA, 150 bp, Homo sapiens
ccaagtttggggccaatgccatcctgggcgtgtccttggccgtgtgtaaggcgggagcagctgagaagggggtcccctgtaccccacaatgagatttggttgggacccctacctatactccagtgcacgcttcaatttaataacggggct

SEQ ID NO: 541260 - DNA, 524 bp, Homo sapiens
  misc_feature (3)..(3): n is a, c, g, or t
  misc_feature (70)..(70): n is a, c, g, or t
  misc_feature (151)..(151): n is a, c, g, or t
  misc_feature (185)..(185): n is a, c, g, or t
  misc_feature (195)..(195): n is a, c, g, or t
  misc_feature (203)..(204): n is a, c, g, or t
  misc_feature (242)..(242): n is a, c, g, or t
  misc_feature (301)..(301): n is a, c, g, or t
  misc_feature (306)..(306): n is a, c, g, or t
  misc_feature (310)..(310): n is a, c, g, or t
  misc_feature (321)..(321): n is a, c, g, or t
  misc_feature (328)..(328): n is a, c, g, or t
  misc_feature (343)..(343): n is a, c, g, or t
  misc_feature (354)..(355): n is a, c, g, or t
  misc_feature (358)..(358): n is a, c, g, or t
  misc_feature (502)..(502): n is a, c, g, or t
gcnggcatgggtgagtgggacccaggcctattacccggccagagggtttgggggcctctctcctgggggnctgctctttccacacgccgcctttgccagccagggctgtcttggacactccggggggtgggctgaggggcacatgattccngatttggtcttcttttgttttgttatttttacantggggtttcntggcctgnnttcccgggggtatgggttatttgcagtgctgttttttnttttagtcccggtttttgttcaaaaacaatgatactccccattgggctgtatttttgcncaagntacnaaagtgccttnacaggtncagttctgctggtcnatctgcttacnnaanggctccatggtgtcagctacgcccaccccactccggcccgatgtcattcgggtcacctcgctccaggtgtctgtatctgggtcgtaacactccacactgtccaggaacgtgtgaccatcatagcctccaaggacgtagattctnccctggtggacagtgatcccca

SEQ ID NO: 541261 - DNA, 279 bp, Homo sapiens
agggaagataaaaaaaaatcttcctagtctcaagtcttcaggcaagagcaatatgactcctgtgtttctgtagcctgctggaacatctaggcagaaagtggctgtactgccctgctaccaacattctccatggcgttgggagaggaacgaagtaccctgcagagaactgaatgtacacaggtagctgctgagatgtgtctagtctggggccacacagctgagcaggatcagttcagaaatgagggaaaaccgtggatgttcctttaaaaagcaaatcat

SEQ ID NO: 541262 - DNA, 524 bp, Homo sapiens
ggtacctgtctataaggagtcctgcttatcacaatgaatgttctcctgggcagcgttgtgatcttggccaccttcgtgactttatgcaatgcttcatgctatttcatacctaatgagggagttccaggagattcaaccaggaaatgcatggatctcaaaggaaacaaacacccaataaactcggagtggcagactgacaactgtgagacatgcactgtgctacgaaacagaaatttcatgttgcaccctgtgtttctacacctgtgggttatgacaaagacaatgccaaagaatcttcaagaaggaggactgcaagtatatcgtggtggagaagaaggacccaaaaaagacctgttctgtcagtgaatggataatctaatgtgcttctagtaggcacaggggctcccaggccaggcctcattctccttctggcctctaatagtcaatgattgtgtagccatgcctatcagtaaaacgattttgtgagcaaacactagaacctaaagcaagagcaaaggcgagat

SEQ ID NO: 541263 - DNA, 880 bp, Homo sapiens
ggtacctgtctataaggagtcctgcttatcacaatgaatgttctcctgggcagcgttgtgatcttggccaccttcgtgactttatgcaatgcttcatgctatttcatacctaatgagggagttccaggagattcaaccaggaaatgcatggatctcaaaggaaacaaacacccaataaactcggagtggcagactgacaactgtgagacatgcactgtgctacgaaacagaaatttcatgttgcaccctgtaagtctcaagccagtgctggccaagagggggacatagctgtcctctgaggaacagctactccctctgtgcaaaattccaatcttcaggggttaagtacggttcagttttcatagactttataatagagtagtttcagattcacagcaaaaactgagcagaggtaccagaaatttcccatgtgcctcctgccctcaaacatgcagactccctgttatcaacatcgtcccaccacaggggggtattctgtatgactgatgaactacctgtgcacatcattatcacctgggtccatagttcatgtagggcttcctcttggtgtgtggaatgggggtaagttcaggacctatttctttcttttaacacatgtgggcagtcacaatggtcagctgtaattccagcattgggggcgaggggggaccaggaggcgggacgaagcctcctaggaaagtggaaccggttctctaaaacaaaagaaaaaaaatgtggggcccgccgagaagttaaacctgggggggcgccaagaaaagaaagagcagagcaagaccggcagacaggggtcccaaaagccgggggtgacagcagctggttgtcgagaacacgcgcgacgcgaaacacacacgagccagcg

SEQ ID NO: 541264 - DNA, 1166 bp, Homo sapiens
agcggaggtcttggggcgccgcggcggaaatcgcgcggatgccagaacgcgctctcagcttcgggtcctgcggctgcggctgccgccatcatggtgcggaagcttaagttccacgagcagaagctgctgaagcaggtggacttcctgaactgggaggtcaccgaccacaacctgcacgagctgcgcgtgctgcggcgttaccggctgcagcggcgggaggactacacgcgctacaaccagctgagccgtgccgtgcgtgagctggcgcggcgcctgcgcgacctgcccgaacgcgaccagttccgcgtgcgcgcttcggccgcgctgctggacaagctgtatgctctcggcttggtgcccacgcgcggttcgctggagctctgcgacttcgtcacggcctcgtccttctgccgccgccgcctccccaccgtgctcctcaagctgcgcatggcgcagcaccttcaggctgccgtggcctttgtggagcaagggcacgtacgcgtgggccctgacgtggttaccgaccccgccttccttgtcacgcgcagcatggaggactttgtcacttgggtggactcgtccaagatcaagcggcacgtgctagagtacaatgaggagcgcgatgacttcgatctggaagcctagcggatctcccactttgcatggctgtcttttacagatgggaaaactgaggcctgatgctggagattctatgagggtgctctcctcaagggtatcagacggtcgtaggttcttaagaatttgattcatcagtggcaggccatgcatagagccacgggaggtgcgtccttgttttccaggaaatgttcttagaacttggactactgattattaattgactgtgccttgggaaacagtgggaagtaacttggtgcagcactggggtattgttggcttcttgtgttggaaactttgtaatgtaaaaggaaaaactggaaatccccacgccctgtttccctttatcgtcttgtggttggactggttcaattcgtttaactcgaattcttgctcctggccgtggttaagctgtgtacagatgatggagagtttggcctcaagtttttataaactgagcgagactagtgttcaggatctcctcccttgtttaaatgtcaataaatgccccaactgctttgtaagtgcaa

SEQ ID NO: 541265 - DNA, 456 bp, Homo sapiens
  misc_feature (22)..(22): n is a, c, g, or t
gctctaccgctatctccctcgnaatgaccttcttgatccaaatcagtcaggtttcaagactagtcattcaactgagactgctcttctctgtatcacggaggcgctccgcactgctaaagctaactctctctcctctgctctcatccttctagacctatcggctgccttcgatactgtgaaccatcagatcctcctctccaccctctccgagttgggcatctccggcgcggcccacgcttggattgcgtcctacctgacaggtcgctcctaccaggtggcgtggcgagaatctgtctcctcaccacgcgctctcaccactggtgtccctcagggctctgttctaggccctctcttattctcgctatacaccaagtcacttggctctgtcataacctcacatggtctctcctatcattgctatgtcgacgcggccgcgaatttagtagtagtaggcgg

SEQ ID NO: 541266 - DNA, 827 bp, Homo sapiens
ggtacctgtctataaggagtcctgcttatcacaatgaatgttctcctgggcagcgttgtgatcttggccaccttcgtgactttatgcaatgcttcatgctatttcatacctaatgagggagttccaggagattcaaccaggagtaagtcttggcttttcaatgtttattatgttattgcagcctggtagatggacctgtctgcagatgaaagcctttgtgtttctgtttgttgtttcttgttttttgagatagtcatgctctgtctcccaggctggagtgcagtggcaccatttcagctcactgcaaactcctcctcccgggttcaagcgattcacctgcctcagcctcccgagtggctgggattgcaggtgcgtgcccaccaggcccggctaattcttggtatttttatgtggagatgggttcaccatgttggccgggctggtctcgacctcaggtgatccgccgcctcagcctcccaaagtgctgggattgcaggccagcatacattacagtggggcgagccactgtgccggcccaggtagcttagtttcatctctatgaacactgaatgaagcacacagtacagccaacatatttgggggaaacttagaacacgtgccagaggaagtaacattagtcatactgctctaggtagacgacttccacagagcaggcttccgtttttccacacaaaaaaacaaaaaaatttggcggccggccgaatttaaaatttggggggccgggagaaagcgagtgccagaacgcgcaggtgtccaaaaccggcggtaaccgttgtgttttcgcctccctcccccgggacagaaaa

SEQ ID NO: 541267 - DNA, 369 bp, Homo sapiens
actgtttataggcatgaatcctttgtgcattagtacataagttggttcagtaaagcatttgtcatatgtcctttctatgccaatcactgtgctgccattggactgtaacagacacaaaaaataattcctctgctcatgagtttctagtttagacgagagaaatacaaacgaacagacaagcacaatataactacctctaactacggacgaaaacacgggtgcatcggtgtcacttggtgggacaccaggtcttgactgtgtgtggggtgggactaagggacctgctgacgacgaccgtacatttctaccctgagtaacgtaactctgagagacacgactgagacgtgctccagactacgggtgccggat

SEQ ID NO: 541268 - DNA, 1258 bp, Homo sapiens
gctcgaggttgcagtgactctttctgttcaggccagaaccctctgggatgcttctcagccattgtatccatcagtagtcaagtgaagtgcccgtgcagagtagctccctgagacggtggcctatgcccacgtcgtgcgctgtatctacgatggcgactgaagtgcttgacaggtgtgcaagctgcgccctgcggtggagtcctagatcagcatgcgaagatcgcttgtggtgccattatacgagtgagtaagactctaacacaatcagggcttgtggacaatgaacttgctgtactgagccccgtctggtgcaagtagctccgaggatatgccatgggcatcggtcagtggtctcggcgtggtcatggtaccgaggacatgcgtcggtccactatcgcgccttgttgacattcataggtgtgaggacttccatgtgccgacgtgggtgaaaactctagatgcccagatccgggcgtagggaccgggctggcagcatcccttcgaggagggcccctcttgactttgacagacgacgaaagtgcctacaagaggaaggcacattccacggagggtcagccaacgggggtgcactccgtttgagtgcgtggacaacctctggatttcgcctacgcggtattgctacgcgagcctgagagagcgtacctacgaacgacgagcggggaggtgcggaccaactgtctctatgaggccctaccacttgaagcgactctgtccgtgcatgattctaatcgtattcaggactttacatcctcttgccttggaaaaccgtaaattgcattgagttaccaaatttgccccctggtctacggcgactgcccatatccaaaaggcacgagatgatagaacttctacccttcccagtccggggggcttcagggagatgctcgcccaggggcaatggggagtggccaggtgcaggtacgaaggggaataccgtgtggaatgcccgatgtcaatgtcggccacacgcaacggggaacccccaggggagggaacgcaggacgcccggggacccccggaggcagcaacccggggggaaggccccggatcggaaccccgagcggaagacccgagtccggggtaggatgagcagagcccgccggaaaacctagagcagggagaacggagcagtggtgagcggtccgatgagtacagcaggcagggaacccgagtagccactgtagaacaaactacacaagctcaggagccactgtcaagcgggagtgacacgcacagg

SEQ ID NO: 541269 - DNA, 336 bp, Homo sapiens
  misc_feature (1)..(2): n is a, c, g, or t
  misc_feature (74)..(74): n is a, c, g, or t
nncagggcattcacatttatttctgagcatctgctaaacatcttcaaccacaaaggtaaagttgtttgaagaancgtttctgcaacacgatgtggtcataaagtacctagctatttcactgaggtcacttggcaacagtgtggtgactggtccttctggctgatgggggctccaagaactacttgttctcaattgtgcttatgtgtttcccagcttcttatccctgtccccccagcgggccaaggcagatggcacaggccctcaccccctgttagtggtgtagatagcgtccgcgcttgacgaaggcgcgccaagaacatacgccccgatgatgta

SEQ ID NO: 541270 - DNA, 1096 bp, Homo sapiens
agcggaggtcttggggcgccgcggcggaaatcgcgcggatgccagaacgcgctctcagcttcgggtcctgcggctgcggctgccgccatcatggtgcggaagcttaagttccacgagcagaagctgctgaagcaggtggacttcctgaactgggaggtcaccgaccacaacctgcacgagctgcgcgtgctgcggcgttaccggctgcagcggcgggaggactacacgcgctacaaccagctgagccgtgccgtgcgtgagctggcgcggcgcctgcgcgacctgcccgaacgcgaccagttccgcgtgcgcgcttcggccgcgctgctggacaagctgtatgctctcggcttggtgcccacgcgcggttcgctggagctctgcgacttcgtcacggcctcgtccttctgccgccgccgcctccccaccgtgctcctcaagctgcgcatggcgcagcaccttcaggctgccgtggcctttgtggagcaagggcacgtacgcgtgggccctgacgtggttaccgaccccgccttccttgtcacgcgcagcatggaggactttgtcacttgggtggactcgtccaagatcaagcggcacgtgctagagtacaatgaggagcgcgatgacttcgatctggaagcctagcggatctcccactttgcatggctgtcttttacagatgggaaaactgaggcctgatgctggagattctatgagggtgctctcctcaagggtatcagacggtcgtaggttcttaagaatttgattcatcagtggcaggccatgcatagagccacgggaggtgcgtccttgttttccaggaaatgttcttagaacttggactactgattattaattgactgtgccttgggaaacagtgggaagtaacttggtgcagcactggggtattgtatcgtcttgtggttggactggttcaattcgtttaactcgaattcttgctcctggccgtggttaagctgtgtacagatgatggagagtttggcctcaagtttttataaactgagcgagactagtgttcaggatctcctcccttgtttaaatgtcaataaatgccccaactgctttgtaagtgcaa

SEQ ID NO: 541271 - DNA, 901 bp, Homo sapiens
atgattgtggcctcattccttaagcacccccacacctggaaagcatatactatattacaaaatgacatttagctcaataggacttgattgaatataatgaagctttacagtattagatgatgtcatctgtcactatagggtcatacaatccattcttaaagtacttgtcattagttattattattactgttagtcttgctgccccagggtatcagtccttcaagggagccatcctgttgcagcgaccatggcagatggccgcctcagctttgagaggctcgtcccttcgaattaactctcgctggctcaggcatgccccgcacttctttgagctgaccttgaagagttctatgtgtagcctggatgtgacttagactcacctggtgtggatcatgtcgctatattgatctaagatggaagaagctgaaagaatagtgtgagggctaattctcatatacagtagactagcgctatcatacagtcaatgatacacttttagctcgcgtatgaagtgagaggaatggcgcgaggaatagaggctatagaaatgtcatgatgatcacgagggagtgtaaagtcagtaagatactttcaaggaggcttacattaaacaaatctggttttagagtagagtgagttggactgacctgctagaatacccattgttgctcaatgatcatgtggccaggtaaacagattatagttgaaatgacctatcaaggctagaccggcgggcaagttcattgaccctgttgaaagaaagatgctgaaccattgattgctagacaaagaagaattcgggtgccaatccgaaaaacctgaaaccatcgcgttgcgtcaccaatgacacacttaactcgattttccccagcaacacctccatgggaaggggaaaataaca

SEQ ID NO: 541272 - DNA, 1023 bp, Homo sapiens
  misc_feature (1023)..(1023): n is a, c, g, or t
agcggaggtcttggggcgccgcggcggaaatcgcgcggatgccagaacgcgctctcagcttcgggtcctgcggctgcggctgccgccatcatggtgcggaagcttaagttccacgagcagaagctgctgaagcaggtggacttcctgaactgggaggtcaccgaccacaacctgcacgagctgcgcgtgctgcggcgttaccggctgcagcggcgggaggactacacgcgctacaaccagctgagccgtgccgtgcgtgagctggcgcggcgcctgcgcgacctgcccgaacgcgaccagttccgcgtgcgcgcttcggccgcgctgctggacaagctgtatgctctcggcttggtgcccacgcgcggttcgctggagctctgcgacttcgtcacggcctcgtccttctgccgccgccgcctccccaccgtgctcctcaagctgcgcatggcgcagcaccttcaggctgccgtggcctttgtggagcaagggcacgtacgcgtgggccctgacgtggttaccgaccccgccttccttgtcacgcgcagcatggaggactttgtcacttgggtggactcgtccaagatcaagcggcacgtgctagagtacaatgaggagcgcgatgacttcgatctggaagcctagcggatctcccactttgcatggctgtcttttacagatgggaaaactgaggcctgatgctggagattctatgagggtgctctcctcaagggtatcagacggtcgtaggttcttaagaatttgattcatcagtggcaggccatgcatagagccacgggaggtgcgtccttgttttccaggaaatgttcttagaacttggactactgattattaattgactgtgccttgggaaacagtgggaagtaacttggtgcagcactggggtattgtggcttcttggtgtgaacttgatggaagggaatggattccagcgttctttgtggggggaggtcaagtaaacaattgctgggggaagtaaaaaagaaatggctatagggaagn

SEQ ID NO: 541273 - DNA, 1021 bp, Homo sapiens
  misc_feature (325)..(325): n is a, c, g, or t
  misc_feature (432)..(433): n is a, c, g, or t
  misc_feature (436)..(436): n is a, c, g, or t
  misc_feature (438)..(439): n is a, c, g, or t
  misc_feature (443)..(444): n is a, c, g, or t
  misc_feature (446)..(447): n is a, c, g, or t
  misc_feature (480)..(480): n is a, c, g, or t
  misc_feature (485)..(485): n is a, c, g, or t
  misc_feature (491)..(491): n is a, c, g, or t
  misc_feature (499)..(501): n is a, c, g, or t
  misc_feature (503)..(503): n is a, c, g, or t
  misc_feature (517)..(517): n is a, c, g, or t
  misc_feature (521)..(521): n is a, c, g, or t
  misc_feature (529)..(529): n is a, c, g, or t
  misc_feature (545)..(545): n is a, c, g, or t
  misc_feature (548)..(548): n is a, c, g, or t
  misc_feature (556)..(556): n is a, c, g, or t
  misc_feature (571)..(571): n is a, c, g, or t
  misc_feature (573)..(573): n is a, c, g, or t
ccaggctggtacgggcggagatgtacggatggttgccggaagaagtggcgaagttacttttgagggtatttgagtagcggcggtgtgtcagggctaaagaggaggacgaagaaaagcagagcaagggaacccaggtcaacaggagtagttcactccgcgagaggccgtccacgagacccccgcgcgcagccatgagccccgctcccccgctgttgcttggagaaggggcgggacctggagagaggctgctccgtgaccccaccatgtcctctcctaccacgagttccctggatacccccctgctctggaaatggcccccctcagnctggcgccccttcttcttcacccactgtaaaggaggagggtccggagccgtggcccggggggtcctggacccatgatgtcccagaggcactgatgtaggccagtctnnagncnntgcnngnnacagactgggtcatcccagatcccgaagagganccacnagcgcnagcgatannnangggcccagccccgnaagnatgctcgngccacgagctttgccngtngtctgtgngggacaaggcctccngncttccacctacaaccgtgctcgagctgcgcataggctcgcaaggtgcttcttccgtgcgcgcagggtgcgtcctgctcggtggggccatggcggctcatgcctgcccgtgggtcggcggcgaccctgccgacattggacccctttcatcgcttgcgccgtagtgccccatcgagttgcccggccttgcgtcacatgttgccacggacgtgcccgcggacttgacccggttgcgggatgccgctcccttttccgtgcctgcatcccgtagtccgggacgcagcgacccgatttcgccgtgactgacacgcccgcgccgacggttcgccagctccccaggtcgcctagtcccctcgtgtgggccgcctgggccagcatcgcgcttctgccctctggtggcctgcggggcttcccctgccctgcctctcgcggccctcccgccctggcgtc

SEQ ID NO: 541274 - DNA, 669 bp, Homo sapiens
agcggaggtcttggggcgccgcggcggaaatcgcgcggatgccagaacgcgctctcagcttcgggtcctgcggctgcggctgccgccatcatggtgcggaagcttaagttccacgagcagaagctgctgaagcaggtggacttcctgaactgggaggtcaccgaccacaacctgcacgagctgcgcgtgctgcggcgttaccggctgcagcggcgggaggactacacgcgctacaaccagctgagccgtgccgtgcgtgagctggcgcggcgcctgcgcgacctgcccgaacgcgaccagttccgcgtgcgcgcttcggccgcgctgctggacaagctgtatgctctcggcttggtgcccacgcgcggttcgctggagctctgcgacttcgtcacggcctcgtccttctgccgccgccgcctccccaccgtgctcctcaagctgcgcatggcgcagcaccttcaggctgccgtggcctttgtggagcaagggcacgtacgcgtgggccctgacgtggttaccgaccccgccttccttgtcacgcgcagcatggaggactttgtcacttgggtggactcgtccaagatcaagcggcacgtgctagagtacaatgagggaaccgcgaaggaaacctttttccggaattccccttgggggggaaaaaaaagg

SEQ ID NO: 541275 - DNA, 923 bp, Homo sapiens
  misc_feature (325)..(325): n is a, c, g, or t
  misc_feature (432)..(433): n is a, c, g, or t
  misc_feature (436)..(436): n is a, c, g, or t
  misc_feature (438)..(439): n is a, c, g, or t
  misc_feature (443)..(444): n is a, c, g, or t
  misc_feature (446)..(447): n is a, c, g, or t
  misc_feature (480)..(480): n is a, c, g, or t
  misc_feature (485)..(485): n is a, c, g, or t
  misc_feature (491)..(491): n is a, c, g, or t
  misc_feature (499)..(501): n is a, c, g, or t
  misc_feature (503)..(503): n is a, c, g, or t
  misc_feature (517)..(517): n is a, c, g, or t
  misc_feature (521)..(521): n is a, c, g, or t
  misc_feature (529)..(529): n is a, c, g, or t
  misc_feature (545)..(545): n is a, c, g, or t
  misc_feature (548)..(548): n is a, c, g, or t
  misc_feature (556)..(556): n is a, c, g, or t
  misc_feature (571)..(571): n is a, c, g, or t
  misc_feature (573)..(573): n is a, c, g, or t
  misc_feature (653)..(653): n is a, c, g, or t
ccaggctggtacgggcggagatgtacggatggttgccggaagaagtggcgaagttacttttgagggtatttgagtagcggcggtgtgtcagggctaaagaggaggacgaagaaaagcagagcaagggaacccaggtcaacaggagtagttcactccgcgagaggccgtccacgagacccccgcgcgcagccatgagccccgctcccccgctgttgcttggagaaggggcgggacctggagagaggctgctccgtgaccccaccatgtcctctcctaccacgagttccctggatacccccctgctctggaaatggcccccctcagnctggcgccccttcttcttcacccactgtaaaggaggagggtccggagccgtggcccggggggtcctggacccatgatgtcccagaggcactgatgtaggccagtctnnagncnntgcnngnnacagactgggtcatcccagatcccgaagagganccacnagcgcnagcgatannnangggcccagccccgnaagnatgctcgngccacgagctttgccngtngtctgtgngggacaaggcctccngncttccagtacattacgtgctcagtctgctaaggctgcaacgggcttcattccgtgctgcagttgtgcgctgccgtgtgtnggggccatgagtcgctattgcctgctcggggctggggtggaatcctgtcctgtatggactgctttcatgcggcgcaagtgccggcagtgccgtctgcgcacttgcttggccggcagggatgagggaacagtgcgtcctttctgaagaaacgactccggaagaagaagaatcggaaacaacagcagcaggagtcacagatcacagtcgcagtcacctgttgggggcccgcagggcaagcagcaagctcagcctctgggcctggggattccc

SEQ ID NO: 541276 - DNA, 334 bp, Homo sapiens
  misc_feature (22)..(22): n is a, c, g, or t
ctggagtacattggtacccacntttgtgtgggaggcctaggtctttgacagtgttctggggcaatttgtgactagaattagtggactaacagttccagtctttgtcacacaccaaagtcctttcaagtgactggcaccacaaggtgaccaaacagtatttgaccagtcgacgcgccaccaacacctaacaagctgttacctgaaagtgcttattaccagcattgactgtaatgtgttttaccccatctagtcatccccaggatacaatactcccaggccatccaacttcttgttagcagttggcttgctacccccaagccccagtagaaaccac

SEQ ID NO: 541277 - DNA, 1573 bp, Homo sapiens
agcggaggtcttggggcgccgcggcggaaatcgcgcggatgccagaacgcgctctcagcttcgggtcctgcggctgcggctgccgccatcatggtgcggaagcttaagttccacgagcagaagctgctgaagcaggtggacttcctgaactgggaggtcaccgaccacaacctgcacgagctgcgcgtgctgcggcgttaccggctgcagcggcgggaggactacacgcgctacaaccagctgagccgtgccgtgcgtgagctggcgcggcgcctgcgcgacctgcccgaacgcgaccagttccgcgtgcgcgcttcggccgcgctgctggacaagctgtatgctctcggcttggtgcccacgcgcggttcgctggagctctgcgacttcgtcacggcctcgtccttctgccgccgccgcctccccaccgtgctcctcaagctgcgcatggcgcagcaccttcaggctgccgtggcctttgtggagcaagggcacgtacgcgtgggccctgacgtggttaccgaccccgccttccttgtcacgcgcagcatggaggactttgtcacttgggtggactcgtccaagatcaagcggcacgtgctagagtacaatgaggagcgcgatgacttcgatctggaagcctagcggatctcccactttgcatggctgtcttttacagatgggaaaactgaggcctgatgctggagattctatgagggtgctctcctcaagggtatcagacggtcgtaggttcttaagaatttgattcatcagtggcaggccatgcatagagccacgggaggtgcgtccttgttttccaggaaatgttcttagaacttggactactgattattaattgactgtgccttgggaaacagtgggaagtaacttggtgcagcactggggtattgttggcttcttgtgttggaaactttgtaatgtaaaaggaaaaactggaaatccccacgccctgtttccctttatcgtcttgtggttggactggttcaattcgtttaactcgaattcttgctcctggccgtggttaagctgtgtacagatgatggagagtttggcctcaagtttttataaactgagcgagactagtgttcaggatctcctcccttgtttaaatgtcaataaatgccccaactgctttgtaagtgcaaaaaaaaaaaaaaaaaaaaaaaaaaacaacttgttgggcggcctttggcgtgtgaaaaagtttttttaaaccattgtgggtttggtgggcgcgggggccgccagattgggttaggttgaacacggttggggtcaataagggtgtggttccctaagagagaactctgggggtaaagtaagcttaggttcgttgggagttttttcaaccaatgtataaaagaaaacgcgccggggggggaaaaaaccagagaacgtgtgttcttgagaaacaatttcccaggaatgggagtatcagcgaggggagcaatcatcaagcggggtgattttttattaaaaacggggggattgtacgaaaaggacagagcgttcgagatattaaaattttaagcgcccgcggcagtggtggaag

SEQ ID NO: 541278 - DNA, 437 bp, Homo sapiens
  misc_feature (410)..(410): n is a, c, g, or t
atacggcctttggcgggcagttgccgccagtagcgccaggccggtgggcgcgccagttcttcgtcagtctgttggtcgaaggtgcgcacctcgatcaagcgcgggtccatccattcattgagcagcttgacggtttcgcccttgccggccccttcaatgccgttgatcaggatgatcaccgggaagcgcttctgctgttgcagctcatactgcacttccagcaaggcttcgcgcagcgccggcacctcggcgtcataggtgtctttgtcaatggcgtgaccgatttcggcggattcgaacatgggcagctccgtttcaagatggctcaagactagcggattgggcagcacgccggtcaaggaattccaaccggcttgccgtggatcaatccgcgcggccaaagactaatncccgggcacgtggcaaatgcccagctc

SEQ ID NO: 541279 - DNA, 1591 bp, Homo sapiens
agcggaggtcttggggcgccgcggcggaaatcgcgcggatgccagaacgcgctctcagcttcgggtcctgcggctgcggctgccgccatcatggtgcggaagcttaagttccacgagcagaagctgctgaagcaggtggacttcctgaactgggaggtcaccgaccacaacctgcacgagctgcgcgtgctgcggcgttaccggctgcagcggcgggaggactacacgcgctacaaccagctgagccgtgccgtgcgtgagctggcgcggcgcctgcgcgacctgcccgaacgcgaccagttccgcgtgcgcgcttcggccgcgctgctggacaagctgtatgctctcggcttggtgcccacgcgcggttcgctggagctctgcgacttcgtcacggcctcgtccttctgccgccgccgcctccccaccgtgctcctcaagctgcgcatggcgcagcaccttcaggctgccgtggcctttgtggagcaagggcacgtacgcgtgggccctgacgtggttaccgaccccgccttccttgtcacgcgcagcatggaggactttgtcacttgggtggactcgtccaagatcaagcggcacgtgctagagtacaatgaggagcgcgatgacttcgatctggaagcctagcggatctcccactttgcatggctgtcttttacagatgggaaaactgaggcctgatgctggagattctatgagggtgctctcctcaagggtatcagacggtcgtaggttcttaagaatttgattcatcagtggcaggccatgcatagagccacgggaggtgcgtccttgttttccaggaaatgttcttagaacttggactactgattattaattgactgtgccttgggaaacagtgggaagtaacttggtgcagcactggggtattgttggcttcttgtgttggaaactttgtaatgtaaaaggaaaaactggaaatccccacgccctgtttccctttatcgtcttgtggttggactggttcaattcgtttaactcgaattcttgctcctggccgtggttaagctgtgtacagatgatggagagtttggcctcaagtttttataaactgagcgagactagtgttcaggatctcctcccttgtttaaatgtcaataaatgccccaactgctttgtaagtgcaactttttaatctgtctggttttctttttttctctagagacggagtcttgcactccagcctaggggacagagtgagactctgtctgaaaaaaaaaaaagaaaagaaaaaaaatgtaagacagtgattcagaaagcaagctctggagccaaatagcctagtctgagtcctgacccctatgcttagctagctgtgtaacattgattgttttaccgagcctctctgtgcctccgttttcctcatcataaaaatgtggtaatattggaggggggtgtggaattactgtttaatggtacagagtttctgttttgggtgatgataatgttttgaaggctgggcgtggtggctcactcttgtaatcctagcactttgggaggccgatgcaggtggattgcttgagcccaggagttcaagacctgggcagcgtgg

SEQ ID NO: 541280 - DNA, 526 bp, Homo sapiens
  misc_feature (16)..(16): n is a, c, g, or t
aaggaaatttaccccncaatatatttatttgacgtattttgaaatggccctacaaagctgtctcttgtgggggaaactgcattctgtagagaatctccttctcttattaggtcttttctggagagtctgacaccttttaaggcctaaaaagaaaaattcatcatctgttctctctgaagcctgctacctggaggcttcatctacatgacttaagccaagcctcccttactttaacttaagctgacttcatcttttcaggtaaagtttaactctctcaaccaattgccagtcaggaactctttgatctacctctgacctggaaacccccatcttcaagatgtcctgcctttccaggccaaaccagtgtataccttacatgtattgatttatggctttgcctggaccttctgtctccctcaaatgtataaaactgtaacccgactacctcgggcacatgttctaagaacctcctgaggccccatcctgggctttgaaccttggcaaaataaacctataaatgtattga

SEQ ID NO: 541281 - DNA, 1038 bp, Homo sapiens
agcggaggtcttggggcgccgcggcggaaatcgcgcggatgccagaacgcgctctcagcttcgggtcctgcggctgcggctgccgccatcatggtgcggaagcttaagttccacgagcagaagctgctgaagcaggtggacttcctgaactgggaggtcaccgaccacaacctgcacgagctgcgcgtgctgcggcgttaccggctgcagcggcgggaggactacacgcgctacaaccagctgagccgtgccgtgcgtgagctggcgcggcgcctgcgcgacctgcccgaacgcgaccagttccgcgtgcgcgcttcggccgcgctgctggacaagctgtatgctctcggcttggtgcccacgcgcggttcgctggagctctgcgacttcgtcacggcctcgtccttctgccgccgccgcctccccaccgtgctcctcaagctgcgcatggcgcagcaccttcaggctgccgtggcctttgtggagcaagggcacgtacgcgtgggccctgacgtggttaccgaccccgccttccttgtcacgcgcagcatggaggactttgtcacttgggtggactcgtccaagatcaagcggcacgtgctagagtacaatgaggagcgcgatgacttcgatctggaagcctagcggatctcccactttgcatggctgtcttttacagatgggaaaactgaggcctgatgctggagattctatgagggtgctctcctcaagggtatcagacggtcgtaggttcttaagaatttgattcatcagtggcaggccatgcatagagccacgggaggtgcgtccttgttttccaggaaatgttcttagaacttggactactgattattaattgactgtgccttgggaaacagtgggaagtaacttggtgcagcactggggtattgttggcttcttgtgttggaaactttgtaatgtaaaaggaaaaactggaaatccccacgccctgtttcccttttacattacaaagtttcctacacaagaagccgggtcctctagagcgccgcgaggggg

SEQ ID NO: 541282 - DNA, 1091 bp, Homo sapiens
agcggaggtcttggggcgccgcggcggaaatcgcgcggatgccagaacgcgctctcagcttcgggtcctgcggctgcggctgccgccatcatggtgcggaagcttaagttccacgagcagaagctgctgaagcaggtggacttcctgaactgggaggtcaccgaccacaacctgcacgagctgcgcgtgctgcggcgttaccggctgcagcggcgggaggactacacgcgctacaaccagctgagccgtgccgtgcgtgagctggcgcggcgcctgcgcgacctgcccgaacgcgaccagttccgcgtgcgcgcttcggccgcgctgctggacaagctgtatgctctcggcttggtgctcctcaagctgcgcatggcgcagcaccttcaggctgccgtggcctttgtggagcaagggcacgtacgcgtgggccctgacgtggttaccgaccccgccttccttgtcacgcgcagcatggaggactttgtcacttgggtggactcgtccaagatcaagcggcacgtgctagagtacaatgaggagcgcgatgacttcgatctggaagcctagcggatctcccactttgcatggctgtcttttacagatgggaaaactgaggcctgatgctggagattctatgagggtgctctcctcaagggtatcagacggtcgtaggttcttaagaatttgattcatcagtggcaggccatgcatagagccacgggaggtgcgtccttgttttccaggaaatgttcttagaacttggactactgattattaattgactgtgccttgggaaacagtgggaagtaacttggtgcagcactggggtattgttggcttcttgtgttggaaactttgtaatgtaaaaggaaaaactggaaatccccacgccctgtttccctttatcgtcttgtggttggactggttcaattcgtttaactcgaattcttgctcctggccgtggttaagctgtgtacagatgatggagagtttggcctcaagtttttataaactgagcgagactagtgttcaggatctcctcccttgtttaaatgtcaataaatgccccaactgctttgtaagtgcaa

SEQ ID NO: 541283 - DNA, 713 bp, Homo sapiens
cttttctggaggcagctgaagactgacgctgccctagtcacctcggaagccccgtagaccatcagggacaccgagctttaggtaactctcacagtagagggatggtagagagcggtctacagcctgagacccatcaccagctattgcaacagaggctactctttggttttcaagaaagagtgtggctgcgcgtggtggctcatgcctgtcatcccaacactttgggacaccgaggcgggaggatcacgaggtcaggagttcaagaccagcatggacaacctggtgaaacctcatctctactaaaaatacaaaaattagctgggcatggtggtgcgtgcctgtaatcccagctactcaggaggctgaggcaggagaattgtttgaaccgggacccaagaggtgaggttgcagtgaaccaaggtcatgccacagcactccagcctgggctgcagagcaagactccatcacaaaaaaaaaaaaagtgtagtttaattgtatgtataattgggctcaaagaaaaataaaggcatttccctctagcaccaccagattttcttctctctgtaccttatgatgcaaatttggctattggattttcacctgagttgttccctttaatgtgcaaatttaaggctatttagctgacaattgcctaggatggtgaaagaggttatcaagaatctgaaaagtctaagatagaacacaaaaaacag

SEQ ID NO: 541284 - DNA, 942 bp, Homo sapiens
agcggaggtcttggggcgccgcggcggaaatcgcgcggatgccagaacgcgctctcagcttcgggtcctgcggctgcggctgccgccatcatggtgcggaagcttaagttccacgagcagaagctgctgaagcaggtggacttcctgaactgggaggtcaccgaccacaacctgcacgagctgcgcgtgctgcggcgttaccggcgtgctcctcaagctgcgcatggcgcagcaccttcaggctgccgtggcctttgtggagcaagggcacgtacgcgtgggccctgacgtggttaccgaccccgccttccttgtcacgcgcagcatggaggactttgtcacttgggtggactcgtccaagatcaagcggcacgtgctagagtacaatgaggagcgcgatgacttcgatctggaagcctagcggatctcccactttgcatggctgtcttttacagatgggaaaactgaggcctgatgctggagattctatgagggtgctctcctcaagggtatcagacggtcgtaggttcttaagaatttgattcatcagtggcaggccatgcatagagccacgggaggtgcgtccttgttttccaggaaatgttcttagaacttggactactgattattaattgactgtgccttgggaaacagtgggaagtaacttggtgcagcactggggtattgttggcttcttgtgttggaaactttgtaatgtaaaaggaaaaactggaaatccccacgccctgtttccctttatcgtcttgtggttggactggttcaattcgtttaactcgaattcttgctcctggccgtggttaagctgtgtacagatgatggagagtttggcctcaagtttttataaactgagcgagactagtgttcaggatctcctcccttgtttaaatgtcaataaatgccccaactgctttgtaagtgcaa

SEQ ID NO: 541285 - DNA, 979 bp, Homo sapiens
agcggaggtcttggggcgccgcggcggaaatcgcgcggatgccagaacgcgctctcagcttcgggtcctgcggctgcggctgccgccatcatggtgcggaagcttaagttccacgagcagaagctgctgaagcaggtggacttcctgaactgggaggtcaccgaccacaacctgcacgagctgcgcgtgctgcggcgttaccggctgcagcggcgggaggactacacgcgctacaaccagctgagccgtgccgtgcgtgagctggcgcggcgcctgcgcgacctgcccgaacgcgaccagttccgcgtgcgcgcttcggccgcgctgctggacaagctgtatgctctcggcttggtgcccacgcgcggttcgctggagctctgcgacttcgtcacggcctcgtccttctgccgccgccgcctccccaccagcgcgatgacttcgatctggaagcctagcggatctcccactttgcatggctgtcttttacagatgggaaaactgaggcctgatgctggagattctatgagggtgctctcctcaagggtatcagacggtcgtaggttcttaagaatttgattcatcagtggcaggccatgcatagagccacgggaggtgcgtccttgttttccaggaaatgttcttagaacttggactactgattattaattgactgtgccttgggaaacagtgggaagtaacttggtgcagcactggggtattgttggcttcttgtgttggaaactttgtaatgtaaaaggaaaaactggaaatccccacgccctgtttccctttatcgtcttgtggttggactggttcaattcgtttaactcgaattcttgctcctggccgtggttaagctgtgtacagatgatggagagtttggcctcaagtttttataaactgagcgagactagtgttcaggatctcctcccttgtttaaatgtcaataaatgccccaactgctttgtaagtgcaa

SEQ ID NO: 541286 - DNA, 382 bp, Homo sapiens
cgcgtcgactagctttgaggatttcgttgcaaacgggatatcttcatataaaatctagacagaagcattctcagaaacttctttgtgctgtatgtcctcaattaacagagttgaaccattgcttggatacagcattttggaaacattccttgagtagaatctgcaagttgatatttagatagatttgaagatttcgttggaaaagggaatatctccatataaaatctagagggaagcattctcagaaactgctttgtgatgtttccattcaagtcacagagttgaatattcccttttatagagcacgtttgaaacactctttctgcactatctggaagtggacatttcgagcgctttgaggcctatggtgaaaaaggaaata

SEQ ID NO: 541287 - DNA, 809 bp, Homo sapiens
gaggctttcattgcacacctgctggctaatgcctgccgccacttgctacatgaaactgacctcccaagactgtctgctggtgacccccgtccgctgcggtaccctgcctgattgtggcctccatgacatgcctgacagcaaatggctgcactggctgctgtgctggatctgagcgctggcagtgctgacggtgcactgctgcgtgagtctggtatgactgagaatgctgcgaatcctcaccaagatgcagtttatgaagtacatggtttacccgcatgaccttctgcgctgaattgcctgaccgctgtgtaccagtacttcaccaatgacctgtgttccattgtctgggtcttgcctgcctgccccccagctggatgccctgatggccctggagccctgaagccctgaaccttgaaccttgctgcttgggacctcgctgggctgcttgctgttgctggtctgccttgctgaccttgccttgcttgcatgttgagcgacttcgtaccttgctggtgccgcatgtgtggtgctgttgcaccgtttacgattgatgagcgattgtcatatctttgcccttccttggatcatgcttggttgtcaaaccctcggtggccctccatcagcccacaatgaatccgtgccttggcccgagtggccgcccttcgattatagattgcccagttcatttttcactggggtgctgttggtgacagaagttattccctccgggggtcatcggagatgtcctattgatgacttgcgatccagatagatgataaacgaacaagccaggatcgatatcaagcaac

SEQ ID NO: 541288 - DNA, 339 bp, Homo sapiens
gcactagcatgattgaatacattcctgggcaagagatctgtccgcgtcccagtaagcgagattccttcatctataaaatgttaacacagtgtgtctaaaatgtcgatgtactcgagtgactttacctgagatcattgccaaatctcaaatcaacatccttatggtcattgttgccagaatctcatttattgtgtacagtaaacccaagaggaggcatttagttctatgcttgatcacatgaaaaaatcatacacatgccaacagagcacataattcccccttacaccataaatacaatcacagcacacctaaaaatctccgtaatttcttccttattga

SEQ ID NO: 541289 - DNA, 421 bp, Homo sapiens
ggtagactacatggcgtcgtgagataatatatctattcatacaaagtgattctacttgtagaagaaaataaaccagaagacatgaaataaaccacagctacttgcatcagactaattcaatttattaactcagttcttagctttagttcacatggcagactacgttgcatgtgttaggtctactggcaggtagacctaacccaggtggtgtgtggtggcttggtatgtgctttctcgtgtaacatcgcgccatcattggtatatggttagtgtgtaggttagtaggcctagtatgaggagcgtaatggagtggaagtgaaatcacatggctaggccagaggtcattaggagggctgagagggcccctgttaggtctacctggcagcttaaaactcaaagtgactggcggtgcttcatatcc

SEQ ID NO: 541290 - DNA, 88 bp, Homo sapiens
ttttcttgtcattgctggtcaggattactaatatttgggagggctttaaagacgcatgttgtggtgctaatgtactttcacttttaaa

SEQ ID NO: 541291 - DNA, 110 bp, Homo sapiens
gtagtgaattctcttatggctttgtaacaggctttaactagatatcagactttaccacattcttcacatttatagggcttctctcccaggaaaatccgtcgaatacgaga

SEQ ID NO: 541292 - DNA, 340 bp, Homo sapiens
aaaggcccaaaaaaagaaaccaaggacagatgcggactcctgccaactacacgaatccagaacacgtcagagacgcacacgtcaccgacacgcatacccccagccacagcatcatgagcggaatgagtcgaccctgcgggccgctggccctctgcccacgaggctgacagacacccgcgccacaccaccccgccaccccaccgaccaagcgcctgaccccacgagcccaacaccaggcccaaggcatctgcatacagcaaccaacccacacgagaggcggcccgacaacgagaaaccatcgcacacaccacaccgcacgcgaacaccacaccaccccccc

SEQ ID NO: 541293 - DNA, 136 bp, Homo sapiens
gctctcagcaggctcccccatgggtgctccatccccccaggcaagcagcatcatttcaaccagggcagcaaacagaggcaggtgcagcagcatcggcagcaagcaggtggcaaatcatatggagcattgcaggttg

SEQ ID NO: 541294 - DNA, 329 bp, Homo sapiens
gcattagacttcaggttctttagcttttaactattggacttagaccagtggcttccatgggccacaagctgaaggctacactatcggcttccctacttttgaggttttgggacttggactgagccactactggtttccttgctcctcagcttgcagatggcctatcgtgggacttcacctcctgatgatgtgagtcagttccccctaataaactccctttcatatatatgtgtgtgtgtgtttgtatatatatttatgtgtgtgtatatatacacacacacacacacacatacatacatatgtatatgtattctattggttttgtccct

SEQ ID NO: 541295 - DNA, 146 bp, Homo sapiens
ttacactctgcgcaatggcccctacatcatgaagaaatggggatattactgttttccttacgagaacagagagaggaccatacctctccaggagctcaacgagtggtctttcttgtttataggtattaggactcccacatctctac

SEQ ID NO: 541296 - DNA, 652 bp, Homo sapiens
tgggagacggattctcactttgtcgcccaggctggattacaggggcccaatctcggctcactgaaacctcaatctctggggttcaggcaattctcccgcctaaccctcccgagattagctgggcactacagtgttgtgcaccaccacgcccagataatatcaggtaatatatctgagtaaaacgatgggtgttaacaccaatgtaagcccaaggctggccttggaactcctgaaaatacacagtagattcttcaccgctctatgacctcatacaaaagatgcccggaatacacaggcgcgtcgatgcccaccggaagccccaggccacaaacctcgataagaacacaagacaacaaacaaggaaggctaacacaccacaaccaaagaggtaagaaacgccacaacgtagactcaacaagcacaggaccctacaacccgcaattgaaacaaaacagccgcgccactaccaaggcgaccccatatagcacggctagaaaccccattcgcaccataaaaaagcacaaacatgacaagcgcaaaaaagagaaaaggcaaaaaacacgaggcaaacccaagaacccagaacccatccaccaaacatcggccatacacaccgaccactaggaacccacaacaaaaggaccaacacaac

SEQ ID NO: 541297 - DNA, 242 bp, Homo sapiens
taatcgagctcgcccaattatgtgactcaagcgaaagatccaagggcctgacttctccccaacgtgcgtcacgcttgagtgaggtctgggcaattggaaagttccgggcgacggcgtgtggaccatcgaccgagtctcatctggccttcaccgtgtgttgggtggggagaaggccactcggctgtcctggtaggtcaggccaccccgggcctgcccctgtcgcccggccacagtaaagcccc

SEQ ID NO: 541298 - DNA, 3051 bp, Homo sapiens
ggcttgcgaagccggaagtgtcctgagtctcgaggaggccgcgggagcccgccggcggtggcgcggcggagacccggctggtataacaagaggattgcctgatccagccaagatgcagagcacttctaatcatctgtggcttttatctgatattttaggccaaggagctactgcaaatgtctttcgtggaagacataagaaaactggtgatttatttgctatcaaagtatttaataacataagcttccttcgtccagtggatgttcaaatgagagaatttgaagtgttgaaaaaactcaatcacaaaaatattgtcaaattatttgctattgaagaggagacaacaacaagacataaagtacttattatggaattttgtccatgtgggagtttatacactgttttagaagaaccttctaatgcctatggactaccagaatctgaattcttaattgttttgcgagatgtggtgggtggaatgaatcatctacgagagaatggtatagtgcaccgtgatatcaagccaggaaatatcatgcgtgttataggggaagatggacagtctgtgtacaaactcacagattttggtgcagctagagaattagaagatgatgagcagtttgtttctctgtatggcacagaagaatatttgcaccctgatatgtatgagagagcagtgctaagaaaagatcatcagaagaaatatggagcaacagttgatctttggagcattggggtaacattttaccatgcagctactggatcactgccatttagaccctttgaagggcctcgtaggaataaagaagtgatgtataaaataattacaggaaagccttctggtgcaatatctggagtacagaaagcagaaaatggaccaattgactggagtggagacatgcctgtttcttgcagtctttctcggggtcttcaggttctacttacccctgttcttgcaaacatccttgaagcagatcaggaaaagtgttggggttttgaccagttttttgcagaaactagtgatatacttcaccgaatggtaattcatgttttttcgctacaacaaatgacagctcataagatttatattcatagctataatactgctactatatttcatgaactggtatataaacaaaccaaaattatttcttcaaatcaagaacttatctacgaagggcgacgcttagtcttagaacctggaaggctggcacaacatttccctaaaactactgaggaaaaccctatatttgtagtaagccgggaacctctgaataccataggattaatatatgaaaaaatttccctccctaaagtacatccacgttatgatttagacggggatgctagcatggctaaggcaataacaggggttgtgtgttatgcctgcagaattgccagtaccttactgctttatcaggaattaatgcgaaaggggatacgatggctgattgaattaattaaagatgattacaatgaaactgttcacaaaaagacagaagttgtgatcacattggatttctgtatcagaaacattgaaaaaactgtgaaagtatatgaaaagttgatgaagatcaacctggaagcggcagagttaggtgaaatttcagacatacacaccaaattgttgagactttccagttctcagggaacaatagaaaccagtcttcaggatatcgacagcagattatctccaggtggatcactggcagacgcatgggcacatcaagaaggcactcatccgaaagacagaaatgtagaaaaactacaagtcctgttaaattgcatgacagagatttactatcagttcaaaaaagacaaagcagaacgtagattagcttataatgaagaacaaatccacaaatttgataagcaaaaactgtattaccatgccacaaaagctatgacgcactttacagatgaatgtgttaaaaagtatgaggcatttttgaataagtcagaagaatggataagaaagatgcttcatcttaggaaacagttattatcgctgactaatcagtgttttgatattgaagaagaagtatcaaaatatcaagaatatactaatgagttacaagaaactctgcctcagaaaatgtttacagcttccagtggaatcaaacataccatgaccccaatttatccaagttctaacacattagtagaaatgactcttggtatgaagaaattaaaggaagagatggaaggggtggttaaagaacttgctgaaaataaccacattttagaaaggtttggctctttaaccatggatggtggccttcgcaacgttgactgtctttagctttctaatagaagtttaagaaaagtttccgtttgcacaagaaaataacgcttgggcattaaatgaatgcctttatagatagtcacttgtttctacaattcagtatttgatgtggtcgtgtaaatatgtacaatattgtaaatacataaaaaatatacaaatttttggctgctgtgaagatgtaattttatcttttaacatttataattatatgaggaaatttgacctcagtgatcacgagaagaaagccatgaccgaccaatatgttgacatactgatcctctactctgagtggggctaaataagttattttctctgaccgcctactggaaatatttttaagtggaaccaaaataggcatccttacaaatcaggaagactgacttgacacgtttgtaaatggtagaacggtggctactgtgagtggggagcagaaccgcaccactgttatactgggataacaatttttttgagaaggataaagtggcattattttattttacaaggtgcccagatcccagttatccttgtatccatgtaatttcagatgaattattaagcaaacattttaaagtgaattcattattaaaaactattcatttttttcctttggccataaatgtgtaattgtcattaaaattctaaggtcatttcaactgttttaagctgtatatttctttaattctgcttactatttcatggaaaaaaataaatttctcaattttaatgtaaagagttaaaaaaaaaaa

SEQ ID NO: 541299 - DNA, 374 bp, Homo sapiens
gtcactctttgttcgaataaatgctgctcatggattctcccttattcaggtgggacaaccacaaaggttaccatgagggaaatctaactgagggcagtgaggcgaaggaaaaggatccctaaaaggtttcaggccctcagtaccgcctggagaggcagagcaggcccaatgtcgccgtttgacctggcagcactttggggagccagagcgcatggaggtcttcctggtccgcggacagttcagggcagacggggttttttaggaggattcgaaatttgcaatgccacagttcaggatatcttagcagcaccattcaagtatcaagtagcatatcacgactcgattcaacgacgtcagctaggattttgggaaag

SEQ ID NO: 541300 - DNA, 2993 bp, Homo sapiens
ggcttgcgaagccggaagtgtcctgagtctcgaggaggccgcgggagcccgccggcggtggcgcggcggagacccggctggtataacaagaggattgcctgatccagccaagatgcagagcacttctaatcatctgtggcttttatctgatattttaggccaaggagctactgcaaatgtctttcgtggaagacataagtggatgttcaaatgagagaatttgaagtgttgaaaaaactcaatcacaaaaatattgtcaaattatttgctattgaagaggagacaacaacaagacataaagtacttattatggaattttgtccatgtgggagtttatacactgttttagaagaaccttctaatgcctatggactaccagaatctgaattcttaattgttttgcgagatgtggtgggtggaatgaatcatctacgagagaatggtatagtgcaccgtgatatcaagccaggaaatatcatgcgtgttataggggaagatggacagtctgtgtacaaactcacagattttggtgcagctagagaattagaagatgatgagcagtttgtttctctgtatggcacagaagaatatttgcaccctgatatgtatgagagagcagtgctaagaaaagatcatcagaagaaatatggagcaacagttgatctttggagcattggggtaacattttaccatgcagctactggatcactgccatttagaccctttgaagggcctcgtaggaataaagaagtgatgtataaaataattacaggaaagccttctggtgcaatatctggagtacagaaagcagaaaatggaccaattgactggagtggagacatgcctgtttcttgcagtctttctcggggtcttcaggttctacttacccctgttcttgcaaacatccttgaagcagatcaggaaaagtgttggggttttgaccagttttttgcagaaactagtgatatacttcaccgaatggtaattcatgttttttcgctacaacaaatgacagctcataagatttatattcatagctataatactgctactatatttcatgaactggtatataaacaaaccaaaattatttcttcaaatcaagaacttatctacgaagggcgacgcttagtcttagaacctggaaggctggcacaacatttccctaaaactactgaggaaaaccctatatttgtagtaagccgggaacctctgaataccataggattaatatatgaaaaaatttccctccctaaagtacatccacgttatgatttagacggggatgctagcatggctaaggcaataacaggggttgtgtgttatgcctgcagaattgccagtaccttactgctttatcaggaattaatgcgaaaggggatacgatggctgattgaattaattaaagatgattacaatgaaactgttcacaaaaagacagaagttgtgatcacattggatttctgtatcagaaacattgaaaaaactgtgaaagtatatgaaaagttgatgaagatcaacctggaagcggcagagttaggtgaaatttcagacatacacaccaaattgttgagactttccagttctcagggaacaatagaaaccagtcttcaggatatcgacagcagattatctccaggtggatcactggcagacgcatgggcacatcaagaaggcactcatccgaaagacagaaatgtagaaaaactacaagtcctgttaaattgcatgacagagatttactatcagttcaaaaaagacaaagcagaacgtagattagcttataatgaagaacaaatccacaaatttgataagcaaaaactgtattaccatgccacaaaagctatgacgcactttacagatgaatgtgttaaaaagtatgaggcatttttgaataagtcagaagaatggataagaaagatgcttcatcttaggaaacagttattatcgctgactaatcagtgttttgatattgaagaagaagtatcaaaatatcaagaatatactaatgagttacaagaaactctgcctcagaaaatgtttacagcttccagtggaatcaaacataccatgaccccaatttatccaagttctaacacattagtagaaatgactcttggtatgaagaaattaaaggaagagatggaaggggtggttaaagaacttgctgaaaataaccacattttagaaaggtttggctctttaaccatggatggtggccttcgcaacgttgactgtctttagctttctaatagaagtttaagaaaagtttccgtttgcacaagaaaataacgcttgggcattaaatgaatgcctttatagatagtcacttgtttctacaattcagtatttgatgtggtcgtgtaaatatgtacaatattgtaaatacataaaaaatatacaaatttttggctgctgtgaagatgtaattttatcttttaacatttataattatatgaggaaatttgacctcagtgatcacgagaagaaagccatgaccgaccaatatgttgacatactgatcctctactctgagtggggctaaataagttattttctctgaccgcctactggaaatatttttaagtggaaccaaaataggcatccttacaaatcaggaagactgacttgacacgtttgtaaatggtagaacggtggctactgtgagtggggagcagaaccgcaccactgttatactgggataacaatttttttgagaaggataaagtggcattattttattttacaaggtgcccagatcccagttatccttgtatccatgtaatttcagatgaattattaagcaaacattttaaagtgaattcattattaaaaactattcatttttttcctttggccataaatgtgtaattgtcattaaaattctaaggtcatttcaactgttttaagctgtatatttctttaattctgcttactatttcatggaaaaaaataaatttctcaattttaatgtaaagagttaaaaaaaaaaa

SEQ ID NO: 541301 - DNA, 3459 bp, Homo sapiens
  misc_feature (1412)..(1412): n is a, c, g, or t
  misc_feature (1415)..(1415): n is a, c, g, or t
  misc_feature (1427)..(1427): n is a, c, g, or t
  misc_feature (1438)..(1438): n is a, c, g, or t
  misc_feature (1528)..(1528): n is a, c, g, or t
  misc_feature (1645)..(1645): n is a, c, g, or t
ggcttgcgaagccggaagtgtcctgagtctcgaggaggccgcgggagcccgccggcggtggcgcggcggagacccggctggtataacaagaggattgcctgatccagccaagatgcagagcacttctaatcatctgtggcttttatctgatattttaggccaaggagctactgcaaatgtctttcgtggaagacataagaaaactggtgatttatttgctatcaaagtatttaataacataagcttccttcgtccagtggatgttcaaatgagagaatttgaagtgttgaaaaaactcaatcacaaaaatattgtcaaattatttgctattgaagaggagacaacaacaagacataaagtacttattatggaattttgtccatgtgggagtttatacactgttttagaagaaccttctaatgcctatggactaccagaatctgaattcttaattgttttgcgagatgtggtgggtggaatgaatcatctacgagagaatggtatagtgcaccgtgatatcaagccaggaaatatcatgcgtgttataggggaagatggacagtctgtgtacaaactcacagattttggtgcagctagagaattagaagatgatgagcagtttgtttctctgtatggcacagaagaatatttgcaccctgatatgtatgagagagcagtgctaagaaaagatcatcagaagaaatatggagcaacagttgatctttggagcattggggtaacattttaccatgcagctactggatcactgccatttagaccctttgaagggcctcgtaggaataaagaagtgatgtataaaataattacaggaaagccttctggtgcaatatctggagtacagaaagcagaaaatggaccaattgactggagtggagacatgcctgtttcttgcagtctttctcggggtcttcaggttctacttacccctgttcttgcaaacatccttgaagcagatcaggaaaagtgttggggttttgaccagttttttgcagaaactagtgatatacttcaccgaatggtaattcatgttttttcgctacaacaaatgacagctcataagatttatattcatagctataatactgctactatatttcatgaactggtatataaacaaaccaaaattatttcttcaaatcaagaacttatctacgaagggcgacgcttagtcttagaacctggaaggctggcacaacatttccctaaaactactgaggaaaaccctatatttgtagtaagccgggaacctctgaataccataggattaatatatgaaaaaatttccctccctaaagtacatccacgttatgatttagacggggatgctagcatggctaaggttagtatttaatttaattactatgtaaacatctgaatttaatgtatcctancantagtggaagcantaacatgtatngtgtcttcatgtatgtctatatgacttaggaaatatcacttaaattgataccctttccaagtgatttgtggtctttcttttttacttttnatcctttcttgaattcattatataagaaaattctctccattgagatagtgcatgtttagataatgttaaggataacatatttattatatttatatctatttttaactcttagaaatnggtggttaatgtgtttttaattaacctgataaaaatgtgtaagcttgaataattttgtgtaaaagtttttcttaccctatagcagaattagcagcaaatattgacatttcatttctttattaggcaataacaggggttgtgtgttatgcctgcagaattgccagtaccttactgctttatcaggaattaatgcgaaaggggatacgatggctgattgaattaattaaagatgattacaatgaaactgttcacaaaaagacagaagttgtgatcacattggatttctgtatcagaaacattgaaaaaactgtgaaagtatatgaaaagttgatgaagatcaacctggaagcggcagagttaggtgaaatttcagacatacacaccaaattgttgagactttccagttctcagggaacaatagaaaccagtcttcaggatatcgacagcagattatctccaggtggatcactggcagacgcatgggcacatcaagaaggcactcatccgaaagacagaaatgtagaaaaactacaagtcctgttaaattgcatgacagagatttactatcagttcaaaaaagacaaagcagaacgtagattagcttataatgaagaacaaatccacaaatttgataagcaaaaactgtattaccatgccacaaaagctatgacgcactttacagatgaatgtgttaaaaagtatgaggcatttttgaataagtcagaagaatggataagaaagatgcttcatcttaggaaacagttattatcgctgactaatcagtgttttgatattgaagaagaagtatcaaaatatcaagaatatactaatgagttacaagaaactctgcctcagaaaatgtttacagcttccagtggaatcaaacataccatgaccccaatttatccaagttctaacacattagtagaaatgactcttggtatgaagaaattaaaggaagagatggaaggggtggttaaagaacttgctgaaaataaccacattttagaaaggtttggctctttaaccatggatggtggccttcgcaacgttgactgtctttagctttctaatagaagtttaagaaaagtttccgtttgcacaagaaaataacgcttgggcattaaatgaatgcctttatagatagtcacttgtttctacaattcagtatttgatgtggtcgtgtaaatatgtacaatattgtaaatacataaaaaatatacaaatttttggctgctgtgaagatgtaattttatcttttaacatttataattatatgaggaaatttgacctcagtgatcacgagaagaaagccatgaccgaccaatatgttgacatactgatcctctactctgagtggggctaaataagttattttctctgaccgcctactggaaatatttttaagtggaaccaaaataggcatccttacaaatcaggaagactgacttgacacgtttgtaaatggtagaacggtggctactgtgagtggggagcagaaccgcaccactgttatactgggataacaatttttttgagaaggataaagtggcattattttattttacaaggtgcccagatcccagttatccttgtatccatgtaatttcagatgaattattaagcaaacattttaaagtgaattcattattaaaaactattcatttttttcctttggccataaatgtgtaattgtcattaaaattctaaggtcatttcaactgttttaagctgtatatttctttaattctgcttactatttcatggaaaaaaataaatttctcaattttaatgtaaagagttaaaaaaaaaaa

SEQ ID NO: 541302 - DNA, 1026 bp, Homo sapiens
tatccagttcttactgacagtttcttaattacatcattacatcggtttttcatgtatttatgataataccatgctgttccagtaagaaatagaacaaatcatagttacttaaactctttaaaaataaatagctatttattcctctgaaaagtattttaaggttgggggcctttatacataaatgcaacttttgagattacctttttttcttgtgtgtgtgttttaggttggctctttaaccatggatggtggccttcgcaacgttgactgtctttagctttctaatagaagtttaagaaaagtttccgtttgcacaagaaaataacgcttgggcattaaatgaatgcctttatagatagtcacttgtttctacaattcagtatttgatgtggtcgtgtaaatatgtacaatattgtaaatacataaaaaatatacaaatttttggctgctgtgaagatgtaattttatcttttaacatttataattatatgaggaaatttgacctcagtgatcacgagaagaaagccatgaccgaccaatatgttgacatactgatcctctactctgagtggggctaaataagttattttctctgaccgcctactggaaatatttttaagtggaaccaaaataggcatccttacaaatcaggaagactgacttgacacgtttgtaaatggtagaacggtggctactgtgagtggggagcagaaccgcaccactgttatactgggataacaatttttttgagaaggataaagtggcattattttattttacaaggtgcccagatcccagttatccttgtatccatgtaatttcagatgaattattaagcaaacattttaaagtgaattcattattaaaaactattcatttttttcctttggccataaatgtgtaattgtcattaaaattctaaggtcatttcaactgttttaagctgtatatttctttaattctgcttactatttcatggaaaaaaataaatttctcaattttaatgtaaagagttaaaaaaaaaaa

SEQ ID NO: 541303 - DNA, 2345 bp, Homo sapiens
ggcttgcgaagccggaagtgtcctgagtctcgaggaggccgcgggagcccgccggcggtggcgcggcggagacccggctggtataacaagaggattgcctgatccagccaagatgcagagcacttctaatcatctgtggcttttatctgatattttaggccaaggagctactgcaaatgtctttcgtggaagacataagaaaactggtgatttatttgctatcaaagtatttaataacataagcttccttcgtccagtggatgttcaaatgagagaatttgaagtgttgaaaaaactcaatcacaaaaatattgtcaaattatttgctattgaagaggagacaacaacaagacataaagtacttattatggaattttgtccatgtgggagtttatacactgttttagaagaaccttctaatgcctatggactaccagaatctgaattcttaattgttttgcgagatgtggtgggtggaatgaatcatctacgagagaatggtatagtgcaccgtgatatcaagccaggaaatatcatgcgtgttataggggaagatggacagtctgtgtacaaactcacagattttggtgcagctagagaattagaagatgatgagcagtttgtttctctgtatggcacagaagaatatttgcaccctgatatgtatgagagagcagtgctaagaaaagatcatcagaagaaatatggagcaacagttgatctttggagcattggggtaacattttaccatgcagctactggatcactgccatttagaccctttgaagggcctcgtaggaataaagaagtgatgtataaaataattacaggaaagccttctggtgcaatatctggagtacagaaagcagaaaatggaccaattgactggagtggagacatgcctgtttcttgcagtctttctcggggtcttcaggttctacttacccctgttcttgcaaacatccttgaagcagatcaggaaaagtgttggggttttgaccagttttttgcagaaactagtgatatacttcaccgaatggtaattcatgttttttcgctacaacaaatgacagctcataagatttatattcatagctataatactgctactatatttcatgaactggtatataaacaaaccaaaattatttcttcaaatcaagaacttatctacgaagggcgacgcttagtcttagaacctggaaggctggcacaacatttccctaaaactactgaggaaaaccctatatttgtagtaagccgggaacctctgaataccataggattaatatatgaaaaaatttccctccctaaagtacatccacgttatgatttagacggggatgctagcatggctaaggcaataacaggggttgtgtgttatgcctgcagaattgccagtaccttactgctttatcaggaattaatgcgaaaggggatacgatggctgattgaattaattaaagatgattacaatgaaactgttcacaaaaagacagaagttgtgatcacattggatttctgtatcagaaacattgaaaaaactgtgaaagtatatgaaaagttgatgaagatcaacctggaagcggcagagttaggtgaaatttcagacatacacaccaaattgttgagactttccagttctcagggaacaatagaaaccagtcttcaggatatcgacagcagattatctccaggtggatcactggcagacgcatgggcacatcaagaaggcactcatccgaaagacagaaatgtagaaaaactacaagtcctgttaaattgcatgacagagatttactatcagttcaaaaaagacaaagcagaacgtagattagcttataatgaagaacaaatccacaaatttgataagcaaaaactgtattaccatgccacaaaagctatgacgcactttacagatgaatgtgttaaaaagtatgaggcatttttgaataagtcagaagaatggataagaaagatgcttcatcttaggaaacagttattatcgctgactaatcagtgttttgatattgaagaagaagtatcaaaatatcaagaatatactaatgagttacaagaaactctgcctcagaaaatgtttacagcttccagtggaatcaaacataccatgaccccaatttatccaagttctaacacattagtagaaatgactcttgggtaagaaactcatcatttggaaactgtagtgtttccatttgctttcattgcagtttgtgcttttgctcttacattttgaaattttttatgtttgttgtaatacaatgtttaataaggttatctattgaccagttaaaagaaaataaaacataaacatcattctaaaa

SEQ ID NO: 541304 - DNA, 239 bp, Homo sapiens
tggggtgactctgaggatcctggcgtacggacgctaggctcacgcgctcttcagaaaacccggcagcgccgatgcaagtgagtacacctacctcacttgcctaagcggtgccccatgttcaatacccgcctgaagcaggagctgaccgctctgcgcgaagaattgtcgagcttgctccaggtgaaagagagcctggaaagcgaaatgctctgcctgacactggaccgcgtccgtagcgg

SEQ ID NO: 541305 - DNA, 220 bp, Homo sapiens
aagactgggtttcgccatgttggccaggctggcctaaaactcctagcctcaggtgattcacccacctcagcctcccaaagtgctgggattacagacatgagccaccacactggcctaaaacttaggtgtaatggcattataagtctagctttattaatgctgggacattagtcgcttttaaaattacctcttaactctgctttaattggctcccagaaat

SEQ ID NO: 541306 - DNA, 1990 bp, Homo sapiens
  misc_feature (1934)..(1934): n is a, c, g, or t
  misc_feature (1947)..(1948): n is a, c, g, or t
  misc_feature (1971)..(1971): n is a, c, g, or t
  misc_feature (1975)..(1976): n is a, c, g, or t
ggcttgcgaagccggaagtgtcctgagtctcgaggaggccgcgggagcccgccggcggtggcgcggcggagacccggctggtataacaagaggattgcctgatccagccaagatgcagagcacttctaatcatctgtggcttttatctgatattttaggccaaggagctactgcaaatgtctttcgtggaagacataagaaaactggtgatttatttgctatcaaagtatttaataacataagcttccttcgtccagtggatgttcaaatgagagaatttgaagtgttgaaaaaactcaatcacaaaaatattgtcaaattatttgctattgaagaggagacaacaacaagacataaagtacttattatggaattttgtccatgtgggagtttatacactgttttagaagaaccttctaatgcctatggactaccagaatctgaattcttaattgttttgcgagatgtggtgggtggaatgaatcatctacgagagaatggtatagtgcaccgtgatatcaagccaggaaatatcatgcgtgttataggggaagatggacagtctgtgtacaaactcacagattttggtgcagctagagaattagaagatgatgagcagtttgtttctctgtatggcacagaagaatatttgcaccctgatatgtatgagagagcagtgctaagaaaagatcatcagaagaaatatggagcaacagttgatctttggagcattggggtaacattttaccatgcagctactggatcactgccatttagaccctttgaagggcctcgtaggaataaagaagtgatgtataaaataattacaggaaagccttctggtgcaatatctggagtacagaaagcagaaaatggaccaattgactggagtggagacatgcctgtttcttgcagtctttctcggggtcttcaggttctacttacccctgttcttgcaaacatccttgaagcagatcaggaaaagtgttggggttttgaccagttttttgcagaaactagtgatatacttcaccgaatggtaattcatgttttttcgctacaacaaatgacagctcataagatttatattcatagctataatactgctactatatttcatgaactggtatataaacaaaccaaaattatttcttcaaatcaagaacttatctacgaagggcgacgcttagtcttagaacctggaaggctggcacaacatttccctaaaactactgaggaaaaccctatatttgtagtaagccgggaacctctgaataccataggattaatatatgaaaaaatttccctccctaaagtacatccacgttatgatttagacggggatgctagcatggctaaggcaataacaggggttgtgtgttatgcctgcagaattgccagtaccttactgctttatcaggaattaatgcgaaaggggatacgatggctgattgaattaattaaagatgattacaatgaaactgttcacaaaaagacagaagttgtgatcacattggatttctgtatcagaaacattgaaaaaactgtgaaagtatatgaaaagttgatgaagatcaacctggaagcggcagagttaggtgaaatttcagacatacacaccaaattgttgagactttccagttctcagggaacaatagaaaccagtcttcaggatatcgacagcagattatctccaggtggatcactggcagacgcatgggcacatcaagaaggcactcatccgaaagacagaaatgtagaaaaactacaagtcctgttaaattgcatgacagagatttactatcagttcaaaaaagacaaagcagaacgtagtaagtaaaatttgctatttgttaatttaataaatccctcttagtaattagttataattcagttaaattaatttggtatatctgtaagggtagcttcttaanctgtttttttcanngatgtgattctgtcaggaaaaangttnnttgtgtttaaaaaa

SEQ ID NO: 541307 - DNA, 406 bp, Homo sapiens
cactggacatggtagccatcagaaaaactaagcttgttggataatgagacatggttagcaaagcttgacatttgaaggcacggcctgtaacatagactaggtagatgtcgtttagttctggatcttttgcccacaaagccttggtatgcaaaaacctgcaaggcacagctaagatgttagggcatggtataaataccctagatactttagaggagtcttatgggtagaggtagtttgggctccctcctctaaacatcccttgttgttaaatgtgtatcaaacactctggagcatgaaaacacaggtaaactgagtcctaattggtacatttgccgtcttgtatttttgctttccttatgaaggtgttaactggggagagttgtgaggcttcttaaccaaagcactt

SEQ ID NO: 541308 - DNA, 2084 bp, Homo sapiens
  misc_feature (2028)..(2028): n is a, c, g, or t
  misc_feature (2041)..(2042): n is a, c, g, or t
  misc_feature (2065)..(2065): n is a, c, g, or t
  misc_feature (2069)..(2070): n is a, c, g, or t
ggcttgcgaagccggaagtgtcctgagtctcgaggaggccgcgggagcccgccggcggtggcgcggcggagacccggctggtataacaagaggattgcctgatccagccaagatgcagagcacttctaatcatctgtggcttttatctgatattttaggccaaggagctactgcaaatgtctttcgtggaagacataagaaaactggtgatttatttgctatcaaagtatttaataacataagcttccttcgtccagtggatgttcaaatgagagaatttgaagtgttgaaaaaactcaatcacaaaaatattgtcaaattatttgctattgaagaggagacaacaacaagacataaagtacttattatggaattttgtccatgtgggagtttatacactgttttagaagaaccttctaatgcctatggactaccagaatctgaattcttaattgttttgcgagatgtggtgggtggaatgaatcatctacgagagaatggtatagtgcaccgtgatatcaagccaggaaatatcatgcgtgttataggggaagatggacagtctgtgtacaaactcacagattttggtgcagctagagaattagaagatgatgagcagtttgtttctctgtatggcacagaagaatatttgcaccctgatatgtatgagagagcagtgctaagaaaagatcatcagaagaaatatggagcaacagttgatctttggagcattggggtaacattttaccatgcagctactggatcactgccatttagaccctttgaagggcctcgtaggaataaagaagtgatgtataaaataattacaggaaagccttctggtgcaatatctggagtacagaaagcagaaaatggaccaattgactggagtggagacatgcctgtttcttgcagtctttctcggggtcttcaggttctacttacccctgttcttgcaaacatccttgaagcagatcaggaaaagtgttggggttttgaccagttttttgcagaaactagtgatatacttcaccgaatggtaattcatgttttttcgctacaacaaatgacagctcataagatttatattcatagctataatactgctactatatttcatgaactggtatataaacaaaccaaaattatttcttcaaatcaagaacttatctacgaagggcgacgcttagtcttagaacctggaaggctggcacaacatttccctaaaactactgaggaaaaccctatatttgtagtaagccgggaacctctgaataccataggattaatatatgaaaaaatttccctccctaaagtacatccacgttatgatttagacggggatgctagcatggctaaggcaataacaggggttgtgtgttatgcctgcagaattgccagtaccttactgctttatcaggaattaatgcgaaaggggatacgatggctgattgaattaattaaagatgattacaatgaaactgttcacaaaaagacagaagttgtgatcacattggatttctgtatcagaaacattgaaaaaactgtgaaagtatatgaaaagttgatgaagatcaacctggaagcggcagagttaggtgaaatttcagacatacacaccaaattgttgagactttccagttctcagggaacaatagaaaccagtcttcaggatatcgacagcagattatctccaggtggatcactggcagacgcatgggcacatcaagaaggcactcatccgaaagacagaaagtaggttatagctttatgcgtagtttctgctcttattaatgtcctttttcacattgactcagttaatttatttgagtttttcttccttaaatagtgtagaaaaactacaagtcctgttaaattgcatgacagagatttactatcagttcaaaaaagacaaagcagaacgtagtaagtaaaatttgctatttgttaatttaataaatccctcttagtaattagttataattcagttaaattaatttggtatatctgtaagggtagcttcttaanctgtttttttcanngatgtgattctgtcaggaaaaangttnnttgtgtttaaaaaa

SEQ ID NO: 541309 - DNA, 612 bp, Homo sapiens
gcgtcttcacccatcatgagcagaggtgaggagaggcagctgggaatatggagacagtgaaggacaggcctgagagcacaggtcctacctgggcattcagcagaggagccctaaagtcaggagcacccaagaagaggggagggcagcagcctccattgacggcgagcctccagccctctcctactttgatcaccatttctctccaggctttctgcctccgagatgtggcaccatagtgcggtgccctgtggcctcaccgccctacttccacctccgcccagcctgtaatgtttatataagcagcctcaaggaccaagaaccatctgcgaaaggacacacacaggaaattcataaaagaaatctgaatggataaaaccatgaaaaaaagtatgcttcattagtaattaaagaaaggcaaatagagctggaaggcatttttcccttagcaaaccataacagaaaaaaataagacccaatattggcaaagagactactgaaaaaacattcccatacattgcgtgtgggagtatacatcggtgcaggcttcctggatgacagttgggtgatatgtgtcatgtgtgctaaaagcctcatgtcatttgcctacgaatt

SEQ ID NO: 541310 - DNA, 259 bp, Homo sapiens
  misc_feature (12)..(12): n is a, c, g, or t
  misc_feature (146)..(147): n is a, c, g, or t
  misc_feature (214)..(214): n is a, c, g, or t
  misc_feature (245)..(245): n is a, c, g, or t
cacatgcctgtngtcccagctactcagaaggctgaggcaggagaatagcttgaacccgggaggcggaggttgcagcgagccgagatcgtgccactgcactccagtctggtgacagagcgagactccgtctcaaaaaacaaacaaanncaaatggcaactgctatttttattattcttctattctaagacaactattattattattctcctcctnttccctcaacatcaaatcttgtcaatttctncttctaaacaactg

SEQ ID NO: 541311 - DNA, 255 bp, Homo sapiens
cagaggttgcagtgagctgagatcacgccattgcactctagcctggcaacaagagcgaactccgtctaacacaccaccaaaaggtttggtatgtttctctcaagaaaaaggcatggtgagtccagacagcagcaaaagcttttgtgaaaccaattgtgttcatctagatagtaagtactcctatttttactgttaattttttaaagagaatttttccccgtggaactcctgttagtacgtcccagggagaaagcc

SEQ ID NO: 541312 - DNA, 141 bp, Homo sapiens
attatactgcatacgctgcgtatatcatctcgtcgcctgtcgccctgcccgcctcctcgatgatgctggccttctggcgctcagtgcggcctccgccgaccagagcatcgtcatttacaactgcccaacatgacaacctgg

SEQ ID NO: 541313 - DNA, 452 bp, Homo sapiens
acttttccacgttccggtctccggctgagaacgccgatagagttgcgtagtaaggacgatccttgggcgccgcgggagagccgacgctctccaatgggaaaaacgacgactgctttcaagtgtctgatcggggattccggagtgggaagactggtcctttttcgtttttgatgagcttcaatactacctttatttccaccataggagcaaaactaatctcgaaagataaatgaagtttccaggaaaaaactgggatagagaggatttcgaagtagcatatgctaaacgaagacatgagaaaacatgatgatcagggatgtcatgtagactaagactttgatataagaggcattttcacaattttatctgaaagcatagagaaacaaatcaacttgtcattttcaaaaacttaccctggctgtaatctcaataaaggactctttaaaagtcaa

SEQ ID NO: 541314 - DNA, 125 bp, Homo sapiens
  misc_feature (119)..(119): n is a, c, g, or t
gtggtgtgtcatgcagcacctgattgcccgtgagagaggctgcatctaccctcaaaggtatgtctgaggatctatgctgaggagttggcagtgcttcattcaaaacactaaaaacaatntgtttt

SEQ ID NO: 541315 - DNA, 476 bp, Homo sapiens
agacggggtatcactatgttggccaggctggatatagaactcatgacctcatggtccgcccacctcaacctcccacagctgctgagattatagagcgtgagccaccgcgcccggccactcttgcttcattcttgttagggctccgatactacattagatacctttctgcttgtggtgtgactgtcttgtaacatgacatatgacactcagcatactttccatatttgatatacgggatacagcatggcatgggcacacgtacaggtcctcaggcatgattacacttagcttacgctccagagcaaggagcaactcttatcactgttgggacatgtagaaaggcgaagccactatgaaaaacagtctgcaggttcctgaaaaaatctcacaatagaactgcatagatgatccagaaatcccacttctggatttatatccacaataatagacaactcaggatcttggaacgctatctg

SEQ ID NO: 541316 - DNA, 458 bp, Homo sapiens
  misc_feature (278)..(278): n is a, c, g, or t
accactgttggtcttgcccttgaggtaactccaggctgtcgagagaatgagtagaaagcaccaggactgtcagccgcaaagggattgtcatccctgctcctgggccaggtggactccatccttggccacctgcttggggcagttgtacagtgtgctgccagtgcgagtcagtgcaggcacaaatgcaacatctagtccacggtgaaccgaggtgcaggcctacccctagtgaaataaatgccacatagttggtgggagtgcgtgacttaaattttttnttaacttggtgtggatccatgtcaactaaaggggcgagggaagtgcggtgtgcttgtctgtgggaagtctctgtggcgtgtgatccgggagccagaattgacttcagaaggaggtggtgtgatgtgatggtcagagagacctgggatttggttccagctctggttgttaattcttctgta

SEQ ID NO: 541317 - DNA, 270 bp, Homo sapiens
aatgagctgaggcagatgttcccacagtgtaccagagccctggtgctatagtctctgagcacctctaaggaaagagcaccttctgtggacatgtgctgtagggcaggagctatagacaccaaggggaaggcgccataccggggctgttccccgaggaggaagggaaggggctctgtgtgtcccccaggaggaagaggccctgagtccctggggatcagacacccccttcacgtgttatattccacacaaaatgcgagctcgtcataacgg

SEQ ID NO: 541318 - DNA, 476 bp, Homo sapiens
  misc_feature (3)..(3): n is a, c, g, or t
  misc_feature (127)..(127): n is a, c, g, or t
  misc_feature (178)..(181): n is a, c, g, or t
  misc_feature (268)..(268): n is a, c, g, or t
  misc_feature (295)..(297): n is a, c, g, or t
  misc_feature (310)..(311): n is a, c, g, or t
  misc_feature (334)..(334): n is a, c, g, or t
  misc_feature (338)..(338): n is a, c, g, or t
  misc_feature (345)..(345): n is a, c, g, or t
  misc_feature (366)..(366): n is a, c, g, or t
  misc_feature (456)..(456): n is a, c, g, or t
tgntttccttccgtgttcttttaattatgcttgggttgttcatgataatttcataagtcattaaacaaagctagccatcatctcaagttatttccctgttaactatttttacagcccatgcatgttnggcaagtatcaaaaaaaaaaaaaaaaatccccaaggcgaaaatcctaaaannnngttaattacttgggtttttgttttactgctgtgcttgatttacatgaagtattgaataccaggccattcttttttcctgcatctttnctttttcttttgttctttggttgcctnnncctttttaattcnntttccgtgggtgtggccaaaatnatgnaggctanccgcgggtgacttttcaaatnttgggatgtggaccgtttctgcccttttccagagtaaaatgggtcccccctttgtctaaggggccccttctgcgcgctgtggtcaaaggngttccctttgggttttcccc

SEQ ID NO: 541319 - DNA, 631 bp, Homo sapiens
  misc_feature (262)..(262): n is a, c, g, or t
tggagtcgtatgcctcgtcgttatctgtgctatttataattctttgcccgcgtgattaggtctgggagaagtgtcaaaatactttcttccccattctcatgaggaaagggacccttgtggaaaataatgaagctgcaagaccccgaggttggccgtatcttctttcagattatcaagaaacagacctgtgatgcctgggagacgggggctgattcaattggagtgtgctttccttttggaaaaaaatgtgattcagtccctngtgggactgcccaaattggcccttgacaaaaatgacccccatttgtgtgatttcatttaaacccatttcctgaatgagcaggtgaaacccatcaaaaaattgggtgcccccgtgcccaacttgggcaaaatgggagggcccgattttggcttgggggaatttttttttgccaagccccccctgggagccagttttaattaaagttaacccccgggttaatttccccaaaaccgtggggtgatttccttggtccccaaggaagggcatgcatgttggggtttcctttcccttttttttaagttgtcccaaaacatccccttaagtttttttttttgtccctttctttcaaataaaaaaatttggttccca

SEQ ID NO: 541320 - DNA, 853 bp, Homo sapiens
taaaggggtaatataaaaatgtgctcgtgtgttaagccttacgtttttctcatgcctccattatcagttgcaattgtgtatctaagacctccaagctctgtttttaaaacaaaacaaaaaaacctttctctattatctcagaaatataaatactgttattttaatattcaagaaattcaatataacttttaacacacactgtggaacatttaacaccgttataaacaatgtagcttataagctatttttaacttccaaggctgttgtcttgcctttttgtctttctaccagtactttctcttaactattttgtcacgaattacactacgatgcaataacataaactctaggtatttaaccgcacttatgacattcaaataattcctgatttaatgacaacgggataatactgactttccagctgttatactgctagtgtatctttgttaccagactaacatgtacttcttcaaacgggacaaaacaaaccggacatctgaaaggctatttcttactttgcattttctaaattgacctgagggcacattccgattgaacatgtacttgaagttacagctttctggtatacacaccttataacgctctactaatgctttgacaaatgtctaacctattcaaacacagacacattggcacaactgttaatgcatgggggtgtctcaagaacacaaccaacagtggttgcttatatcgacttctggagttgaacacacttccattgtgttacaattccctagttattaattcacaacattcttccaccaaaggccatccatgctgtgggcaacagcgcaacaagataaacacaacacgacagaaaaggagcaacacg

SEQ ID NO: 541321 - DNA, 112 bp, Homo sapiens
tcgacggtgttctgaggaaacaaatctttttacagagctccacacattaggaagttaaaacattttatttgtacttagtgaaaacagaacaccgtcgaaggggtaccgagct

SEQ ID NO: 541322 - DNA, 503 bp, Homo sapiens
  misc_feature (375)..(375): n is a, c, g, or t
  misc_feature (412)..(412): n is a, c, g, or t
cggccgcgcgacattttttctttttttgttttagagatagtcttgctctgtcacccaggatggagtgcagtggcatgatcatggcccactgcaacgttgaactcctaggctccagcaatcttcccaccctgcccaacctcttttatatgaaagcagcttgtagtttctgtagtgatgggggctgcattgtggcgggatgtttactgatggctgtgtttgcgactaagaaactctattttattttgtcaggactgacggttgctgtggactcttatttttggcggcagctcacttggccggaaggaaaggtgctttggtacaacactgtcctgaacaaaagctccaactggggggtatccttcagtgtccgtgcangagggcgatgggtgggacccgcagccacatctcctgngcctccatgggcagtggaagcagctgcttctcccttctctgcagcgtggctgcagggtcaggatggagcccctccctcccacttgctcctg

SEQ ID NO: 541323 - DNA, 454 bp, Homo sapiens
agcttagccaggtgtggtggcacatgcctatagtcccagcctctcaggaggctgaggtggaaggatcacttcagcctgggagctgaagttggagccgagactgcaccactgcactccagcctgggtgacagagtaagactctgactcccaaaaaaaaaaaagtgtcagccaagtgtgtggctcacacctgtaaccccagtgctttgggagaccaaggtggaagcgtcacttcagcccagtttgagaccacctgggcaacacagtgagacccctacctctacagaaaaataaagtattagccgggcatggtggtgcatacctgtaatattagctactcaagaggctgaggcaggatgttcgcttgagcccaggaggtcaagactgcagtgagctattaatattatcataccactgcactctaacctaggcaacagggcaagactctcgtcgacgc

SEQ ID NO: 541324 - DNA, 475 bp, Homo sapiens
aggtccgaccccgcctcccgctccccgcccctcgcgcgcagcgcggggccagctttactcagggcacagagggtctctgcggccgtagcggccggggctgcggtagccactttagatttgggcaaggactttagattcgggctctgttctgtttccgccgtcctgcttcctgccgaggctggcccaggcagccgcgcttcgaaggacgccgccgggagctgcggaggtcagtgcgcgctgccgcgaccggggccttcagcgaggcgccggcgagaccagggaggaggcgggcgagggcgcgacccgacgtggcgctggccgtggattcctgaggcctcaccgcgcatgtccacgcgtcacagccccgtgctccttacctggggctgcacccctcacttggggccgggctcctcacctggggctggacctgtcacctgggggccagacctctcacccgggggccggacctctcatc

SEQ ID NO: 541325 - DNA, 2392 bp, Homo sapiens
aggtccgaccccgcctcccgctccccgcccctcgcgcgcagcgcggggccagctttactcagggcacagagggtctctgcggccgtagcggccggggctgcggtagccactttagatttgggcaaggactttagattcgggctctgttctgtttccgccgtcctgcttcctgccgaggctggcccaggcagccgcgcttcgaaggacgccgccgggagctgcggagcatgcgtggagtggcagtgctaacggctggtgtctcgcactgttggcctgtgaaggtacgtgaagctgaaagcctggaatggctggaaaggggtcatcaggcaggcggcccctgctgctggggctgctggtggccgtagccactgtccacctggtcatctgtccctacaccaaagtggaggagagcttcaacctgcaggccacacatgacctgctctaccactggcaagacctggagcagtacgaccatcttgagttccccggagtcgtccccaggacgttcctcgggccagtggtgatcgcagtgttctccagccccgcggtttacgtgctttcgctgttagaaatgtccaagttttactctcagctaatagttagaggagtgcttggactcggcgtgatttttggactctggacgttacaaaaggaagtgagacggcacttcggggccatggtggccaccatgttctgctgggtgacggccatgcagttccacctgatgttctactgcacgcggacactgcccaatgtgctggccctgcctgtagtcctgctggccctcgcggcctggctgcggcacgagtgggcccgcttcatctggctgtcagccttcgccatcatcgtgttcagggtggagctgtgcctgttcctgggcctcctgctgctgctggccttgggcaaccgaaaggtttctgtagtcagagcccttcgccacgccgtcccggcagggatcctctgtttaggactgacggttgctgtggactcttatttttggcggcagctcacttggccggaaggaaaggtgctttggtacaacactgtcctgaacaaaagctccaactgggggacctccccgctgctgtggtacttctactcagccctgccccgcggcctgggctgcagcctgctcttcatccccctgggcttggtagacagaaggacgcacgcgccgacggtgctggcactgggcttcatggcactctactccctcctgccacacaaggagctacgcttcatcatctatgccttccccatgctcaacatcacggctgccagaggctgctcctacctgctgaataactataaaaagtcttggctgtacaaagcggggtctctgcttgtgatcggacacctcgtggtgaatgccgcctactcagccacggccctgtatgtgtcccatttcaactacccaggtggcgtcgcaatgcagaggctgcaccagctggtgcccccccagacagacgtccttctgcacattgacgtggcagccgcccagacaggtgtgtctcggtttctccaagtcaacagcgcctggaggtacgacaagagggaggatgtgcagccggggacaggcatgctggcatacacacacatcctcatggaggcggcccctgggctcctggccctctacagggacacacaccgggtcctggccagcgtcgtggggaccacaggtgtgagtctgaacctgacccaactgccccccttcaacgtccacctgcagacaaagctggtgcttctggagaggctcccccggccgtcctgagggggaccaggcagccctcagcagccacaggccttccaggagctgttatcactaccagtttctggcacaattccagcacaattatgacaattcagagaagcaagtcaaaggactgggcacctgcctctgacagacaccagaccaggtccagggcctcctccacagcctcagctggggctctcagcaccaaagaacgaggggcccaggtcttgttggcaccccgggagccactgcccagggtgatggtggccagctcagggcttcctgcgggtgactgtcgcccagaccaggtgccattcatgactaatcaggagcagcgggctcacccaggcacctgtctgccaggaggccacgtgtgtcctgcccacccagggggagctgtattttggcagcaccccacgcttgctgcccgagggcctcttggggcacctaagacagcaccccctctcaggggagaccatggtggccccggccgcacccccccaccctggtgccaccactgcaacttttgtattcacaggcatcccatctccatcacagataaaatcttaggagataaacacattcaaaaaggaatgagataaaaagaataaggcaataaatgttgattggaacctctca

SEQ ID NO: 541326 - DNA, 2425 bp, Homo sapiens
aggtccgaccccgcctcccgctccccgcccctcgcgcgcagcgcggggccagctttactcagggcacagagggtctctgcggccgtagcggccggggctgcggtagccactttagatttgggcaaggactttagattcgggctctgttctgtttccgccgtcctgcttcctgccgaggctggcccaggcagccgcgcttcgaaggacgccgccgggagctgcggagcatgcgtggagtggcagtgctaacggctggtgtctcgcactgttggcctgtgaaggtacgtgaagctgaaagcctggaatggctggaaaggggtcatcaggcaggcggcccctgctgctggggctgctggtggccgtagccactgtccacctggtcatctgtccctacaccaaagtggaggagagcttcaacctgcaggccacacatgacctgctctaccactggcaagacctggagcagtacgaccatcttgagttccccggagtcgtccccaggacgttcctcgggccagtggtgatcgcagtgttctccagccccgcggtttacgtgctttcgctgttagaaatgtccaagttttactctcagctaatagttagaggagtgcttggactcggcgtgatttttggactctggacgttacaaaaggaagtgagacggcacttcggggccatggtggccaccatgttctgctgggtgacggccatgcagttccacctgatgttctactgcacgcggacactgcccaatgtgctggccctgcctgtagtcctgctggccctcgcggcctggctgcggcacgagtgggcccgcttcatctggctgtcagccttcgccatcatcgtgttcagggtggagctgtgcctgttcctgggcctcctgctgctgctggccttgggcaaccgaaaggtttctgtagtcagagcccttcgccacgccgtcccggcagggatcctctgtttaggactgacggttgctgtggactcttatttttggcggcagctcacttggccggaaggaaaggtgctttggtacaacactgtcctgaacaaaagctccaactgggggacctccccgctgctgtggtacttctactcagccctgccccgcggcctgggctgcagcctgctcttcatccccctgggcttggtagacagaaggacgcacgcgccgacggtgctggcactgggcttcatggcactctactccctcctgccacacaaggagctacgcttcatcatctatgccttccccatgctcaacatcacggctgccagaggctgctcctacctgctgaataactataaaaagtcttggctgtacaaagcggggtctctgcttgtgatcggacacctcgtggtgaatgccgcctactcagccacggccctgtatgtgtcccatttcaactacccaggtggcgtcgcaatgcagaggctgcaccagctggtgcccccccagacagacgtccttctgcacattgacgtggcagccgcccagacaggtgtgtctcggtttctccaagtcaacagcgcctggaggtacgacaagagggaggatgtgcagccggggacaggcatgctggcatacacacacatcctcatggaggcggcccctgggctcctggccctctacagggacacacaccgggtcctggccagcgtcgtggggaccacaggtgtgagtctgaacctgacccaactgccccccttcaacgtccacctgcagacaaagctggtgcttctggagaggctcccccggccgtcctgagggggaccaggcagccctcagcagccacaggccttccaggagctgttatcactaccagtttctggcacaattccagcacaattatgacaattcagagaagcaagtcaaaggactgggcacctgcctctgacagacaccagaccaggtccagggcctcctccacagcctcagctggggctctcagcaccaaagaacgaggggcccaggtcttgttggcaccccgggagccactgcccagggtgatggtggccagctcagggcttcctgcgggtgactgtcgcccagaccaggtgccattcatgactaatcaggagcagcgggctcacccaggcacctgtctgccaggaggccacgtgtgtcctgcccacccagggggagctgtattttggcagcaccccacgcttgctgcccgagggcctcttggggcacctaagacagcaccccctctcaggggagaccatggtggccccggccgcacccccccaccctggtgccaccactgcaacttttgtattcacaggcatcccatctccatcacagataaaatcttaggagataaacacattcaaaaaggaatgagataaaaagaataaggcaataaatgttgattggaacctctcaagattacagaaaataatgagaatgaaattttaa

SEQ ID NO: 541327 - DNA, 2504 bp, Homo sapiens
aggtccgaccccgcctcccgctccccgcccctcgcgcgcagcgcggggccagctttactcagggcacagagggtctctgcggccgtagcggccggggctgcggtagccactttagatttgggcaaggactttagattcgggctctgttctgtttccgccgtcctgcttcctgccgaggctggcccaggcagccgcgcttcgaaggacgccgccgggagctgcggagcatgcgtggagtggcagtgctaacggctggtgtctcgcactgttggcctgtgaaggtacgtgaagctgaaagcctggaatggctggaaaggggtcatcaggcaggcggcccctgctgctggggctgctggtggccgtagccactgtccacctggtcatctgtccctacaccaaagtggaggagagcttcaacctgcaggccacacatgacctgctctaccactggcaagacctggagcagtacgaccatcttgagttccccggagtcgtccccaggacgttcctcgggccagtggtgatcgcagtgttctccagccccgcggtttacgtgctttcgctgttagaaatgtccaagttttactctcagctaatagttagaggagtgcttggactcggcgtgatttttggactctggacgttacaaaaggaagtgagacggcacttcggggccatggtggccaccatgttctgctgggtgacggccatgcagttccacctgatgttctactgcacgcggacactgcccaatgtgctggccctgcctgtagtcctgctggccctcgcggcctggctgcggcacgagtgggcccgcttcatctggctgtcagccttcgccatcatcgtgttcagggtggagctgtgcctgttcctgggcctcctgctgctgctggccttgggcaaccgaaaggtttctgtagtcagagcccttcgccacgccgtcccggcagggatcctctgtttaggactgacggttgctgtggactcttatttttggcggcagctcacttggccggaaggaaaggtgctttggtacaacactgtcctgaacaaaagctccaactgggggacctccccgctgctgtggtacttctactcagccctgccccgcggcctgggctgcagcctgctcttcatccccctgggcttggtagacagaaggacgcacgcgccgacggtgctggcactgggcttcatggcactctactccctcctgccacacaaggagctacgcttcatcatctatgccttccccatgctcaacatcacggctgccagaggctgctcctacctgctgaataactataaaaagtcttggctgtacaaagcggggtctctgcttgtgatcggacacctcgtggtgaatgccgcctactcagccacggccctgtatgtgtcccatttcaactacccaggtggcgtcgcaatgcagaggctgcaccagctggtgcccccccagacagacgtccttctgcacattgacgtggcagccgcccagacaggtgtgtctcggtttctccaagtcaacagcgcctggaggtaggatccacacacagcacggccctcccagaggccatgtgagggccccttgggggcgggggacagggcgatgtgggggccctgggcaggaccaccagctctcatcccacaggtacgacaagagggaggatgtgcagccggggacaggcatgctggcatacacacacatcctcatggaggcggcccctgggctcctggccctctacagggacacacaccgggtcctggccagcgtcgtggggaccacaggtgtgagtctgaacctgacccaactgccccccttcaacgtccacctgcagacaaagctggtgcttctggagaggctcccccggccgtcctgagggggaccaggcagccctcagcagccacaggccttccaggagctgttatcactaccagtttctggcacaattccagcacaattatgacaattcagagaagcaagtcaaaggactgggcacctgcctctgacagacaccagaccaggtccagggcctcctccacagcctcagctggggctctcagcaccaaagaacgaggggcccaggtcttgttggcaccccgggagccactgcccagggtgatggtggccagctcagggcttcctgcgggtgactgtcgcccagaccaggtgccattcatgactaatcaggagcagcgggctcacccaggcacctgtctgccaggaggccacgtgtgtcctgcccacccagggggagctgtattttggcagcaccccacgcttgctgcccgagggcctcttggggcacctaagacagcaccccctctcaggggagaccatggtggccccggccgcacccccccaccctggtgccaccactgcaacttttgtattcacaggcatcccatctccatcacagataaaatcttaggagataaacacattcaaaaaggaatgagataaaaagaataaggcaataaatgttgattggaacctctca

SEQ ID NO: 541328 - DNA, 1103 bp, Homo sapiens
  misc_feature (45)..(45): n is a, c, g, or t
  misc_feature (50)..(50): n is a, c, g, or t
  misc_feature (52)..(53): n is a, c, g, or t
  misc_feature (56)..(56): n is a, c, g, or t
acacctcacaggctggacttctgtggcttcctcctgagccaagtnctctncnntcntgtctcagcggctgccaacagatcatgagccatcagctcctctggggccagctataggacaacagaactctcaccaaaggaccagacacagtgggcaccatgggacagtgtcggtcagccaacgcagaggatgctcaggaattcagtgatgtggagagggccattgagaccctcatcaagaactttcaccagtactccgtggagggtgggaaggagacgctgaccccttctgagctacgggacctggtcacccagcagctgccccatctcatgccgagcaactgtggcctggaagagaaaattgccaacctgggcagctgcaatgactctaaactggagttcaggagtttctgggagctgattggagaagcggccaagagtgtgaagctggagaggcctgtccgggggcactgagaactccctctggaattcttggggggtgttggggagagactgtgggcctggaaataaaacttgtctcctctaccaccaccctgtaccctagcctgcacctgtccacatctctgcaaagttcagcttccttccccaggtctctgtgcactctgtcttggatgctctggggagctcatgggtggaggagtctccaccagagggaggctcaggggactggttgggccagggatgaatatttgagggataaaaattgtgtaagagccaaagaattggtagtagggggagaacagagaggagctgggctatgggaaatgatttgaataatggagctgggaatatggctggatatctggtactaaaaaagggtctttaagaacctacttcctaatctcttccccaatccaaaccatagctgtctgtccagtgctctcttcctgcctccagctctgccccaggctcctcctagactctgtccctgggctagggcaggggaggagggagagcagggttgggggagaggctgaggagagtgtgacatgtggggagaggaccagctgggtgcttgggcattgacagaatgatggttgttttgtatcatttgattaataaaaaaaaatgaaaaaagtgaaaaaa

SEQ ID NO: 541329 - DNA, 177 bp, Homo sapiens
ggatcttagaggatccccccctcctttgctggggatgaccccatctcctcactgtctccctccagcatgactctcctggtcttgccaccactcatcatcagaggcattgatatagcagtggcagaatactcgtccatattgtaaaactaagtccttgagcttggtagcccatctgtc

SEQ ID NO: 541330 - DNA, 275 bp, Homo sapiens
gaactagtctcgagttttttctttttctttcttatccactaggcatttattctactctgggtaaacctggtgtctggatttctttttttttaaattaaatttaatttaaagtcccgggttacatgtgacaggatgtgacagatttgttacataggtaccaaacgtgtgccatggtggtttgctgcacctactaactcatcacctaggtattaagcttcgcatgcattagctatttaaaccgctctgtacttctggcacctgtacctcatccttta

SEQ ID NO: 541331 - DNA, 2365 bp, Homo sapiens
aggtccgaccccgcctcccgctccccgcccctcgcgcgcagcgcggggccagctttactcagggcacagagggtctctgcggccgtagcggccggggctgcggtagccactttagatttgggcaaggactttagattcgggctctgttctgtttccgccgtcctgcttcctgccgaggctggcccaggcagccgcgcttcgaaggacgccgccgggagctgcggagcatgcgtggagtggcagtgctaacggctggtgtctcgcactgttggcctgtgaaggtacgtgaagctgaaagcctggaatggctggaaaggggtcatcaggcaggcggcccctgctgctggggctgctggtggccgtagccactgtccacctggtcatctgtccctacaccaaagtggaggagagcttcaacctgcaggccacacatgacctgctctaccactggcaagacctggagcagtacgaccatcttgagttccccggagtcgtccccaggacgttcctcgggccagtggtgatcgcagtgttctccagccccgcggtttacgtgctttcgctgttagaaatgtccaagttttactctcagctaatagttagaggagtgcttggactcggcgtgatttttggactctggacgttacaaaaggaagtgagacggcacttcggggccatggtggccaccatgttctgctgggtgacggccatgcagttccacctgatgttctactgcacgcggacactgcccaatgtgctggccctgcctgtagtcctgctggccctcgcggcctggctgcggcacgagtgggcccgcttcatctggctgtcagccttcgccatcatcgtgttcagggtggagctgtgcctgttcctgggcctcctgctgctgctggccttgggcaaccgaaaggtttctgtagtcagagcccttcgccacgccgtcccggcagggatcctctgtttaggactgacggttgctgtggactcttatttttggcggcagctcacttggccggaaggaaaggtgctttggtacaacactgtcctgaacaaaagctccaactgggggacctccccgctgctgtggtacttctactcagccctgccccgcggcctgggctgcagcctgctcttcatccccctgggcttggtagacagaaggacgcacgcgccgacggtgctggcactgggcttcatggcactctactccctcctgccacacaaggagctacgcttcatcatctatgccttccccatgctcaacatcacggctgccagaggctgctcctacctgctgaataactataaaaagtcttggctgtacaaagcggggtctctgcttgtgatcggacacctcgtggtgaatgccgcctactcagccacggccctgtatgtgtcccatttcaactacccaggtggcgtcgcaatgcagaggctgcaccagctggtgcccccccagacagacgtccttctgcacattgacgtggcagccgcccagacaggtgtgtctcggtttctccaagtcaacagcgcctggaggtacgacaagagggaggatgtgcagccggggacaggcatgctggcatacacacacatcctcatggaggcggcccctgggctcctggccctctacagggacacacaccgggtcctggccagcgtcgtggggaccacaggtgtgagtctgaacctgacccaactgccccccttcaacgtccacctgcagacaaagctggtgcttctggagaggctcccccggccgtcctgagggggaccaggcagccctcagcagccacaggccttccaggagctgttatcactaccagtttctggcacaattccagcacaattatgacaattcagagaagcaagtcaaaggactgggcacctgcctctgacagacaccagaccaggtccagggcctcctccacagcctcagctggggctctcagcaccaaagaacgaggggcccaggtcttgttggcaccccgggagccactgcccagggtgatggtggccagctcagggcttcctgcgggtgactgtcgcccagaccaggtgccattcatgactaatcaggagcagcgggctcacccaggcacctgtctgccaggaggccacgtgtgtcctgcccaccccacgcttgctgcccgagggcctcttggggcacctaagacagcaccccctctcaggggagaccatggtggccccggccgcacccccccaccctggtgccaccactgcaacttttgtattcacaggcatcccatctccatcacagataaaatcttaggagataaacacattcaaaaaggaatgagataaaaagaataaggcaataaatgttgattggaacctctca

SEQ ID NO: 541332 - DNA, 543 bp, Homo sapiens
  misc_feature (45)..(45): n is a, c, g, or t
  misc_feature (50)..(50): n is a, c, g, or t
  misc_feature (52)..(53): n is a, c, g, or t
  misc_feature (56)..(56): n is a, c, g, or t
acacctcacaggctggacttctgtggcttcctcctgagccaagtnctctncnntcntgtctcagcggctgccaacagatcatgagccatcagctcctctggggccagctataggacaacagaactctcaccaaaggaccagacacagtgggcaccatgggacagtgtcggtcagccaacgcagaggatgctcaggaattcagtgatgtggagagggccattgagaccctcatcaagaactttcaccagtactccgtggagggtgggaaggagacgctgaccccttctgagctacgggacctggtcacccagcagctgccccatctcatgccgagcaactgtggcctggaagagaaaattgccaacctgggcagctgcaatgactctaaactggagttcaggagtttctgggagctgattggagaagcggccaagagtgtgaagctggagaggcctgtccgggggcactgagaactccctctggaattcttggggggtgttggggagagactgtgggcctggaaataaaacttgtctcctctac

SEQ ID NO: 541333 - DNA, 2329 bp, Homo sapiens
aggtccgaccccgcctcccgctccccgcccctcgcgcgcagcgcggggccagctttactcagggcacagagggtctctgcggccgtagcggccggggctgcggtagccactttagatttgggcaaggactttagattcgggctctgttctgtttccgccgtcctgcttcctgccgaggctggcccaggcagccgcgcttcgaaggacgccgccgggagctgcggagcatgcgtggagtggcagtgctaacggctggtgtctcgcactgttggcctgtgaaggtacgtgaagctgaaagcctggaatggctggaaaggggtcatcaggcaggcggcccctgctgctggggctgctggtggccgtagccactgtccacctggtcatctgtccctacaccaaagtggaggagagcttcaacctgcaggccacacatgacctgctctaccactggcaagacctggagcagtacgaccatcttgagttccccggagtcgtccccaggacgttcctcgggccagtggtgatcgcagtgttctccagccccgcggtttacgtgctttcgctgttagaaatgtccaagttttactctcagctaatagttagaggagtgcttggactcggcgtgatttttggactctggacgttacaaaaggaagtgagacggcacttcggggccatggtggccaccatgttctgctgggtgacggccatgcagttccacctgatgttctactgcacgcggacactgcccaatgtgctggccctgcctgtagtcctgctggccctcgcggcctggctgcggcacgagtgggcccgcttcatctggctgtcagccttcgccatcatcgtgttcagggtggagctgtgcctgttcctgggcctcctgctgctgctggccttgggcaaccgaaaggtttctgtagtcagagcccttcgccacgccgtcccggcagggatcctctgtttaggactgacggttgctgtggactcttatttttggcggcagctcacttggccggaaggaaaggtgctttggtacaacactgtcctgaacaaaagctccaactgggggacctccccgctgctgtggtacttctactcagccctgccccgcggcctgggctgcagcctgctcttcatccccctgggcttggtagacagaaggacgcacgcgccgacggtgctggcactgggcttcatggcactctactccctcctgccacacaaggagctacgcttcatcatctatgccttccccatgctcaacatcacggctgccagaggctgctcctacctgctgaataactataaaaagtcttggctgtacaaagcggggtctctgcttgtgatcggacacctcgtggtgaatgccgcctactcagccacggccctgtatgtgtcccatttcaactacccaggtggcgtcgcaatgcagaggctgcaccagctggtgcccccccagacagacgtccttctgcacattgacgtggcagccgcccagacaggtgtgtctcggtttctccaagtcaacagcgcctggaggtacgacaagagggaggatgtgcagccggggacaggcatgctggcatacacacacatcctcatggaggcggcccctgggctcctggccctctacagggacacacaccgggtcctggccagcgtcgtggggaccacaggtgtgagtctgaacctgacccaactgccccccttcaacgtccacctgcagacaaagctggtgcttctggagaggctcccccggccgtcctgagggggaccaggcagccctcagcagccacaggccttccaggagctgttatcactaccagtttctggcacaattccagcacaattatgacaattcagagaagcaagtcaaaggactgggcacctgcctctgacagacaccagaccaggtccagggcctcctccacagcctcagctggggctctcagcaccaaagaacgaggggcccaggtcttgttggcaccccgggagccactgcccagggtgatggtggccagctcagggcttcctgcgggtgactgtcgcccagaccaggtgccattcatgactaatcaggagcagcgggctcacccaggcaccacgcttgctgcccgagggcctcttggggcacctaagacagcaccccctctcaggggagaccatggtggccccggccgcacccccccaccctggtgccaccactgcaacttttgtattcacaggcatcccatctccatcacagataaaatcttaggagataaacacattcaaaaaggaatgagataaaaagaataaggcaataaatgttgattggaacctctca

SEQ ID NO: 541334 - DNA, 417 bp, Homo sapiens
  misc_feature (22)..(22): n is a, c, g, or t
  misc_feature (24)..(24): n is a, c, g, or t
tatataactgatccagaggatncngaggcttcaacggaactttcaccagtactccgtggagggtgggaaggagacgctgaccccttctgagctacgggacctggtcacccagcagctgccccatctcatgccgagcaactgtggcctggaagagaaaattgccaacctgggcagctgcaatgactctaaactggagttcaggagtttctgggagctgattggagaagcggccaagagtgtgaagctggagaggcctgtccgggggcactgagaactccctctggaattcttggggggtgttggggagagactgtgggcctggaaataaaacttgtctcctctaccaccaccctgtaccctagcctgcacctgtccacatctctgcaaagttccgttgaagccgtcgggtaccgagcc

SEQ ID NO: 541335 - DNA, 395 bp, Homo sapiens
atactcaatgggatcgaaagggtcatgtactcacatatctagatagcatgatagcctgtccagcaaggatagtgttcagcaggtggtgtatctgtctcgcatgacgttataatcattcaccccacatagctggatcagtacgcgcgatagatagtctgctgctcagtacattgtctgtgcttcaggatgttagcaacagctgtagggcaataatcataggtagcttgatccctatgcaaaagttatagttgacacttggggcactttcatggtggaacatactaatagagcattctcgaatgtgtactctccaagttgctcagaaagctctcaatattgagtaattaaaatctgaggctattccacaacagatatagattcgtagtaaactgtag

SEQ ID NO: 541336 - DNA, 1084 bp, Homo sapiens
aggtccgaccccgcctcccgctccccgcccctcgcgcgcagcgcggggccagctttactcagggcacagagggtctctgcggccgtagcggccggggctgcggtagccactttagatttgggcaaggactttagattcgggctctgttctgtttccgccgtcctgcttcctgccgaggctggcccaggcagccgcgcttcgaaggacgccgccgggagctgcggagcatgcgtggagtggcagtgctaacggctggtgtctcgcactgttggcctgtgaaggtacgtgaagctgaaagcctggaatggctggaaaggggtcatcaggcaggcggcccctgctgctggggctgctggtggccgtagccactgtccacctggtcatctgtccctacaccaaagtggaggagagcttcaacctgcaggccacacatgacctgctctaccactggcaagacctggagcagtacgaccatcttgagttccccggagtcgtccccaggacgttcctcgggccagtggtgatcgcagtgttctccagccccgcggtttacgtgctttcgctgttagaaatgtccaagttttactctcagctaatagttagaggagtgcttggactcggcgtgatttttggactctggacgttacaaaaggaagtgagacggcacttcggggccatggtggccaccatgttctgctgggtgactgtcgcccagaccaggtgccattcatgactaatcaggagcagcgggctcacccaggcacctgtctgccaggaggccacgtgtgtcctgcccacccagggggagctgtattttggcagcaccccacgcttgctgcccgagggcctcttggggcacctaagacagcaccccctctcaggggagaccatggtggccccggccgcacccccccaccctggtgccaccactgcaacttttgtattcacaggcatcccatctccatcacagataaaatcttaggagataaacacattcaaaaaggaatgagataaaaagaataaggcaataaatgttgattggaacctctcaagattacagaaaataatgagaatgaaattttaa

SEQ ID NO: 541337 - DNA, 297 bp, Homo sapiens
actgccaaagcgtagtacccaaaaaaagggtctttaagaacctacttcctaatctcttccccaatccaaaccatagctgtctgtccagtgctctcttcctgcctccagctctgccccaggctcctcctagactctgtccctgggctagggcaggggaggagggagagcagggttgggggagaggctgaggagagtgtgacatgtggggagaggaccagctgggtgcttgggcattgacagaatgatggttgttttgtatcatttgattaataaaaaaaaatgaaaaaagtgaaaaaa

SEQ ID NO: 541338 - DNA, 104 bp, Homo sapiens
gtcctgcaaaatcatcattcgggagcaagtgggtttaatatcctttgtcatgaaaggaaagattagctttcatgactacacacttagtccatctgacccatctt

SEQ ID NO: 541339 - DNA, 344 bp, Homo sapiens
  misc_feature (22)..(22): n is a, c, g, or t
  misc_feature (24)..(24): n is a, c, g, or t
tatataactgatccagaggatncngaggcttcaacggaactttcaccagtactccgtggagggtgggaaggagacgctgaccccttctgagctacgggacctggtcacccagcagctgccccatctcatgccgagcaactgtggcctggaagagaaaattgccaacctgggcagctgcaatgactctaaactggagttcaggagtttctgggagctgattggagaagcggccaagagtgtgaagctggagaggcctgtccgggggcactgagaactccctctggaattcttggggggtgttggggagagactgtgggcctggaaataaaacttgtctcctctac

SEQ ID NO: 541340 - DNA, 1298 bp, Homo sapiens
ggccaggatggcggcgtgcgacggcgacgactcgctgtaaccccatcgcggtggctcatacgacgagtctccgcagtgacggacgttcaggcttggcctcaatgagcgagtcaacagagagctgtccatcagtcgaccattgcgtctccttggggcgtagagacaggacccggacagtgatgctttcatgcactgtccgttacatgcatactcagtacgtcatggatcgaaacgatggtaggtcgctcgcgtggacgctaggcagaaacaagctaggatcaaccttcgacataccctaggtaggagagggcctcagtagtactgtgctacgtgccgtgattgccccaacggctgcgaaggtcggcttggtgccaccatgttcgtgagagtaggaccagatgcgttgccggagaagcatcgagtcacggtgtgaacttttcctctcacgtgcgaacgcactccttcaaaactgtacggccttttcgaaggggcatttgagatactggagaggcgggcagtcccttttctcttggtgagcgcgggtctgttgttgcatacgaccgcgacctagcggccgagggtctgccgtggggaaacgtggtatcattctatccgcttgcgcgcgcaaaactcattgcggggccttcctcggcggcggcgctttgccttgtgcctcctgcgttggcctggacgtcattccgcgcttctttggctttgttcgcgaaggttttaggcccctcgcgtcggtagacaggaagttctgttggcagaacccttatggcaagaacacccaccgggttacaacctttggtgctccagtggacagagcaccctctgggttggggcgtaaccaaaacgatatcgaaagcgaggccacgccaacgacaaagttcgggcctgggaccggttgtccgccggggagcgccgggccccatgagggggccgtcacagccaaaacatggcgcttccgacggggtgttgggaaacgattgtaatttgcgacccacaaaggaggttttgccctggagggcacgtgggccttagtttgcgacccgcgagagcgggtccctaagattgaaacacctaaaggtaggggacttttctactaacgggcttccggttatttggctcacggcattgacccaagacgtgcgttagttcctactcttcgcatttggcttaaagcaccgggcgaaggcgggagcgctcccttgaaactttatcctgcgggctctctgtgttacgagcgcagatgaagacggaagccgcacaatttggtgtgctattagagctacacc

SEQ ID NO: 541341 - DNA, 156 bp, Homo sapiens
gcggccgcctactactactactactgctcgaattcaagcttctaacgatgtacggggacatgtggggagaggaccagctgggtgcttgggcattgacagaatgatggttgttttgtatcatttgattaataaaaaaaaatgaaaaaagtgaaaaaa

SEQ ID NO: 541342 - DNA, 904 bp, Homo sapiens
  misc_feature (22)..(22): n is a, c, g, or t
  misc_feature (24)..(24): n is a, c, g, or t
tatataactgatccagaggatncngaggcttcaacggaactttcaccagtactccgtggagggtgggaaggagacgctgaccccttctgagctacgggacctggtcacccagcagctgccccatctcatgccgagcaactgtggcctggaagagaaaattgccaacctgggcagctgcaatgactctaaactggagttcaggagtttctgggagctgattggagaagcggccaagagtgtgaagctggagaggcctgtccgggggcactgagaactccctctggaattcttggggggtgttggggagagactgtgggcctggaaataaaacttgtctcctctaccaccaccctgtaccctagcctgcacctgtccacatctctgcaaagttcagcttccttccccaggtctctgtgcactctgtcttggatgctctggggagctcatgggtggaggagtctccaccagagggaggctcaggggactggttgggccagggatgaatatttgagggataaaaattgtgtaagagccaaagaattggtagtagggggagaacagagaggagctgggctatgggaaatgatttgaataatggagctgggaatatggctggatatctggtactaaaaaagggtctttaagaacctacttcctaatctcttccccaatccaaaccatagctgtctgtccagtgctctcttcctgcctccagctctgccccaggctcctcctagactctgtccctgggctagggcaggggaggagggagagcagggttgggggagaggctgaggagagtgtgacatgtggggagaggaccagctgggtgcttgggcattgacagaatgatggttgttttgtatcatttgattaataaaaaaaaatgaaaaaagtgaaaaaa

SEQ ID NO: 541343 - DNA, 827 bp, Homo sapiens
gggttcaagcgattctcctgcctcagccttcagagtagctgggactacaggcacgcgccaccacgcccggctaatttttgtaattttagtagagacggggtttcaccatattggtcaggctggtctggaactctatttcatttcatttcatttcatttcatttcatttcatttcatttttttattttattttattttattttattttattttattttattttattttattttattttattttatttttttgagacggagtctcactctttcgcccaggctggagtgcactggcgtgatcttggctcactgtgagctctgcctcccgtgttcacgtcattctcctgcctcagcctcccacgtagctgggactacaggcacctgccaccatgcccggctaattttgtaattttagtagagacagggtttcaccatgtagcccaggctggtttcgaactcctgacctcaggtgatccacccgctcggctcccaaagtgctgggattacaggcttgagcccccgcgcccaggccatcgaaaaatgcttttcaagcctcctgcactatgtctgcaaataaccttctttacaatgttaaaagaaatgcactctggtgtctggacgggccgcgactgccgatctcggaacattgacgaacggccaccaatgtgacaggcactccccactatacatcacggtgtcgggacgcgagaccggacccaattgccttacacccaagacttgatcccgtgcgacttacttttctagaaacgatggtcccaaagccattacccttgcgccccattcatatgacggccaacaacgcggcgga

SEQ ID NO: 541344 - DNA, 1266 bp, Homo sapiens
  misc_feature (45)..(45): n is a, c, g, or t
  misc_feature (50)..(50): n is a, c, g, or t
  misc_feature (52)..(53): n is a, c, g, or t
  misc_feature (56)..(56): n is a, c, g, or t
acacctcacaggctggacttctgtggcttcctcctgagccaagtnctctncnntcntgtctcagcggctgccaacagatcatgagccatcagctcctctggggccagctataggacaacagaactctcaccaaaggaccagacacagtgggcaccatgggacagtgtcggtcagccaacgcagaggatgctcaggaattcagtgatgtggagagggccattgagaccctcatcaagaactttcaccagtactccgtggagggtgggaaggagacgctgaccccttctgagctacgggacctggtcacccagcagctgccccatctcatgccgagcaactgtggcctggaagagaaaattgccaacctgggcagctgcaatgactctaaactggagttcaggagtttctgggagctgattggagaagcggccaagagtgtgaagctggagaggcctgtccgggggcactgagaactccctctggaattcttggggggtgttggggagagactgtgggcctggaaataaaacttgtctcctctaccaccaccctgtaccctagcctgcacctgtccacatctctgcaaagttcagcttccttccccaggtctctgtgcactctgtcttggatgctctggggagctcatgggtggaggagtctccaccagagggaggctcaggggactggttgggccagggatgaatatttgagggataaaaattgtgtaagagccaaagaattggtagtagggggagaacagagaggagctgggctatgggaaatgatttgaataatggagctgggaatatggctggatatctggtactaaaaaagggtctttaagaacctacttcctaatctcttccccaatccaaaccatagaattccagagggagttctcagtgcccccggacaggcctctccagcttcacactcttggccgcttctccaatcagctcccagaaactcccgaactccagtttagagttattgcagctgcccaggttggcaattttctcttccaggccacagttgctcggcatgagatggggcagctgctgggtgaccaggtcccgtagctcagaaggggtcagcgtctccttcccaccctccacggagtactggtgaaagttcttgatgagggtctcaatggccctctccacatcactgaattcctgagcatcctctgcgttggctgaccgacactgtcccatggtgcccactgtgtctggtcctttggtgagagttctgttgtcctatagctgg

SEQ ID NO: 541345 - DNA, 765 bp, Homo sapiens
  misc_feature (45)..(45): n is a, c, g, or t
  misc_feature (50)..(50): n is a, c, g, or t
  misc_feature (52)..(53): n is a, c, g, or t
  misc_feature (56)..(56): n is a, c, g, or t
acacctcacaggctggacttctgtggcttcctcctgagccaagtnctctncnntcntgtctcagcggctgccaacagatcatgagccatcagctcctctggggccagctataggacaacagaactctcaccaaaggaccagacacagtgggcaccatgggacagtgtcggtcagccaacgcagaggatgctcaggaattcagtgatgtggagagggccattgagaccctcatcaagaactttcaccagtactccgtggagggtgggaaggagacgctgaccccttctgagctacgggacctggtcacccagcagctgccccatctcatgccgagcaactgtggcctggaagagaaaattgccaacctgggcagctgcaatgactctaaactggagttcaggagtttctgggagctgattggagaagcggccaagagtgtgaagctggagaggcctgtccgggggcactgagaactccctctggaattcttggggggtgttggggagagactgtgggcctggaaataaaacttgtctcctctaccaccaccctgtaccctagcctgcacctgtccacatctctgcaaagttcagcttccttccccaggtctctgtgcactctgtcttggatgctctggggagctcatgggtggaggagtctccaccagagggaggctcaggggactggttgggccagggatgaatatttgagggataaaaattgtgtaagagccaaagaattgcagtaagggtaagctggtaccga

SEQ ID NO: 541346 - DNA, 357 bp, Homo sapiens
  misc_feature (243)..(243): n is a, c, g, or t
atgaatgtattcaaactggactaagctatgaagagccattgttggagtagatgtgaaccttgaggggcctcaaagcccaaggaagaggtaaggttctgaggcagttcagacttcttttagtccatcacggattgaagactcactctgcagaccatacagggggcccaaaagaggtatcagggataagaaacccaagaaacagtgattgcaataagatcttcccttggtacctaaacggaaaanagaaaaaaattagcaaacagacctatagaaatgtaatagattgttgttttggagtaacctttgtccatggtaccatcttatgttctaataataaaataataaaaataataaaaa

SEQ ID NO: 541347 - DNA, 616 bp, Homo sapiens
  misc_feature (45)..(45): n is a, c, g, or t
  misc_feature (50)..(50): n is a, c, g, or t
  misc_feature (52)..(53): n is a, c, g, or t
  misc_feature (56)..(56): n is a, c, g, or t
acacctcacaggctggacttctgtggcttcctcctgagccaagtnctctncnntcntgtctcagcggctgccaacagatcatgagccatcagctcctctggggccagctataggacaacagaactctcaccaaaggaccagacacagtgggcaccatgggacagtgtcggtcagccaacgcagaggatgctcaggaattcagtgatgtggagagggccattgagaccctcatcaagaactttcaccagtactccgtggagggtgggaaggagacgctgaccccttctgagctacgggacctggtcacccagcagctgccccatctcatgccgagcaactgtggcctggaagagaaaattgccaacctgggcagctgcaatgactctaaactggagttcaggagtttctgggagctgattggagaagcggccaagagtgtgaagctggagaggcctgtccgggggcactgagaactccctctggaattcttggggggtgttggggagagactgtgggcctggaaataaaacttgtctcctctaccaccaccctgtaccctagcctgcacctgtccacatctctgcaaagttccgttgaagccgtcgggtaccgagcc

SEQ ID NO: 541348 - DNA, 684 bp, Homo sapiens
  misc_feature (614)..(614): n is a, c, g, or t
atattgagagatagaatgacctagcatcattgactcacacctgtggtccataagcgtgggaggatgatgcatgaggatcagctcgggcctaaaggtctgatacactgctgacatgcacagtggtgatctgtacatacacacaagtttcatgattacgtttatatggaggactgagcctgatatgcctgctagctggaaggctgctgctgcagtgatcgcgtgtacaccatagggtgaatcctgccatattcataggttgtgtcactcgtcttaagtcttaggcactccgtgcatgaccctatcttttattctatggagaaatgagatatctaggcatgtgacgtaaaggcgccaattatctgtagaggcccaatcatggactcagaaaccgatcaagatgccctgtaaggactgttagtgagaggtgactgttgacctgtaggctgcctactggacaggcttactataggcagacaagtgtactgaggcctgtatgacagagctttgcaggccatagcctgcgaatgaactgggtcctgatgttgagactagtctgttaacacggtgcaccatttgtctactcatgcgatagagtcgtacccatgcccgctgtngcacacgtgatgtcgccttgtgggacggtctaggcgcgtagactatcagtggtatcggggttgagagcac

SEQ ID NO: 541349 - DNA, 823 bp, Homo sapiens
atgacgctcagcactcgtcgcttctcctaacagaccctgcccggcttggcgatggagtttccggacctcgttcgctcactgttcggagccgagctgtcagcgcttgggtgaggtggcggagcgcgcggtggggctggtggcccagcggagaggtgactttgaacctgcaggtttgggagggaagggtggtgctcccagtgctatggcaatgcctgtgggtgtgctggtgtgcttgaagcttgtgtgtgggtgtgtggtcatgcgtgcagattgtgtgtgctgtggccaatggagtgtaatggtgcttgtgggaagtgtggctggtgttgtcgaaaatagtggtggctgttttccttcccgagttggaagacttgagtgagagagaaggacatcgaggtcccgcgtggacctgcaagtccgaccaactcttttgcagattttcttgccgcttaaggtgtagatgcctgctcagggccatcttcgtgcgacagaccatgtggcctacgcccagcatcactgtggatctgcgttaccaaaaggtgagggggcggatcctcagggtgaaagcaggcagatggagaatgcgtgcagaatcccccaaatctgtgtctacacgtttccttctccgcttttgatccttctgagggctgtcaggtgcgtggggaaaagacgtgttaagataaggcgttgaatgttgggtgggtacagtagtacaaaggtactatatcagcgaaccaaggaggatataggacggagtggatgttgagccaggagagttgaggcgtttgctcccgtttgactagcagggatattcgagggtaca

SEQ ID NO: 541350 - DNA, 321 bp, Homo sapiens
catgttgaactctgcggagcaggtatgggaagcgctaaagaaacggaaatcgttgtcgtggtagacgaggaacgcttcgaactctggattagtgaatttgagaggcttttcactagctcgggtattcgctattggtcgacccctatttaccgttcgggagttctggtgtgatggaaaagttattacttctagtattactactgggtgccagtggagcggctcagcctcagtcttttgaaatgccattgccacctgctcaaattttaccagcaagcattgcgacaaagctatgggatgcagatccacgagtagagtcagccc

SEQ ID NO: 541351 - DNA, 446 bp, Homo sapiens
tacatactgccatgtaggccattcaagtgaacccgaccccttctgatgtgcacgataacatccgtcgtcacgactatacagaagtggacaagcaacagccgctactcacatttactcagcctgcgtgtccagaagaggtagaggatccagagaaaccgagctaatatgtcatgtgctggccactgctcggcagaaatcacagatacaagacatggggaaagccaatggttggctaaggaggcagcatctctggtaaagtaacatttaagcaaagaatcaaatgaaacaaaggggccagtcgggggaaattggtgttagactggtaaactcagagatggaaacaggtgttgtcctgcagcatcactgaggcagtgtggcaggagtggaacaggattggaaactcgagagacagaagaaatttgacaaaaaaaacacaacaaccacca

SEQ ID NO: 541352 - DNA, 828 bp, Homo sapiens
  misc_feature (260)..(260): n is a, c, g, or t
agttcggccgttcccgctcccgcccggccccatgtgctggtgattccccagaatcaggcctcgtttttgggccacccggggtcgcaccgcttcgggcttgcctctctacaccccacgggtttacaagtctcttggccccgggacgatcctgtattttctggccccagcttcccaaggacctgtttgcgacaccctagcgctggataattctcccgtggtgccgacccccatggcttggcaggcccggggtccccaccctnttccttccccgggtggtaatgacgacgcggttagaagtgtctcgcgcccccgtggttcttgcacgagttgccttttggctgccgccccccccaggggactgcaacgaggctggctctgggcccgcagtgcccgcggcacccacccctcctttgatgccagagtgccccacgagccttctcttggacgcctgttccgagggacttgtattgtcgccccccgaaccggttctggacccgagaagtttctttggacgccctccctaggccacgcactccccgggccggtacccctgggcacgcgggagatcttctgcgcgcctacatcattcccacgtcacaattgtcgccgggggagatgctgtattgatctcgcttgcgccccccctgctcgatgaaatggcactggccgccgcgattcgcgccctcccgtcatcgtcaatgctggtggcttggtcatgcctccagagtggggggtgtcgtctcactgtgtcatatatcaaaaatgatgttcaccccgtggtgatatcccgcacaatagaaggagggggcccacctcccccacataaca

SEQ ID NO: 541353 - DNA, 615 bp, Homo sapiens
gcgactacagtcggagacagggatctgtagaaatcacgtatcacaacagacatcacacgatctaccatgcgtgtgcatctgtaatgcacgaacctggtcgacaaaatcatgtcacttcaaccccatatcatataaattagagaaaaaaaccttctaaatcacgtggttacattcaaactttaacttccttcagtacatgctgcagattacagtactgttaaggtcattgcaagcatgcccaaaccctctggtgtctgatcatgtatctcagcaacattgcagtatgcaagaaacgagcatgccccggtctcagcccatggactagttaatacagtgaagcaggttcctgtcttttacccttcctgctcagaacataaaagattaaggcactcacaatcaaggaagactgggagttctcagcagctggcaacactgcagtctcaacagataacatcacggcaaaccaattactgagacacttggctgttgctcaacctggcaagtctcaaacagcctttctttaaccttgtaggcatcagatgcataaggttagctgcaacatgtgcatggtcaacaaactacgtagagctcttatgaacaactcttgtaccaaat

SEQ ID NO: 541354 - DNA, 171 bp, Homo sapiens
aaaaaaaatgcaggggccctggaaatatatttaatttaggggggagttacatgagtataaacaaatgtaaaatgtattaagctggccctttaaaatttgtagactattggatgtatgttttagttaaatgaaaaagattaaaaaatggaaaaatggctttttgcccctcca

SEQ ID NO: 541355 - DNA, 193 bp, Homo sapiens
tagtttgtggcctgtgatatgtgctttctcggtgttacatcgcgccagtcattggtatatgcgtttgtgtgttggttagtacgcctagtatgaggcgcgttctggcgtgtacgtgaaatcacatggctaggccggaggtcattaggagggctgagagggcccctgttagggctcatgggccatcgagacgaga

SEQ ID NO: 541356 - DNA, 331 bp, Homo sapiens
  misc_feature (132)..(132): n is a, c, g, or t
tctggccaggcccctcaggaagaaactgagagcaaagaatggaggtcagagtttagtccctggtgttcccccttatctgacgggtgtgtgaatccatttggtgggggtctgggtttctgaaaagtagctcangggcacgtgttaaggatgtctctaggtgactctaacttccctggctattgtttgaaactgttatgaccttcttgcttatcagcttgctggtttccttctcggggcgagctgggtgcctggagttttcggtgaaggaaactcaagattctcctttatttctgtgcttgtgagaatccccctgctcccaaagaggggtccc

SEQ ID NO: 541357 - DNA, 117 bp, Homo sapiens
ggtgaggttgtctagtccacgctcggagccatgccgtccaagggtccgctgcagtcggtgcaggtcttcggacgtaagaagacagcaacaacttttgcgcactgcaaacgcggcaat

SEQ ID NO: 541358 - DNA, 142 bp, Homo sapiens
ttttgggggcccccttgggttttttttttggggggggcgggtttaagggtttaggtttttaaaacggggcttttttagggggacccccgggcccaaaatttgggcccgagtttttgggcccctttaaaagggtttatgggga

SEQ ID NO: 541359 - DNA, 626 bp, Homo sapiens
  misc_feature (1)..(1): n is a, c, g, or t
ntcgccacaatgttgctttatcaacggtgcttcctactttgtgttatgtaacaaccggctggctgccggatcgttctctgtaacaaaacacggtgtggggtgcctctaattcgtgctatctcctcgaatgttagtgtatataatgaatggagcgctcccttgccttcagatcgctatttattaaagagtgtggcacaagggaaaccaggagtctagtaatatttgcctcggcgagctttcatcaacggttgataccccgtgttgatgattccccgccctcaacggggtgtattactaaaatgatacgcacgcgtggcctggcgtgttttataatagacgcacgacgtgtgtcgtaataaggtacaaagtgagtcaggtccactcggtgagaacgtagaagggcaatttgtccacgttccgcgatccgccgggtacaattctaacacagtgatggtctatatgtagtatgatggtagccctcaacctggatgcagcagagatggttcttaacttactctcaccaaaatatttgttttacacaccccacgcgggtgtatatatagaagtcacgagggctgccatatgttccctcgccaccaagaaaaaggtagcccagccaacatcga

SEQ ID NO: 541360 - DNA, 368 bp, Homo sapiens
agatcctttgagatggagtcttgctctatcgtccaggctgagtgcagtgtcacagatcttggctcactgcaacccccgcctcctgggttcaagctattctcctgcctcagcctcccgagatagctagggactacaggcgtctgcaaccacacctggctgatttttgtatttttagtagagatggggttttaccatattggtcaggctggtctcaaattcctgacgtcaggtgacccacctgccttggcctctcaaaatgttgggattacaggcgtgagccactgcatccgacctcattttgtttttttcaattctgttatcggcatttcttccttttttttttattaatgtataggtgtactgtcata

SEQ ID NO: 541361 - DNA, 302 bp, Homo sapiens
gtcgtgaagcgaaacccggcgactgaacatctcagtagctggaggaaagacatcaacgagaattcgttagtagtggcgagcgacgcggaaccaggccagtgccgaacaagtgatttagcagaacgattttggaaagatcggccatagcgggtgacagccccgtatgcgaaagtgaaattgtcggacttgagtaggggcgggaccaccgttgttatcctgtctgaacatggggggaccacccctctaaagccttaaatactcgtatgcaaccgatagtgaactggtaccgtggggtaggaggt

SEQ ID NO: 541362 - DNA, 340 bp, Homo sapiens
aagccgggcaaagttttttttttaaaaaaaaaatttccttttaccccaaacccaacaccttgggttttcccttaatcccgctttaacattaaggccgcatttttttaacccaaaagtgttttaaggccctgggaaatgttcggaacctggggggggaaaaaatcccaaaaaggcctttgcccccggagcccccctttgaaaaggggcccctaaaaaaacccttgaattttagtgggctaaaaaaaatattaacggggggactttcttacaaataaggggtatcttctcccatataagggcaaattggcctaaaattccccccttttttggaaacgaaagg

SEQ ID NO: 541363 - DNA, 213 bp, Homo sapiens
aatctggcggcgtcgaaccacgtcgagcgatcgcttccaccggcaggccttcggcctgcagcttcagcgcttcggccacggcggtgtcgcgcttgcgcccggccagcagcgtgtgcacgccggcctgggccagctggcggacggtttccaggccgatgccacgggtggcaccggtgaccagggcgatcttggaagtagcggtattcatgcgtg

SEQ ID NO: 541364 - DNA, 392 bp, Homo sapiens
aatttcctgataacattatgtggccctttggatccagccaagcctgaggtttacccccgggctttttggatattgggaccaggtggttcatccccttttctggaaattcgagtcaggggtaatttaaccccctttagacccttaaagaaccatcagcatcccccgggaacttttttaaaaaagcaaaatttctactgctttggatcctgggtcaaaaaaaagaaaaaaaaaaaaaatgcaaaactttaggccccgcccccgatttattaaatcaatttgcagtttaacaaaatccccaggggatttgtaggcccattgaactttaaaaaccagggttttagaacaggtttttaaaaaggaacaaataaactcatttccccaaagttaactga

SEQ ID NO: 541365 - DNA, 123 bp, Homo sapiens
tgaaaaccattcctttcttcagcttagtattgattttggctattgattacgtagggagccttcacggaattcaattcccagtcccagaaccctacggttttaggtagagttattgttcagcag

SEQ ID NO: 541366 - DNA, 1251 bp, Homo sapiens
  misc_feature (193)..(193): n is a, c, g, or t
cagcagcagaagcaggagccgctgggcagcgactccgaaggtgttaactgtctggcctatgatagaagccagacaatcacaacagaagcaggttcttcaagaatatgcaaacgaattcctctcgaatacagatgctactatagacactcttaatcaatagaaaaggagaatgctaaaatgagatggaattacnaagactatcaaaggaggagacaaggactctcctagataggagaagaacttcgtgcaatccgcaaggaccagagccaggacggcaatctgtattctattcggggcttttcgggatatctcccaggggagaaaaatagcacaatgatgattaacatgataataatgaaatagtgatatatcatgaactgatagacaaccaatgattcggaatgagataccaaatgatactctagaatcggatcaaatgaacatcattataagaaattgccactagcagcattcagagattcagataaaaacaaataattaaatattgaaacctactatacttgcataccctagctaaatctcacctaacggtatatcgagatgctaccgccatacatgcgctataatgaaggcgaacccaaacaaacgaattacacctacttaactaaccgagctaggcaccaaatgaaaccaagaggagtctaaactaagagcgcggaacatactggatgggagaaatgataaacaaaacgaaaatataaaaacataagcgatagcctaaatgaaaaatggaatcccccatgaaggagctataaaacataactgaaccgacaaaacgcgagcgaatctaaagaggcgctaaaaccccaaaaacccctaccaagctagtaatacccataccctataaaaattacaaatacattatataaacccatggaggcggaaaattcaaggctggcgcacccaacgcccggctgccattacaatccccgaaaagggggacttcctgggggccccaaagatatacggtccgcaaaccaactaatcccagggccaaaaaagcaccttaaacaaagaaaataccctaccaatgcgagagcaatataaagcgcaaaacaatcccaggggcgcccaatttagctggggcgcccgaggcggagggtccccccccaacctgaattcaaaaaagccatccagaaaacggggaagaactcatggagagagagaaaggcgatagggaattgaagaaaaacataagacacgggaaaaggccacacctccgcagagggc

SEQ ID NO: 541367 - DNA, 247 bp, Homo sapiens
gttctaggggttgaagggcaggcgcttttgctcggggttgtagccgaacgactgcggaccctggaagctggcgatggtcttggcctggcccagcagcagctgcttgaccgatggtgtcgcggtccaccgccatgatcagcgcgcggcgcacgtcgcggttctgggtgatgccattcttggtgttgtagcgcagcgcgaaggcccacccgggcccgccggtcggaaatgacgtcggcattgcccaagt

SEQ ID NO: 541368 - DNA, 394 bp, Homo sapiens
  misc_feature (1)..(1): n is a, c, g, or t
  misc_feature (172)..(172): n is a, c, g, or t
nccccttattatgaaacatccagcctattttataaatacccttaatatagaaaaccctcctcaggagctgtttaaagtataaagcccaagattttcccttaggctaatggcctgaccttctgtgctttcaaattaaagtacttaaagcactgaaggattggcccaggtgtgngtcgcacgcctgtaatcccagcactttgggaggccaaggtgggtggatcatctgaggtcaggagtttgagaccagcctggccaacatggtgaaacctcatctctactaaaaatataaaaattagccaggtgtggtgctcatgcctgtaatcccagctactcaggtggcagaggcacaagaatagactgaaagtaaaaaaataggcacaaatagactgaaagt

SEQ ID NO: 541369 - DNA, 945 bp, Homo sapiens
ggcgccacgcaagtctacccgaggcggctgtccatgacactgattccagatcttcacatgaggcatgggtcgatactcgcctgcgcagaagtgcttacgcctcgtacaaagttgcagcccaagagaacaggcccgtcacggaccatctggacgagcaggcagctgcagggacctgaagcagattcaccagcaggctctatgatcgtcagttatagcaggggtctgggaggacaagctcatgaagacaacgccagtgtgtgttttaatcggaaaagtggtcacttgccaagaaaggcccttgagaggtgacaccgtaattgatggttgggcaatggctgataaatgacactttgagacatctccatctcatctcaagtcactcccgccagcagatgaaggatgcagcagtctcggccctggctgctctatgcagtgaatattacatgaaggagccgggggaggcagatcccgcaattcaggaggagctgatcacgcagtacctggctgagcttcggaaccccgaggagatgactcgctgtggcttctcgttggcttgggcgccttccaggcttcttctgaaaggccggctccagcaggttctcacaggtttaagagcagttacccacacttccccccgaggacgtaagtttgctgagtcccaggagaagacggttgaaatgccattgcgaggatttgccagcactgtcggtgtgaaagcacgagcccagacgaaggctgtgtgcgggaggatggtccccagattactgtggctgctgggtgctgggacgtatacaccaggatagaaggggcgggggcctgggtcgcaggcggctgaacgtcggtggttgcaacttctggcggacccggatgcaagccaacttaggcttggttgtggccgcagaattcgtcgtacccgggctggcggtggggccccgcccaaaatac

SEQ ID NO: 541370 - DNA, 190 bp, Homo sapiens
catacacagacacgttccttacacacgacagagacattgccatacacatacagcagagcggccgttccatacacacacacattaccaccgcgagacacaacacataccatacacacaagagagaaatattccatcacatacacacacaacattcgcgtactcacacacattccaatacacactagacaca

SEQ ID NO: 541371 - DNA, 571 bp, Homo sapiens
cttacaggctgatgctgctggttgggtggattggactaagaaactctgcaacacagtaggtaccccaatgtgtttgggattggggactgtaccaatcttcctacgtcaaagaccgctgctgtagtagctgcccagtcaagaatcgttgataagacattttctgtaattattgagaatcatacaccaacaaagaagtatgatggctacacatcatgtccactggtgaccggctacaaccgtgtgattcttgctgagtttgactacaaagcagagccgctagaaaccttcccctttgatcaaagcaaagagcgcctttccatgtatctcatgaaagctgacctgatgcctttcctgtattggaatatgatgctaaggtaagtgcactgcctggttcctggatgaggaaagggatttgtagcacatctccacccaaaggggatgcagcctcttttcttcattattagcagtgaccaagtgttctgtcttccatgctctaggccctcttttgctgctggataaataataatagtaaatcactttcacataccaagtactctatcatctgctacct

SEQ ID NO: 541372 - DNA, 290 bp, Homo sapiens
  misc_feature (26)..(26): n is a, c, g, or t
  misc_feature (86)..(86): n is a, c, g, or t
  misc_feature (124)..(124): n is a, c, g, or t
  misc_feature (155)..(155): n is a, c, g, or t
  misc_feature (157)..(157): n is a, c, g, or t
  misc_feature (205)..(205): n is a, c, g, or t
  misc_feature (216)..(216): n is a, c, g, or t
  misc_feature (242)..(242): n is a, c, g, or t
  misc_feature (256)..(256): n is a, c, g, or t
aggcggcccgcggtggcccaagcgtnagggtctcccccacgccgggggcgcaacgcctgtgtcgcctctccgtgtggatctggcantcggtcatccacctgctgcaaatggggcaggtgtggangtatatccgcaccatgtacctggggattcananccagcggcggaaggaacaccaacgacgcttctactgggctatgatgtntgaatatgcanacgtcaacatgctgcgcctcctgganaccttcctggaaancgcgccccaactggtgctacagctctacatcatc

SEQ ID NO: 541373 - DNA, 883 bp, Homo sapiens
gggggggggggaatggggttgactgtagggcggaggccggaaacttgaaacccggaacccggaactcggaggggggaaaaaaaagctctcaagtttggaaaaaaaagatgcgctccagacaaaatttactttggcaaacaaatgtgtcgcacaaatgacaacgacaacagaaaacaacaacgttgtgggcggccgccaggccacccgcagaaaaagtttttttgacacactgtggttggggggccggggccgccgatgagtgtagtggaacaatgggccacgaggggttgcagagagaacccctgggtccgagcagagggtgtggggcttccccccaataaaaaaaccgcggggccacaggcgggggtgaaaaacccaaagggggggttcgaagacaacggggctccatacaacgggggccagcggaggactggataaaaataacgcccgcgcgggagagagagcgacacagacacgcaagacaccaggaaatagtacgataagagaacgcaagcagcagcacagcaacaggaagaaagaagaaacacagaacagaaagcagccacaagcaaaacagagcagtatcgggcaagaacaggagaagagagccagataaaacagaagagaacacagatgacaaaaacaagagaacagcacagcatcaaacagagcaaaagaaagagacaatgaaagacaagacaacagctcaaaaaaaacaacacaagacaaaaagagacaaaaaacagaaagaaaaaacacaaacgaacaggagaggaaaaaacataccaaaggaaccaacgcaacgcgcaaacggacaacaggagacatcagacgaacacaaactacgaacagagcgaaatacacgcgaaagacacaccggaca

SEQ ID NO: 541374 - DNA, 571 bp, Homo sapiens
ctgcacgagaggcgtggggccaacgaaggacaggatgatcagcttgcatctcctggtagccgtaggccaaggagctgcaggcagtcggtggtgataggccaggaacttggaggtggtatcttgtgcgagcaggggcaccatctttggcagaccgtcggccaggcgcgcggacatcttggcgccctcctggtacaggagcaggttgtgcagcgtggtgatggcatagaacaggaccgactccacaggggagctgagcatgcggaccagagcagggatgccacccgacttgaagatggcgagcagcccctcccggtggtgggagaggttgtgcaggatgctggtggtgcagcgggctgtgtccaggtcgctggtattctgcatggtacgcacgacagcggacaccagctggggcgagcccatcagggcccgccgcgacgcctccttcttcgacagctggttcacaatcatggccgccttggtcaccaccaccgggtcctcgtcgttgagcagtttggtgagctcgggcagcgcgcgagtggccagctcggcatcgtcctggtagttgagaaga

SEQ ID NO: 541375 - DNA, 331 bp, Homo sapiens
agtgagctggtccgcactagttggagtttcccatacccacggagcctgctcattgctagcacagcagtctgagatcgaactgcaaggcggcagcgaggctggggaaggggcgcccaccattgctgaggcttgagtaggtaacaaagcggccaggaagctcgaactgggtggagcccgctgcagctcaaggaggcctgcgtgcctctgcagacgccacctctgggggcagggcatagccaaacaaaaggcagcagaaacctctgcagacttaaatgtccctgtctgacagctttgaagagagtagtggttctcctagctcggagtttggggg

SEQ ID NO: 541376 - DNA, 468 bp, Homo sapiens
aaccctcccaagggaacctttggctaaaaccagaaagaaatggccaaaaatgtgttttaaaagcatggtccttcaaaaaaggcaataaacggccccactagtgcttctggcgatgacatttttaagctccagcgtcctcccggagaaaaaaagttttatcccttaaaaaaagaaaccccccaaaaaccccccgtcctgaatggtgtttcataaactgaaaaagttcctagtttccagtttttttcccttccctttccaaaaggggttggcccagcttgccaaaaaaaaaaaatgggtcccccgtttttacatcgccctttcagttcccccctttggaattcaaaaaagggaggggtcctgaaaaaatcatttgtttaacaacctttgcccccccctgggttataaaaaaaatccccaaatggcccttgagaatagtatatgttcccttaaaaaaaaagttgcgggcta

SEQ ID NO: 541377 - DNA, 459 bp, Homo sapiens
  misc_feature (414)..(414): n is a, c, g, or t
  misc_feature (419)..(419): n is a, c, g, or t
ggttcactctcatcctggccatacctgaggactatgctcctcttctagaagttcggtgcagtcatctgacttaattgattcagcgcatttatctgcaggctggagtacaatagcacgacatcagctcactgcaacatctgcctcccgggttcaagcaattctcctgcctcagcttcccgagttgctgggattacagcacctgccaccatgcccagcactttgggaggctgaggtgtgaggatcatctgaggccaggagtttgagaccagcctggccaacatgacgaaaccctgtccctactaaaaatacaaaaattagctagcgtggtggcacacgcctgtagtcccagctactcaggaggctgaggcaggagaatcacttgaacccagaaggcggaggttgcagtgagtcaanatcanaccactacactccagcctgggtgacagagagacccatttc

SEQ ID NO: 541378 - DNA, 248 bp, Homo sapiens
gactgctgctggtcgtctctgaggatccccttcattttcctcttatttttcatttctgttgcagcactgcgtctcactctgttgcccaggctgcagtgcactggctgatctcagctcactacaacctcaccctctactaaaaatacataattgctgggattaccggcgtgagccaccgtgcctggcccattgcaattttttaggaagcaatgagttccagcagggctgagtctctgacttcttttttt

SEQ ID NO: 541379 - DNA, 129 bp, Homo sapiens
ccaagaatcagcacctcccacagccgaccaggctcaacgcacacaacagcattccctgaacagcaccaccacgccaggcctcagtcggattctacaactatcccacagacagcccagagctcaacagga

SEQ ID NO: 541380 - DNA, 91 bp, Homo sapiens
ctggggccacgagcgccattgacaagcaatggggaagaaacagaataacaagagcgaagactgtaccaaggatgacattgatcttgatgcc

SEQ ID NO: 541381 - DNA, 82 bp, Homo sapiens
cacgtgcaacctccagcgtccttggttcaatgcagttctcctgtctcagcctcctgagtgacagagctgatgactctgtctc

SEQ ID NO: 541382 - DNA, 695 bp, Homo sapiens
  misc_feature (545)..(545): n is a, c, g, or t
caatggtactttgacctccagtgtagggctatactatacatatatacatatatatatatatatatataaaattgcgtactgtgtctctcataaaacagaatatacagtggctaccatgtatcgtggtgtgcactctctctcagagaccccgtatctctctctctctctggagggcgctgggacatacatctctcaatcccgcttccctccgcagctccctcccactctcgcccctctcttcgtcgccggctgtcatcgacgactctctctcgatgatcgtctcatccttatcatcgatgtcgatccactcgctagctgctactcctactgttgctcatcgatgtggacgagatgatgtggggcgtcgatcgtcctatcctacctcttctgatcgctccccggacgagggacgaggctgagagaacgagcggcacacaccacacagcatagtagccccagcagagagaactatgtgtagccgcagtagaatagccacaaaagacgagaaagtattatccccgaccaacgagttgcctctcacaatngtcgtagtctgtgggtggtcgtgcttctaggagactactgcgctggcgacagcaacaatgatgactggactaacagaattgagtaagacacaaaatgggtcgagacatcaatcagaagatagtgagattacacagaagagagaaaacaaa

SEQ ID NO: 541383 - DNA, 141 bp, Homo sapiens
tcattctgtggtgttcctgtgctcaggccgtcatgctcacagcaggattcacatcaaacattcaaggctgagaatattcaatactacatttcttagctggtcccatcacacctaagactcatgagcggaaaaaaaaacaaa

SEQ ID NO: 541384 - DNA, 569 bp, Homo sapiens
ggctgtcaggaactggagttagttcggggtccttcagataacactgaggtgtagcctcaaccagaaaccttcagttgtcccaggacctccttccaaccctatgtgatggctaggtcttccatgaatggaaactggattggaacacagctgacattcccagcacccaagggcgatgggggattgacaaaatactctccagcaagcctgtcctctgagtcttacagatctggtggctgcactaaccactcttaactggaccaacagaggcctggtattgttgatttcgagagaacaaaaaaaaaacttatgggataaggaaattggcagaaaggtaaaagtactgggggggctggtcctattcacccttctggaaatattcccagatgacctcttacagggtgaacgcagctctagggtcagcggtagcagtcctcttggtctggaggtgtaatccagaagttctgggtctcattaccaagaaatttacggagcttggcccccaagggtgcaggttggcagtgacaagttcacataccgtgaaagaggaaagctctcagcaagcagacgcg

SEQ ID NO: 541385 - DNA, 982 bp, Homo sapiens
gagattctccccagacgccgaggatggccgtcatgggccccgaacctcgtcctgctactctcgggggccctgggcttgacccagactgggcaggctccactccatgaggtattgctccacaatcggggtccggccgccgcgtgggagccccgtttcagtccgccagtgggcctagtgtgaccgacaccgcaagtccgtggcgggtctcgacagagcgagcagccggaagaccagaatggattggagccagcggggtcgccgtggattaggagcgggaagggggcccgacactctgggggacgcaggaagcccaggcaaacaggtgaagcggccacatttcacaagaatgtggaccgaggaaaacctgtggcgggatctcgcgcccgcccggattgttacaagcccaagaaagggaaggcgccggtatcttacacaaccactgccaagtatgattgatgggggatggcaacggtgaggcacccggcaaggggacgacagtacacccgcgggggagataccacccgagtaagcgccatacgacgggcagagggtataacgtgtgggccgtgaaaaggaaggacacctgcgctgtgggaccggccggcagcaacaatggcgggttcagatatacccatggcggacatgttgcgacgccgccccatgtggggggagcacagagagaggagctacctggacaggcatgtctgacgaaagggtcacggagaataccgtggcagcaacacgggaaggaagaccgcgaggagagggacccgccaaggaaattatgaccaacaccattgtgacgtggaggccattgaatgcgggcacgggtcaccggggaacaatcgcgcaaggccgggaggccaacagacacggcgttggagcagccgcggcagactcaagggcatgggacttggaagagggacaggatggaaggggacgaccccgagggaacacacagccagtagagcgcccgagacgg

SEQ ID NO: 541386 - DNA, 288 bp, Homo sapiens
gctatcggttcaatcatattccgataacatggatggacacattttgtttatccattcagccgctgataggcattgatggttgtttcaactttttggctctgataaataaagctgctgggatcatgcaagttcaagtttttatgtggacgcatgtttgcagttctcagccagcctaagtggtttctcaccttttttttttatattggggagagggagttctgctctgtcccccagggttgggggaaacaaaatgaacagacggaaagacaaagggtctgggtgctgcgg

SEQ ID NO: 541387 - DNA, 122 bp, Homo sapiens
ctctgccccctcccctggaggagctcagcgaagccttgaaaggccggggctctgggaggtgtgcccacctggaggggtgggggctctgggggtctgcccacccggaagggtgggccagaaac

SEQ ID NO: 541388 - DNA, 417 bp, Homo sapiens
ttctttacactgccggtttacactgtttctccaagacatcacagctgatatctcctggtgctatccccaaactgccactctaaactcttgaagtaaataaataatctttgctggcaggactctgctgaatctccttaggcactctctaatcagatatcctaggtcctcccaattcttagaccttttatacctgtttttctccttctgttattccatttagtttctcaattcatccaaaaccgtatccaggccatcaccaatcattctatatgacaaatgtttcttcttacatccccacaatatcaccctttaccacaagacctcccttcagcttaatctctcccactctaggttcccacgctgcccctaatcccacttgaagcagccctgagaaacatcgcccattctctctcccta

SEQ ID NO: 541389 - DNA, 565 bp, Homo sapiens
gtgatggagtattatttttaaaaagtgattttgaaccctggctatgtgttggaattccttacacattttaaaaatacatacatatgcttggtgtccaacatagaagattatgatttaatcattgattaaacaaatattcattgagtaccttatgtgtgcctggcactgtcccaagtgctaaatttagtatttttggaataagatctgaaattctggatgattgaaaaaattccagaagtgagagaattcgtgtgaacttacacaagcttattctcttaataaggatcaatttaacactttttaagttttatcattttttctttcttcaagcaactaattttagttgtctctcatttatattcttagaattaaaaataggcccggccaggtggctcacgcctgtaatcccagcactttgggaggccgaggcagtcaaatcacttgaggtcaggagttaagacaccagcctggccaatatgataaaaccctgtctctactaaaaatacaaaaattagccaggcatgatggcaggtgcctgtaatcccagttactcaagggaggctga

SEQ ID NO: 541390 - DNA, 284 bp, Homo sapiens
cactgtcgtgcacttggctgcgtggctggttctattggccctaggtgctgctattttgggtgggatgggagggggtagagggagccaggagcactgggttctccttgagaacactggccacaagagtactggcctcttctatcactggcactgtccttcgcacttgcttggtggccccaacgtgagtcgttgtaaaacacgccgccgttactattttctcacaactgcctttcctgtgaaccaccactcataaacacctcagcactacaactaaacttctatat

SEQ ID NO: 541391 - DNA, 996 bp, Homo sapiens
ttcgaagggttttctgcccaagaagaagttcgtgtgtcgaaggaaccacacaagaggtgtatgtctctgtccgaacccaaacaggggggactctgttcggtgtgtaaaaaagcgtggttgtggtacaaggggggaattgtgcgccccaccactttttggggtttgtggcacgacgcgatctctgcaatgttccttatctttggggcccaaaacctaagtgttcctgtagggtccccccaacgcaatgggggagcccccgtgcccaaaaagtaaggtgacgaagggtcctgcgcatatgccacgcgaggcgcagtctcagaatgggagacacacacctgggggtcacacactgggaaaagaggacctcttcggggtaaagcctagtggaggaggcgccctggacaaagccgtgtcctgtaaagcgggcgtgccatcccattatcccagttccgccgagatagccctgagtccagagaaccccacccctggattgagacccccttggcgtgccattcgaccgacaccgcgccacagattgggtactgatagccgcccggcgacaagactgggagaacaaacacagggtccccccaggccctggagctcgcgttctacatagggaattcccttcgggcaggacctccagacgccacagatggccagaagcaacaatagttgggaggaagagagccccttggggaacccactgcgccaccgatccgagtactcgtgacgaaacagccatgtgggttctctaacgcagaatgctcagggaaatggccttccccgccgcgaggcccagctatctgcctcgacaggctgtgacatctttcttattctaaccactggcgcattcttcccctctattttgacgctagttggtatgaaattttatttaaagctctaagatattgtcttttttctttgtcacagaccacattttttttgaatttttttttgcaccggttttcccaaaattgaaaccttcccagacca

SEQ ID NO: 541392 - DNA, 405 bp, Homo sapiens
tttataagtttagcactcagattctttccatcctgtataaattagagctcacataatagagcctcaatgattaaagagatataggtgttatacacagggtgttggctttgcaccatcgaaaaagaatgccctatgaatagcgctttcgatcttcagtatctttctcttattctcatggtaggttaagatgcttttaaatgtatgtgttataagcctaaggcagcttgacttccagctgcaagttttttaccctcctcggcaaagcaggtctcctaatcgtcagccttcacagcacttctctacaaaagttgtgaaatcatccatacacagctttcagccgctcttttgttgccatgggcgtgtgtttcgcgagctcaacaagcgcagtgtgtctcgtgatgtgcg

SEQ ID NO: 541393 - DNA, 638 bp, Homo sapiens
gcaggaccaggtcctgaggatgcagatggtgagtgcagggctagcatcagagtaagctgggctggggtgttgtcgctgaccaggtgcccttgacccactgtgtgctctcccaatgccctgctcctccctcacctcccttcccccaacagctggggaagatgaggggccacctggggccagcaggtgccttaagggagttgagagggttctatggctggtagggacagccagagcccacaggggtctgaggatgtgcgggatggaagcttcctgggggtagaggaagggcagcagcaacagaggctttcctgcagtgaggatggaggggacctttttttttttaagatggagtcttgggccggatgctgtggctcacacctgtgatcccagcactttgggaggccgaggcgggtggattacgaggtcaggagttcgagaccagcctggccaacatggtgaaaccccatctctactaaaaatacaaaaaattagccaggtgtggtggcgtgcacctgtagtcccagctacttgggagactgaggcaggagaatcatttgagcccgggaggtgtaggttgcagtgatccgagatcgatccattgcactccagcccaggagacagtgcaagactctgtttca

SEQ ID NO: 541394 - DNA, 173 bp, Homo sapiens
agcagcaaccagcgatgctactctatttctatgaattcaacttttttttttcccttagattccacatgtaagtgatatcatgcagtatttggtcttattcctttgggtatatttcacttagcataataccctccaggttcatctatgtggctatcgctggcctacagcacatg

SEQ ID NO: 541395 - DNA, 189 bp, Homo sapiens
cttttttccggttaaaaaaaaatttttttttaaaaacctttcccgggaaaaattttccaaacccttccgccggtttaaaaaaaggggggccttttttcaaggccctaaaaaatttttaaaacaatttttttgtgccaagttaaaaacctttaaaaaaaaacttttccttaaaaaggtttttggaatcca

SEQ ID NO: 541396 - DNA, 437 bp, Homo sapiens
ctagaggatccccccagttacacagctgctttatactaaaagatttcttgataaagctcttgaactacatatgtttgttcttgaaagggcataggtcttgtgggaggctatccgggtcctctctgtattatgctgtcacaattgaatacgtttagaagctgtccgccttcatgtaaataatttttggagatacattagctattaacacatcctaaccaggatatactctgttctcgtaacaatatataaagtttccagtaacttggggatggctaccaaaagttaacacagtatttcgtcctcaaatgcacatagtttattcgcacgaaatcttctttttttgaacgaacaacagcaaacgatccaacaactctatacaccctggtgggacctaatgtaacctttaattctgacttgaactgtaagcatttttatga

SEQ ID NO: 541397 - DNA, 1296 bp, Homo sapiens
  misc_feature (528)..(528): n is a, c, g, or t
gcccgagcgaccgcacgaggatgggcaagtgtcgtgggacttctgtactgctagggtaacgactccgctactctaccgatgagcactcagaagtggcatgatagacacagtataaagaagagtcgtcagtttgagtgcatcagcgcgcataataggcccaacacgcgttatcggaggtgcttctcgatgcagatccggcaatcgtgcgtgtacataaagtcatgatctcgcacagccaacacagggcacaaattcctgaccaattagggacacgtgtgataagagggggtccaagcatgagtcaccgcaatggcaagcaaagagtcacaaggccttaattgctatccccaaggtgacgggtatgctatatgcacctgtcttcaatctgatggaaagaattgcactgaaagattcatgcgatttgcactgcgacatattgcggttcaggcggatacggtggtcgaaatagctagtcgcaagggagtggaatagatgttccgttgggaatgttcctgcactttatacctngtgttcttgctcttaccatgctattgcacaaagttgtaaggccttctgatatatgtagcccttattactaaatcgggcgagattgataaggttgaccacggaactcgacaccgaatccaataccgaacttacttcaattggggttggaaaaaacaacttggtaacagtacaattaaagatcgtgtcttcagtaattgccccagagaaacaaaccatacaatctagatacgcagataacagagggggggcgcccgagccgcgtagacagattttttctcccctcaaaggtgaggaccgtgcataagtctaaaaggcgcgttagccctaaggagtgtttttctcgttgcaacaccaaaaacggtggttcccccttaaaaaagggtagttgcaggaagtaaaattaagctataaggggacattagcacaggaagagatagataaacaaccagatgcgagcaaattgttggggcacacactgtgcataccctttggggacataccatagagtgcacagggggaccacttaaacaacatacaagcaggatgtgtgggcaacataaaatggcggcccaaaaaaataacccatagagcaagcgattataagggctataaaaggtaaaattccacttgtaaatgcgcgaagactattctataggcggagataaagaccacctgagaaacaatggctagtaccccgatggtacaaaagtgcagcatagatgacattacaatgttgtgaccacatattatacccgtgcagatacaaaa

SEQ ID NO: 541398 - DNA, 1229 bp, Homo sapiens
ggatatcgtcgaaccacgcagtcgaggaagatgaaatgtataactgattacttttgtaagctaaatacatattaaagagagctttttattttagttaaagccatttgaaaaacagccaactccagataattcacaatgaaattgtagggccccatcggatgttttattagagtgttttaggccatcatcaatacatacttgatgagcatttcataattcagcagtctttttaatcattcactcagcattcagaaacaagttgaatcagtcggatattgtatatttattagatgatttatggaaacgtgatgtagagacatggaagagaccatgacagactgtagtccaaaatgaatcctgtggattatcagcatctacttatggtattcaattatttgataaagaaagattgtatctaaataactaagttcattgtaaaaccgatattatcagagattagttccggagatgtcccaaatagaaaatttcataaatactgacagtatcattaaattactgataaatacatcaaacagaattcccaaagatattagcagatggacttccaaaaatacataagtaaatgatgaaagtggacacaaagagaggcatagaacatctagagtcactcatatgccataagaaaccacaagaaaatcgacaagcaggacgaaaaagaaaagcacaacagacaagagacaaggcacatccagagcatacgcagcaaacaagaaccaatacacaggaaagaaaccagaccaccaaccaacataccacaaagacaatcgcaagaaccaagaaacagacaccaagaccgacaaaaaacgaaaaaaacacacaacaaccagacacacaaacagtgaacacacaagaagacaagcaccacaaaaaaaaaaacacagaagaaagagaaaaaacaacacagaagaagcggaacaaaagagaagacaacagcaaacacagaagaaaacgaaaacgaaagaaaaaaaaaaacgacagtgaaacgagcaagcagcacagacaagaacgtagtaacatagagaaagacagagcaggaaaacagaagtcaaggcaagaacgcgcaaacgagggcatgataagagacagaagaagagaacaaaaacaaatacaatcggaaaaaagccaaaaacaaccgagaacgaacccaacgaagcacacaaaaggaagagacaagagaggcaaaagaaaaaaaggagaacccaacaaaa

SEQ ID NO: 541399 - DNA, 133 bp, Homo sapiens
ggtcccacgcatactcgggaggctgaggtgggaggatcgcttgacgccaggagttctgggctgtacgtgcgctatgccggatctgggtgtccggcactatagttcgagcatcatatataggtgaccatcccgg

SEQ ID NO: 541400 - DNA, 207 bp, Homo sapiens
actagtaggtaccatagctaatgtaaggtacattttaagtaaggtaccttagcgtatacattacttaagaatatcacagaggtggctggcaaggatgacagcataggaacagctccagtctgcagctcccagtgagatcaacacagaaggtgggtgatttctgcatttccaactgagatacccagctcatctcattgggactggtta

SEQ ID NO: 541401 - DNA, 663 bp, Homo sapiens
  misc_feature (229)..(229): n is a, c, g, or t
  misc_feature (324)..(324): n is a, c, g, or t
  misc_feature (340)..(340): n is a, c, g, or t
ttacagttccaaatatgccccacaccttttcccggccgtcacattgttctcaggcccatttttttggattcctcagcttaatcacagtggttgacatgtaataggtcatcccgaagaattataccaaatggcttagagaatatctccaaccttctttcttcaaattaaatatgaatcaggattgaactaacttgggttttgcctaaaaataaccaataaatataatggnagagtgtgcaagtagattcaatcataactttattttacacatacaatattagcatagaatcttctaaaaccaccaaataattaaataattaatanaatagaggctttctcntaagtgatgctcaaacacattaggcgcaatccaggtggcctctgcagctgtgtctctctttcatcttctgttcctgtaagggcagggcctctttcaggaacagccaccaataagcttcctctttccttttggtcagttggatttgccactgtaatgagaaaatgggtgccttgagtaggtgctcaggaaagctgactgcacaacagtcttctcttgtcttgtttccccaggtttgagagttttatgaatgcagtttcccaagcttggcacccaagtgggtactgcttgtacaagttgtgttgtgtgcaaaggacctttaggtt

SEQ ID NO: 541402 - DNA, 585 bp, Homo sapiens
  misc_feature (451)..(451): n is a, c, g, or t
  misc_feature (526)..(526): n is a, c, g, or t
  misc_feature (548)..(548): n is a, c, g, or t
  misc_feature (564)..(564): n is a, c, g, or t
  misc_feature (574)..(574): n is a, c, g, or t
taacttttaagcttttttccttttcatggcatttgtctgacttccaaaggggaagctaaagcctttgtaaagaaacaatatatatgacaaatacctaaaaataaaaccaccgcactattaatatattaaatgtcactatggatacacagatacaatatatcttaacaataccactaaaccaaactcttacaaaacaaaaatggtaagatgaaaaaggagtcttagataactgcctgcttgtttcaagtaatactagattcgacaaataccaatgtaactagagaaaccagctaagctactgaaactggaataacagtatatgatcttcaaactgcccttcaaaagacatttccaaagtacagggaccactgttacgctagtagcaataattaccatgtaataatttcctagtatgtgctacatgctatgctacatgcttccacatagagtnggcctcctaacacttacccctaaggttatgtttgaaaataaataggcgggtacttggcataaaggcggggcatgnaggttacatctggagggcactnccacggttgttagggnccctggggtnctttataaaca

SEQ ID NO: 541403 - DNA, 346 bp, Homo sapiens
  misc_feature (141)..(141): n is a, c, g, or t
ccatccctgcaggccagggcacacggtgggccccccgccagctccttggaggccaaacccaggatggttgcaggccaggtttggggggcctcaaccctttcttggagcgcctgtaaaatggtcagcgtgaagcgcaagtgntggacaggtggcccgtgtgccccacagggatggctcaggggactgtccacctcacccctgcacctttaagcctttgccgcggggcacccccccccaggtttttggtgccaaataatgacgacctgggtggaaacctaccctgtgggcacccatgtccgagccccctggcatttttgcaatgcaaataaagagggttctttttttg

SEQ ID NO: 541404 - DNA, 194 bp, Homo sapiens
cggattatactagtatacgggttcttctgaatgtataggtagggtggcggggcatccatatagtcactccaggtttgtaggagggttctatctaactattagcgacttttcgacttcgaagcgcaatgcttctcacatcatcgaaaattatataatatatactgctagttagcagcaaatgaactgagacctac

SEQ ID NO: 541405 - DNA, 465 bp, Homo sapiens
  misc_feature (53)..(53): n is a, c, g, or t
  misc_feature (75)..(75): n is a, c, g, or t
  misc_feature (331)..(331): n is a, c, g, or t
gaggatccccagtagtcgatcaaacctggcatgaccgtgctctgcttggcgtnatcagcaggtctgcgtgtgaanaatccacatctgctgcctgacccacgtaggtatcattccatcaacactgacgagggtatctgctgtaatgagtggagacgcgagatcacccgtgaggaaagtgcctatattatgaataattgatgtatatggcttatggttcgacatttaatttatctctttatatcatcgagtaacgggttcgaatatccgcgcgccacacttgttgaatgaacggaagttccacaagttgttcgtgatgaacaaacgctggatncaacgatacgcatgcccctctggatcgaaactgggggtgaacttgtcacgcgaatggagcatgaaacgattgttgatgtacaccaacttgccaggttgaatgtccagcggccgcgctacgcttttaagcgcgtt

SEQ ID NO: 541406 - DNA, 169 bp, Homo sapiens
gtactatctctgaaagacctgaactgcccgagccttagccgttcctttgtagtgtgctcaaagacaaggttacggagaaggcttccgcttgatggcacagtacattgattaacacaaactcacattggttctaggtctcaacgttcaggcttactcagagatttgattg

SEQ ID NO: 541407 - DNA, 375 bp, Homo sapiens
gaggatcccccacttgatgccccttgatgctgtagtctgacagggatgcgccgctatctgtccagctgctttccggcggagagtcatcctctgtctggctcacggaggaatgccttccgttggtcctggatctttgctttgacgtcctccagttgtgtcactgggctccacctcaagggtgatggtcttgtccatgtgcgtgtcttcacgaagatttgcatctccacctctgagaacggcgcagcaggtgccgggtggcactctttctggatcttgtaatccgaccgggtgcgcccatcttccagtctcgttttccagcagaggatcagtctctgctggtcaggatggatgccttccttatcttggatctttgcc

SEQ ID NO: 541408 - DNA, 128 bp, Homo sapiens
tcgagcggagactaggcagaactgagcattttcaaagttcccgatggagagatggatgccgcgtccgcttcgcatgcgacgacgacttccctgccgtgtttgtgacccccttcctgcccagcaaccgt

SEQ ID NO: 541409 - DNA, 942 bp, Homo sapiens
  misc_feature (74)..(74): n is a, c, g, or t
  misc_feature (84)..(84): n is a, c, g, or t
  misc_feature (86)..(86): n is a, c, g, or t
  misc_feature (138)..(138): n is a, c, g, or t
  misc_feature (193)..(193): n is a, c, g, or t
  misc_feature (237)..(237): n is a, c, g, or t
  misc_feature (264)..(264): n is a, c, g, or t
  misc_feature (275)..(275): n is a, c, g, or t
  misc_feature (303)..(303): n is a, c, g, or t
  misc_feature (344)..(344): n is a, c, g, or t
  misc_feature (349)..(349): n is a, c, g, or t
  misc_feature (352)..(352): n is a, c, g, or t
  misc_feature (421)..(421): n is a, c, g, or t
  misc_feature (446)..(446): n is a, c, g, or t
  misc_feature (451)..(451): n is a, c, g, or t
  misc_feature (457)..(457): n is a, c, g, or t
  misc_feature (513)..(513): n is a, c, g, or t
  misc_feature (704)..(704): n is a, c, g, or t
  misc_feature (725)..(725): n is a, c, g, or t
  misc_feature (806)..(806): n is a, c, g, or t
  misc_feature (837)..(837): n is a, c, g, or t
  misc_feature (846)..(846): n is a, c, g, or t
  misc_feature (860)..(860): n is a, c, g, or t
  misc_feature (864)..(864): n is a, c, g, or t
  misc_feature (876)..(876): n is a, c, g, or t
  misc_feature (921)..(921): n is a, c, g, or t
tggtttcccgaatcacttggcaaataaccagcaggcgcggcagatgctcttcttttgcgcttcctacggacgcntacgcaagtncnatgcgccggacctgaacagccagggtcccatctctcagccggctcccgggcngtgctagcagggaagagggacgcgccggccgaatgaaacactactaccccggaancccgccctggaccttccacccgggcagcgagtctggcggccccncgccgcccccccctccgccccgaacanactgcgctgcnagccccgggcttccgccgcagcgcgcancaattcggagcgtgccagaggagaccagcagcagcacttgntttanctnggctgcgggaattccgacctgtacactttccagaagcctgatctctccaagtccgcccccagggactcnagccccggcttccaggttgaccccngcgcncccccntcctgctctcggccgcgttcaccgcgcgaggcctccgcggtcctgttaagcccgancagcacaggccgctgcctcagcatccaccccgcagcccacgtgtggcaagccggggaaggggtggagtgaacggccggagaccacgtggagaaaggggccgctttggcccttccatctgggtgccgggagccctaggccctccggccatggccgacagcggcgatgctggcagctcgggcccctgggtggnaatcgctcaccaacagcaganagaaaagcaaggaagccgcagtggggggtgccgcctcccgcccagcccggctcccgggggagcccacgccaacctgcgccngcccagccccggactggaccagcagctcccngggagaacnagcaccccaatctnctcngggggggccggngagcccccaaaccagacaagtgatacgggggcaaatccggcagcngccgccgcaatttgaagatct

SEQ ID NO: 541410 - DNA, 426 bp, Homo sapiens
  misc_feature (10)..(10): n is a, c, g, or t
  misc_feature (31)..(31): n is a, c, g, or t
ggctcattcnagttcatcatgatacctcagngtctatcagtattcaaatttattaagcaataacatgcagaatgtatgatataaagggctgtgtcatcacacattccccacgctattttttttttttttttgggcaaagccagtgaaaggtgccgcaggttaaaattcaaccaaaatttaaagggcccacacacaccaagagggaaaaaaaattcctcggggaaaagtcactatagaaggcaggagggcttaaaaaggggaaaaaccaacaatctctggactaatatgagggaagactccaaattggctctgggaaccaattctctacaaccgagattccccctcccttcaataactattctcccagaggtcccacagcacaaagagaaataaaaatctgagaacagtactactcctctgggctac

SEQ ID NO: 541411 - DNA, 362 bp, Homo sapiens
  misc_feature (14)..(14): n is a, c, g, or t
  misc_feature (46)..(46): n is a, c, g, or t
  misc_feature (74)..(74): n is a, c, g, or t
  misc_feature (78)..(78): n is a, c, g, or t
  misc_feature (190)..(190): n is a, c, g, or t
  misc_feature (206)..(206): n is a, c, g, or t
  misc_feature (233)..(233): n is a, c, g, or t
  misc_feature (263)..(263): n is a, c, g, or t
  misc_feature (311)..(311): n is a, c, g, or t
  misc_feature (362)..(362): n is a, c, g, or t
agcagcgggccatnacctgagcttttggaagacaaaagagaaatanggaagcacaatgctatacatgctatatnaacngaaggaaagaatttcagggaggaaagagtgagtattcaaaacttgtgggaatgtgcccaggctttgctgcatgctggctggctgaaattaagctcccatgatcatttagggntcattaagaaaacagnagccccctatatattctaggtgcaaanactttgtttccaactactcttgcttactgnttttagaatctacacgggaatatgtttaaggaatgcttaattggtatntatccccaagtaatttgaggtttagaagtgaccatggattgggtgtgcctn

SEQ ID NO: 541412 - DNA, 1417 bp, Homo sapiens
  misc_feature (8)..(8): n is a, c, g, or t
tcggctcnccccccgtgtctttgcgtgtgtgttctgtgtgtgctttcgtagtgtggtctcgtgtgtgtcgtccttgcgttctgtccgcgctgcgtgtcgtctgggtgggtgttgtatcgtgcgaccgggcagccgcgtctggtgttcttagtagagagccggctgctgctccctgtttttttcgcgggggggtgttactctcgcccggagggtgtgctccgccgcttgttttggcgcccatttagcggtgttttccctaataccgtggtgtttcctctctcgttttcccccggtttttgcgtccccccccgcccccctgtttgtctccttcccttttttttggtccctcctttctccccgtctccctccttctgagggggggggggaaataccgttcttcttataagtattctcttttggtgcgccccgcctctttccttagtgttagacgcccccttgtcattcgttcgtttggtgccccccccccccctgggttgcgcccccctcttcgtcttctgaaggggtggctctccccctctcggtggggtgttttcttggcggggttatttgtcccacctttgatacgtgtttttttttttttctcgggggtttctccccccccaccaccttgtgtgttgtgcgcccctggggtctttgtcttgtggtccccccccccctctgttttgttctgtgcacacacgatttggtgttgtatatatagttgtgtcctccccccctgtgttgtttggtaggttcccccacaagattggtagttcctctcttataatagataggttttttttcttctcctctcttttgttctcctctcgccgggtttgtgttataagtgttttcgccccccctcttgctcttgtggtggaggcacgcccctcttttataccccacgcttgtctcgcccccacctttttgttttcctctctctctcttgtcccctctctctccttctctgtcttctctctctcttttttctttttgttgttgtggcacgcacccctcctgttgtgtggccacacacagcggggcgtgttgttctctgtatctcttcttttgtgtaatatctgtctctgtttttttcttttttatatttttggcgcctctcttatttttttctttcttacacccccccccccccttgaggcctctgttttgtggggcggcgcgagagggggtgtgtatttttttctctcgcgcgcgcgcctctctctctttgtgtccgccccccccccccttttttttgtctgctccttgttgttgttgaccctgccgcatttgtgtgtgtgaggatgttcccaagcgagagagaagagagagggtttctccccccccccccctcttttgttgttgtgtataaaagagtgctctctgttataggtggtgtgtgtgtgtgtgtgtaata

SEQ ID NO: 541413 - DNA, 508 bp, Homo sapiens
  misc_feature (197)..(197): n is a, c, g, or t
  misc_feature (275)..(275): n is a, c, g, or t
  misc_feature (331)..(331): n is a, c, g, or t
  misc_feature (333)..(333): n is a, c, g, or t
  misc_feature (339)..(339): n is a, c, g, or t
  misc_feature (351)..(351): n is a, c, g, or t
  misc_feature (381)..(381): n is a, c, g, or t
  misc_feature (396)..(396): n is a, c, g, or t
  misc_feature (419)..(419): n is a, c, g, or t
  misc_feature (421)..(421): n is a, c, g, or t
  misc_feature (424)..(424): n is a, c, g, or t
  misc_feature (429)..(429): n is a, c, g, or t
  misc_feature (439)..(439): n is a, c, g, or t
  misc_feature (445)..(445): n is a, c, g, or t
  misc_feature (451)..(451): n is a, c, g, or t
  misc_feature (460)..(460): n is a, c, g, or t
  misc_feature (467)..(467): n is a, c, g, or t
  misc_feature (469)..(469): n is a, c, g, or t
  misc_feature (478)..(478): n is a, c, g, or t
  misc_feature (482)..(482): n is a, c, g, or t
  misc_feature (492)..(492): n is a, c, g, or t
ttctggctatgatccaactagttagagctaacaaatggctcacttccaccagaccaggggctgctgtagagtctgcccagctggccaatttaatggtttcacttctagaggatgcacggggccacgcagggtcctcctctcccttttggctgctctctctttagtaagtacaccttctgcttggagtggtgcctggnatcctacagggatgtggtgagagtaaagagagaaacaggaattcctatgaggtgctaaagcaggcatcccttgggatnacaccaaataaaggccattaacataatggtgcccacgttttataagttggatgagntntcaatngggacctggaantgggcgtgactgctgacttcttgaaactanaactttctcccctcngtactgggggtggtctttctgcnanaanactgnggtttaagtnaaatantgaaanagctgggtnaggtgananaaaatctgnttcnaagattgaanctttttcttggtgctg

SEQ ID NO: 541414 - DNA, 1294 bp, Homo sapiens
  misc_feature (244)..(244): n is a, c, g, or t
tgggttgaggggaccctattcggtttactcccaaggtgctctttatttcgtggttgaaaaaaacctttacttctccattaatttggggaaaggaatgtggaagaagtggacaccacgcgaacaccaccagaacacataggagtgggagtggagtgttttttggggggagtgggcttaagggcgaacaataaaggcttgtgcggtgtatggtctctctcctgtgggcgcgctctccctctccaanactattgtgtgcaagaaatctctgtgtgaaaaacctctctctctcctgtgaaagcccgggggatatgagctccaaaatttcactttaacactagtgtgtcaatataaatcccacctgtttattcggtggcgagagaggggggatgtactcccaagtgtgtgtgcgcctctcctcttctctctattctactctggactctgggagtatttatatttataacaaaaagcgccctatgtgtgtcgtggagaaacaccccaactttatattttccatataacagcagatgtcaatatgacgaaatattcccgagaaaacagcaaacaaagcaacaaagacacacagaacaacaaaagagagggtgcgggggcgcgcgtctcacgagagagaaatatacaccctcgcacgaggaggggggccccccacagcactctaaacacgcgcgcgttaacccccgagaagcgatatacgatgtagctcacaacaacaaacggtgagggcgccccccccatataatgtagggaggagagcgcgcggaataaatattattataaacgcacgacctacacgcgacgcaccaagtgagacgcacagcaggcagaattatccaaaacaacaccacgccgaggaagagactacgcgggggagcccaacaacgccctggccgcccaacacgctgtaggagcgaaacccctctttaggctgtcaaaagcagaacacccctaactacaccacacgcgggggggcggggtggcacaccaacatatggtgtagggcacacacaccacttcatcaccctgatcgacgagacactattttcaacaaagcgcccctactagagggggaccaccacccattatacaaaccactatttttgacaagcgggatgcttcctaaccggctggttgtgttcacaacaccgcaccagtcaggacgaactatatagtgcatacgtaagccaatccattggacaaccgaatttttcgggcacttcaccgggacgcctagtgactttcatgggcgaaaacttttcttatacacgcgcagaccgct

SEQ ID NO: 541415 - DNA, 152 bp, Homo sapiens
taccaggaggatacccacaaaatctaaatgatccgtagctcatttgccctacaatgtatgtgcaagccatatggtttatgccggagcacctgctattctactgggagtactggaatatgggtacatgccaggccgggggtgccttacataga

SEQ ID NO: 541416 - DNA, 1028 bp, Homo sapiens
tcgttcgtctcatctgggtcgctcctctcaattggttccattgcgcacaaggcaaagcccagcctgtgctgtgaagtgcccttacgggtgcccactctggattcatcacatcccactgggcgccacgcccgcttcggcgtacccccgattcggtgtgtccgtccctgttctgctccccttccgggccttttccgccagggttcgtgcttactcttgtagccagtagtcgttcctgagcgcctcgcttcaaggcttcccgttattcgcttgcggcgtaacgcttgccaacgtcgggcctcttacaggcacacgcactgaggccctggtcgcgggcttctagctagggcctgatgggtaaccgactcgttggaccatcccgattggtcatctctttattatagggtgtacacaccgtgtactgttcatggaggactgtggtagcctcaatccaggcttattggcgggactactgagtagtgcatgatgggttgtacaagtacgctgacgagattcctacaagggcgtttgccacctccctgtccattgtgcctgtgccactgttgcctccaattcgcctcctttggcttccacgtggacccattatttgcccttaggcgctggactcagtcacttggtagctgtctacctctacagccgttccccgaggtgcagccaagagccatagcctctgcctctggcctccgcctccgggccctgcgttcaccagcaagcctcccgggcagccaccaccaccgcaagctgtcattcccacccgtgtagaccatctatcacggagccctttctgcgcataagttgctcaccaaggtgaagggttccatatgcgctgctgtggattgaagacattggccaggcctcgttctctcttcttgcccttggcctagtctgggaccaaactctgatcagtatgaggggtagaagtgaggcttagacactgactacctgtccccaccacacctgccacacccagggccaaccatgactaagctctctcatgacccacctcagct

SEQ ID NO: 541417 - DNA, 141 bp, Homo sapiens
aggtatgcatggtaagctgtgggctggaccaatggcacagatggggttgaaaggtgagaagcggtaagctagaggagacagacggcgttgcacttaaaaacaattcaacttcattttaatgtatgctatgtaaagttcaca

SEQ ID NO: 541418 - DNA, 123 bp, Homo sapiens
atcatggttaggagacaggccatgcctttcaagtgcatgcagctcactgatttcatcctctagtttccgctactagtgcccaccatgaagtatgtcctgacaagcctggtcagaaggcagact

SEQ ID NO: 541419 - DNA, 149 bp, Homo sapiens
gtcgacggaaataagaaatcagttaagtctcggctgggcgcggtggcttatgcctgtaatcccagcattttgggatgccaaggtgggcagaccatttgaggccaggagttctaaaccagtttggccgacatggaaaaccccatctctac

SEQ ID NO: 541420 - DNA, 1358 bp, Homo sapiens
gcaggatgagatgatcgacgtcatcggggtgaccaagggcaaaggctacatacatggggtcaccagtcgttggtaacaccaagatagctgccccgtgaagacccaccgaggcctgcgcaaggtgtgcctgttattggggcatggcatcctgctcgtgtagccttcttctgctggcacgtcgcttgggcaaaaaggttacctatcacgcgctactgagatgtctaaccaagcaaagatgtatatagacttggccagggggcttacgcttatctagaaggacgagcaagcttgtatcaagaagctaggagtgtcctgcccaccgtggagcttaatgtagcccgtaattcctggatcacacggaggcagttcacatccgcgtccttgcgagttgtgactttacgttgcaccatcctaattgggatgcaaaggttggacccgatgttgcagcctttttggttgcacttgccttgcagataggcgcactggtgttggagtggcggaaacgcgaaaagcaacgtcggtgcttggctccagcacacttgcgcgacaacaaggtctcgtgtggccgtggtgtagtcaagggatccagtaatagcgtcgggcccgtgggcgtccttagcgcaggaaaaggaatttgggaacacccttgtttagacggttttccctatttcgtagccatcgctagcttctttcaccaatacgggtattttgtgacccaattggggtcccggaccgtttaccccattggagccactactaggggcacgagcgacggtacaaagtaaagaacggccaatattcttccaacttgggcgagaacctacaccttcgaaaatggagatcaacgcattccctggtaatacattgtcgctctaaaagggggaaaaggtgaaaaagcgagacgccctcataagagtcgccccctattgggttaccaccaagtccaatttgtctaggctaacggagattgggcgccattggggcggcgatcacactccattgagttcacatccacagggttatgaacttacatattgtcccaaagccatgggtcctttgtctattaaactgcaggagcatcacacagaacaagcataccacgcgaataacgtattcttggagacatcagatatacagatggggagacaatacatattatatatggaggagcggccgttagcaatcgtataggaagcctttacgcgactttgtgacagcttatgtgctaaactagatggcgacattcctatgttagcccattaaacaaagataaggcgccgatatctagcacacgggaacgtggacaccacagacgcagaactccacatcaagttgtatacgtactacgaggtctcacc

SEQ ID NO: 541421 - DNA, 131 bp, Homo sapiens
aggttgactcctagaggtatcccgggagtgagagaagggaggcctggattgtttctggggcatcaggaaaaggagttgcaagcagaaagaggaccctggattctgcatcacagcagtgtcccacatcttgg

SEQ ID NO: 541422 - DNA, 1041 bp, Homo sapiens
gcactaagcttgggccgttgtgtcttgtgtgcccggaggcgaacagcatgagcggagttacgtccgttgaccttcgatacaccatgtcgggtttcggaggaccaagcccttgggggaaccaatggatgtagaccccttccagagatccctctgtgacccagctgaccaaggccccggcaggttggcctgagtcggaatgtaaccgcctttctcagagtacaaagtgcaagcgaaggaggatgcttcgcgtggtcatgcgcacactcgcctgtggtccgtcgagcgatctcgaggcgggtatctccaagggcattcacgatgagaagccaaaccggagacgatgcccaccgaggtgcgatggatgctctgtgagcccccaggacacggggcatgcgtccggacgagacgagcgtagagaaaactggaaacagggcaaaagcgtgtcgagactggaaacgcagaggagcggtgaggctgacagaaagcgagctgtacgacgcgaaccttggcatggtgagacatgaaactaaacctggatccctctctggcacctcgatgggtgtccctgtgtaaaggccctgtcttttcgtagtcacggatgtcctcccatagagatccctgtcgaacctatccagcggatagtgtcgatgaatggctctactaatctgtgggatgttgaccttcagtgacctctgtttcttgaatctggttaacggactgggtgtggtttctcgggcgcaccatgtgtccaacgggaagttggtcatattgagcttctgcatggctgtggagactgatcttcactccgtgtggcttgcctttggttggtaccgaaccccctcatataaaagggctttaaggtcccacaaaatcttttagcgtcctttggggtctgtccttggctgttttttgcccccatatggactcgacctcttcccgtgggtggagaccccgggcgggggagaagcaggtggggttgacggcccgttgacggaaaaattctcggcgcaaagcacaaaaaagggggcggaccccaggtcg

SEQ ID NO: 541423 - DNA, 110 bp, Homo sapiens
cgaatccgcgtaacgtagacgcgccctccatatttgtggagcgccaaagctgctaagatgcgtcagttgtggagtggcgtagacgagttaagtcctgttctgcgtggagg

SEQ ID NO: 541424 - DNA, 323 bp, Homo sapiens
tctggtgaggcttggtggctcatgcctgtaatcccagcactttgggaggctgaggtggatggatctcttgaggacaggcattcaagaccagcctggccaacatggcagaaccccatttctactaaaaatacaaaaattagccgggtgtggtggcacacatgtgtaatccagctacttgggaagctctgtctcccaggttcacaccatcctcctgcctcagcctcctgagcagctgggacaacaggtattaaattttcacagtatatataaggcagcaatcccataggcctttcacggattcttctgtatcaacataaagaggc

SEQ ID NO: 541425 - DNA, 170 bp, Homo sapiens
  misc_feature (6)..(6): n is a, c, g, or t
  misc_feature (19)..(19): n is a, c, g, or t
  misc_feature (85)..(85): n is a, c, g, or t
  misc_feature (147)..(147): n is a, c, g, or t
  misc_feature (169)..(169): n is a, c, g, or t
gacttnagcttcatcatcntccgggcccgggtgggggtgcggtcgggtcgcaggagtcgaggggtggggagcccgctctggtacncgcgtggcgcgcgccccggctcggccaagggaagcagggagggggagcttctccgcgtcacngcttccgctgcccgccgcggtnc

SEQ ID NO: 541426 - DNA, 385 bp, Homo sapiens
ttctggggcaggcgccctctgcaagaatcttacttcccttcagcccaccgagatggctgcggcgtcccgggcgctgagatgggggagccctgagggcgtctcaccgggaggaggccgtgggcccagcgcgaagccgacccgacattcccccatgagcccgggaggcatcgccacatcactgggtggaagacgccccgccgccggcgcaggcccagaccccggggaacgcgagagccacgaacctgggccaggagccgccgagaccagccccggccgccccagcgctgctcccgcccgggcgcgatgcggtgagaatggccccgggcgggaacgtcccctgtcggggcggccatgggaggcactggggtccctgctctgcggccgc

SEQ ID NO: 541427 - DNA, 108 bp, Homo sapiens
  misc_feature (6)..(6): n is a, c, g, or t
  misc_feature (15)..(16): n is a, c, g, or t
  misc_feature (35)..(35): n is a, c, g, or t
  misc_feature (89)..(89): n is a, c, g, or t
tctggnggaggaggnnctcacaccaccccgcagangagcgtctccaccacgaagttgttctcgaagtggcggatggcattgcagatctnggccccacgcttgttgatc

SEQ ID NO: 541428 - DNA, 929 bp, Homo sapiens
  misc_feature (147)..(147): n is a, c, g, or t
tgtggctgcgcgcacaacacacacacacaaagagggggggagacacccgggggggggcccccccgggcccccccccgtatgatggtaggacgcgcccctcgattgaaagtcaacgagagcgcacccgtaggggagttgttgttctcnccccacccaccactcatcgggtgagtgaacacgctcttctacataacaacacaccactagcaatatcaacaccaaccaccacccacagacagacagtggtggaggagccacccactcttctattatagaacagagagaagcacacactactatgaacgaggggacacacaacacacacacaagaacgagagagaggagcgctcacaagaggaagagaaacaccaccactcacacacgcacagtctcactatactaagtagaggagcaaagaggcgagtaggggaggaaatagaaactcatacacactcacaacgagagaaacacaacaaatcaaacacactcaacgctacgcgacaaaagatcaacacggtgagaggacgcaaaaaacaagagatccaacaccacacaccaaaaacaaaagagtaagaaaaaacgcgacgaatgtacacccaaccaccacaacaagacagaacaaaaaccataccttctatgtagtgaaaagagaacaacaaaaaaaaaaaagcaagagaagaagggtgggagcacaaacaccacacacacaacacgaaatgacaaacaacacccacaactactatacaccaacacaataaaaaacacaacgatgaagatacgattacataagaacaaaaacaaaagggaagaagacaacaacaacatgaagaaataacaaacaaacacaaaacacaaaaacaaataccagcacccacacaattgtagtaacccaaaaaaaagacaaacacacacaaacggataacacaccc

SEQ ID NO: 541429 - DNA, 330 bp, Homo sapiens
gatgaccaaaggcaccaccaagggatcaaggcacataggaagagggacttaattcacacaggagcctggctcctgcatgccatggcatggctctcggggctgtcagcatggttcccaatagcataggcgtgctctgaggagggccctagggcacggtcctgaggacatagccagggccaggctcaagagctgtacaatgtggcgcaaaggactgcttacacatacacactggggctactcaacccgactgtgcagaattatggtgagccttttaccactccagcctagcctctaccacgcaattaggagggcactgccccccaacaggca

SEQ ID NO: 541430 - DNA, 103 bp, Homo sapiens
tttgtgcataagtgtaagtgtataagcatgtcaagtattaaaaagcaagcaagcagaattgggaatgcatccaatccaagatgcggcatcttcaaagcctcca

SEQ ID NO: 541431 - DNA, 1277 bp, Homo sapiens
  misc_feature (434)..(434): n is a, c, g, or t
  misc_feature (459)..(459): n is a, c, g, or t
gcaagcaccggaggtcgagacagcaggcgggtcaagtgggcagccgggatggcagagtcgtgcggcgctggaggagctggtgaaacttacagggagacgctgctggtgcgaggcctcaacgctagctagcaaggccagcgccgtagctgatcgagagtaggaggtgtgtgataactcctgatagactgaaggcactagctgggatcctgcatgaaaggcgagatactagtaaatttgtgctcaaagacgcccgcgaagggacaacaaggacgactactagttcactcgctgtgccatggatggtcatgcttccgctgaggaatgcgtgtatgagaacagttaggatcgattccagtttcgtccgtatcacatgacggcgcaacgggtgtcggagaaacgttcatgtgattacagcgctgtacttgtgcacactnacatatgcgagagatcacttgcatngcgcgtaacaggtactgggagagacgatctccaaagacttgattctagtgaaccttggatagtgagccttagggggcgcgtggaagcttcgctgtcctctatcgactattgaacctcacctgtatcacttattgctcgagtatttgcgcaactgaagtaagactgacgcaacattataacgctaccacgatagcaaatggtactatcggcgggataacccgagccatgaccgcgtggcccgataccgcggaattctaccagatgtgattttgacattgcttgggaactttgatcccatgatcctgatgcagagtgcctgagatcatgtgcgagatctgagttcacttcagataggcaaatcctggtcaagtaaacgaacgacgcattctacattggcattgttgccatactcgagcggcgttactgacaaggcaggtccgaaccgactggtccacagcataccacgctgacacgcgtcccggcacatgtcaaggacagatgcagagaacagagccccaccaaaggcgaccgcactgagcactatacccacgcgagcctccacggggacaaagctgcgggctcttgaatcccaccaccggcgtgcggctgagacaaggaagagatagacaaccccgaccgaggcgaaccaccgggcggacgcggcgcacagaggcggagggacagaacagcgaaagagagggaagaggcaacacgccgcgcggggcagcgagggccagtcgcgccgcccgcgcgccgcgagcgcacacggcacaccacccccgcccgcccctcgcaccccgcccccccacgcgcccgcg

SEQ ID NO: 541432 - DNA, 205 bp, Homo sapiens
atactatacatgattcctacaatatttcagagcaaaagatggctactttatgtaactttaaatagccaatggtttagtttacacaaatccttggacaaaagaactggaatattattgtctctgttcaccactttagttttggagatatagtgcgtcctggagaaagcatcatttttacctttgtagctctcaattcatcagtaag

SEQ ID NO: 541433 - DNA, 1083 bp, Homo sapiens
gcttcgtgctgctgtgttggcttacgttgctccgtgcttccccgagcggcgtcggcgacatcatgacggatctcgtgcacgtgtgcaggcgctgagcagtgcaggcaacctaaatcatgcgccacttgtaggtgagagtgatcatccagatgattcacggcaatctgatcgctcacgagggcactctaccaaaggtggacagtctgaactgcaagcatggaatcgcatcaacagtgtactactaattgaggccactctggatgcaagtacagtgccgccgatgaccgtgctcgtggcatctggagtccggacacctatgtgctttccagatttacgcgtcagggggctcctctctgggcaagattctttctcgagctctgggacaatcgttcagattaacagttgtcaggaagtggtgcttgggcgaacatactatgtgagtcaagtggagctacctaccaacacgaatgtgccgcgaacgcgatgggtaggaccttcaggctggcatgtaatattgctgtgtgcgtcagcaaaaaaggcgccgtggcatgtgtaaccatgtttgggatggcactttcgaaggcattgccacagatggacctatcacaaagatcggaggaaagaccccgaactcctgccatagggggaatagcggagagtttagcatgtgcgtctacgtagacacaaaagttcggaaaaggacccttacctaggttggggaaccaagtaggttaagtggaactcaaggcgcgtttttaataggcaaaggcacacagtagaaagcccaacataggttggattcattccttgtggcaaagaacgcaaagatcagacaagtacgatatcatcattctggaggacagttttagaattatggggtaggtattaacatacatgtgtggtgggaagccccacgtggaagaacacacattccaaaccatcggacgttataacccacattatagtccaaacaacagacgttgggaacaagggtccaggacaaggcgcatcttgggacaacgaccggggaagacacatttggacgtggacggacccattccttagaggcagcgcagaacgagg

SEQ ID NO: 541434 - DNA, 471 bp, Homo sapiens
  misc_feature (201)..(201): n is a, c, g, or t
  misc_feature (239)..(239): n is a, c, g, or t
  misc_feature (282)..(282): n is a, c, g, or t
  misc_feature (311)..(311): n is a, c, g, or t
aaaacaagttaagttttcgggaaactaatgggaataaaataatgtaatttgccttgtgagaaggacaggatacttaggcgttccaggggtagaatgcctatagtttggatatttgacccttcccaaatcctcatgttgaaatgtgattccccagttttggaggtgaggccctagtgtgtcatggtggttgattccttatgnaatggcttggagccactctctcagtagtaagtgacttncttcctctattacttctcatgagagctgactgttaaaaagagncctggaaatctccttgtatcctctcttgnctacgtgatctctgcacatgccagctcctttttgccttctaccatgagtggaagcagcctaaagccctcaccagaaatagatgttggtgccatgtttcttgtacagcctgtcagaaccatgagacaaataaacttttcatttttataaattaaaaaaaaa

SEQ ID NO: 541435 - DNA, 762 bp, Homo sapiens
cggccgcgtggcccaggtcgtgaggacagtcatcaatgcggacttccccttcccgctgggctggctcggcggctacctggccgtcctcgcgggcgccggcctgaccttcgcactgcagagcagcagcgtcttcacggcggccgtcgtgcccctcatgggggtcggggtgatcagtctggaccgggcgtaccccctcttactgggctccaacatcggcaccactaccacagccctgctggctgccctggccagccccgcagacaggatgctcagcgccctgcagcccgtctgcggcctgctgcccggaggcccaacaggttcagctcccgaaactccgggtcatgctgcaccgccgctgacaggaagagacaagtgcggcaccccctggaacccaccctcgttcttcttgcctctgccctgtctctatccacttagaccctcccagtgcagggtcctgctccaccccctgcaggaagccctccagactgcacctgtgtgtggactcctccaagtccggcagcccctggaggggcccgtgacactgttctcccctcctgtggccctgtgcctcctccccgcagggcctggactgtgcaggctcagcacactggggactgaggagacggggtctcttggcaggaggcacaggcagagccaggtcggaaggtgcttcccccgcaggtcccccttgagggcagcagtgatgcagtcagtgctcgggggtgctgggctggactgcagctcccaggagcgtgcgggaag

SEQ ID NO: 541436 - DNA, 526 bp, Homo sapiens
acaatagagatgacatcatctgaggacgtgggatcagattcgaagaccaatataattactcaactatttaaaaaagatagtgaagtggtcttgattgacatttagatttacactgccaagccaatcatgtgaaggacagaagcttttgccatgggcccctcacatcagggaaaatgaccttcactgctgttaacagtaatgtgtccctttcattttctggatcaagccttctcagcggtgggtctggatgtgggtaaactaaggtaaaggggatgatattccacaaactaattatgcacacagaaaatctgtggagcctatcagaccccaagtgtcttgaaatgtttgtagaaacccactaaaatgccccttctctgggtgtgggcccttattgcagctgtctcacagcctgagctgtggtacagagaaatgggggttctccttttatttacattatattttccccaatggcagctttactcccgttgtattaccttcctattacccaaacagttcctcttatctc

SEQ ID NO: 541437 - DNA, 951 bp, Homo sapiens
agcggaggacaacaatcgcaggcgggggaggcacccccaacgaggcaggactgagagccagcccctcttcccccctggctctcaggacccccatcgcagggcggggaggcaccccccacgaggcggcgactgagagccagccctcttccccctctggctcttacgaccaccatcgcaccggcgcgcgcgcgcgagcgcaccccccgctgaccgcaccgccctgccacccagcccctcttcccccctcctggcctctctacgcgcacccacccatcgcacggccgcgccacgcggcggccggccccccccccccgagcgcaccggcacctcacccggcccgccccttccttccgcccccccggccctccttcccgccccccccctcctcccgcccggcgacggcccaccccccctaccgacgcgcccgcgcaccccgaccaccgcccacccgccccactcctccccaaccccccttgagcctaccatacgccaccacccccactccgccacccggcgggaacagcgcacaccccccgtaacccccactacaccggactccgccccaggccacgccccgccccccccccctcccaccagggccctccacgccaaacaccccacgcccccccccgcgcccgcccacgacaacccccccaacccacgccccccggcacccccccacccccacgccccccccccgcccccccccggccccccccacaccgcccccctcaactcgcacgcgccccccaaccgaaccacccccccggcgaacgaccggccgccccagcccaccacacaacacaccccccgacccccccacaccccccccacccccacccaaccccaacgcgaccccctaaccgccgcccccccccccccccccaccaccacaccacccacccccccaccccaccacggccccaccaccacaccctcccaacaccgccg

SEQ ID NO: 541438 - DNA, 103 bp, Homo sapiens
acgtactgtcgcatatcacagctgtgtagtcctgaatatacctttcttctgttatcaacttatccagttctcaagttattctgttatatgcaacatgaaaagt

SEQ ID NO: 541439 - DNA, 529 bp, Homo sapiens
  misc_feature (18)..(18): n is a, c, g, or t
  misc_feature (36)..(36): n is a, c, g, or t
  misc_feature (40)..(40): n is a, c, g, or t
  misc_feature (45)..(45): n is a, c, g, or t
  misc_feature (48)..(48): n is a, c, g, or t
  misc_feature (67)..(67): n is a, c, g, or t
  misc_feature (75)..(75): n is a, c, g, or t
  misc_feature (92)..(92): n is a, c, g, or t
  misc_feature (266)..(266): n is a, c, g, or t
  misc_feature (272)..(272): n is a, c, g, or t
cagctgcggcatggctcncctactcacggcaactcngtcnaatgnggntttttagatcatttctgtnacggttcnaagcagaaaggatgagnggctgagtatgaactaccttggagccctatactgatatggcatttcttttgtatgttattcagtcaaaatactacccacttgagttttctaatctgatgtgagctcacgttacacgacttttagtagtaaccctgactagaaataaactggatgcttaggagagagtgtcagangtatanatgctaataaaacctgtttatattattgttagctgtaagtttttgggaaatactgaacaaattagtccacaatcaagtgtctacttttcccttcactgtagggcctctcctgcacagagcagtctgtttagctgtgaacaccacaatctgcagatgttcaagtcccttgcataaaatggcatagtatttatatgtaacctatgcatattctcctgtatattttaaatcatctctacattaaaatacctgataaaacg

SEQ ID NO: 541440 - DNA, 740 bp, Homo sapiens
  misc_feature (4)..(4): n is a, c, g, or t
  misc_feature (28)..(28): n is a, c, g, or t
  misc_feature (50)..(51): n is a, c, g, or t
  misc_feature (62)..(63): n is a, c, g, or t
  misc_feature (214)..(215): n is a, c, g, or t
  misc_feature (254)..(254): n is a, c, g, or t
  misc_feature (280)..(280): n is a, c, g, or t
  misc_feature (287)..(287): n is a, c, g, or t
  misc_feature (324)..(324): n is a, c, g, or t
  misc_feature (337)..(337): n is a, c, g, or t
  misc_feature (355)..(355): n is a, c, g, or t
  misc_feature (410)..(410): n is a, c, g, or t
  misc_feature (504)..(504): n is a, c, g, or t
  misc_feature (544)..(544): n is a, c, g, or t
  misc_feature (657)..(657): n is a, c, g, or t
  misc_feature (661)..(661): n is a, c, g, or t
gcanacagacgccgggctgcgcgctggngagctgcggtctccggccatcnnacccccccctnncccccccgcctccttctccccctccgaggtccagcggcgcctggcggccggcgcgtgctgggtccgccgcggggcccgcctctaccacctctccagcttcgtgcggcaccacccggggggcgagcagctgctgcgggccaaggcgggccannacaacaaccccgacctggacgggccgccgcacaagcacncggccaacgcgcgccgctggttggancaatacnacatgggaaaactccgcgaggaacaacaaggctccanggaaaacaaaccnataacccttgaaaaaacncaaaaaacaaaacctgctaaggaaccacggttcaaaatggtggattgggacaaanacctggtggactagcgaaaacatctcctgtggcaagtgggccacttgggaaaaaaatacaaaaaatgggttcaccaaccggtgaccaagcccanccgcctcttccactcacacctcattgagggcctctctaanactgtctggtacagtgtccccatcatctgggtgcccctggtgctgtatctcagctggtcctactaccgaacctttgcccagggcaacgtccgactcttcacgtcatttacaanagantacacggtggcagtgcccaagtccatgttccccgggctcttcatgctggggacattcctctggagcctcatcgagtacc

SEQ ID NO: 541441 - DNA, 826 bp, Homo sapiens
ggccgggcctgagagtggggcgggggtgcagggtcccaggaccgggccggggtctttcctggcccgggggaattcggcccagtgcctcccgggggggtgcaatcgcccaacaaaggattcttgggtgctgccacgacctcgagggacttcccatgcccctggatccaggcccccaccagcgcatccgtggcccggcatcccggggctctccatctgcgagggtaccaccagttcgctggtactgcacatctgggcagaccgggctgctactcaccgtccagacacgcgtccagtgttccaaggtccagtgccacggaggctgggcatgtccgcacgggaccccagagcagcaccgggagccgggccggcggcagccgagaggggcggaaaaaggcttcacgaggccagacaatggaggagcataacgatagatgactggtcaaagccaagaagccaggcggcgcaggtgttcccacgccgcgggagccggaacaaagggcggtccacacagagggaaggaagccggatgaaaggaaaacgcgggcagggacccaaaggggcaacgaaaggggaagaaagaatcgtgaaccgaatgggccccaaagggcaaccggacacgggggatacaagtgcaggacaaagcatggaagacgagcacgagcgcaagagcaagataccgggaacggcgccagaccggggaacgtgacccatgcacccggaagaatcaccaagaagtgcttgcgcggccagaaaagaaagaaaaaggaggaagccacaggggaaaagggcacacggaaaccggggaaagaaggccgagaagagcaga

SEQ ID NO: 541442 - DNA, 324 bp, Homo sapiens
ccgagtctgactacgcggctggcctcccaacactttgggaggctgagaggtggatcacgaggtcaagagtttgagaccagcctggccaagatggtgaaacctcatctctactaaaaatacaaaaattagccaggtgttgccaggcatggtggctcatgcctgtaatcccagcactttgggaggccgaggcgggcagatcatgaggtcgggagttcaagaccagcctgatcaacatgatgaaaccccgtctctactaaaaatacaaaaattagccgggtagtccgatcgagccgcgtagtcagatcgagccgcgtagtcagatcg

SEQ ID NO: 541443 - DNA, 485 bp, Homo sapiens
atcaccatggcgggctgggaccctgtacacgtatcctgaaaactggagggccgttcaaggctctcatcgctgctcagtacagcggggctcaggtccgcgtgctctccgcgagcaacccaacgttccattttggcctaaaccaaccgcacccctgcaatttctcctgcgaatttcctgccggccaaggtccctacgcatttgacgggtgatgatggattctgtgtgttctgagagcaacgtccatggcctactatgtgagcaatcgacggagctgtcggggaagtactccacgagtgcacgcagctcgcaggtgtgtgcagtcggtgtgaggcttcttgctgatttcccggaatctaagtggccctcgcaggctccagttatcctgggagtgttcccccagcctgtgagggctagtcatgtctaccaccagggagaacacggtcgcactgaggaactgtcgacgggaggaagtgaaggctgaattc

SEQ ID NO: 541444 - DNA, 136 bp, Homo sapiens
tatcagtcggtcccttacttcccacgatcaccttgcaaggttagggaagccaggaaagatacatagtattgtggtgtgttgaattcaattacaaccccacgatcacccatagtattgtggtgttgaattcaatacg

SEQ ID NO: 541445 - DNA, 766 bp, Homo sapiens
gccatgtgggctcgttcgagctctcggtgcaggatctcaacgactgctctcggacggagcggtgctacagcctcccgagccagccctgcaacgaggtcaccccgcggatctacgtgggcaacgcgtgtgtggtcaggacatccccaagctgcagaaactaggcatcacccatgtgctgaactgcggttgagggcaggtccttcatgcacgtcaacaccaatgccaacttctacaaggagctccggacgtcacatacctgggcatcaaggccagacgacacacaggagttcaaccctcagtgcttactttgaaagggctgcgacttcatttgaccaggcttgtggtcaaaagaatggccgggtgctcgttccactgccgggaacggttagtatgccgttccccaaagcgctagttaatcgccctacctcatgatgcggcagaacgatggacggtcaagtctgcccctgagcatcgttgagggcagaacctgtgagaatcggccccaaccgatggcttcctggcccagctctgggcagccttcgaattgaccagactagccaaaggaggggaacgtcggaaaccctagggcacccccaacgacgtcttgcgtcgagaggctcgtctgtgtcccttgccattctgaagttatcgagaaaccacagctacgaaatgagggggactcatcttagaaagacctctaaggtcccttttggctctgaggggtcctctaataatcccactggattcagcacgcaggaaattatgg

SEQ ID NO: 541446 - DNA, 157 bp, Homo sapiens
ggctcatttcagatgggctagctatagtgtgtacagatatgtaaagccactttcctagtctatatatgtgtcacctggagtttttcacaactcaggtgagtattagcttcattggggagggggtgatctaaaacactctttacgccggcttctatgg

SEQ ID NO: 541447 - DNA, 130 bp, Homo sapiens
aaaatttttggcgtgttgtggctaggtacgaacgaaccgatagaaggggatacttgaccgacgcgtgcaagatatcccagtcgacgtatttcggtggacgaagcatcactgcctaacgcgtgttggaaag

SEQ ID NO: 541448 - DNA, 383 bp, Homo sapiens
taagatggtcaggaaggaacacatgaggagggtgtgtgggaagaatggaggtactgaggcagggtgcagtggctcacacctgtaatcccagcactttgggaggccgaggggggaagattgcctgaggccagcagttcgagaccagtataggcaacatagcaagagcccatctctaaaaaaacaaaaccaaaccagattagccaggtgtggtggctggcacctgtgttccaactacttgggagactcatgtgacaggaagatcacttgagcccaggagttggaagctgcagtgagccgtgatcttgccactgcactccagtctgggcaacacagcaagatactgtgtcaaaaaatttttttttgataaaaaataaaagagttac

SEQ ID NO: 541449 - DNA, 725 bp, Homo sapiens
  misc_feature (149)..(149): n is a, c, g, or t
gagtaggtgcaagtcggaaaccggtgaacatcttcatgctggattgatgttccgcaatggattatgagacctcacgctggtcatgagaactagactgacgtcacaggttgcactaaatatattatgcgtgcaaggaacaaaagcgtggntttagaagtcaaatgtgatagcgataagtagatatgtgaccattatagtagtctttcagtagttatttatatcttatgtgcatatgcattcaaatcgttaagtgatagtgtagatgtatggatgcaatgtaatagtgcttaccattatagggcattttatggcgttggagaaagacgtaacgtggaatctacattacaagggattcttgttgatggtggtatacagttctaggggggtctatctggaatatggtcaatggatttagggatggggagaagaaggaaccccgatgaagacctgtagctgttgaccttgttatgagaaacagaataagttggcagcaggtttcatactgtttgctagatagagagtagtgcgtcgtgggagtcagacaactgggtagaaccctcagtgttatcgaacaggatgaagactacctgtattgtgaggtgtgactgaatcaagggtttgccggtgtttcatgtgtgggacttgaagtttgatggttggagggacgactgggcttccaatgaaccataaaatgtcaggtgttttcggaatctccagggggaatg

SEQ ID NO: 541450 - DNA, 196 bp, Homo sapiens
ccttcttacgcggatgacatattttccgagtatcttacattagtttagtggggcctgcaggtctgtcccaactcagagacagacctgcaggccatgggccaagacagagcccttccccaccaacttgacctgtggatgaaaagcatcatccctgtatgctggaagtgtgtagtaagatgacggatgtgttggcaga

SEQ ID NO: 541451 - DNA, 317 bp, Homo sapiens
ttaactatctagggtttgctataacaaatactatatactactacataccctatactacctatagtcctatcatatatctctgcctctattctatctatactagcagatttttctcacctatagtacaaagaaatagcgatatatattttcatgtaatttgattttggaattctgtcaccttatgtagtgagttcttccaaaatataatttttttccaataattgtcaagttgttggcttttattgtattgaatgaaggctaataaaactagagtgccagagaagtggttaaggaaaatctcaggttgattccttatg

SEQ ID NO: 541452 - DNA, 100 bp, Homo sapiens
gctgggaatgtagactattctggacggtagtcgaggcacgtgctgcaggatgaactggggtccgtagcgggcgctcaatcccatggtgcagcgttccaca

SEQ ID NO: 541453 - DNA, 174 bp, Homo sapiens
tatcatacaacgtgtagccattctctacgtcaagggccatcttaccattggagcaggtctgggaatcacaaaggtgaaagccattcctccttcatatcctggaatctcatcctgcaggcggccaatattgtcttcgtaaaaagtggcaccaggggttaccaacttcaattccga

SEQ ID NO: 541454 - DNA, 171 bp, Homo sapiens
cgttttgatgtgagagagacagagagacaaagtaggtggtgaggccaggcgttttgatgtgagagataagattgggcgtgtggccagaggcttttaggatacaggagttaactcaggatgagctgccattgcccactgcttcctgggttgcaagacagcctcttctcccaa

SEQ ID NO: 541455 - DNA, 261 bp, Homo sapiens
ctgggtactctaaggatccttcgcgcggattctcagagaagaacagcagaatggggagaagatgagacagaggctgatgccccatgccagcccatacttggggagcgctggagccaggaagatactctagaggataggtgccagggtgctgagagatgagcctgaactgggtacgtgggacagagagaagtcagcacagagtcgacgccaggagaaaggggggaggagaagccgttggatggacaggaatccggcgggcga

SEQ ID NO: 541456 - DNA, 793 bp, Homo sapiens
  misc_feature (109)..(109): n is a, c, g, or t
  misc_feature (526)..(526): n is a, c, g, or t
cgcaggcctcagccttccaaagttctgggattacaggcatgagccatgcgcccgggctattattattattcttatttttgagacagagtcttgtatgtctccctggctngagtgcagtgtgtgccaaccctggctcagtgaacctccacctcaccgggttcaagcgattctccctacctcagtctacagagtagctgggattacaggcacctgccacacgctggtgaattatgtatttcagtaaaaacaggtgtggggtctcgctctgtcgccaaggctgagtgcagtggcatgatcttggctcgcgtgaaacctcacacctcatgagttcaagagattctgccttggtttcctgagacagctcagggcacccaccacacatgccgggtagttaggtatcacacgaacgtgatggggttccaccagtgtggccagaaatgatctcgatctcttgaccctgtgtgatcccgccaatcttggctcccaaagtgctgggactaatagcgcgtgagcaatatgagcgtgncttaaatttttctaaaatagcaagagtaacaattaatttgtcgtttcttaaagagtgtcttcccaaggttattttctcaacaaaagtctttgttgggtaaggcaaatctagttagaaacttgtttgggaaggttaaactagccacggttaatgaaggggcatttctttgtgattcaggaataatattacgttttataggagggggatagttgaaaagaacgggatggagtaaggatttctgaagaaagcttggacgtgccgagaaca

SEQ ID NO: 541457 - DNA, 1523 bp, Homo sapiens
  misc_feature (227)..(227): n is a, c, g, or t
  misc_feature (391)..(391): n is a, c, g, or t
  misc_feature (601)..(601): n is a, c, g, or t
  misc_feature (959)..(959): n is a, c, g, or t
  misc_feature (1232)..(1232): n is a, c, g, or t
tctgtggtgttgctttgatgggttgtctcgctatgcgcttgcttgtgtaccgacctctgatcgttcggcgcgttgtgtgtcacagccgacggtgcgtctgtggggtgcacagagttgtttttgtcgatcggaccgtggtacacgccgggcgtcgttggtgttggcgttagtcttccccaaagatctccccgtgttcgtaaagaaggtggttcttcctcgacgaggcncgcccttttttctcacggggcggtgagttaacaatgtggccacaccacaggcattgttcccccccgggcaagccccacgtcgttttttcgccgggttttataaaatacgcaccggggtgtgttatctaccaggggttcgcttaagattggtggaaaaatgttgncgagatttttttaagaacaggcctgtgatgagtgtatgtccccccctgtggggttaaaccagtggaacaagagtgggtgtttttttggggaaagagcccgaccctttgtatgttttgccgttggccgcccagttggcccctggcccccacaaaggcacttctcggctggtgtgcgcccacaccgtggggatccgccttctcccccccccncaaggagccctttgaggggtcttttaaaaacgccctctttttatagcgcgcacgataactttatttttaggggggcccgaaagttcttctctctctctcgagaagggggagacacacaaaaatatttctggggtttaaagatgttttttctcggagagagagaggagataataacgcgcgccaaacccgctcccttgggcgttttaagctcgggggccccccacgctctgagagttaagtggcgcacacactaaactcgccacacgtggagccctctctctcactaaagtttctcacaggagaaaaaactctgtctctggctcgaggcacacacagagagggagaacacacacacagngcgccccctcagtgtgacgcctcctctgtgtggcctctcactcttataatgtgcgtaacccctggtgaacacatgcgtatatgcacatgcccctcttgtgagaatatatccttgtagaaaatgtctgtgagacacccacacagagcgcccacctgtatattctcgtatattgtctcacatctgtgcacacgcacagagatataacctttatataaatattccccacaaattgagatatagagagagaaaattgtggtgttcacactgggaganaactctggctctgtttgagagcccctctcccaattgggagagcttgagaggaggcctcgtggtgtctcctctgcacaggcacttggggagctctggccaccaagccaaggagtccagccagccatgaagccccggagctgtagcgtgtgccagccaggcggcccaatcccaaccagccatggggaccaaccagtgtctgccaatccattcctccagttatggccagaatgtgctatttttcactgttaggtgttgcttttgagaactaccaataaaactctcccacccaga

SEQ ID NO: 541458 - DNA, 255 bp, Homo sapiens
  misc_feature (11)..(11): n is a, c, g, or t
  misc_feature (49)..(50): n is a, c, g, or t
  misc_feature (245)..(245): n is a, c, g, or t
  misc_feature (250)..(250): n is a, c, g, or t
ggcatcaccangggacctcaagccccagaatatgcagcaaaaattatannctttttatcttccactttcccttccctcagaactaaaagtctttcagcacgggtaccagccctagaatttccagtacaccagcagcagcctggaaaccacatcctcatcaaaagacagaaagaaaaaaactcgagccagcctgagaaggaccctattttatgctgttaaccactgagactggcatcctcacaggntgagnaaggg

SEQ ID NO: 541459 - DNA, 215 bp, Homo sapiens
ataacgaggaataatgcagatgctatcagcactgagcccaataacttgagaggcccgctattccttccggtacaacggagtgattcaccgtaatattgtgggctttgagcgcggcagcctatggcaggggtgtcgtggtggtcattatgcgtatatagggtcaacggacgtttgccagctcatttgtggggaccaacatcaacaggatgtttctg

SEQ ID NO: 541460 - DNA, 400 bp, Homo sapiens
aacgatgtgtcctcagcttctgaggcggggtcataaagaaaggttacacgttttgttgttgttgtggttgatgacagatgtttcactcttgttgccgaagctggagttgcagtggcgcgatctcggctcactggaatgctccgcctccctgtgttcatgtgattcccctgcctcagcctcccgagcagctaggattacaggtgcccaccagcacacccgggctaattttttttttttcggtaatttgttacagtacagatggggtacgacctattgttggccaggttgggtctggagactcctgactccaggtgatccatgtggctcagcctccagtcgtttggggactcagaggcgtgagccaccatgcccgccccaaaggtcctgggttctaccttgg

SEQ ID NO: 541461 - DNA, 1292 bp, Homo sapiens
agctggagatgattagttataggacatccatatccactccagcctgggtgacagagcgagacctttgttcttaacaacaaaaaaaaaaaaaaaaaaaaaagagttagaacgaggtgtgcaaacttgtgcgttgtggccaaagagggtctgtggcaagtgtgaattaggaacacgagttcactttcaaattaagagagagaaacgagaaacaagtgtgcaagagcggtgttaaatttcacccacatttgttctaattcctgtggggccatgtggcttttccccagagggaagagtctcgacgtgtgtctctcaattgagagacactctcccttgtgatgatatttaataaaagacactatgaggtataagtcacttctgctgttgctccccaaacgctttgatatataaatttcaccctctcgccagaagagatatcacgagtgctcaaacacccacaaagagtgcctggtggtgccgatgagaggactcatcactttgctggggctatcagagaaaatcttactctcccccaagaagactgcggagccctttctgtgatgaagcagcacaagaacacgagtaggtgttctttccagagagaacgcagaggatatctcagaagaagaagaggagtgttataacaagttgagtacgtgtgtgtgtcttccccagaaggcctctcctctctgtggtttgtgaaggggacacccaaaggaggcagagggaaaaaagttttttcctcagggagagagaaaaaaaacctcgtctccgcaggagctttgtcctctcaggagagaaagacgttttttgaccacgcggttcttcaagacaagcgcttgatgaggtgaatgatgtttgcacacgatctgccgggtggggtgggcgaaaatatgatgtgaggcctctgatgacaaacatgttgtgttagtcgtctctgaacgaatgtcgcgtgtgagaaaatatcacctctaatgtgtggggagagatgtcgtacacgctgtgtttggggcgcaggtataaactctctgtgtgggccccatctacaagaactgtgtgggtttgttgttattagataaagagcctctctctcaagagtgtagaaacctaataatgggtattaaatcactcagggagtactctaaaaagggtgttgaacccccctgtgtggggtcggcttaacccctctacgccagtgtgacaccttaataagttaggtgtgtgccaccaacaaggagtgcttacaaacgaagaacgtgggggtacatcaacaagagcaagtttccatcgagtac

SEQ ID NO: 541462 - DNA, 166 bp, Homo sapiens
aagaatcgagctcggtaccgttttgggctgtcgtgcccggggtcagcgcatggtcttccggtggtctctggctcgcgcggctctccaacgagactcgtgcgcttccccactgatcatggtgactccggaccatgagcgctcactcgatgttcatgcaactggggcc

SEQ ID NO: 541463 - DNA, 203 bp, Homo sapiens
agtgatgcggggagtcacagttagaaggcggccggtgtgttgctggcacgaaagtgctgaggtccaccagcgtagtcctgatggctccgcaacctcagattaatagtggctcgaggcacggagccacacagggcgtggcgtgccaggccatgcggacgttagcggcgcgtccctcctggcaggctagcgggcgcccggcacca

SEQ ID NO: 541464 - DNA, 84 bp, Homo sapiens
ccccaaggggtggccgtcctgagggggaagtgagaagggctcagagaggacaaaataaagtgtgtgtgcagggaaaaaaaaaaa

SEQ ID NO: 541465 - DNA, 405 bp, Homo sapiens
  misc_feature (26)..(26): n is a, c, g, or t
  misc_feature (67)..(67): n is a, c, g, or t
  misc_feature (95)..(95): n is a, c, g, or t
taaattgaattcacatgagaaaatanagagcatcagtaaaggtaactataagggaaacataaagtancaatatgtgtgttttgtttgtaactctntaaagtctcctgtctagtttgaaggacaaattcataaagcaataattataaacttgtgttgatggatatatacataaatttatatgacagaaacacaaaggaacaggaaataaatggagacatatagaaccaaagtttttgtatattactgaagttaagttggtattaattcaaactagagggttattggttaaaatattaattgtaatcccagggaaaccacaaaaagctcaaaaaatgtataaaaaatgacaagataggttagaaaatatttaatataaaataaagcattagtggaggatagagaaac

SEQ ID NO: 541466 - DNA, 528 bp, Homo sapiens
  misc_feature (3)..(3): n is a, c, g, or t
  misc_feature (73)..(73): n is a, c, g, or t
  misc_feature (88)..(88): n is a, c, g, or t
  misc_feature (150)..(151): n is a, c, g, or t
  misc_feature (158)..(158): n is a, c, g, or t
  misc_feature (181)..(181): n is a, c, g, or t
  misc_feature (206)..(206): n is a, c, g, or t
  misc_feature (240)..(240): n is a, c, g, or t
  misc_feature (258)..(258): n is a, c, g, or t
ggntagtacggcggctacggctctaccatgtaaaaggtaggacctggtgaagtaaaaatggtgttactgtggngaactaaaatgtgtncaacgaccgaagaaaccctggggataagagtgaggggattggatccccaaaggtaactctcnnctgcttnaaaactgaattcccgttctagtncctaacattctcttactacttgccngttacaaatactatttttaaatgaatctatatantgactttcttatcaatcntcttacgtgcatcaaattagagtactttggtttgaaaacaacacttagagcctccagataacttttaagacttatttagctttgtgggtggtattttcatgcaaataagtaagggtgggttttatattttgtagaagttttcggtcctattttaatgctctttgtatggcagtatgtatatattgtgttaagttcctcaagaatctccttaaaaactttgaagttaatacttttgtgcaactgtgttttgaataaagccatgacagtgtt

SEQ ID NO: 541467 - DNA, 669 bp, Homo sapiens
  misc_feature (3)..(3): n is a, c, g, or t
  misc_feature (73)..(73): n is a, c, g, or t
  misc_feature (88)..(88): n is a, c, g, or t
  misc_feature (150)..(151): n is a, c, g, or t
  misc_feature (158)..(158): n is a, c, g, or t
  misc_feature (181)..(181): n is a, c, g, or t
  misc_feature (206)..(206): n is a, c, g, or t
  misc_feature (240)..(240): n is a, c, g, or t
  misc_feature (258)..(258): n is a, c, g, or t
  misc_feature (539)..(539): n is a, c, g, or t
  misc_feature (553)..(553): n is a, c, g, or t
  misc_feature (561)..(561): n is a, c, g, or t
  misc_feature (573)..(573): n is a, c, g, or t
  misc_feature (576)..(576): n is a, c, g, or t
  misc_feature (582)..(582): n is a, c, g, or t
  misc_feature (586)..(586): n is a, c, g, or t
  misc_feature (612)..(612): n is a, c, g, or t
  misc_feature (643)..(643): n is a, c, g, or t
  misc_feature (664)..(664): n is a, c, g, or t
ggntagtacggcggctacggctctaccatgtaaaaggtaggacctggtgaagtaaaaatggtgttactgtggngaactaaaatgtgtncaacgaccgaagaaaccctggggataagagtgaggggattggatccccaaaggtaactctcnnctgcttnaaaactgaattcccgttctagtncctaacattctcttactacttgccngttacaaatactatttttaaatgaatctatatantgactttcttatcaatcntcttacgtgcatcaaattagagtactttggtttgaaaacaacacttagagcctccagataacttttaagacttatttagctttgtgggtggtattttcatgcaaataagtaagggtgggttttatattttgtagaagttttcggtcctattttaatgctctttgtatggcagtatgtatatattgtgttaagttcctcaagaatctccttaaaaactttgaagttaatacttttgtgcaactgtgttttgaataaagccatgacagtgttaaaaacaaacnaaaaaatttgcagnactcctgnttattcttttantgnttttgnctgntccctgtttttttctgtgactgctgnaacttaaagtttttgaaactgaattgcttcnaataaattgaagatttgttanaatta

SEQ ID NO: 541468 - DNA, 111 bp, Homo sapiens
ttgagttgttcagtctcttcccagagcacatctgaacattttcatcttccagttgcagctggcgtagggctctcgcctgtaatcccagtacttaagaggctagatggggag

SEQ ID NO: 541469 - DNA, 241 bp, Homo sapiens
gggggggctttttttttttaaaaaaaaaaaaagacccaaaattttttttcccccccccccccccgcccaatttggggggtgtttttttttttggaaaggggttttaaaaaggggtatttgtttcccccaaatttgttttttttttttccccctgggggggcccggttttttaaggcccccccccctaatccccgggggggtttttccccggggggcggggaaaagggggttttttttttca

SEQ ID NO: 541470 - DNA, 159 bp, Homo sapiens
agtatcccctcccatatgagacatctagtatcacacgtctgataatcttgcccggtccttttccttatctttactcttcttcttcttgcttgttgatcgttctctttcatccctgacttctttctttggtctttagtctttgactgtctacataggcga

SEQ ID NO: 541471 - DNA, 847 bp, Homo sapiens
  misc_feature (13)..(13): n is a, c, g, or t
aatctaaaataanagttaaaattatatctagggaagagagtgggaggagggagaggatcaggaacaataactatcaggtactgtgcttagtacctgggtgaagaaatggtctgtacacgagacctccgtgacatgagtttgcctttgttaacctgcacatgagccccagacctaaaataaaaaaaaaaattaagaattttaactcaattagatcatagacttaaatgtaaaatgtaaagtagtaagacttttaggagaaaaaggaggggaaaattttcagggggatatgaagagaggttgattaatgggtccagatatacagtttgatagaaaaaaataagatctgtctgatagatcagtaaggtgactatagtttacaatcatcaatcgtgtatttcagaatagctagaagagaataattggaatgtttctacaataaaagaaatatttaaggtgatggatataccaattacactgattttttacaaattatatgaatattacattactgaatgtaccctgaaaattttaaaaaaatgtatgattaacaattttgagcaaaaaagaaaatatagatgaatgaaaacaaaaacacaatgtaccaaaatttatgggacccagcaaattcagtgaagcaatgctaagggggaaatttatagctataaacacatttaaaaaccaagaaagatctcaaatcaacaatctaactgtacaccttatgggattagagaaaaaagaataaactaaaccaaaactagtagaaggagggaaataataaagattagagcagataaccaaagtagatattagataaacaaatggggaatagaacaagggtagagaaaac

SEQ ID NO: 541472 - DNA, 151 bp, Homo sapiens
gttctcccaagcccctccaccatgtggagacccagtgagaagctgtctgtgaaccaggaagggatcctcactagagagcgagctggcaccttcatcttgggcttccagcctccagaactgtgagaaataagtatctgttgatgaaccaaaa

SEQ ID NO: 541473 - DNA, 110 bp, Homo sapiens
ttctatatgaaggcggctggctcaacacgctccgtagaccaagaacatgacatcggagcggctctggacaccacccagtattcaaagcatcccccgcagctggttgtggc

SEQ ID NO: 541474 - DNA, 174 bp, Homo sapiens
tctagaggttccccacggtctcgaagaggtgcacggtgataaactgtttgcagatttcttttatacagatatacatgggttcatgaatattacacgtcacttctaaagcaaccagaatgagggacacgtaaagcaatcctgtacattcactagagaactttgcagctcagtttc

SEQ ID NO: 541475 - DNA, 226 bp, Homo sapiens
gggtgatctaaggatccgtctacctcgcagtgggtgggatacaggcgccaccaccacacccgcctaatttttgtatttattagagacaggtttcaccatattggccaggctggtctggaactcccgacttgtgatccacccactcagcctcccaagtagctggaactacaagagacaagggcttgctctgttgcccaagctaaagtgcagtggtgtgagtgtagcc

SEQ ID NO: 541476 - DNA, 961 bp, Homo sapiens
caccgaccctcggatggtccgctcctccccctacccccactggacgtggcccgagtggtgagtgctcccatttcccacgtgaactcagatgagcccgaggctgtcctgtacgtgtgccagtggcggccgagtggatgagcaccttctcagcaaggacgtggttgtcgatgaggtgtgttccggcgcaacggcacaacgacatggatgagccctgttctcgcgccgctcatgtacaatgcagatccgccagcatgtaatcctgtgttacagaaagtacgcttgagctgctggtgtcagacagtgatgtggtcgaccagtcctgagtatgaggaggaaatgtccaagatatgtatgacgtatctgttgaggacagctttcgccagatctaaagatgagaagatcttgcaacattaaggccactgagcatgtgatctctcccatggggtctggtcttcttcactcctggacgggcagcgccataggagcatgttcctgcccctccacggggtctgacggaacgatctcctgacgacacatcgagaactgtggctagttctgatgcctgctggagagaactttactattcatggacggctgcagccggatctcgaagtactcgcgtgggcaaactggtgaagaaccggactgtggactgggctctaacggcagtacatcgccgtatggagtccgctccttgaacagaggggcattccacctccggtcctgagcggcgcaccgaacgttgagtccgggccacattcagccaccgtcaccatgttcctccacgactcagaccgtgggccaaacaaacccgtttccatagaaccaatctctgggccagacaagggcccctatcacgggtcaagccgccccgcactagaaacccgcgcccggcctcagatcggctcccagccactaaccccgtctccccacaccccttctgccccacaccgcccccacc

SEQ ID NO: 541477 - DNA, 677 bp, Homo sapiens
cggacgcgtgggttttcttttgtttgtttaacataaacatagaaactaactttatttctctggaggaagcaggtactggaatgccggagcagcgaacttcgccaacaggcgggggggaaaagcagtggaaccgcgcgtgggggaatgggggggaacgaggaagcagcaggatgtccgctccagggcggctgcgccctgggtctccttccagcccgtggggccttgggccccggggtccccggccaagaagaactgggtgctgggcgacccttgtctccggcttgcctggaggccacctcagggctattgtccagaggcgacaaagatcctggaagggcgcaggccaagtgtcccattcaaagtccattgggtataagtgcgcacaattgtctacatttctgggcgccgaagaccccatgctggctgccaggggccccctgtggaaagaatgggcgccaagtcctaaggaggtcccaccggggtgcctggtccgcgctcttccctgggtggccaaacacattcccggcgctggcccagggtccaagcgctgggtgttcactccacaggtgctgggtgcacccatggggcaagggcctgggggggtaccataatcacaacgcaaagggccccgcgccaggaccacgggccagaggcaggtcatacccagagcctgcgtg

SEQ ID NO: 541478 - DNA, 103 bp, Homo sapiens
ctcagtgactctggcttctatctctgtgcctggagtggtcagctagcgggagtagatgagcagttcttcgggccaggggaggacctgaaaaacgtgttcccac

SEQ ID NO: 541479 - DNA, 265 bp, Homo sapiens
  misc_feature (88)..(88): n is a, c, g, or t
  misc_feature (97)..(97): n is a, c, g, or t
  misc_feature (103)..(103): n is a, c, g, or t
  misc_feature (108)..(108): n is a, c, g, or t
  misc_feature (114)..(114): n is a, c, g, or t
  misc_feature (118)..(118): n is a, c, g, or t
  misc_feature (137)..(137): n is a, c, g, or t
  misc_feature (143)..(143): n is a, c, g, or t
  misc_feature (175)..(175): n is a, c, g, or t
  misc_feature (194)..(194): n is a, c, g, or t
  misc_feature (241)..(241): n is a, c, g, or t
  misc_feature (259)..(260): n is a, c, g, or t
gttcaccaaatctgtgacttagaaaaacatgtggagggttctgccatcttctgaattctgatcctcactgagtcctcattgaaatgtntatttgggngaagtnatgtnttaccngggncctccttcccagtgaactntttttntcagtatgtaatttctagttcagagtctaagnacttgcctttggtaaatgncctggtataaatctggtatgtctaaatgtacttgtagtgtacacctnaataaaagtgtaatgggnntcact

SEQ ID NO: 541480 - DNA, 185 bp, Homo sapiens
gggtcggtaccgtagttacgggattcagtccgcttggaggggactgagcaagctggtcacaatttcgccccagatcataacaagcagccatctatccggcacaagcgatgaatgtttctgaatgcaatgttctggcaatacccatccttcatgatctaggatcttccaacaaaatcccctaacgg

SEQ ID NO: 541481 - DNA, 130 bp, Homo sapiens
ggtagatctagaggatcctgagagactgtgttgatggagctgcccatcacattgggagcagaaaagggataatgtgagcagagaagggggagttgagaacaagaggggagagagggatgcgggaagtggc

SEQ ID NO: 541482 - DNA, 583 bp, Homo sapiens
  misc_feature (63)..(63): n is a, c, g, or t
  misc_feature (143)..(143): n is a, c, g, or t
  misc_feature (179)..(179): n is a, c, g, or t
  misc_feature (356)..(356): n is a, c, g, or t
  misc_feature (367)..(367): n is a, c, g, or t
  misc_feature (451)..(451): n is a, c, g, or t
  misc_feature (456)..(456): n is a, c, g, or t
  misc_feature (469)..(469): n is a, c, g, or t
  misc_feature (486)..(486): n is a, c, g, or t
  misc_feature (542)..(542): n is a, c, g, or t
  misc_feature (566)..(566): n is a, c, g, or t
gtccatatcaccctaaatgattatcaaactaatcatttagaaatacctaagggaacagtgacnttttataccactattaaaaatgtagttcaggtaaaataattatatgtctgcatagttgggaaaggacaaagaaattgacngtattccttcccaaacagagcaccaatgtggccctntctttctctcttatttattggcttacctttttccccactagaatatatgctggcttgtgtgtagccagcattggctctatgactaatttccattaacacagcttggttaaaaccatataatagccacaatactctgcatcactatattaatagcaaattgaaaatttttttagtganagaaccagccnatagtttggaaaaattagtttggaaaaatttcaaaactaattatactttttggccagttttaaaatattggggaaatgaactangtatnggttaatttcacngagaatggagtttaacntatcctggatatattagtgatgagtcttaatgccagtgtttcatgagactgtttanttcagcttaactcccaactggtgncatttgatcattactcg

SEQ ID NO: 541483 - DNA, 806 bp, Homo sapiens
  misc_feature (353)..(353): n is a, c, g, or t
ggcctacaaggctgccgctatgggtcatgtcgtgcaactgggcatcgcactgccgagtgagctaggcaatccggggtgcgacggcgccacgattcctataattggccggatgaatacctttgatggggggttcagctatgttggcctgtgcaggaatctcatatttcctagaactctggtaacccattggtcctacgtgattgaccaaaatgcttggagacttcaacctgatgtgaccgacccaatgaagcgtccgatgtcgagtaatgcctccatgcatcattcttaggctgtgtctgctctagctctccattggactaaggtgacagtctcctcgaatgtgaatgtccatnctcagatgacttgtctcggccctttgatcaggggttagagtctctggatagtttcctatcagaaggcgttatcattatacgttccctacgcagtgtcccatgcatcactcagaacaaattattcaacctatgttatactgtgatgggtggctgcttcgtattcactcgcaatagagactcctgtattgttcctcccataggatttagctcgttaccccggaaatgctatctggtcacggctgaaacagtaagtggctcgagatatcgccggaagtgactgcacgacgtagtagtcgacatgcttgttttcgtcattcgcgctagactttgtgtatgcctttttgggtggatacatgctctgtgtcatctgattgctgaagtggggcggatgacacttacaatttgatgtccaagggataacctgatggttccaagttagaaagaggccagtac

SEQ ID NO: 541484 - DNA, 852 bp, Homo sapiens
atgaatggtgaggagcagtactacgcggccacacagctctacaaggacccgtgcgcattccagaggggtccggcgccagagttcagtgctagtccccctgcgtgcctgtacatgggccgccagcccccacctccgccgccacacccgtttccaggcgcgctgggatcgctggaacagggatctcccccggacatctccccatacgaagtgcccccgctcgccgatgacccggctgttgcgcacctccaccaccacctcccagctcagctcgcgctcccccatccaccggccggacctttcccggaaggagccgagcctggggtcctggaagagcccaacagggttcatctccctttcccgtggatgaaatccaccaaagctcacgcgtggaaaggccagtgggcaggaggtgcatacgcagcagaaccggaggagaataagaggacccgtacagcttatactcgggcccagctgctggagctggagaaggagttcttatttaacaagtacatctcccggccccggcgggtggagctggcagtgatgctcaacttgacggagagacacatcaagatctggtttcagaacaggcgcatgaagtggaagaaagaggaagataagaaacgtagtagcgggacagcagtcgggggcggtggggtcgcagagccggagcaggattgtgccgtaacctcgggcgaggagctgctggcattgccacccccgccacctcccggaggtgctgtgcccccagccgcccctgtcgctgctcgggagggccgactgcctcccggccttagtgcgtccccacagccctccagcgtcgcgccacgtcgaccgcaggaaccccggtga

SEQ ID NO: 541485 - DNA, 807 bp, Homo sapiens
gggcgggcgtgatctagtctgattgacggaggacgctcagtgctgtgtactgaggatgagcgagtggtgagacgtctgcgagcagcggtgagagagagcccagagatgagcgctcgttgggacgtggatgatcgattatgtgtgaatggatgacatttgccatgaatagagataacctggcagggaagagagaaagatatggcataggtacctgctcttctgcatgttgcggggcaggaatgcactgccgcagcggcgtaccaggataacgtgctactgtcccaattgggttggatgcgcctcgatgtaacctccaatgaaatgatgactacggtcaggtacacaaactggccaaagaagctgcatgacctgatttagccatcagatatatgtgtgcctatcgatactcaatacacgcgatgatcaacagagcagatcggaacctctcatgtaatggatcccgtgggtgaatgcgctcgataatctaaacacggtggtcccctgggagttacatccacaaggtgctagttgggccgctgcctggcgagtgctgtagatgacaagggctgtctgtactggtgctacagcccatgtcgctcgtgttgaaaacatgggcctatgtcttggactagccatgatggctatcatggacgctagttgaagagcgtgttctttccgggaaacattaaagaaacattgctgaggtgccctggcagatgaggctcatcaaatgcgtgccaaggggcttcctcgaaagtccctaatgccatttaacgaaagaaaggacgagctggaagcgtgtgggca

SEQ ID NO: 541486 - DNA, 375 bp, Homo sapiens
cggcacgagcaggaaagtacctgtgcagatgctggcacttaaggcctatggagaaaacatcaggtgttatagagagtctgttgtagggaattaacggaccactgagttaagtcaaagaatggtctatttgagtttaggtggtctggtttatggggaccctggctaaggagcatactccaaattcttggtgttaaccctctcagtagtcataagaatagtctccctggtgcactgtattctctcaaaggttttaaatgtttgcatgaagccatctttagaacgtcagatggtctctcttcaactggaatgacaagagctgaaagaaatgtgtgaccacgaggacaccgaccgatgagtgacatgctgagctggtcc

SEQ ID NO: 541487 - DNA, 156 bp, Homo sapiens
aggggggcgtccctgagccgaatcttcacttccattcaggtaagcggagatctccgtgagggctgggagctttgtggtctcctctctctgcaatggtctcatcgccgcccagctgctcttgtactggaatgcaaagccaccccacaaagagagcgt

SEQ ID NO: 541488 - DNA, 118 bp, Homo sapiens
ctgcgaagcgcttcttatagctgatggattccagcagcctgaggcaatagaatttagcagatgctgggagaaatggagagctaaggaaaatgaaggaactgagacagagtgaagggga

SEQ ID NO: 541489 - DNA, 321 bp, Homo sapiens
atcttcgctatatggagatatccttcgttatgtatccgtgtgtgttttctttgtcgctcgtgtccactgggctgtggcctgtcgtttcacttgcaggtcagggtttagtccgccctgtcatctgtagcagtatctctctcaccaaccacgggcatggatggctcagtagcaagccatctagacatcgtgcaaaactgatttgggcgccaactacattacgtaccgccttattagcagatgtggtcctccatcactgcttccgtgagaattgatgagcatgaatgtgacctgacagatttcggccaactggtgcccttcccc

SEQ ID NO: 541490 - DNA, 101 bp, Homo sapiens
ggcagtggttggtgccgacgcagcagataaatggagggtgtcgaggagatcagatgtgagccccgagtagcaagatgtgggccaaaaatagacactgggca

SEQ ID NO: 541491 - DNA, 190 bp, Homo sapiens
acgctcggtctaccacttacggttcgctgtttgtggcacactcctgggtcctgttctgcagacttatgaagcctagacggaagaactgtctcacttgccagcaccatcttctctggaatcccgagttgctatcatctgataggattatccctctgtacactgcagactggagaacacaattatgtttaaa

SEQ ID NO: 541492 - DNA, 686 bp, Homo sapiens
tgagacgcggccccggcggcggcggcagcagctgcagcatcatctccaccctccagccatggaagacgaggaggaagaagaggaggaggaagaggaggacgaggacgaagacctggaggagctggatggtgcttggagatggaatgccctgccgcctgtggcttgtcctgctggccccatgtgcccacctgccccatgcctgcctggcgcgccctctgatggacttctggaaatgacttctgtgcctgcctggctgccccgtgtggacccgctgcctggcctgctccccgccgtcgcccctggaggctggcagccgtcttgtggaccctgagccctggtgtctgtctgaccgtgccctgcgccatccccgctgtcgtgctgccgcagtctccgccctcacctcgtatcactcgacggacgactgatgcctccggccctgggctcccacacaaacaacacaacgaagacaagaagaaacaacagaaacaaaaaagagaaggaacaaaagaaaacaagaaacaaattaattacaatcacacccgccacacactaactacaccaccacacaccaaacaactcacataacctcccatccacactcaccacccaccaacacaacacactaccacaccgacacaataacaacaacaaacacacacaaaaaaactaatccacactaaccaaaa

SEQ ID NO: 541493 - DNA, 436 bp, Homo sapiens
  misc_feature (65)..(65): n is a, c, g, or t
tttttggggggggtttcccttttccccccccgtggggagggatgggcctttaaaaactggggttntttaagggcttgggcccggggttttccccccaaggagttttggtttttttggttcagggggtcccaagaattcccccccaaaagtttttttttttgggtttccgggggggggccccccggggggccccccccttttttttttcccccattttgggggggggcccccgggggtgggaaaaggggggccccttttttttgttgggggggccccggggcccccccctgggtttttcccaaaagacccttggccggttggggggggtacccccccctttttttttttttttttttttggggggggggggggggccctttttttttggcggcccccttttccccccccctttttttttccctttttccccccccca

SEQ ID NO: 541494 - DNA, 376 bp, Homo sapiens
  misc_feature (207)..(207): n is a, c, g, or t
ttatggaaatctttagcttttaatcatttttaccaatttgaacagtttaataaactggttctgctctcttctgaatctcatgcctttggcaccttggtaggtgcaggaggagctcagtgcaaaaatcactttggggcctcattaaccctttagagacaagctttgccccaggctgcggacaggacagatgcttagataaggttgaanccagttcagtctctactggattagcccactctccccttccccacattatttagtaataaaaagtaagttaaaacacccttattatttagctgttaagactataatgaaactgcgcaaatctctctggaaccatgtgcccaggatatccagctatttttataatctaagc

SEQ ID NO: 541495 - DNA, 996 bp, Homo sapiens
ttgggctgctgttaaataacttaaaggggttgatgtggggatgtcacaatggtgaggtattgtttgtgctccaaggtgttcttcagttgccatcctcaaagctggttagtgcatgtggatgtgtaggtgcagatgtggtgttccatgttttcttccagtgacaggtgtttatgtgtgaggtgtcccaggagatgccccaggaattgagtccctcggtaccatgggacaacacaacaattataaagaggggtgcttcgtgcccaccccctgtggagcacatatcccacatgtgtccagacatagaatggacaacatgtggatgcgccaggatgtgtgggccaattcttggctaataaagaacagtgcggccagttattccaagagaagccacatatttggcgcgcttggggtgacactttattcttctattctggggcgcaagatcccctaattttgcgcatagacaccccttttcacttccttctcacacacatctggggtgagatctgtgggaacgcccacatagtggcggaagggtgtggcgctctatatgtgcgtgaggcaagagagggccctcctggggtgcccaggggagggtgaattcgtgctttcgacgtgcttgggggaagtgtggggtgtgcgccaacacccatgacgtccctagaatgccccccttaaggtgggggaatgctgcgtggtctattgcgggagtgagaacaaagcaatctcacaagcggggggacaaacaccgtgtatccaggggggggtccaatcaccccacacaatgtgggggccactgggggtgtgtttttgtgctccccactgttctgtgggagtgcctttgtgtgtgcccactctttgtaggtcgccaagggcctcgactagcacgggggtcatctaacgccgcaaggggtgccctgggcattgtggtcctttgtaaaccactttttttgccccatgacacaagtgtggcttgggtgggggtgtgatctccca

SEQ ID NO: 541496 - DNA, 368 bp, Homo sapiens
acctggtatctctttagaaacttctccatttcatccaggttctccagttttgttgagtatagccttttgtagaaggatctgatggtgttttggatttctttgggatctgttgttatgtctcccttttcatttctgattttgttaattagaatgctttccctgtgccctctagtgagtctggctaagggtttatctatcttgttgattttctcaaagaaccagctcctcgattggtgattttctgaatagttcttcttgtttccacttggttcatttcgcccctgagtttgattatttcctgccgtctactcctcttgggtgaatttgcttccttttcttctagaccttttaggtgtgttgtcaagctg

SEQ ID NO: 541497 - DNA, 168 bp, Homo sapiens
  misc_feature (9)..(9): n is a, c, g, or t
gccgccttngctgcgcccctttcccgctgctgcccccgccagctcccgagcgcctttcatgcgatcaaagttacggcgagacggcgaagccaacctgatgctgaaagtgatcaccttggcaccactgtcttcttgtggatctatctcatcaaacaacacaatgaagat

SEQ ID NO: 541498 - DNA, 239 bp, Homo sapiens
tgggcgcgggccgacgaatctcgagtgtcgctgactggagcccgagatgatgggctcttctcttggggatcccaactggttccctatgcaatccatgtagaatcctcagaatttgtcgtataaccagctgtacgagggcgcgaacgtgatcggattacagatggtgaccatgcgcgggaggctctgcaggcaggcattgccatggttacgtgatgctatgctagcattctctgagccca

SEQ ID NO: 541499 - DNA, 425 bp, Homo sapiens
  misc_feature (159)..(159): n is a, c, g, or t
ccccttggcagagctccccttggcagagctccccttggcagagccccccttggcagagctccccttggcagagctccccttggcagagctccccttcgagagctccccttgtcgagctccccttgcgagctccccttggcctcccaaagtgctgggatnacaggcatgagccaccacgcccagtccttttaaaaaatcatttgctttctaagtgtttcattattttttctgcctctgtctctggacagactaggacgacagatatttgccaccacatctggctaattttaaatttttttgaagagaaaaaaattttgctcaggctggcctctaactcctggccttaagcaatcctcccaccttggcctcccaaagtactggaatgacaggcatagggacactgcatccagcctgagtttacaaat

SEQ ID NO: 541500 - DNA, 149 bp, Homo sapiens
gagagatgtacctgccggttcaggacgcccgagagcagcgcttcgagtactaacaaaagaatatccagttcgcacatgccaataagcccaaaggccgcaaggcaaagatggcctttgtcaactctgtgggcaagcaacttgtgacgtcc

SEQ ID NO: 541501 - DNA, 161 bp, Homo sapiens
ccccttggcagagctccccttggcagagctccccttggcagagccccccttggcagagctccccttggcagagctccccttggcagagctctaaataaggcaaatgattactgctacaaataagttaactattagtagcagtaatcatttgccttattaat

SEQ ID NO: 541502 - DNA, 873 bp, Homo sapiens
  misc_feature (154)..(154): n is a, c, g, or t
  misc_feature (176)..(176): n is a, c, g, or t
  misc_feature (187)..(187): n is a, c, g, or t
  misc_feature (190)..(190): n is a, c, g, or t
  misc_feature (219)..(219): n is a, c, g, or t
  misc_feature (230)..(230): n is a, c, g, or t
  misc_feature (236)..(236): n is a, c, g, or t
ggagtcagtcagagagccttgggccagagttccaggggctctgggagtggctgtcagttctacagggcctggagctgatacgaaaaacctcccttctttcccaaatggtccccagcttccccgttcactgaaggccctgcagtcgggaacagtnaggactttgcacccagttgttntgggtgtttgnccnacccttcctcttgtgtgattcatggaccngcagcattgcntcaccngtgagcttttggaattgaagactctcagggctcacccgggaggacctgctgggccagaatctgcattttaacaagatgcccaggtgatttgcatacacgttcagatctgagaagtgctggtaggagaggctttaaggtggtaattagatcttttctccacctgcaagaatcttagtttcttcatgttaaatctattaactgtggcaatggcatggggggttataaaacaaaacaaaatccttacatcaggaatgcaccctggcgtgttatggatgtgggtgaaatgaaatgtctggaatttgctttaaaatatcctaaaatagcaagaaggaaaagaaaagtgggtactggaatgagattggcgaaatgttgacaagttcttgcagtgggatgatgggtgcatgggggttcatggtataattctttccctgctttttgtgtatatgggaaatttccataatgaaaagttagaggtcgggcacggtggctcatgcctgtaatctcagcattttgggaggctgaggtgggtagactgcccgaacccaggagttcaagaccatcctggacaacacggtgaaaacccatctctactaaaaatgcaaaaattaggcatgttgacaacatgcctgtagtcatg

SEQ ID NO: 541503 - DNA, 102 bp, Homo sapiens
cttgctatcaccttgaacaatttcggccagttgctgcttggaacatcgggagagggtttccctcttatgagcgggtgggaaggcaatgccacacatccggga

SEQ ID NO: 541504 - DNA, 1568 bp, Homo sapiens
  misc_feature (100)..(100): n is a, c, g, or t
  misc_feature (819)..(819): n is a, c, g, or t
  misc_feature (1143)..(1143): n is a, c, g, or t
ctgtttattatggcggcatcccttctcctcggagagatgggagacctccccgcacccgtccagaggtgtgtcgtgccaccagccgagagaatacgtgccngctcacgggccgtttgtgtggttaatatacctcctcggtcgcctgcggctccccccagccggtgtactccgtatatttgcaccccccgggggtcccctccttattaaaatggggtttctccgccagaggcgggcccccctgggggtgttcgcggcgacaaaaaattattctcgcggcgcccaccccttcgaggggggaatatattaggcgtgttgtcctttaaaggggggattagccccaccccccgccgtgccgaccccccccccttctctttaaggggacaatatttgggggggagatgttttcacaactagtgttgccctcctcactacaaataggagtctccacctggtaaacccacaaaggttttgtcttgtccccacccgtaatatatttgtgctccctcggcacaaagatgtgttctctcttttccccatcgtgcttgtgcacaccactggtctcttcgtgggaagagcgcttataaaaacttatcccgctcgcgtatggatgatcatcttataggtgcgcccctcttctagtaaaagggcccccacaacaaagcctccttggggtttttgttttataacatcgcgcagcactcatatcagcgagatggccgctcttcccaccgcccgagcattttttatagcgcgaccagggggaaaacaccctctctcctacacacaaagaggcgggactccacgcacacacagcttgtngtctcccgcccgcgttttggtcgtctccctgttcacacccttcccccacatctttgctacacaacccacgcgagagtgttatacaatagagattttgtttcacattcgcccacacacttctctctatatcacgtctctttcggctatatgtatatagcgctcttggcgcttcgcacagcacacacatcgagatgtaacctctctctctcgctctttatccgcagatgtttctctcgtttgtgtgactcggcatatattcaccactctctcggtggatctgccctccactcgagatatctctatagagagtatatatatagaatntgttcccactgggccatctatagagatcttatagagcgagaaaccccctctataaggagacgctgttcccacgcgcgccaagattggtgcccgcagcatatatggagaccacgcgctccctcgttctccccacgcctctcccacgctgagagagcccacaatgccacgaaaggccacagcgtgaattttctgcacattttccacacctgaagattcccacgcttcacttctcacttgggaattggttaagacacacgctgggtccacgcccccgggaagggccgaaccacgaagccacggaccgcgggccctgcctcaccctggaaagccccacccacctccacggaaactccctcccctagcccagggaacccctgagggaccccgcctgtgagggatggtgctatctggccccagatactatg

SEQ ID NO: 541505 - DNA, 903 bp, Homo sapiens
  misc_feature (898)..(898): n is a, c, g, or t
cctgcatgtgtatatatgtgaaagggtcagcatgataaatgtgactgatgttatctgtgtattagaaaaacacaatcggtagtatataaagtatctatcactttgtgcggatcactttttacactcacataggtcggtatcttaatagttgtagactaatgtgaatgtcaggctgttcagccgagaagcagaatgagtggaccagtgcaagtcacttcacgtgatggaaacactgaaggaacagttaccctgctttgcctcgaaagtgtcatcaatttgtaattttagtattaactctgtaaaagtgtctgtaggtacgttttatattatataaggacagaccaaaaatcaactatcaaagcttcaaaaactttgggaaaagggtgggattaagtacaagcacatttggttacagtaaatgaactgatttttattaactgttttgcccatataaaatgctgatatttactggaaactagccagcttcacgattatgactaaagtaccagattataatgccaggaatataatgtgcaggcatcgtggatgtctctgaccaaagtgtgtctcaaaatattattctttaccttaaaggaaattaatgtttctctggggtgggggcccggggttcaaaggtggctgaaccaggtgatctagatgatcacattatgggccctcctgatggaattcatttgcctcacttctggcgtatccgtttaactcgacttccactggtggtttcccaggcccttggtgccccggtgggaattcttctcctcaccaacatatacacatctgtgccgcgtccacggcttgtcaccaggggagcaaaagacacagcgtcctttgcaaactgtaaaaagccgctcgccgttcgcgcacatcacacaccagtagngtggt

SEQ ID NO: 541506 - DNA, 759 bp, Homo sapiens
  misc_feature (1)..(1): n is a, c, g, or t
  misc_feature (28)..(28): n is a, c, g, or t
ncctgcatcgctgcgtccttcgtgtcancggggtccctctctcttcctcgtcgtcgcagaagaagctttccgctctgcttcgtccacttcctctgctgcgtgtgtggcacgtcttttctttcctctcccgcaccctggctgttctttcctcgtcgtctctttttcgcgccactgcaacatcctcttccgctgctcatgtgcgtcgcgcggtgcataaaggacgcccccgtgctgatgtgtgcggcagccaccacactgcgcgtggcgggcgttccccccccccctcgtctttctgtgaagatcaaatgccatagcgctctcttggtgcccggctccccctctgcattgtttggtttaggggtgtgtcccccctctcccacatttctgtgggctcgctgtcccccctccccgcgctcgtgctcccactctctttcgcgcctctcaccgcactggctgtcgaacccgtctactcctctccgcggtcccctcttgttccgcagcgggcgccgctccggtgcttcacccacacgtcggagtggtccggcgcgcaccagcgcccgacttgtgctccactgggctgccccctccccgctgcgggacgaggttctggtcccccggcgaacctgcggcagcgagtggttgcgcctggggcgacgcgcaccaccgccccgggcggtacgacccttcggcggggagcaagccgcccgcgcctgccagcgtagcaagacaacaacaggacacaacaattagtcagaacaa

SEQ ID NO: 541507 - DNA, 175 bp, Homo sapiens
attcgagctcgtacccctcctagcagacgcaggtcggaccccacattgccgtggctgtggtgtaggccggcagctatagctctgattggacccctagcctcagaacttccatatgccatacctgcaaccctgaaaaagaaaagaaaaaaaaggttcctttgggtttgcgtctggt

SEQ ID NO: 541508 - DNA, 181 bp, Homo sapiens
ctttcttttcttttccttcccttccccttttcccttcttttccatcctttttttgtttctctctctctctccctttcccttccttccttccgtccttccgtcctttgtcctttgtcctgtccttcgtcctcccctccctttttgtataatttaataaaaaaatggtcgcgcttttgtttta

SEQ ID NO: 541509 - DNA, 971 bp, Homo sapiens
  misc_feature (971)..(971): n is a, c, g, or t
ttcaacccagcaatcccattactgggtataaacccaaagagatataaatcattctattataaggatacatacacacatatgttcactgcagcactattcacagtagcaaagacatggaatcaacctaaatgcccatcagtgatacactggataaagaaaatgtggtacagatacaccatgggatactatgcagccataaaaaggaatgagatcatgtcctttgcagggacatgaatggagtttgaagccattatcctcagcaaactaacacaggagcagaaaaccaaacaccacatattcgcacttataagtgagagctgaaagatgagaacacatggacacaaggtggggaaaaacacacactaggggtctatcaggagttggggggagaaagagcatcaggaagaatagctcgtggatgctaggcttaatacctaggtgatgggatgatctgtacagcaaaccaccatggtacacatttacctatgtaacaaaccctggacatctggcacatgtacccctgaatttaaaataaaagttggagaaaaaaaaaaaacgacaccgttaattgtaccaaacaaaattgtaaggcacctacaaatcaatccaacaaaaggtagatcccatttaattaagaaactattagcagatgcagtggtccacacctgtattccagcactgggacgtgggactggtgattcactggagccaggagttcgaacaagctgggaactgggagactcctctctgtttaaggtacaacaagccggtcgggtggcgccgggtcccagtatcagaagcgagcggaaacggtggcccgggaagtgacgattgaacgcttgctccccggcggcagctctcttctctacaaaaagcggagagtgtatactgtcttcgaccagcggtcacaaaacaaacggcggtcggcgacctagaaagatagggactgacgaaatgtttatcaaggattn

SEQ ID NO: 541510 - DNA, 247 bp, Homo sapiens
gaggctgcggtgtctgctgctattctccgagcttcgaaatgccgcctaaggacggcaggaagaagaaggacgctggaaagtcggccaagaaagacaaagaccagttaaccaacatccgggggcaaggccaaaaagaggaggtggtccaaggcaaagttcgggacaagctcaataacttagctttgtttacaaggctaccattataaccttttaaggaggtccaacctttaacttttaccccactttg

SEQ ID NO: 541511 - DNA, 751 bp, Homo sapiens
tcccaaaaagccaaagccagttttatttcaacaatcatctttattacagtaggatgatggtccggggccaccagcctaaacctgtgcagccttagaaaaaacctgtgtcaacagggctgtgccttcccttctcataaacagggggctccagccaccttccaggggcattccctttgctgcattttccccgtgcgtggagagatggggcaaaagggcacaacggggacgagagagggcattgaccccacccacaaggcatatagcagcctccttggccacaaaggactcctttggccagttagcaaaaggggaggaaaacagcaaccaccgagggtttaccaccactttggtggcaagtggccaggaccccattaagcgtcctctaaaagtgggtgcctcaagagcaattaactaaatttaaaagtgagccttcagcagcaaacgctgtcaattcaccacaggaaaacgctgacgcaaaaagcaaacgcaaagaggaattaaatagcatcactcgggcatgagcgcctaggccccttccctcataggagcagcttgtcagccagggactacaataggggccctccaaagatcctgaggaggagccaccttagatatatcccccctcatagtggtgtcataatcatgcattaaaattaagagggacccaaattccaaatgtgcaaataacccttagaagggacaacccccctttagaaggccatgaagcattggggcagtggaaacatgagac

SEQ ID NO: 541512 - DNA, 475 bp, Homo sapiens
  misc_feature (328)..(328): n is a, c, g, or t
agttcaggacccgggttgggtgctggtgctggaggtggatatggttttggagtgtggtgccgttagtgaatttggtttctggggtggagctggtggtggtttgggctcggtggtggagctgtgtttggagtgtggcttcggtgaccctgggtttcttgtctgccctcttggaggtatccaagaggtcactgtcaagccagagtctcttgactcccctcaagctgaaaatctgagcccagcatccagagggtgaggaccgaggagggcgagcagatcaagaccctcaataataagttgggctccttcatcgacaaggtgcgtgtcctgnagcagcagaacagggttctggacaccaagtggaccctgctgcaggagcagggcaccaagattgtgaggcagaacctggagcctgttgttcgagcagtacatcaacaacctcaggaggcagctggacagcatcgggggggaacggggc

SEQ ID NO: 541513 - DNA, 232 bp, Homo sapiens
gcaccgaggcggaagagccggcgcaacagaaacttaagggcgacctggttgcttccttctcgtggtcatcgtgaacgctgctgcaatgaacatggtgggtacaaatatctcttaagagcccgggggttcaatgctttgagatacatacccacacatgggattactggataataggcctgccattcccatatcctgggcccataaaaggaccagctgacagagcaatatgaat

SEQ ID NO: 541514 - DNA, 172 bp, Homo sapiens
tgtctcacgtttgactcacgaacaggtcggtcgatggaccttgccctcaagttaggagacaggccatgcctttcaagtgcatgcgctcactgatttcatcctcaagtttccgctacagtggcccaccagcacgtatgtccgcaccagcctggccgtaaggcagacatcaata

SEQ ID NO: 541515 - DNA, 127 bp, Homo sapiens
ttagggacaggatttctaggatagtcagtagaattagaatggtgaagatgataagtgtagagggaaggttaagtggtgtctacggcaaaaggtacaacagtatttatggctaaagtgaactgcacca

SEQ ID NO: 541516 - DNA, 473 bp, Homo sapiens
cactgtatttgttgccaggcgcctaatccaggctgcaaattaatacctagtagacaagaacatctccattttgaggctgaataaaggtcatggccctcatcccagacagtagttcacaaacagactcgactgggaccgtgtctttgctggctatcgagctggacaaaccaacagcacagaaccttcagcctggccagtgagtggctgtgcctttgtacccatggcaagcacgacacccatcgtgcgaggaaacaagtgatggagcttagcacgggcactgtgtcttctcaggacgcctcagcagctctctcccatgtcagcccttcagcagggaagacccaaacctgtcaggaggagactgtcccagacctgggctcccacgcgatgtccacaattactcaaagatgcaggacgcagcctccttgaacctgccatttccacaggggccagaggaggggggtatacacaaaagc

SEQ ID NO: 541517 - DNA, 1836 bp, Homo sapiens
ggatggcggagctggacgggtggaggttcgcggctctaacggggcttcctacaagggattgatcgaacaggatgttacatgaagactcccattacagttggtgcttgtgaagaataagtgtggtaacgtagaacggccaggtgtcgcgatgttgagagtgcaagtcagcatgaccgaccgaccacctggatataaaaaacagaaattgaggtggaatggacgaactgaacgctggacagcgatactaccaccaaggaacgccaagatgcacccaaagcagacacaaggatgcggatgagcggacatccggccactacaacgtcccgagagctgacccgacacgcggagcaacctccccagccgaacacacgcacaccacgtcacggcccatagacggaacgagctctagcactcacaccaaagcagcatcgcgccacggtcgcgccacgctgaccgcgactgaccgaccgaaacggagagctccaccgcatccaaaccgcgcacagcggaaccacaaccactgcgctcgacacgacaaactagagaggcaccacgactccggactaccggaccagctcgacgagcaaaaggcgaggcgaattgagcggcaccggccgggtcacggcgcaactccgggtgcaaagtacgcacgggggcagtcggcaccgacctgaacatccgcaacacgacacacgcaacaggattcacactcggcacagagcccacagcacctcgcgaacccgcacgcgacccacttacgcaaccaacgtacaacttagccgcaggcaagcacgactcgcacacccacacacccccgcccccatccacgccgaacacaccccaccaacacacagcaccaggccaccaccacaacagcgcacccaacgccaacgcccgaaccactggccgcccatcgcgtaggcacacacgcccaccaaacaccccgagagtgcaccggacgcgaggacaacggaccgcacagacaacacccacgacagagcacccgagcaacccaacataggcgcacacacaatagcgcccacaacgccacatccacaccacagcaccacacacggacacacgcgctacgccacccggcacctctcacacgcagccccatcctatacaccaaccaccacgccctcggccacaacaccccagacgcgccagccacaccacgaagaccggccaacagcaaccaacacaacacagcagaccacccaaccccgcactaaccaaacacagaacaaacacaacactgccgcaccggcccaaacgcccgcaccacgccaacaccaacacaaccacgccgcaacacgcggcaccacacaccgcaccgtcaccgcacaaccgcgccgccaccaccacgccgagcacacgcccgcgacccagcccaacaacagcacacaccaacgccgccactagtcacacgccacgccacaccagcaaccaccccgccgacagacgagacgacacaggcaaaacgcaacagggacgcacaagaccgacgcagcagagcacaagccacacacaacacgacagtcaacctacgcgtgtcgtacccacgccacgctcgcgtcccacgcagtgccgccggacgacgatcagcaggcacgagcagtcggccaggagaaacagagcgcatgaacctgcgacggaacataccttactgcgcgacaccccaccgccgacgcaccacaccggcgcgacccaccaacacaagcccacccgtcgcgaccccgcgcgccgccgcccacaccaccccagcgacacagcagaacacaaccatccacactcgcgccacccccacaccccgccgtaccacaccaccaccta

SEQ ID NO: 541518 - DNA, 1105 bp, Homo sapiens
ggccatttgtgaagagacgaagactgagcggttgtggccgcgtagttcgacctccagcagcagtgcggctatctctgacgcaggaacccgggagtaagggagactacagatatgctgagatacttactagtctaccctactccctaactaagtagagatagtggtttgatactaacagctaacatatacgagctttgtgtgagacaaccttaaccatttcaaattacgaatgggccaggcaatgttaccagacaatgatagatacctacgttccataggaactaccctgtgtaatttcccttgggaatacttcatatcagcttctttgagtggtcatcggaaatactggatgtgtgaggcaattctatttgcgaagtgaatgggcaaacatttgtggtgctaggctcttggtatcataaaggagggctacttggccataccgtaacagtactagcatatcctgtacgacgacaattggtcgccgaggctatggctggtaaggcgagggtacgcacgggactgggggcatgacagtgactttggctagggccacggtctcttataatacttacaccttgggctgcgagagccaaatagtggaacccggagggaaaaatgccacggtgttgacaacgattctggcagcgcgagatgtacgggcgtcctcttttgacttgtgactatagacttttcaacgggactattcatgatcagggatgttacagttacccagcacgtgtacctcctcctcctccctaattgctccggggctggtaagttgccccctcgaaacacggtccagcggtgttactcacgggaaaacactttcacgaacagtgggcacaacagtgagctttcaatttccttaggagtggggacacccgggggactctttcccaagtccgggcaacagctgacaagggcagatggaccgttcagggccatcaacacagggacgatgacaccagaataaaccacaaaggtgggctttctctcccggacaaccgggcaacaacgttcgcaaagggaccgagcaaccaagcagttcaggcttcaccacttgatccgtcccgaacacggcacaggagaatccgtgacaacgctg

SEQ ID NO: 541519 - DNA, 167 bp, Homo sapiens
  misc_feature (154)..(154): n is a, c, g, or t
  misc_feature (161)..(161): n is a, c, g, or t
cggctcactgcaacctccgcctcccgggttcaagtgattctcctgcctcagcctcccaagtaggtgggattacaggctgccctgcctacccactgcccccagtctttaactttttttggctacttctcttaagttagacgatgcgggtttcacntatgtcntggcca

SEQ ID NO: 541520 - DNA, 1198 bp, Homo sapiens
  misc_feature (315)..(315): n is a, c, g, or t
gctggatgcttccctgctctttgcttctgggaaacacaatcaatggcatgaagctgcgctgtctccgggcttgtcgtgatccggatctctgtaccatatgtatgagccaattgtgcgtgcatcgacaatcatcgcgagagtaatccgagccataccagaaagacattcccgcagccacatttaaagagttcacacatgcttacattggctggtgccgcaagagacttgcttgggagacaggacaggaaggcaagtgatgggaatgcgagacttcaagttcacaagatatacgatgtcccgcatatgcgttagaangaggcaacgtgtacagggagggattgctatgcctcctcggtcccacgatacggacagatgttctattaccaatatcctcagaccatcggacgtgcgtgcactagcgtgcagggtcacacgagacctctacattttcaattcttgtctcacttccgaatctgtccatcggtgagattgcatagttctcacgtgctagtgatgactcatcgaaactagttgaagcactgggacgaattgccggcaatcgattcgagaagttgagacctggggatggtatcccaagcgagtttcgcccctagattcgcatttggtcgggtcagtgtaaaactttgccaggcgagggtgtacaaccaagtggttgttagcgagacgatcaatcgccatgggacgcacaggttggctacgaagggggtccagtgcgtcttattgcacgtggtttggactgatcccgtcaaagtcacccgcattcgtcccctgaagcagtcagcttaaaaatttagcctggccctttacccccaaatccccattttggagagaggagcccaggcccattccgaaggtttggttacgatacccaggtatacggatagaattccatgaactttcgcaaggtggattgggagatccatgggggagtgggttggggcaatttcggtacttacttcattccgctttaatgtttaaactcgttagcgcattggcgtcccttacaaggggttcccctgaggaaggccttcacatgtggttgacgaggagcacggggagcaacaaagtggattcgggaaagtacacaaaagaaagggcggaaaacaaacgcagagatttatttgaatggaatttctaatcataggccagtaattttttcaaattggaaaacctagag

SEQ ID NO: 541521 - DNA, 226 bp, Homo sapiens
ggctatgcttagcctgggattggtaaatacattactagagttaattagcatccctcggtctttaactgttcatggaaaaagccttaggcgtagcataaggtcacagattgcccagttaatgtgaagttaccaaagttaccaactacttgtttatatcagagccttgtgaacataaattttacagtttgaaactgttatcttcggttgtcccttctgtcgtcttctc

SEQ ID NO: 541522 - DNA, 314 bp, Homo sapiens
  misc_feature (1)..(1): n is a, c, g, or t
  misc_feature (10)..(10): n is a, c, g, or t
  misc_feature (45)..(45): n is a, c, g, or t
  misc_feature (51)..(51): n is a, c, g, or t
  misc_feature (65)..(65): n is a, c, g, or t
  misc_feature (88)..(88): n is a, c, g, or t
  misc_feature (110)..(110): n is a, c, g, or t
  misc_feature (153)..(153): n is a, c, g, or t
  misc_feature (162)..(162): n is a, c, g, or t
  misc_feature (164)..(164): n is a, c, g, or t
  misc_feature (180)..(180): n is a, c, g, or t
  misc_feature (183)..(183): n is a, c, g, or t
  misc_feature (193)..(193): n is a, c, g, or t
  misc_feature (214)..(214): n is a, c, g, or t
  misc_feature (229)..(229): n is a, c, g, or t
  misc_feature (257)..(257): n is a, c, g, or t
  misc_feature (278)..(278): n is a, c, g, or t
  misc_feature (291)..(291): n is a, c, g, or t
nctttaaatncttctcttaaggttgaaggcacaacagttaatggnctgtantgttgctattccgntggctgacatgtttttgataaanctttaacaatcctgctactaantttggcggagagtgtttgccaggtttcaatgtgggctgcagcntgtttgtgncntccttctctggtttgncantgtaatgagntcataagctaaattttccagnaaagaattttgtttnagattatgcctcttatctacttgagagncaacatgtcttttcaatcatnggattgacacatnaaaaataaagttatttcttaatc

SEQ ID NO: 541523 - DNA, 818 bp, Homo sapiens
  misc_feature (237)..(237): n is a, c, g, or t
ggggctttctcccaccgctttccgagcccgcttgcacctcgggatccccgatcccttctttatggcgtcgctctgtgctgtgggccgaagctggccgcctgggatcgtcctcagcgcctggggagtgatcatgtgataatgctcggaatatttttcaatgtccattccgctgtgtgatgtgaggacgtcccttcacggagaaccgatttgtgagaatgccccccagaatatatacanactttacgagcaagtcagctacaactgtttcatcgctgcaggctttacctcctcctcggagggcttctctttctgccaagttcggctcaataagcgcaaggaatacatgctgcgctagggcccgggcgtttccccgtccagcccctcctctatttaaagactccctgcacgtgtcacccaggtcgcgtcccacccttgcgggccctctgtgggactggtttcccgggcgagagactgaatccctttcccatctctggatccggccccgtgagagggctgaggctggggggctgtccgtctctccaccttcgtgtgtccgatctcataaagagaatcgggtctctcaaaaaaaaaaagaaacaaaaaagtgttgcggggccggccggaaagttccaaaccactcgggggcgggcccagaggtatgactggccagggacaggactcgggcgccaggctggttcccaaaaccggcgccggttgcccccgggccggctcgcaacgccggccccccccgcgcgcgggaccgacacgagaaccatcacgccaaacacgacagccgccaacaggcaccgccacgccac

SEQ ID NO: 541524 - DNA, 177 bp, Homo sapiens
tctttagagttatcccgctagagtctgaagtccttcagagaggattattatgcgactgtgagtgcgtcgtagttcgagtttgctatgcagaatagtaatgaggatgtaagcccgctggcgcgattatgattaatgatctgccccgggaaagttccagggctaccgcagctcgatatt

SEQ ID NO: 541525 - DNA, 528 bp, Homo sapiens
  misc_feature (35)..(35): n is a, c, g, or t
  misc_feature (70)..(70): n is a, c, g, or t
  misc_feature (99)..(99): n is a, c, g, or t
  misc_feature (104)..(104): n is a, c, g, or t
  misc_feature (115)..(115): n is a, c, g, or t
  misc_feature (126)..(126): n is a, c, g, or t
  misc_feature (312)..(312): n is a, c, g, or t
  misc_feature (314)..(314): n is a, c, g, or t
  misc_feature (337)..(337): n is a, c, g, or t
  misc_feature (339)..(339): n is a, c, g, or t
  misc_feature (342)..(342): n is a, c, g, or t
  misc_feature (463)..(463): n is a, c, g, or t
  misc_feature (480)..(480): n is a, c, g, or t
  misc_feature (502)..(502): n is a, c, g, or t
gaattcggccaaagaagtttaagggaggaagcttntttcccttttttaggattaacaaaacgcaagcggnagaagttggcctctgattacggaggaggntgacnggaccagttcntaagaagacanaaaacgcaggagatcagcaggcccaaattcgccatcttgaaggtgaggggagagagttcagacagtcgcagcgtcaacggatgagggtagcagtgaccccaaagacatcgaccaggacaatcgcagcacgtccccgagcatccccagcccccaggacaatgagagtgactcggactcgtcagcccnanagcagatgctgcagcccagcccncncantttgcaggctcccaactgggtcaccccagctccctcctcagctcctccagggacccctcagctgcccacgccaggcccacgccctctgccactgcagttccccacagggctcccccaacgnctcccaggcccctaacncagcgcaggctcccacagcgcntgttccccacacccacatccaacagc

SEQ ID NO: 541526 - DNA, 306 bp, Homo sapiens
gttggcgtgatggcaacctggtctgcgcacctgccctattacgttgtcgatctcttgttggacacggcctggacagacatgcgtccccacaatgggtcatgcacccacggggtgtccgtgcccttgacactcacttctatgcctcctaatgtttggacggaggtcacggcttacatggatcgctggtcacagcctgtgcttgtgagcccctgggttgtccctagcaaagttcattgggccccctgccttgtacccattcctccctctggcgccctgcacttgtttccccagttggtgggggtaccg

SEQ ID NO: 541527 - DNA, 1069 bp, Homo sapiens
gccaacatggtgtacaggcgctacgctggaggttgtgtagggtggtctatgtctcctttggacctcatgcacgtaaaatcggtcgcgatgttgatgtatatatgatcagaaacatgggtcattggtcgatggaccttgatctcaagtgaggagagaggccatgcctttcaagtgcgtgcagctcactgatttcatcctcacacgtttccgcgaaagatgcccaccaggaaagctagtgtccgagcagacggcctggcgatgcaaagtgctagaccatcattatacggagaatggtgccagttccagctacgagtgggggccaagaatgatggaacgccgagagataaggaggagccacacgatgacagattcctgatcgtattaaagttttggcggccaggaccctgatggaatccgcattgatcaatgaatgaaggttagatgcacagcttcggaagggcatctctcgctgaaagctactcccaaaagatagcaccctcggtaactaaagggttactgctgccttggttgcttggctcgcttgcgtggttgcatgcatgttgctagcatggttacaaagtttccagcacaacaatgatctacacgcccgtgcagtaatatatgctctcggactagtaaggttcctggccgaggacagtctaataggaccatatagcagcagtctgtggcagtaggctctgaatggttcaaaaatgctccagcgcataaagctgctgttccataggcatcttggcatgaaaggtttacggggcatcattaccagcaaccagggcttttgctgtcacctgccacccaggggggcgtctaaaagaaccgtggggccaaattgacgcgcccagttttctgcaggggcgcaaagggcgtggttaaacgagagagggcggtgcaaggctgtgagggacccgcgccggcggtggggaccccctgcgggggacggggacaccccacggtgccctgacccacactgtgtggggacgcggcatcgggccttctgtttcgaccacacacgaggcccctcgcctccgtctcgccgcgcgcggctccgaag

SEQ ID NO: 541528 - DNA, 238 bp, Homo sapiens
cgaggagggatctgtggtgggctcttacctccccttggttgtgtccgcaggagctgaacccatgccaccgtgctgaaggctcagttcccgagtgtggctgtggaagcaagtgggggtcatcaccctggacaacctcccccagttctgcgggccggaacatagacggtcatctccatggggattgctgacccaaggcggcccccaagccgcttgattatctcccatcaaggctgtttgc

SEQ ID NO: 541529 - DNA, 104 bp, Homo sapiens
tattatccacagggggggtgattgatttgagacagttacattaacaaaacaaaaaaacgtggccaaacggaaacaacggtgtcaagttctggatacttaactcc

SEQ ID NO: 541530 - DNA, 115 bp, Homo sapiens
ttttaaaatactttgtagaaaatcgcaatatggcaaatgtgcgtacaaaacggaatgtgcaaatacgctgcccgaatcaagtgttatcgctccttttcgtaaaaaataaggccat

SEQ ID NO: 541531 - DNA, 88 bp, Homo sapiens
atcggcgccgtgttgcagagcgacaacgaccaagtcaaggtcgtgcgcctggtgccggcaggccctgccgacaagaccaagcaagtag

SEQ ID NO: 541532 - DNA, 1073 bp, Homo sapiens
  misc_feature (250)..(250): n is a, c, g, or t
  misc_feature (302)..(302): n is a, c, g, or t
  misc_feature (423)..(424): n is a, c, g, or t
  misc_feature (496)..(496): n is a, c, g, or t
  misc_feature (529)..(529): n is a, c, g, or t
  misc_feature (659)..(659): n is a, c, g, or t
ggctcgtgccacaggtaagctggcatcaagtattgtcctcagagcgccgagcatgacgggatcatcggacgcctcgcgagatcctgtcctgctcgtgtgctgactgctggtggggacagatggtgccttgaccagagagcctgggaccggtgtcaccactcgcatgtaggtagttttctagcatccgaccgaatgtccacggcaccggcgcgacgggcgaggcccacggctgtcactgcgacagcagggncataacgtctggaacgaccatcgcacaggttgcgctgaggggttcgagcagncgagcgaccggcgatggtccgacgggaacggtagccgccggggacggccatgggaatagcaggcagcgagtgggcgcggtagctgatttggatgacccggagactacgactagaatacttnncaagcactccaaagagacaggacttaatccgtagcagtacgcctaggcgtgcaacctaggcgcgggcatacntacaaacccaagaagccgaagagccggggatcntacacaatcgatcgcacgaagggatggtagtgagcttgcagaaccttggaggcccggaacggcgctgccatccttcacgacggggcactggaccagtcgcgacctgacgagcaggccaggcatgtacatntcgccacatggaacgcaggatcctgaagctaccatggaacgcgggcgggacgaccggcggctccagcaatcatcgccagacggcgaagtggggcagtgcgggctcgtggtgagcggcatgcagcttgagaagcctaaccttggtacgggctctgttgtcgtgggacgtgtgctccagactacgaatagtccgtgggaagcaaccggggcaacagggacgactggcttgcgaacgcgggcgggaaccctcgacacttggaaggacaacaaggttgtaaccccaattcaattcccaggttatgtcttgactgcatttgtgatgggcaaactcccttgcagcgtgtggctagggggccccttggtggccttactaaacccatgtcctcacagaattctacaacctgggagactttgg

SEQ ID NO: 541533 - DNA, 365 bp, Homo sapiens
ttccggtgttccctttgtcttaaactgagaataatgtggaagggtgtggtggactcacgcctgtaatcccagcactttgggaggcagaggggaacggatcacttgaggccaggtgttcgagactagcctggacaacacggtgaaaccccgtctctacttaaaaagtgcaaaaaaggagccaggtgtgatgcacgtgcctgtagtcccagctactcgggaggctgaggcaggagaatcacttgaacccaggaggtggaggttgcagtgagccgagatggcaccactgtactccagcctgggcaacagagtgagactctgtttcaaaaaatatacatataggggctcggccgtggtggctcacgcct

SEQ ID NO: 541534 - DNA, 161 bp, Homo sapiens
atctgtctgtggctcccagtcgtgctgggattataggcttgacgcgaacgcacccagcagtattttttatttaattggagtagtagattagttgagtatagttttatattagtcgtctcgatgtacatggcagacgtttccatcctgctgtgctaggactc

SEQ ID NO: 541535 - DNA, 1673 bp, Homo sapiens
  misc_feature (1213)..(1213): n is a, c, g, or t
  misc_feature (1577)..(1577): n is a, c, g, or t
  misc_feature (1628)..(1628): n is a, c, g, or t
tagggaaacaaaattcatgttttatttccccagaaaaaactcaaaagtaggaagctcctccttccgggaaaactgtgtgtcaacagtgtgaactttcaggttccaccaaagggaagggaggttacagaaaagaatgcgtgggtgttattgttgacgaaggcgtgggtggcccacgtgaaagccacccacaggtgcagtgtgggaaaaaaacaagggagaagaacaacacctgtgggtctccccacagccttagagaaacacacagagaggtgtgtgtgtgcaacgcgcggggccacagggggctgtggccacccaggctgtggggcgcccaaagggaggagagagaacgctctcctctgtgagacgacaccccagtgtggcttttcatcggaggccctctcgcgtgtggtgtggtgtgtgccgcaagaaaactgtgtcgcctctcacccacaaacacttctctcacccccacactgtgtgctgcagacagcaggccccccagtgtgtgtgcccacacgcgggtgacaaagacctgatagggaaatacacaccacgtggtagagagatctctccccccccctttgtgtgacacagtgggggtctctctgtgaaagcagttgaggatctatctttctcgcacaacaccgactatatgcgacacaagtgtgcgagaatataacccgcccatgttgtctgctgggtgtgtgtagtacacaattgtggagtgaagaagttctcctgtggacatctcctggggagctctcccgttgtgccgcggttgggcgcacgcggtgatatctgcggtgggagacacagcaggtggtaatgttagtacgcgggcgcgttttttctgcggcgaaaagccccccctcttctacaatataaaaagtatggggtgcctatttctcccaccagatgttgttgtaagaggaaaaagacgggggggaagagtagtcatcccaccggtggtaatagtagttgcaaacaaaatcttctgcctcttccacccacgaaagaaaatgtagctgccgggaggtcagttgatcaccaaagtcatctcatacacagcaggcgaagagggggcccccctaccgcaggaggatgtttgacccactgtggaagcgctagagaggcacgcggggggagacacaccccctgtggtgggatgtactcacgctagtgggtgcgtatacatatcaaaaggatgggggcnggacaatcactcctcccccccaaaggatattggtggactaatggttgagccagcaatacaaccgccgcccaaaggcagaatcttggtggggagcatcattttttttacgacacaacacatagttctgacgctatattctcatcttcccctcgtactagttaggtcgccacccccaccagaagggagcagttgcagccactcgccgtaagaagacagcacacgcacacgcaaagataagaagcagggtcccccgcggagcgcagcatattcgctacggaggcgcgcccgcgaggagtgtatcagcgcgggcgcccgccagtatagaggcggcgacgcgaggagaggaggaggaagtggtgtaggncgcctcaccacaatcggggctgtgagctctccctcctgcgtcgttgatcgnagtaaacaacgccacgccggcagcgacagcagatctagtttagcg

SEQ ID NO: 541536 - DNA, 336 bp, Homo sapiens
atttatttattttttaattttattattattatttttagatgaagttttgctcttgtcacccaggctagagtgcaatggcatgatctcggctcgctgcaacctccgcctcctgggttcaagcgattctcctgcctcagcctcccgagtagctgggattacaggtgcatgccactgcacctgctcatttttatatttttagtagagacagggtttcaccatgttggccaggctggtgacctcctgacctcaaatgatctgcccaccgcagccttccaaagtgctggattacaggcgtgagccaccttgcctgggcaactgagtgagactacatctcaa

SEQ ID NO: 541537 - DNA, 429 bp, Homo sapiens
ccacgccagtgctctcatcacttggcctttcaggagtcaactggatatattagcacaggcagtgtcctggaggggaggctcatgggctctgaagtaaaaaccacctgggtttaaatcctagcagtaaccacttcctaactccaggatctagaaaaagctgtctaacctctctgggcctcagtttcctcatctgcaaagcagactcaataaaagctacctttgaggctcaggaaacacagttccaagtagcatagcttggatgtgcatcctggactgtcctgacttgaaaaacacagggagaacctacaatatgcctcctggaacgaagacctctccatctcctaaatgaatgacgtgtatgatgagatgtgaatggtgacaggaatgtgtcccctgagcatgcagggggaaaggtaacatgggaatcta

SEQ ID NO: 541538 - DNA, 354 bp, Homo sapiens
actgggctacagacgtgagactccgatctcaatgaaacaaacgtatatatatcttcacacataagctagggcatggaggcaatgcttctgtcatcccagactactcaggaggccgagataaaagattcacttaaatgtgggagtcggcggtagtagtgcagctgcagatcaaccatagccctgcagcctgggtccaccaaacgcagcactccatactcaaaaacacaaccagtggggtgtaggtggctcaggcctgtattcccagcattttggagcagagtgaagaggaggtggatcccctaagggtccggaattcaaacatccacgggggacccctcataagaccgacctgca

SEQ ID NO: 541539 - DNA, 123 bp, Homo sapiens
gcgattcttgagtatcccaatctgcggaatcggagttacctggtgctagatagatcagcaacagtggcttgtggctaggccatgtgacatggaccatgagtcagggcaatgggcagagcagtg

SEQ ID NO: 541540 - DNA, 1303 bp, Homo sapiens
gtggggctgacctactatacctcgccgctgtttcgtgcgcgtttacagccctcgtcgctgctggtcatgcggggctcgtatggaagcatcattattgcgctccgcgtccgttcaccaaaatcgggctccgccactgattgtgttatggtccataaatgttcgacttcgaccaacgggcgtgttgactcgccagggggtctgtgtcggaaggccgctcctctcactgctatgggtgttggcgcttgccgctagtggtgaccgcaccgttttgacacgttagggggcgctttgtcctgcgctttccgcggggttgtttgttactcctatgtgctcgtaaataggggggagtgagttgtgccgcacagtttcgctttcgccatagaggctcaatagctgcgtcgccatattcccgtcttcgcggtgttgtggtggttccttctgggcctgactttagccccgtcggtagtatgaatccctcactgtcaattgcgtgaaagcagtgtgttgtccgtgggcagagtaagccgaagttggaatgttccgttgcgtgctccaaggacgcttgtcatgtctgctcataacctcaggtaggtcgttccgggaaggtcccgtccggcctggccacgttcgccgcctgctctcggccagagggaaggatcattttccgtgcctgcgatgtgttcattgaagataactctgccgctccttgtcgatggaattctcttcgtagaccacttgtgtctgcgaatcagtacacggcgctaactctgtgctatgcgcgccctttggtccaaggctcttctctcgcgacgaacgctatgtgccctccgtgctggagacgggacgggacgcacggactctggatcactgcgtcagcttcatgtagccgccatgcatgtgttcgtccagtgagctgaagtcatgagctacttgcatgtgtacttggcgtaaatcggagacacttgcacggattccgtgtgcagcgctgtgcccgcacaagtgccatggacagatggagtcctggatggactgcgcagccctagaggtccgcaggcacaaggcctagggccatgtgccacctttcccgtcaagcaagggctctctctctcctgtcgtgggcgtcattgtgacgcaactggcctcatctacaagcacaggcctgtggcctgttcaaggcagaaccacgaccctttgactgcccgggtggggatggtggctcaaggatgctggagctgaatcagacgctgacagttcttcaggcatttctatttcacaaacgcatgacacatgccaataagtactt

SEQ ID NO: 541541 - DNA, 794 bp, Homo sapiens
gagtgcgatcattcgggctgtcagagttggtctgttactcgtgtgtgtggcggagtctacggaagccgttttctgcttcacttttcctggctgtagagcgctttccccctgtgcgggtgcagcagtgcagagcagcaaggtgcgcagatgagcactatgttctgcggacactctcctcaatcgttccctcatctctgttgtgcacggctctgctcgcagagggcataacctgggtccctggtttcccagggagagaccaagtcacaagcagactgccaggcccagcaagtggcaaaccaccagagtacaacaaatgggacacaagcaagcacggcaaccacataaccagagctccaggctggcgtcgcaaaaaccagcacaaccgccaacaacagcagcagacacagcacgcagacacctgcaagcaatagccaacagcagcatctcattccaagtggtctcgcaattggaacattcccaaggttcgcatcatctggcctccttgggtatcccactgccccttaaatgcggcactggtaccactttccccatatttcgcatgggtcacagttgactcggcaacgccttcctttctcaccccctcctaccttcgaactcccacagggaacgtggccctcaaatccgcaacagtcttgcctgtgcggagccatggcaaccccaccaggaaaactggttccctcatcgagcccttggactacttctctggctcactaatttcgaagtcccccacgcacacattcaggcacgcaattctaggacttggcccctttcag

SEQ ID NO: 541542 - DNA, 214 bp, Homo sapiens
cgggccccggggtggagcaggaggggcggagtattgggaccgggagacacagaagtacaagcgccagtgacagactgaccgagtgagcctgcgtaacctgcgcggctactacaaccagagcgaggccgggtctcacaccctccagtggatgtatggctgcgacctttgtctcgtaagggtgcctccttcgcgggtattaccaagtccgcctacg

SEQ ID NO: 541543 - DNA, 862 bp, Homo sapiens
tgcccctcatgtacataaattgttatgcgtagcatatacacagtgctcacttctaggaatactagtatatcgctcacacgtcgtgtcctccctactatgccgtagaaaggagataagactatcgctgttcattataggtactctcataaccctcaacagccacgtcgcgtcttagcgcagtaatagtgcctattgccattactagtcattatgcacgtctggggagggagatgggggcctagcgctactagtctcagtctccaaccacagatggcctagactagcgtagcagtgaacgctaaagctactccatgtgctaaagactacttcgtcccaactaattgtattactagcactgtactatgactttcctgaaattaatgcgtaaatttgaagtcaagcaacagagcacaccacagtcctaattacttaggcatcagtcccctctactattattcttaggcagatcaagaacaacctagtttagctgtaaccacatccttttgcctccgaccccacgtaaaaacgcgccctccataaatactaacatagctgactcctaaccctcaggaaggcatgggcgatgcagaccgccgtcttatgccgtgagggcccttatcaccgaaataaaaatgctacctctcgaatagtaatcgtgctacaaaatctccttcactgataaaatcccgagtgcagctgaacgactgaatatacggttatcctgcttcgaacccggatttatccgagcttgggctataacacccgatgaggggacacaggcggaacgctgaagcagggcatactgctagatttatagcccagaaggtcacgttcctgatctacgcacaaattaactcgaacc

SEQ ID NO: 541544 - DNA, 118 bp, Homo sapiens
gagatcccgtacaccgcaaggtatcacgaccacttgtgttgagatcacttcggctgcttgagtaactgtctcgattccaccatagtggtcacgtgagctgctgtaatcatcatagcga

SEQ ID NO: 541545 - DNA, 456 bp, Homo sapiens
gtcacagtcgcttcagaaaagagtgggacaggtacaagcatatatagaggctgacacataatccacagactagaaacccgatgagggctatgtatccaggcacattctacttccaatttaaaaacctatgggaagccgacgcatcggaacgaaacttggctgtgcttcaccgtggaaggtatcaatgcgccgctcagttgtctcctggtaagacgggcgtcttccgtaaaccaggtggattcgtgagacccattgtcatgcagaaaggtgcttcctctcttggttactgcaacgacaatactgtctccttaacacaaagaaccaggtcaactggtaacacatctaggaagcccttagcccatactgtgcagggaaatagtaggccgcagttccttggccaggcacaggcaacgtgaaatctcaccattcttcaccgccctcattccgcttgtccaa

SEQ ID NO: 541546 - DNA, 425 bp, Homo sapiens
gcacgaggctgttttaaacgcgcagctgttttaaatgaaagacactttatgactactcaagccattataaaagtcacttatcaaagctcattatcacatatatcttaccaaatcctagctcattgaactctactgcagctctcgggttcctgaggctttctactttatcggagccagggctacatgccagcaaccatgtccaagggacctgcagatggcattgatcttagcaccacctactcttacgtgattgttgtccagcacggacaagtagagataattgccactgatcagggaaactgaaccactccaagctatgacgcctatatggacactaaacagtagactggtgatgccgcatagcatcaagttgcaatgaaccccacccacagtttcagatgcccgtctgattggacgcagacttg

SEQ ID NO: 541547 - DNA, 212 bp, Homo sapiens
gcagaaccacgaggacgatgaaggaagttgagatttgtatctgcagaatgcatcttcattattggctagcagattgaaataagtgatggggttcagtcagagagagaaagtcaaactttaccagtgcaaaaaacagggccacaattgcctacgttttagagcgcaagagttttcttcttataacggcaacatgaagcgtttgcgttgggtca

SEQ ID NO: 541548 - DNA, 135 bp, Homo sapiens
atttcttaattttaatttcctaatcattagtgattgtggacgtcttttcaaggggctactagcccatttacagttctgtagattgcctgttatagacatttctaaggctcttgacaagtacaaccatattttttc

SEQ ID NO: 541549 - DNA, 136 bp, Homo sapiens
tgacctaaaggatcccaagctccaacaagatttttcctagtgtccaaagagctgtcctctttggactaacagttaattacaaggggattagagggtctgtgggcaaatttaaaaggttgaactaagggaaattttt

SEQ ID NO: 541550 - DNA, 729 bp, Homo sapiens
  misc_feature (2)..(2): n is a, c, g, or t
  misc_feature (93)..(93): n is a, c, g, or t
  misc_feature (106)..(108): n is a, c, g, or t
  misc_feature (112)..(112): n is a, c, g, or t
  misc_feature (122)..(122): n is a, c, g, or t
  misc_feature (129)..(129): n is a, c, g, or t
  misc_feature (170)..(171): n is a, c, g, or t
  misc_feature (179)..(179): n is a, c, g, or t
  misc_feature (187)..(187): n is a, c, g, or t
  misc_feature (199)..(199): n is a, c, g, or t
  misc_feature (205)..(205): n is a, c, g, or t
  misc_feature (225)..(225): n is a, c, g, or t
  misc_feature (252)..(252): n is a, c, g, or t
  misc_feature (262)..(262): n is a, c, g, or t
  misc_feature (355)..(355): n is a, c, g, or t
  misc_feature (357)..(357): n is a, c, g, or t
  misc_feature (497)..(497): n is a, c, g, or t
  misc_feature (505)..(505): n is a, c, g, or t
  misc_feature (585)..(585): n is a, c, g, or t
  misc_feature (717)..(717): n is a, c, g, or t
tnccctcttcccctccctgttaaatacacaaatatattatattcaatatgaatcgagtctgtttccagcagaaaaaaaacatacaaaaaaatntgggagggggggnnngtgngggggggggngggaggngtgggcgcagggtaggaggtccggagtccagtgtggtttgnngcgccccnagagtccnagggtgggtgcncaacgnctgctacctggaccccagtnggaagtgtgtgcccaaccgtccaaacnagggggtgtncgtaaaggggcaggggacgttcagaaggtgtgtcccttgaccccaagcagcagctgacagccgttgctgacgtgggtcatgaccttctgtttnanctgggccacctgctcccggaggaggccggcggtactcgacagccccgcgttctcggccttgagcgtcttcaccttgtcctccaggcgcgcgatgcgctccaacttccgcttccggcacttggtggccgccagccggttcngcagccgnttgcgctccactttgatgcgctcttggtcttccatgttgatgggggacaccggcggcgtggcgtcccggctgcgcgcctncggcacggtctgcggttcctccttgaaggtggaggcgccgcggcccaagcccagctgcgccgggtggccaccgcgaagggcggcgcgtgtgggaggtagctgatggtggtcgtcgggtacagctcccggtcncgacggcagccc

SEQ ID NO: 541551 - DNA, 296 bp, Homo sapiens
  misc_feature (79)..(79): n is a, c, g, or t
  misc_feature (111)..(111): n is a, c, g, or t
  misc_feature (115)..(115): n is a, c, g, or t
  misc_feature (129)..(129): n is a, c, g, or t
  misc_feature (134)..(134): n is a, c, g, or t
  misc_feature (161)..(161): n is a, c, g, or t
gagagaatggccagcaggaaggcgggccccggggcaagtggcagccaccaagcaggcccaccgtggttcttccaccgtnttttccatgtttgaccaggcccagatacaggngttnaaggaggccttagntgttntcgcccagatcgtgatggcatcatctncagagacctctgagggacatcttctacatcgggagatgagtgtctaccagagagctgctcgcgtcatcagagcaaagccactacttccacttctacgatgtttggggaagagctagagacccccgagaatcatcg

SEQ ID NO: 541552 - DNA, 645 bp, Homo sapiens
agctttccttaggggctgcaacctggacgccgaggccggtttcggagtggggagtgcccattttctctccttcccacgttcctggcccccagacagccatttgcaggcgggtgtgcttgtggtcagcctccgccgcccccaccgcgactcccgtcactgggagagctgcacacctgctgcccctgagaaccaagtcagcagccgcgttagtgtaaccatgtcttgagtcttggacacagtcagcctggactctatgggatatgagctggctggcgactgtgtgtgaaaggagcctggctctggtggcccccagaatctctctggggcctggtggtcgggagagggactacattgcaccatgggaaacgagagagaatgggatgccacgcgaatgagacacagcacttcacctcatgcatgaaaacccccatcatcctctcaaaacctccagcagagcggtcaaaacagccaccacctccaacagcccctgctgcccctgcctgctccagcccctctgtgagaagcccatctgttctcatgaagccactgggaggacggggaaggggcctgtggccgtgacatggtgcctctacccctgagggcaccgcccacactcacccctgaagacccattgaagccatccaa

SEQ ID NO: 541553 - DNA, 869 bp, Homo sapiens
aggatagacgatatcagattgatgctgctatcgtcagatatacatgaagatgagaaagactcttggtctataatcgttctagtccctgatatttactataatcagcatgcaagactttccaggtaacagcctggagatttgacaaagagaattcgaatctctgatagacagagactatatggagagagcacaaagactaatccgagtcagtacctacttacgtgggctgacgactatcttgctagcatcggtcgcccctttcatgcaacaccaccgtagtaatgtaccctcagaagacaggaaagccacagccctgctgtcactttctgggtggactctgaattgatccagcatgtgggacattggaaaggcgaatggaagggacggatggctccatggggtcatctattcaccaaggctcaagaccttcaatcctgcagatgtatctgttgttcccgtccagtctcttgcctctagttcttctgaggcattttacactggttgctgttcactctgtgcataaataatctttgtagattgggaccgtagaggatgtctagtagcagagaagttccttttagaataggtctggtgctgtgtgtcaacagagagctgcaagtcaggtctcgttctcggtgtgtgatcatgaggtgcccaatgaaggaacgaccctagatgctgcctttggtgtaggctctgaagattccctgtaggtatccctgaaaaaaaggttcgctcagatgattccggctttagaggggaaaacaggggccttaaaggggggaaacttcccaaagagcggggttcaaagactgggaatggataagccccttagcggggcccccgggttcggttttccccacgtggtg

SEQ ID NO: 541554 - DNA, 660 bp, Homo sapiens
  misc_feature (320)..(320): n is a, c, g, or t
agtctgaagatggcggctcagagcgcgaggtgctgggcgtgggtagaagtatcaatcagccggttgtttgtgagaagaattccttggactgggcgtgagtcagtgaaagaacattgtgcacagttcggccatgtcagaaggtgcattttacctttgtgacaaggagactgttttcacagaggttgggtggggtcagttttcttcagacgaaggattcggaatgcatacaaaggaaaatcatatatagatggagtaaggtccaggttcacactagaaggccaaaattccgaaacatctgatgatgaaccgaaaggactttnggagaactggcagccctatttaaataaagagcttaaacattaaggcaagaaagaaaaaaagaataacaatccaccacacaaccctttggtggtggggcgcccctccggccccctgggaagaaagtcttctaccaccacctcgccggtgggcggcccgcggcccacatagcgtatcgcgccaccccgtgcccaaggcggtaccacagagaaccccgggcatcccaccggggccgtggcccccccaataaaaacgcccgcggcgccccgcgactgtccacacacccccagggcccgggcgcccaccgcgctctccacagcgccaccggcctgataaatgcgg

SEQ ID NO: 541555 - DNA, 215 bp, Homo sapiens
  misc_feature (79)..(79): n is a, c, g, or t
  misc_feature (111)..(111): n is a, c, g, or t
  misc_feature (115)..(115): n is a, c, g, or t
  misc_feature (129)..(129): n is a, c, g, or t
  misc_feature (134)..(134): n is a, c, g, or t
  misc_feature (161)..(161): n is a, c, g, or t
gagagaatggccagcaggaaggcgggccccggggcaagtggcagccaccaagcaggcccaccgtggttcttccaccgtnttttccatgtttgaccaggcccagatacaggngttnaaggaggccttagntgttntcgcccagatcgtgatggcatcatctncaggcagacccttaggaggacctcctccagctgggaaggtagttcacagagagc

SEQ ID NO: 541556 - DNA, 170 bp, Homo sapiens
tggctgcagtgtagatttgccttagaggaggctgcccaagacttggcctcctcttgccccctcctgacctctgcccttctctggtcctggaatccttggagaaggtaggggtcttgaccctaagtttagatttgatctcatgtgcaggaggttttcctcgggtctgaaag

SEQ ID NO: 541557 - DNA, 216 bp, Homo sapiens
cgtcccctgcagctgaatgctccacattttaccctttcgcggcgcatgcctcttgctctagcacctccatgctgctgccggcagctcttcccttggccttctgcagcagctctcgctctttgctgagagagtccacctctcccttggaggtccacatgtctgcccttgccagatgtgtccctgctcccgcagtgatgcttctgcagcctgttgtct

SEQ ID NO: 541558 - DNA, 366 bp, Homo sapiens
  misc_feature (14)..(14): n is a, c, g, or t
  misc_feature (18)..(18): n is a, c, g, or t
  misc_feature (22)..(22): n is a, c, g, or t
  misc_feature (128)..(128): n is a, c, g, or t
  misc_feature (349)..(349): n is a, c, g, or t
  misc_feature (356)..(356): n is a, c, g, or t
gggcttgtaccgtntggntgcnggcctggtgtcggcttgcaagttctttctgtgtttgttctctgccctgccaaggccgtagagctggtgcgtgcgggtagggggctctccgaggagccgcacgccgngcacccaatggtccacctcactactctcctctgcaaggcccaccgtggggcaacctttaaccatccgccttgccctggggtggctgcaccaatcggccgttctaccgcattgtggctgctcacaacaagtgtcccaggggatgggccgtttcgtagaagcagcttggggttcctattgatccatttgcccaacagttcatgggagaaaaattcgtttgccntcaaacntagaacagga

SEQ ID NO: 541559 - DNA, 177 bp, Homo sapiens
cgcgcacacatactggagaagtacgcactgttcatggtcttcatggaccaccatgcatccatattcgtgctgttgtaactctttgtacagaccagggatcagtggagctgagtgcaacctcctccccatgccatctgcagagcctgtttggctaagtgggtgccaggcggtatcctg

SEQ ID NO: 541560 - DNA, 165 bp, Homo sapiens
atgtgcggtgctctagaggtcccaacgccgagacaccagaccgggccggaacggaccaggactggagacttgactagctctttctcgattccgtgggtggtgggcaacaacttcgtccattccgatctctcggactcgcggcggtatggtgattcggcgtgtgca

SEQ ID NO: 541561 - DNA, 313 bp, Homo sapiens
ctaaaattcaccatgtacgcatgcacgctagtcactgttcgttcgtaaacctgactgtgctgctagcgagtaaaatccttctaattcttaaagtttaaggataatttatcttaagatttcatgtcaaaaataaaagagccagaggctgggtgcggtggctcacgcctgtcatccctgcactttgggaggacacggtgggaggatcttttgtagcccaggagtttcacgaccagcctgagcaacatattgagaccctatctctacgaaaatatcataagaacaaaatagaatcactctggcgattccactatcc

SEQ ID NO: 541562 - DNA, 577 bp, Homo sapiens
actacttaatgatattaggagaagttgactgcagtggcatgcacctatattcccagctactcaggaggctgaggaaggaggattacttgagcccaggagttcaaggccagcctgggaaaatttgtgaaaccacatctcctcaccattttccagtttaggaaaaaaaaaaaaatagtgcaactcacagccagcactcatctaattttacattaatacactctttgaggctgaaacaaatctgactcattttcagtgtgaacatacattataaaaactcttcttggagttatttctaaacagagctaacatcagatccatctgaatcatctattttagaaaaactgaatttatcaaattaatcttcagccaacaacttctcgagaacaacgttaacatcctgctatattttccaggatttgacatcttcaacgatcgaaaatgtctatattttgtaaatggaaatagcactcatacaatagaatgctaaatattgaatgtgttttttctgtttccaaagttggtatgctaaatcaatgaaaaaataataataaaagctagatattttgtgacaaaaaaa

SEQ ID NO: 541563 - DNA, 101 bp, Homo sapiens
ccactccaccttactaccagacaccttagctataaccatttaccgatattatagtataggcgataggagatttgagaccctcgcgcaatagatatagtacc

SEQ ID NO: 541564 - DNA, 921 bp, Homo sapiens
cttggtgtcttacattgaggtcttcgacactggcacacatgcctcaaatggtccgcgtgcgacaagtatctcggagttatgtaaatttcccggagacaagtgcgttgtgtaagaccgccaaatgttgcgccttgggacattgtgccaggaagcccttgtcccgttgaaggcacaccccccacttgggagaaactggacacacaaggtgcggggcgtacatttgctggagcaaccccggcggttcttcctgtgaccaaagagcaacagggggtggttgtggacacacaagaaagccaagtcgtgggggccgcaacaaacaagtgagccacggtgttgccccggaaatacttgggtacccgcctggtacacgtgctgtgtaagaacgcaaaaaacgatcgcgggtttccccccgcagcaacactgtaggagtgtttgcccccccccaaccccggtacattctcgtcccccctgtggttggtggagtcgccctccctgtggaccaacctggtaataagaaaaacccatgcctgtcgtgcgaaaggcacgccctacatgtctctcatgcgaaggagcccccaaccagccgttgtgttgatctttgtccggatctaccaaattcatcttcttacagcaccatcaaaccatcatccaatcttctatctttcccacaaatgagaatccttcctaacgtaatttcttccatctcttcttgtaaagaatccatttgtccccgaacaaacattctcccacctgtcttctcaagaagcatatctggggactatattactattgcgccagcacaaaacttctgaaggtacacagaagaatactttcttgcgacgcctttataatatagtcaaccattgaacaccttcacccccccttttacacaaaaaaaaaaaaccctctttttacaaaaca

SEQ ID NO: 541565 - DNA, 372 bp, Homo sapiens
cgtgggatcactggatgtgccactggtttatttacccgcttatctactgagtgaacgtctcagctgcttccgacttttggtaattatgaaattatgaataaggtttggtaattatgaataaggctgccgtaaatatctgtgtgcaggattttgtgtggacataaattttcaattcatttgggtaaatacaaagggacaaaactgctggatcacatggtaaaggtatgtttagtatcgtaagactgtcgaactgtcttccagagtgaccaccgttttgcatccccacctgcaatgaatcagagttcctgttccacatcttggccagcactgggggttatcagtggtgtggattttggccattctaataggtgt

SEQ ID NO: 541566 - DNA, 326 bp, Homo sapiens
  misc_feature (263)..(263): n is a, c, g, or t
  misc_feature (308)..(308): n is a, c, g, or t
tttttcaataccttttaggctttaactataagaaatggagagtcggctgggcatggtggctcatgcctgtaatcccagcactttggaaggccaaggccagtggatcacctgaggtcaggagttcaagaccaacctggccaacatggtgaaaccctgtctctactaaaaatacaaaaaaactagccgggtgtggtggtgggtgcctgtaatcccagctacttgggaggctgaggcaggagaatcgcttgaacccaggaggcggngcttgcagtgagctgacattgcaccattgcactccagtctgggcnacaagagtgaaactcctc

SEQ ID NO: 541567 - DNA, 191 bp, Homo sapiens
ctttttgttttttttttgggagagtctcactcactctgttgcccaagctatagctagagtacagtggcatgatctcagctcactggaacctctgcctcctgggttcaagcatttctcctgcctcagcctcccaagaagctgggattctgggagtggtggcacatgcatgtaatcccagctactcatgagaa

SEQ ID NO: 541568 - DNA, 1512 bp, Homo sapiens
gagctagatggccagtcacgagaacccagtggacatcctcatcatggatgatgaggacgtctcgccatgtctagggctcccaccataagcttgtcgctccggtccccagagctgctgcctccggcagcacggcccgggcgagatagcgctatagctagcacggacaggaacaaggagaatcagtcctattggacatggtcatgtgataggatgagacaagagacggcgagccactacgccctcatcacgtacgcgaacgcgtgagtcgcagatcgaaccgcatccccatcgcgtcatccagaaaccgggatcgcgagtgagaacacgagcacattaggggcatatcaagtaagcaccacctggacatcgccgcggttaccacagacactgcgctggccactgaacctcgccgaagggcgcatacggaagacagagaggacgatcgagcaaagaacacagatgcgaaaccaagtaggggcggtcgcgtagacactgggaccgccagacgccatagcaaggcccccaggggaggaaacaacacggcaacgaccacccatcacccggacacaaagccgcaccaggaaaaggcactagatgaggccaccagaacacagcagccccacggaacaacaccaaacaggcccccacaaagaaagaaagagacccacagagacggacaacagacccgccaaccacacggcacccccaacgcaagagtgccaccaaaccccaaccacacacgcaaaaaagcacgaaacacaaagaagagaaacacggcacaaacacagagtgacaagaaagagaagaacaagaggacaagggaaggaagaggacgcccacgaaacgcggagagcatacagaggcacgcccacagaccacgcataacgactgcctgcggcgaccccagatccacgctgtgcgagcacgagaatgcacaccaagcgaacacatcagacgcgacgcgtggcgcaccaccacgcacccacaagtccggcgacaagcaaccccgcacgcaacaaaacaacacccaaaagagaggacgcacgtagaagaagcaccaccacacccaaacacgaaagccagagcaaaaacaaaccaaagaaacaggtacaacgacgaccaccggagccacccaccaagacaagaacaacaaagccacacaaaccacacaccaccgacacacccaaagcacaaagcgatagacaaacacaaaaaaaagcaacaaccacaagaagaagaaaggacacacgcggacacacaacaactagacgcaagcaaagatggccacccaggccgcaatagcaaacagcacaacccagaaggaagaagtagacaacgaggatggagacactagaaggactgaagagtagaggatagcagaccagtagcaaccgagaacgcgtaggcgtagagagaatagtcgtagctccgtgagcaaagtaaagaaccagacgaagtcagacaaggagaacacgagagcgagacaaataagcaggcagtatagcatatata

SEQ ID NO: 541569 - DNA, 114 bp, Homo sapiens
atatctgcaggcgtgtctaaaagtgtgtcattttgcagggggtttaggtgcatagttctaccacactagagatctaggacattggtcttgactttggtgagttctcttgaggaa

SEQ ID NO: 541570 - DNA, 175 bp, Homo sapiens
gccatctgggaatctttgcttgaatgatgtttgaagcaacaagtgtgaccaatagagtgaaaggtcaaggagtttaaatggaatggattcttgccataggcagtggcaggaaccctatgaaggtctggaatgaactgaaagtgcaagtgttttcagagtagtatgggtgggactt

SEQ ID NO: 541571 - DNA, 1030 bp, Homo sapiens
ggggcgtcgcgcgaaggctaagggagtgtggcgggcggctccctgggagccaagatgcctcggtatgcgcatgcatggtcatgggcccccgggggcagtcggtggaagagcaccatactgtggcacacatgtgtccatacactgtgaagcgcactcaaccggtctgtccaaggttgtaaaatcctggatccatactagtcagaatcactttcagactagctccggtgatggctgacgatccgggaaactgaatcggaggtgggactgactgtcctcggcaggatgattctcttgcgacttcggtcccaagcggagcgatctggtctttcgcatggagttacttttgccaatacacttttgacttggctggacgaacttgtcttgggcatgtagaggacgactatatcctttctgattggtccagggtccagatttgaggttgtaacactcaacctgcctggtggatggaaaaccaggctggtccaagccagctcgagcagtgggaggtcccgagatctgtgagaagtttttctgggtgaattcttcagttcatggttggaggtccatttccagtttatttcttgggcatcttgggcaagccccttgaggttgccatggaatctctctagcaaaattcccgcaagtcaaccattcattgaccacacattggatgctgcctgagttaaaaaaaagcaaaacaacgggacattgacgacctttttagaatccaggaacattgttattccttcactttagcaaggaattcttaacaaagttgcacttaaagggaaagcccaacgacaatttccaaggaaacacgtggaacctaacagggctcattattgttgtcacctggcatgtgacatgaacctaccagccagtgaggttccgaatatttcataaacccgttaacggatccagtccagacttcaaagaaaaggcctggaacacttgggtaacggcccggcatacctgggaatctcggcccttcaaatattggcagaagcacgctacaaatctaaagaaacca

SEQ ID NO: 541572 - DNA, 152 bp, Homo sapiens
ccagatcacgaagggagatctgctactaaacagagttcaaaaactttccagagtaattaggtatgtaaagctcatgtaaactagacaaaggatttgctattagagataatatatattggaatttttataagcttacttcagagggatcctct

SEQ ID NO: 541573 - DNA, 262 bp, Homo sapiens
gccagatcaaacagtggcctcgccaagtgcattgataaaggtctctgtgatttcacagtacccctcggacagggggcccctccctgtttggcagcccaggtggagagagagaggagacagcttatgccattatttctgcatttcagagacttttagtacttttactgattttgctactgctatctagagggcggagccaggtgtacagagtggaacaggaaagtgaaataggagcgtgaccgctgaagcacagcatcacagg

SEQ ID NO: 541574 - DNA, 957 bp, Homo sapiens
  misc_feature (14)..(14): n is a, c, g, or t
  misc_feature (148)..(148): n is a, c, g, or t
  misc_feature (211)..(211): n is a, c, g, or t
  misc_feature (222)..(222): n is a, c, g, or t
  misc_feature (253)..(253): n is a, c, g, or t
  misc_feature (257)..(257): n is a, c, g, or t
  misc_feature (268)..(268): n is a, c, g, or t
  misc_feature (274)..(274): n is a, c, g, or t
  misc_feature (277)..(277): n is a, c, g, or t
  misc_feature (286)..(288): n is a, c, g, or t
  misc_feature (300)..(300): n is a, c, g, or t
  misc_feature (310)..(311): n is a, c, g, or t
  misc_feature (315)..(315): n is a, c, g, or t
  misc_feature (317)..(317): n is a, c, g, or t
  misc_feature (331)..(331): n is a, c, g, or t
  misc_feature (343)..(343): n is a, c, g, or t
  misc_feature (346)..(346): n is a, c, g, or t
  misc_feature (348)..(349): n is a, c, g, or t
  misc_feature (373)..(373): n is a, c, g, or t
  misc_feature (376)..(377): n is a, c, g, or t
  misc_feature (385)..(385): n is a, c, g, or t
  misc_feature (398)..(398): n is a, c, g, or t
  misc_feature (400)..(402): n is a, c, g, or t
  misc_feature (407)..(407): n is a, c, g, or t
  misc_feature (412)..(412): n is a, c, g, or t
  misc_feature (419)..(419): n is a, c, g, or t
  misc_feature (424)..(424): n is a, c, g, or t
  misc_feature (436)..(438): n is a, c, g, or t
  misc_feature (475)..(475): n is a, c, g, or t
  misc_feature (481)..(481): n is a, c, g, or t
  misc_feature (493)..(494): n is a, c, g, or t
  misc_feature (522)..(522): n is a, c, g, or t
  misc_feature (651)..(651): n is a, c, g, or t
  misc_feature (869)..(869): n is a, c, g, or t
  misc_feature (878)..(878): n is a, c, g, or t
  misc_feature (917)..(917): n is a, c, g, or t
ggaaggcccgggancgcggggggcggggggcgaacggcggggggacgggggagggaccggcggcccgcgggcgcgccccggggcgggggagcgagggtgcggggggcgcggcggcggcggaacgaacgcggggcgggcggggcgcccncgcagggcccagggccgccggcgcgacatcgacatcgaggacgccacgcagcaccggcggganaaccgcaagcnggaccggcccgcgggcggccccagggcaganagcncacggccagcnagggcnganaaaggggannncaagggacggcngggcccaganncgcncngcgcaggggaaagnaccgcagcaaanaananngggcggcggaccaggccacccaanaannggcaaganaagcaggtcatcngnnnctcangagangaaagcnccacnggcagggggagnnnggccaaggagggggagaggggggcgagcagggacgcnagcagngcaagcaaggcnnggggaagcaacaaggggaaaaaacagcntggcgccaagaatgacggggaacagaaggacgacgagggcaaccggagggcgggggcgaacgccggcggggccgaggccaggcgggcggccaacaagggcgcggcaggggggcgggggagcagcggcanaccggcggagcggaccgggcgcaagggcggcacaggcaggggggcggagcgggcgggcgcgcaccgcaacgcgccacagcgggccggccgggaggaggcaggcaaccggggcggggggcgcggggcgcgggggaagggcaaaaggcaagaagagagcgggggccagaggcggcagccagagggcacgccacggaaccacgggcgcaggagcagcgggngcccggcancccggaggagaccaaaacggcggggaggagagagccaanaggggccggcggcaggagacgggcggagggggggacggga

SEQ ID NO: 541575 - DNA, 126 bp, Homo sapiens
  misc_feature (63)..(63): n is a, c, g, or t
  misc_feature (83)..(83): n is a, c, g, or t
gatattgcgccactgcactccagcctgtgtgacagagcaagactctatctcaaaacaaaacanaaacctgactttgtactggnttccttatccttttaggggagaagaggcattgattttactcat

SEQ ID NO: 541576 - DNA, 801 bp, Homo sapiens
tgctggagaaaaactgataaagccacagtgagaaatggacaagtctgccagcatctttggagatttcaccagtacctctgcttaccatcaagtaagttacacagaatgccaatatgtagatttgaataacgagatgaatggacgatggtgtaatggagaaatataggcctttgtacccaaatagttagatatgtctatattcttctcaaagcaatatgtggcactgtgggagaaatattaattatatattaattcgtaaagcaagtcagaagatttaagaacaaggggtacgatccacaccatataatttataagtttaacatatgaaagcaattaaggttagaaggcagataatgaagagatgtaacgaaaaagctagatgagttggagaattaagacaagccttgttaattcatggtataaaaaaatcaatagaattttagaatgctttagcaatgtgaaccatagttaacatatgaaaggttctctcatgtaccgtgtttctctccctcgtccctctctcttcctagtctggaacattcaagaaggctaaatcttgtttcacatgaagaacagcccaagatactgaaaaagtaggaatcacagacacgatggcatttccagtggtaatcccctttcccccaagaggggtgagacatgtttctttaggcttccttgtgatagttgtggtcacgtgatcactaaagtacttacaataaaacagagtctgggtttaatttggggagaacacctagaggttaagggcgggccaagggggtaaattgacgggggaaacacgcc

SEQ ID NO: 541577 - DNA, 250 bp, Homo sapiens
  misc_feature (15)..(15): n is a, c, g, or t
tggggcaaaaaaatnggggtagggggcccccccttttttcggtttcccccgccgggggggggggggggcccccctttttccccgcccccccccaaaagaaaagagggggtttcccttaggtgtttaatttggggcccggcctttttatacccccaaagatttttttttctacccccccccaacccccccccccaagggggggaattttttttttcccttaaaaaccccccccccgggccctttttttcca

SEQ ID NO: 541578 - DNA, 193 bp, Homo sapiens
  misc_feature (49)..(50): n is a, c, g, or t
  misc_feature (61)..(61): n is a, c, g, or t
gattagttcatcaacccagagcaaacatgcacatctctgaagccaacannattcttcagantgctggatgaaaaattgaaagggtcgggattactgttcggaagagaggatatcacatagcaccatttttaccactcaacccaggagctactactgtgtaaataggttacacccagttgaaatctttgcaaag

SEQ ID NO: 541579 - DNA, 131 bp, Homo sapiens
gctgcaccgagtaggtggagactataggcacgtgcaccatgtccgagctactttttgtattgttagtagagatggggtttcaccctgttggcaggctggtcttgaattcctgacctcaagtgactcacccg

SEQ ID NO: 541580 - DNA, 268 bp, Homo sapiens
ccccccccctgtcccccatgacccttttcccccggtgacctggggtcccccccccatcttttttcctgttccaaaaaggggggggtggggggttcccctttttgtttcaacttcatggggccctgagcgggaactttttttttccccattaaaattagacccttgggataaatttactttttcaaatttttcccctgaggggttgatgggttaattaaaggagaagattcctaaaatttgagagcccaaataaatgggagccctgaga

SEQ ID NO: 541581 - DNA, 518 bp, Homo sapiens
atagttatatgttgaaggaaagtttttagagaatatagagggtaaagatggatttaaagaattaaataggagtttataagatggtttgttagattgttagtgaaatttgttttattaaaatttgaatttaaattaagaaaaatatttgttaagaaagaatttggagtaaagattagtagaggtgttaaagggaagaaggaggaaaagtaggaagttggaaaggaaggtattgtattatttgaaaatggtgaaattaaagttgaagaggtatagaaaattgaatttgtagataatgagggagaatgaattgttatgaaaaattggggttgattttatgtattttttgggataatttttaaaagttatttttattaagtattttgtaaatgttaattttttaggattttattagttggtatatgaaaatatataaggatggatattttattgttttatagttatgttttttggaaatttatattatttttaagtaaaataaatattagttaaatattgga

SEQ ID NO: 541582 - DNA, 211 bp, Homo sapiens
caacctcaatggtgctgggggtggatctgagttgctgctcatgtggtccttgcttcctggtgcttttctggattgtaccagccatgaaacagcatcctgggcatgggtgtgggcacatgagcacccaccatcccttgtctgtcgcggccccctagagtgcacccacttcacatggccacagcaagcccctgagcaaggagcactgggacat

SEQ ID NO: 541583 - DNA, 297 bp, Homo sapiens
gcagaaggagagacccgggcaagcttcagagcaagagtggaagtttattaaaaagcttcagagcaggaatgaaagaaaagtacacttggaagagagccaaacaggtgacttgagagatcaagtaaaacctcattaacgtaactgcaacaatgaagacattacctagacgtgctggcttcctctttgccttcctccatgatgtaagtttcctgaggactccccagccatgcttcctgtacagcctgtggaactgtgaaccaattaaaccttttttctttataaattaacaaaaaaaaa

SEQ ID NO: 541584 - DNA, 187 bp, Homo sapiens
atcttcacgacgctatgttgtcatgctggaggtgagagtgttgtggttggtgatctgtggctgtgtagaaggtggtagatgcctcatgaggctggtgttgtggtactgcaggtaacgttgttatttcagttgagcctggactgatgcgtgaggttgtagattctccactgaactgaggtttgtggag

SEQ ID NO: 541585 - DNA, 247 bp, Homo sapiens
ttctggaacactgaaatatcccccagcagtcgaggagtgttggctagatctcagtccccatcatcactcacatgcccttaggggacctggggttacagcaccactgccagccccatctacggtaatccagtgacctaaatagaacggaatggcgactgtttcatatgtgcttccgaatgctgatgagggaagtctgaacgagaggggaggctgtggaaacatggtctgtgatcatacacagaggtgt

SEQ ID NO: 541586 - DNA, 803 bp, Homo sapiens
ttagtatatgcaggcataccctactcacacaaatagcttattaccagagataggaaattgcaggtaatttgggagaaatgtcatagccaaatttatagagaaaaaataaaataaaaacttctctatggcctcttgatttaagaaaaaaacagaacaatacaaaaaatataaaaagccctaaaccaggatttatctgagaatgtcttcccaaaagggaagatgacaccaatctatataaacacgtcagtgcgcatttactgccgactccgagtggaaactttaaaaccttaaacagactctcctacagcaaatagatctctatgtgcagcatgaggaatcactgcatagttctgctccaccactaatatgatgggtacacgcaccaaaccatggaaacagttagatgttacacgaacatactgctgcaataatgactgtcaatatgggatcttatgcttgaaccaacatggaaagtactaatttatcacactgttgatccatgattaacggcctcataatcactcaagaaactgaacttactgacacaactctatcattgagcaatcgacaaactatgacctaataaaagcccaccctcgtggggtatcaacaagacatacttaccctgccaaggcacagaatataactatttaaagaggatacaactactattaacaaaagacacatagtggcgaccgaggtgaccctaaaagtcgaatgttcaccaaagtcatcaggttagacagctatctagttcgaacctgttccacgacgatcacacatggaaaacgcataaaaatcac

SEQ ID NO: 541587 - DNA, 865 bp, Homo sapiens
gatggactcggtggagaagggggccgccacctccgtctccaacccgtggggctggctgtcccggggccggcgccgaagctgcagacgcaagtctcgcggcggccagtggccgaggtgtggatgaagccccgcgtacctggacagccctaattctggcccgctggcagtgcagcgtaggcatcccgcctgaagaacattaagcacactggcgggggtcccgcgtcattggctgggtcctgcgtgcggcccgtggattcagggccgccttccagagtgtatgggtttcgacagacccattgatgaatattgaagaatgtggccaaaacaattttggttgcacaaggttcatcgaaagaacgtgctgaacgtttcaacaaggacagcttctaccgtcaactagagtgccagtcattacgaatttctcttacgttatcatacagtgagggtcgaccaatgttaggaaattattcaaaggctacttctccagtgtttaccatccttagctgatcttcaacgaaaggttcgcagaacatgactttcgagaacgaacggactactgagttctgtatctctgttgtgagaacgcccatcaagtttcgatggagctgcaaacttcacggaaacgggagtccgctgaaagttgacccgaaccctccttgaacttttcaattcccatgcttagaacggcctcgtccgacacagacgtgggtagtggccgcaattactcttgcccacgtgggtccacttgaatctggggctcacaacgaccatttgatcgaccgatggcgtactttgcaggcgtggcaacacctgggcttactttggaactgcgatttgacctttgtgtggattcaatgttgcatat

SEQ ID NO: 541588 - DNA, 149 bp, Homo sapiens
aacatatacacaagaacaagttgataagattgatagcagcaatggccttggctggactcagaaaactcattgctattggtcgccacgaagcacacgacgaaacatggtacgtggggtggttgaagataaggatacaaagtaacccggtg

SEQ ID NO: 541589 - DNA, 392 bp, Homo sapiens
ggctgcttttccctcatgtgaaaaaaacctgtttccctttggtttttcctggctttgcacctggtggctattccaaaacagttctccagtatgttttggccctggaaagttggacatgtgtgtggctcaacagttttttcgggggagttcagtgcccttttggtggcccccctctgttttcccctgtgagtttttgcaggtggcgacttcatttgcaaggtcccttacatagcccccctcagctgcttcggaaagcgtgacgaaccagtagtcctcagtgtgtgtgtaagtgaaaaggcccttgtggtagcagggcccatgcttcatttgtggctgtgtccccctttgagggcctggtatccagtaagatcaataaatacttgtggaatgca

SEQ ID NO: 541590 - DNA, 319 bp, Homo sapiens
catccgggccctatattacgagctgtctccacaagaaccgatatggatctagactacgtctgactctccacaagtgcgtgaggggaggggatggctgccatcgtgtgggaggcatgcagacggaatgatgggcctgatggacgtgtcccctatcctgcagattgaggagagcaccacagcggtcaacacacagtctgctgaggttggagctgctgagacgacgctcacagagctgagacataccgtccagtccttggagatcgacctggactccatgagaaatctggtgagtgccttcacatcacctgcccagctcctc

SEQ ID NO: 541591 - DNA, 152 bp, Homo sapiens
  misc_feature (120)..(120): n is a, c, g, or t
  misc_feature (146)..(146): n is a, c, g, or t
ccgacagcatcctacagctaaactgggaaagctctgcggttctcaggcttgtctgaccagcagtgatcttttacatgggttggaaaattaagtctcatttgtacagttttccatttatanatacagagatagaaatagtcaaccanattggc

SEQ ID NO: 541592 - DNA, 137 bp, Homo sapiens
cagactccctgcaccgtcaggtgatctcgcccgccttcggcactcccaaagctgctgggaataaccaggacggttcaggcaccgccgaccctcagaactagcttctttcaagggatgtaccaatcaccacgctccag

SEQ ID NO: 541593 - DNA, 230 bp, Homo sapiens
atacagtgattcaggttcttctctattcctgtaatctaggagtgatcagtgacatctctgacctatgagtagtaatacaggaatgccactagaggagctgtgtattctagccagtctgtaactctctttagccccatttcagcctttcagggatacaagaatggctctataacagctggtcaattgtatgtcagtgttcctggattcatatctagtgtagggcgataaat

SEQ ID NO: 541594 - DNA, 401 bp, Homo sapiens
  misc_feature (34)..(34): n is a, c, g, or t
  misc_feature (185)..(185): n is a, c, g, or t
  misc_feature (208)..(208): n is a, c, g, or t
  misc_feature (253)..(253): n is a, c, g, or t
tgcaaccttgaaaacgcgataccaagggcaagangccagacataaaacgacaaccactgtatgattctacttacacgaaatacttagaataggcaaattcaaagagacagaaagtaactcgaggttactggggactggtggctgagggaatgggacgttattgcttaatgggtacagagtttctntttagggtgatgaaaaagttttngaaatagatagtggtgatgattgctcaacagtgtgaatataatanctttaaaatggaacgtttaagccgggcacggtggctcacgcatgtaatcccagcactttgggaggcagaggcaggaggactgcttgaccccaggagttcaaggccagcctgggaaacatagtgagtccctcgtctctactaaaaggta

SEQ ID NO: 541595 - DNA, 204 bp, Homo sapiens
acctccgtgtgcttcataataagtgcatacagggtttttatccaggcttgaatgacaaagaaattctgacaagtttaatacccatcaatgatagactagataagaaaatgtggcacatatacaccatggaatactatgcagccataaaaaagaatgagttcatgtcctttgcagggacatggatgaagttgaagcgacgtcgga

SEQ ID NO: 541596 - DNA, 115 bp, Homo sapiens
  misc_feature (31)..(31): n is a, c, g, or t
gcaaagatacagtattacagtgacatcagtntatctgcagtatttttacatttgctttgtaagaaggagcatatgcgaaccttttttacaggacccagtagtttttttatatttt

SEQ ID NO: 541597 - DNA, 348 bp, Homo sapiens
  misc_feature (171)..(171): n is a, c, g, or t
cagctggcccaaggccgagaggaacactacgaggaggaagaagaggaggaagaagacggggctgcagttgctgagaaatcacatcgaagagctgaaatgtagcggcacccaatttctagacaacgctcagccaacggattcttttcaagctgctcaaacataaatctgccnactgaactctaggatatttaattacaaaaattaagaacttagacttttttaaaacttttgtattagaaatgcgcatacatttatatgaatatattttgataacgtaggtctagagcttcttttatattcaagctaaacatgaaaaagaagaaaaacaataaagtaaacctgagcccc

SEQ ID NO: 541598 - DNA, 243 bp, Homo sapiens
ggtccctcgtacttctgcccgcgcccggcgtagcgccgcgcgaactggcggactgcggcgcgcctggcctcgctggccgacgaaacgcccgaaggccgcagcatcgtggcgctggccgacaaggccatccacgcgccggccgtgcgcgccgccgatgccgagtactgtgcccttcaccgcgcagacccgtatgagcgtgcgtccacctgaaagaccgcatgatccgcaagggcgcggtcgacg

SEQ ID NO: 541599 - DNA, 777 bp, Homo sapiens
  misc_feature (212)..(212): n is a, c, g, or t
  misc_feature (540)..(540): n is a, c, g, or t
gaggacggggcgatggcgggctgagaggagctgcgtcgtgcgcgaacatgtaactggtgggatctgtcgtgggctcccagatgatggtcgtcctcctgggcgcgaagaccctagtgctcgtcgccgtggcgccatgggtgttgtccgtagccgcaggtggccaaactctaaaatctcctcaaagagtagaggtcgaccatcatagatgacanatttattcctgaggtggaacaggagcgatgagtctgtcgggaatgtgactgtttcattgcgattatcaaaaaactggggatggattacttgggtctcaggatggtctgggtgtcagcacctatttactagttaccatattgccacgtttgtcgttcactctaggctgcaatgttccatggaagaccattaggttggcgtatacagagcagagccaggataacacttcttcatggtatgaggtcgactcatttacaccatttcgctggaagctctagattgggtccttccagaaatgtaccatttagaaggctgtaagagtaaggggantagtgattacagattctcttgcgtggatacaacaagatagttgtgactgtggaggcattttggatggtttaaagctttagcattttagggtaacttgatctgggacaccactccttcaggtggtaggacgaagaggatttggccatgcttgattccagagcattaagattaataaatgctcaaccagaggactaattatggtttaaaagttaaagcagagtagttaggtagtggaga

SEQ ID NO: 541600 - DNA, 135 bp, Homo sapiens
ggaagtgacatcgtctttaaaccctgcgtggcaatccttgacggaccgccgtgatgcccagggaagacagggcgacctcgaagctccaactacttccttagatcatccacctattggatgattatcccaaatgtt

SEQ ID NO: 541601 - DNA, 448 bp, Homo sapiens
tagcagaacttgcgcacgccggagaaaccgcgtacagcggggaccccaccccaagcccgccggccaggcagccgaggctcagggtcgccagaagcttcagggcgatagtgagggtcgcgagccccacgcagagggggaccgccgcccggaagggggacgttgcggtaccgctttactcctcgtcttcattcaccacctgccctctcccattcttccctacttccgctattctcccgacccctccccccttctcttcttccccatcctctcacttccttcctcaccgtcctgattctctcatcacctctctccccccagtcccccatccattactctccatcccctctttctctcacctccactcacctcacacttccccccttctcaatcctactctctacctttcctcgtcttcacctctcctcttacctctctcctcctttccttg

SEQ ID NO: 541602 - DNA, 146 bp, Homo sapiens
ggactcgtacgttatgtaaagtactatttgtccatcttaacatgaatatttattacattacttttagttcaataaattttaacaatatttaaaaattatctaaattcataaaagtatttcataaatttcaacatttaattattatg

SEQ ID NO: 541603 - DNA, 1302 bp, Homo sapiens
  misc_feature (300)..(300): n is a, c, g, or t
  misc_feature (308)..(308): n is a, c, g, or t
  misc_feature (313)..(313): n is a, c, g, or t
  misc_feature (421)..(421): n is a, c, g, or t
  misc_feature (643)..(643): n is a, c, g, or t
gacgacgagcgtgataatccgtgattccatctaattctctcgtcgacacacctgtacggaaggcgcaatgcggtaagtctcttgacctaccgcgtgatatctcaggcggcatatgcagccgtccacgttccctggtagatcggtagtaatttggtcattatcacggcgtttgaactaagcatattgtattcgcccagaatggactagaggcgccttcatcagtgagtagccgctccatggctttaaacgtaccgaactctcccgctccttaatgtatctctagttgtggtgctccgatgngtgagtgnacccnagtcctacgtctacacttgatgctatctgacgcgtcttacaagtgtcccgttgttaattacgtcctcactcgagcgaatgagtaactgctctcaggagccgccgtganacatagaaacttccgggaactaggacgaaaacgtatagagaaatagcttgggttcaaaggaaatggccttgtgccccatctgggaaaagctaactagaattaggcgggtactatcttttggtgccgccataccaaggagtgctccgtacctacgagaagtgctcagatagtcgaaggcagttgtacaccaaactatgaaaattaccccgtactgggacaccnccaagccgtttttttaaaacatttaatacggtgtgccatggtggtacaacaatgcgtttccccaccttttccccacggttggtcatacctaagcaatccaaggcccaaaccaagcaacagtagaggcgaatagggtggtctgttgcccccaataagtggctgggggaagttagaacaggcgtttgaacacacggttcccccacacaaaaagtttccgatagaatttttgccccgagcacatatgttgggaaaacaggacataacaggggctctgcttttgacttcggcttcttttggtggacctttggctacacaagcccttagggtcgtagaagggtctaagccgaggacttctggaaacacctggcaaccttctgaatcctaatggacaacctgggaattgtggccaccgctctttatgtgtgttgccggtaatattttataaaaacggtattttctcccataaacccggttgatggagtgccttgacgttccaacaacaaccttcgtccattattgggcggtatcggtgccacatggtgccggcattgccaaaagtggcacacacgaacaagaccttgtggcggccagaagcgggaagcaatgagtgttcaccccgcgggggggggccccccttttataattcacaattaaattca

SEQ ID NO: 541604 - DNA, 533 bp, Homo sapiens
acacctcctccttgctggagcagctgaacggcagtttaactggtgtcccggctggccaacctacgccagagcgaagaccagtactattttcgggtccccccggtggcttcccacacttttgactcgggcgttccttccggtgtcactgaggtggtcgtgaagctctttgactctgatcccatccctgtgcgggtccctgtagaagtctccaggaagaacccttaatttatggagaccgtggcggagaaagcgctgcaggaattcccccaaaagccccgggaggagtgaaatgtggatgttgcttttgcacctacgggggcatttgagtccagctcccccccaaatgaggtgcagccccccaaagagagctttgcccgtcccccagtaaccaggccccagcctccaggcccccaactccgcccagcctctccccgctttgggtcctgccctctaaccctcgactttgctggtcatgggaagaacaaaattgctcccgcatgccactaattccataaaactgttttgtgggctga

SEQ ID NO: 541605 - DNA, 104 bp, Homo sapiens
gtgtcagtgtgatgatagggatatggaattgttatatgaaaggccggtaatgattaatctccattttaccaggtttggattaggtgaaggtgcctgaccccagg

SEQ ID NO: 541606 - DNA, 661 bp, Homo sapiens
ggctggagacaacactttatcagtttgacactggcaggagtggaacagtagacccacaagaatcgcagaaggccctgacaacaatgggatctcaggctgagtccccaggctgtgaattcaactcgcaaaacgatacagcaccaatggacagatcaccttcgacgactacatcgcctgctgcgtcaaactgagggctcttacagacagctttcgcagcacgggcatactgctcagcaaggtgtgtgaatttcccatatgatgattccatctcaatgtgtcatgagtgttctaaactcaagaggaagctgcatgaactgtactcaacattccaactgcagctctccttgtgcttgtcctcttctgccttcggctacatatgtatacacacttacatcacgactttctcttaacagctgtgtaacagtttatcactttatgtacaactgaagttcgtcctccagtttagataactaaacttcttgggaacctttaactaagatctagtctgttacaccattctagaactttcctgagccattatcagtcatgccttattttctggctaaaacctctatgtaactcttacgtatggcaaaatgtgtaaggtcacctcatttcattctccattgtggaggatcctaaaagactggttactccggac

SEQ ID NO: 541607 - DNA, 231 bp, Homo sapiens
ttagaggtatcccccgcgcgcatatatcctaatctaagattgtgtgctgaggctgtttattataataatgtttgtgtcttcggctataagaatagggcgaacgcgggcctgcggcgtattcgatgtttaagcctgagactagttcggactccccttcggcaacgtcgaacggggttcggttggtctctgctactgtggagataaatcatattatggccaagggtcatgatg

SEQ ID NO: 541608 - DNA, 585 bp, Homo sapiens
gctgtttatcgcccccttatgtgggccccccgggtggcttgagcctcatatgcgatggattgtccaacatgctattaaggtcccggatcttttgcccccggatagagcttcgaggatccactcctgggttctattctgcccagtgggtctcccgggactcgggatttttgttgcccttggtcgttcgatcacggtgcccacacaacggggggatgcgtgggcctgttaagctcgggtcacggtgattaggccccaaggggggccgcgtgggcccacggacacacggcgctcctgagggttctgggcacaccgaccaacgccggcaggacagaggacactggagtcgttgagggcgcgccacgccgggtatcccggcctcccgcgagaatgggtgatttgatggagggcgggccccggagtgaagagggcgtccctcctcccatttttgtttttggaaggctttctgcccagcccctttgttattccctccccccaccttggccccttgggtttttcccccacagggtaggtgttttattttttttggccccttgggtttataaaaataaatttattttcttttta

SEQ ID NO: 541609 - DNA, 899 bp, Homo sapiens
cttatgtaatatttgatcgccgtagtgactctttcagctgactccacctcagttttagggcagcgccctgaacgcatccgctaccatggcagaggtcgctttgggatcatggagaaggcttattgccattattttgtgaagttggtggaagggcccccaccttcacctgagccaccaaggacggcagctgcccatgccaaagaggatatttagcagcttctcagccggacccatccttcacactctatgatgaggagatccatactccacagtgtgtatattttgccattcattttctaaaaatcagacctaaattcacggtcgataacccaacacaaatgctctcattagccctcatctccgtcctccttctccccctttcctttggcgcgggatatttctagatcgctcttaccatgacctatgtattagataaatcacctctcgccccgctgtatacattccctctccgcctctttttcctattcttcttaacctcgtgttaatctatataactctccccaccctttcctcctctcaagttcctctcctcccacagcgcccctttctttctgatttagactccgccacccacctatgacagttccgatcccgtctagtctcgtccatgctttcctcccgctgcagttcagcactcaccttccctctacttttccttttctctatattccccctcaaacctgcacatacatccttctccgatcttcgtatctacgtcgctcctcattatccgccagtttgtagcttcgttgtagctgttacttcatatcccccgtccaaacacatcaattctgcatgccccgcctatccgtattttctccgctccaacatgactatacttctatctctcctgcgcccccctctcccacattctcatt

SEQ ID NO: 541610 - DNA, 736 bp, Homo sapiens
cgccttagataactggttataatagaagcagtctgggctactttaaagaccgattgtcctcccaatggcaccattggtctgtaaccagatcaacatcgggatgttctttacaacaacatcgtagccaacaggcacttgtacatgtcgcatattaagccttcatccttaaaagagtctgtatggtaagacctattaggctccaagctgtaaacaagtctctgtgttaattcatcaaggcctccaatcttgttgtaacgatagtatggtaatcagcgcgttaatccagatttgtataccgcagtacagcaattgccaccgtaatcacggccttataattagcatgcttacacatgtttagtcatgcatcgataatctatggcagcgtaagtcagtctccatacaaccgctagcattcaatgactgtgtagtctgttaatctgtaacatttgtgcctataatgcgtatgaagtgagaacccttcactcaatcgagtatcagaagcgtctattgcaaaatcttctccagcaattgacagtatagtacctccgttgaaaacgtaggtcgaacatcgcagctgctaagggctcccgtctctgtgcagttccatcatcaagtctctgacagcagccgaattcatggctgtagagtacaccatcgtacggctgcgcctgcggatacgactcttgctgtctcacctcgtggcgaattcggcacctcgtcacgaattcggcacgag

SEQ ID NO: 541611 - DNA, 177 bp, Homo sapiens
  misc_feature (26)..(26): n is a, c, g, or t
cattgagcaatgtgcccagctcttgntgtacctactgctcaatcaggatcggtcactgcaggccctgatcttgctatatggaatttaccaatgatagatttttcccttcatatgtggcagatatgtgtaaaccgcctgcaccatcttgtaactcatgaaatcccacaccatttcttc

SEQ ID NO: 541612 - DNA, 160 bp, Homo sapiens
taggtggtgagagacgagaggatgccgcggcatccgctcagatcgagaagttctcgctgtggatctgcgaggggaggattccggtctcgagcaggtcatcgcggatgctgtccatccagtggcccggtccgcacaggaagatgtcgtagtcctcgatgtc

SEQ ID NO: 541613 - DNA, 841 bp, Homo sapiens
gtcatggtagtacatggcaaggatgatatgtatgatgtagaatatgagcttgcgtaagtcggagtgaagttaggttaagcacctagtacgagtcactaggaaaacatggatcagtacatatttataggatctccggcatcaacaatcgcaagacatgtccgggttcacctgaataggctcctcgcattcgagaattcgcgccatccgaagtaggatcagaaaaaaacaatgcgcgtatctccctttctttatctggtataaaaggatggcataagtagagaccctcggagatccgtggcaggcctaacctgaagtctagtcgactaagttcattattgataacagactgtgagcattgtcacatctagattaccactatttaaggttgatcatccaatagagcaagtaggtgggagtcgggatcgggggggatgtcagcaccatctgggagcttgtaaggagactggggatcacgcaggtccgtacgtataacgatacataaccttttcagagttccatgctctcgattgtatagtgtccagaacactggttttgaacttgtcaagggctagatttagctctagtcttttaaagtaatgcgtctttgcctcctccaatggatacgtgtagtttgtctattaactgttcaactcagtaattaccatgtcttactcttgttcggtgaagagttaactgtgcagggcccttttcatccaagttaagtagttctgttttacgcacaaggagaagttgccctaggtggcagcgaacggttgacactatggcgcaagttttcctcaaattacgcgggttaccatttggatacatcacttactttatg

SEQ ID NO: 541614 - DNA, 205 bp, Homo sapiens
gggggggggggggccccccccaaaaaaataattttttggggggggccccccccccccccccccctaggggggggggggggggttttttccccctgggggggggggggggtttcccctttttgggggaaatttttttggggggggggaaaggcccggggtttttttttttttccccccccccctttaaaagggggggcccccccca

SEQ ID NO: 541615 - DNA, 108 bp, Homo sapiens
tgcagggagaagcgggtgggggtagcctggatgtgggccaagatccactgtccgtcctgggcggcacaagctcattgaagaagaaccagcccagccagccccctatct

SEQ ID NO: 541616 - DNA, 141 bp, Homo sapiens
gctagggtgaactgaagactatagcgctctccaagctgccagagagagcacaatagtgtggtggaacttgtggccctttccaaggccacggatctattcggcctgcaaatgtcagcccacgcatctccctgatgcttgtgg

SEQ ID NO: 541617 - DNA, 996 bp, Homo sapiens
  misc_feature (996)..(996): n is a, c, g, or t
ttaccatgacgacagagatgatgttgtggattattgggccaaaagaggaagaggtcgtggtacttttctttgtggcagacggcgctttaacttcaaaaaatcaggtagcagtcctaactggactcatgacacatacacaggggcatgggacttgcacgcacacacgccaacatcacacacctccctacgacacacagatcatcattcaacactacctccagctcaatattctgtctctagtactttttttatacctcacataacacaatgtatgtcatccgtctcactacacttatcaatcacaacacactacaaaacaataactaccccagaatataaacaagaaataataatacccgtcatccaaactccactaaatctctatctcgacatcaacgcatcacccttcatccgccattatattaccaaatcacacaatattaccaacaattaatatcctatatcatatgcccccagaatccatattcaccaatcatccctatctcatatctcatattccacacccccctatttaacatataatatgatacatcgagaattaatgccattgccctcatacccacaacccacctaccgatattcacaattacactcagccccccgctactttatcatctacatcgaagtcatctcatactctaaaccagctcgcattacagatcgttagattctcaaaccacccttactttctctcttacacatacattcacacatgccgtatcctacatcatccaaccgcgagtatatccgcacatatactcgtctacactccactatattttgtcgcgtctatattcgtccctcttcgcatccatctatctttccacccacatccccatctccatttacagaccaccatcgccccacatactttatccattcattaccccactaccctattctgttgtccgccagctgcaaatccgccaagaagatatcactcggcgatgtatatcaaataatcatacattatgn

SEQ ID NO: 541618 - DNA, 144 bp, Homo sapiens
  misc_feature (30)..(30): n is a, c, g, or t
  misc_feature (44)..(44): n is a, c, g, or t
  misc_feature (96)..(96): n is a, c, g, or t
  misc_feature (103)..(103): n is a, c, g, or t
caggatttaaccatggtttattgcagaccnattgtgtgccaggnatgagcccagtgctcccacaaacagtgtctccaggtacgagaactgtaattncgacccnggaacaccttcctgcactcagacagaagcatgtgcagactg

SEQ ID NO: 541619 - DNA, 404 bp, Homo sapiens
aagaaaataaaggaagcaaaggggaccaataagactgttgtgaattcagttttaaataatttggtcagggaaggttggtaagtgagaaggttgtatttgagggaaaagccaaagaatatgaagagcaaattccccatgcagaattcaagggggaaaatatttgaagcagagagaatggcatgtgcaaatgctctgaggcgaagcaagcctagcacatttgagaatggctggagacaaaagaaagtcaaagaaatgaggtcaaagagggggtgagttcaacaaggagtaataaggtgcttgctggctgtttcttccatacctttatgatccagagagaattctcactgcaatttggatacttgcatatgtaatttaaagttaataaaaagatcgggaccaagaaa

SEQ ID NO: 541620 - DNA, 210 bp, Homo sapiens
ggccccaggttagactaacaagaagactgaattgtataatactttaaaagctagtgatctatttgctttctcttccacgacaaatataaggtgccatggaacaggctgttcccaaatgctgactccaagaggtaaagtgttatttcgttgattagttatttcttaggcttagcttcgcgtttatttgttaagattgttaggtctacctgg

SEQ ID NO: 541621 - DNA, 190 bp, Homo sapiens
ccatatatattttagaatagcatcgttatttctataaaaaaaaaatgtcatgaggggaacaggctgaacaactaccggttaggtattatgcttactaccggggtgatgccatcattcataccctaaaccccagcatcatgcaatatacccatgtaacaagcctgcatgtgtactccctgcgaacctatga

SEQ ID NO: 541622 - DNA, 420 bp, Homo sapiens
tgtctctataaaaaatataaaaattagctgggtatagtggtacgtgcctgtaatcccagctactcaagaggctgaggtggggcatattgcttgagcccaggaggctgaggttgctgtgagccaagatcaggccactgcattccagcttggacaatagaaccaggccctgtcaaaattacgacaggacaggataggacaatttatttttcccaaaagttagatcacttatactttcaccagcaattaacacaagtgtccattttcttacatctttgcctgcactgtttgttgccattttatgaaaatgtttgccaatcagatggatgagatcagtgctttacaaactgggtaccccggtgctggagaggttctttgaagctgccccagggcctctaagggttggagaggaccactcaggat

SEQ ID NO: 541623 - DNA, 225 bp, Homo sapiens
ccgctagaggccaacaagctgatatccatgtcagctgaggctctcagttcgcccaagcgtgagtacaacagaggacagctgcagctgaaggctggcaccagcccccaatcccagccccatcttcaggccaatacatgctgctgggacgtgctcagccccagcaccaccctgcaggctccaacacggtgtgtgctgtccgctatgactgcttccagctcatcctga

SEQ ID NO: 541624 - DNA, 206 bp, Homo sapiens
gtgttgaggttgcggtctgttagtacgtactagtgatgccagcagctacgactgggcagagataggagaagtaggactgctgtaattagcgacggatcaacgcaaaggggcgtttggtattgggttatggcagggggttttatatcgataattgttgtgatgaaattgatggcccccaagcgccacgctatgggcctcccaaagag

SEQ ID NO: 541625 - DNA, 348 bp, Homo sapiens
accccgtgtaactggaaggagctattcattatagaaattatctttaaaatgagaaaaagaggctgggcgcggtggctcatgcctgccatcccagcactttgggaggcaaggcgggcagatcacaaggtcaggagattgagaccatcccggccaacacagtgaaaccccatgtctactaaaaatacaaaaaattagccgggtgtggcggtgggcgcccgtagtcccagccactagggaggctgaggcaggagaatggcgtgaacccgggaggcggagtttgcagtgagccgagatggggccactgcactccagactgggggagagtgcaagagactccgtctcaaaaaa

SEQ ID NO: 541626 - DNA, 173 bp, Homo sapiens
gatcaggacagcttttcccctttactcggtttcctacaagcaagtaggaaaaacagtgaattttccctaaaatgtccaatctgtatttatgtcccctgtcagtgttttgctgttggttttttaaaacaatctgatcaataaatcttatccaaatcaatttggttccagttcca

SEQ ID NO: 541627 - DNA, 1059 bp, Homo sapiens
  misc_feature (1059)..(1059): n is a, c, g, or t
tcgctcctcactccatcccagttctgcattgctacgctgctgtgacgttggccgaagcgcccgttcttaacgtacccactaggacgcggttgttcaacgaccgactgtagcagaagtcaatccagaaccaatcacccattgcattgttacgagagacacgagcgacagatgacccagagaacagcgaaggaagagcagcattggctcactacgtggtcattacgagcaggtttgccagcgaaagaccatagaatggcatgcctcattcctcgagctgtgcactcacatggcctagcgtcgcgcatcgatgccattgggtcgcctcgcaataagaactccacgatcagtggtcttaaggacgtataatctcggctccattgaccaagactagtcggaacctgaggaagtccaaccaagtgatggcgagaataggcgccgtcgtgcgcgagaaagtacaaggcacattgtggattagactaggatcgagcattagtcccgcacgacatcgagggacctcatgtcaacaggagtacgtagtggctctttttcgttggccccgtgaacgcctcttcccgtggtcaatgcgtggagcgctggggtactgggtgcctggtctcttggagacggatggcgagcatggagtcattctccctaccttcctggctgacattactccgctgacttcaacgttaccgcttcaataggcgccctggggggcatgcctcagcttggcactcgttagtgccctgtctgggagggttgtcagaccacacttgcttgatcaacgtttcgtgcaagtgccaagtagtaaaagcatctaacattaaagccaaattaccaggttggttataggcccaaagaagcaatcatcataccaccaatagctaggagtaaccaacgcgtactctcgaaacacaattattcccattagagagagagggcccagagttttagacagtacagttaccacgagcattcgcttcggtcaccaacgggtgggcccactattaggagagagcgcaggaaaaaccacatatacgagccaaggaccccagtccn

SEQ ID NO: 541628 - DNA, 312 bp, Homo sapiens
atagacaactagggtcagtctgcaggtgtaagccatttaccaagatagttgtaggtcaagaagggcagatttattagagaaagtcgtgataatatgttgcagtgggcagctcagcagagaaggggctacctgcaaagaggcaagggctggaggaaagttttatagggtcctgctgaagggtgctacgtgtggaatgaggtcattgtgcccgcaggttgtttgtgattagctgtttctagcaattgttcatacaataattgttcattattgttctcaacttggggctctccccaacctggggacccttcctta

SEQ ID NO: 541629 - DNA, 288 bp, Homo sapiens
ctgactacggaggaagtccttggttacatgtcattatagcatttccgacaagttataaagttgtcattaccctctggatagttaaccttagggtgtgtgtcctgaagactatcttctggtctcgaaatggacatgatggatccactgatgtacagcagaaagcctggaggtccaaccgccgtagacaggaaagtgctgaggtccatttgtatgcacacaaagaaaagagtttgttcctttcgaggaaataaaattggcctgaaagacgtcattactctacggagacat

SEQ ID NO: 541630 - DNA, 350 bp, Homo sapiens
aaaaaaaaaaaaaaaaaaaaaagggggggggggggtttttaagttggcccccaaagggggggggggggggcttgaactttttggttaaaccccccccttttaaaaaggggcccccaaaacataggggaaaaatttttttggtgggggggaaaaaaccttggctttgggggccggattaaaagggttaaaagcccggggtttacccattaataacccttttaccttggggaaggtaccggcccttaaacccttgggtcccctaatgggaaaagggggaaaaaaaaaggcccctttccaaagggggggtttgaaaaacaaaggggggggcccgggttttctttggcaaaagg

SEQ ID NO: 541631 - DNA, 418 bp, Homo sapiens
tatatacaacttctctgttacttttttttttgagacagaagccacactctgtctacttggctgtagtgtggagcacattctaagctaactgcaacctccgcctcccagttcaagcaattcttctgcctcagcctcccaagaagctgaaattacaggcacccgccaccacgcgaagctaatttttgcatttaggtagagaggctgttctacaatagatgcacatgactggctcaaacttctgacctcaagtgatctgcccaccttggcctcccaaagtgctgggattacaggtgtaagccactgcacccggcctttttaactttaaacatgttttagaattcgcctaaagatcaaaatatcatggattgaacctcatcaattgatagcagtgagtgactgacgcttccaaatcaagaaa

SEQ ID NO: 541632 - DNA, 885 bp, Homo sapiens
  misc_feature (25)..(25): n is a, c, g, or t
  misc_feature (30)..(30): n is a, c, g, or t
  misc_feature (33)..(33): n is a, c, g, or t
  misc_feature (37)..(37): n is a, c, g, or t
  misc_feature (54)..(54): n is a, c, g, or t
  misc_feature (56)..(56): n is a, c, g, or t
  misc_feature (80)..(80): n is a, c, g, or t
  misc_feature (91)..(91): n is a, c, g, or t
  misc_feature (149)..(149): n is a, c, g, or t
  misc_feature (157)..(157): n is a, c, g, or t
  misc_feature (168)..(168): n is a, c, g, or t
  misc_feature (184)..(184): n is a, c, g, or t
  misc_feature (202)..(202): n is a, c, g, or t
  misc_feature (209)..(209): n is a, c, g, or t
  misc_feature (274)..(274): n is a, c, g, or t
  misc_feature (323)..(323): n is a, c, g, or t
  misc_feature (333)..(333): n is a, c, g, or t
  misc_feature (422)..(422): n is a, c, g, or t
  misc_feature (435)..(435): n is a, c, g, or t
  misc_feature (443)..(443): n is a, c, g, or t
  misc_feature (460)..(460): n is a, c, g, or t
  misc_feature (491)..(491): n is a, c, g, or t
  misc_feature (702)..(702): n is a, c, g, or t
  misc_feature (704)..(704): n is a, c, g, or t
  misc_feature (728)..(728): n is a, c, g, or t
  misc_feature (762)..(762): n is a, c, g, or t
  misc_feature (782)..(782): n is a, c, g, or t
  misc_feature (859)..(859): n is a, c, g, or t
tatgggaataaatacttgttaaacntcccntanaaanatgcattaaaacgtccnanaacacaagccaagggccgtaaaantaagggtaaancaagaccgaatttcccgcacggaccagcaggaaagccagtcacccaaaagagcccaanccccaaanccgccgaaggngcagggcggccccagncccggggcatcctgaacnggtcccnccccccgcgcacggcccgcatgggggtcaccgggcccgtcccacccgcgtgccgccgcaccgtcntcccccccacccccatgaaggggttgtaggtaaacccccccgccagggnggatggcacngtgggccccccgatgccgtacctccccctggcccaggccagcctcccccggatggcggcattgccgcggccccacgtggcgtgcaaacntgaggttgttganggtgtacncggggccacagtagacncctgtgtccggggggagccggcccaagaccnccagcagagctttacacatctcatccgcagtcccttcatagaacttcccgcagccagccacaaacaaggtgtcacctgtgaacacggcagggggctccgagcctccgggcttgctcacgaataacaaatgtgtcctgaagtgtggcacggggtcgccaggcacttgacgttcagagaccccacctgcagtgtggacaggtgagtgatcttntnagttagggccccgatacggtcgtnacccccgtacaccttcagtcccgactccagcttnaccagtttctcattcccgcnagcatggtccctagaagtcaaacaggagacctgggctgccttctgagctgagggggctgcctgctgagctgaggggntgcttctgctcttaaacctagtcaaa

SEQ ID NO: 541633 - DNA, 492 bp, Homo sapiens
cgctccaatatcctgtgtttcgcaggatcctgattagatctgatttcaaaactcgtgatgcatttgaattatggtcacatggctctctgattgttaccacggtagagcggcccccagctgtctacttcctcacagctcctactgctatcaccagtttgagaatgcacacctgtccctactgctccaaaggcagaagcgcatcaactgtgcccgatccactctctgttgccctgcagggctgcatcttggtccctggggcgacattatctacagtcttcaaatcaggaatgggaggtagtcttgtaggcagctagtagcttctagaagctgcttagccgtcccttccgccggtttctcaatataacagctgggcctgaactgatctccaagggcctcatcggcattcgtcctcgatcccagcaaagctgccctttgagaaccacaggtaggcttgttctacctgcagtacagccatatcctccagtgatacca

SEQ ID NO: 541634 - DNA, 355 bp, Homo sapiens
ttcattaggcaaattagtgggtgtgatatggtatctcattgtggttctgacttgatttccctaatgactaatgatgttgaacatcttttcatgtgcttactggccattgtttatcttctttggagaaatgtctattcaaatcctttccacatatttgaactgggtgtctttataattgagtcacaggttctttttatattctagacacaagtctctcatcaaatatatgatttgcaaatattttctccaattctatgggttgttctttgcattttttttttttttttttttttttttgggggacggagtcccgcacggaaccccagccggggcgacaaagcgaaactccgtcccc

SEQ ID NO: 541635 - DNA, 156 bp, Homo sapiens
ccacttcatcaccaacattccaaccaatgcaattcaattgcatagcattccaaatcttaggcataataattgtacagctcaatcaacatcaaaacacaccaagtgttttccaattccacataatacatgtaatgccaatgaggcaatggacatgac

SEQ ID NO: 541636 - DNA, 121 bp, Homo sapiens
gtatctatacctgctgttagctgaggaagaagttcacatgttgtgactgtatgagtcaaactgaagaatgattattacacgtgggaaaaagccaattgcttctcttagaaagctcaagcta

SEQ ID NO: 541637 - DNA, 327 bp, Homo sapiens
atactggaccttctagttttttgttttgttttgagacagggtctcaatctgttgcccaggctggagtgcagtagtatgatcacagctcactggaacctcgaacacctgggctcaagcaatccctccgccgcagcctcccgagtagctgggattacaggtgcacagcccagctaatttttgtatttttaacagaggcaggatttcatcatattgcccaggctggtcttgaactcatgagctcatgcaattcacccaccttggcttcccatagtgctgggattacaagtgtgagccatcgtggctgccctagtagaaggtccaggtatg

SEQ ID NO: 541638 - DNA, 153 bp, Homo sapiens
ccctcactacagggcgacgagagcacataggaatgatttgaaaattgtatgttcaacactgtcattttatttttacgatgttagatatggtgagtagagcgattgaggtgaagtagattaggcgtagccagacgtagagcttaaggagtaggc

SEQ ID NO: 541639 - DNA, 332 bp, Homo sapiens
tattggttctgcattaatgttaaacaactcacgtcggtgacggcgagtaacggacaggcagcttcattagcgctcgcagcctttcctgtgaacctgtagcaactctttattttttcgtacttgctctgtgctgcttcgagcccctaagctggggcttcaaatactacgaaaaactcagtattattcttacagcaaacttgtccaaaagtcaagagtaatgaagaagcctcttgtgaacttgtttaacgatgtcatcgtgagtgcttcaaggaaatacgaaaggacaacaatacccacgagctatgcattgttttctgtattagatgcggggg

SEQ ID NO: 541640 - DNA, 137 bp, Homo sapiens
tggaacgtggaggtgtagtgagccaagattgcaccactgcactccagcctgggagacagagtgagactctgtcttcgaaaaagaaatatgtgagaatttagatgataaagttaacaaagttaactttttagatgtaa

SEQ ID NO: 541641 - DNA, 451 bp, Homo sapiens
tgccttgtcatgtgactcccccctaaggaggggcccttggggaggggctggggccctcccaatgcaaccagcatagccctttttgggcccccccatggtacaccctaaagcctgaaacttgaaccccaatcctttgacagaagaaccccagggtcctggagccctaagtgggactaactttccttcattcaacccaccggggtttcaaactcacctcaccccactgggggtgatttggaatttggtgccccaatgtaagcaccccttcatttgggaattccccacttgagaattacccttttgccccgaacatgttttttttttccctcagttgggcccttccttttggcaggatttttcctccctccctctttccctcccttcctctttccatttaccctccgattgttcctgaaccgatgagaaataaagtttttgttgataatcatca

SEQ ID NO: 541642 - DNA, 105 bp, Homo sapiens
  misc_feature (88)..(88): n is a, c, g, or t
  misc_feature (100)..(100): n is a, c, g, or t
gcggtcactctagacgtgactccccccctcttctcctaacggacgacacgacggggggtccgacgctcgacacttcgtaactactggntcactacgctgntttcc

SEQ ID NO: 541643 - DNA, 107 bp, Homo sapiens
tcaatagtgactgatatagagaaggtacaccgtacacccctttttacaggagatgctgcctgactgaagcttactgatgtgaggcttctagtgggataccctacctt

SEQ ID NO: 541644 - DNA, 430 bp, Homo sapiens
ccaaatttgggggggggggggggaaagaagggatttgggggggaattttccccccccccccccccccccaaggggttattttttaaacccaaaaagaatttttagttcccccccccccagccccccaattttttgggggggggggaaaaggaccccttcaaagtccccggggttggggggggggaaaggggggcaaaaaacccgtcccgttttttttttagggcaaaaaaaggggggttaaaaaaattttggggtccccctttagggggggcccccccccggccctggggcctggggggtggggatttggggggcaggggcacccttgtttcccccgtttgttttttttcccccaaaagggccctttttttttttaaaaaggccccaaaaaagggggaagggtcccggaaaaaaaaattttttaaaggga

SEQ ID NO: 541645 - DNA, 1463 bp, Homo sapiens
  misc_feature (135)..(135): n is a, c, g, or t
  misc_feature (302)..(303): n is a, c, g, or t
  misc_feature (425)..(425): n is a, c, g, or t
  misc_feature (607)..(607): n is a, c, g, or t
  misc_feature (621)..(621): n is a, c, g, or t
  misc_feature (1463)..(1463): n is a, c, g, or t
gtcacaaagatgtcagagacggccgcctgccataacgaggtagtgtgtaatgcggaatgtggagagacagagatgctgagtatcatgcatgctaagacggagacgaatgacgtgcccgaaggtgggtgacggaangtacggatggatggaccgtacatcatatgagtagactcgagatagcattgtacgtacggactgaccgatgttagatgactgtatgcatgtctgatgttctaggcttaccgtgggtcaatcagaggcaagtctggagacgcagtggactgcgagcgagtgcactcganntgctcgagtacactccacgaagcacatatagacgcagagccaggaggagtgagcgttaggaatcgactagaagagatcgggagaagaagtctgaaacatcaaatccatggacataaggcgcngggctggagaacccctactttcactcctcatctcaacatatactcaccgtacatacacagtataatctacagaggcgtgcggggtcagcgctgtgcgcgagcgttatgtaagagtgcgccaccgggctcacccgtccacgagcgaggtgcttcgcagggtcagcgcgacgaccagtcgggcntgattgaacacccncccgggcgtacatgcgcgagcacgacctcttcgacaaacgctcgaaaggaccccggattggaatgttagacttcgcgaccatagccaagggttgcgcaggcgcagaatacccagagacatatccccataggaccgttttgccgacaggagccacccatgtggcgttatgtaatcttctgccgttttccattcccacaggagttaaccactactactaaacagacacaatagcgacaagcatatataatcgcagcacagaccctcacattatcaacaaagcgcacgtttgatggagaccagattataggtgcacatacattctaacagggccgggtgaagcaaattacttttccggataacacagaggggtttcagaagggggccagagtattcacacacacaaacagttgtggcagttccgtgccggagcgaaatttagaaacacccgatgactaatcgcggaggaggccacctttgaccgaggaaagcccacagacttaccccgtccggtggataacacccataacggtgtatcgtaggaaaccccttcctataaacctttttgctttgagggtaggttgagacccatactctcggtttcgccactcttcacttcaacaatcccattcgcaggcagggcgcggagcggcacacaacacaagaagaagcgaccgtctttcgtgctatcaaaaagaacgagaggggcggccacacacaaagtttgtgacttcacaacagcggggaagaccagaccacacgacaagtcctctttagtatttccgcgggacagcgaggagtttcgccccagctaaaacattgggagacagggcgacggcaatagn

SEQ ID NO: 541646 - DNA, 217 bp, Homo sapiens
tatatactcgagcgtagtgagagactgcgtatagcggatacactctgaagagagagcaggagagctataacatgatacatatgcgagtttgctgcacgccttaataaagtgtgaatggacgtcgaatttagcagaagcaattacactggccgaaagaaaatactcagatgagaagaagagggttgatgaactgcagcagcaagtcaagctgtataag

SEQ ID NO: 541647 - DNA, 179 bp, Homo sapiens
ctcgtcgtggggctcatcgtggcgcgtggggtgcatggccgttcttagttggtggagcgatttgtctggttaattccgttcgttatcggaattaaccagacaaatcgctccaccaagcgccacccaaagagccacccaacgagccaccccatgcgccacaccatgagcctcacaacgag

SEQ ID NO: 541648 - DNA, 242 bp, Homo sapiens
acctgaaaatgccatacccatacctgatttatctgaaggcaattctagatataactataaactaggaaaactgtgagtttaacacaagtctacaacacaagttgaaacacctgatcttgtggatactgacatacacttaccactcttagaacaccctagttttactaactcacttactctgactgactcagacgttgagatgaaagaactctgatggtgtgtgaccagaataaactatatta

SEQ ID NO: 541649 - DNA, 687 bp, Homo sapiens
ttctatggttatatttataaaatagctggttaaatgaagaaataatgaaatcagaccatcccttcagggggaaaaattgcagtgttcaagagttgtttttttgtttagtttttttgtttttttgagactgagtcttgcgctgttgcccaggctggagtgcaatggcgcaatctcggctcactcaacttccgcctcccaggttcaaatgattctcctgcctcagcctttcaagtaactgggataacagggctgcactaccacacccacctaattttttgtattttcagtagagacagggtttcaccatgttggtcaagctggtctcatactcctgacctcaggagatccacccaccttggcctcccaaagtgctgggaattacagctgagagccaccatgcctggcattaatgttgttttaattgtcacagcatctgctactagaggatcattattatgatcatttccagtgaaagcatgtttaaaaacaaacaagaatttagactttaatataaaatgtgtagattgatcaaacttggatgttatgaaattttagtgtttttatagactagaaccatctaggaaatccatttcagttagattccgtttgcttggtttgatgtgttcctccaaatcaggtgttgcatgtatatttggaaaggctttacaagggatggccgagggtccc

SEQ ID NO: 541650 - DNA, 460 bp, Homo sapiens
  misc_feature (78)..(78): n is a, c, g, or t
  misc_feature (90)..(90): n is a, c, g, or t
  misc_feature (94)..(94): n is a, c, g, or t
  misc_feature (151)..(151): n is a, c, g, or t
  misc_feature (176)..(176): n is a, c, g, or t
  misc_feature (224)..(224): n is a, c, g, or t
  misc_feature (328)..(328): n is a, c, g, or t
gggtttcaaagggagcgcacttccgctgccctttctttcgccagccttacgggccgaaccctcgtgtgaagggtgcantacctaagccgnacgnggtagaggcggcgcaccccttctgacctcagtgccgcgctcaagatcagaatgccanaacttgaaggacttgcgggacggtncccgggcccggggatgggcacgcctgaagctgttgtgggggcgcgcgnggctacggtgtgcgcgaatctgtgttcaccgtggaaggcgggcacagagccatcttcttctcggatcggtggagtgcagcaggacactatcctggccgagggcnttcacttcaggatcccttggttccagtaccccattatctatgacattcgggccagacctcgaaaaatctcctcccctacaggccccaaagacctacagatggtgaatatctccctgcgagtgttgtctcgac

SEQ ID NO: 541651 - DNA, 130 bp, Homo sapiens
ggaacgtctgaggttatcaataaggttcctagttccagacgccatgggtcatttcacagagagccaagcttattatcacaagcctttgggccagtgattgtgagatgctgagagaaacccttggaagtct

SEQ ID NO: 541652 - DNA, 139 bp, Homo sapiens
tccgttcagaaagaagaaataaagaaacctgtgctaagagctaccttgtgctccctcagagaccacatgccctgccagtcctggagagaagcagagtgtgcagccttggtatctcctatctctccgtgggggtcgccat

SEQ ID NO: 541653 - DNA, 342 bp, Homo sapiens
cggcttcctgatgatggtcattgggggggttgtcatgtgatgggtcccctccaggttactaaagggtgcatgtcccctgcttgaacactgaagggcaggtggtgggccatggccatggtccccaggtgaggagcaggtgtccgtgagaacccgaacttcccagagagtatgtgagaaccaaccaatgaaaacagtcccatcgctcttacccggtaagtaaacagtcagaaaattagcatgaaagcagtttagcattgggaggaagctcagatctctagagctgtcttgtcgccgcccaggattgacctgtgtgtaagtcccaataaactcacctactcatca

SEQ ID NO: 541654 - DNA, 297 bp, Homo sapiens
acttgctcgagaagataacctacgagtattcctgaggtgggctggatagtcctcttgggaggcttctttggtggtgacgagaacgagatgaagaggatgatgagctactcccagacaaggatgctgccgaacgtatacttcgtcttactggagatctactccttctatgccttggtggaggaggcatacttcttggcggagtactactacgaggagatggccgcctttttgggcttggccgccttctaggtgaatacgatcttgatcgagatctatggcgccgtcccaaagcacagg

SEQ ID NO: 541655 - DNA, 757 bp, Homo sapiens
gggttggggtgtgagaggtcgctcgctctagggagattcttcaagcaatcagtatgtcaacgatgacacaggtgtttcccttccttcatatgaggaagatcagggatcaaaactcatgcgaaaagctaagagaggcaccattcgtaccgcgtggaatagcgggtttgccagtccaattgtggcatatggattatataagactgaagagcaggggaagtactaaaatgtccggattcatctgatccacatgcgtgtggcaggccaaggctttgttgtaggagcaaggactgttggtatgggctattccagtgtatcgggaatggctgggcagaaacctaagccgcttagaagaagagatgcggtctatggtcttgtcggaggagcttgtttatagttagatgtcttattattaaagtgacctattatggtggaaagaaacggaattggatgggttagatggtagcatggatttgagtattggcttcctttcttgcagggcttgggttgtgctttggtgaccgaggttacttagtgacgtagtgaactaactaggtcattcagggagtcaaggtaaatgtaaacgtgtcaccctaaatgcattgaagggtggttgaaaatgtgtcacttgctgaaagttttaggatgaagtttaggtctaaaggaagataacggggggcccggaaggaaccaggtcggggcgaaaggcgcgactttgggagggcccaaaagtctatggccatgataaattggcggccgt

SEQ ID NO: 541656 - DNA, 343 bp, Homo sapiens
ggtcgaccaccagcgcccccagcggcggtgcgcgcgattgccatcggcgttacgttgaaatgatggcgggccttgagccagccatcagtcgccgccgccgaggtcggacttgaatcgatgctctaacatttcagctcctgaaaaagcggctgattgccggtgtaaagagcataaatttgaaacaaaccaagaagaactgctgtaaaagcaacgctaccttgtagaaaatagaacgataaaaccagcacgagaccggcaatggaccctctgacggatttgaacaatatgtacctgttcgccaaggtggtggatcacggcgggtttacagcggcggcgaaggcga

SEQ ID NO: 541657 - DNA, 157 bp, Homo sapiens
ccggaactagatacataattgctttcctctagatcatccagaaaaactgcacacatcaatttaaccttacaactataaatgcaagcgccgattaataaaacgcacggcaatctgacgtcatggactaaagcgatctgcggccttatttcaccttgag

SEQ ID NO: 541658 - DNA, 485 bp, Homo sapiens
acccacggccagtgagacttattgttgtatcattaaactttcgggaataaagatgctttaagtaatttttaacttttaaacaacttatgaagctctgaagacaatacaaggtttggtttcacactgactctcacacattcttgttcattagactaaaaatcctttatatacctgtatccaaggcaggaatcaatgtgcaaccctgaaataatttcaaccctgaaataatttcaaattagaagctgattcttaactctgctcttttcctgtaatcatggcattatcccttgtaatcgagatcattaaacataatctcacattgagagaagtttttatataaagatgtactgtctattattaaatagaatacttaatatcctaggctgaagatgtgcaatggtattactccattaggagccctatttcagtagggaatgcccctatttgtttggccacccatttagacacttctggcagcaaaattt

SEQ ID NO: 541659 - DNA, 111 bp, Homo sapiens
actcacgttcaatctctgtcttctctcaatgtgctagttatgtattatatcatccagaatttctacagctcttggcaagatctttagagaatgcttttggcccttatcgag

SEQ ID NO: 541660 - DNA, 125 bp, Homo sapiens
tccggggcatagggtatgtatgggggcggctcagccgcatttctcgtctggccggagggtctgccgcgcccccagcacctacgggggcgcgctgttgtctcatcctcccgcttctcctctggggg

SEQ ID NO: 541661 - DNA, 469 bp, Homo sapiens
cagttctctccctatgctgcgactactaatctaacttactgtctctatggactgcctattctggtcctttcttataaatggaacgacgcaacatgcagcccatgttttctggctgctttcactgagcataatattttcaagattcacccatgttgtaacacatatcagtgcttcattcctttttatggctgaataatactccattgcatggacagaccatatttgtcttatctgttcatcactgacagacatttgggtttgttccattttttggctgtcatgaataatgctgtcagcatgtatgtatgtacgcggtttccttagtttttatctaatgtcattttcctgttccaggatccccttcaagataccacattatgtttagctgtcatgtttctaggctcccttggctgtgacatttctcaggttttcattgtttttactgaccttgacagttttgagttctggt

SEQ ID NO: 541662 - DNA, 1009 bp, Homo sapiens
tataaaattattagtataaaaggggaaataggtaggacataccgtggtaagggccatagattgtggggagagaatgggggtgggtttggtattatcccaaccttgctctatttaatttttcaagttgtgtccaccatctgtggggacagtaggtggtgcatatgaagggtggaagatcaaatatagcgcggtcaggttaacaagttaacaggtttacaggcaggggtgaagtggagtgcgcttcagtaaagtgggtgggagatatgaatgagagagctattatgtgtgttattatgtggtgacaattatctctctcgacataatatgcgcctccatatgtggacacccaacaaaacgccggatatagcgagaggctcaagagctctctcccctaagagagacagcaaagagaagagagtgtgaaacagtagagacaatattttaaaaggggttttgttctaactcctccagtgtatttacaactttgttgtttcccccagtggtcgcccaaaaacaataaatataattacagagggtctccggtgagaatgactctgagaaaagctatcatcaagagtgtcgtagcgagtactaccgctagaagcggaaatagtcgcgccgagcgtcaagcctaaggcctttatgcgcggataatcaatattcactaaacaacaactacagtgtttacacataataatcaaaccacaacgttgtggttatacagtatataaaacgagagtattgtagtatacacccgcggcattacaaacattgtcggtggtataatattataatagatctacaatctcctccataatgtgttgtgggggcataaaaatttggaacagcgcaaagactatgtggccttaaacaagcaatatttttagaggacgcagataatgacacgttgtgtaacaccacgaccgagatcaacacacttctccgcgccggagctacatcccagaaaaagagcccccgaagaaagaagtattctcccacctgtttgtat

SEQ ID NO: 541663 - DNA, 777 bp, Homo sapiens
agattggtctaggtcgaggctggttggaattggccgagggctgggtccgcccgcccgggcccacacaaatggcccggtagctgaccaagggggagcggcccacccgccctgggcccggccttacccacgccgctccgccgcctgcagccccggccgcggtcacccgaccgtccgcgcctcgccccgtggtccgccacgtgctgctgctattgctcctccgtgcccgcggctgtatgccggtcgcttcggcacccggccgccctcacctcccttaccccttcccggtgccgccgcaaaaccagtcccgctggcgccaaagcgatccctgctccgcgctgaacctgctgtgcccggcggcaccgcaagagagcgcggtgaccgcacttttacgcgcggcaccgttaggttccggtgacgcgctcgctcaggtggcattcagttcaccactttggcggccaggcgggagtaggtttcagcaagggcccgtagggcgcttttacccctgccataaagcgtcgtataaagttccaaaacaaacaggttcgaagaagcattcatcggaaactttacgaagagcgcgggctacaaaggcggggggttcacaagtaaagcccttagcgaaacacaccccaggagttttccggacaggtgctccccctttaggggagggctctttcttaggggaaagctgagcctaaggaaccaggggcttgaagaactaaaacaggcggcggaacttgccgggcaaagggcccttgaaaggacccgaactttgcc

SEQ ID NO: 541664 - DNA, 773 bp, Homo sapiens
  misc_feature (245)..(245): n is a, c, g, or t
  misc_feature (251)..(251): n is a, c, g, or t
  misc_feature (255)..(255): n is a, c, g, or t
  misc_feature (258)..(258): n is a, c, g, or t
  misc_feature (266)..(266): n is a, c, g, or t
  misc_feature (273)..(273): n is a, c, g, or t
  misc_feature (281)..(281): n is a, c, g, or t
  misc_feature (289)..(289): n is a, c, g, or t
  misc_feature (293)..(293): n is a, c, g, or t
  misc_feature (297)..(297): n is a, c, g, or t
  misc_feature (308)..(308): n is a, c, g, or t
  misc_feature (312)..(312): n is a, c, g, or t
  misc_feature (326)..(327): n is a, c, g, or t
  misc_feature (331)..(331): n is a, c, g, or t
  misc_feature (337)..(337): n is a, c, g, or t
  misc_feature (349)..(349): n is a, c, g, or t
  misc_feature (357)..(357): n is a, c, g, or t
  misc_feature (361)..(363): n is a, c, g, or t
  misc_feature (373)..(373): n is a, c, g, or t
  misc_feature (377)..(377): n is a, c, g, or t
  misc_feature (382)..(382): n is a, c, g, or t
  misc_feature (386)..(387): n is a, c, g, or t
  misc_feature (389)..(389): n is a, c, g, or t
  misc_feature (392)..(392): n is a, c, g, or t
  misc_feature (453)..(453): n is a, c, g, or t
  misc_feature (508)..(508): n is a, c, g, or t
  misc_feature (512)..(512): n is a, c, g, or t
  misc_feature (515)..(515): n is a, c, g, or t
cggagtcttattgtggcggtggttgtctcagaatcagcggactttttgggtcgtaggaacctggtatgagaaaacgaggtacaaatccgacgtagtcgttctttctacctaatcggggagcctccgagccttctacccgccggcaaaaagaaaaagaacgcgaaaacgctctccccccctccggtcaccagcggtcgctccgtaacaccctaacaggagcttaaccatcagccaaaatatcggtngggcgnggcngtntatgttcncaacttnagtatccngggaggtnaagngggnagactataagnctangagactgagattanntcgnttaatncggcgaaatttngctctcancaannncataaaaacnagtngggtncggnngngtncgttcgcaactttagtcatctaggaggtcgaggtaggagaactgtccgaatttgggaggtngaagccgtagcgagtcgagactgtgttatcgtatcttagttcgggcgatagagtnaganctngctctaaataaataaataaaaaactttatagtcaccggactacttatagacccccctcccataactccgcctcttccgcttacggattactaacagccgatccgttaggcccaacctccctaccgtccgagaagaaaggaactaaaggatcgcgcgcagcaagtcgatggcaaagccaagaccaaaccaagatagagagggaacatacactatcgttaggtttgacaggaaaaactcgtctccttccccaacaattat

SEQ ID NO: 541665 - DNA, 277 bp, Homo sapiens
tcagcattccagcaggcgtcagcatcagagatgttagttccagttgagcctgagctgctgggaaaggtagttgattcctcaccgaggtctgcggttagtgagtagtggcaggtaaccctatttgggtggaggctagggctgccgagaaaggctgtagattcttcagttgaggcccgaggtaggtgctgatcctacagtagacaccagtgtagtagtgagtatgaggctaggccggctgtggaagcgttgtaggctcttacaccacggaacatgaggt

SEQ ID NO: 541666 - DNA, 782 bp, Homo sapiens
  misc_feature (714)..(714): n is a, c, g, or t
  misc_feature (717)..(717): n is a, c, g, or t
  misc_feature (741)..(741): n is a, c, g, or t
  misc_feature (753)..(753): n is a, c, g, or t
cggagtcttattgtggcggtggttgtctcagaatcagcggactttttgggtcgtaggaacctggtatgaggccctttatatcgactccgaaccttcgattttaagcgacttctttgtactggttcatatcctaacgtccgtcccttcaataaaaccgacttcaaacccgcgtaaagatttcgtcgcttaaaaacccctaaacgaacatcgaaagtacaaagcgaaaaaccatcgcccacgataggccgagtactttagcccgaaaacccgacactcgaatcgccttaaagcttagaatcccccgaacgttaatacgatatctaaaaccctagacccgggacctctaatcgtaagcacaacatagcaccttaaaaaaaaaaaaaaaaaatctgagggggggtttggcatttaacctgtttcacagcgagctgcaccataacctatcggttgctgccccataatgctgcgatcgggaaaatttcggtgccatttaatccaactgttccgtagtatactttttccctgttagtcggtgcaacagtgaagaggtttgtattgactgtttcctttaatagccgtgtagttcgaacggtgaacggtaaaccgcaagtgccaacaccccgccaaaacctgtgccaaacccccgccaaactagtctaccccccaattaacaggttgaaactggtaaaactttccacaaactaaaagaaccgnttnagacagggccgagcgccgccttancccggaatagancttatcacccaaagattgcgggttcttaa

SEQ ID NO: 541667 - DNA, 945 bp, Homo sapiens
  misc_feature (877)..(877): n is a, c, g, or t
  misc_feature (880)..(880): n is a, c, g, or t
  misc_feature (904)..(904): n is a, c, g, or t
  misc_feature (916)..(916): n is a, c, g, or t
cggagtcttattgtggcggtggttgtctcagaatcagcggactttttgggtcgtaggaacctggtatgagtcccgaagtacccccgctcgcgtctttcgactcctaggctattattacgaagcctccagtagcttcggcatctccgggagcccttactccctcggctctcgtttagaacttgataatagtcgtcttagtcgatatgcacttagtcatcggcttcgtcgacgacgaagttttcgacgtcgaaattatcgtcgtcgtaattatcgtgattatcgtcgtcttcattatcgtaattattgtcgtcctcattatcgtctgcaaagataccttagccccatttaaacgggccggggactctttgaacggcagagcgcgctttcgagacggaactagtccgagctcctcgtaaccggctataatcacctacgtccttcgcgaccctacttaatcatccattccgttcatgacacttttcccactctcaactagcccacccctccctaaacaaaaaacaatcacgagtaataaaaaaaaaaaaaaaaaatctgagggggggtttggcatttaacctgtttcacagcgagctgcaccataacctatcggttgctgccccataatgctgcgatcgggaaaatttcggtgccatttaatccaactgttccgtagtatactttttccctgttagtcggtgcaacagtgaagaggtttgtattgactgtttcctttaatagccgtgtagttcgaacggtgaacggtaaaccgcaagtgccaacaccccgccaaaacctgtgccaaacccccgccaaactagtctaccccccaattaacaggttgaaactggtaaaactttccacaaactaaaagaaccgnttnagacagggccgagcgccgccttancccggaatagancttatcacccaaagattgcgggttcttaa

SEQ ID NO: 541668 - DNA, 755 bp, Homo sapiens
  misc_feature (687)..(687): n is a, c, g, or t
  misc_feature (690)..(690): n is a, c, g, or t
  misc_feature (714)..(714): n is a, c, g, or t
  misc_feature (726)..(726): n is a, c, g, or t
cggagtcttattgtggcggtggttgtctcagaatcagcggactttttgggtcgtaggaacctggtatgagaccatagaccctccccccgacgatggcggccagggcaagaagtggtccccacaagtcccacccactctccccaaccattcttcctcttcgctctaacgtctatatccatatctatcccaaaaaacccccactccctacgggactcacactcaaacaatattatactacacgcaaaccaagaaataccttaaacacctcttgggataccgaaaggaaactaagtaaaatacctcgcaacgcgcaggtaatcccaaaagcgtccgaggtagaagtaaaaaaaaaaaaaaaaaatctgagggggggtttggcatttaacctgtttcacagcgagctgcaccataacctatcggttgctgccccataatgctgcgatcgggaaaatttcggtgccatttaatccaactgttccgtagtatactttttccctgttagtcggtgcaacagtgaagaggtttgtattgactgtttcctttaatagccgtgtagttcgaacggtgaacggtaaaccgcaagtgccaacaccccgccaaaacctgtgccaaacccccgccaaactagtctaccccccaattaacaggttgaaactggtaaaactttccacaaactaaaagaaccgnttnagacagggccgagcgccgccttancccggaatagancttatcacccaaagattgcgggttcttaa

SEQ ID NO: 541669 - DNA, 975 bp, Homo sapiens
gaagaatcacgcctgcgagatgtgcggcaaggccttccgcgacgtctaccacctgaaccgacataagctgtcgcattcggacgagaagccctaccagtgccctgtgtgccagcagcgcttcaagcgcaaggaccgcatgagttaccacgtgcgctcacatgacggcgctgtgcacaagccctacaactgctcccactgtggcaagagcttctcccggtgtgcaggggcctcgctgcccactaggccggtgggggggagggcaacaaggtggcctgtctttggctggtggggaggcggctcccgttcctggggacaggaaccactcccaggaggagggaagttgctaggaacagggggtggtactttagaagaggtgggtctctgggctgaaggaaagcagcctctgggcagaagaggaatcttggtttgagggctttcctgcctgaggactgaagctgagggggaaacgctgggacctttgcagaggcattttggaggaacctaggtagatttgaggcacaccttaccttggagcctaagccctaacacacaccccctcccactcaacatatccctaggccggatcacctcaacagtcacgtcagacaagtgcactcaacagagcgggccttcaaatgtgaggcctggtcatctcacgcccatttcctacagatcaaagaccccgagaatctgatccccttatttgttccctttctttatccccgaaggtttactcttctgtgaccccaacttcgccagaatggagcggtttgtagaggttctcgaggccacgtcgcacgagagaagtccgtctggctgcggagagtggtcggtttattcgacatgagggcgccagccccacggtggggctgcacagttggggtgcccgcggtagcgggggggatgtgcccctggtctggggggggggccccgcgggggggggggtccccgtcacgcggggggtcgctcgcttga

SEQ ID NO: 541670 - DNA, 281 bp, Homo sapiens
cgaagagagcgagagagagaaaacagagccacagatgacagaaacaaaacggactcacaaaaatatctaaactcgacgagatggagcgttcgccccgtggaatggaagtgcagacacctcagcaaactgaattgctgcccgtgcgctcacaggtgctattttcgccgaggatgcaaagactgctttgtaaacgactacagagctctacatgtggtctctgcaggaccccacaggaagcaggaatgtcttggcaaccgccacgcgaactatagaagccacac

SEQ ID NO: 541671 - DNA, 841 bp, Homo sapiens
  misc_feature (51)..(51): n is a, c, g, or t
  misc_feature (704)..(704): n is a, c, g, or t
  misc_feature (774)..(774): n is a, c, g, or t
  misc_feature (809)..(809): n is a, c, g, or t
  misc_feature (825)..(825): n is a, c, g, or t
ttaaatcggcacgaggctctttatgttgcccaggctgacctcaaactcctnggctcgaacagtcttcccacctcaccctcccaaagtgctgggattaacaggcataagccaccatgcctggtttaaaactgcatttcccaatgatgattatgttctctgagccccatctgagcgcacacatgtgtggtgctcttgggagtcgggggcacagcctcaaatataatacaatatttccaacatcgtgtccttggaatacagatgatttttattttcttctttatttttttctatgtttttctaagctttctctaatgagcatgcactactgtaataaacagaagacaaaaggattaaaacaattttttaataggagaaatttttaaatttctcatttacaaaagttctatgagaagataccttttaaattttaattattttaaacatacagaaagggataatttctaaactttgagaggatgggggatctacaaagacattgatttgactatatacatttgaaccaaaataaaaggaacatagacttaggaaaatatttgcaataaggatgacagtgtgagatctttgttacataaagctgacacaaaatgagaacaaaagcattaagagttggggcacggtggctcacgcctattaatctcaggcactctgagtcccttaaccgaggcagcctgcttcttgatggntaggagggcttgagggcaagggagggcttcacgttgagcttcaggaagttggggggctttcaggggagcntgtgggtttgttgcccgcttgcgcttcccgggccnccgggaccaaccaggnggaggagaccccttgg

SEQ ID NO: 541672 - DNA, 754 bp, Homo sapiens
cggagtcttattgtggcggtggttgtctcagaatcagcggactttttgggtcgtaggaacctggtatgagccttagaggaaataggagtttaaattcccggaagctagtcacttccccttattagcctaagacgcaccatttagaatcgtacctcggcaacggagtaatcataaccggctaagcgaccacgcaaactagcggcctccaatccccaaaggactacgaacttaacaaaatcgcatagactcttccttcagaaaaacatacaaatacaagtatctataactcctacggaaccctaaaggtcctgcggacctctcgaagtttactcgccatgactaccagagagctacagattcacatccccggcgcaggcgaaaccacccaccctagaaacccgccccgaatagctccacaaactacaaattacgggttaacccaaactcgaccctccaaaactcgtcgtcagaccggggctcaacccccccccaaccaaccgtcagaacgaacgagacttagaacaccagccgcgcgttacttaatccctagacgttaaccccgtatcgagtagaaacttccaccgtcatcatcgtaaaagatccccgccggcacttcgttacttacccgccgtctcttaacttccctatacgataattagagcgatactcaaaaacctaaacccccctacgctacctctcctcaaaaaactccctagaatccgaagattttaaatttcccgatacgggtacctta

SEQ ID NO: 541673 - DNA, 1033 bp, Homo sapiens
  misc_feature (965)..(965): n is a, c, g, or t
  misc_feature (968)..(968): n is a, c, g, or t
  misc_feature (992)..(992): n is a, c, g, or t
  misc_feature (1004)..(1004): n is a, c, g, or t
cggagtcttattgtggcggtggttgtctcagaatcagcggactttttgggtcgtaggaacctggtatgagagcagactctttgcccgacttagtaactttatcatcgggcactcatttagaagaaaacaagctaccacataaaaaagacatccgtatatatgcccacagtagtataacccgtaaccgtaaaaacacggaattaatttaaacgtttactaactaacgagcggacaaagaaaacgcgagacacacacacacacaccacacacacacacacgaacatcatcaagttacaaaaaaaagaaacaacggtacctgtagtaattcggacggaaccggagaccaccacctcaagcgaagcaatctaggaacggaaaattaaatagcgcacgcctctatctacgcgggagtcaagtcacgaggatgtaaaggtacaagaacgacataccggctcccggggatctaggggaaatagcggggagcgccgagggacaaaagatcacataccgggcatagcgcatatcgtccgggcgaagggcgcgttgaaactctagaaactattgtcgaacaatccaccgacgcaaataaatattattcgccttttaaaaattcacccagacaaaaaaaaaaaaaaaaaatctgagggggggtttggcatttaacctgtttcacagcgagctgcaccataacctatcggttgctgccccataatgctgcgatcgggaaaatttcggtgccatttaatccaactgttccgtagtatactttttccctgttagtcggtgcaacagtgaagaggtttgtattgactgtttcctttaatagccgtgtagttcgaacggtgaacggtaaaccgcaagtgccaacaccccgccaaaacctgtgccaaacccccgccaaactagtctaccccccaattaacaggttgaaactggtaaaactttccacaaactaaaagaaccgnttnagacagggccgagcgccgccttancccggaatagancttatcacccaaagattgcgggttcttaa

SEQ ID NO: 541674 - DNA, 896 bp, Homo sapiens
  misc_feature (759)..(759): n is a, c, g, or t
  misc_feature (829)..(829): n is a, c, g, or t
  misc_feature (864)..(864): n is a, c, g, or t
  misc_feature (880)..(880): n is a, c, g, or t
tgtatgtttttctagaaatggggtcatatatgctgccaggagttcgaagcttcagtgagctggagtgcagtggtacgatcacagctcactgtagcctcaaacttctgggatcaagtgatttttctgccttagcctcctgagtgctgggattaacaggcataagccaccatgcctggtttaaaactgcatttcccaatgatgattatgttctctgagccccatctgagcgcacacatgtgtggtgctcttgggagtcgggggcacagcctcaaatataatacaatatttccaacatcgtgtccttggaatacagatgatttttattttcttctttatttttttctatgtttttctaagctttctctaatgagcatgcactactgtaataaacagaagacaaaaggattaaaacaattttttaataggagaaatttttaaatttctcatttacaaaagttctatgagaagataccttttaaattttaattattttaaacatacagaaagggataatttctaaactttgagaggatgggggatctacaaagacattgatttgactatatacatttgaaccaaaataaaaggaacatagacttaggaaaatatttgcaataaggatgacagtgtgagatctttgttacataaagctgacacaaaatgagaacaaaagcattaagagttggggcacggtggctcacgcctattaatctcaggcactctgagtcccttaaccgaggcagcctgcttcttgatggntaggagggcttgagggcaagggagggcttcacgttgagcttcaggaagttggggggctttcaggggagcntgtgggtttgttgcccgcttgcgcttcccgggccnccgggaccaaccaggnggaggagaccccttgg

SEQ ID NO: 541675 - DNA, 748 bp, Homo sapiens
cggagtcttattgtggcggtggttgtctcagaatcagcggactttttgggtcgtaggaacctggtatgagtctgcgttgttaaaaatttgtccggcgaaggtttggctagtaatatagcggtacctagcatcgaactagtggatttaagagcgagcgagttagccctcgtaggaagagacgttactcggatcgaaagatttcccaacctagatctccatctagagcgcaagggtaaataacacgctaaaaggatacggcacaaaaaacccgcaggagcgtagtcgcgtaatctctctagacataagacccatccgagtgatctttctataggaaaaccccacaatacaggcgactagaggggttacggagaagactatcgttagcccgcggacctacccccagacggatgtatcgggtagtaatctatcctcgattagccattaactaaagaaggccaccctagagtagcctgttaggaattcgcttaacccggagaaacaggcggctatatttaaactaaccacgcctagcggcacgaacgcgggatcataaccttcggaaaacggcagacgtcgtataaagccattcctcgccctactaccgtaaataaaaactaccgaaaacatcacgttgtacctacccaaagtcaccccggccatcacgcacaaaagctcataactcaaccaacagtaacatccagagcccaccaccaggaaaagaccgtcgagagcacccactaggccccca

SEQ ID NO: 541676 - DNA, 744 bp, Homo sapiens
cggagtcttattgtggcggtggttgtctcagaatcagcggactttttgggtcgtaggaacctggtatgagataggcgttcgttattatgtttagtcaaccccccgcacccccagcagagatggggccctattgcgccggttaggacggctctgactcttcgattctgcgacttatttgttctggttctttaaagcgtcgggaccataggtgcgagttattgtgtttggttaacaacccccccagcccaagcctacccccgcttttgtcgacgaaagccagagtcgtccttcttaggtagtttcgggagcaggggtatagatccgcgttctgtcctttagtagtcgtttagcgttctcgcttatatttattctttcggcgcatccgtttttcatagtagtagtttagacttcttttcggaccaaaaccgtaatcggcgtttcaatttaaaatccgagaaaaaacctctcactatacttatctcctcggtacccgcagaactctcggtttcgggcgcgctccccttcgcagtcgccatagaccctccaagtagaccctccaagtagacggatacgcttagacctacgttcaaacacttagccgacaatcggaaaacgtcggcctatggcctcccagcaaagaccaacaagggacttttacgcgtcggggaacgcgtccctacccgagcggggacactaggaagaaaaggaggggtccgggcagcaaattccatcccgttaacccaa

SEQ ID NO: 541677 - DNA, 124 bp, Homo sapiens
cctttacacacgtagacagcttataaacacagaaatgcaggataacacctatcctgagattttgctgtctaatttatggatcatttgtgcttacaacttgaatgaaacttggctatttgatgac

SEQ ID NO: 541678 - DNA, 162 bp, Homo sapiens
ctgtgatagactctagagtatcccacgctccagcatgtgcaatcgtagaagctggtctgaacgagagacactcaggaccagagtggacttcaccaagcagagcagagacttgaaacgttgtgtgtgttttacctagatggagggggaagaaggggagaggga

SEQ ID NO: 541679 - DNA, 744 bp, Homo sapiens
cggagtcttattgtggcggtggttgtctcagaatcagcggactttttgggtcgtaggaacctggtatgaggagttccggacgtcgtcgtcgtcgcggtcgttaagaccaacgttacgtctacggtaaaagggaagtcgaaattaatctagaacgtcctcgagaagtcctaggtcttcggtaaaggttcaatcagtaacaaaagtaaggacgattcggcaatcagtcgaagcagaaaccaacgacgcgttctctatacgcaggaatccgtcgatctgaggatagatctaagatgagactagttgatccagcggggtcgtagcactaatctgagggaggcctacgataatcgaggaaaaagttaaagcgggattaggggactgcttaccacactcctacgcctagggttagatatgggaaccagcggatagagtcgcaaattggactaaagaaaccactattaacggagcggcaaaagtcgttataggaataagcttaatccccaacggcgtaatagcaatcgctcactattagttagtatttactgtctagccgctcttagtcgccagttagaagttctttccttagctagggacgtaccacgcctaagacaaaccacccgcgggctcagaatacgtcgcatttatccccaacgctaaggagaaggcggaaagccttaagtcgtcttcacccgtagtataccctgaacgaaataggcgttaaagctccttcgttgggttaaaagc

SEQ ID NO: 541680 - DNA, 1006 bp, Homo sapiens
  misc_feature (938)..(938): n is a, c, g, or t
  misc_feature (941)..(941): n is a, c, g, or t
  misc_feature (965)..(965): n is a, c, g, or t
  misc_feature (977)..(977): n is a, c, g, or t
cggagtcttattgtggcggtggttgtctcagaatcagcggactttttgggtcgtaggaacctggtatgagtctgcgttgcgtatgcgcaaaatacggggtagttccggaatacggcgccccccggagcccttccctctatagccccttactcttttatcctcccgactagctacgcgcttgcgattctgccttacgatactaggacagtcgcgcccgtatattacgtcttacgcctacctggagttaggaggggcctctagcggagttcggtccagggaatagggagtgacggaagaacgttaataccagtgccggctcctctccgctaggaacgaaggacgtccgtatatacgtatttttctatctctatatccgtatatacatatatatatatatatgaaacggccggcccgctaaaatctatcgcagcatacaaagtccgtatctcgtgcttcacactcagtagtacggggcatgcccggtagcctatcttaccagggggcaaacaacccacgattacctactcgcccccacgaacccccccactcagataacaaccgcaaacaaagaatctattactctcgcctacccaaaaaaaaaaaaaaaaaaaatctgagggggggtttggcatttaacctgtttcacagcgagctgcaccataacctatcggttgctgccccataatgctgcgatcgggaaaatttcggtgccatttaatccaactgttccgtagtatactttttccctgttagtcggtgcaacagtgaagaggtttgtattgactgtttcctttaatagccgtgtagttcgaacggtgaacggtaaaccgcaagtgccaacaccccgccaaaacctgtgccaaacccccgccaaactagtctaccccccaattaacaggttgaaactggtaaaactttccacaaactaaaagaaccgnttnagacagggccgagcgccgccttancccggaatagancttatcacccaaagattgcgggttcttaa

SEQ ID NO: 541681 - DNA, 290 bp, Homo sapiens
  misc_feature (41)..(41): n is a, c, g, or t
  misc_feature (47)..(48): n is a, c, g, or t
  misc_feature (58)..(58): n is a, c, g, or t
  misc_feature (77)..(77): n is a, c, g, or t
  misc_feature (159)..(159): n is a, c, g, or t
cttagcttaaaatgctaatgtgttgtatagctatataaaantatttnntttattcccntacattattctatagcttnttcctgcaaaaattttttttgttgttataaactaagacacacacattgtgcctacaccgggtcaggagcatcaatatcactnttttcttcctccacatcttgtcctactggaaggttttcaggggcagtaacatgaatggagctgtcatctcctataataactgcttttttctggaatacttataaattgtctagttattatgtacagtacat

SEQ ID NO: 541682 - DNA, 399 bp, Homo sapiens
  misc_feature (14)..(14): n is a, c, g, or t
ggaaaaccccgcanatgggattacaagagaaagcgcttgccacgtggactctgatttttacaagcctcctctccaggcaggctcctggctcccccgagctctcctgtccatcccaccagcctgctcagacacagccacacctgccccggctgggcctcccagactcactggcatcgaagacggccttgagcgcctggatgtccgtggccacgcccgatatcctgtagatgccaacctcctcgatacccctcttctccacctcctccacacactgccggacgatgtagggcaccttggagcgctcccgcctggggtggagcgcgaggatgggcggagggcagcccccacgacagctctcccgtagcaacccccacccagcacacacacaccctgtagagc

SEQ ID NO: 541683 - DNA, 127 bp, Homo sapiens
tgtctgctctatgatggatccccgaactatgttgatggcttcatatgatgggtcactctcctcaccctgctgccctgcagagccaccagtgtgtcacacgtggcatgatatgcatgccccagcatgt

SEQ ID NO: 541684 - DNA, 669 bp, Homo sapiens
  misc_feature (31)..(31): n is a, c, g, or t
  misc_feature (33)..(34): n is a, c, g, or t
  misc_feature (59)..(59): n is a, c, g, or t
gctccacagaacgtttatgacagagataggncnngaacagagcaatttagatgtatttngtggtctggtttcagaattactggttgtcactcatgcagtcttaatggaaccattttatgagaagtttttattttccctatgagattgcatcagatgactttactacatgaattcttaattattaggtctttttctagtgaatatctctttcaggtgttaacattttttaagttgtggaaacttgattcagtcgtgggtataatactgaatattttctcttttgataattttttcccttaattctctttgttgtctccattttattttttgattcatactgtaagccattcacatctttctcatgttatacctctgatttttgtcgtattaccttaaacaccagagatatttgccagtatcttggaatgtcagcaggtgcatttggtatggctgggtatccattaaatctagagtttgtatgctttgtttttgtgtatatgtcacaataatttagaactaaagcctaaactccagttatagcaaatgttgatatgaactcttgagagattaggtacttgtaacattttaatcaaaccattaagaattactagtttttagtaaatctctttgtcattgacaagattaagaatcacagtattaggagtttga

SEQ ID NO: 541685 - DNA, 215 bp, Homo sapiens
aaataatactacccatatatataactatgctacaccggacaaaaagaaccataaagatacataagtatgaactgagctatgatatcaattgacttccagggtttatcgtgtgagcacaccaatatattatacagtacgaatagacgtaaacacacgagcatataacaactccgctaccataatcatcgctatccccaccggcgtcagtatagata

SEQ ID NO: 541686 - DNA, 328 bp, Homo sapiens
  misc_feature (31)..(31): n is a, c, g, or t
  misc_feature (33)..(34): n is a, c, g, or t
  misc_feature (59)..(59): n is a, c, g, or t
gctccacagaacgtttatgacagagataggncnngaacagagcaatttagatgtatttngtggtctggtttcagaattactggttgtcactcatgcagtcttaatggaaccattttatgagaagtttttattttccctatgagattgctctgttcaagtcctatctctgtcataaacgttcctgtggagtctcatctccatgtctgggcttccctacctgaaaaatgaaagctttaactggaaagggcagacactagataatttctaaggtccctctcaactgttaaattccaggattttatgaactttcagctagaatttgtcgtcg

SEQ ID NO: 541687 - DNA, 851 bp, Homo sapiens
tgagcggagtcccacgccccaggccccaggcccagcagcatgcagcagcagcccctgctctcccgcgacccggagaggctctgcagccatgaaagccaaccgtcccgagggacccgccgtgtaagcagggagcctccgcggagctcccgccgtcgatcccccttggtgagtcctgtccgcagacgagaggcatggacgaaggccgaaacaacgagggggccgcagatcagacctcgaccagaaacgacgaggcgcaaaagaccccaagacagaaacaaaaaagccacagcgggaccagactagataaagacagcaacaagacaacccaacaaccatacagcaccacacaacgcagcaacgaaaaggaaaacaaacaagaagagacacaagcgcacacaaagagggcaaaccacgaaccaacgaaaagagaaaacacacaaatagcaacagacacgcaccaacggagaagacgacaaacaagaacacaaaaaaagagaacaagacaaagaaaaagaaaaaaaacagcacagaaacaaagaaagcaagaaaaaacaacacagaggacacaagacaaagacgacacaagagagcgagagaaaccgacaacaacacaacaacggcacagcgaaaagcacacacaaaggggacaagaagacagaagaacccagcagcaagcaacgacaacagacgaaacagaccccaaaacggagcaagaaaacgacaaagaaccaacacgagacgcaacaaagagaaaaggggacagacaaacagcccacaaacggcacaaaaagagaagcaacacacaacacgacaagaacaaacacggcaacccaaagaaaccacacgacgag

SEQ ID NO: 541688 - DNA, 330 bp, Homo sapiens
actgagctttgatgatatatggcgtgttcagaaagggataagcattattaaaagtatataaaaaattaaaatagggaagaaagggaaaagaacctgtttaaactacttcatagaactgtttttaaaaatttctggctggatgcggtgactcacacttataatcccaccactttggaagcttgaggcaggcagagtgcttgagcccaggagttcaagtccagcctggccaacatagtgaaatcccttctttacaaaattccaaaaggaaaaaaacccaaaaaatttagctgagtgtagtgacttgtgcctgcagtcccagccattcaggag

SEQ ID NO: 541689 - DNA, 1513 bp, Homo sapiens
tctggcagcatgacattttatatttaatttctctcagcgtggtagcttttttcattctcagaaacgtggagcaccattttttacacgtgaggtgggtatatctccattccttcgttccctttagcgtatagggcatagtgtgtgaacaagaggcgttttcaagcaacgtatattttatattgtgtattatacacacagtgtgtggcgtagtgaacatttacaaatttatattattattattatttctatagaggtggttataataaaagccactctacaaaaagtgtggtagctctataccagtggtattaagtgaacatccgtggagaaattaaaaaattcaccacttgtctataaacatataatatcttctgcgtggctgcgtggcaaaaaaattattttcatacatataccatgtggcattatgtgatctacaaaaaaacaactctttttacagtggatgtggggggataaatttcttataacagacattagtttaaagaagaaagagtgtccaaacaagtgtgggtactcgaggatacatctccccgcgtgggttataagaaaatacagtgtgcgagggtgcgcaccgatagggtgtgtctcacaattttccgtggcgaaactataactatagaggctttcaccacacaagtttcaaaatacccgtgcgatatattataaaaaacccccgagcggtttctgttggaaaacggggggcattgttgggcggaacacacctcatatataaagtcataagaatatttaaaaaaagtggatataaacggggggggggggcgaacaaatatgacgggatctatgttggacagaaagcacacctgtgtggtaatattcaaaaagaactcggaggaaataaaaaaaaattataaggcccaaggaggggatcactattaaaacatttttgtaccacaacaacgaaggcacctatacattgatagcttacaccaattacaacacgcgtgggggagaaccatattcgggcggcaccacccccccacagaagattgtggtggctcccaaaacacgctgccccaggagggagacaacctaccagggcgcagcacacgggagaaaaatataacaccaaaaggaagagagcctacaaaaacaaacaaaagaggaggacgagggagaacaaaacacaaacaacccggaggagaagagcaacaggagcaacacctagcagtccttcgacaacacacccaccacttttctcactggcggaggggcggggacgcggaacgaacaccgaccacagaaggcagaccaacaacaactacagcaacaacaagaaaagaagcgggaccacaaaaagagcgcaccacatacaaagaacacagagcgggtggactaacaaccgacgaagaagaccagcgaagtaaacacacacgaatgctaccagacaaagaacaaagaaacagaataagcaaaaaaaagacaatagaaaacaatagaaactcagagggacaagaagacccactacgacggccac

SEQ ID NO: 541690 - DNA, 1123 bp, Homo sapiens
  misc_feature (1123)..(1123): n is a, c, g, or t
gccatgcggaagccacgctgcggcaacccagatgtggccaactacaacttcttccctcgtcaatggcccaagtgggacaagaaccagatcacatacaggactcattggctacacacctgcatctggacccagagaacagtgcgatgatgcctttgtctcgatgctcttccaaggatctgtgagcgatgtgaccccactgcggtttttctctgaattccatgtatggacgaggcagacagtcatgatctaacgtttggcgcgcgtgggagcattggtccgatggatacctcctttgacggtaaggatcggactcctggcttcatgccttcgctcgccatggcacgtggtgttgggggagactcccattttgatgacgatgagctatggaccttggcgagaaggccaagtggtcctgtgtgaagtatgggaacgccgatggggagtactgcaagttccccttcttgttcgaatggcaaggagtacaacgagctgcactgataccgggcgcagcgatggcttcctctggtgctccatacactacaactttgagcaaggatggcaagtacggcttctgtccccatgaagacctgttacaccatgggcggcaacgctgaaggacagccctgcaagtttccattcccgcttccagggcacattctatgacagctgcaccactgacgggccgcaccggatggctaacgctggtgacggcaccattgaagactaacgacacgcgacacgaagtatggccttctgccctgaagaacgcctgtcacaggtaggagagcaaccagaacgtgcccctggtgtttccccttcccgttctcgcggccacatattcgagactgcccacgccggacacgagtagcaaattcgggtgtacacaaggcagatacacacagcgcacactggagccacgccctgtacccaggtactgcgtgacacgggaacccagatttgagcaaccggggtgtcatccagaacgggcgcggggacgtacaacagaagcctctccagatcggagcacagcaacggcctccacagtacgcaccagcgccgcgaataacaagtcgagaccatctcagcccagagacaaccgaatagtcgcgagtaaaccacgtan

SEQ ID NO: 541691 - DNA, 182 bp, Homo sapiens
ggcctgtcatgtgaaagacgactgtgcgactgtacgtggctgacggacctggggatggggagactttccagggttcgactgagggtctcttgtaaaccacaagggtctgtaggagagggagaaggatttgacaaacagacagcagaggtcagagtcacgagagatcttgaggatgttactcc

SEQ ID NO: 541692 - DNA, 734 bp, Homo sapiens
  misc_feature (176)..(176): n is a, c, g, or t
  misc_feature (215)..(216): n is a, c, g, or t
  misc_feature (351)..(351): n is a, c, g, or t
actagttcactatcggtgtctgattagtatttagccttaccgggtggtcccggcagattcagacagggtttcacgtgccccgccctactcaggatacatctatgagattttatgatttcgtatacaggaatatcaccttctatgttgaagctttccaacttcttctactatcatanaattttgtaactcaatgtaagatgtcctacaaccccttnntacaggtttgggctctttcgctttcgctcgccactactgacgaaatcattatttattttcttttcctgttgctactaagatgtttcaattcgcaacgtgtctcgctaatttgactatggattcatcaaaatgcanctgaggtttgctcagttaggttaccccattcggaaatctccgtatcatagtttatttccaactccacgaagcttatcgcaggtaatcgcgtccttcatcgactttcagacccaaggcatccaccaaatactcttacttaacccgcgtacttttttttttttttttttttttgcgactaagatgtttcaattcgcaacgtgtctcgctaatttgactatggattcatcaaaatgcaactgaggtttgctcagttaggttaccccattcggaaatctccgtatcatagtttatttccaactccacgaagcttatcgcaggtaatcgcgtccttcatcgactttcagacccaaggcatccaccaaatactcttacttaacccgcgt

SEQ ID NO: 541693 - DNA, 1526 bp, Homo sapiens
gcagcctaaagatgagcccggagccatgcggtgggaggccgctgtcgtcgcgcgccttgtgtttttctgttcctttttttattttgttttgaactcccgtggcctatacagcaggcacgccatcagcgccatataacgaccatttactgtaccatgcgcggagccccttttggagccacattagcgtggccctcggaggacctttaagactgtggacaaccttttgtgcctaatgtgtaccgccccacctgtggcattaatacgtgtgggtggccctcattcttccctgtcacgagggggtcgtataaagtctgtgacgccacgattggccgtgatgtgtctgcggggctcgcgctgccgtggcgcgtgttgctccccctatgtggggggtcacctttgagcgggacggaatgtggccccgtgttgctcgtgagttttggccccggtggtgggttggcgtcagatctcaccccgttggttaactcggcaggggcgtgagtcgcgtgtcctgtcttattccacgaagaaacccgttgtcttgtgggaaagaccaccaacgcgctttctattatctctctccagactctctgtggaacaaaccaagggattattgcgccaggggcgacaggagccaggcccggatataaatctcgcgtgggtgtgaaccaccagctttcacacaagtgtgtgtgccctgttgtggaaaacccatgtctcaacaggggcttggcacgtgtcgtgcggaggcaccgaccatttacaagtcacgtggtgtgggagtgtgcggcgtagaacttcgacccattttatcctctctccgcaccacgaagaatatatttcacccgccatccgcgcgtattctacaattctgcgtaaaacacgcgcctggagagtgaggccccattctgtggtgttgggagcgcccaagagagcttccttaagttgggggcggacgttgtttgcgcccctccgataacattttctccccgttggacacaaggtataggtcccatccatccgcgcggaaacagggcggaaacttctccaccaaggcttcaccgggagaaagcagtgccgttggtggggcacaaaccccctctccttatcgataatgatctccgtggggcatcttaaaccgtgttgagtggtccatatccaatgtgtaaattttcccccgtttgttgtgtgaccatagggactggcctgtatgccccgttggggaagagactcccctttgtgctagccgttatggaagttcgcgttgtgtgaaaagggcccaccgctcctacacaatatcaatggtgccccctaaggaaagggacacctgggcttgtgacattgtccccaaagggggcgcccgacgaagaatattgacccaaagtgaggcgccaagcgtaaagacacatgttgtcacgagaaggttgttgtggtggacccgcaagggggcttccagacaaccacctttgttgccccaccaaagaggaagggagagaggccaccctatagtggcgttgtgcccaaaaaaa

SEQ ID NO: 541694 - DNA, 929 bp, Homo sapiens
ggtggttgagatgattacctcggacgtctacggaaacgagcgggcgcatgtgtccgctgtgtgtgtgtgtgtgtgtgtgtgtgtgcgcgtacattgattactatccatttctttagtcaacgctctccagttcctagatttcgtgctattaaggaaaactgttgaagctttcgtgctattcatgtcatcagattcttaaacgacagcaccagagcaaagaactcagtactacagagttctaggaattctctcccctgaaatcaaaacgctggaagactttttatttcttattgtaagttgagaagtttcataaagctgcatcaaggattagattttccaggactctgcggaggaagcggcaggaagaacctcagagagggcagaggtgacttcaaaggtgactggggactccgtcctgagggtcacttggccctgagcccctgcgtgcccttgcggaagcccagaagcttcttcctgctgcagcctcccgtttccgctggtgctgacgtatatgcatttcatgatggggtccaacaagaacatctgacttgggtgaagttgtgcaatattggagggtgagtgtagggctgggcagctgggagacaggctcatgggtcaaaggctcatggctcaggcggttgcctgcctgggcgggatccccccctgcccaacccacaactagggttctggggttcggtcacgaacggtaaagggagaggtatacggcagggctcaaagtgaggggtccacggaaaggcaacatctgtatatgttctcacctggggaaacaggcaaagcccaattaccgggacatgggacaaccgttcgggacacaggcccgccccctcgccgggtaaaaagcgcccgagcaacagtggcgtagaaaggcacagactcccaacagggggagaagagggcccaagaagggg

SEQ ID NO: 541695 - DNA, 134 bp, Homo sapiens
gcggccgcctaactactactgctcgaattcaagcttctaacgatgtacggggacatggaacctctttctttgatcttctttttcttttctccccctcttttttgttctaaagaaaagtcattttgatgcaaaaa

SEQ ID NO: 541696 - DNA, 1562 bp, Homo sapiens
  misc_feature (183)..(183): n is a, c, g, or t
tggtggctgtccttggccctctgaaagcttgcagaaataaagccaatgggctatactcagctttgcaccacagctcaaccccctcaggggaaaataaggttaaaacacaaaaagagctccatccaagaggacaagggcacagcacacttcaaagagataaggggaacaccgtgccctcacagnattgagagaggacaccagcacaagaaacttcgtgacaattctcttaaaacccagaaggtggtgtttctttacctctccaaatgtgatctcatatagcttccccagcagagtgggtgtgttaactcaaatttaaagcagccttgaagtgtgacagaatattcgagaaactcgtggaagtggttaagaaaagagctctccagagtgaaatatcacggggggagaaagagtttggaacacctccaactccggaggggaacaacacgagttacaagtgtgctctcccagaggagttttgcaagagatagtgtaccacgagcccccattttcttagagaacagagaacacccaaagagctgtgagaaacctttttctatagcaaattgtgcacacacaaattttttcactataggcgggaaagatatctcccgatattaatatcaccaaagctttagagagaggcccattttcaaaattatcgccacagcgagatatttcacactccgtgagaagggagacagaagggaagttctccctacgaagagaaggcctctccaaaagagaaaccaccactctcccttttttgtggaaactcttccaaatgttgcccgcggcggcgacggacaaccaaacacatctttactacgcacacagacgggcacatttttttttcacaagaaccaaacgttgtgtaaaagaaactttcttacgaaaaaaaaaaatttagtgcggcggcacttatactgttgtcttacacgggggaggcaccccaaaaaaccgctatatattaaagtctaccatgttgtggggacatctttcccctgtggaaagaaagacagcaaacagaggaccgcgcgaaagattgtttacccgccaaaactgtctggtggaaacaacaccgcgttatatttgaaggagaaataatatatagggtcccacacgcggggaacaaatttttcccccccccgaggtgtccctccaaacctatacaaaaaagagcggggtggggcaccacttttgggggtgagaaccccccccacatggaggagacccaccgttgttggagagagaaaatcttcctccaaaagaggaaaaccgcacgggctttttaccattcttcaaaaccccccgaggaggttctcctctatataaaccgggggggttgttatacccccacgaggaaaaaattaatgctctcttcttgtccgccaaaaaagaatttattgttcgccccacaattatttttatagtaaagccgctgttcaccaaatgtgcacgaccaagtggagctcaaccatattatgcccctcaaggggtgggggtgggctacagaacaaatgtggtacccgtgacccacacggtcatcaataacccggcacaga

SEQ ID NO: 541697 - DNA, 965 bp, Homo sapiens
cgtggtggcgggcacctggagtcccagctactcgggaggctgagacaggagaatggcgtgaatccgggaggcggagcttgcagtgagcggagatcgagccactgcactctagcctgggcgacagagcgagactgcgtctccaaaaaaaaaaaaaaaaaggaaccggttgaggtttttccagatggggttcccaggaagaaagaagaggttctcctggagaattaggggaggcaggtacccaggttttaaaaggctccataagagggtcaacacaaatgtggaggctctggataaacgtggatgtagaattttctatacgtaggattaattaatcttccagtggagggaacgcaggttacaggtaaacagggattaaccgggtgggacagatacaggatgtgcgcaaatatttaaggggtggctttggatttacacacgcttggcgttcagcggttggatctcttgggttaattaggttcccaaaaaaagccaccctttgttccaacttcagcgacacttggtgggggggaccgaaggcgcaaacttttctcaacaaatttaaacaaacctttggggagtttagattttagacgatttcacacggatgggggtcggattttcaaatgtggtcctcgggcggaaaaaccaacacatatccaacgtggtggggtaaaagtccttctaaaagggggcaaagacggatttctaattaagtttaatgtggttgccaacaaatggggttttaaaacccttacgagggttacaactgttgcgaatggcgcgttggacactgtggttgtttaacccttgtgaagcttacattctccgtggaaaaagcgccacataattttgggggggggggaaaaaaacaatatcaaagggatttggtctataaagagattttgagaaacccagaatggaaacacaaaacggggaaaagaacaatatgggggaaaaggagggtc

SEQ ID NO: 541698 - DNA, 157 bp, Homo sapiens
agaggatgttggctgcgactgggtgcggacgggcgctcctccgcgggtataccagttcgcctacgccggcaagattacatcgccctgaacgaggacctgagctcctggaccgcggcggacaccgcggctcagatcacccagcgcaagtgggaggcgg

SEQ ID NO: 541699 - DNA, 184 bp, Homo sapiens
cgttagaaattctgtaataatgggtaggaatgttgctttagatggaggagaggggactacatatagagaggagggaggagaagtggctgcattggggagggactctaaaggttaggttaggaattggacacggagtgtcaaagtcttcatgggcaggtgaaggctgggggagtgtggtgatgga

SEQ ID NO: 541700 - DNA, 306 bp, Homo sapiens
  misc_feature (118)..(118): n is a, c, g, or t
  misc_feature (156)..(156): n is a, c, g, or t
tcattaattctgtttttcctgctttacaaaattcaaatatgtatgtcaagagaaaggaatgctctaccagctaagctcatgttattttaaaatgagaattattaatttattaaaatanctagaataagcatttatttttataccataaagcataanacacaaatttcttaaatgatatttccttcttcgttatgacctagccaaagttttagaaggtagctatttttaaaggccttcttaccacattggctccatccactttgttcaaggccaaagcaatctgaaataaaaataacagctcaccta

SEQ ID NO: 541701 - DNA, 325 bp, Homo sapiens
  misc_feature (175)..(175): n is a, c, g, or t
tgttgtggtgatctagaggatcccactttagcaggtctatgacttgggttaatctgtgtgacgtgtgtggtggacgaaattttgacaacctggggttagtatagcttagttaactttcgttattgctaaaggctaatcactgtgttcccgtgggggtgtggctaggctaagcgtnttgagctgcattgctgcgtgcttgatgcttgtcccttttgatcgtggtgatttagagggtgaactcactggaacggggatgcttgcatgtgtaatcttactaagagctaatagagaggctaggaccaaacctattgcctgcataaaagtg

SEQ ID NO: 541702 - DNA, 373 bp, Homo sapiens
cttattattgacatcacgaggttcgtgtggactattcaccctcagaagacagcgaccctcctgatcagcgatgagcgtgggcgtagagaacactgctgtagggctggcactgtggtcgcatcaggtactgttgtgggtgttgttctttacactggcagagaactccggagtgtcatgaatacctcagatccccgaagtaagatcggcctgtacgacttggaagtgaactgcctcaccaagatcctcttatggttgccctgggtggtggtctcgctggtcatggttgcccttcagcactttgcaggccgttggtacctgcagatcatccgcttcctcctcttgtataccaacatcatccccattagttttgcgc

SEQ ID NO: 541703 - DNA, 122 bp, Homo sapiens
gcggccgcctactactactaaattcgcggccgcgtcgacggttgttattagtagagtagagcagcctttcatcaggttgttattagtagaggagattagatgggaggggaggagagggccca

SEQ ID NO: 541704 - DNA, 130 bp, Homo sapiens
gctcttagtagattacacatgcagcatcccgttccagtgagttcacctctaagtcaccacgatcacaagggccaggcatcaggcacgcgcattgcagctcaaacgctaggctagccacactcacggaaca

SEQ ID NO: 541705 - DNA, 442 bp, Homo sapiens
tcccgggggttttggagggacccttttctcccccccctgggttttttttccttcccccccgggttttgcagggaatggggggcaccgcctttttttccccaaacccacagtgggagcccctttttcccactttttgggggccgttgcccccttaagttagggggccccccgggccctttccctcccctccggttttttaggggccaagcccccccccccctttttgggtggtgagatggggggttagggggggtgctccccacctcccttaaagggcccccccattttttgggcccttttccgggtgtgggaggtcttttggggcccttaggggttcttccttggaagtttttttggggggggtccccggggggctgggcccaaaagcccttagaaaacgggggttctttactggggttaattaaacggggtttccccctta

SEQ ID NO: 541706 - DNA, 291 bp, Homo sapiens
caattcactggagcaggaggaggggataaacgagattgagcactaggagcaacagtggcaggacacccaacagcccaaagttggaaggagcacaagtgtacactgatggatgaatggataaacagaatgtgatctaaacataccatgaaatattatccagcctttaaaaggggaggaagttctgatgcatgctacaacatgaatgaaccttgaggacattatacaagtgaaataagccaggcagagaaggataaatgctgtatgattctactcatatgaggtacctagagt

SEQ ID NO: 541707 - DNA, 694 bp, Homo sapiens
  misc_feature (49)..(49): n is a, c, g, or t
  misc_feature (90)..(91): n is a, c, g, or t
  misc_feature (142)..(142): n is a, c, g, or t
  misc_feature (168)..(168): n is a, c, g, or t
  misc_feature (185)..(185): n is a, c, g, or t
  misc_feature (191)..(191): n is a, c, g, or t
  misc_feature (193)..(193): n is a, c, g, or t
  misc_feature (203)..(203): n is a, c, g, or t
  misc_feature (205)..(205): n is a, c, g, or t
  misc_feature (226)..(226): n is a, c, g, or t
  misc_feature (229)..(229): n is a, c, g, or t
  misc_feature (233)..(233): n is a, c, g, or t
  misc_feature (265)..(265): n is a, c, g, or t
  misc_feature (293)..(293): n is a, c, g, or t
  misc_feature (326)..(326): n is a, c, g, or t
  misc_feature (329)..(329): n is a, c, g, or t
  misc_feature (342)..(342): n is a, c, g, or t
  misc_feature (344)..(344): n is a, c, g, or t
  misc_feature (365)..(365): n is a, c, g, or t
  misc_feature (503)..(503): n is a, c, g, or t
  misc_feature (685)..(685): n is a, c, g, or t
agaccacaagcccaatcaccacagcttcttgtagagaacatggagactnccaagatcaacatcaggtgccgcttccttcctgtggctttnnatcttccagtcagaatggtattttgccttgaagggccccaaaacaacagcnctggctatcatcttcatcccaaaagnggagaagatgggcaggnaagaananggagggtgtnanagagaggttcccatcaggttnatngggngcccgatgtacctcttggagaatgtcagcttnaatcagcttctgcagctccttggtcttntccagtagtaggttcagcttaggctccagagcngcntgctccttaagtncntcctgctgcttctgcaccatnagctctttttttaaagacagcagctgggactgcttcagattttgctggaggaattatagttactcgagtccacataccttggtgaggccaggatcataaacaggtgttgcagctgaagattggtaagcttgctaattngatcctccagcaatgacaaatggtaaccatcttctctttggtctggacctgcaggatggctggagccagctggaactggctcacagacaggacatctgcctcctcactcaactccactgctctctgggctaagaagatctcaagctccatgagctcatcaaggaactgattccgggtctcantgtattcaa

SEQ ID NO: 541708 - DNA, 614 bp, Homo sapiens
  misc_feature (398)..(398): n is a, c, g, or t
gggttctcagagaatactccatccagcatccaggatctccctccctctcatccctgaagggctagaaggtcaaagcacagaaaaagcctccttggtgctgacatgggagacaaggatccgttcttcaggcggcagggagaatggggatagaaacggactcgggacttgacatgtagtgctcagccacacgccctcaccaagacctgtgcattctctactctgatgacaaggaaaggccacggcaaggggggtgggatcgggggtgtgggggcggtggcacggcgggtgggagccacggcgtggcgcatgcggggtgacggtgtcaccgccacacacggctcgggggcaggcgtgatcagggagggggggagacagacaaggtgaaaacgtaacacggnccaaggattccccggcttctgtggtactttccaaaattctcggatcaaaaaggtataggggaagcacaccattaaaaaattacagtttaaggtatttacaaaagccatgatgatatattacacaagaatcaatacacagtatatgaacaaatcttcagggaaagcacttgtgagaaccggtctccacagggtacggagctcgaatcgtatgtagag

SEQ ID NO: 541709 - DNA, 202 bp, Homo sapiens
ggagtgataaaatgatgcggatatcctaggagaggtgcggtgtgtatagtagcggtaggatttctatacagagtagtggatgatacatagtatagtagtaatgttacttcatcatcgtttgtggcataaagtaatatcccatgaaagattgggccagtgacctctaacagcttcaggacttaactttcccacttggatcaat

SEQ ID NO: 541710 - DNA, 432 bp, Homo sapiens
caaattctaattaatcattcactttgtaggtctttggttcttacactcttttgttagcaaatacctctggctgatttacagtagaacccccagagatgacttaatgacattttggccgccaatataactggtttgtgagggctgaacatcagtggtggttttgtaatagtaatttatcactctgttttaaagacagctttcaaagataactgaattcatacaaaaattagaaaatgtataacctaaacagcataaattatataggtcattaacttcttaagtcttgttactcccatgtattttgttatcaaagttataaacaagaagacctttaagaaataaatatgaagtggatcagagcacttaaagaatgagccgagatagcaccatcgtactccagcctgggcaacaagagcgaaactacgtctcaaa

SEQ ID NO: 541711 - DNA, 1218 bp, Homo sapiens
taagctggccccaagggggtatcctaactcttttattaaggggcccggcgccggaagagctcaaatattaaaaacacaaaagagccccactcgagttaataacaatataaaaaaccccaaagagtggaaaacgtgagggggcgaggggaagagaaccccggggccgaggggcacgaggagccgctggtgttcttgtgggccacgggcgcgtggccgagggggttccccgcgggtattgtgggtggtgtgcaaccagagggttgtggggggcaggcgatgtgggtccgtgtgggggaggcccccggggttctctcgctgtggggtgggggggacacctcttcaagttctctctctcgggggggggtggtgcctcgaagatttctgtggtgtgcccccgggatattgtgtgtgtccaagcgagggcccaaaacatgtggagaggcccctttgtggggggggttttgtgggttcacccggggtttcaacacacagagagaggaggctctccctttgtgaacccctgtgtggggagccccgggggggccatttgtggggtccactctctctcccgagttgtgtcccagagggagagcgctcactctcccgagggtgtcgaaatttctccccgagattcgcgggggggagatatctctcactctttatatcgcgtgggggacgaaaacttcgctttacagagcgcgcgcccgtggtagagagcggtggctctcccaggggggaggagttccacaaatctctcattcgataaggggggggggaggggggggcgcatctcccgaggataaaccccccccgtgggagggaggggcacaaaattactgtgagacgaggggggggagaacactattaccaccctgtgtgggagggacggcccaaccagctggggggggcccccctaaaattgagggcacgcggcacccccgggcaccagggggggggcgccccactctaacactgtgagcgggaaccccacagggggagggaggagagcccatctgagaaaaaagttttaaaaagcaccgcggaggtgtagaccccgggggggggcccggcacaaatgtatgtccgtggggacccccggggtgtgggaccaccgggggcccgcggcaaaaagtgagcagtgagagcccccgagtgtaagcgggggagaataatctcacacagggggcggagtatagccaagcacgaggagccacaaat

SEQ ID NO: 541712 - DNA, 194 bp, Homo sapiens
cattaatccaacttttgtatgaagcattctactcagcacagcggcacagttcatcacggcagagcttgtccagcttttccatcctccttttccggatgggtagaacccggggtacaagctttcctaccagggttgtaaataaggcgtaagaaccttgaactagctcccaggcttggataaagctcctacattaa

SEQ ID NO: 541713 - DNA, 509 bp, Homo sapiens
gttcctcgaagaggtttaggaggcagaatcccagagcagccctataaccccaggtccagtggcctggaatcctgagactcgcgtatccttggccagtggataacacaggacgtgtgtgcgcatgtgcaagtgtggatgtatgtgtgtgcgtgtgtattgctcataacttaagaggaacttgggagtcggggttggaggtgctgggcaatggaacttcaaattcaatgtcgcccagcagtgaggggagtcgagaggtgaggcctgtaggccaaccaattgatggagtctcagcgatagcccaggtgagaagtggttcacccagaggagcagggtgggggcctcaggcagatctgtccctcttggcccctctgtcctcaaatgtccaaaatgtaggaggacctctgtacatatcccacgcctgggctcgtgccagcagtggagttactgtagagggatgtcccaagcttgtataccaatcagtgttaagctgtttgacactctcctgtgta

SEQ ID NO: 541714 - DNA, 642 bp, Homo sapiens
ctgcttaaatatttttggagcgcaaaatgtttgtgaataaaagcaataaacgatatgtggcccctctttgttaaaaggggaccccagatagaggtggtctcccccccgcttgttgcggttcttcgtgcaaaaacattaacactcttggcccctcgagtcagtatggggtaccattagctggccccgcttagatggaacaccatttcggggcaatttttgcgacaacacacatgtgtgcacttgttcagccactatctcgtgtgttaacagtgccaccgaaactgtttgcatccccggatggcacggccaccacggggtaggagcattttttcctccgactgtctattctccacacgctctttgttgtccccacaacaagagatctcggtctcacagactctgacgattgctccaccgagcaagttgtagtccatcaccgacgggagtgcccctcttggtggaacatatcaaactgtggatgtagattgttgtaatagggttcccaagaggcagtaactctttgcagcacttgtcttcccgagggagcaatagtttctcctcagccgctcgccaaaaacatattagggccttttgtcccgcggatatacccacccgcatatacgtcccctgcataacacaaaa

SEQ ID NO: 541715 - DNA, 154 bp, Homo sapiens
aactgaaaagacatccgaaaaggcgatcgtgggtctaaatagtgatgtgattgcaggagtaatggggaagttccatgtctgtgacctccagaataatggcaggtaatcatttatgtctacaccttagcagaaatcaggctcctccacaacctct

SEQ ID NO: 541716 - DNA, 315 bp, Homo sapiens
acgcatgcctgctgagtagctgggattacaggcatgtgccaccaggtcgggattgttataaccctggcagtagagacggggttggccatgttggccaggctggtcttgaactcctgacctcaagtgatccacctgcctcggcctcctaaaatgctagtattataggcgtgggccaccgcacatgggctcctcctccttaaagtctcaacttgtgccactttctccatgaagcctcccttgccacccgcagtcactccagcttccatggcctcttgtacacccctctatcatgttggactgaaactgtctatttac

SEQ ID NO: 541717 - DNA, 489 bp, Homo sapiens
cactagtagatagggaggctggtgggggtgtagtaaaggcctgtctcttattctaggaggctagttagatgagtacaattcgtgaacagtcaccaagctgtaggtaggacaatttgtgcacttatctagtatcacgctttaataaaccatgtttaaaatcatataggggcatcttggtttcacatcccctgaggtgccagtgacatatccagtacctcgaagtccccatcccatgctaagtgaaacgtgctattctcaacacacagctgcaatctctacatttaaagatactgagactgatatagcgggttctctggctcctggacacgatacagtctactacacagaaactaggcaccactttatcactaatatgataacagctatcttcccctaaatgtcctacacctactcatgtaccttatagtgacttataccatacaacgtataagtatagtatcgtaatgccagttacagttgtagcatcat

SEQ ID NO: 541718 - DNA, 282 bp, Homo sapiens
ttccaagacctcttatctcttggatagcaatattggtgtatgctcaagtccctgatataaaatggtttagtatttgaatataactcatgcacatctttctgtatatacttcacatcatctctagattacttatgatgcctaatacagtgtaaatgctatataaatcattattatgctatattgtttggggaataatgacaagtaaaaaaagtttgtacatatttcagcacataggcaattttttctgaatattttccatccaaggttgttgggttgactttg

SEQ ID NO: 541719 - DNA, 742 bp, Homo sapiens
tcagacatatatttttggagacagactctcactcttgttgcccaggctggagtgcagtggtgtgatctcagttcacagcaacctctgcctcccaggttcaagtgattctcctgcctcagcctcccgagtggctgggactataggcgtgtgccgccacacccggctaatttttgtatttttagtggagacggagttttaccatgttggccaggatggtctcgatctcttaacctcatgatccgcccgccttgtcctcccaaagtgctgggattacaggcgtgggccactacacccaacctcaaattgtttttcaaagagaaaacacttacgtgtctcagcatatacctagtgtgactggacaacaagatctaaaagaatcaagggatccatagacttaagagtcaggacatccttacctgattccttgagctgataaacttaacttctctgtatgttttcctgatgggcacaaataagagcaattcttattaggcccttactacctaggtattgtacactctttgcgattaggattttgccttttatttctctattcagattgttaatgggaacaactgcactctagcctgggtgacagtcagactgtgtctcaaaaataaaattaaataaataaataaatgctcttttctcagagggggagaattgcttgccccagaggtggggattgcggtgagccaggattgcccactgacctcagcctgggtgcagagccgacttcgtc

SEQ ID NO: 541720 - DNA, 633 bp, Homo sapiens
  misc_feature (3)..(3): n is a, c, g, or t
  misc_feature (79)..(79): n is a, c, g, or t
  misc_feature (116)..(116): n is a, c, g, or t
  misc_feature (144)..(144): n is a, c, g, or t
  misc_feature (152)..(152): n is a, c, g, or t
  misc_feature (184)..(184): n is a, c, g, or t
  misc_feature (215)..(215): n is a, c, g, or t
  misc_feature (304)..(304): n is a, c, g, or t
  misc_feature (344)..(344): n is a, c, g, or t
  misc_feature (350)..(350): n is a, c, g, or t
  misc_feature (395)..(395): n is a, c, g, or t
  misc_feature (447)..(447): n is a, c, g, or t
  misc_feature (460)..(460): n is a, c, g, or t
  misc_feature (509)..(509): n is a, c, g, or t
  misc_feature (622)..(622): n is a, c, g, or t
gtncccgtttgttccttcggggctgggcctgaggaggtggcgtttttcctcccgctcgctttcattgccccgaggagantcttcctttcctgtctatttggttttagaacaggggntgggactgactttctctattgctacttntggcgtgncctcggggtggcgtgggccccttggccttcgnaatacttaatttttggggtattcttgtgagncgggttggtatccatcgtgccgctgttgcaggtgcttcttctgtgtttgtcaggaggttcactgttgtttctccagtgttttactgggnttcacaggggtgttacaggtggaccccagtgatgaaaatnactgtncccaccagcattttaaatcctcctaaattagagaaccaccctccnagaaggtttgctgggtcccatccctcccaggtttggactggtacacgggctncttttctgatgtntgaagcgatttccagaacctcttctccattattgcctatgttaagacancaattggagatgttaaacttaccacagcccgcaccctcttctgctaataagtagtctagggccagcctgttttgataaattgccgcgcgcatttggttttgttgttgcgcganattttctaggg

SEQ ID NO: 541721 - DNA, 296 bp, Homo sapiens
  misc_feature (28)..(28): n is a, c, g, or t
  misc_feature (61)..(61): n is a, c, g, or t
  misc_feature (74)..(74): n is a, c, g, or t
  misc_feature (289)..(289): n is a, c, g, or t
  misc_feature (296)..(296): n is a, c, g, or t
ggtcttgctctgtcccccaagctggagngcagtgatgggtcatagctcactgcagccttgngctcctgggctcnggtgaccctcccgcctctgcctcccgagtagctgggacctgtacaggtgcatgccactatgcctggctaatttaaaaaatttaaaaatttgccaagaatggtggcatgggaggcaaatggaggctgaggcgtgggatcacttgacctggaagccaaggctgcagtgtgccctgattgtgccattgtcctccagcctgggtgacagagtgaatacngtttctn

SEQ ID NO: 541722 - DNA, 539 bp, Homo sapiens
gtctatgtctcgatcgttactcccccattacatcacttctccttgcctcagtgattaagtccaaactccttaacagccccggctcggccctgccttgcaagggcagcctcactgcttgcccctctccattacatctgctatggagtccaactgagcctcatctgccccttgaacgcacactctttctcctctgggagtctctgaagtgggtaatatcctctgcttataatatgcttccccttaaacctctactctcttcctagctagctttgactcctctgtcacttgtccgctttggcatcacctcctcatagaagacttctatgactcccgagattctcaggagcattggcaggtgaagtgctcctcccatgaatggatggagattaaggagtgtgtgtaattcatgcttaattcaccagtgcttagctgagtaccgggcatacaatagtcactgtggcggccaaagtaataacccccaccgccgtcaccaatctctacaaagaaagcgtgcatacccatcaacgaagttcagatat

SEQ ID NO: 541723 - DNA, 1073 bp, Homo sapiens
agcggttgcaggtgagccaagatcacgctactgcacttcagcctgtgtgacagagcgagactccggctcaaaaaaaaaaaaaaaaaaaagacagggcggattatttcctggcgggcttaatagattggagaatgaaaggagtagagacggtacagactattttacctcagagacaatggaaaggccataatttatccagagagtcatacgtgcattactggaccaggcatatgaggcttacctcttagaagcatttggtcatcttggaattaacaatacgtcttcgtggtatttaccttaagtgaagtggacaacttttcagaagggtttcagggggtgaagataaactggaataaggagataactttacacaagcagaaaaagcctcatctctatcgggatcccgtttaagtgccaggggctcatcaccagggtgttagaactcagtcaccttttacccagggcgtgggaccaaccacctttctcaatctacggggtggtgttcacctttagacaatcttctgacatctcacgtgttcagcccaacaacaattttctccttccaagcctcgtgcaagtctcaatgaagtggacaggaattatatacttgctgtataaaccatacctgtggttaaccttaggccaaagccagggatcctcataagggaaagatgtacttggaaagttacttccccaacacattgggaggcttttccgtgttggcccccctggaatacactgggtagtaaccactggggcaaaaatgtgcccagcccaaatcccaggacctgggtgggtacaacctttcatctgatctaagaaagcggggcgttagcaacagaaaaaaggcaaaagcagtaaggctcacatccgaggatttaaaccgcgcaagggggttgacagattgtaaccttacttaaagtattttgataaagcgctacactctagggatgagacattgcacgtttggcgtgaggtagcacgctttttaggatatggactaaagccccttgattaaatgagacatcaatatcattcgaaaagagtttagccaaattgattctttcccccta

SEQ ID NO: 541724 - DNA, 382 bp, Homo sapiens
gcacagctacgaacataagtatccaaccaagtcaggggccacaatcttgacacagatattgcatccaacagcaaatcatcatgcaaagggcaaataagcacatgcacagcatgctgcaaactcattaatcattaggaaaataaaaagtcaaacacctaacctcaccagtatcatgcccactaaagtgactaaaattaacagatcagctataccaagtgctgtcaaggatatggagcaatcagtaccctcagacattgtcgttgcaaatataaaatggtacaaccatttaggagtatcatttgacagttttttttttttctttattggagatggagtctcgctctgtcaccaggctgaagtgccgtggtgcactctcggctca

SEQ ID NO: 541725 - DNA, 153 bp, Homo sapiens
agcaagtacggatgtggatgagatgatcaggaggctgacatcgatgagatgcaggtcattataaagttgtcagatatgactgaaagtgaaggcccccgggcagctggcgatgccgttctcttgatctctctcttctcgcgcgcgcactctctc

SEQ ID NO: 541726 - DNA, 205 bp, Homo sapiens
tgggcggaacatgaggtcaagagatcgagaccatcctggccaaaatggtgtaaccccgtctgtaataaaaatacaaaattagcaggagtggtgatgcatgcctgtaatcccagctactccagaggctgaggtgggaggattacaccactgtgctccaccctgggtgacggagagtactattgaaaaggagaacgcgtcaaaatcg

SEQ ID NO: 541727 - DNA, 1630 bp, Homo sapiens
  misc_feature (1089)..(1089): n is a, c, g, or t
  misc_feature (1463)..(1463): n is a, c, g, or t
gtagaaaccgatgagcaccttagatattcgtcttcgtggacttcccagaccgtggtacctatcgaaccatgaattctggtcggattccatttgctctccaagcatgaacggatcgaaacaagatgttgtttcaggtgtgcttcatttgttgcacatctggtaacagtatagcagtcagtagagttcatcgagctgatttcggtcaccttcctctgccgttgttcacttgggagttctgatgctctgtagctggactatagtcacgtgtagagaagctcagcggcctgagttgcgagaagcgagattctccgacgggtgtgatcctcgcgaaaatcatctgtctagcttatctcattaacgtacatttcgacgccggctagtggtgatgtgaagcgttcgtacactgtagggactgcacgtctctgtcagccaaggcaatgctggcaatagacggtacgatacgacggagatcactccggtctgaacattgaccgtgtggtgatagctatcaataaaccgtttccaaggaatgatcgtctagctttgacaccagtggtcccgttttaatcactatctaggttcccaatatccataagcgtggttcacgcatagtgataccagataccaattgtaccttatacaaactcgcacggtacatagagacagaattacctgcgaggccaagctcgtccacctgaggctcagctgtgggatgctccggggtggaccccgaatggtaaaggggcggcgaacgcgtgggttcctagtgggttgcacggccagacggaccccgggtcggaaaggggcaactccagggtacacaagtgccagcctgggaggccagccataaggtaggcggaccggaggcaaaattgccggctctaggaccccgggacaacgcggggcctaactacgtcatagggaggccaatgcgagtccctagggggcagcagtacacataccatatcgagaacccggggggtgccatggtcggagacggctgtcaacctcatgccggcctaaggggggggagagccgtgtcccgggggggacaaccccagcgaagtccccggggcctaacaccggaanggaccggggcctctggctgaacctcgctccaattatggcgccgcgccaaaagtggggccaataacagggagaggggggggcccacggttctcgggtgttagctccgcggggggacaagcgcacgggggcgccctctctccacaacattggtggcacatgggtgtcccccctgggggggggcgcaaagccaagaggcggcgcaaccacgatggagggtagcctggccaggacaacagaccgggggagaacgcggtgagactgcagccccgggagataatcggacagcacagtgccaccggccggcgggactcacaaacgccagaagaagaacacaccgcgagctggacagagtgaccccgatgcgtcgcagagangatgaattcctctccacgacacagggagagcgatagcagcgccagtagcagaaacaacaccaaagccgcgggtgccaccccaccacaaacgagacgatcagacaccgtgcgtcggtgaaggaaccaacggagccagcagccgcaatcaagacagatcataacgatcc

SEQ ID NO: 541728 - DNA, 260 bp, Homo sapiens
agaactggcgattcatttatctgcaatctaatgcatcccgtagaggaactggttaagcaagctgagaacgcagtgtaggttcagaaactgtatgaacatgatcttccttgtgtgattgtcacaatgttgattagcactataatactgccaggtgctggtttagactaacttgtacatcaagcttgcaataatagaacacttatttccctagtctcatgaaatgttatttaatatgtcaagtgtcatagggcatcagcggg

SEQ ID NO: 541729 - DNA, 482 bp, Homo sapiens
  misc_feature (482)..(482): n is a, c, g, or t
agctcaggtttgcctccactctagaaactcatcagagtgatgcccttctcaaatgggggaggtcccaaagcggatatcctggcagtgtgaaaggccggctaaaggtttgtgccaagaggatctgtggaatgcatctcctacagctggtgctgctgagtaaccactctgatctggcatcttctttgatcaagttacagagcagagtttccagggctggggattgaagtcctgcctcctccctttgtctctggttgtcctcggtaatgtttttccctcaaggtactcatgatacttcccatggggtgagtcagggacaggtctctttccagggaatccaggatggtagggaggttggttgtctaccttgatctcactttttccattgtagaaactgtgagttggggaaagttttccacacacttggtgctggacagattgtggcaaggggccccacagatataaaaatctgattcttttaaccn

SEQ ID NO: 541730 - DNA, 878 bp, Homo sapiens
  misc_feature (54)..(54): n is a, c, g, or t
  misc_feature (61)..(61): n is a, c, g, or t
  misc_feature (87)..(87): n is a, c, g, or t
  misc_feature (101)..(101): n is a, c, g, or t
  misc_feature (144)..(144): n is a, c, g, or t
  misc_feature (162)..(162): n is a, c, g, or t
  misc_feature (167)..(167): n is a, c, g, or t
  misc_feature (175)..(175): n is a, c, g, or t
  misc_feature (225)..(225): n is a, c, g, or t
  misc_feature (229)..(229): n is a, c, g, or t
  misc_feature (261)..(261): n is a, c, g, or t
  misc_feature (266)..(266): n is a, c, g, or t
  misc_feature (289)..(290): n is a, c, g, or t
  misc_feature (302)..(302): n is a, c, g, or t
  misc_feature (313)..(313): n is a, c, g, or t
  misc_feature (339)..(339): n is a, c, g, or t
  misc_feature (348)..(349): n is a, c, g, or t
  misc_feature (351)..(351): n is a, c, g, or t
  misc_feature (397)..(397): n is a, c, g, or t
  misc_feature (406)..(406): n is a, c, g, or t
  misc_feature (441)..(441): n is a, c, g, or t
  misc_feature (462)..(462): n is a, c, g, or t
  misc_feature (488)..(488): n is a, c, g, or t
  misc_feature (493)..(493): n is a, c, g, or t
  misc_feature (656)..(656): n is a, c, g, or t
  misc_feature (691)..(691): n is a, c, g, or t
  misc_feature (717)..(718): n is a, c, g, or t
  misc_feature (720)..(720): n is a, c, g, or t
  misc_feature (723)..(723): n is a, c, g, or t
  misc_feature (735)..(735): n is a, c, g, or t
  misc_feature (737)..(737): n is a, c, g, or t
  misc_feature (752)..(752): n is a, c, g, or t
  misc_feature (754)..(755): n is a, c, g, or t
  misc_feature (769)..(769): n is a, c, g, or t
  misc_feature (784)..(784): n is a, c, g, or t
  misc_feature (790)..(790): n is a, c, g, or t
  misc_feature (806)..(806): n is a, c, g, or t
  misc_feature (836)..(836): n is a, c, g, or t
gcgggggtggtcgtggggggatccggtggggcatggagggggggggggtggggngagggangtgtggtggaggtgcgcttccttctnaggggacagaaatnaacccgtgttctgcttattgttagcacaacatcaccagaaaangataacgacagcgaagcngaganagaaagtnaagtagtactttcacactcccaaacttagggggggctataaccttaaggngggnggatttgctacacaaaagcactatccacagcnagggntgatgtagccacaagaataaatnnggggagaggggngcctagaattnatgttccttacgcctcatagcgacgnaccctgggnngntggttggtctagcatctacgcagaatatgttcaccttgttgggggngatgggggnggcgcaagatagctccttagcgggctgaagagggngctagatgggctgtggggagnttgctgttcatgctgcagttggaagnggggngctctttagttcagtgcgctgcagggtgggaaagcaacaacacggacaccgtcccaccctcaacccccccactggcacagggtcacacaatctgggtcaaagaaatagtggggcccttgtggtcatcaaagcgatccatggtcttgaggctgaggatcatgtncaggccataggtgaagatgaagagcatgaacaggnaggtgagcagcaaaaaaaaaaaaaanngnganaagaagctggcncngtcgctggcgtgggngnnctgctcccccattncgttgaaagcctggntctggnagttctgaagcatcanctgccagggagagggctgcgtgcgggccangaggagactacccttcttgctcaggctgctgaaatactcgct

SEQ ID NO: 541731 - DNA, 124 bp, Homo sapiens
cacgaggttatcccggaggaatgtcatcccagggggtgaaggtgccgggcttctggtcgtatggggacgtctcctcctcgtcgtggaggtatttgttgtacctcccccggccgttttccccgta

SEQ ID NO: 541732 - DNA, 580 bp, Homo sapiens
  misc_feature (7)..(7): n is a, c, g, or t
  misc_feature (27)..(27): n is a, c, g, or t
  misc_feature (50)..(50): n is a, c, g, or t
  misc_feature (63)..(63): n is a, c, g, or t
  misc_feature (71)..(71): n is a, c, g, or t
  misc_feature (77)..(77): n is a, c, g, or t
  misc_feature (90)..(90): n is a, c, g, or t
  misc_feature (136)..(136): n is a, c, g, or t
  misc_feature (141)..(141): n is a, c, g, or t
  misc_feature (152)..(152): n is a, c, g, or t
  misc_feature (166)..(167): n is a, c, g, or t
  misc_feature (173)..(173): n is a, c, g, or t
  misc_feature (177)..(177): n is a, c, g, or t
  misc_feature (184)..(184): n is a, c, g, or t
  misc_feature (190)..(190): n is a, c, g, or t
  misc_feature (205)..(205): n is a, c, g, or t
  misc_feature (225)..(225): n is a, c, g, or t
  misc_feature (236)..(236): n is a, c, g, or t
  misc_feature (255)..(255): n is a, c, g, or t
  misc_feature (257)..(257): n is a, c, g, or t
  misc_feature (260)..(260): n is a, c, g, or t
  misc_feature (268)..(268): n is a, c, g, or t
  misc_feature (285)..(285): n is a, c, g, or t
  misc_feature (318)..(318): n is a, c, g, or t
  misc_feature (327)..(327): n is a, c, g, or t
  misc_feature (329)..(329): n is a, c, g, or t
  misc_feature (367)..(367): n is a, c, g, or t
  misc_feature (376)..(376): n is a, c, g, or t
  misc_feature (380)..(380): n is a, c, g, or t
  misc_feature (388)..(388): n is a, c, g, or t
  misc_feature (395)..(395): n is a, c, g, or t
  misc_feature (397)..(398): n is a, c, g, or t
  misc_feature (400)..(400): n is a, c, g, or t
  misc_feature (411)..(411): n is a, c, g, or t
  misc_feature (415)..(415): n is a, c, g, or t
  misc_feature (419)..(419): n is a, c, g, or t
  misc_feature (433)..(433): n is a, c, g, or t
  misc_feature (454)..(454): n is a, c, g, or t
  misc_feature (473)..(473): n is a, c, g, or t
  misc_feature (475)..(475): n is a, c, g, or t
  misc_feature (487)..(487): n is a, c, g, or t
  misc_feature (558)..(558): n is a, c, g, or t
tgggggnaactgcccactttattaggnaaaagggggcccaaaggtctccncagggcccacccncaaagtanaaaaancaaaaaggaaaanaaaaggaacctgcaacccagtcctctgtccctgggattctgggccnggganaggggggaaanaggaaggggggggnnggcctnaaanaggcctnaaaaanaaaaggtcactggcnagggatgcaaaggagcgcanagcggggactnggggaggatgacctgtccnanagnggcccatntaacgcagcctcctgtntgggagggggcctcggctcggcatccagggggnaaaggggantntaaaaaaccaactgcaggttcaccttgtggcccaccancccccgganattnttgaagcnaaaattnannancgttgggcgcnccangganaggccccaggaaanaaccgaaaagttctcgggaanccccaagggcagcagcttntntggacggaaaanccccgagtttccgacctccacccacttcttcaggccttggtggtagctgaacacctccatgctgggctctntttttgggttgtaggctggctt

SEQ ID NO: 541733 - DNA, 360 bp, Homo sapiens
  misc_feature (196)..(196): n is a, c, g, or t
  misc_feature (283)..(283): n is a, c, g, or t
aggaccagccggcagttaacatggcacgacagggcagcaaggagacagaagggagaccgaaaagaggcttctatactataaaagctattgtgtaagctagatatattaagtagttggctcaggagttcgatagttcttgggcagtgagagtgagtagtagaatgtatagtgagcctagggtgttgtgagtgtaaantagtgcgatgagtaggggaagggagcctactaggggtgtagaaatagggaagtatgtgccctggcgtccagggcgtactgaactggnttgccatcattcgggatgaagaaatagcccaagggtggggaataaagtgtggattcccgaaggaagatataaacgat

SEQ ID NO: 541734 - DNA, 165 bp, Homo sapiens
atacaaggttggcaggtaggtggtaacacctgtaatccagccctatggcaggcgggcggatcgcttgacgccaggagtatgagaccacgctgcgcaacatagtgagacccatctctacaaaaaaatattaaaaattagccaggcatggtagtgcatgcggtagtc

SEQ ID NO: 541735 - DNA, 352 bp, Homo sapiens
ctttcctcctcatcatcagatccaaagaggtcaatgtcatcatcatcttcctatcgtgtagctccacttcctgaagtgtcttccacatgccttttggtaacacttaatgtgattataccactgtagggcttcacccaagtcgccagccgttggtctgcacgcggcttcaaatactgccacatgcgctgtgtaatggcacatacccctcaatgtagctcttgtcccacaggtaatcgttgagcacttggagccgcacaggcgcttctcagtgtctccgaaacacatggtgtcgcgtgtatccgagatctggagaacagcagagagagagcgcgcatagtgtgcgcgccctcgt

SEQ ID NO: 541736 - DNA, 534 bp, Homo sapiens
tactctggcccagaggcccagtccaaccggttggggggatgccaacaatttttccccacccccaaaggaccgcccctcaaagtggcgctcggcagtgccccaaattagcctggggtggccggccccaaaggggtgttgccaacatgttcctgacctcccaaaaagtttcagcccacgggcccggcccggcctggcccttcaagggatggcccctgtgaaggaccctttccaagcctgcccgttgccaatttgctgtgaaaggggggcctccctgccttggggccttagccctggctttgcacttttcctccggggaaaaaggaccctgcccctcccccgacctggggccacactgttgccttttcccaggacggaggcttttggaccctcggaccccatccccctcaaccaagtgtctttttgtgtttggggggaggaggggatgatatccgtgtggttccatgtattatttttaagctccgtgagtgggtgggtcagtgtttgcattaagtggaataaactgcccccccccca

SEQ ID NO: 541737 - DNA, 305 bp, Homo sapiens
aggattgagagcaagagcacgggacagaggcggggtgtgtccagcacccgcagagcttgtgctcgggcagtgggtgtggtgaggctgtgttgaggcagggccacacaggctgctccaaccatgggggtagggtcaagcgagaggcgggcaggggagaggctggtgccaactgactcgagcccagaagacccaaagcaggcctgtggcccaaccagagtaaagattgttcagttgatccagactagctagtggaaccccaagaatttctttcatacagaaggctgtagcttttcctttgtggggtc

SEQ ID NO: 541738 - DNA, 511 bp, Homo sapiens
tcagcctcccgcgtagctgggactacaggtgtctgccacgtgcccggtagatttgtatttatgttctggtgtatgtcttattactctgatatagtggtctcagtcagtggctagtgtcttctgactggaaataaggtatgatcaatacagataatgctttcatgccatgttcttctttcatattttctctgaaactctgattacatgtgtgttagatctgcctgcctattacatttttcgatgtgtcttatccatattttgtatttcttacttttgtgctaacattctggatttcttctgacctgtttagttcctactaattctcttttcatccatgtctaaaccgtttgttaatcccacccatatgattttttgttattgtctggagatagggtctctatcaccccaggctggattgcagtggcacgaattacgagttcacagcgaaccttcaactcttgggcttaagcactcttcccgacctcaaccgtcctgagtagttgggactatg

SEQ ID NO: 541739 - DNA, 173 bp, Homo sapiens
gatccgcctgtgaaacgagacgacctctaatatttatctaagttaatatgtattcagatgaaacctgtatattaggtgttcatgtggtcacttttgtatttaaagatcaaattatttgactatttgctcaggaaccatttcttcatacttctgattggtaaccactgcagggt

SEQ ID NO: 541740 - DNA, 1845 bp, Homo sapiens
  misc_feature (573)..(573): n is a, c, g, or t
  misc_feature (599)..(599): n is a, c, g, or t
  misc_feature (1143)..(1143): n is a, c, g, or t
  misc_feature (1146)..(1146): n is a, c, g, or t
  misc_feature (1161)..(1161): n is a, c, g, or t
  misc_feature (1645)..(1645): n is a, c, g, or t
  misc_feature (1669)..(1669): n is a, c, g, or t
  misc_feature (1688)..(1688): n is a, c, g, or t
  misc_feature (1709)..(1709): n is a, c, g, or t
  misc_feature (1798)..(1798): n is a, c, g, or t
ggactcgcgggcttggctggtctcggctcgattagcacgctcgcgacgtccgcttcgtccatgtctgtgggttagtcaccaaccggctatcggacttagacgagtccgagtagtgctagtgctggtgcattggagctcgtcgagcaaagcggtctgatgacaagctatggacagatggctcatggtggcgtagagctgaggaatgatatgaacgatacccaaagagcatggattgtccagcaagatgaccaatgggatccggcatgaaaggttttgaagggtaggcttgagacgcaccctttatttccggatcctaatccagtaatgctccggtgtaatttattccaggtagtattgtcgacctatatgtgcctgggaaagagatttattgaagcatccatgaggagagagagcatatgggaaggcctaaagcgtttgtggacaatagaaggtgtcccccggttctagtatccgctagtcctggcttgacctaaggactatcttaatgagcttgggaagataaggaagggaagaagaaagatgaacaagaggcatgcgcaaggctctgagcancttgcgtcagaagatccgaaaatacnacgtgatttcgagtcccatatcacaagctacaagcagaaccccgagcagtctgcggatgaagatgctgagaaaaatgaggaggattcagaaggctcttcagatgaggatgaggatgaggacggagtcagtgctgcaactttcttgaagaagaaatcagaagctccttctggggagagtcgcaagttcctcaaaaagatggatgatgaagatgaggactcagaagattccgaagatgatgaagactgggacacaggttccacatcttccgattccgactcagaggaggaagaagggaaacaaaccgcgctggcctcaagatttcttaaaaaggcacccaccacagatgaggacaagaaggcagccgagaagaaacgggaggacaaagctaagaagaagcacgacaggaaatccaagcgcctggcatgaggaggaggcaggacaatgaaggcggggagtgggaaacgggtccggggcggagctgccgtcggttaaggagaagccaagaaatgtttgccaagggaactgagatcacccatgcatgtngtnatcaagaaactgaantgagatcctacaggcacgaggcaagaagggaactgatcgtgctgcccagattgagctgctgcaactgctggttcagattgcagcggaaaacaacctgggagagggcgtcattgtcaagatcaagttcaatatcatcgcctctctctatgactacaaccccaacctggcaacctacatgaagccagagatgtgggggaagtgcctggactgcatcaatgagctgatggatatcctgtttgcaaatcccaacatttttgttggagagaatattctggaagagagtgagaacctgcacaacgctgaccagccactgcgtgtccgtggctgcatcctaactctggtggaacgaatggatgaagaatttaccaaaataatgcaaaatactgaccctcactcccaagagtacgtggagcacttgaaggatgaggcccaggtgtgtgccatcatcgagcgtgtgcagcgctacctggaggagaagggcacntaccgaggaggtctgccgatctanctgctgcgcatctggacanctactacaagttttgattacnagggccatcagcgacaggtgacccgctgagggcctcctcaaagtctgagcaaggacaggcagaaaatgagggcgaggactcggtgtgtngatggagagactgtgcaagtacattagccaaggacgcacagacggat

SEQ ID NO: 541741 - DNA, 192 bp, Homo sapiens
gctgtggttaaaggcaaaggctgcagcctgattggcgtgcccaaactgggctgggcactgtcaggaacagccaggctgactccagagcctgccttctggttggattctcccggattaagtctggccctgcaggaaaaacgacaggagttatcatgccaaccaagaatgagacaatcagagactggcaggtat

SEQ ID NO: 541742 - DNA, 283 bp, Homo sapiens
  misc_feature (10)..(10): n is a, c, g, or t
ccgacagagntgtgcatgtgtaaacacaaaattatcatgggtttatgtcctttaggctcacttgcaaatatcgggaatgaggtttatccaaaaaagaatgacaaggaccagcagattaagcctctgcccctgccagagggctcaaagggcaggaaaaggcagtgagagaaggagagacagaaaccaagatgacagtgcagaggaggcatggggatgagatcacacacggagccctcacagggaatgagttggggtcatttgatgttcatattagaagctgcag

SEQ ID NO: 541743 - DNA, 95 bp, Homo sapiens
aggcgagaggagacgagacagcggggcacgacgcgagaaggcatacgccacaaaaaaacacgacgggagggtggagggggggggggaggggcggg

SEQ ID NO: 541744 - DNA, 106 bp, Homo sapiens
  misc_feature (16)..(16): n is a, c, g, or t
ctacatcttatttganagctacccatcacagagctgatcaaacagattattaaaagacaatcaaaccatctacaataagtcagcctcaaggttgacagcagcaagg

SEQ ID NO: 541745 - DNA, 343 bp, Homo sapiens
gctgcaggcgcggccgactggtgtttatacgtcactcgccgaggttccttgtgtcatggggccagcctgactgagaagaggacgctcccgcgagacgaatgaggaaccacctcctcctactgtgcaaggacaggggcctggtccgcaaagggaagaaaagcaaaagacgtggctaaattcgcgatccgcccagccactggcgccgactgcagtgacatactgcggctgatcaaggagctggctaaatatgaatacatggaagaacaaggaatcttaactgatgcagaagtgccggagcactggactccggggacacagcttggtgggttttttttgggggccg

SEQ ID NO: 541746 - DNA, 585 bp, Homo sapiens
ggctgcatggtttcgatagataactagtatggggataaggcggtgtagtgtgtgcctctgtgtgtaagaacgtgggctagcggcattgtttaactctttagcagcgtaaagccttataactcacgtgcgcccgtctcattaagtgggactggccagtggcctagcgtttaatagaatacgttggcgtggtatgggtgtaaattgacgtgagcgcaggcagtccgaaggaacggttcacgtatgtgggcaaatcaaaaaattgattcaaggcatacataatgtatcacagaggatcgagggttcgggtccattatagagtgtagagtagtaattggtctaatcagattttggtatctgggcagggttctacagttctggcatataggtcaattggtatggggatggcgatgcattcaggtccgcgctgggtcggcatgcacgcattattttgcgcacggctgcggcgattcaagtcagaagcgcgtgtgacaactacgacatgcatccacgttactctgccgcgcggcagacagcacccttggagggccttgggcagcggcctgggggccccggggccgggcgatc

SEQ ID NO: 541747 - DNA, 159 bp, Homo sapiens
gagaatgttttacgatgcattgttatcattaaccagtctttttagcctactaaacttaaatggcaattgaaatacagagctctgaatgcgaaacaacttgacctgaaattgtcgacagagattgatacccattaaaatagttaagaatgacgaacatag

SEQ ID NO: 541748 - DNA, 238 bp, Homo sapiens
  misc_feature (65)..(65): n is a, c, g, or t
  misc_feature (136)..(136): n is a, c, g, or t
  misc_feature (161)..(161): n is a, c, g, or t
  misc_feature (219)..(219): n is a, c, g, or t
tctggtcactgggaaattgccggtgtcccggttctgtttgagtggggatatttctccgatcacgnaaacagcttcccgcaagagctgctggataaactggtcacgcgctaatctgccgggttacctcggtaactgncactcttccggtacgtcattctggnatcaactgggcggagagcacatgaaaaccggcaagccgattttctatacctccgctgntccgtgttccagattgcct

SEQ ID NO: 541749 - DNA, 564 bp, Homo sapiens
gagttaattggaggcagagaccatgtactccagttgcctctacagcacatgacacatgccagacacctcatcagtgttctagaacacttgctaattagctgtgacagcattgcatgtttcttactccgttttgtaacccaagagatttactgggattttctgtttcaatatgcatgccttgactctttactaatagaatttctaagagagacctatagctatagataataggaaaacattatgttcactaatgtagttttttcccccatttactgagtcaacagaaagtcttaaaatgctaaaaacataagtgacaactactaacatcaggtcacaaagcacttccataattattatctcatttgatactccagtaaccctgtgaatgttatcaccttcattatcatcatcatcaccactttgatcattaccacaaccatctcaattttacatgggatgaagaaacttgaggctcagaaaaatgaaaagacctatttgaggtcagtgtatgagtcaggacttttggttgtattttgaaagtagcccaatttgaactggcttaag

SEQ ID NO: 541750 - DNA, 106 bp, Homo sapiens
ggttttcaacctagtcacagagcagcacctacctcctcctcctttccacacctgcaacatctttttccttgggctgaatatttagtgtaattacatctcagctttg

SEQ ID NO: 541751 - DNA, 206 bp, Homo sapiens
atctcactccctcctccagtgccctgtgtcagtgcacagtgacccgcagcctccagctcccggccctctgcctcggcccgctcatgttcctcccactgcccgcaagtcaagctgccttctcctctgcccagcaagctggtcaacacttgcgctgcttcttctcctagggtgcacacaagctgccgctgctgctccaggtccatggt

SEQ ID NO: 541752 - DNA, 215 bp, Homo sapiens
cacagcgattatgagtggtttaataataccagtgtactcaactgatccacagtccaaagtggcaggtccctaagaaatttaccacgcacttcagttaaatccaaataccttattatttttgtgtccatcccaacagtcttctgtggggagggaccgaaggctaggggtaaaccgagtctccgtaatggcccggggttcctgtttgagcttttgga

SEQ ID NO: 541753 - DNA, 409 bp, Homo sapiens
cggaatatcattcagccttaaagaaagaaagaaatccttctaattttgacacatgaatgatcctgaaggacattatgctaagtgaaataagccagacacagaaggacaaatactacatttatatcacttatataaggaatctaaaatagtcaaactcatagcaacagagaatagaatagtggttgccagtggttggaggaagttggaaaaggggaaatattagtcaaagggtacaaagtttcagttgtgcaaaataaataggtcctagggatttgtatggcatagtgcccatagctaatactgtattgtatacttaaaaatctgccaagagtgtagatcttatgttaagtgctcttactgcaaaagtagaaagaaagaaagaaaggaacaaagaaagaaagaaagaaag

SEQ ID NO: 541754 - DNA, 251 bp, Homo sapiens
gtaaaatgtgcccgggagcggctccctgagagcgtccgtgaactggccccactcgccctcggtcacgatcctgagctcctggtagtagtgctcgaacagcttgttctccttgacgatctcggggtagcgtcgttcccagaccgcttaaccgcgctttccaccacctgaggcgccatcctcggcgtcatccgtccgatggtgttgctggagccgccgtccccgcgaccaccgcaccatagcgcatgcggccg

SEQ ID NO: 541755 - DNA, 169 bp, Homo sapiens
gggtgccccccccccccccgttttttccttttccccattccccccttttgggggccccccgggggggggggggtttttttttcccccccctgggggcctttggggggggccccttttttttgggggggtttttttcttttttgttttttcccccccggggggttttcca

SEQ ID NO: 541756 - DNA, 691 bp, Homo sapiens
agcggacaaataagtgaaattatagagatgctaatttggagttaatagaagtatgtttttagtaattagagctgtctgaccataaaatggactgcacaagataatgaactttcctaaatgaacatatataaaaatattaataatattatttacctgagtcttggcaaagaataattttcaaaaatgataaaattatgactgtcattcaggtagaaaatgaatatattttaaagattctgcttagctcatcatttactgagggaatcaggcaaatatatcataattgagagaactcagaaagcagatatagttctagatcagggatattaaaatgaattttcagataggtacaaaactggcttttgtccctctaccaccagatataatttatttgcatgtctgtagacaaaattttgcaatgctatcatttttctgtaagttacagagttataatatagactactcaaaaaaagtgcatatccttatagaatgaatttctgaagtctctagcattttcgtgaaagaatatccagtagtctcttttgcttgttttaaagtgttaaaattttccttatagtctcctcttcttagtaaaaataacctcaaaaataggttattcttgatcactagtttttatatttggcctgattatttacatgggcataacaagaatgtcaatttaccatatagg

SEQ ID NO: 541757 - DNA, 1020 bp, Homo sapiens
cactgcccggatggtctgcttctcggcgcctcggtgcgtcccacctttgagaccggtacgaacgtcggcctgttccgtggctgcgactgctttggctgagtcatggggccttctccttttcctgccctcgggtacttgccccagtgtgcaccatagaacccttgtgccatggtgcaaaacgttggccacagagtaatctctgcactaagtagcgctatgagggagattgacgccccttccactatgaacagagtgattggtccggaacatccttgtcacaggatcaagtgtgatgaccaacttgtatactttaagctggaggtagccccactgaaccaagctccgccctatgtacccatacaatcgtatggacaggaaatcgcaggaaacttgcctaacctgcatttgagattgctgagatcagatagagagcgtgcatgttacacaagggcatttcccatgtgacaaagcttcgcacgtggtcggttgagcaaatgtggctcctgtacataaatgtcttgcatcagtctattccatctacactcgttaacatagggtaagcgccttaggggtgcgatcctcgagcaaggtcatttctctccaagaatgaacactagtaaataggtgtagccaaccgcatttgatgtacatggagcgaagccatgtgaacctgaggccttccaaatcatccctgtataaaagctatgatgacttgaccaaatagaggtctcaatcgaatgacgctcgaatctggtcttaacaatctcggttatcttcaaacactaagtctgaatggaaaatgcaggtgaacggaaccaagatgtgtcagacgcgtcgtcttctgtgacgtcttaaagcttcggtgttcctcggaagtttggtgctaacatgccgagaagaaggctgactcgcagtggatcgtcgccaaaaccgaacacctgtggcctgctgttttcacactagcctgcgccaaactttagaaaagaaatttagaaccgtaacacttcacaatagttcctg

SEQ ID NO: 541758 - DNA, 779 bp, Homo sapiens
  misc_feature (696)..(696): n is a, c, g, or t
gcactttcctcgatgccaagaagagcctgaacctgcaacatcttcctgaagcaattgaagtgctccaagcgaggaggtcgctgctatgatccgggctggagataccaccgaaggtttgatgtggaggttcgtcaaacaactcgcttaagctccgttcccgagaagcgacgagattgaaaacctgcgggcattcacagaggagcgagccaagctggccagtggccggaccgacttactgacgcgtcctcctgtctggctcagtatccctgtctacctagctgcgtaatcgaagtgcgaatgctgcctgtgtgatgggcgcggatcgccgtgctgggacagtggtgcaggccacagaggctccagcatggtagctaggcgtgccgtgccgaaagctctgctcaccgagccgccgagctggccctattttctggccaggcgtgatccatgagaacttgggatacttcctcaatctacggcaggccatgaccggatgacgccgacggcttcaagagtcagcgacattgctgagagcatcacgggagaccaagtcccagcagaatcgcgtgacgctgctgcaccaggtgctgggaggaagcggaaaagagccatcccgagctcctgcagctgccccgggaactggaacagacctcgcaagcagcagggatcaagctggagatcatccggtcagaggccagntccaagctgaagaagcgtctggagaccgagcggaaggtgtctggctccgtgggccgaggtccaggagcagtacaacggagcgg

SEQ ID NO: 541759 - DNA, 364 bp, Homo sapiens
attctaaatacaaaatgaaacattattgtcattaatttgcaatatctatgattgaatcctctaaatgaattgtgcaggagaggcgattagtataacacatgactactgacgttcacattgagtcatctttaaaaatctgtactctgctatttggatgcttctcgtgacgcgagttggattttgtactgaattactagtcgttccattcctttttttgaggtgttcttagtggggctataacatcgccatcctattaggacgagagtacgaaaaacaggccatagagaaatagccagtttccatcatcttatttctgagtgaacgtctctagttcgcacatcctcatcttgcatatagatcgctt

SEQ ID NO: 541760 - DNA, 856 bp, Homo sapiens
gaactggcgcgagacagcagcgcttggggaagacctgagagccccttcgtaaattcgcgggccccgtgtgcgcccgccgcgaagggtcccgggaggcccaacacccccccgtcccgtcggcgaagaaaccgggccccctctcagcggggtagggacacggccaagcgcgggtccgagacccaaggcaaggagcccgtcgtgcgaatacgcccagagaacacgtgctgcggagagataattcgccgcagacgtccccccgtgggaccaccctctgggtccaccggcccacaatttctgcgagccccctatgcaacaagaacgccgcgcgcccccgcggggaagccgcaaggcatcacgtgccctggaagaatctcacctggcaaagattccacagagcctgcgcgataccaccccagctgggagggctcccccgccgactcggaccaaggcatcgggcgagagcagcccccccccgcagctaccaccctctggggcaccaccaacgagttaccgggccccgcatctgggctatttgggcgtactataagaagcccaagggccgtcgcctctcccgacaacacagaagccggccagcagcgtcacagatggctagaagaccctggcggcaagagatgtccccgggcagacaagtgagaccccaaggaccgggggtggacaaaaatggtaacgctcgggaggggcgcgcaggcacgcacacagggggccgaagcccctcctatcacggcgcagacgatgagagccggacgaagtcccgcccagctcacgtcaggagagcgcccgaacacgcccccaggggacatgggggccccacaaaagaaaggacccgcaacaaaac

SEQ ID NO: 541761 - DNA, 222 bp, Homo sapiens
  misc_feature (63)..(63): n is a, c, g, or t
aactaatcacttacatcgccttatgtcttatcattattctaacattatattctaggctggaangatcgggacgtcggccccggcttctactccttgagcgtctcctgtctctacttcgagatcttcttcgctctcggcttctgtctctctctctacttttggaacgtctgaaagggggacacttttcatttattctatgaccaaatggagctactatttcag

SEQ ID NO: 541762 - DNA, 134 bp, Homo sapiens
  misc_feature (2)..(2): n is a, c, g, or t
tntctggggtagatatatttatttcaggtacatacattaagtggcactaattacacagtagctataaggtgaaaacgatgaccacaatatctggatttgtggcgacatactgagaaccgtagaaaaagcagatt

SEQ ID NO: 541763 - DNA, 362 bp, Homo sapiens
tcatccgcaacctggacgcggtacgcatgcgcgccccgacacctgccgccgagtgtaccgcgcgtcatcgccgagtgtgcgcagccggccgaggagcggcccaccttcgagttcctgcagtcggtgctgaggactttacacgccaccgagcgcagtacgagtcagctagccgccggcgctgcgcccgtgcccactctgcgcggacgaccccgacttccgtgccatcccagacgggcgcgaaggcggggtgtcgcctgtgcccttttctcagacccggaatccagtgggcagaggcacgttcgcagggggtccccggacggactccttcaccgactgcacccccgggcgagttacgcggccgc

SEQ ID NO: 541764 - DNA, 1674 bp, Homo sapiens
  misc_feature (243)..(243): n is a, c, g, or t
  misc_feature (372)..(372): n is a, c, g, or t
  misc_feature (651)..(651): n is a, c, g, or t
ggttcttatcagcggctctgtttggtgcgtccgctcctgtcttcgctggtgggtgacgacagcatctcaccgccctcggtgtgtgtttgcgcctcccctgcaatggtaactcctccgtggcgcgcgtagttcctctctctcgtgcgtggtttagttctgtctctttggcctcggcgggctgcgctgagtattatctctcgttttttcgtgctcacaccgcgtgtatacgcctgcttgtgtgcncccatcttagcgtgccgctccttttctgtgcgggccgccccccatattgttggaggacactgttgttgtgccgcccagtatatagtcgcgtggcgttgtggtttctcttccttccctggttttttcccnctcggcagtttttttctcttcgtgctgactcatacactttgttgtcttttcggttgctcgcttgcgttctgttaatgttgtgggtgcacctttttttatttctcgggggtaacaatcatacatggtgttgcaatcatcattatgcttgtctcggccgtcatattataccgccgcgggggggggggtgcacatcatagatgtgtgattgtcccctccctcgtccgcctcccctcactggattatttccttcgcgttgatcgtcattttaattatgatctntttttgggtgggtggcgcccccaccatcgctgtcttgctgccacatcaacaaccccagccagagatgttgttggtggcgccccccccccccctctgcttttctgttgccaccagccaccacagacgtctctccgcttgtttttgcccgcggcggagggtgttgttacaccacaacagcgagagtatttttcgcctctttctccccctccgcattgtgtgtggtgactacttctgctcgggggagatttttgtcttctctctcgcgggggggggttcatcacacacatttgttgttgttgtatactcgtcgtgttgtttgtacacacatcgaggagaggtctctctctgcagagttttgtgtgtctctctcacacagagacacctctctttattttctcagagagcctgtgtggtgtgtgtgtctccccacagaggccccccctctgtgtgtgaagagaattttgtctctctctctgtgtgtctctcttctgtcgctaccccgcaccccccgcttcccgacacaccgcgtggggctcagagaggtctccccactactatgtcgcgcgctgtcccccctcgggcgcgccacacacagagagaggagagccacacaccctggacgctcctctgtgaggagaagaagagagagagagtttaaccacccacaaacgcatcatgcttataaaaaatattttcacgcaggagaaaatatatgtattgttaaagaggagaaaagagaattgccccacttttcgcccacgcttgttcccctcggagagagacacacactcttccccccgcgggccaagctttttgtgcggggcacatatacgtctcttaagcccgggcgacacatgtgcgccgagccaagagaggggtatattgggtatagagggcggcaaaagagttggaggtttttatttttatgggaaccacaagcgcgcccccaaagcgcgcaaataaactcccttgttttttttcttcccacggaaaaaagagggtttttttttttttttcccccca

SEQ ID NO: 541765 - DNA, 705 bp, Homo sapiens
gaaggaagcgaggcgcgacactgctggggagaggagggcagtgaggagcgaggagcgggcagaggcagctccggcggccgagaggagggagcgcggcgcagagaggaggggcttgcgccccgtagaaatgtcaatcagagcccggagccccgggaatctccgccaatctgttcggacctgacctggctcctcgccgccgccctcgccgccgccgtcgccgccgcggagcaggatcaattaggcgaacgcggacgcacagacgcagatgcgggcggatgcgcggcccaatgcgccgggccatgccccccgatgacgcgccggagcccgccgggcgaggctgtagctggtgcgtgccggggggtctgggcccccttctccgttccgtgccctcgtggtgcaccagtgttcgttcccccagtctgggataccaactacatgctgccgcttttagccgtgcagagacgcccgggggccgctggccggcgagcggcggcatgccgtcgggtgggccctggggcgagcgtgggtgccggagcctcggagctgaacgcctcgggggtccctgtccaacgtgctctccgtccgtgtacggggcgacctacagccggggcgtgcggcggcggcgacaaggtacgggcccttctgccctacgccgggagtgggctatcttccgcagtggggcgcagatgagctgaaggcacgccg

SEQ ID NO: 541766 - DNA, 1291 bp, Homo sapiens
cgagcgaacagttacaaacaatccccgcacgcaggacctcaccgccaagcttcggaaagctgtggcagaagggcagcaggcaggacaccattttctgaccttcatctggagcaacccccggtcatctgcatcaggctcaggcagacaacccctactcatcgtagcaggcaagggtgcaggtacaacgtgcatgccatgttgctgcccaacagcagccacccagggcttcccatcgtgcccaggctgcactctgggacgtccatggcagcaacccatggaacttcatgcaggactgcatgttacccgtgcatgcacgcaccgacggcccatgctggcagcaagcggtatccaggttacgatggatggcaccatgttaccatcaaacacacacgccggacgaacgactgggactcatgaccacacccgatttgtcattttgatgcttgatcaaggctcttggcacacatgccagcatgttaaggtcgaacggtagcatatttcggtcgacgaccgcatttgtggcatctgttcaccagcacacactccaaagggccaatcacacatcatggcagtcaacacactgaccgtgcacaggcattcgtcacaattagaggtcgcacccaggcaaagcccacacgaacatcagaaaatcctagcgtgggacacttgcacagcgcagacgcgcatctcagccagcaggtcagtcgcaaccatggggccccaacttcacttcacggtaggcccccccttcgcttggcaccacgccgagcagcaggacgcaaccttaacagtccatccccagaataacaatccagccgcgaacagcatgggagaagtcaaccacaaagaacacccacgaccacgggcatgaaaacgcccattactcaaaggataaaagaaccggcaaactagagaagaggcaatagacacccgaaaaagaacgacccggggtaaacgtggaacccagtgacagaaggcccgagtgcgaacacggggcacccccctggaacgataccatggccaccacagggaaaagaaagaacattctacccagccacacgacaatctgtggcacaacaactgatcccaaccatcgcatgatgcacaaaacacatggacctgtcagtaacaacccaacgttacacagggaacaaccagaaacaccgggaacaagagcaccgggactatacaacagaaagctgggcgacggggcacgcctagacacacagacaacaggcgtgaatatccccacagtaggatgagcacactctggcgccaacaacgccgtgac

SEQ ID NO: 541767 - DNA, 591 bp, Homo sapiens
tgcctcagctcccaaagtggtggatacgggtgtcgccactgcgctggccaaaatgaacattcttttagaaaaagaaaggcaaaggtagtagttttcattatgtgtggtattaaaatattctcacttaggaaaataaaatttaatgaccctattctccccctaagttatcaatatggtttcaaaatatggttaggtttctagactctgtaagaaattgacagtatagtggaaggtgcttctctcctgtcctcagcattggtgactctcagtgagctagctactgctcttattgaggttgtctttctctactcctctgtaacatcgtataaattggtgtgttgcaggagccttgtggctatgatgtaagtttcgtctctgcgcagttaatgggtccattatggaactgaatatacaattttggtgtctctggcacatctgtctgacaaaaaactaattgtcctggattgaacctattattagaccatcttgtgtcactcgaaaattaatgtaccaggggtcaattcaacatctcaaaatacaataacctctaaaataggcaagtcatgggatgatcataaataacaggctaga

SEQ ID NO: 541768 - DNA, 295 bp, Homo sapiens
agggttttttcggggacaaaaatcactgtcacccagcctggagtgccgtagtacgatcacggctaactgcagcctgacctccttgtgatcaggggctcctcccatttaagactcctgagtagctaggtgtgtaccaccatgcctggttaattttggtagttttttgaagagatggggttttgctatgttgcccaggctggtctaaaactcctggactcaggcgatctgcatgcctcggcctcccaaagggctgggattacaggcgtaagccaccgggcccagtccatattttttt

SEQ ID NO: 541769 - DNA, 712 bp, Homo sapiens
  misc_feature (111)..(111): n is a, c, g, or t
  misc_feature (200)..(200): n is a, c, g, or t
  misc_feature (219)..(219): n is a, c, g, or t
aaaggtagtagtcagcggatccttacaccccctttttaccaaacacatccctctctagcaacacacactcttacgacccaccaaaacatcacaatgacatattttctatcnaatctcccacaccctaaaccgtaaacaaaggtcacccacagaaccacttagtacacccaatccttctttacgcggaggagtgtgggggnacccaacaacgcgcccacncacccaaagtaaaaataccaccccacgggataatacgaccctggcccgggcaccaccgattatcatccacaacaaccaaggatccgagagagccctctatcgggagcccacaaagagcagtaactcgaactagattgacctagtcacagccaacaggtggtcaaagagcaaccacccccccggaataaaaagcgcaggagtatggggagacctcaggagcactatacccaactgcgggaggggtgagggactaagcctgacatgaatggataagcggcagcctacgaacgcatcgacgccgacacaggcgcccaatgggaacaagggaccgcctagggatacaaggtcgacgccgattgtaggaccctagccacagaaaagctgacccagaccttagaatgctaaccacggcaataccacatgtgccgtcccctacggaggggagttctggcatcaccgggatctgcgtctacggccgcgtagtagcaccatt

SEQ ID NO: 541770 - DNA, 447 bp, Homo sapiens
  misc_feature (100)..(100): n is a, c, g, or t
  misc_feature (174)..(174): n is a, c, g, or t
  misc_feature (221)..(221): n is a, c, g, or t
  misc_feature (379)..(379): n is a, c, g, or t
  misc_feature (381)..(382): n is a, c, g, or t
  misc_feature (409)..(409): n is a, c, g, or t
gcctaccgactgacactgacccgattgccctgcgtgaactcaacgagtctgatgaggggaagcctgcctccccgctgctggtcaacgcggttgcctcaanacggatggctccttccgctgcatctgccgcccgggattcgaacccacgcaccagcacaccaccttgcgcccgcnacgccacggcctgagccctggaacccgtggccgcccacccgcgccgncactcggggcccctgccgcgatcctgcagccgcttatgcgtatgtgcacgggccgcccgcctggacctggagaagggactacggacgcctggaagctgcgacgccctgcactgtcccgcctccaccagcgcctcccactgatgtcgtggtcccgggcncnncaggggcccctttacatgccctctccnttttataaaattttccattaaaaaccacctattttcta

SEQ ID NO: 541771 - DNA, 1184 bp, Homo sapiens
aaggataagataataagagaacagttgtagaaaatcacagtgaacaagaccctgtccgtaccttgtttcctaacgttcatcgagtctcctggatgttgagtcctaatgaccaatgaagagagagatggtgctcatatattgacctggtactcccagaggaagggcaagtggtgctagtgaatcaaaacactcttacacggaccagcacgtaacttccgtgtctctgtgattggcggttaggtggcatgctcgaaaatagctcaaagcctacggtagcatcctgcgatgggatgtgaaaactaaaagtactgcactactcttgaatctcatggcagtactgctgtgctcatcatgagttatggattttcgcggtgctgcaatggccactgcgagggctagaacgaggaggccccaagcgcgaatgtgcaatatacacgttgagcacttgtggtggggatcttggataccaagactagaattcgcaaggaggcctggggtgagaagggtccgaattggttcctttgccccagaatggacagtacttccaatatggactgaaacggttgttggatgaaaacatctgggtgtgaattcgcacaaccttacccagaaacaaaggagtgttgccaatgaatttcggtcattgggtgcctccgcgcaggagggaactgagggggacaaggaagcccctttctccgttggggacccccttgagagtcgcattgggtagcctccggtctatcgtacggaccctttagaagtgtgaccgaaccccttttcgccttacaggacggcttggggacgtttgggcgtccctccctaggcctttgggttgtccacggagtcggtcccgcgtacagggggatggacattgcgcattgtgcaccaaaggttgcttaacagatttaccccggggcgaactttgggccccttttaatgggccaccttgggagcgtcccaaaaaggtggcaaccgataagacaagtcggccccacgagtctttaaacttcgactcactattccaattgtcggcactgcaagccttcgcgaaattgcgcccattccgggcatcacagcccccaacagccgcccatttcggcaccgagggtggaaggtacaagggcctctgggggagaacacccggaaagaagaagcggaatgggctctctgattccaacgtacat

SEQ ID NO: 541772 - DNA, 161 bp, Homo sapiens
aggtgactctagaggttcccccttatttccggtgtccttaaaaaataaagggcagaccgtgcaatacaaccccagatcagggctggcttagctaatatggggccaacggcggtggaagaaaaatggtcaaacaccccaaagtggtgtaaatttctggtaaa

SEQ ID NO: 541773 - DNA, 935 bp, Homo sapiens
gggaaaaccgtgtactattagccaatggtcaatcccatccgtgttcttctgacacttgccgtcgacggctgagtcgccgttgggtccgatgctctcctttgagctgttctgcaagcaaggtcccaacagacagtcaataaaaatcctcgtgctctgagcactggcaggagaaaggattcggttataagggttcctgcttatcagcagcaattattctcagggctttatgtgtcagggctggtgacttcacacgccataactggcactggatgcgcgaagtccatctatgagggagaaatctgaagatgagaacttcatcctaaagcgtactcggtccaggacatcttgtccatggcaaatggctggacccaagcacaaatggtccctaagtcttattccatctagcgactgggaagagaattgaaagtcggtatggaatgggatagagcagtggtggctgtgtgtggcaagagaggtgataggaagaaagggcagtgaatactcgtggacggccaatggaagcgcgatttgggtcccaggaaatggaaggagcaaggccaaggaagagtcaccaaatgtggcttggacctgggtggtaactaaacggttctgtacatttaagaggtttcgcagccttctgggtggtaagggcattcctctaaaggcgcaaacccaaggaattctacttttcgccgtaattcctcgtttaagggcttccagaggaacgaaagacagagacccgagttacacaatgaccacaactctcttggtcattccggcaaggataatacgccattacgaagaagttcgtctcatcggtaggtacagtccatacggtccgttgcacaggtgtatcccaccttatttgggaggttaaccccagtaggattatataccccctattggtttacacccgtcccccgagtggcccctaa

SEQ ID NO: 541774 - DNA, 250 bp, Homo sapiens
gatatagatgtgagccgagcatggtatatgcccgagggcatagtaggaggagttcgccaccgggggcactgaccgcaaggacgtacttatttctaccaggcagacgatgagcactacatacccccggagccgtgctagctggactatggaaccccggagtgatccactaccatacctcaactaccccgctatagccaaagctctaacaacctcagatgaacatcatacctagtcaggaacataggagtga

SEQ ID NO: 541775 - DNA, 678 bp, Homo sapiens
gaggatttctcatctggtcaataaagctgtttagaccagaaaaaaaaaaaaaaaaaaaaaaaaaaaaaaaaaaaaaaaaaaaaaaaaaaaaaaaaaaaaaaaaaaaaaaaaaaaaaaaaaaaaaaaaaaaaaaaaataaaaaaaaaaaaaaaaaaaaaaaaaaaaaaattgtgggccccttggccaaaaaaattttaaaattggaaaagttttataaagggggccaaaattggggacaattggaaaaatgccccaaaagggggggggataaaaaataaaggggccgggttttaaaaaagtggaaaggggaaaaacctgggggtacccaaataaaagcctttggaaaaaaatccctttttgccaagtggggaaaaacggaaaaggccccgaacgatgggcttttcaaaaaagtggcaaacctaaaagggaaaaggaaaatggaagggtaaaaattttggaaaaaatgcgggaaaaattttggaaaaaaaacttattttttaaacaaatgggcaaaaatgggaaaaaccctttaaaaataaaaaaaataccccgaaaagggtttaagggttttccaatttggaaaaaagagccctttttaaaaaacgggggtctccacgtaaaagggggaaaaaccgttttttagggcgagggccccattagggcctcccctttttttgg

SEQ ID NO: 541776 - DNA, 898 bp, Homo sapiens
tgagaggctcgtgcagcgcaaggctgcgctgccgcggcctgagcgcaacctgcgcaacgagcgcctgggagcgtgtgagtggatgcaggccccgcccctcctgagtgaaaggccccgcccctgcagtgaaggagtcgtggcctcgccggtgtctggaagggacgtggttgtggcatgcagcctgccccctggagtgaatgtgtgacctaggtgtctagcccctgactgcgtgcgatgtgcgcctgctgccaggggtctcagtgatgctttttacccaacaaggtgccaatgcagggcgctgggtgtcccagtggagctgaaggaagtgcttgcccaaggccggacacggtgtaggcatcagcggagataaggaggttggggattggggccgggtccgacacctttgcggttcattgcctcccagctcaccagacctgcacttgccggactgacaccaaggtcgtgacctgaacttgtaacgttggttgcatcagccccccgttccctggaggggcccgacaatagtaggtcgggggccccactggaggaccaccttgccacggatgtggacctgtagtagggtcggtaagggaggccttggcattgctgtagacctgcgtagtcaacaggttgtacaccgccaacaacaagaacaccctacatacacatgggaataacctagtccgtttacatgcagttagtctcgtaggtggcgtggggggatcgtggtgcacggcgtgcatggcgccaattgggtcccccgtatgagtccgtaataaccatgacaccttacaagtatacgcatcgttccataagagaggtgcccagaaagaacgccctaagggacgaaatgggaagtgagcggggatgaccaaggggaacgaggtccatgggctca

SEQ ID NO: 541777 - DNA, 866 bp, Homo sapiens
  misc_feature (866)..(866): n is a, c, g, or t
attagaagtatgggacagttggaggctggctatgaattttcctgcatacttatcccagtgcagcagtaatggccacaacaacagctaatatatgtccagtgcgtatgtgcacccgggacaactcactttcaagcctccagcctcacctacgtctcatgaaagagaaaccagacagaggttaagcaagaagtgaaggccatgttaatgaaatactaagctggggtttgaacctaggccttctgactctggtatcaatgctagttttgcaacagcaggtactgctttgcccctgaatcgtgcgggatacaatgaaagcaaagagtagcacatttcctggaagaaggaagggtggaggagaccaaactgcttcttggcctgagtcaggtatcagctctaatagttctcatattctctaagatacagatgtccttgtagagcagacaaaaatgtgagtgagctttcaaagacatttgaccacatacgtgatcctaaagcttgctgccatttgaaattctatgcttcagtgtcctctcagcacacttggtgggcactactgtaactggtgccccagcactgttccagccatccactccatgacagaatgtgggtggaaatggagcctccaaagccttggatgttggactagtctgtactggcctcccaagccccaggactgatgtgtggaactgggagaaagcccaggccctggcaaaaggtaagtttgaagggtttcctgaacaggggtgttcggctcctaagaaatggtgttcccaagcaaagttggttccttaaaaagggtttcagctttcaaaaggatggggggcttttggaacgacccccgggagaggccacgttaatcgggggcn

SEQ ID NO: 541778 - DNA, 749 bp, Homo sapiens
actccagcctgggctggacagtgagactttgacagtgagactgtcaaaaaaaaaaaaaaaattaatagataaaacaggccactagaagggtgcagttataaagaaatggatgaggtttttacctttttaaaatatgggttagaagttcaaaaaccatcccttaaagggtgattggtttttttggagacaggggtctcggctctggtcacccagagtgggagtgcagtggtcctggtaatctcagctcactggcagcctctgcctcccgggttcaagcgattctcctgcctcagcctctttagctggggactacaggcgcacgccaccacgcccggctaatttggtatttagtagagatgggtttcaccatgttgggcaaggctgggtctaggaactccttgacctcgggtgatacacccatctcggcctcccaaagtggctggggataacagggcttgagccaccacgcccagcttaaattgtgattctggatactggttaaacgtatcaggtggcaattaacttgtggcaaagtcagtcgaaataagccctggggatatggccttatgtacactgtaatggcagacaggtggctttcatcattcatgtaacattctcacacagtgaggatatcatctcctcaccaattccagatggtaaatgtccatcttaaacaatctgaggtcccaaacagagtattggactgtcaataggtgtccttgctgcaggatgcgatgtacctgagcaaa

SEQ ID NO: 541779 - DNA, 743 bp, Homo sapiens
cggcgaaggaggtggtggctgcgttgggctccgggaagccgttcgggctggggctgtcgggcgcggggtggaggcactacgcgcgggggatggcccactgcgtgaccttggttcagcatgtcacatattcctgttagaccaatctcattgacaacggacatcggctccaagtctgacccagtctgcgtccttttacaggatgtgggagggggcagctgtgctgagcttgggcggactgaacgggtgcggaacgtgcttcaaggccccttgagtttcctcgcaaggaactctacagcttgagtaccgctttgagacagtccagaagctacgctttggaatctatgacatagacaacaagacgccagagctgaggggattggattgactttccctagggggggtgcttgaggtgttccctaggacaggatgtgtccagccaggtactgactctccccttgatgctgaagcctggaaaacctgctgggcgggtgaccatcgagggtcttcaggctcaaggcacatttaacaggacaaatcagtgtagtaaccatggaggtagaggccagagaaccctcagaataccggaaccgcgacctatgccctggggggacaacacatcccgaatccgaattgactgggagctaccttccggccagggatgatgggacaatggcacctgggtgttacagatcttgagggtcgatccacgtacgcagaaccttgaaggcgctaacactgggacc

SEQ ID NO: 541780 - DNA, 265 bp, Homo sapiens
caaaaaaaaaaaaaaccggggcccggggggccccgggggggtttttttttgaacttatcctaaaccgccctggccccccccccccgggcttggccttttaatcctgggttttaaactaaacgggatttccccctgggggttggtccccccctgaaaaaacccaaggttttaggttttagggccctttatcccgggggaagggttggggaaccccccccggggggtttttttttttaacccaaaaaaaggtttattttttccttta

SEQ ID NO: 541781 - DNA, 106 bp, Homo sapiens
tcgaacgggattctaatatagatatagttcaatttctcgtgtaatatcgaaagtatttgactgctatatcctgtctaattagggtaacagacactagatttaccgt

SEQ ID NO: 541782 - DNA, 287 bp, Homo sapiens
  misc_feature (59)..(59): n is a, c, g, or t
  misc_feature (67)..(67): n is a, c, g, or t
  misc_feature (251)..(251): n is a, c, g, or t
gacagtgtctctcacccagtctggaatgcaacagcgtggtctcggctcactgcaacttnccccctcncaggttcaaaggattctcgtgcctcaggcctcctgagtagctgggactacaggcatgtgacactatgcctggctaattttttttgttacttttaagtagagacggggttttgccatgttggcccaggcaggcggatcacttgaggccagaatttgagaccagcctggccaacatggcgaaaccnctgtatcactcttttagacccttctgtcgtcttctc

SEQ ID NO: 541783 - DNA, 549 bp, Homo sapiens
  misc_feature (151)..(151): n is a, c, g, or t
ttaagccctgagataaaggatgtcattgagcagctcaacttggtccccacctggtggcaggtgcagaacctcggaattgaggagggtaacaattttggagtggctgtccagaaaaaggtgtttgagttgatgaccagcctccacaccaagntagaggggttccacactcaaatttttaagtatttttttgaggggggtgatgcagtgattaaagcagccaagcagccccatgtgggtgattatcggcagttggtgcccaagttggataaggcaaagtcccgggaaatccggttaatggtcatggagatccccaaggcttatgttgtgttatatgacatcatcctgaagaattttgagaagctcaaaaagcccaggggagaaacaaagggaatgttttattgagagccctttttcccattttgtgatgaggacagcaaaacccttccggttttttatgggggactccaaattttccccaaactggtttttgttgagatttttccccccccttgcctttcgggcccaataaaaatagttaaccccctgcca

SEQ ID NO: 541784 - DNA, 330 bp, Homo sapiens
ggggcccaaaaggggggggtttttttttccccccccccccggttttaaaaaaattgggggggggggggttaccccccgcttttaaaaaaacccccccctgccccccggggggggggggggaaccccccccaaaaaaccgcttttccttttttgttgtggggggggggaaccccccaatggggggggccggggggggggggaggggggttttttttttttttttttttgtgagacccccccccccccccccccccccgggggggggggggttttttaaaattgaggcgggggttttttttgggggaaaaaaaaatgggggtgggtttttta

SEQ ID NO: 541785 - DNA, 635 bp, Homo sapiens
  misc_feature (252)..(252): n is a, c, g, or t
  misc_feature (272)..(272): n is a, c, g, or t
  misc_feature (292)..(292): n is a, c, g, or t
  misc_feature (338)..(338): n is a, c, g, or t
tatcgtgtggggataatgggggataattgggggggagggtatgtgaagggtgtttaaagccaatcgatttggtactatgtttgaaaatgctgctgtgcttcctcagcccgatggagggggccgaggaaagttagccgtggttctcggggaggcggtggcacggggacgtgggctcaggagaaagccccagggggacggtggacccgagaagatttccgggagtggaaccgtgagtggaaacgctccggtggntcaggaggaggctgcaggantggtggccgccgggcttgcnagaactttgcggcagttttggcctccacttctccgattgtgcgtgngccatctcttctgtgggggggccgcccccgtgtgggcggggctctgggggtgggtgtagagcaactcagggggacggtgacgtttgggccctcccgtgaacgcctcgagctcctatggcagagcactgtgacccctgggtgggcaccgcatggagtggctaggcaggccccttgcgcaggcgctaggggggactggcttccaggggtgcattttgggaagaatcttgcccacggggtatctgggggaatgttgtccggaagcacggtcggaggggtcgacagtccctctcggacttg

SEQ ID NO: 541786 - DNA, 95 bp, Homo sapiens
aaaaaaaaaatcccttttttggataaagggcctccccttttgttaaataatccctttttttgggaaaaattgttaatttaaatgggcccccttga

SEQ ID NO: 541787 - DNA, 904 bp, Homo sapiens
ggactagtctcgagtttttttgggggtgccacaggaataataaattattataatcccgatggtggggtatgcacataaaaaggggggacctcttctcaccaaagggtgctggccgttgcccaaagtggcggcaacataggagaggcgcccctgatggcccggcccgtgccaggcccgtgttctggtgcccaggtgtggtgctctgaggacacggttcctgagggccttgctcttcatccttcacagtggggacacggccctcatgcaagtggcacaggggtgccggcagacagaatccctgacgcccttgtcccccgtgggtgccccagggtgctcagaagaaatgccgtaaggattgaggcccactgttggcggggagcagacagccactttatgggccaagccttccctcaaaaaggaagcctgtgccctggatttgcaaggcttcctcgggggtgtgctccaccgttgccaaaaagaaagctaaacccaataccttgcgaccagagaatccccatggttgtgttcaaaggggttcccaagtgtccccctggggttctaaggcgaaccgagtaggggggtgcgtttaggacacacaggagaaggtttctaacaaaccctgagttgccccctcacggctgctgaaatggaccttggacggtgtaacaggccacggtggaagcagctgaggatcgcattgggccctgggaggaagtcacttggaggggcttctcttaaaagttggcaaggccccccaggaaccgtcctggggcatatcccgtttgtcacgggtgggcattcgttgggaggcccaggcaaaaataaaagaggaagtaccaaccacaggcgcttaagaaggcacacaaaagtgttgacaggagggtttcttgcccataatgatggg

SEQ ID NO: 541788 - DNA, 479 bp, Homo sapiens
atggaatggtatgaatgaatgaatcaacccgagtgcaatggaatggagaggaatggaatgaatgaatgaaactacccgaatggaatggaatgtaatggagtgtaagggaattgaatagaatcttccggaatggaatgaatgaatgaatgaatgaatgaattgaatggaattaacccgaatacaatggaatggaatgaatgaatgaatgagtggaatggaatgaatcaaccgagtgcaggggaatggaatgaatgaatgcaatgcaagggaatcatccggaatggaatggaatgaaatgaatgcaaagcaatggaatcaactcgattgcaatggaatggaatgaatgaaaggaatacattggaatcaacccgagtggaatggaatgaaaggactggaatggagtggaatggaatgaatgcaatgaatggaatcatccgtaatggaatggaaaggaatggaatgagtggaatggaatgaat

SEQ ID NO: 541789 - DNA, 1112 bp, Homo sapiens
gaacgcaagcagcctgagcagcggagaggcgccgctgtagttaactcctccctgcccgccgcgccgaccctccccaggaacccccagggagccagcatgaagcgagctcaccccgagtacagctcctcggacagcgagctggacgagaccatcgaggctggagaaggagagctgcggacgacgcaactggaaacttgacgttcggctctaggttccactgtccccaactacactcttcccagcacttttggccagaaacacacgacggagcaggaactaacttgacgaagcgccgacgagaccggactcaactaacagtttgtctgagctgagcaaggctggtacccagtgcttttgagaagcagggatctgctaacgctacgaaaaacgccgagatcctgcacgcatgaccgtggatcacctgaacaatgctgcatacggcagcgcaggcgacacggttacttctgacgcgcacgcccttgctatggactactcggagtccgggactttcgggaatgcctggcagaagttgcgcgtcatctgagcatcattgacaggactacatgcctctgacccgcttcgagttcgactggtttcgcatctcaccaactacgcttcccagcggcgaagcccgcgagcggcgcccacgcgggccctcggacacattcctgggggaccgtcttcggacatcacccgcacatcgcgcacccgctcgtgctgccccagcaacggccaccgggaacgcgggccaccacggccctcaaccacggaaccgcagcacaaggccaagctgagctcggcaccataccggaggccgccggattggcaaacgcacctacggcaagctccgaccggtgctccttgcggcacctccgcctccaacatggccgcacgccatgggactaccacagcggcactcccgtgcggcactcaccgtataccaacaacgggccctccagccacggcgctccaccgggccgaggccctataaacacaccagcgcgcaacctgtggagcccataactgcgcgcgccgaaacacagccctaaacacgccgccaagtacgcggcaggcacaaacacccagggacacggccgcacccccaacccaca

SEQ ID NO: 541790 - DNA, 1005 bp, Homo sapiens
tgggggcaaaaaaaaaaaaaccccctttttttttggggggaaaaaaaaaaagggatatattttgccctggggggcctttgtgttccccaaaaaaaaaccccccctttttgccccccaaacaaaaccccctcgtcgcctgcgcgccaacggtgcccctggcgtctcttaagaagcgtaattccaatcaaaaaaaattcttgtccccgcgaggaagaagctcttgctcccccaagtagaacacgtagcaggatttgaggagttttttttactcctcttttctcatatatatattctttctttctctctagtagatttttgacaaaaatcaactggttgtggtagtaaaaaaatctctctctttttttctccctcgagagaaagcccaaggtgagtgcgcccctcctctatgtctgggcgcgccacgaggtggagcccgcgcctagatatagtgggagtgcagacctctctcgaccccacgagcgtgcggacgagcaccgcggggcggagcgatcgagcaagagagagcaaacacagaggagagagcaatcatatttctaccaacacccgagcgggcgttgctgtggggcggacaacagcccacacacacgctcgctgacgtaaaaagtaagcagccgctgtggctttggttgagcaaccacacacctgcgatgtgagagagacaacgcgctgtgtggtgagatacagcacgagattcaaacaaccaccccattccgctggaacccccccgagagagagaaaaaaaatatccccccgaagcgtaccacacacccatcagcggaacgagggagggacgagatatatatttgtgtgtgtcaaaaacccactctcccccgcctcaaaacacgagcagagtatcgtgtgtgtgagaaacacagagacggcggggggtaggaacccaccaccatccggggcggttgtagcagaaacgaccgaaggggtggggtcccccccccccaaccaaacaatcaacctccgcccgacgtc

SEQ ID NO: 541791 - DNA, 158 bp, Homo sapiens
ctgagagtttcccacagatatattatgacagtctgctgtcaggcttatgattgcaataatagtctattaatttaaaaaccaaaatggcaaatttgtatcttatatcctataatagtatctgatatctctgcatatacatcttaggataacttcccagt

SEQ ID NO: 541792 - DNA, 149 bp, Homo sapiens
agaccttatgattggcgggcacttatgcacgcttatcatatcttaacaagctttgagtgcagagatgaagagtcaaatctgaccaagatgttgatgttggataagagaattctctgctcaccaccatctaagttgcccgcctaatcgaa

SEQ ID NO: 541793 - DNA, 222 bp, Homo sapiens
gccctcaaatttatcacgaaattggtggggacgcacattcgagccaagaggaagcctgaggagctgaccaacgtactggccggcatgaggaaagctgctgccaagaaagactgtgcccctaccctgccctctccctgaaataaagaacagcttgacagaaaaagcaaatcttgattataaggaaattgagaaacttgaagagggagcacgtcggccgactaa

SEQ ID NO: 541794 - DNA, 158 bp, Homo sapiens
gtagtagtagcttgagtccttccgtgttcagctgtggaacactcccgattctcatggcaagacaagcgctcacagcgggtgactgcggagcaggggtagttctcagggcactcgaaggccaggcagcggaagccgccctggcatgttgcaaacaggtc

SEQ ID NO: 541795 - DNA, 712 bp, Homo sapiens
tttttttaaagccagcttttcttcagatttttttggtgggcaggtcgtgaaagacaggtgaggaagtagatcttgggctcagcatgcctctaaaagtataatttcttttttttaatgtggaaagaaatgcataactctgtttctgttcctgtccccctctctgcctctgtggtgcctgagatactggggatcccacagctggggccactcagaggctaccaggaacgcttccagtttgcatctggctgttagtgccagggccagaaacccacagacctcttcacagacctcctgaccgtgatgtccctgaagcctggaagttgttccacacaatgaagcagaattgagtgatggggtgttttgtggaacccagtgaactgtgtaacacagtgaactgtgtaatttgagtgaagtcaaattccttgacttcatttggcccatttcttccttactaccaaaaagaaagatgttagatgggatttaatactttgcttaacagtacagaaaaacaaaactttggattaatcccagaagagaaatgctgaccctgttgccttctgaattgtaggaggggagctggcactgtctgcattctcagtgctagtatttctgtggctgcacaggttacaaagactctttgagggccttttcctcagggtcttttccatggtcatggattaccgtcgggcaatccttgtttgggactttgctt

SEQ ID NO: 541796 - DNA, 334 bp, Homo sapiens
ggcgtgcataagtgagatatataaacagacagagaaattacactaggggaaagaacatcactataagctgatcgtcactgtcctatgacgttgggaagaaaagagccacagaagatgtgatggtgaagatcagcattaagcccacctgcacccctggtgctggcaaggcatggaacaggcaggtattgatgtatgacgcgcgggcaccggacgcgtttggctcgtcgtttccaagatatccacgctggacgacactgtggcgatgccacgtcgcgcgtcacgtactaggccacatgtgtgagctatgaatacctagctcactatgagggacaat

SEQ ID NO: 541797 - DNA, 115 bp, Homo sapiens
cgtgtgcaaacatgtgtacataccaacaacagaattcaaacacatagatcacagaaatgaaatgagaaataaacaaatccacaattgtaagtttggagacttcaacactcttctc

SEQ ID NO: 541798 - DNA, 814 bp, Homo sapiens
  misc_feature (58)..(58): n is a, c, g, or t
  misc_feature (105)..(105): n is a, c, g, or t
  misc_feature (193)..(193): n is a, c, g, or t
  misc_feature (211)..(211): n is a, c, g, or t
  misc_feature (229)..(229): n is a, c, g, or t
  misc_feature (255)..(255): n is a, c, g, or t
  misc_feature (338)..(338): n is a, c, g, or t
  misc_feature (344)..(344): n is a, c, g, or t
  misc_feature (366)..(366): n is a, c, g, or t
  misc_feature (424)..(425): n is a, c, g, or t
  misc_feature (467)..(467): n is a, c, g, or t
  misc_feature (476)..(476): n is a, c, g, or t
  misc_feature (496)..(496): n is a, c, g, or t
  misc_feature (522)..(522): n is a, c, g, or t
aagtgctgtactgcccggattacgggatggcggttccgttaggtctgagggagcgatngcggtacgcgcgttgaagctgctgaccacactgctggctgtcgtggncgctgcctcccaagccgaggtcgagtccgaggcaggatggggcatggtgacgcctgatctgctcttcgccgaggggaccgagcctacncgcgcggggactggcccnggggtggtcctgagcatngaacgggcgctgcgctcccgggcagncctccgcgcccttcgcctgctgctgccgcacccagtgtgccgccgacttcccgtgggagctggaccccgactggtcccccagnccgtgnccatggcctcgggcgccgccgncctgcgcgactgagcttcttcgggggccttctgcgtcgcgctgcctgcctgcgccgtnncctcgggccgccggccgcccactcgctcagcgaagagatggngctggagtnccgaagcggagcccctacantacctgcaggtcgctacttcagatcnacaagttggacgaaagctgttgctgcagcacacaccttcttcgtgggcaatcctgagcacatggaaatggcagcagaaccctagactattaccaaaaccatgtcttggagttgaaggaggccgacttcaagggatctttaaggactcaacccccattattgcaaagaatttcggacttggggaattgcgactctacctcagaggacacagccaacaggaaagctgttgccccaaccttagaaggcgtgcgcttgcaagaatactttgtgggctatgaggaattgcgtgccct

SEQ ID NO: 541799 - DNA, 435 bp, Homo sapiens
tccactagtgtaggcataggataaacaccccatgtccagtggtgccaaggtctgaaccgcgtggaagcgcgagatcaccccaggaatcaccccgcccggcgactggaatgtcctgacccgggttagctacggcctgatgccgacctacaactcggaagagaacaacgaaattggcgtagaccgtatggctcagggtacagcccagaccacggttgacgtcggcggccacgttgaaacaaagctccgctacggcgcgctggatgaattcatggcctcttgctttggcaaggattgggtcggcaacgttctgaccatgggcaatgaccggatttcgttctcgattggctcatacgccaacgacgttggcattgcggcgattgctcgaggcgctcaagtggctacgatgaacttcgagatcccgagcgacaacgagat

SEQ ID NO: 541800 - DNA, 712 bp, Homo sapiens
ggggcttcattgtaattactgtgcctgtcgtcgtacaattacatcattgagctgtaatgtaggataaacaatattgtgaagaatatagttggagtcaagttctgtcctgatgtagtcacctttcttctgtcagatacctccatggcccacatctagtcatccattacccaggatgactgattccaagcttgtggaggttgtttggtgggaggaaatgtgtctgtgtgtgaggggggtgttttcttacattaaaatactaagttttataaacataattttattggcccttctcagtgcctagcaaggaaggtaggttaggtatatgctcctttttacgttgaggaaactgagactcaatgttttagtgtgtagtactccttctattctgtttgtaaagtaagtaatgagatgggcagcctttgctgaccaggctggaagtgcagtggtacaatctacggctcactgcaacctccacctcccggggtcaagcagttctcctgcctcagcctctaagtagctgggattacaggggcctgctacaacccagctaatttgtattcaattctaattttattattcatgatatttttgacatggactcttgctctgtgccaggctgagtgcaggagcctctggtcaatgaactaactccggtcagtgatctctgctcactccgatataggacaaggctgccatcccaatcggtttacaa

SEQ ID NO: 541801 - DNA, 100 bp, Homo sapiens
  misc_feature (51)..(51): n is a, c, g, or t
  misc_feature (78)..(78): n is a, c, g, or t
gacaatatgaatgcatgtgacttttgaacatatttgcagcaataaaaaggnactaggcaaatcaaaactgcattttgncatttaaaagttggattatatt

SEQ ID NO: 541802 - DNA, 923 bp, Homo sapiens
gctgccggtctgatgtgcagagctgctgtcatggcgtgccgctctgtgctggcttctttcccgtcctgtctgctgctgctgtatctgggggatgtccacgagccgtcgcgaggtgcccggtgctgctgtctgagtggatcttgggagggtagtgggtgtctgggataggagtatctgcttctagaggattgaggggcgtgcagttgttcgaggggtgaagcctcaggaatggatctcggcggccggagtgctggtagacggagaagagcacgttggtttccttaagtagagatgggtagttgtgtggttcagtgatataccttcgtgtggatcttatgtaggtggaagtagtatctccagcttcaacggatttgatcccggtggagtggatatcacttcgaaaggataaatgagagcaagatatgtgaattagagtcgatcacatctagaggttgtcagactgatcctatcctctaccaaatgagtatcttcatgtccaacttcttactttagtaaaagggaatcgtgtgggtgtagagaacttctaatgaaccgaatgtttatgctgatggttcttccttcagggatattggtgcgtctggctaaagtggtcaaagaagtggtcctgtaactgagacggaagatggggctgtcgtgaatatgtgtgttctaacatgaagtgctgaagttgctgagttcatgacaggatctgcgctcaaatctctggaattagggggaggtaaaggaagggggctgggagaggttcggcgccaagtgggttggcaaggggcgggggtcacgtggacgcgtggagttaaggacccaggaatcctcaggtgataagttgttggggaaaacatttggtgcgaatcaaatgcaaaattataaaaaaagggacacgggtgatgtaataaatagctctg

SEQ ID NO: 541803 - DNA, 443 bp, Homo sapiens
attcttgtcatacatttccatacttgcattatataaatagtacggggatctctgatatcagatgtgcaggtatgtaacgctatggtatagatgtggccgatgttagaatggcttgactcgatcaacctgtcacctacattaggtatttctctaaatgctgggtcaaatggtatttctggttctagatccttgaggaattgccacactgtcttccacaatggttgaactaatttaccctcccgccaacagtgtacaagtgtttctgtttctccacatcctctctagcatttgttgttacctggctattttaatgatcaccattctaactggcatgagatggtatctcattgtggtttagatttccataatgaccagtgatgatggagctttacatcatatgtgagttggctacataaaacgtgttccttttgagaagtgtctgt

SEQ ID NO: 541804 - DNA, 599 bp, Homo sapiens
aggtacagaaggaatatacctcaacatagtaaaggatatatatgacaaactatgccaaattatactacaggaggaaaagttggaagctttcctgtaagattgaaggagacaaggatacccattttattcaccttttaagagtctcgcactgttacccaggctgagtgcagtggtgcaatctcgatcgctgagctccgttctgtgggttcaggcgattctcgtgcctcaggccccaagtagctgggactacaggtgtgcacaccacgctggctagttctgtgttcctggtgagacggggtttcaccatgttacccaggctgctctcgaacttctgagctcaagtaatcttcctaccttggcctttctgtctaagcgacagagcgagacttgtgtctcaaaaaaaaaagagaaacccaacaagttaattcctgtggaggatgcagacacttgggaaacttcttatccctttgaatggtgggcaaagcctaactaggtacaggcattacggacaaccagcgtggaaggtggctcacacaattttcaacaatagaatatcatacctgggcataccgttccagcagtcttgcactgagtttccc

SEQ ID NO: 541805 - DNA, 170 bp, Homo sapiens
agatatttagaaaccataaaatccacctatttgaggtgtacacttgagtgattttctgtatagtcacagatctgtggagtcatccacaccctctaactccaggatatttacctcacccccgagaagaaacctcccttaaccattagcagtcactcctcatttgctctccc

SEQ ID NO: 541806 - DNA, 267 bp, Homo sapiens
  misc_feature (9)..(9): n is a, c, g, or t
  misc_feature (11)..(11): n is a, c, g, or t
  misc_feature (13)..(13): n is a, c, g, or t
  misc_feature (129)..(129): n is a, c, g, or t
  misc_feature (168)..(168): n is a, c, g, or t
  misc_feature (171)..(171): n is a, c, g, or t
acggaaggngnanggggaggagcgtgcacccctcctggccttggtgcgcgccgcccgctaaggtactttggaagggacgcgcgggccagacgccgcaggacggccgcgatgggctggttggccggcggntctccagagggctgggctcccacccggccgccgcaggancgncggtcgtcttcgtgtggcttctgcttagcacctggtcaacagctcctgccagggccatccaggtgaccgtgtccaacccctaccacgtggtgatcc

SEQ ID NO: 541807 - DNA, 250 bp, Homo sapiens
gtagtaatgaccgcacggaagtggattctgggtcccccgtactcatggctcaaagtaccactcctcagtcgctatattaaagcttatatttagctggattactgctaaaaaaaaaagaacacggagcactatgagtgtgagtatactggaaggcatgtcataccagtttccggggcagcatgctaaacagttagaattcctacacggggtgctaatcaagtcattaaagtagttcacgttttaggcccct

SEQ ID NO: 541808 - DNA, 960 bp, Homo sapiens
gtgcagtgactcggataccttccctagtggccataaagctccagacgaatctcagtgcaggacgccatcctcgcaatattcaagagtcacccttctaaggaggacccctagactgctcgctagtggaacacgacagaggcgaaatcctgccccgtctcccgtggacctggctggatatggtttttgccaatccacagagccatcctgccctgacagctagcaagaggccaagacccacagaacaaccactacagcccctctgtcagcaggaagcagttaaagaagactgaccttcgtccattttcccagataattgggtcttggactcttgagggggggaaatgttggagcaggtagctagtcagacatgagcagggcaggggagggccccctcaccaggaatgtcaggcaaccatcaggtgatggtgaggcagttgttaagctgtgtctctaacataataatgagtggcagctggcgccagggaacgatggcctcccaatagataggaaacacctgaagctggtgatcagccacttcctgataagatctcaggagttgggtgcgcaggctcaagcatgcaccctaagaggcaaaatagtggcatttaactcatatatgaccttcctttaggaaggcttgactggtaagggaaaaactcctccagtgaacacgtgcacaacttcagtaaaaacactgcacatgcgtcccctcccaagtgctggcaggccactgtgcatgcagacagcccgccccaaagaaaaatcagaggaggagaaatggaaaccccggaacaatgccaatgtataaaacccaagtcaagggcctaccaaggcaattggatctctcaagtcacccgcttggctctcttcaagtgcactttgcttccttttgttcttgctctaaaactttttactcctgctataaaacttgccttggactatcatgctacttacgcctcc

SEQ ID NO: 541809 - DNA, 251 bp, Homo sapiens
  misc_feature (117)..(117): n is a, c, g, or t
  misc_feature (185)..(185): n is a, c, g, or t
  misc_feature (237)..(237): n is a, c, g, or t
gagctgctagatatcttctgaactcttctacttcttctctccccttccgttccgtcttcaacacactcgcgagactaagtatacttgtttgcctctcctgccgctcggtttctagtntcagcattcaacagtttggaggtacagagagaaaatgcagaagtatctttacttatccccctccaggnattgtatcttgaggtagaatatgttccttcctctcttctagtagtctagtanatcgactgtctctt

SEQ ID NO: 541810 - DNA, 111 bp, Homo sapiens
ttattcgttactggctatacttcgtataccatggagaaaataagtgtataatcccaagtgtctgaaacaaacaaatttattatcatagtctttgctggtggtgaaaggtgc

SEQ ID NO: 541811 - DNA, 269 bp, Homo sapiens
  misc_feature (43)..(43): n is a, c, g, or t
ggggtttttttttttggggggggggaaatttttttttttcctnaccttacaccatgtacaaaaattaacttgaaagggatcaaagacctaaatgtaggagctaacactaaaaaactcttagaagaaattttagatgtaaatctttatgaccttggatttggcaatggtttcctagaagtgacaccaaaagcaaaagcaaccaaggacaaaaatagataagctggatttcatcaaaatggaaaactcttgtgcttcaacaggcactgtga

SEQ ID NO: 541812 - DNA, 249 bp, Homo sapiens
tgctgcttcctctctcgcccaaagacatgtgagcaactgctaatgaaaagcagctaaacagccgcttaggctatagcagtttcaactccactctgagtgtgaagattccaattacattcgacgaccttaagttctttcaattttctcctaacacaagttcctgagtccagtatttaccatattacagcacctagcagatcacgctgtctaccacacctcactctttcttctgcctgctatcactccttc

SEQ ID NO: 541813 - DNA, 246 bp, Homo sapiens
  misc_feature (230)..(230): n is a, c, g, or t
tcggtgtggcgttcagaggatcccctctggatgcataggtcaggatacaaaatcagtgcaaaaatcacaagcattcctatacaccaataacagacaaacagccaaatcatgagtgaactcccattcacaatggcttcaaagcagaataaaatacctcaggaatccacacttacaaggagatgtgacaggacctcgttcaaggcagaactacaaaccactgcatcaacganaataaaacgaggacac

SEQ ID NO: 541814 - DNA, 298 bp, Homo sapiens
gctcgactcaactcaaaatggcctgtaaaaacctgaagtgagccagacgtcatggctcatgcctgtaatcccagcactttggttggccaaggcgggccaccgtgacttcaggagttcaagaccggcctggccaatgtagtgaaaccccatctgtacagaaatacgataaaattagccaggcatggtggtgcacgctgtagtcccaactactcaagaagctgaggggggaagatcgctagagcccaggggcgagaggctgcagtgaactgagattgtgccactgcactccagcctgggc

SEQ ID NO: 541815 - DNA, 288 bp, Homo sapiens
  misc_feature (237)..(237): n is a, c, g, or t
gctgatctagaggatcccttaaaagtgcactcttctatatctacttttttttaaaaaaagactcaccttgttttgagtctagtttttggcagttatagagtaaggctgctaaaaacgtctgtgggaggacttttgtgtaggacatacagttttccagttcatattggggtcaatatattgtaggatatgagacttacttgaattacagtaggaccagtgctatatatttctatcagnacctaccgcaggactggtctttccgaaattgggctgtaagattataggaaa

SEQ ID NO: 541816 - DNA, 102 bp, Homo sapiens
ccccagattgcctggagtgaaggtccctgagcagacatcattacaatcctgtctgttctgcacaggtcaatgaaccattgagccagtgcttatgttactggt

SEQ ID NO: 541817 - DNA, 868 bp, Homo sapiens
ttcccgggcgcctggttccttggcgcctttgtgggcccctatgagagcgtgggtccgcagaccgaggtggttgcgtcggccgcggatttccgcggggtgttttgttcaccaccagcgggcgcgtggtagtcgaccagcagggggttttttttcgaccggcgcgccggcccgcaacagtggggggttaagagaggtttgagccccgcgtgttgtttttccccggggggccccccacccattggggggattattgtttgttttcgccccgctgtctccggagcattgtgtggtcagacgaacccctctttgtggtgcgcacaccaccctcgggggccctctttggtagagcgcccccaacgatggttgtcgcctcctcactgctgggggggaaccccgcttccaataattttcagcgggggcgtggttcttccccaaggggggccacccactctttcctccttattgtggctggttgttttttgataggcgccggaccacccacgcgggggggtgtgtagatcgccccgcgccccttgtttgtgttcctctaacgaggtttttctcgcgcctttcgcggtggggggacggctttgttctcccccccgcggggtatccacttgtggggcgcgcgcgggcacgggggcacaccctatcttgtgtgcggggtgttcttttttttccgccctctgccgcctatttttgtgatgttgttcggcttttttcttctggacccccttttttttcctggctccaccaagagggttttttctcccctaaaaaaaaggttcccctttccccgccccttttttccaagagggggggtttttcctttttccccccctccccctttttttgggtgacccccaca

SEQ ID NO: 541818 - DNA, 903 bp, Homo sapiens
tccctctgcggtgcactgtagtgtctgtagggctatgggtttctgggcccaggcccgctgtgccgagcgtaacaccaggatgttgctgtgcccgcacaaattgttggtcccacgccgtcttgacgccgggcttcggggtaacgcccctgtgggcctcccgcccacctggggttcctggataatcccacgaacggtgtccccggggcgcattgtgtgtcccgcggtaccgcagggtcttttcttacggctttaacccttgtaggcggtctccaaggaacatttttctttgacgcaccactcacgctggggccacctctgggtgtggaaaacaatctactttttggccgccagcggcgccaaaataacttcttttggacaatccccgatggaatgtcactgttcattcacagcttagtttcttcgaggttcttaacaaaaaacctctccagcggccgtcctgaacaccattcaaattcccccccctagtcataacaaattttttccctcggcgagcattaaaacaaccaccaattttactattcatctgttcccccacacggggaataaatggttcaaacccccttgttcaaacccccgcacattctataagaatgttctataacggttgttgcacccaaacgcgaaaataaaattgaaattcttgtcatgttcgccctcaccccatgtcccattcggttgcgttccgccccctcccaaatacttgtagggtatccacgactgagtttatacccctttgtttacatcttaactcagcaagaatatatatcggcgtctcagaataaagagtttttcatcgtctattattctattaagcagtcccatcaatcttaagtggtcttgcaacccgccgaattgaagaatcagcgcccccccaaaataaca

SEQ ID NO: 541819 - DNA, 139 bp, Homo sapiens
aagcatgtgaaagcagaatgtcaaatactcagaaaaccattagatctcatgagaactcactcactatcacgagaatagcatggaggcaaactgcccccatgtatcccatcaccacccacgagttccctccacaacctct

SEQ ID NO: 541820 - DNA, 1377 bp, Homo sapiens
  misc_feature (813)..(813): n is a, c, g, or t
  misc_feature (965)..(965): n is a, c, g, or t
ctcccccctattccactcccccgccgtgtagtgatttggtggtaaatactgtgtgatagctgtttataatattcttttgggatatttttctgtgtctataagagtgttgtccgccctattatcccagtcttatgagttggggcttctcggtatattatatcctctttggggccactgtatttcgatgtgtcgcacacaggctacatgcgttggccccaacttgggaaattgatgaatattttgttggggcgggggggaaaaccaacatgtgggccaggaaactttgctctatcatagtgtggtggtgaacttcgtttgtttgtggtgattgtttggttcgtttgggaaatattgtttggggcccaccgcggatgttgttgtttttgtcttctcccacggggaggagtttgtgtgaagatcctcaccacaaagatatgtggggagatactgtgtagcacccacagtgtatgatgttagttgtagtacaaactttgtggggagatagggaaaacaatgtggctaactagagaagatatttgggtgtgggtgtttgaaaaatagtgcgcgcctctattagagagagattgtcgactcccgctaaagcgttgttattataaagggagtagagtatacaccacaacactcgggggggcgtcaatatgtggggagatgttataaatgtgtggtggggctcgtggattgtcttctgtattgtgcggaaatacacccatagtgtgtgtgaaaagtagtggtgaatactccaagaggattttcctcatgctcccccgggtgtctcacacacacaaaaggcgntcttaaagagggggatagtgttagtagcgccgcactttgtgagagatatagtgatagatctgtgtctctctgtgagcgcactgtctctcactaggtgatactccgtctcaaatagtcctccgcgggtgatatgttaacaccacgcggtgttntatctctacacactcacatgatagagcttataatagagtgagtagagatagtgagagagttgtcgctctctagacctctctcagaatatatagagtcgcccacgagtatacccacctgttggggtacacatactccagagaagagtgacccttataaagaacctcgtggaactaagtggagactttataggctcgtgaagagaaattttaaaaactaccacactagggagataaacttcgagacctcttgaagtgttttcacatccacaggaacactcggagtgcacccacgttggctttgatttttttcacagaaagggaaattgggctcaccagaatccaaccctatgcttgggttaaagcttgccatttgagctttgtggaccaattaattactattggtaaggtgtta

SEQ ID NO: 541821 - DNA, 1306 bp, Homo sapiens
  misc_feature (175)..(175): n is a, c, g, or t
  misc_feature (902)..(902): n is a, c, g, or t
caactctcgtcgctggtgtggtgtggtggtctgccccgccgctcccctcgtccttgtattgtatgtggggcgcgcccctcacccttcatacatgtggctgtgtgcgccccttcctccgactgtcttactcgttgcgtggtggggtgtgcgtctccctctccagcccccccgtacngggtgtgtgcgggggtcggcttcgctccttctgtttataagttcgtatggtctgctcggccccatcgcgtgcgcctagtgtggggctgtgggcgagattatattaccaggtgtccgcccccgttcgttcgtggctgcgatgcgttcgtcgcggagaaatgagctatccttctccccccccggccatttaccaaccaacagccgtgtgtgtgggggttgcttcacaactacttcctcgccaagatatatttctgttcctttcttgtgggcgacaaacatcaatctgtccctggccgccctcgacatccttgtgtctcctcgttgggagataagatgtcgccacgtgccacacactcacatataccatgcctacgctctctgtcctgtaagtacgatatataatatctatacgccgccccgctcttttacattctattcgttacctattctattaagtaagagcattacttacactcccctcgcatatacatagacgcactcccaccactctccctctgtctgagaggagacagtatcatagtgttggctggtgagcgcacactcgctctgcggaccaatacttacatactgcaagtgaggtggagcacactctcactgctatttgctgcaacaattccattatactcaatgattattatcgcttggttattcctctcaccaccacctctattgtgtgtgggggcgacacccaccacactacccttggngctgatataacaatatcgtcttcgattctgttcttcttatatagaacgcacacacattcattttgatcacacgtacatggcagcttctcttttctctctagaaaaaaaaaatagagctctcccctctattatactccctgcgccgtctgttacacactccctttcttgttcacccataattattcttctagagatacaccccctccatacttcggatggtcaatacatacaggatacaaacaattctccgcccgtgtttgataataatcattttctactccactcctgcggcggcggaacctaaccaacaacacaaatttattttcgcgcggtgtgcaattttttttttccgttttttttttcggctttttttttgggaaaaaaaaaaaaaaaacccccccgga

SEQ ID NO: 541822 - DNA, 354 bp, Homo sapiens
caccatggctatcagagttagcttctcacagtgtggcagttcgcgtgggaaacaaagagcatgatcctgtacgtcataatggtgaataaccccagatattcagcctggcacagtctcttcacaagttgtctaccgcctgtctaggatgggttccatcaatggtgatgcaccagcctgaatgcagaagcgctccagtatctccaagggtaccttcaggcagccagtgtgacactgctttacacctacatttttctaatgggctaaacccagatggtttcctaggaaatcacaggcttctgagcacagctgcattaaaacaaaggaagttttccttttgaacccgtcacgacttga

SEQ ID NO: 541823 - DNA, 882 bp, Homo sapiens
  misc_feature (769)..(769): n is a, c, g, or t
tgccctcagatcatgctctcttaggacatggggaactctgtctcaaaccagcgttctaatcggtgtcggcagctatactcctttctgccgaggaggttttctgggtacaccgtcaccccccctggtgctctaagagcacgctgtgccccgtgtaaagcgcgccgctcccgtgaattttcgcgcccctttttctcctattaaggctattttgggccccataccgcactggttagttcaaaagtcccctccgtctttgttgagcggaaaaataggccgctattcttgtccggccctatcgaatttccgccgcggtctgttgataactcgtccctcctctagtactaccttggcgcagaatttgtcccccgtgaccacccgccccgaatcctttccccctggtggccccccctcattgagtctaatttctcgcgcccctaacggggtagccattatgtcgattgctgtcacaagcattcccgacaagtggtggataggcccacccgctgttgtgaacaggtcggagtgcccccaccgagttaaaagcgtacaagcttcacaaggcccaggtaacagagtgtcggccccacccccctgaagaagctcttggtcaatgcctcctggagtaagtttctctgacgaactagcccttcatctcctgcgctgtaaggcggcaccccatccccaacttgcgtatgcatctgtgggcccaggatgtttactccacatatatggggaccccacagctggagtgaagtcttaacagatcttntcaccacagccccacagtgatcgatagcccatgaacgtgtcgttcctcgttagagcatcccccgtgctttagggccccgggtctttcattggatttaccccacacccataaca

SEQ ID NO: 541824 - DNA, 943 bp, Homo sapiens
  misc_feature (7)..(7): n is a, c, g, or t
  misc_feature (77)..(77): n is a, c, g, or t
  misc_feature (79)..(79): n is a, c, g, or t
  misc_feature (94)..(94): n is a, c, g, or t
  misc_feature (96)..(96): n is a, c, g, or t
  misc_feature (98)..(99): n is a, c, g, or t
  misc_feature (102)..(103): n is a, c, g, or t
  misc_feature (106)..(106): n is a, c, g, or t
  misc_feature (127)..(127): n is a, c, g, or t
  misc_feature (129)..(129): n is a, c, g, or t
  misc_feature (136)..(136): n is a, c, g, or t
  misc_feature (139)..(139): n is a, c, g, or t
  misc_feature (150)..(150): n is a, c, g, or t
  misc_feature (241)..(241): n is a, c, g, or t
  misc_feature (307)..(307): n is a, c, g, or t
  misc_feature (391)..(391): n is a, c, g, or t
gtaccgngtccggaattcccgggatggaagatggcggcgtccgttgtctgtcgggccggctagcgcggcgcgggggnanaagtggctagtgtgngngnncgnnggngcggcgcgggcgcgcgtgggngnggggcgngcnggcgctgtggnggagtagcgggcaagcgcttcgctcaggcgctccagttcgtgccggaaacgcaggttagcctgctggacaacggcctgcgttttgcctccnaacaatcctctcaacccactttcacggtgggaatttggatttattttggcagccgtttttaaactnaaaaaaataatagggcaagctacttttttgagcatcttgctttcaaaggaacaaaaaatcggcctggcagttccctggaaaaanaggtggagagcatgggggcccatcttaattcctacaacacccgggaacacacagcttactacatcaaggcgctgtccaaagatcttccgaaaactgttgagctcctgggttacatttttcagaactttagtctggaagactcacagattaaaaaggaacgtgatgtgatcctgcgggaaatgcaggaaaataatgcatctattcgaaatgtggtctttaactacctgcatgccacaacattccagggcacacctctagcccaggctgtggaggggcccagtgagaatgtcaggaagctgtctcgtgcagacttgaccgagtacctcagcacacattacaaggcccctcgaatggtgctggcagcagctgggaggagtggagcaccagcaactgttagacctcgcccagaagcacctcggtggcatcccatggacatatgcagaggacgctgtgcccactcttactccatgccgcttcactggcagtgagatccgccaccgtgatgatgctctaccttttgcccacgtggccattgcagtagagggtcctggc

SEQ ID NO: 541825 - DNA, 1088 bp, Homo sapiens
  misc_feature (685)..(685): n is a, c, g, or t
gagtgctgacactacaaggctcggatctccggcgcactcagtacaatcatgcaggttggtcctgtttgacccccggaacttgtaattctgctactctcgtagtgcttcatctgtcatttcttcgtcttcaagcactgatgatatcagtactgattgcctatcagcagaaggaagttgcatgcatctgacatgtaaatgaatccggtatgttatagtccaagctacctgtggcccttgcagatttcctgtgctacttcattcaaacgcaacagtaagcacaaggatctactagttctttcgtgagagacatcttaacactcagacgtctgaaatatgtagaaacattcacgaacgtcataacatgttgtagtacgatatgcacatccgatacttgcgactttagtacatcccttgagtgtaaatcaatcgaacagaccgaaagagtcattgcactaaggaccgtctaggcttagctttgtgcaaagatccccaggcaataaatggtcttagcaaggtaaaagtgtcatcgcacacattccattgagaagcatcggatgtgttgaagcacaattgacgtcgaagcttattccgagttcatttggcgatgtgcacaattactatcagatctcgatgatacatccacaagaggactctggttcaacgcataggaagagcagcataggtnagccctagcttgcaagcgacgagtggcccagcgaacccttgccaacaggaccacggtgccaatttccgatgatatcacttgcggcaaacgaattgtgcaatgaccattgcccaaattacagggggagcttaaccagggagctggcgcttcaacgtgttatttaaaaccgtctggaaaaggcgtaaaccccagcaaacttgcttcagtcttacctgtgtaaattccgatggcgtcctgggaccagtcgcactgggcccctggtggttactccacgcacggaagactccggattgggccattggtcaacatttccaggacccacactgggttcccgtgcttgagcaagggatctgggacattctgggctcctaactgggcaaacccaatctttggtgggaaatgg

SEQ ID NO: 541826 - DNA, 531 bp, Homo sapiens
  misc_feature (257)..(257): n is a, c, g, or t
  misc_feature (260)..(260): n is a, c, g, or t
  misc_feature (288)..(288): n is a, c, g, or t
  misc_feature (300)..(301): n is a, c, g, or t
  misc_feature (304)..(304): n is a, c, g, or t
  misc_feature (322)..(322): n is a, c, g, or t
  misc_feature (361)..(361): n is a, c, g, or t
tcatataacttatatcgtacagacgagggtggccctaattaacctaaactaagcgcttcatagttcttcaaactaacctccaattggtttatggctcacacctgttgtctttacaaattcctctacacactaaaacctcgcccctgaaccaccttcccccctttaatcaaggccattacggaggggcccacccactgccccaccgcatttggtcttcgaggctccccccttttgggaccggtccctaactccctcgnaancacttccctcattttacaacaattcagncatctcccccgnngcngggactcccccccccccncctcccccccccctgcaactttttccccccctcctctcncccaccttctcaattcccccctcctttcttcccctctcttttctcttccacccccctccatcttttttctcctcttactacccatcttatacacatctcccccttacattccctccctcttttctcacctacctttcctttcactctttctccttctccactcctctctt

SEQ ID NO: 541827 - DNA, 913 bp, Homo sapiens
  misc_feature (913)..(913): n is a, c, g, or t
tactttaaacctaacgactattcattgtatcatagcttgtgatgtattctgctcatggcttttaaggtaaatgtgccatgatccactgccattctaattgctttaacaagtcattaccacactactgttacatcttaattatgcatacagacaggtagacttgttttacatatgtgaactaactagttgtcaaagcaaatgcagatgtattctgcaagtaaagtctttttctctctgaaatttctagggatgttctttaagtgaaattcatattaaaactgaagattttagttacaagaactgagtgcagattaaagtctttgtgtgattcaaacatagtcaagagtacaactgtgatatttcatggaagttatgcaataaaatgtctctaacctgcgaacaaatctatcaagcagacggcacagtactgaatttgaaaccagaaatactaggtttttatataaatgcttcgtagatttgttttatgataaagggcacataactctcctaaacctcaacacctcttgaataggtataataagtccacatcaatgctgatgccttagtattattaaactcttacagtatgatgtcaggtggacacgtacaatgttacgatcattcccttagggccaactttgaccagtttatacagaaacatgtggccacttttctggtcgcaaggtaatatctcaagcaacccagaaagttttcttttgtgccttttcaaatcttaccttttttccaccccgaccatgtggttttctcgaaaataaattcccccttcttggcgaagccatttccctttggcgccacttttagggagggctcgctgctggtaacacccctggtgttaaaaaaaaaaaggggggcgtgaatcgggggggaggagtggtagcgggagcacaccagn

SEQ ID NO: 541828 - DNA, 340 bp, Homo sapiens
gaccacaacctggtcgacatggtgaaaccccatctctactactaatacgaaaaacattagctgggcatggtgacaggtgcctgtaatctcagctacttgggaggctgaggcagagagaatcacttgaacccgggaggcggaggttgcagggagctgaggtcatgccactgtactccagcctgggggacagagcaagactctgtctcaaaacaaacaaacaaaaaataataatacgataatgctatttgacgtgttttgtggttaatagtgattttaaatgcagttaactttcagtacactgaatatttccccagaaaattggaaacttcatatacttggc

SEQ ID NO: 541829 - DNA, 169 bp, Homo sapiens
ggtacttaaatacaaataaaagtatctagacatggtggcatatgcctgtgatcctagctgcttgtgaggctgacgcactgagaatcatttgaacccaggaggtagagtttgcactgagttgagattgcaccactgcactgcagcctgggtgacaaagcaagactgtttc

SEQ ID NO: 541830 - DNA, 400 bp, Homo sapiens
  misc_feature (10)..(10): n is a, c, g, or t
  misc_feature (67)..(67): n is a, c, g, or t
  misc_feature (135)..(135): n is a, c, g, or t
  misc_feature (165)..(165): n is a, c, g, or t
  misc_feature (195)..(195): n is a, c, g, or t
  misc_feature (231)..(231): n is a, c, g, or t
tggtcgtgtngaccttttaagtattttctggagtctttcttctttactttgtcttagaatcttttantttattatctttacttccagcttcttacttcgtaaatggagtggtctgtaaagcctttgggaatttantgtggtatctccttttgccagtggccttgntgggtaacccttctcatgatggttgggttncaggggagaatcagaagctttgagagtttaaatganttgcctgggctgggttggtgggtccattagagagagccagaccccagcacctgtccttactcccttccccaggcccccttgcttggctgcctgtctttgctcagcctcctcactcggggtgttcactggttctgccgtcgacgcggccgcgaatttagtagtagtaggc

SEQ ID NO: 541831 - DNA, 262 bp, Homo sapiens
cagtatatgtttaaaatgttactacaccttccatgtaactcagcactgaccactagacattatgattaaaaatcgaattcatattaaagtttaaacaatgaggtataaatttggtgtattttcatgttactagtcccttttgtataatttggcttaaagtgtatcatggatttttaacttcaaactcccccccacactcactaattgaggctaatcaaaaagcactttcgttgaaaagttgcaccaaagaaaggagaatttt

SEQ ID NO: 541832 - DNA, 101 bp, Homo sapiens
ccgggctctacgcacgaggggtctctgtaagcctccaggctgggcagcactcagcgtggacgtggagggggactgtttggagctcgggaggacgtcttcca

SEQ ID NO: 541833 - DNA, 311 bp, Homo sapiens
  misc_feature (68)..(68): n is a, c, g, or t
aattaaagggcaggctgggcatggtggatcacacctgtaatcccggctttgggaggctgaaatggganaatcacttgaggcggggaagttcgagaccagcctgtgcaatataacaagacccccatctctccaaaaaaaaaaaaaaaaaaaaaaaaagccgggcgtgatggcgtgtgcctgtggtcctagctgctcgggaggctgggatgggatgattgcttgagcccgggagtttgaggccgcagtgggctatgattgcactattgcactctagcctgggtaacagtgtgagaacgagaccctgtctcaga

SEQ ID NO: 541834 - DNA, 515 bp, Homo sapiens
aggggtttttcccaaacccccggaaaggtgtcaagagacccctttaatttccggcccccccccccttttcaaaagagggggttttggggccccccccaaggtctttgttcaggggactcttgggcttttgggggtgttaccgccccccctttcgggaaagttcccaggtttgttgcccaccgctccccttttaaacaagttggggtttttaaaatgcggggccccccgggggccccaaatagcccgggtcctatgggaggggggggggccccaaagtttttttcctggggggccccccggggcccccaggaaaccccccggaaaaacctcccccgggtttggtccttgggctccggggggtttaaaattaagggggggaaaaaaaaaaattcccccccccccaaaaaaccccccccccacccccccaaagaaattaacctgggaaaaacaactcccccaggttttttttaaaaggggggggccgagccgaataaattgggggggccccccttttt

SEQ ID NO: 541835 - DNA, 749 bp, Homo sapiens
gctggtccggtccggagtttagggataggttcaggagattctcctgcctcagcctctggagtggctgggaatacaggcacgtaccaccgggtttcactgtgttagccatggtggtctggatgtcctgacctcttatccacccaccttggcctcccaaagtgctgagatggcaggtgtgagccaccgcgcccagcaggactgattagttggtgtttttttttttggaaacggaatctctggttgctcaggctggagtgcaggggcgcagactcttggcttgacgtgcaaccttcttgccctcccgggtttcaagtgattcctccgtgcctcagccctcctgagttgctgggacttacggggcacaccgccaccatgcccaatttaatttttggtattttttagatagaagacgggggtttcaccagtttggccaggcggggtctcgaaattccgtgaccctcgagggtgatccaccgtgcctgggtttcccaagatgtgcgtggggattcacggcggcgttgagcccaccgcgcccggcctggggtgttcacccacttttaagaaggggcttcgaggcgaaacccacctttaagaatagttgagagttcttgccgtgccccataattattatcagatcctttcaaagtcccttcaaataaaccattaacagcgcgttgtggaaaaaacaaatatcaaagcaaaataaacaaaataactaaacaaataataataaacaaaccaagatgctg

SEQ ID NO: 541836 - DNA, 196 bp, Homo sapiens
gaaaataagtctggttaatatagaaggtgtccggagttcccgtcgtggcgcagtggttaacaaatccagactagcaaccctgaggtcgcaggttcgatccctggccttgctcagtgcgtgaaggatcgggcgttgccatgagctgtggtgtaggtcgcagacgcggctcggatctggtgttgcagttcacggagag

SEQ ID NO: 541837 - DNA, 145 bp, Homo sapiens
ccaagtagtaggatgaggaacgtcactgggatgaggaacgtcactgggatgaggaacgtcactgggatgaggaacgtcactgggatgaggaacgtcactgggatgaggaacgtcacttaatgcttatagtccggtctcaaatgct

SEQ ID NO: 541838 - DNA, 226 bp, Homo sapiens
gatcaccctgttcgggcttcctttacctggggggcttataacccaaaattacccaacctagggcggccgacttacaccttaaccttattgggttaattttatggtactccacccatcctaattaatatacattagttttccctcccggcagggttcctgggcaattgttggatccctttggacttaatttttccgcgttccaccaccaggctcccttcctccattt

SEQ ID NO: 541839 - DNA, 293 bp, Homo sapiens
ctaatatgtagctcgagcccatcataacatttgatggttattagtccagctacccattatgacagatgagacaaacccaggcactgaagtgttgaggcttcgcgcctggtcacttgttcttatatctaatacggatactggatccccatctcctcattatccagtgcagagctcattctactttgccctgcttcctctcatactttgtggatagctagatataaatcacatgtgtacatttggaatcttggaacaagtgcctttaataggccagtcctatggtagaaccgact

SEQ ID NO: 541840 - DNA, 443 bp, Homo sapiens
tggcctgagacgtgatcacgatgagtcggaagcaaaacgactcctgagctaatgtataagacacgaagtcataacaaacagtctcttacaccacagcacaatcaaattagaactcaagatttaaacattcactgaaacccacataactatatggaaatagaacaaccggggtccgtgaatgagcgtctggttaaataatgaaagtaaggtagaaatcaagaattgatttgaaacgtaatgagaagtaagagataacatatcagaagtcgtgggatgcagctaaagcatggttaagagggaaatttatagtactaaatgcccacatcaaaaagctagaaagatctcaggttaacaacctaacatctcaactaaaagaactaaaaaatcaagagcaaacaaaccccaaagctagcagaagacaagaaatagccaagatcagagct

SEQ ID NO: 541841 - DNA, 549 bp, Homo sapiens
  misc_feature (76)..(76): n is a, c, g, or t
  misc_feature (79)..(79): n is a, c, g, or t
  misc_feature (105)..(105): n is a, c, g, or t
  misc_feature (240)..(240): n is a, c, g, or t
  misc_feature (413)..(413): n is a, c, g, or t
  misc_feature (549)..(549): n is a, c, g, or t
tgagccggtaccgttagttgatactacagtgcacccaacttagtgatctgagttcttctgctcatgagccccctcnctnccagtctccctaagtcttgaaaggangtccttgagagcttccagccttcagccccacatgacccacattatggcagagggagcttcctgggttggtggttcctcctatgggagcttacctgggctccacagaaaggtgcctagggctgcctcaagaagggnaacaggagagtcttcatgctctagctttgtgtgaccttcgctgccttgtttctttcagatggatgtcgttttgaagggcgacaatcttcctcagtatagaggggtgaacattcggagattgctgtgagtatattggggggcaggtttatagatgtggggaaatcctccttgtncctgctttcctgcctcctcctatcatgaatggctagaatatcaatactgggtgggtcagagagtcctgcagccgctagggaacactgggggctgtgacacctttcattcttcattcattcatccactcaacacacn

SEQ ID NO: 541842 - DNA, 919 bp, Homo sapiens
  misc_feature (504)..(504): n is a, c, g, or t
cggacgcgtgtgggctgcgctttctcagccctgggaggaggcgcctgaacccagaactattttgcctaaccccaacctggtatgactcagccacttcttcacgaagttgcaatcttattggacgggattttaggtttccctcccttcccctatccatacagttgagaagtaattcagaagtaggccagtaagcagactttttattccgttattactatatgggagcaaaacagtgcccagtgccgacggtctttgtgttaatagtgcatatgtgtagctgcaattgagatgcagtggactagggctgcggagtgggagtcgaccggacgggctggacgggccgattgcattatcagctcaagttagtcacgtagacgaacctcgcgagcactcctacggttccccatggtgcaggcgctgtgagcattggttcttcactcccgtaaggagctggcataggtgcatggaagcaaccattaccaccaggtactctcgcattggatnacaacagcgtgaggtcacgaggaaggataaaaccaaacccataaggttcaagcaatcctcccgtcaggcaaagcgattatgggaaactttcacgacctatcaatgatacctgtcaacgggtccgcttcccagggtcttgtacgaaaacaaggaacctctgcatctcatgcactgacgtacgcccagtagaggtctcttcctgacccagacagctcctctctgagccatggtcctggcgggtatgggggctgccatggtgcgctcgagcccttctcctggggggcctgctgggcgaggctgacctgttgatccaccggtcactggtgtgttcagcccctctgctcggcccagctatttcccgcctccttttgagtgttccaggttttcaaattgcatttacctgcgcccgaaagtc

SEQ ID NO: 541843 - DNA, 95 bp, Homo sapiens
attcggcagaggggcctgtcccactgtgtgcacttgctgttttccctgtccacatccatgctgtacagacaccaccattaaagcattttcatagt

SEQ ID NO: 541844 - DNA, 666 bp, Homo sapiens
taaaaaccttaattaatcccaataataaaattttcggtttggttttttaaaaaaaaaaaaaaggggggggggcccccgggggggttggcccgaatgggcgatcttaaacccggggagggggggtgtgccgggggagcatcacacctcggagaccacaagtgttgactggggaaaaacgttgtcaaagagggccccttcaaaagtggcccaaaagagccaagtgctcttggggggcctgaaatgagacggcatacccccgtaagagtgaccgctggccagtggcgtagaaaaaaaattcgcaagaagactgaaaaaacaacaccttctggggcgaacgggtgtattaccacaagctgcacacagtaaggccccagaatggacaccgggggtgaaatatccccggttgggaccaaaaggtgctgcgctacaaaaagagggagtgctctcacgaagaagtcgcgtggtctcttaaaaagcgcagaggccccgaatgggtgcgccaaggctcatgtcttgggaaagaaggaatatccaagcaacaggtggctcaacaaaccgaaggtggcttcctccccgaaaagcggctggggggtgaaaacacgtccttgtcgtcgcgggcacaccttcacaatcaattcttgtcgggaaaccaaccacgattacgac

SEQ ID NO: 541845 - DNA, 230 bp, Homo sapiens
gcaccggactgtctgtcccaatgtctaacaaagtccggaggcgactcttcctgcgatgtctcagagcgctgtgtaaccgcccaaggggttcaccttgcctgctgtctagacaaagccgattcattaagacaggggaattgcaatagagaaagagtaattcacacagagctggctgtgcgggagaccggagttttatgttttattattactcaaatcgatctctttgagca

SEQ ID NO: 541846 - DNA, 212 bp, Homo sapiens
catgaagagttgtgaagagtacaggaggaggagcggaagaagcgctaatgaagagcaggaggagacaacaaagaggatactaagcgaggctaagaccgaggagaccagggcagaagaagattaagaagaagaggaagccaaggaggctaaagatgcccatggaggagaccaacccaagcccggtcaatctcccacttgtccaccagtaccat

SEQ ID NO: 541847 - DNA, 341 bp, Homo sapiens
  misc_feature (36)..(36): n is a, c, g, or t
  misc_feature (174)..(174): n is a, c, g, or t
  misc_feature (196)..(196): n is a, c, g, or t
  misc_feature (220)..(220): n is a, c, g, or t
  misc_feature (303)..(303): n is a, c, g, or t
cctcgtgcattattttttttaagagactgggttttnctctgtcacccaggttggagtacagcagcaccgtcatagctcactgcagcctcgaactcctggacacaagcaatcttcccacctcagcctcctgaataactggaactacaggtgcatgccagcagtcagagctagggngagtgagatggagtctcactcngtctcctaggctggagcgcagtgncagtggtgtgatttcagctcactgcaacctccacctaccgtgttcaagtgattctcctgcctcagcctcccaagtagctgggnttacaggggtgcaccaccacatacagctaatttttgta

SEQ ID NO: 541848 - DNA, 317 bp, Homo sapiens
accattgctctgatgctcgccatgacaatgcgaagcgttctttccaagttgtgagggctgcgcagacaacaggttggactgtgtcctgcgacgtcgatatgtgtttttgcggcgtttataaagagaaatatggctggcgttcacatctagtccttttggtgtgttgagacattcaaatgtgactattattactgctaacatttcacaaaaaaaaagctaagccagcaggctggtcgaattgcggcgtcggctctgtgcaacccttaacccggtcaattccagtgggagcgcttgtgtgccgccttaacggttgacgg

SEQ ID NO: 541849 - DNA, 835 bp, Homo sapiens
  misc_feature (192)..(192): n is a, c, g, or t
ggaagaaccaagcttgaatctgttacgcatgggatgataacctgaggacccccatcgggacatctcccatcttttgaaaaacctggaagtgaggagatgtgcacggatggctgaatgtttgggaatgagaggatgagatgagtgaggcttgaataacacgccagcattgaatatccatgcgctacaggcagncgagccagcaggccgccgaatcagacaagcgcatgttagatgagcgtgatggtagagcgagctgacgttcgatagaaaaccactaacatcgagtgcatcgttgggagaaagatgaaagagagccaatggtagttacttcatttaagaaaaacacagagaacgaacagtatatcgtcttccgcaggagaggttcagaagatagcttgttctgatctttttggccatgatgccagtaggtggatatgcctggattaggagagggaggaggagggactaggtgttcagctgtgggtgcgtatggattggatagagacaggcaagccatggtcctattgctactgcggcagaaatatggagcctgggtctcaaagcccagcttcgctgtacctttgccgaattggtcagtgtatgtcttggcgcaggtaagaaagggagggtcatggggagttagattacaaggtcgtgacgaatgagtgtggtgtcgagatgaaggctggtatgcacatgctcaaaagttctagggatcatttgagggtcctgttatcccaagagaaacgagggggtaagatgtggcattcgataaaagtaatgagaagtgtctgtctactggatgcggggaagcagatgtaggagaaacaaaaaa

SEQ ID NO: 541850 - DNA, 105 bp, Homo sapiens
tgaggacccactaagttttgatgatgaacttcatatgctgagtcatgtcggaattctgcatccatcttcacttcagagatgtcctacgtcgtgatgacactcttg

SEQ ID NO: 541851 - DNA, 1010 bp, Homo sapiens
  misc_feature (31)..(32): n is a, c, g, or t
  misc_feature (36)..(37): n is a, c, g, or t
  misc_feature (100)..(100): n is a, c, g, or t
  misc_feature (115)..(115): n is a, c, g, or t
  misc_feature (161)..(161): n is a, c, g, or t
  misc_feature (171)..(171): n is a, c, g, or t
  misc_feature (183)..(183): n is a, c, g, or t
  misc_feature (193)..(193): n is a, c, g, or t
  misc_feature (196)..(198): n is a, c, g, or t
  misc_feature (202)..(202): n is a, c, g, or t
  misc_feature (204)..(204): n is a, c, g, or t
  misc_feature (206)..(206): n is a, c, g, or t
  misc_feature (208)..(208): n is a, c, g, or t
  misc_feature (211)..(211): n is a, c, g, or t
  misc_feature (220)..(221): n is a, c, g, or t
  misc_feature (225)..(226): n is a, c, g, or t
  misc_feature (277)..(277): n is a, c, g, or t
  misc_feature (287)..(288): n is a, c, g, or t
  misc_feature (294)..(294): n is a, c, g, or t
  misc_feature (297)..(297): n is a, c, g, or t
  misc_feature (304)..(304): n is a, c, g, or t
  misc_feature (334)..(334): n is a, c, g, or t
gcgaatctcaacgctgcgccgtctgcgggcnnttcnngggccaccagtttctctgctttccaccctggcgccccccagccctggctcccagctgcgctgncccgggcgtcacgcntgcgggcttagcgggttcagtgggctcaatctgcgcaggccactcnatgttgaccnagcctctacagnggcctcccgngcnnnccgngncncncangccgccgcnngagnnaaggatcgggaagcgttcgaggccgagtatcgactcggcccctcctgggtnaggggggctnnggcacntcntcgcagnacaccgcctcacagatcgactccaggtggncatcaaagtgattccccggaatcgtgtgctgcggctggtccccccttgtcagactcagtacacatgcccactacgaagtacgcactgctatggaaagtgggtgcaggtggtgtggcacccttggcgtgatccgactgctatgactggctacgagacaccaggcagggcattcactcgctggctccctcgcagcggcgcataatgcaccgcccaggcactcctctcagcacgtatactcagcagagcaagcggccccacctgcgcgctcgaacggcccaacgaacagacatgacaacccatcatgagcacaaatgtacgatgcgcacgcctactacctatcaacctgcaccatatcccacgttgcaatgtatcgtcgccactacggatagaacccttcacaatcgcattcgacacaaacagcatatcccttggattcagaacattaacagtcccaggtggggcactcgctgcccccatagaccttcacattcggaacgctacctagcggttcctatgcggctagcctcccttgatctatccaattgactaggcaacgccctcttagcgtctttaggccccttttctgacaatggggcactcaaggcggcctgcataccctgtactccttatcaagaaaatgtgggcaatacctactcacgagacaacccatgtaaca

SEQ ID NO: 541852 - DNA, 1553 bp, Homo sapiens
  misc_feature (294)..(294): n is a, c, g, or t
gatgtcggctaacggaggcgatgtgagggcctgcgtgcgaatcctcctccgtgcgttccacgaggcggctagggcgcctgcggtggcccatgccgcggctgtaggtgcagcgtgcttgcagtgccttccacaggccccagaggcggaccggccttgagtaagggacttactgacgacgcgtggaagttcgatggtcctcatgcggtagtctagcttcggcgctgcttgcgtgctcgaagtacgacgcgttggacggcagtgctgtacagtgacggtgactctcgagctttcganaccctagtctagctggtcgtatcggcgttgctagcatgctctcgtaggtcctttgaatcgtgccctcttgggtagcgctacgataaatctggcagcatggctataggggccagacacagggcacagcttggggcaatagggcgaaagcatacgtagaacgagtaccctcgggggttggtcctacccacttccctagcgttatttctagcttctagagccacaaggttcggacgggtcggtagccgtgccttacgaacgccccagcggcaaattccggggcgctccttggcccacaagccactagagggtcgattcggtcggtatagagcctcctcgtcagctttatagggagaagctcacgtctgccactcgggtaatatagccgcgcataatgtccctagcctagaaactttaacacaagaggtaacgcgcgtcccgcgccattcgaggagaacttgcaccggctgataagacagcaggacccgcttagcaggaacgtcggcacgggttccgctaaactcatcccagttgggtggcatattcctccaattcacattattcccgcaaaggcgtattacgcagtcgcagcacagcaacaaagtgcgtcattccgggcttgcactttaggggaggcacatagcgcggtcgcgagataccactataggcggccatcaacgtaatccagctatcacgcgcgttctggagtcccgtagagacgcggacaacccgcgttacccaggtcttggtgtgcacatctcagctcaacgtgaggtccacagtgtaggtatttatgactgataagtaatcgtgctgccacgcgcggttcctacttatccccccgtaatacgaatcccgttttagcggatgatcggcaattcacatcaaagctgtagtctccatacgactatcccgggtgcacgctggaaagacaaccagcatgggcggacagttgcaacttggcgagcgtgtaacaatcgtcctaggtgcaatatacatgctttggtaagcggtcgttagtgctcatccgcgctacagaagaagtgtcgtgcgggctccctgtgcgtgaaaacagatcccccggtgcgcagctatctggtcccatgtgcgtgcgagcatcaccgtatcacccactgccgacctatcaccgcggctcgagtgacttcccctctcacgattgcgttcgtgtaatcggtgagattccgagctcctttttttgacaccggataaagtgcctacatcaaggtagattataacgcgct

SEQ ID NO: 541853 - DNA, 144 bp, Homo sapiens
catgagccagcacgcccagcagagtcctgttcagttctggagaatgtagtatattagactagcacttagctatgaatgtccaacaaatatttattgctgtttctcaactttaaaattttaaataaatctgtgtcccatcaaaca

SEQ ID NO: 541854 - DNA, 872 bp, Homo sapiens
gctcaaagtaagcgtgagcggagaggatctggtacgccgcttcagtcgctccctgaagaataagaagagtcggggacctcctatcccagttacattccagaggatgagggcgtctgatagctgtcggagagtggacgcgtttagcttgttgccgaatctgcccccagtcgatcggtactggtacgacccctgtggccatgctggacatgcccactcgtgcgagagcgaagaagacatctgtccagcttgcagctttgcatatggcgaagaaagcagccgggaaaggagagaataggcgatgaagtccaacatacgatcagcacatgaattgaggaagggaagaaaaccaaggctgaggctcctctgcttaactcagacgcgacttatcacccagagtgctctgcaatcgagagctccccactataacaggttgctgctcagccggaagtacagaccagtaagcccctggtccctctgtctccctttcccctatgccagcctcagaggtcgaaactccaaagtgggaagatcagtagggaacctgaagctgcggctggccacgaggccgaggagtcagcaactgtcatcagcccctgaacgcatgagcgcccacaaagaagacgagcccgtggaccattatctcagccattcgaagctctggatggatcccagatggacgaggtccgaatgggctacaagatgaaaatgttgagtttgactctgatgaggaggaacacgtggatatccccgtgggcttgatacccttttccagtcattccacctaattacaagggtgttgaaacttacaacaccacaaaggggggctcgtaaaactcctgagggccaattaggggcccccgtttggcaagggc

SEQ ID NO: 541855 - DNA, 236 bp, Homo sapiens
gcgtggatatctgcactcacgacatgcgtaactcagacactcacccaagtctaggtccaaataccttggtcttataagatttatttctcacattttatcaaatgtccaaaatcgtggaccaaaagtgactttcgaaggtaagatctgcattagagtggtatttccgttctaaatacctgaatggtacttatttttatttaaaaggacagagttccgtgccaagtaggcgtgtgaga

SEQ ID NO: 541856 - DNA, 556 bp, Homo sapiens
agtgccacacatatacacaatggaatattattcagggctgggcacagtggctcatgcctttaatcccagcactttaggaggccaaggcaggaaagtcacttgagctcaggagttcgagatgagcctgggcaacatagtgagccctcacctctgcaaaaaataaaacaaaaaattagccaggccgggtggcgcatgtctgtagtcccagctactcaggaggatgaggtggcaggatcgcttgagcctaggaggttgaggctgcagtgagccaagattgtaccactacacctcttggtaacagagcaacgactccgtcttgaacaacaacaataacaatggaatactattcggccactacaaataatgaaatcctgccattcgtggccaacacggttggtactggcaggacatcatgtcaagcaaaataagccaggaacagaaattcacacacactgccatgtttcttactcatcatgtggcagctcacccaaccctgacactcatggacgatcagagaaccaatcacgacttatcagatcactgcacaggacagcgc

SEQ ID NO: 541857 - DNA, 350 bp, Homo sapiens
  misc_feature (34)..(34): n is a, c, g, or t
gcccctgccccccagcctggggggcagagcgagnctccctctccaaaaaaaaaaaaaaaaaaaaaaatttttcccattgagcctgggggcctggtccccgcctctaatcccagccctttgggaggctgagatggagggattccttgagctcaggagttcccaacgagtttggcccacatggtgaaaacccctcttttctaaaaatacaaaaattagctgggggtagtggcgggcgcctgtggtcctagctacttgggaggatcccttgagccctgaaggcaaaggttgctgtgagccgagattgcccccctgccctccagcctgggggactgagggagactccctttcca

SEQ ID NO: 541858 - DNA, 243 bp, Homo sapiens
tcacaactgcacatgattgttgtaatcatgaatgtatatgttcatgtaaataaatgtcctcaattacaactcaaaaaaaaaaaaaaaaaaaaaaaaaaaaaaaaaaaaaaaaaaaaaaaaaaaaaaaaaaaacctcttccccccccacccccccccaccaaaaaaggggggggggcaaaagggggggggtttagggggggaaacaactttctctaagcgccaaaaaaacacccccccaaatat

SEQ ID NO: 541859 - DNA, 111 bp, Homo sapiens
cggtgctgtactctatcagcatgttcatatagtcatcttagcactggggataaatacacaataagacatgcttacttgttagttttatttttttgagactgagtctctctc

SEQ ID NO: 541860 - DNA, 306 bp, Homo sapiens
  misc_feature (217)..(217): n is a, c, g, or t
  misc_feature (225)..(225): n is a, c, g, or t
gaattctggatcctcggggggggtacgaggaagattccaggaggaggtgaatctcagcagcatctctgagctggagcaagagcccacttccacaggccaggagtccctttcccagcccggcctgtcttgactcaggggtctgcaggctgtgctcacggctcctccaacatggccctctcctggctcctctgcatgaaaaagaacccacagggctgtngctggaanccttctgaggtcagaaactgagcatccttgcccctccacccttcctggcccaggaatgcatgcacacggatggatccagaa

SEQ ID NO: 541861 - DNA, 824 bp, Homo sapiens
  misc_feature (312)..(312): n is a, c, g, or t
  misc_feature (451)..(451): n is a, c, g, or t
ccaggcagcaaggaccccccagccgcctcgatgtggtcccaccaaagggagaatgctggaagggtgtgagagaccctggcacaggtacaccagccaggacgccctgggcgccatgcaccagacgaaagaggaaggccaagagccagtgcccacagttagcccacccaggagggccaacccggtgtgtacccccgagggcgccatttgtaaggaggcgtgcttgcccaagttacttccgatggcccattgcctgtccgtccaagagaccctggccagatgtaaggacaccacgcctggggtctcccctgaatnggatcccagctcggaccacgccagatctcacacgcgccgcgtgcttgctctcaacatgaccgtgcccagatgccaaggctggtggtcgaaggagatactatcagaggtgctgtgacaccacatgctctgtcgccatccntccgaccaagtgacgacgaccaacagtccaggcctacattccaaccggggcaagagccccacagcggcccgtgtggaatagccccgagaggccccggctgactttgcccaaagtgctggagctggaccccaaccctggcgcctgtggtgaaccgagaactgcgggccctggaggcacggatccggccagaaggacgaagaggaccaagacccggttcccggggatcttctccccttgaccggagcacttggccctgccttacctgcccagccccctgctgccgctgcccagcccccctgcccgtgctgcgtcatgcttctgtgtatataaagccctttatttatctcttacgcgaagaagaaaacacttcgag

SEQ ID NO: 541862 - DNA, 826 bp, Homo sapiens
ctctcctataagtggcttcccctttgggcccccctattgtcttgttattgcgctgctatcgtagtacgctggtgcaacgccgcccgcagtagggtaattctgctcgtctcgggccggccgcgggtatatgccgtcctgtgtgtaataatcgtggtccgccgtattgctgtgtgcgttctgttgcgccggcaccgtacggtgtgcggtcgtggttaagataacaccgaggggcgggtgaagaggtccccctcgcctggtgcttgcagaaatccattggggcccccccatgggttcgtgagacccttccgggtggttcccccgtttttcggcgggataatttttgttcccacggctcgaacatattggtcccccccccgttgtgtcctcgtggaccaccggcggagcacgtggagtctcctctgagcgcgtgacgccactggcgggttgtttctccccccgcgttgtgtgcccccctctcgggtataatatagtccctctcgccccagaacgcttcttggcaccttcactgggccgtgcccccaccacattagggctttaaaacacgcaggccatgtgcccgcgagcgtttttaaccccaacccctgttgtcccccgcgcaacaccgccccgcgggggtatatactaccgcgtcacaagcgtctctcgaaaattctggtgggcccaaccccacctttctaatcccctctcttccttaaagattatatttctcccctaaaaattcttttaaaatatgggccccgtatttttccccttatatgcccccccctttatccccctctttatagagagccctctataaaaaaaa

SEQ ID NO: 541863 - DNA, 692 bp, Homo sapiens
  misc_feature (67)..(67): n is a, c, g, or t
  misc_feature (70)..(70): n is a, c, g, or t
  misc_feature (74)..(75): n is a, c, g, or t
  misc_feature (77)..(77): n is a, c, g, or t
  misc_feature (83)..(83): n is a, c, g, or t
  misc_feature (91)..(91): n is a, c, g, or t
gtcgtgcgtgcgtgcggtcggttgcgtcgggctgcaggagaagatggcggtctccacaggagttaangtncctnntnaatttncgcttgtnggaagaacttgaagagggacaaaagggagtaggcgacggtacagatagtctggggctctgagagatgatgaagatatgagatcttacaaggtggaacaggccgtgacttattgcgtccacgcaaggagcaaattatgaaaaccagaatatatggccggaaagtagaatgtgggacctaaattaccgctagaagctcatcggtcagttcagattgtgtagaccaataagattaatatgaacgtgaatagaataattccatgtgggatggttggagtgcccggagcatacgatgtgttagcaaaaatggccaaagattgcatatagcattaaagtgtgtgacttcaatgagctaagactgtctaatgatgtcgcaaagaaagatatgagaggttccatagtgcagagaatggagcaaactatacgacaattaatttaaagtggatctcaaactgtgtcttaacatgaaaaaaccttctactcatgttaatgtctgtgattgaaatatcactaattgcaaatacacgttaagtggaagaattccaggtggtaaacatgacctggcatttgggaggactatatttatatatgtgccccaatgtgg

SEQ ID NO: 541864 - DNA, 918 bp, Homo sapiens
acatgtggtcttgcacactttagcggacatgagtttttgttaaggctctttaacgcctctataatccacgcttccctgccaactttttacacgcctttctgaaaattttcccatacacgctgggtatctgtaaacgcgtgtgcctaacacggggttttcaattctcccaagggaaaatattaaatttcccccactacagcagtgtgtgcgaacatgtaaaggctgaacactcgtgtaaagttccgccccctcaaacacgatggcgatgccctcctagctaactacaatatctgggcttctaaccactaaatcttcagcaatactatgggttctagtccgacaaaaattaggccctaattacaggcgagattggcaaattagctttcctaaattctgaatgactgcccaatgccgatccccctctgcttaaactctacagaacccccgtctttgttacgccctatagcgtccgagattatccccttctataaattaatcgccacttacccctttgtcgacccgtggttcgcatcaatcaatcccccctacccgtttatagcgtctattccaaagactctgtcactaggatcagacacatgaatgccccacatctattcctcaatggctccaaaaaaggcgttctccaactcacttagccttttcacgacacgttattaatacttttatgagcaatttattagtcgtcactattcaccggtgtcttcgaaggagctaaccccccgccttattaacatgtccccatgcgccccatttaatatcacacagcatgaggaataatatctttgagtacaaagtaatacaaaatgaacggattctcgccaaatagtagtaattcactaggcatatcaattattttcggttacaaaaacccgttttgctgggacataaaaacaccac

SEQ ID NO: 541865 - DNA, 299 bp, Homo sapiens
tcaattcagttttcatgagctgcctctagtaatttttatacacggattttggtctcttggcgaattttttactcacctttagttgcttttagtatttacatttctctagcttaatttatatttgcatgacatgaaagatagggaagaaagttgtcagctaatggcacttgagttttttatctaaaaaaaactatgataaaatgttgcgatcgctgctgtcaagatgactgaaaagtctttgagattgccgaataaaaacagtaagacaccattgatatctacttgagaaaaacatgtca

SEQ ID NO: 541866 - DNA, 906 bp, Homo sapiens
  misc_feature (906)..(906): n is a, c, g, or t
gatgacacagctgatgtttacaagattgaaagagtctcgctccgaaaatcatggtaaagaatactgagacaatgaaaaaaaatcatcaaaatatgctttgctggtagaactgtaccttttatggtttgcttgcagatctagtatgtttctgcatgaaggtgctgtcataatgatagagatttccagagagttttgtgttctccatgattagaacgtggtaggccaggatattaaatattggtataagaaataaaaagaactggaaccggattcgaggaatcgtgaaaacaatatttttagcaagcaacaaaaagaactatattaaacatgggtttacgggaaattataactgaactatgagaagtacaatttgttatatgtatatgtatcaatatttctatagtaggattttatagcctctagtggggaaaaataactgattccaatgacattcattttgtgtttcatctgtgatgagtcatggatgcttttattttccttggtggtgtgaaattgagctgaaaaaagaaaggtgtttgaatatagttttaatttctctctacagttttgtggttggttgtgggtgtggaagtgtgtgtgatggcttctccatgtgggatcttggcatgtgtgatctcagtgagccaatgggatgtttcgggcccctcgggtcactgggttcgattgctgtgcgccccccaaatttcctccctttgattctccttgacctacgtgttgtggatacccgattctgcgtgttccccattgttccgccaatcgtcttggttgtcctcacaagccgcacgaattggggtcgggacacaccgggcgggcggccccacgctccgggtatacgggccggccgggcgaaaaagccgccggggcgtttggcactgctgccccgcn

SEQ ID NO: 541867 - DNA, 291 bp, Homo sapiens
aggttattttggcagcagtgccatacctgcgtttgcagtctacgtcgagcgctcccccgttgctcgtgagtgttctgtctggcgtagttgagctgggtactctcgtccattactgccccatcgacgtgtttaccgaacgctgttttatgatgctcttcttatatctgtccccttgtgtaaaacagtggctgtccatctccacctcattgctggtctccggagaggaagcacctgtttctagctggtatgtctgcggaccaccctcagcgggagcttcttgcaacctgctcg

SEQ ID NO: 541868 - DNA, 171 bp, Homo sapiens
tcctgtgcctaattttcgttacattattttatttgcataaatatgcatgcgagaaggtagaggaaaatgtggttgcatcttgtagtggtctaacagaaaaaacagatgtcctgagaactacaaacaaatcagacaaagcccacatgacatcttagtggactggaagatcat

SEQ ID NO: 541869 - DNA, 257 bp, Homo sapiens
ccctaagccccggggaccactggttgatgatggcgttcaccaggatcctgcatgagggtatctcgcctgctgagcaggtagtatgatctcgaaggcctgcttgcacgatgcgcgcagtcatgagcttcttgccgttgttgcggccgtgcgtcatcatggagttagtgacggcgctccacaatagtgatcactgaggctgttgcggaagcgtgaggcggcaataccgctcctgcacggtgaggaaggtacttggaata

SEQ ID NO: 541870 - DNA, 303 bp, Homo sapiens
cagacactgaccaccattgctgctgagaaaaactcaacaattgtcttccctctgcccatagatatgctgcaaggaatcataggggcaaacacagccatctaggctagtgtagagatgagcgctagctttccaagcatgagtcggggacaaattagcctttaactcataaagagagggtagggctttcttttccatatgtcatgtgggttccagatgtatagcagttataaaataggtgaagattgtagctgtaatctgagagattggatttataaggaatcgtagctaactagtaaagttgat

SEQ ID NO: 541871 - DNA, 290 bp, Homo sapiens
agacaatgaagttcatccatgttaagaaatatacagactcctatgcaattctttgcacctaacagcttactataaataattaactttaggggaaaatatttttaataaaacacacatacaatatacacacagatatcaatcttaaatagaattattactacaaggagtggtgtgtcaattgtgttaaagactgttacactggaccacgctttccatattcaggaacttgtgtcaatgctcccctcccacagaaactgggcttgcccttgtgacttgtttagattaacagg

SEQ ID NO: 541872 - DNA, 907 bp, Homo sapiens
gggcgttcccggcgctcggcaggccgcaggatgtgcctggtcccgggccgggatgcccatgcatggccgggagctggtctgaggccacagccccgcgggccgggccgcttccctccggtgaatcatcgctcggcagcggcggctgcccgccagtgtgcctgttagcagtcgcgccgggccctaggctcgtgggccccagccggagcggctagctgctggagtcggaccccggacctttctacttgctgctagttactggcctgcacgggaccagcagtgcatggccgaggcatccgctgtgccaaagcttggcgaagggacccggtgagtcgcgtggcacgatggggagcttggagctacaccaacggaagatggggccattcaagggatagcgcattccatagcccacgaggcacctaacgcgaagggctggcttggcagggaagagcggcagttgtccctggtgagggcccagggtgaatcagcttcacttttcccaaggggaacccacggttgcagttttcaccccgtggcctaattgcgcgctccactttcgagtggcccacttgtgtgaggaccttttccctagagggggcaacggctatttgggggtgatacaccatgtaagcttttccccaatggtcgcaaaaaaaaaaaacctgcgcccggaagacagggagatagaaatatccgggacaaggcggtggcacacaaggcggcaggccccaccccgccaaaggcgtgggcagagagggaaactatccggtggggaacgggggacgcctttagggaaaacgaaccaacccccacacaaaaaaggagtgatagtagcaaacattcgcccacatacatcatgtggaggaaaacggcggggcaaacaggagacccaccaaaaaacgacacacag

SEQ ID NO: 541873 - DNA, 159 bp, Homo sapiens
agtatgggcatggtgccaccaccaggtctgataatgtgtcctgggagccatgcccatcctcataggtctgtctcattgcccaccatcaggacacccttgtaggctgtggatagcgggaaagcatctccgggccatgggttggctggggatgaggacagc

SEQ ID NO: 541874 - DNA, 1083 bp, Homo sapiens
ggcgtgctggctgaggtgacgggccggactgccctctcgtgacggctgcggcggagggcaaaatggcggagtgcttcggcgtgccggggcggactcgggcgccgctagtagccgaccaccggttatttcttgccacttttgcaagggcgaggtcagccccaaactaccggaatatatatgtcccagatgtgaatcaggcttatattgaagacgtgacagatgattccagagagagcgagagtgagagcgagagagtgagtgcatgagcttgcacaagagagggcacgcacgcactgcggagaggacaagcgactacgacaacacatgggcacacatttcgccacacgtgatactcatcacccacatgctgcgtgactccgccactgactcctcgatctgtctgtcgccattccaatgctccactctgtaccgcatgtcagagctaccctctggtccacacacgtgttggtgtgcgcgccagcgacggggatacgaaacaagtaagcgacagaaaaaggaaagttgatggcagacgccaaagcgggaccagagatattgggacatcgacagcgcactgaccccgctcaaacgcatcgaagaacccctagaactaaagtcccggcatgtcgcaaactggcgaacccacggaataacgaagacgccccacatgcaacaaggggagatcaaacaacgaagaatcagaagaggagacatcactggggcgaagcaaagacccaaccaccgcagctggcccaatggaaacgaggcaaaccagcacgaatcaccgaaaggaaagctacccgggcaaacgaacaagaagtctccccaactataagaaaaaaaaaactaaccaaaacaaaattcataaaacaaaagaaacaataggacacaaaagcatgacagtgcaaggcaaacacacgaaaagcgcattaagaacctggagagggggacacccatggacaaaaaaagacactgcggaaacacaagaacaggaggaaacggaaaagggctcaaacacaagaaaacgcaccagaaataaggacacacaggcaaaaaacgagcacaaacaaagagaaacaaaca

SEQ ID NO: 541875 - DNA, 765 bp, Homo sapiens
caagcgccttctccgcacacggaaggcccacccaccagaagccgaagatgtcagcaggcgggccaagagccaagaccaccaggaagcggccacagcgggccacatccaatgtcgttcgcaatgtttgaccagtcccagatccaggagtataaggaggcttacaacatgattgaccagaaccgtgatggcttcattgacaaggaggacctgcacgacatgctggcctcagcgtggggaagaaccccatagagcagaatacctggagggcatgatgagcgaggacccgggtgcccatcaacttcaaccatgttacctcaccatgtttggggagaagctgaacggcacggatccccgaggatgtgattcggcaacgcctattgcctgcttcgacgaggaagcctcaggtttcatccatggaggaccacctccgtggagctgtgtcactcaccagtgggtgaccgcttcacagatgaggaagtggacggaagaatagtaccgggaggcacccaattgatccgaaaggcaagttcgagtacgtggagttcacccgcgatcctcaaagcatggtcgccaaggatgacgacgactaggccaggcgaggagctgaagaacgccgaggaccacaacgacacagagtacacgtggaaccagaccgctcgcagaatcgatgtccatgtcaccacctgcacaagagggacaatgcgtgaggacgaaccggcccaactcctcaacccatagttggacacgatgggcctcagacggcag

SEQ ID NO: 541876 - DNA, 146 bp, Homo sapiens
ccccgttctggagagagacagcagagtgctgatgcatgaatggaagtggggggtgggctgtgtaagtggccggatgggcagtgcagtgaaatgctggaacctcactaagtgggtgaaatgccccgtgcacgcaaaccctactgggt

SEQ ID NO: 541877 - DNA, 599 bp, Homo sapiens
cgttacgaacagcatactaacaccaagctgccagagtcctggatagtgcaattgtgtttaaagtgtcactgttctagtgaacacagcttgtcaggaacaaacactagaacgatttgacgtagaggctgctggtcaccttttgtgacctgaggaatcccaggcctgtgtgaaaagcaaatcttcacattgcagcacatgatgccagaaatagcactgaatcaagaaaatagccattgcggagctgccctctgtgagtcttgctgtccatcccattctattctgtactgtgacttcagttcaggaagtgtggtgtggtgtttaaaataagaggaaggagcaatgttgctcagtcaagtgatcagatcccgaatcttagatccccagttctaaggccttatcacctcccctgcccataggccaacaaccatagtccctcacattagtgattagcagactctttgtggacgagtgaatttcacaaacagcacaatttcagaagaaatcgagggcacaggccctcacttttcttcttttgacgcatcatcctgtgatgttgaactgtcgattgcaggatgctgatgttgtgcacgtcaatcacc

SEQ ID NO: 541878 - DNA, 257 bp, Homo sapiens
gaagggacaccatcaggcctctggctgaggcagtaccataaatgatccatttctacctgcatttcccagaggactagcaggaggccgccttgagaaaccggaccttcccaagccatcgcctgcctggtctctcattgtcactgccctctgcacaacctctcctctatcccactagagattgcctgtagactgcctcttgactgcttgagaatgcaggtctggccctcaataaatgcttcctgcattcttctgcctcc

SEQ ID NO: 541879 - DNA, 297 bp, Homo sapiens
agtaaagggcatacatttcctgctttcaccaattaaccactgaattgctattttttccctttggccagatagttaggtttttggttcccccccagtaggggttttcgcccaagattagggtccttttggaaagaatagtttcagtgtttataggatagatgggggaagaatctagttaaatttgcatttgggtagttggtccgcccgccctggttatatactcagggaaaatagatttggagtttctgtagccatttctgttaatagcaacctttccttaaaaaagtctgtttatca

SEQ ID NO: 541880 - DNA, 1166 bp, Homo sapiens
tttgatgttgtcgtcgtcgggttttgtttgctgggtgcttgctctccttgctcgtttgtatctgtagcacaccgcttgtgggaatctttttggtaggtcgcgttggggtcgtgtgttgccaacattctgtttcttggtcccctggttggtactgcctcggtcgttttgtgcttatacgcccccgtttttatttcccggtggctgcttccgcttcgtggtatcctcctttgggggtgtgctcttagttccgcgttagtttcccccgattggtttgtagaagaaaattcttatagggtccattggttcttcctagtgttaccgtgtgtgccaatacatgccttattaccgttgccccttaaggtaaaagtgtgttggggattagtgaggtcacaccgcatgaccatataccccaaggccacagggtcacatcctgtagtcaatattttaaagttttgggaattgtttttgtttgcctcctatatcactggaataaatggtaaagaggctgaatgttattactctaaggtggatttcttatgcaccgtaatatcagacatatagaatgtactttgttttactatttgtaagataccaaggtatatcaactgacatacatcagcttgaaacctgagataatgctaaaatgttctaattattttaaatgtttaaagaggacaaccatgtaatgttgctaaacatgaaaaatgtcatcaagtggaataaagaatagctgaaggtaacatttgggggaaattgagctgaaaaccaaaatatgagtattttgataccttttctttaccatgagactcttgactatgaagtcaaatttatgctaaaggggaaaaccacggaatttctgggaggaacctcgtggtaaaacgcacgagctatatatgcttccctcaatggtggagagtgactaaaattaaaaatacggttaaatgacgttttcctcaatgtaaaagcacttgaagtaaaatgtgttcttttaatgttgcacgagaaacactagtgtgcgttctagagaggagtcaccctttttctttaatgcacattgtgaaatacgcacgtctcgcatcctaagtttaaaatatttgagaatcctctatgggactctctgtaaatgttttaaataactgttgttttccaataaatattttatacta

SEQ ID NO: 541881 - DNA, 373 bp, Homo sapiens
tcgaaacagacagtggcacaaagcgggcacaggctggtgctacagcaaaacacattccctactttgagacccagtggccatgagggccatcaacgtgagcaggcgtcccgacgattgccgggatgcacatagcaggaaacgggaggtggagctgtacacgaattcctgaaacctatcagactggacaagaatgaccggggccaagggctcggcagaaagctgcagttgctgagggggcagtgagagttgagcacagagtccttcacaaaccaagaacacacgtaggccttcaacacaaattcccctctcctcttccaaacaaaacatacattgatctctcacatccagctgccaaaagaaaaccccatcaaac

SEQ ID NO: 541882 - DNA, 704 bp, Homo sapiens
gacctgatatgtgccatacccattacctgatttatgtgaaggctagttcgctcagactatcaacctagtctaaacataaggatgaagctcgtgaaggtaaagagcaatccgagtgtacctatgaacatcacagttctgatcatcacccgtgaatatcggtggagtcaatgagtaatcgcctgtcatccagctcgtctcagaacagcgcccttcagttatatctaaatccacttgtcacttcgtgactgacctcacaagatacggactgaacagaacatctcttggatggctgcggtgactccatcaataaacacttaatttgacaaacagatagtgtcagagttatctgctgacgataatacctgagcgtcttatctgctaggaaagatattgcgtatgtccattgataagactgaatagtaggcaggaataaactggttcaggctgctgaatgaggtatgttcgcaggttaggatgaaggaattctagtctcttattcccataagctgaaaagaaactccctgacatggctaatggagtatagcataggtgaactatataatacaggcatggttaagaatcaggacttgagaagtgatacgatcaataaagtcacggatactggctcattgaatccattggagggacgtcttggtccgggatttgcctaagcacttcctgacatattggacgataatggtagg

SEQ ID NO: 541883 - DNA, 1588 bp, Homo sapiens
  misc_feature (365)..(365): n is a, c, g, or t
  misc_feature (813)..(813): n is a, c, g, or t
  misc_feature (1588)..(1588): n is a, c, g, or t
tcggtcctggaatacctttttggcgaggtcacatataattctggggttataaaccttggaccgcgcacaccggggagggttccaagacgctggtaaaataaccaaccggtggggctcatttacccttatttggagtgtttaagaaaactcttctacaagtgtccggggaccattatggtgttaatgtgcccactttaaacatgagacacgcgtgtgagagacagaacagagatattttatcacagagcgcctactcttatctccaagagaggagtagttttacacatatgtggcgggtggtgcctttcacctgcgaattcacacacaatattctcaaacacccatcttctcccacacctgtgagnggcccttgagagaggcgagagtgtttctctctctttctccgctgtgggacactgtgagacacttcactccacagagagcacactctcagaggagggtgtctatacagccaaccagcggtgagagtttctccactgtgagaaagagccactatagacacagacacagagctcctcacagagtgcgtgcgcgtgtggacagacaaacaaacccgagacagagggcgcacagaaagtgtgcgctgttggggctgcaaaaaaaaagacacacacacctctcacacacacacgcccgtgcgggcgtgcgttgcgagacaccccacaagacgcagagcaccaaattttttctctctgtggggtgtgtgtgcacatttctcgaaggatgtgtgtctttttctcccccagcagaggtgtgcgggggggccccccggggtgtgtgtgtctgtctccnctctctctctgtgtgtggaggggagagcgcgagggtgccccccacacccgaggtgtggcgagccgggggggagccccacttcttctgtaacaacgaagagtaatagacaagaacgagagtcgcggaatcaatagatgccccaagcgtgcgccgcggagtaccaccctcaaaagagggggaaacaagctggctaccctcttgctgggcggggcgcgccaccccccaaaagtatccgccgatgatgaaaagctgcggggcggtctcgcgtgggggtggaaaccccccccgagagggaaacaacctctttccgtggggcccaactaaacaacaaggcttccaccgaagaacaaccgaccagggtagctcagaggggcgcagtatgagcggcacacaacgatccactcgcggcggagaagctctgcgtagaaaaccagcccgctgtggcgcccacacaaacaaagagagtgcggctgcccccgtgggcagacagggcaggggtggggcccacactgagagaagagcacatccttttctgggcggcccaacggaggtgtgagaccagctggtggagcagacggagtgtgtaacacaccagagcgaaacgagggggccggcctacaagagaaaagcccccggccagggagcacccacaggagagccccacgcaacacgtgcagcttgaagaagtcagcgcgggcaaacacgagcactccgaaacagaagaaacaccaacagcttcggagagaagagaccactcaggcacacgacatattan

SEQ ID NO: 541884 - DNA, 483 bp, Homo sapiens
atagtgagctagtcgtcacggtttgctggctgcgctgcggagtgagctggtgtgtccctgattctggccaccactgtgcagatacctggtccagcccagcgagggggcaaaagagcccatcctgacacagggcccctggaaggggcagccacccaggcacaatggctttgggctggggcttctgttaggaaagaccctgtgccagctgcctttcctctagctatgagtacgagagggtcccgcacccttccgagctctacttccccaaatttgcgtcctaatttctctcctctatccctcaggccagctctctccctgccccaacaactcacaccttgtttagttccctatagtatctgctctcccgggctcgccaaagggctgcccagctgctggagtgtccatgtggccaagactcggggcctagctgtagatgcccttcctggggtgggggcaggggggtgagagtgcctgcctgtcgca

SEQ ID NO: 541885 - DNA, 947 bp, Homo sapiens
gttgtcgcccgtgctgtgtgtcctgtgctgttctccttgtctggtcgttggtgccggttctccttcgtcctgcttgctggttcattgtcccttttcgtcgctgcggccctttttttgtcgtgcttgggggtttgccctgtgcggacctcctctgtctttatcctctgcatcatgctgtacgcatcctcagatctcctttgttgttctacgtcctgctcctcttcgcccgtactctggttctggtctttcaggctcccgcttcgttctgtttgccacctttctgtttgcttcgccggcgtcatggtcgttctgtgagctcatgtccctcctttcttccgtggtatctctatcgtgctttgcttctcccctttctgtccggccttcgtccagccccacggtctcggctgccatctgcatgtggctcagatatccgatggagctgcttttaccccccataggggctcatgttgtctgtgttcctgccagcctcatgtgtctcgcttctgccagctcgcttcccctaggacgggaagggtgcggctgtgcatctgggctacaatgccagctccacttcgtgcttccttgcgctatcccccaccccctgaccctccagctcctcctggccctctcacggtgcccacttctgttgggcctttatgcctctagaacctgcaggtggtgggtggctggctactcaagaaggaacagaggtctcttggggaggagtctgggtggtccagccctgatgattgtgccccacctcctgctgccccataaccctctcttcatgtcggctcttttcatttaccctcatttagagccattatcgcagatgactttagaaagatttacagtaacgaatggattcctatataaagatgattttgtataatcttcttgcagcaaagaaatgaatattaaccgtgttacaggattaaactgctctt

SEQ ID NO: 541886 - DNA, 187 bp, Homo sapiens
gtcagtctacgatagcagtctaggcaggtctctctggatgacacccaaatggcacatggggcaacacttacttgactctctgagccattctgctcgctctgtgaggacacgagggaaaaaatgtgttttcctagctcttggaagtcagcactgctggagcctcctccctgctggagggggccgcgcg

SEQ ID NO: 541887 - DNA, 141 bp, Homo sapiens
tgggcatggtggacatgggggtggggtggtctggaggcctttctctcttttcgagatggagcacccgcgaggcaatcttcatcttgatggtgctgtttggacccgagttactgagctggaagcgctggcctacagcacatg

SEQ ID NO: 541888 - DNA, 446 bp, Homo sapiens
ggctttgcaagatcccttgtcagttgcttctctgtccctccggacacgcagacatgctgtgaagcaactgccgacactctgcaagtccctgagcgaggatccacgctgggagacatgaacgcgctggcaaatggcaagtcgtgtctccagcccatgatgcagagacacatacaccccacagcacgcatcactcatggacacccagaccctcaaagtcagcgtggaccccactctcttcaacctcccagacccatcccagcccaaagccttctccctccaacattccttgaatcagatgaacgtgcctccatgcacagcagtctacacctgaagctgccctaaacgtggactcatccattcctcccataagcctctcccgggcccgggcccaactaccccttgcgcatgacatagccatagaaggagtccaggatgcacttgtgggc

SEQ ID NO: 541889 - DNA, 174 bp, Homo sapiens
gtacagatactaccggtctcaggcagtctgatgcttgatcaagccagttagataatattcattacactagtccagaatcttctgtttgtcctcatctgttaatctctgccttgcaagtttctcatcgttcaaccagttgcttacatgttgacaggcataggactcaagtgaatt

SEQ ID NO: 541890 - DNA, 802 bp, Homo sapiens
  misc_feature (18)..(18): n is a, c, g, or t
gcaggcttggtaccgccntgggataatgggatcgcagctgtgaggcccggagcgcctgcgggggctggccagagtgctttttgagtgttgctgtggtaggaatgggcggactgcgcgcgccccctgcgtcccgcgcacctcgagggccggtccatgctcccgacggctgcgggcttcagcatctgggtgccaggttggtgggcgtgctgggtgtccagtggctgcaggtgggtgctggactgatgcgcctggtgcctggaggctgatgtgcctgcgctgcggtggcttggtgacagcactggcatctccagagcagtgcccgtgtggccagcaaagggagtgccggcccgacgatgccagacagaaaatatactatcctgtaactgtagccacaaccgtcatcggttaatagcccggatttgtctatcgaccgatcatatacattatctacattcatagcccatgaatgcacaccctcaaatggaacatccatccattactaacactgctacaagagagcacatgctaggaaaagcataaacaagagatgaggacaacagcctaggaaatcagacaggcataccaataataatcaaaaagggaaacaccccagggaatatatagagaggagcccagatgcactagagaacaagatagcgattgaacagggagcccggcattgcatacaccaaaacaatatagtggccataaggatatgggggtcaaaacaccgttgtgcccccatggagatgaaacacccacattggaatagacccaaacagacaatggtcacatttcacag

SEQ ID NO: 541891 - DNA, 337 bp, Homo sapiens
  misc_feature (90)..(90): n is a, c, g, or t
  misc_feature (186)..(186): n is a, c, g, or t
  misc_feature (198)..(198): n is a, c, g, or t
  misc_feature (219)..(219): n is a, c, g, or t
  misc_feature (241)..(241): n is a, c, g, or t
  misc_feature (264)..(264): n is a, c, g, or t
tcagtgtccatgtgtcaatttagggaagaactcaggtactgtttgggtcatatatatagccctggccagttgctcttgccggggtatggnaaactgattagccagcttctgtcatctgtagtgacataaaagtagtgacccttgatagctttctagtccatgtggattctagagaagggaatattncagaggaaacanggggcaccaaaacaacaaatntcaagtatccatgttaagacangggttttttctttcccctatggnttaagggccagtaagaaggtctttttaaggacagtcagttgtgaattgaaggggtaatcccggttttcagctt

SEQ ID NO: 541892 - DNA, 270 bp, Homo sapiens
  misc_feature (93)..(93): n is a, c, g, or t
  misc_feature (120)..(120): n is a, c, g, or t
cgtctgcaagctgaggcacaaggaagccaggggtggatcagtccgagtccccaaacctcaaaagtcgggaagccgacagcacagccgtcagtntgtggccaaaggccgagagcccctggncaactgctggtgtaagcccaagagtccaaaagctgaagaacttggagtctgatgttcgagggcaggaggcacccagcatgggagaaagatgaaggcctgtagactcagccagtccagtccttccacgttcctctgcctgtttttatcctg

SEQ ID NO: 541893 - DNA, 783 bp, Homo sapiens
aacaacctatttagctgttccccaagcttttcctccgaccccctaagaatccccctcctaatactaactacctgatctcctaccgccatcacatatcatggtcaagccaagcgccacattatccagtgaaccactatcatcgaagaaacactctagcctcgtctatactaatcgtccctacaaagtctccttagattataacatgcgacagccacaggaactacatcatataatatatcattcttcgaaaacgacagcatgatcgcacctaccttgagctgatcatcagcccgatggaggcaaccgaggcgagaagcgcctgaagcgcaggcgacatacgttcctgatgctaacaccgctagtaggctcgcttcccctactcatcgctactaattgacactcacagacggcctaggctcactaaagcattcatactaactcagcatctcagtgcccacgaactagtcgagacctcctgagccacacaagctgactatgactaggcgtccaccatagcttcgatagctaaagatacctctttagcgagactccgctgtagtgagtccactaatagcgcaatgtggaagcccccatcagctgggtcactaagtacatggcccgcaggacctcttgagaactagggcggcacatggtataatgacggctcaggactcattctcaaacccatgaacaagacacattagccaacacccttcctatggacatcccgatgaggcctacataccaccaagcttactctagctacgaaaaacggactaacag

SEQ ID NO: 541894 - DNA, 382 bp, Homo sapiens
tccataaggtgtgccaggcactagcagcacacctggctagtttttatatttttagtagagacaggtttcaccatgtttgtcaggctggtctcaaactcctgacctcgtgatccgccagacctggcctcccaaggtgctgggattacaggcatgagccaccgtgccccgcctctttttttttttggagatggagtttggctctggtggttcgggcgggagtgcatgggtgcgatcgggtgtcgctgcagcgtctggctccggggttcgaggcattctcctgcctcagaataccgagtagtggggataacgggtgccctccaccactccgggctaatttttggcatggtaagtagagacggggttttaccatgtgggcacacat

SEQ ID NO: 541895 - DNA, 175 bp, Homo sapiens
gacggcgacttactggctcatttgctttcaataaaaggatcaaagcagccaaaatcaatgtttcacccgccgtcgagtttgaatatccagaatcttttgtacttcttgttggttaatttgtttatttttgtaaaaaataaaataaaattagttaataaaatgatgtttcacagca

SEQ ID NO: 541896 - DNA, 304 bp, Homo sapiens
ggacgaatcacggcggtgtaagggcgatatagtaccaggggtgaacggaggacggtggaagggagtcatcagagtcaccgagcggtcgcagcgctacatcgatcacccacggtggccttcctccaggggttcggcggctacgggagccagtaattctccggctaaaatatctggtagcatgcaagttaaggaatactgagcccaagcaccaccccaagatatatctcctctatggaagtcagttccaaccaaaagtaacagcagtctttccagctggggttcgttcacaatctcacacagatga

SEQ ID NO: 541897 - DNA, 1228 bp, Homo sapiens
gggacaagttagagtagaataatttttcagacgccaagtgcagtacagagtttctgcaaatacagacaacaaactgcattgtcagggcaatggatttgaccagtggggctccaggggtcagtccattggtaactaatggcaccttactggcaggactggttgtgactgcagcgggacgcattgcccacatttgacgcttttccttttttcaccaggggacttgcacgaccccgctgttcggggcgacctggttttggtgggcactaacactgtaccacctggcctaccttcctcttctctctcttctctgcctccttcgttccggcgcccctgcgcgccgttctcccccctgcgcggcccgtgggtctgcccttggcggtcgcccctgcttctgcgcgcgttccccctggggcggaaccctgcgtgcgccttcccccgggtgttctcaccgtgcgggccattcctgtcgcctgtcgtcctcccgcctgcctctcgggtcttgccgtttctccgtcggggctctttgtccgcactcgcaggcgacacacgcggtgggttttcattaccctcgtcgtcgtatgtgctgtctttgcttacctgctggtctcccgtctatccgcccttgttgtggtcttgtgtccctatttgcgttctctctccgcttcagtagtcttccctgagcctcctttttcgcccgcggggttggttccctcgccacacctccggcgtcacctctgtagccctgtgtctccctcctgctacgcctgcctttctccccgccccgcgccggccactgttgcgcgccctctcaggcgcgctggcctcgtcgcttgttccttgtggttttgcacccctttttctcctccacccccccccagtcgggcgctcctacctccctgtcctcgttgtcgtctcttgcgtgtagtccgctcctctgcgtcgttgctgactacccctggctgtcatagtctcccggcgacactcctcttgtggtggccctccctccgcgcgccgcgactcttttctcgtacctctctcgtcgtcgccgcacctttcttgttctgtgtgctacgacgtactctctcgtctgcttgttctgtccacccacagtgagtgtgtgtgctctcatctgcgcgctcttttgtctatcgttgggtgttcctccttcctctactgacgcttgtacagtgtatttggttcgtggcggctcagtcttcttcgtattatg

SEQ ID NO: 541898 - DNA, 149 bp, Homo sapiens
gccactaaactccccacagtcagccaacattacaaaaaagataggtccatcatcctcattgaatttccacaaacctccccaatcacaagtattctcagtggacgtacgaactcacatttcacagatctcaaacttgtcttcaacatcta

SEQ ID NO: 541899 - DNA, 258 bp, Homo sapiens
ttagaatcgagctcggtaccgccaccttatgccgggtgtgttggggacattaggtatggctggtgggcggggtatctcaaagaacatcggagatgtcagagagactaggaaggcgagaaccttcgggaatttcacagcggctgggaatttcaggaaggttgggcacgtcaggaattttggtaaggcagggaatgctgggcatttcagctgcaatggaactttcgagcccttccaggacgtggagtggggaaggccccc

SEQ ID NO: 541900 - DNA, 217 bp, Homo sapiens
gtacagtattcgaacttgagctcggtaccagtatctattccgtgatctcattgcgtggcacaagtcttggttcttagacgcgggactcgcgcatattatgaacgtttctacatggcactagaaccttggagagcattatcgtgccatgttaataggaaatctgagatgatttattagaggaaagttaaatgggctgagtggaaaatgatgaatgaag

SEQ ID NO: 541901 - DNA, 304 bp, Homo sapiens
cttgctgttgaattctacagatgacacaaatgaagtttactgtgcccttaataccaggttgggctaccaaacgctacatggctcccgttaattgctggacgatagcctgaacaaataccacttccagccctacttcatggctgacatctacagcttcggcctaatcatttgggagcatggctcgtcgcttgtatcacatgagggatcgtggtagaataccatttgccttattacaatcttggctaccgagttgattcctgtctttacgaatgatatgcgtcaggttgtgtgtttctacgtttgc

SEQ ID NO: 541902 - DNA, 683 bp, Homo sapiens
caagatatggggctatttcaggtctttaaaatacttaggttcaaaaggaatggttgttttattgaaggactaaaaaaggggaaccaaagttcaccaattcgacaaagctaggtggatttgaaaaaggattcaattcgaccttttagaccaatatactagtcactgccattggaacctcaaaggacgagttatgggcccgtttaaatgcagttaaaaggagattcagcaccttagttaaattcagtacgttagaaggtttatgattaaggagaagtgccccaaaattggttaaaagcagatcctttcttgggataaaggaatccatcttttggggtaatatggacctggaggaccttcattctttagggggactttaatccattacggttctgatccgtgctatataataaagtcagcctggcttgaaggttttggaacatgggtatgtggaggcccttaactgcaattgtcatatatcgttgccttgggaaatctcatttgcgggggatctaagaggagcaggatatcaatttggatccagaaagtccttgtcggccgcttggacccagccacttttgaactcggccaggtttagcatgccgcccgaattcggcttactgtgccaatcggcctaaggtggagcggttaccaattctgcccgcctttttacacgtcgggcttgg

SEQ ID NO: 541903 - DNA, 140 bp, Homo sapiens
cacccaggcgcacttctggtaccccatctaccgtcgacctctgctcatgacatcatccccaaaaaacagcccagaaacccaaaccatctcaacactagctgactcattgtttctcctattttctcctttgctcaaccgga

SEQ ID NO: 541904 - DNA, 110 bp, Homo sapiens
ggaggcgaacccctgaccccagcggacgccgcgcccagccttgatcccccaaccccgggggctggcatgagcggccctcggcggcaccgtggggggtggagtcgcctccg

SEQ ID NO: 541905 - DNA, 884 bp, Homo sapiens
agcggctggagctctctcggcccggcaggtttcgctcccgcccctccggccttccacagctgtcctggccgtcagggtgttcaaggcgggacacaccaggcgtagagatccagcgatcgggccccgccgtcaggtactagcgctccaggcctaggcggagcgcgggagcccgtaagcagctcagcatcccgagccaggcgggctgtccaggggcacttccccgtaggctgcattcccaaaggtctcccgagggcgagggctcatgatgtcacatccgccatggcactggtgacgctcctcgataagtgctggggcattgcgacggggtgacatcacatgctatccggcgcccgtgatgtcataatagcctgtaagttgctatattacatggagcgatggcgttatttgcaagttggcaatgattgattaatatgtgtcagaacccgtaaagcgtgaggaaattaagttgggaatttatgtaaggcacatggcagatagatggttgttccagtcctagtagattgaatgtgtctcagattcatggcagagaaccatagggtccttggactgtcagagaagggtgggggacagttactcttctatctgatgagtgaatgaacaagatgcattgggtgcttagaacatgtgagctgccagagccttaaacgtaacgggtgattattcatgtaatatcgaccactgacttgtcacttggtaggactgggccctgtgcgaaggctaaatgagacaccaggagaacacaatacacttctcattcttcatgactagccttatgagggcgcattataaggcattccagtcatacccatttgcacaaatcggagaaacctggggggctgggtgcttattccttggaattaaga

SEQ ID NO: 541906 - DNA, 117 bp, Homo sapiens
cccgagccgacaggaaggagcagagctgtcgaatacctggatgcggctgttgccccagtcagccacaatgatgtttccattggagtccgacagctactcctgtcgggctagtcgggg

SEQ ID NO: 541907 - DNA, 304 bp, Homo sapiens
  misc_feature (194)..(194): n is a, c, g, or t
  misc_feature (286)..(286): n is a, c, g, or t
  misc_feature (295)..(295): n is a, c, g, or t
agaggatcccctcgaatcgacggtttctcctaagttcgagataggaactcagtcagccaggccctaaactctttcctgtgctgctatggtgccgtctctagagcagagctgtctctagagagtcacagcgacaccttcataataaaatctgtgtttacaggccccgggagcagcggctcacaccttctaatccnttagctctttgggagcacccaggcgcggtggattcacttgacagccatggagttttgagaccgagccggggcaaaacccatgtctctacaanaaaatacanaatattagc

SEQ ID NO: 541908 - DNA, 330 bp, Homo sapiens
gcacacccgggctttcttctctacccatctagggactacagcccagaagaatgcataccacagcacacatgcatgagtaagtcacgactactctcgctccccatgatatccagagcatcacctcaatcatttctatgattctgattaccttaaaactgttacacatgtagtcccagcactttgggagactgaggtgggaggattgcttgagcccaggagttcaggaccatcctgggcaacgtagcatgacccgtccctactaaaaaaaaaatttaaaaattacctgggtgtggtggcatatgcctgttgtcccagaagtgcgcctgggtg

SEQ ID NO: 541909 - DNA, 201 bp, Homo sapiens
gagctcgcgcgccgacattttaattggaaccatgtatctctgggtagctacaaaattcgtcagggatttcatttggcaggcatgtgtctgagcttctataccgactcagggtcagtgtcatctttgtgtttagttcatccaagggtgttaccgtggtttcaatggaacctaacctcattatttgtgtcttcagtgttggct

SEQ ID NO: 541910 - DNA, 167 bp, Homo sapiens
cactctagaggaccccgctactagtccacggtgctcttttttttttccacggccttcccttaacggggaggtgtttcaaaggtggtctatcaaaaggttcagggtttcccttttttctgcaatagcttggacatcggttctggaattctagccaaccggggactagg

SEQ ID NO: 541911 - DNA, 479 bp, Homo sapiens
cccccctagaaaggcctagacggaagtagtgtagtagaatatactaacctatttgtgtagtaatataaaaggtggtaagtcatattttaggctaatactagtgtcatgtaaaatataaacattatgaaggctaactatgatatggtacataattccaggaaaacctgctactggatattactatgaaatatacttacctgcttgtatggctataatatggcttgacttctatatagactcctttctccatctgttttgtaagaggcacaagaggtcgtttgaggggcatacttgtacctttttgtttattttattaatctttttgagacagggtctccctctgtcacccaggtaagagtgcagcgttgtgatctcggctacactgcagccttgacttcctgggttcaagcaatcctctaccctcagcctcctgagtaactgagactgcaggcatagcgccaccatagcctggctaataa

SEQ ID NO: 541912 - DNA, 293 bp, Homo sapiens
gggtcgtaggctgagatttgccagggagcagaggagctgcgagaatggcgggtataggccctgccgggttatgcggctccttcaggtatctccgtcacagcggcagactcagataattctgtgcgccagattacctcctagtagaaccaccacatcatatggtccctcttttttggcatcttcaaggctggcgtcaggacaaatgaccacatcacggctagactgtactgggtctattccagccaggccgtgcaacggtgaccttaatcccaggtcgcctcatgtcatacatg

SEQ ID NO: 541913 - DNA, 210 bp, Homo sapiens
cggcggcccgtgttgtgttttgtgctggggccccgcgctaaggcgaccccctcccccggactgacttttcctataagcgcttctcttcgcatagtcacgtagctcccccccccccctcttcctgggtctcccgcaagttttatactctaatatttatatggctttttttcttcgccaaaaaaataataaaacgttttttctgaaaagcca

SEQ ID NO: 541914 - DNA, 263 bp, Homo sapiens
  misc_feature (75)..(75): n is a, c, g, or t
cgagcgcctagcacttcccaccccggaggaagacaccaagtgtccgccacggcgatgactgcaatcacttggtcnaagggtgacttcaactcctcaggctgacagtgaaagggaggcaagccctctggggagttctgtggaaccaggcaccgaagaaaaaagtttaatcagtgataaaacagctgaatggattgcagaggatgatgatgacgtgtttgtggcttcacgcacaactgaagatttatttactgtgatacacaggt

SEQ ID NO: 541915 - DNA, 762 bp, Homo sapiens
ggtcttctcgggttagattctctcaggttgaggcgagaaagggatacccccccccgaaggaagtccttggactctgtgtgtttttgcctcgcgctggatcccgcttggtcccggagtgtttctgtggaaaacccctaaagattagcctttaagaaaaggaattagaagccatgtttcggaagaccctgtattaccggtacttcctccctttgtaagacactgagtccgaaaccactacccgtttggtttcttgaaagatcccctgaatcgtgtggcacacttaacttgggcgaatgggtcacggaccccgttcttgagacccgcgtggaaggaaaaaatcccagtccccataattttctcttacccaactaatgagaatttggccgatccggggataatgaagtttacccaactgggtgatctccagtccaaaagacccaccatggccccagaatatccgtattccggcccggcctcagagacctggcataatccaataatagtgaaaaaggggtctcgaatttatttggaagggaaaattagacttatggtgaaaacctggataaaaataatgtgaggcgacaagcaacccccaatcatagctgataatattatatttctgagtgacccagacgaaagagaaggagtagaaaggatgattctttcttttggcccatccatttggtcaccagtcttccatttcccagtcatgtataatctttatggcttcccaggaccagaacctcaatacttttttacgta

SEQ ID NO: 541916 - DNA, 159 bp, Homo sapiens
ctgataagacgacagaagggacagactccagatgctgcaccttaagagctgtaacactcactgtgagggtccgcagcttcattcttgaagtcagtgagaccaagaacccaccaattcctggacacaataggactctggtttctaaggggtgataattgc

SEQ ID NO: 541917 - DNA, 145 bp, Homo sapiens
  misc_feature (9)..(9): n is a, c, g, or t
tccctaagngcgagcaaaaaacaaaacaacaacaacaactaaaaatacatgttatagaaagaattcagagtctcggggacagtttctatctacttttcctttcgccaatatagaatagggctatggtataattcaaatatattac

SEQ ID NO: 541918 - DNA, 125 bp, Homo sapiens
gcaagggaggcagaggcacacggaagggcaggctaggcccaggcctcagcttctgaatgatgggctgatgccagccttggctttgggtgaggcctgtcccgggccttgtcctgctgtggcctggg

SEQ ID NO: 541919 - DNA, 90 bp, Homo sapiens
actcacgtgttggctcagtaaagatattaatattcagtgaagtattatgtctgtcttatcctttgagtaacaagatgctaacacactttc

SEQ ID NO: 541920 - DNA, 532 bp, Homo sapiens
gccgggcgcggtggctcacgcctgtaatcccagctctcagggaggctaagaggcgggaggatagcttgagcccaggagttcgagacctgcctgggcaatatagcgagaccccgttctccacaaaaaaaaaaaaaaaaaaaaaaaaaaaaaaagtgtgtggggcgcgcgcccgcgggcccccgcgagagagagacctttcagaaacccatgcgcgggggggcgcgcggggccccagaggagggataagaggagacaacagtgggcgccaaagagcgggtgttcccagagaggagaacaccggcgggcccagaggaacagagagggcgcgggggatctctctctcacaccacaatataaaaaggccccggggggggggcacaaccgagagagcggttccgtgagagaacaaaactccccagagagagggggagttcacggagaggggcgcaaaacgaggggggagacctctaatacaaacgagggggagtccacacagaggggaagaccccgagaaataccaaaaattaaaggc

SEQ ID NO: 541921 - DNA, 155 bp, Homo sapiens
  misc_feature (23)..(23): n is a, c, g, or t
  misc_feature (115)..(115): n is a, c, g, or t
  misc_feature (120)..(120): n is a, c, g, or t
gtgaacatgtaaatataaatctntcagccactacagccatcaaacgagagcatctggaagaccagccagcttggaagttttacagcaataatgttgcagtggaatattatttgtngttanggtcatcctcctcccctttctgtttttttaaatca

SEQ ID NO: 541922 - DNA, 130 bp, Homo sapiens
gaaagattggggtcatccaaggacacaggttcagaagcatatcatggtggcagtgatccaaacccaggtatgtcatttcttcctcaaaatcccattggctgctctgggctgggcagtgaatatggctgaa

SEQ ID NO: 541923 - DNA, 772 bp, Homo sapiens
gccgaggtgggcggatcacctgaggtcaggagttcgagaccagtctggccaacgtggtgaaaccctgtctctactaaaaatacataaatttagccgggcatggtggcgcactcctgtaatccaactgtacttgggaggctgagggcaggagaattgcttgaagtctgggaggcgaggagattgcagtgagccgagatcggcgaccacatgctactcctagaccgtgggcggacaggagtgagactcctgtccccgtccaaaaaaaaaaagaaatcaagaaggaattccactctcctaataaacggcctaatggtgattcaccgcagatgattatttgtaaggaccctggtggttaatgatttccgagttccagaagggttgacgtttgacccggagtatactttccatacttggcggggctaaagaagaaaaccgcccaggggtgtgttatggaccccgccgtgggacttgggcgcctcaggtgtgcattgtgttgaatttgttcttgttctccatctggtcccgcctctgtaacacgggggttcgtactcttgggtcaattcgcgcttcttagacgcgtggtctatgggtttacatcacaagaaataatggtgggatgacgtgggtcggccagataagatcttctggcttttgcccaactccacaggaaatgcgttcaaggttaatgggacgggagagtatcccgtttgggtagaagcttcgaataagggagggacaaagcaaaggggaacattcttggctcaagaaggcg

SEQ ID NO: 541924 - DNA, 193 bp, Homo sapiens
ggatctctacacggatccccaatcatgggggtctggagagccaggtgtttctcagagaggttagagaatacctctctttagtctccagcgtgcatgcctcctgtaagcactattactgttggggagaggtgagtttgactgccatcttgtgctagttatgactccgacaggtatgtgtaggagcttcgttctg

SEQ ID NO: 541925 - DNA, 819 bp, Homo sapiens
  misc_feature (54)..(54): n is a, c, g, or t
  misc_feature (82)..(82): n is a, c, g, or t
  misc_feature (88)..(88): n is a, c, g, or t
  misc_feature (92)..(93): n is a, c, g, or t
  misc_feature (97)..(97): n is a, c, g, or t
  misc_feature (109)..(109): n is a, c, g, or t
  misc_feature (143)..(143): n is a, c, g, or t
  misc_feature (148)..(149): n is a, c, g, or t
  misc_feature (162)..(162): n is a, c, g, or t
  misc_feature (172)..(173): n is a, c, g, or t
  misc_feature (213)..(213): n is a, c, g, or t
  misc_feature (215)..(215): n is a, c, g, or t
  misc_feature (230)..(230): n is a, c, g, or t
  misc_feature (234)..(234): n is a, c, g, or t
  misc_feature (242)..(242): n is a, c, g, or t
  misc_feature (248)..(248): n is a, c, g, or t
  misc_feature (253)..(253): n is a, c, g, or t
  misc_feature (269)..(269): n is a, c, g, or t
  misc_feature (280)..(280): n is a, c, g, or t
  misc_feature (284)..(284): n is a, c, g, or t
  misc_feature (286)..(286): n is a, c, g, or t
  misc_feature (289)..(289): n is a, c, g, or t
  misc_feature (310)..(310): n is a, c, g, or t
  misc_feature (324)..(325): n is a, c, g, or t
  misc_feature (375)..(375): n is a, c, g, or t
  misc_feature (482)..(482): n is a, c, g, or t
  misc_feature (500)..(502): n is a, c, g, or t
cagcagagcgacaccctagaccgggccgtagaggcgccgatgggcctcctgagngccgatgtggtcagccaactcgtcacantccggnttgnnctcncacatcctcccncctgggccccaggggatccgggtaggggactggngcccnnagacacccgacgnggtggcatcnncccccgtgcaaaacccccatcccccccctccctacacatngngctccaggccgcccnccangccaggcngcctgnccctncaccacaacccagacncgccactcccngccncngcncccccacagaccatcccgganacgcagggccttgnncagctctgccttttctctcaccccagccattgatacaggtagcgcctggntctcttcactacctcgctgccctcctgcttggacacaaaggctgcacctttgctggactctgcaccgctgggcttcgcacctgcaaaggaaaggaagcctggttcancccagctcatccccaggnnnctcatcctccttcccctgcgtctcgggcagcttgctcttccctcctctccctctgcaagggcagagctggggcaaatggattgagcctgcaacaaggtggttagactgcaaagggactgccagccaaaggggtgagaagaggtgggccatggtgcttcctcctctcagcccccactgcaatgcggcctggggggaggtgggggcactcacctgcctggccagcgatgcaaagtgcggccagggccaatagggcgaggagtgtgagggctctcatggtgtctcggtggctgcgctgggctgctgctcaggactcagct

SEQ ID NO: 541926 - DNA, 308 bp, Homo sapiens
  misc_feature (45)..(46): n is a, c, g, or t
  misc_feature (133)..(133): n is a, c, g, or t
ctacacgatcttatgcttgggggcgaactgcaggcagcgacgtanntccaggtctccgtgcagcccaacttccagcatgacaagttcctggggcgcctggttcagcgcggggcctcgccttccaactcgagcntggctccgggagcaagaaggcggcgttgtccaatgtgcaagctctgtggtggcccctgccacgggattggtggccctcaaccctgaccctccacctttcctcagggaaacacccagtgtgaggacccgaaaccaatgctggctgaagcccgggggggctcccctcgggctccaaa

SEQ ID NO: 541927 - DNA, 327 bp, Homo sapiens
cctggcttgctcaggtctcccaaagtgctgggattacaggcaagagccagcacatctggccatgtccacgcacagttttgttggtaccagaagtgcagaggggtactcggagcctctaaggccctccctcttaggagtgcctggccctttcctaaacaggagggtccacttccaggagccttatgtcttgggcaatgctcctcggcgctgttggaatctagcgccctctccagtctgacattggccctgaagggggcctgataattgaagagcacttaacttttcctggctctaagtggcactgcatggcctcacctcatcagtcac

SEQ ID NO: 541928 - DNA, 288 bp, Homo sapiens
gacctaagttgaggaacaactaatgaacaattattgtattgaactattgttagatacagctaatcacacatacaagctgacgtgcacaatgtacctcattcgcacacgtagcatccttcaacaggaccctataaaactttcctccagcccttgcctctttgcaggtagccccttctctgctgagctgcccactgcaacatattttcacaatttctctaataaatctgcccttctttacctacaactatcttggtaaatggctttaccacctgcaaaactgaccctagg

SEQ ID NO: 541929 - DNA, 714 bp, Homo sapiens
cggtcgcgaagacgcattagtatgatatggctgtgggcttgtcatagatagctcttattatttgaaatacgtcccatcaatacctaatttactgagagtttttagcatggagggttgttgaattttgtcaaaggctttttctgcatctattgagataatcatgtggtttttgtctttggctctgtttatatgctggattacatttattgatttgcgtatattgaaccagccttgcatcccagggatgaagcccacttgatcatggtggataagctttttgatgtgctgctggattcgttttgtcagtattttattgaggatttttgcatcaatgttcatcaaagatattggtctaaaattctctttttttggctgtgtctctgcctggcttgggtatcagaatgatgctggcctcataaaatgagttagggaggattccctctttttctattgatgggaatagtttcagaaggaatggtactagttcctccttgtacctctggtagaattcggctgtgaatccatctggtcctggactctttttggttggtaagctattgattattgccacaatttcagctcctgttatgggtctattcagagattcaacttcttcctggtttagtcttcagagagggtatgtgtccaggaatttatccatttcttctagattttctagttatttgcctagggatgttggagtattcctgatgg

SEQ ID NO: 541930 - DNA, 952 bp, Homo sapiens
ggagtgccatccacctgcccaagaaaatgcaggaggtggtgaaagactggtagccaggatgccgaccactagccagtggagatgctgagcccggccatgagaggcgagacctgcccatccagtggtcaaatgccatgtgagtgccctggcgagcgggagggcaccgccatgggtgccctggtcgtacactcgcatgtcacagggccagtggctaatacagacgaggcaatggcgcctagactgacgaaacgagagctctgaagacaaaagcatgctccctggacattgacgagggacctgttgacatcagccatcaatggacttgtcaaggtccaatgctgaaatgctcacagaagcagtgtgcagtggatgcccagtggctgcgtgcaggaagaacggtcaggttcatgccacagcccaagacgcacttcttggagcagctgggcgggcctccggagagactggaaagacaggggcccgacagtgctgaacgagctgcctctcctaagtacaagagacgacagtggcgaggtgtcctgtggaagaaaccccccagtgtctttggcatagcacggcagagaggatgaggcacggtagcggtgccagcagagccagtgaacgcgatgacccttgatccataccgtggtgcagtgaagaaccgtactccgaacatctgcacattccgacagcgggacaatacaattccaccatggaaggtcccaagagaccaaagctcactagacccgagatcacatgatcatgtatgacccgcccaggttacagctggtacacggtcgacgacagtgcatctaaaacgggatgcttcacgcaaattttagggcgggcacgcggccagggtactccgtgcagcacgtctagaacgcttcatggcacagggcccccaccgaactagaaaactgtggccaccccaggccaagagagcgcatgggac

SEQ ID NO: 541931 - DNA, 111 bp, Homo sapiens
ttgttctaatgtagaggaatggctcctaattgcattattttttaatctctatagttggatactcccaagacaaaattctttccagaactagtaagaatgaagcaagtaaaa

SEQ ID NO: 541932 - DNA, 303 bp, Homo sapiens
  misc_feature (10)..(10): n is a, c, g, or t
gttttcattnaggaggtgcgtttatcataagggaggtgtatgcacttggttgtgtctgactgtctttttttttgttttttggagagacaagagtctcgcttcgatgcccaggctagagtgcaatggtctgatcttgactcactgcaacctctgctttctggcttcaagcgattctcctgcctcagcctcccaagtagctgggattacaggtgcataccaccaagccagactaatttttctatttttagtagagacagagtttcaccatattggctggtctcaaactcctgacctcaagtgatc

SEQ ID NO: 541933 - DNA, 247 bp, Homo sapiens
tttttttaaaaaggggggggtttttttttttaggttttatgaaacccagaaaggcttttttttaccccgcggttaaaaaaacgggtccccaaacccttggggaggggaaaaatttttaaaggaaaaaggggttagggggccccaaggcgggtttttttttaaaaggccaagctattttgttgggaaagttccttttaatgcccgtttttaaagaggggccccttccaaggggtttttttccccccca

SEQ ID NO: 541934 - DNA, 1785 bp, Homo sapiens
  misc_feature (1496)..(1496): n is a, c, g, or t
cttcagagaagaaaatcttcattggcctcatcccccatgaccaggtcaactttgtcaacggcatccggctgtgtcattgacaaccagtcagcgaggtcctgcatcggaacctgtgagcatggcgcagatgttccttgaacacgcggcacgtacgcgttggtcaggagtaaagagtgagggatgacctatgcatagtacatggattccatttagtcacattggtctgagtccatcatgtaactttcccccttggattcacatgatagacagtatgagacttgagcatgctaccatcattagcaaactgaagtagtattgggcctcaaaggtcataggaagcctcctaggcgactccacatgacatccattgtcgcaactgtcaggatgcaatacaatctgtgtatcgtctgaaatggtgacatctttgcgagacgataggagcccgatgtctgggttggaacgataccagtgcgaagttgatcgcggcagcgttggtgcagtggacattatgatcaggtgaacttggggtggacctagtaaccgcttgacaccgtggatagttgggatgaaagtttgaggtacgataatagcaccttcctttcgatggggatcatggactacaatgtgctgtaaatcggacgtagacccacgaggtagagagcgaaattgcgtttaggatgtcaataatgggagacgggacgcttatcaagacagagtcccagatttgaatgtacgaacaggccggtacaggaaagatcaagacaactttgggctgcgaagtcaatctgactagcggaggggaaaaccaatgtataataagactagatgggatgcaggcaaataatattgcgcggaatataattacccgcgagatatgaacttggtgagtgcagagagaaacaccgcgcgcagtgtagtgaccgacccgacatgtgtctgttgccagatagtcaggtaggattggatactagtagctatgcacaagggctttgagaaatacacgtatgaaatagtccgcgaaatagcgatgtggtaagcaataggagattcaccccggtgtcaacacaactcaacgtaggtgttggtagcgacacaccaatagctgagagattgacgtatactacagatcataagacaattgtagttagtaggagcgaaaaatcgaacgacatatgtgcaagatgaacattcagtagatgcttttacattgcatcggagcccaagaaattggtcatcagggaaatcatatacagaatagtagtatttcgatccaggacactatatcgatggatcacagactaacttatagagtaaatttggtgccacagagtcgccaaaaagatagactataccacgtagaatatacaaagcagttatcgcatgcggaaaggagcctaggacaagagtaacactagcaaggatacaaccagaggatcttatgcaagagctatgtcactctcacttgtgcactaaaaagttcccgtaagagtttattntgctcgtagatgtgactatcatagagatggtgtatgaactatagattaggtggctcgtcatgagacaagatgtgatccactatagaaattcagattaagtacatagagtgaaaacgctcggaaatggagatttcgaagacccacgtgagtaatacaagtgacagtgaatgacgcgagggtgtgtagacccaacaaggtgtgtgcacgaggaaaatggtaagcgaggagatgagagacgactacacatattgccaacggagtgagacatacaacagagggtaggcgcgca

SEQ ID NO: 541935 - DNA, 180 bp, Homo sapiens
aatcgcacgatgtctcagctactccggaggctgaggcaggagagttgcttgactgggaggcggagattgcatgtgagctgagattgccccactgcactccagcgtgggcaacagactgagactctgcctcaaaaaaaaaaatcaaaatttgtatcaaaagtcagctgaggaccatcgttg

SEQ ID NO: 541936 - DNA, 177 bp, Homo sapiens
ctcaggatcctatgcaccattccgatagtaataggaaggatggtggaagtagtcagaaacttatgttgtttatacgtggaaatggctatatcgtggagctccgattattagcggtacgagtcagttaccaaaacccccaatcataatgggtattactataaagaagattattacaaa

SEQ ID NO: 541937 - DNA, 131 bp, Homo sapiens
agcctaaccctaatgtagcgctcttcaggttctaaagggattctccgtttaggttccatattgtacacgtatggaaaataatctgcagaaacgagctgtgcttgcaaagactttcatagttcccaagaatt

SEQ ID NO: 541938 - DNA, 276 bp, Homo sapiens
tggcccaagcgcaaactatctctatacattatcacactaatccgagacgcgtgctgttgactatagagcttggatcccagaactctctgagacctagggccctggtagcacacaccgcgcctatgctctgcgccaccatgtgagtgcgaatatttcaggctgactgtaccacctgttgaccatgccctgagaatggtccaaagcgctctgttggcttcgctaaatcgaataaatgctcttctacacgtaccctgtcagagagtgacacttgggtcc

SEQ ID NO: 541939 - DNA, 147 bp, Homo sapiens
accttctctaaaaatgaaacacggtattcacctgtagaacatcttttcaaaatattaagccacatcagctatgttccacttcatttctgagattttttgagaagaatttttgaaccagaatcaattagttgattaaccatttattct

SEQ ID NO: 541940 - DNA, 269 bp, Homo sapiens
cactaaggccgtgctcgcctgccgcaggctacgagacgtgcgacaaggcgcccgtagctcatcagctgctgtggacgctcggagccatccatgcgggccatctctgctctctagagctgccctgcgagacaaccataccgactctgacatccaggagaaactctttgtggtccccgcggatgaggcccaggctcgaatcccatatgcccgtgtcaaccacaacaagtacatggtgactgaacgcgccacctacatcggaacctccaact

SEQ ID NO: 541941 - DNA, 116 bp, Homo sapiens
gcgccgcagctgggcttggtgttctagatcgtgtacggggtgctggtatttgttgttgggtggggtgcgattcgcgtcctcctctggcgtttaagacttagtggtattcacgtaga

SEQ ID NO: 541942 - DNA, 103 bp, Homo sapiens
gaggtttgagtccagtctgggcaacacaggaaaaactctgcctgtgtcttgcacaaagtgcacactgggaggcaagagcctgtctctgcagtaagaagggctg

SEQ ID NO: 541943 - DNA, 212 bp, Homo sapiens
gcaaattgctccatgttcttctctccctttatgttaacatctccttgaagggtggtttagtttgcattggctggtttcagaaaggtattaaggcttaggccaaatcctaccttgagtatggttaaaaaaaaaaaatgctgctggcctttctcggagcacagtgcgctcggcactggcccagttgtgtttttaataatacaatattggaattt

SEQ ID NO: 541944 - DNA, 1171 bp, Homo sapiens
  misc_feature (650)..(650): n is a, c, g, or t
  misc_feature (919)..(919): n is a, c, g, or t
cgggctccgtgcggctcctgtcagcaggcgggctgcgagcggatcccatggtgcagccttctgggcggctggcggctgcctgtgtgctgtctgctggctgtgtgtcctcctgtgcgtgcttgtcctgtgtgtgctgtgtatgtgatgtttgtgcttgctgtggacttgttgcctccagtgcctgtgtgtgacgcttgccttgctgtgtggactgtgctgaccagtgctgtggtgcaacagctgacagactggaccagggggacagcagcttggctgcgacgctggagatgtgcatgtgcacgtggaccctgaagcttgcgcgactccccagagggccgaagccccagccggctgcgccgccggcacgaggcagtgcccgacaggcgaggatgccgagcgccaggggacttgtatagacaccgacctccacgaagaaaacccctaaacactgggtggttgaaggacctaggtatctgtggaccgaattcgcgcgctaacaacagcggcaaacaactgggtgcggaaccccacctactatactctcggagcttggaacacccctctggacagccacgacaagaaaacccatttataattccaaaactcgacttggtgctgcctttacaacgcagacgggcaccttagctacncttattatatctggcgcaccgaaacatccagcacacttaacgcttggagaaaaccactacaggagtacatgtaacagctccacacttctctctcacttattcacatgcggagagatatcacttaggctataggctcggagtttacgcacttatagggacaccttgaggcagaacgacgccgcttttgtgcgacaccagtaaaggcatattcggcttggttatcaccattcttatgggcccgcattggtgcatccacactactaactttncgtcaattggacatggccagaaatcgaagatcacacacacgaaaccacacttgcggctccctggacagcaacttttgggcacacactttcgggtctctctcggaacccaacttacaaggagcgataaggcccccaggctcaatttacttgggctacaacagtttggcatcacaggcaacacgggtttacatcacgttactcttgatccccaccgcttctgtctgtcggagaacccgtaacccctggaacaaa

SEQ ID NO: 541945 - DNA, 91 bp, Homo sapiens
  misc_feature (30)..(30): n is a, c, g, or t
  misc_feature (47)..(47): n is a, c, g, or t
gcagcacctaggatggggcagagacttgtnacatctttgtccccagnaaaggctacatgttacctccttcagttgataataaacctttctg

SEQ ID NO: 541946 - DNA, 231 bp, Homo sapiens
gtggacccggtccatgcacagttcaaggtcctctttcctgactccaaagcatttttttttgagacacggcttcactctgtcacccaggcaggagtgcagtggtataatcacagctcactgcagactttacctcccagggctctggttatcctcccacctcagcctcttgagtagctgggaccacagcggggcaccaccatgcctgatatttgtcttctttttttttttttc

SEQ ID NO: 541947 - DNA, 680 bp, Homo sapiens
agcggggaggcggaaggggccctgcggcgacgacgtcgtcgacgggggtggccgtgggagctgagcacgggagaagactccctctctcgtgaagccggatcccgagccgggcaggatggatcaccaccagccggggactgggcgctaccaggtgcttcttaagtgaagaggataactcagaatcatcggcgtatagtagcagccacctacttcaagacccagtcaccgcagattgtgcaggctgcgtcttcagcaccagcacttgatactgactcttcccctccaccatatagtagtattactgtggaagtacctacaacttcagatcagaagtttacgggtgagttttagtcccgtgccagctccctataggcgatgctacctctcttcctacgtacgatgaagctgagaaggctaaagctgctgcaatggcagctgcagcaggggaaacatctcagagaattcaggaggaagagtgtccaccaagcagatgcacttcagtgactgcagaccagctcagactggcggaatgctggctgttcgtgctggcatttgtcatggcattctagtttgcatgctggcttggattccgtgtactccttctgtatcaccaagtaccagtagctggcaggtatggtgctatctgcggatttgggctatccttgatccaatggtcctta

SEQ ID NO: 541948 - DNA, 400 bp, Homo sapiens
gtgaccctcagaagcttgcccctaagagactgcccgaggggattcccatttggaggctccgggcctagagaggccacgccttcccgtaaccttgcagggtggtatgtgctatggttcaaaccagagttaagggcccatcccagggcaaattccaactcccgccatctgactgacctggattcctgccttctagcaggaatggacctcatgatttattgcaccccaggaaagcgccacgggcagagaaatagaatttccaactccaagatccctcccaactcccatactgccgcctcttcttgtctcaccacactgagaaaagaatcttacactaaggtctcaagtaaaccaccacccaggcccaacctcccttcaggaccttgcaggcctggcctggccg

SEQ ID NO: 541949 - DNA, 104 bp, Homo sapiens
tgccgggaccagaggcgtgaaccaccgtgcccagccaacttcttctcttttcatgttgaatacaagcattattcttgaaggacatgggcaacaatgacactatt

SEQ ID NO: 541950 - DNA, 183 bp, Homo sapiens
gtatcagagacagagtcgcaccctgagcagctatgtactactcccctccagtctgaaaagaacagccggagagcacctgaaattcatctgaattctcctgaaggtgtgcagcacacactgacacggcaaatcgaaacatgcacaggctccataacaaagtggagagcagcagggaggaggcaa

SEQ ID NO: 541951 - DNA, 124 bp, Homo sapiens
cctgtactatgtaacaacaaccaacaacaataacaacaaaatcaaacaaactaaaaaccaaaccaaaagatatgcttgcacatattgactagataccagatgataggactgctatctactggta

SEQ ID NO: 541952 - DNA, 118 bp, Homo sapiens
  misc_feature (28)..(28): n is a, c, g, or t
gggggtatctatcagggaggcttgtggnatagtatggggacctgacttggcaccaagcggtgaagacattcaattggaacgccaccgtcattcagtccccactcctgggaaaggaaaa

SEQ ID NO: 541953 - DNA, 259 bp, Homo sapiens
gcaggatacgggtacgggagtggtaagacggcggggagccatcaggtcctggcatcagtcacaccggagtcgctggaacatgcagtgtgcccggtagcaacgcggcggctaatttataggtagtagagatggggtatcagtggtagccaggatggtcttgatctcctgacctcgtgatccacctgcctcgacctcccaaagggctgggataacaggtgtgaggcaccgtgcctgtccactaattcatattttaaaagag

SEQ ID NO: 541954 - DNA, 245 bp, Homo sapiens
gtaatatcaagacagagtctggtctccaggcccgggactggcagcggggacctcaggcaggcaggcaggcgggccgaaggcctccagggaagatcagtgggtgtggctgagacagtcagtgtgcacaaaactggccagtcacgagcacccagcgaaagttcatccatgctctggcaggacaggagagcacgcggcccctcgggaatatagaagtatttgccatattctctttgcttgttccgatg

SEQ ID NO: 541955 - DNA, 310 bp, Homo sapiens
tgggagcctgggggagctcttggaccccctccggtgcccacttgcgcttgcttattgtagtactcctcccaagccgtcgtgtagtcctgctgtgggggcgctccgggatgctggggctgctggccgatattgttgtaatactattcccaggccttagtgtagtccgattgaccggtgggtgggggctgagggggctcaccctgagccggtgggtccgcagaggccgttgcgggtccggggacggggcccggggtctgctggtagtagtgtgagtagtaggcggcccacgcggcgttggggtctgcggccg

SEQ ID NO: 541956 - DNA, 369 bp, Homo sapiens
cattagttggtaggctatgtcctcatcatggatcctgtagaggatgatgtcgatttctcaggacttgaaaatgactggctgtatctaaatggtatagatagatgccaagtcctctgtcacttattacctaggactccgtaggcacagctagtggagtcttagcacagtgcccataccctaagaaattaataatgaaaaccaaacctcaagaacctagagcagctgctctacttgccaccatggactccagtggtcagcataagaaaagcagatagttgcattctatttagtttatagctgctttgttcctttgtgtttcactaagcagaggctcaaaaattcccttgataacttcagctgcccctggag

SEQ ID NO: 541957 - DNA, 586 bp, Homo sapiens
gccaactgggttcgagttcgtgggagtgggggaaatcaacccattcaaaactactctagaaattgtcttttggcagaatagcaggtatccaagttaaaaataagagggtcatttaagaccagcctggcaacgtggtgaaaccccgtctctaataaaactaaaaaattagccgggtctggtggcgggcacctataaacccagctacttgggaggctgaggcaggagaatgcttgaacctaggaggcagaggttgtagtgagctgaggttgcaccattgcactctagcctgggcaacagagcgagactccatctcaaaaaaaagagaaaagaaaagacaaaagttgggcagaggatttaaatagccatttcttcaatgaagatatataaatggcccataagcacatgaaaagatgctcaccttcattagttattgaagaaatgcgaatcagaaccacacctaattgaatggcaataataataaggaaaaggaaaataagtattggcacagattgcaattagaaccctaatgcattgctggtaggaatggcaaatggcacagctgctgtggaaaagtttggtggctcct

SEQ ID NO: 541958 - DNA, 126 bp, Homo sapiens
ctctttgcgacccaggggcggtgcggcttcttatttgcgcccgggtgaggcggggtttcccagccccacccccctcaggcaaaaaagcttaagcccatgtttctcgttgtctaaaaaacgtgtaaa

SEQ ID NO: 541959 - DNA, 306 bp, Homo sapiens
  misc_feature (38)..(38): n is a, c, g, or t
gcgcgcggggagagagagagagatctcttgtcgcgagntattggagcaagatttctggtcggtgttcaggggtgtattttcttaacagagacctgtgcggaaatttccttctcttccttttgatagggtggttcacttttggctattggtgggattggtccctttattaaggtttattccttaaggttttggaggttaccagactgtgcatttatttaccttttgggggcgttttatttcgggctctttttttcacggttttgtgttcctttttccacccacatttcatgtggacctttggggctt

SEQ ID NO: 541960 - DNA, 1173 bp, Homo sapiens
tgtggtggctcatgcctataatcccagcactttgggatgtgctgaggcgggtgtgatcgaccttggaggtccaggatgttcggagaccatgcctgggcaactgtggtgagggctctgacctcgtaccaaacaatacaaaaactagcttggtgctctgagtgtacactccccaagctgtacatcccatgctactcagtgaggcttgacatgcctgatgaattgcttgaagccctgggagggcaggcacgcttgacatgtgagcctgcgatcgtgcccagtgacacttcccatgccctgatgtgatcgacggggctctcataactcttgctctcacaacctcaaccactccagagtacacataagcaacataagacaactacacactacaatctgctggctacgacttcgtgcctagaacccacaacctacacttgggctccaactcagcctgggcactctgcttgcactcacgctgtgcttatcccaccaaatctttgctcttggccattgctcgctccacacaatacttccacaggcacacctggctgcttccccaataacaacgcagcactttctccttggccattgtacaatagcccacttatacattacatctctcctgggctggctacacgggcaccccattaccccatctcacactgcccggcgcggccctcgaggcatatctacaaacagggtgttaatcatcgcatcgtgaatacatagacctataaacgaacgtctagcgcagctagacataacaaccacacaccataacacaaacaacaactcctgatcgccccccgagaacaacttccatgcagccagcctctcctccacaacccccagtgtgaagactcgacactgcgaggcactatcaactcttgtctcgtcgacattcgacacgactcgacgaccgtttctgacaacaagaggctgtatgcggcagcagatcgcgagcaccgctgtcgagacattagtatgctgccgtgcaaggctcgtcgatcgagcgacgggcgtgcctgaggagcgcagtgacatcatcggatcctacgagactgctcgggctgctgcatcgacaccgacacatcattggcacacggtgcagaagacggcgcggagaaagagcaacgagcgcgagtgacacatagatgatttaatgcgtgattcgta

SEQ ID NO: 541961 - DNA, 776 bp, Homo sapiens
gcaagcaaagaaccaaattatgaatgaactcacattcatgattgctacaaagagaataaaatacctaggaatacagcgaacaagagacataaaaaacctcttcaaggagaactacaaatcactgctcaaagaaatcagagagaacacgaaaaaatggaaaaacattccaggctcatagataggaagaatcaatattgtgaaaatggatatactgcccaaagatatttatagattctatgatattcctattaaactaccatgaacattcttcacagaagtagaagaaactattttaaaattcatatgggaccagaaaagaaccagaatagccaagaaaatcccaaactatttagattagcttaatctaatctaaagattaaagaacaaagctgtagatatcaatctaactgtcttcacactattccacaaggctacagaaaccaaaacaacatggtactggtacaagaacagacacatagaccaatggaacagagtagagaacacagaagtaggacctcacacttacaaccatatgatctttgacaaatctgagaaaaaaaatgggaaaaagattccctatttaataaatgatgctgggagagatgggtagccatatgcggaaaaatgaaactagacccctttcctttacaccttaaataaaattaactcaagatggattaatcacttagatgtaaacccaaaaatttataaactctagaggaaaatgttggcaatgccttcaggacctaggtagggggcaagatctgtgaggaaaa

SEQ ID NO: 541962 - DNA, 110 bp, Homo sapiens
acgctccagcccaacaccgtgttcataacagattcagagaggaaaacacgtcgaaatctccagatagtggtgacattatacagcattgataatggtaacatgatcgtaga

SEQ ID NO: 541963 - DNA, 403 bp, Homo sapiens
agaaaaggtacatttatttttcaagcagaaaattttcctgaaaaattttttgtaacggtattaaaagaatcataatggaaagtactatatttgattagttgacatggaggaaatggtactcccactttataccaatattttcttaaaaggttgacttctgtattattttaatgagttcttacactcgagctagaacactttcaatgaaatcaaatgtgaaaagagctgaatgcatgacctgcactgcctataaaacgtgatgacattaacgctgcctttaatgcgaaacaattcacatcattgttaagattccagctggaggttgcttaagaatatttaagaccaggtacagtggttcgcacctgtaattcctgtgctacgggaggctgagctgagctcgtgc

SEQ ID NO: 541964 - DNA, 631 bp, Homo sapiens
  misc_feature (610)..(610): n is a, c, g, or t
tcgaagatggcggtggggcctgccgagcgggcatggtcccgtcctagcctcctggtcagtcagcctcctcccggctgcctttcccacagccttgatcgcatggctcattgctccactcccttcctcagcaacaccctcagctcctttgcatctcctttggtccacaccaggagactcccagcagatccgtagccctcgatcagccacatggggtttaccacccctgctggagaaaatcacctgtcatcagactgcggtccccttcatggtccccaagaaaaaaaaaaaacaaaaaaagagacacacagaaaaaaaaaaaaaaaagctgtgggaggccctcggagccacaccacagccttatttttctttctctctgtcccctcacacgctcattccatcctgtgtcctctttactctctgcgggcacttcactgagaaagtagactcagcattcctgagtcggtctacagttttctgtcctcttaccccaagcctgacctcctcagagcccacctcctcctgtgctcagagtgtagtgtccttcctctgcctctcgtctgctctgcgtctaccctgcccctcttgtccctttgtcccatgattacgaggngacggcggggggattcgtatg

SEQ ID NO: 541965 - DNA, 396 bp, Homo sapiens
  misc_feature (340)..(340): n is a, c, g, or t
  misc_feature (348)..(349): n is a, c, g, or t
  misc_feature (375)..(375): n is a, c, g, or t
tcgtacttgtcgctgatttacctgcttcaacccattgccaatccccataaggttcatcattgggatgatggtcgattttaataatttctaatccgtttagccatctttgatcatcgattcgtggcgcattggcggtgtccaccacaaggaccaacgcatcacgatacattttatcgggcacgtcatccataaaggtgtcatcttcactcatccaagctaagccttggacagccttcccaactgcataaatctgcttgtctggaaaactagcttctaaaatcgcctttaagcccaattgcgcaccgtacgcatcaggatctggacgttggtggcgatgaanataatggnntcatatcgctttattctgctaatatngttctcaattgctgacatatc

SEQ ID NO: 541966 - DNA, 420 bp, Homo sapiens
cggtggtcgtccaaggtctccaacaactccgggtcttccagcgacttcaagtcttccaataactctcagcctccagataatcctgagctccagaaaatccacatcttccagacaatccatgcccttccgagacaactccatgtcttccaacgaagactccaagctcttccagctaaagtcaagctcttccagacacactccagatcttccagcaacttactggatcttccacacaaagtccagactcttccagcgaaaactctacgctcttccaacaaaagccatgtcttccagaaaatccacatcttccactggcctccaggtcttccagactatccatgtcttccagaaaatccttgtcttcccttacatctatagcttccaaaacatccgggtcctccaggaaatccgtgtcttcca

SEQ ID NO: 541967 - DNA, 174 bp, Homo sapiens
cactacgggacttgggtcagcctcggcgcttcccagcatgctcccaattgccagtccggcacccctctgcatccggtttccccttctgttctagtggctgacacatggcatcccagcttttgggcttggttgctgacgctccccaggtgtgccaggagccactgggacacggtt

SEQ ID NO: 541968 - DNA, 1144 bp, Homo sapiens
tggaaatgtacagcagaaactcttgagcagagaggctaaacagcaactctgttctcccccttcccctagcacttttcttacgaaaagtcaataattaacgcaaattgcttaacacttggttccagttcctgcctatctggagtttaaatgcgtaatacaccattaatttccacgctgcagtttttattttaaagaaagtaacaagatgtctttacactgacactgaaaattcatccattttagagccaggaattcccatgttacacaggaaaccacatagaagtctacgtgcaacttaacttttcttacacaacgcacaacagagcactcagcattaacactactttcttctgtctttctccttttggaacacttttatgctataacttctttctgccctgcctacttttctgcacaacaactgacgactgtaccagacttctcggcttcccctgctactgcacaagctgactgctgcgtagcacacttctactaccactgctctgcctcttctgacttctcctatcagcagctgacgaacacccttcacaacctacttggacttttgcaaacgtaagtaaaaccaccttccactatctccgacttttcccccctccatttctctagtctcaactacttaatttcgccaacttaacattgctcccttattccgccgccccgctcccccttcaaaagccatattccaccttccggaccacttgcgtccctcctaacctcccctggctccctctactcgtccgcgcactcccctcccggcaccctccctccccgcggccctcccccgaccggtcccgccacttcgggccctcatacctcgctccgctcacccccgactccccccccccgctccccccaccccccccctcccccccctccttgccccctgcccgcccccttcgcacccgcccgcccctcccccctgcccttccccacccctggcccatctcacccacccgctggcccccgcgcacgaccgcgccccaccccgccgccgtcccaccccgcgcccccacaactgcccggccactctcccccaccccgccgccccgcctcccaccacacccccgcacacaacgacctccaaaaaacacgccccttcccgacgcgcccctaccccccctcc

SEQ ID NO: 541969 - DNA, 382 bp, Homo sapiens
cgctggtttggcgtttgttcctgtcccggcattgccttttgttgccgcggtgtttcagcacggtgggcgatagaccgcgtcactgtgattggcaggggcgattgggccgaaacaacgtaggtttgccactcggtcagcagtcccgtgttaagctcgggtggtcgtgtgccccactcacgtggtgcggcagtggtgcacaagtctgttgcctgtgccgccacgatggggggtggtggagatgtcaccgccttgacaattcggccgctcgtctgtaggatgccgggggctcttagtcacccaccttgtgcgggaccctattcttacaaatacggctgccatcttaaagccatcattgaacaagaaaaaaacggagacatagata

SEQ ID NO: 541970 - DNA, 503 bp, Homo sapiens
agagacagggtctcactctgtcacccacagtggagtgagtgatgcaatcatggctcactgcagccttgaactcctgggctcaagcgatcttcccatctgtctcctgaatagttagaactacaggtgtgtcccaccacgcctagctaatgtaaaaaatatacatttgtagagatggggtctcactgtgttgcccagactggctcaaactcctggcctcaagtgagtcttctgccttggcccctcaaagtgttggtattataggcgtgagccagtgcacctggcctcacatgacttttattgcattatactgttataactgttctcttttattattagttgttaatctcttaccgtgcctattttataaattaaattttatcatatgtatatatgcataggaaaaaacatagcatatataaggttcagtagtatacagtttcaagcatccccttgggggttttggaatgtaccccacacaggtaagggggggattactgtaaata

SEQ ID NO: 541971 - DNA, 650 bp, Homo sapiens
tgatcgaggtggatgatgtaatggagtgatgattctctgtcgtattcggtcccaacggaggatcggtatttggcatggaggtactatgccaataattcgtgactgggctgagagaactgtcttggccatgtagaggacgactatatccttagtggatcgtccacggtcagatatgagttgtacactcacctgcctgtgagtgataacagctggtccagagcagctcgcagcagctgggatgttccgagatcgtgtggagcttgctctcaggtagaattcctcacgatgcactgggtggagctcatttcacaggtatgacttgccgtgggcactcgttgcgagaagcccctggaggtgccactgagtcgtctctagacaattttccgtcacaggtcaagcattcatgcacacatagactgggccatcctgccttgaggtacaagaaaacgcaacaggacacggaaaggtcgacgacagatactcttagcgatgtccatagaccactgttacattccttgttaacttacgaccagtacttcttagcgatacggtgatcgttagaggaacgcgaaaaacacaatgttcgagggacaatacctggtaccttacgtggccttactacctggtaggcactcgaattctggacgcgg

SEQ ID NO: 541972 - DNA, 269 bp, Homo sapiens
tattggctcactcgttcacagttccacctgcatcttctcatcaaagccatccaggatacacaggaagcttctttcctcttagacctgtgatcggcctgtgatgatctctgatagcaaaaggtttatcttatttgagagctgccatactgccactgtcgaggtggagactgagcaaaggaagtcctggagctgtgccagctcccagaagcttcagacagaaagagcagctactctcacctggcgaacccattaagagaattctcgttgag

SEQ ID NO: 541973 - DNA, 469 bp, Homo sapiens
atatttattatatatattatatatataatatatattataaatataatatataaatatatttataaatatatataaatattaaatttatacattaaatttatatacatattatatatacatttttatatattatatatatataaatataatatacatatattttttaaaataaaagagtttctaggccgagtgtggtggctcacacctgtggtcccagcactttggaaggctgaggcaggcacatcaccagaggtcaggaggtcgagaccagcctggccaacagaacaaaactccgtctctaaaaaattacaaaagttagccgggcgtggtgacgggcatctgtagtcccagccactcaggaggctgaagcagaggaatcgcttcaacccaggaggcagaggttgtttgcagtccagcctgggtgacagaggcaagactccgtctcaaaaaaaaaaaagaagggcggccg

SEQ ID NO: 541974 - DNA, 308 bp, Homo sapiens
  misc_feature (11)..(11): n is a, c, g, or t
  misc_feature (19)..(19): n is a, c, g, or t
  misc_feature (30)..(30): n is a, c, g, or t
  misc_feature (63)..(63): n is a, c, g, or t
  misc_feature (65)..(65): n is a, c, g, or t
  misc_feature (85)..(85): n is a, c, g, or t
  misc_feature (98)..(98): n is a, c, g, or t
  misc_feature (120)..(120): n is a, c, g, or t
  misc_feature (148)..(148): n is a, c, g, or t
  misc_feature (152)..(152): n is a, c, g, or t
  misc_feature (160)..(160): n is a, c, g, or t
  misc_feature (163)..(163): n is a, c, g, or t
  misc_feature (180)..(180): n is a, c, g, or t
  misc_feature (189)..(189): n is a, c, g, or t
  misc_feature (199)..(199): n is a, c, g, or t
  misc_feature (202)..(202): n is a, c, g, or t
  misc_feature (243)..(243): n is a, c, g, or t
  misc_feature (260)..(260): n is a, c, g, or t
  misc_feature (267)..(267): n is a, c, g, or t
  misc_feature (271)..(272): n is a, c, g, or t
  misc_feature (287)..(287): n is a, c, g, or t
ttttgttaaantttgttgnttttttttacnctgtgctgtttttattggcatatttagtattgncnttttttttttgagacggagnttcactcttgttncccaggctggagtgaaatggcncaatctcagctcgctgcaacctctgccncccnggttcaancgnttctcctgcctcagccncccgagtanctgggatttnagncgtgtgccaccatgccaggctaattttgtatttttagtagngatgggatttccccatngttgttnaggnnccccagcctgtgtgncagtgagatcctggccctttg

SEQ ID NO: 541975 - DNA, 172 bp, Homo sapiens
cctcgcgaaattggaagtagagagcttcttaagaccgagagagcggaccacttggtggagattaacatgcacgacagctggcgcttcaagtacaaggggtggcgtcgtgcgggaacggttaacgatgggactgtcgcagtcaggagaaatgaagcatacttggagttcggac

SEQ ID NO: 541976 - DNA, 591 bp, Homo sapiens
ttgccaggtaccccaactcatagtattatacttttactatatactggatggacttgctaaaattgtcgttaggacttttaaaatatatgtcactcaataacttggcgttcttactcgttatgttaaatgagaaacagaatacaagaacaaaaacacatagtaagaatatctacacaaaatacatacacttgtagacaacaaccagaaggaactatgtcaaaattaaaagagcatagtgaaatcaggaggcacattccaaaatgtctgatgctattactatattatcatttcactaactaaaattctaaataattcccttcctagttgtcaatcctagcaaattaccatacttttcactagaaacacccaaccatactatctctaccatccggtgccctaatacaaagataaaacaattttaaaatgaaaacagctagcaacaactacgttcaaggataagcacttcacatgtgtgctcgggtggctaagagtaaaatcttcctaagaacaaccttgtaaccaatattctagttctaatggttggagccagataactcacatacctgtatgtcaccgacacgcgtgctaggt

SEQ ID NO: 541977 - DNA, 1069 bp, Homo sapiens
taaagctagggggagctcaggaatctactagttgaatttcttcattatcccaaaaaaggccctgaaggccgggagagggcaagcagcctaacgtgaggctgcacagctaggtaatatctgcttgggggtcagtggataaggggcaaaggggctgcagggagcaatacaatgcagggtgaaccttgtgcacagccacatgtgggtagagtttacatttcagacccccctgtgcaaattgaaaacttcccaccccgtgggctgtttcccgttgattggtcacagaagtggacaggctccgtggactgagcttgtccatgggcttccctcaggaggggaggaggaatgcaggagtctcttaacattcccagttcgggaggccatctggatggcttggatccactctgggcgcacctagggggtggctgcttgcaagaaatagtgcacttcatctgctgggaagatctcaaaaaggttctcttcctcactcttcctgccatttgagttgctctccactgaagtcaccacacagcctctcaagtgaatgggtcccaggggactcttctgccccaggagggtcatagtagtgcaggtaggcagggtactctctcaagatgaacttcctgcacttaccagtattcccttctattgcccctgattcagtaaacatccctgcttgataatgacccctttgaattctacttgacagaattactcttatcatcacctgggaactcttttcacagaaagaacccacggttggaaacgtcgaaaaaagcgacaagggatgtacccgaaaaaggggtatacacaggtcacataccaggggaatctggagcacttctccaccgacggggttgaaagaaaccccccatttgacacaaggggataaacaacacaacaggggccccgaggggaagcaaaacagaagggggggacacacgaacaagatcaagagctgggagccgaggtaacaaacctcagaggacacgaaaagactgaacataggtcaagaggagaatcacagacccagcggagagaataggacgaggaatcgcgaaaaggaaagata

SEQ ID NO: 541978 - DNA, 168 bp, Homo sapiens
  misc_feature (1)..(1): n is a, c, g, or t
nctcccgcgacggagtaggggaagggagcctactagggtgtagaataggaagtatgtgcctagcgttcaggcgttctggctaggttgcctcactcgggtgactgatacgccaacggtgggcgactaacgtggtggtttcgacggaacgactataacacactatgactt

SEQ ID NO: 541979 - DNA, 209 bp, Homo sapiens
cctgtgtggttgttcctctggagaacctgactcctaaacatcccagaagagcatttcctgccacttttttgtgctcaaactgccctagcataattcccactgttcccagcagaacccacaaagcagatggggcttgactgggataaacagcacaaatactatcatttccatgtcattgctgataaggaatcgggtttgtgaagtttgaa

SEQ ID NO: 541980 - DNA, 766 bp, Homo sapiens
agatcttttccagcagctgctggctgccagagaggcgccttgcagggacccagcgcttacacaatacccaccatgtcccaggctggtgctcaggaggcccctatcaggaagaagcgcccccctgtgaaggaggaggacctgacagggggcccgaggaaacctgaacaatggtccaggaaatcaagtccaagacctaccaggtcatgcgagagtgtgagcaagctggctcggtcgcccgtcggtgttcagccgcaccgatcaggtactgagactgtctgtgagaagtgcaaagcctggaccctaccgagggagtgtctgtcggcgtgagaagtgtgcgccagtccctcttgcatgcggcgaatgctcggaagagtaggagccgttacccaggaactcttttttatgccagaatgcttccgtctcgccctggtgtctctgggggttgcagcctccttgcatagttcaggcccttcggccatgggtctgctccagctctttggaagcacccaataaagaaggattgcccacggtggccgccaggcaagcaagaaaagaaacctaaaaaataaaaacaatgttgggggcggcggcgccccaaaaggttttttaacccccttctgtggggccgcgccccaaatggtttagaccacgggccggggttcccacaaaaaaccggccggcctcggtggttccaccaaaaaaaggccggggggcgcgggtgtgtaaaccgggggtcggggctatgttccggggccgggtggatatg

SEQ ID NO: 541981 - DNA, 191 bp, Homo sapiens
  misc_feature (86)..(86): n is a, c, g, or t
gatggtagtctgtgaagctgtggttgacttgtccgaagtagtgtcaggaaggagttttcttttctggtgttcgatgaacgagtccntgcggtcgcttcgtgttctcgttcaggagcgttgtatccgtgggcgcggtctcccgcactcgccgctcctcttctctcggttccgctggcgctggcgaaagtcag

SEQ ID NO: 541982 - DNA, 121 bp, Homo sapiens
tcgcgaacgtgtatccctcgcggacgtgtatccctcgcgaacgtgttatcctcgcgaacgtgttatcctcgcttcattgaatttcttcactttgacaggataacacgttcgcgacggggta

SEQ ID NO: 541983 - DNA, 162 bp, Homo sapiens
caccaccggcacatgtaaatagctgggctgcggcagacccagcacctgttgcaggtacagctggcgcggcgtggagtcgagcaggtcggcgccgcgcacgatgtcggtgatgtgctgcgcgccatcgtcgaccaccacggccaactggtgggcccagtttcc

SEQ ID NO: 541984 - DNA, 400 bp, Homo sapiens
ctcctccttgtgttaaatccaggtagacttcctagcggcagcctgtgtccagcaggaaaagctatgcccttttgctaaggaggttgggaaggtccaaggaaagccatttgtttaggtggccttgacatgtgctgctgtggggtttatgtcattatgccaatacgacatcacgatttccagaagctcatctctagggctactgagtttttaaagtctgatgtgatggtcctagggaggctagaatcttcgcgcatctaaagtatttcacagcactctgataggtcattgccactcatgcggtgctgagaccattgtgtgaccgaggtcatgttccctatgtaagcaatccacagtccttgctccgatgtgtgatagatagatacacaatctcgttgccctc

SEQ ID NO: 541985 - DNA, 1400 bp, Homo sapiens
  misc_feature (204)..(204): n is a, c, g, or t
gggaacgcgggagagtacgccttgataggcctcgtgtgcacagctacgatgagtacaaggtagatggcgtctgctgcgctgccgctaagcctcgcacatgatgccaatcaccgtccctctaccgcatgcgaagtctctttgcgcctaagtctatggtcggtcagtcccaatgattccgccttctggttacctgtggctcaatcntctacgtctaccaggacatcatcgaagaagtctctcatggggcagtagttggtcctcactggtgcgtggtagggtggtgcagcagagatattgccccttgcggaggtgaagtgagacttgtcgcggtatctgtcctagacgtctgagtgaacgtcgcacgtgtaggctgtattacctcccattcacagtattgtgtatcacgggggagaataccgccgttgaaggcgtgcactcgagccggttcgaggtgacgcccttgtcaaacccagtgtgacattatcctgaggaaactagtggagttgcctcggacaacgcggttgacggcagaatgcctcaacttcgcatgtcaggaatctgtgaaagcgtgcgtacgcgcagtactctcgcgtgctcgatgcgaaatcggtgccaaggcactgtgagcgtcgttttggttctcatacgaaggtatttccaccagacgattcccaaagcgattcaagaggattccctcccgcattggtggctcgttaggcagcgcgatcctattgtagcgctcgtctctaagtggaactaaaggcccgaacgccttctccaataccaccgccagatggacggtgcgcaagtcacacccttttcgtttacgttaggaatggccagtgggagccccttgcgtcttgccgtgggttttgttggcttccccctgactggtgacatagactttcgatggaaaatctgcccgccgaattcgctcaatgtgggagaatccctgtggcctagagagactgagaacaacactggttggaatgattagagcgaaaactcggacctgttgtggcgcatccgcatcgattgaggggttctcaatggttgctaaagcaaccggaatgcaacattggatcttcctaacccgaagatatgggcgaagttccggcttccatagatgacttttttcatggagtaccgcagccacagtgatttgttgcccgaggggacccaaggcgattttaggtagtccgaacctcttcgatacggaaaattcggccatataaccatgcgttctttagcacgagcataagatcctgtgttaggtggggctcccctttgattcacatggcacctgtattaattgtgtttcacacacataaaccgggagttaccagaggagattgtatgttgccttgaccacacagaggcccccacgcacttaagatctt

SEQ ID NO: 541986 - DNA, 345 bp, Homo sapiens
tctctgtgtttctgcatccgttgatcagatcttatttgtgctctcattgtcaattctttgaattctttcttacctccagtagtttgtaactctcttggtctggtcaggtatggcagctcatgcctgtaatcccagcactttgggagaccacggtgggcaggttgcttgagcccaggagtttgagacccacctgggcaacacgaaaacaacctatactctaagaaaaatacaaaaattagccgggcgtgggtggcatgtttctgtagggccagccaactcaggaggctgaggtgggaggatcacctgagcctgggaggtccaggcccccgtgaaccgttgattacc

SEQ ID NO: 541987 - DNA, 382 bp, Homo sapiens
tgcttcctcatctaagagtcaattttcttcgctattctgaagcttcaatctgactgtgatatgaaacatatttcctctagagaataccaggaagctcccataagtagccagaaaacagctgtgtctggacagaggtgacagaaaccagtggcttgtgtctctcaaagagagagataggcacattacccagtgggaccccatttatagaatggaagagcttatcttggcttaattaatgtgtgaactcaactacaatgttgattgtggttatagtttcacagaggtatatgtatgtaaacatttattcagttctacactttaaatatgcatggtttactggatatccataaaactgtttcaaataaaaaacgatcggccgaac

SEQ ID NO: 541988 - DNA, 1168 bp, Homo sapiens
  misc_feature (125)..(125): n is a, c, g, or t
gcttggctccgggggctccgatcgcctgcccgcacgccgcccgacacccaggaccgtgccgccggtcctccgccgatagcaaacccttccgacgtgaccatcgctgcgcaagccgggcacgcacncgtcccctgcctccgtgccccgtccgcggaaagcttaagtttgacatgagtggggtgaagatgtgggaactatggatcattggagaggagagagtccgatcctggcatgctgacggagaccgagaccgccgggcaagacctgttcgataaccttggtcgtggagagaaccttgacgatatcataacatgatgtggatgacatactcgacgggctttaagcacgctgaactattggtgagagcttacgaagattccgtcaggtgtggaactaagagtagtatggcattgactctcaggtttcataattctcccgcaacgctgcgctaaattggaacaagaggcgttgacactcatgttgaacagactagaagtcattctggatggtcgtggagcgatgattaggctgaaacatacttccaaaatcgtcacagcagtctaaatcttaacgtggagaataaagctgaagaggatatcaggcacgcttggagacctttgaaagaagttagaatgtctgaaatagcctggagcatctttaactgtgaggttaccaacgctgaatgactaccgagagagtgtcttcaagctcctgtcccagcttacctacttggatgggtatgaccgagaggaccaggaagcatctgacttcagatggcgaggtggatggtgtggaatgaagaaggaggcaggatgaaagaaagagaagatgaaggaaaaagaagagatgatgatggtgaacaagaaggagttgaatgaaaagatgttgaaagatgaaacatgtcacagggggatcaggaaccactcgacttagagctcagatggaggaatgggaaagaaatgtacaatatgggacgtgtgggagaacagaacggtcaccatgaggatacgcgggtaacccggggtgagacagaaggcgtacgggtcatgtcgtgcacacaaaaacagagtacaagagcacagacgaatatacacaccctgctgagccgacaacacgagtatacatggatagacagacggcaaaaatttgttactagaacaagatgcgt

SEQ ID NO: 541989 - DNA, 1229 bp, Homo sapiens
cgcaaaattagcccccataataaaattaattaaccactcattcatcgacactccccaccccatccaacatctccgcatgatgaaacgttcggctcactccttggcgccatgcctgatcctccaacatcaccacaggacatattcactagcacatgcacatacatcaccagaacgccatcaaccgacacttttcatcaactcgacccacgatcacatctgacgacgataaaattacctggcaatgaacatcatcacgactcaccattccacgcccacagtgagacgcaccatcaagtaatctcgtatctagtcgctgccatcctatcacgtacaacaaatcgcagccgaatgagcccctactacgttcacgagcagtcccatctatcgtacctacatcacgcaccgaccccatgcaacaaaccacatcagcgcccactacacatccccttcacaagcccatctgccaaacccacaccctacgccaaacgccacggacaccccatgctccacacgacacgcagccccataacatgacaacaccggtccaccacagaccacgacagcagaccccccagacgcacagtccaactacgacaacgaccactacgacacgacgacgccgacccacgcgaccgcgacccaccagcgtcccaaaccaccacaagccaactcaccaccccgctacacacaccccccgaggccaccagacgctttcccacccacgcacaacacaccacccaactcacaggacgacgcacacaacccaaagcacaaaccccgccatcccgcaagacacaccacaagcagcagtgacaacaaacagccccacatggcacaacgaggccacagcggaacacagcacgcccgataccgcacgagacacgacccggaaacaccacagaggaaaagcgacacaagcgaaccccccacgcagtcgccaaaaccgacccaacacggggaaacagatcaacacacaacacacccacacacagcgaccacactagaataacaaaccaaacagagcacatcaggaagcacaagaaaccccagactcagatggagcagccacacgccggcaatgacgcaccacacacgaaagacacgataccagcggccgacacggcgacccgcacacgcgtagaggaagagcaaagtcacagaaccgaataaccaccgacgacgccgcacacaacaacaactacacagttaaccgcagtaacaggccccga

SEQ ID NO: 541990 - DNA, 532 bp, Homo sapiens
aaaagtggaaagcagagagagaggctcggctggcaagaggagaaaaggaagaggaggaggaataggatgaagagatcaacatctatgcattcacctaggaggagtccgactaggaacgcttccaggataaaggtggggacaacagccaacacaagttcattgctcacttccctgttccctctcatcaatagattgacgaggcactggtgctaatgatgaaaattgaactcctccataactatgcaatctaaaccctgcattccctttcacttctttcatcccccacttatacctcattaccctatgcttcacactcactcttgttcttcaatgactccttccccattctcatccttccttccctctcctaatctcatctttaccgtacgttatgtttctatccttaaccttcctgttagcctctctccacatatttctctactgtattcttctcatttattattaattgtcctattctctacaatcacttttctaactaaccttcctatttcctaatttattcttactcttg

SEQ ID NO: 541991 - DNA, 149 bp, Homo sapiens
gggctcatcgtgatctccccatctcagctcccaagtagctggaccagaggcatgcaccatcatgcccagctgatataagtattatttcgcagaggcaggttctcaccctgattgcccatactggtcttgaatttctgtgcccatttcaa

SEQ ID NO: 541992 - DNA, 90 bp, Homo sapiens
  misc_feature (27)..(27): n is a, c, g, or t
taccagctagcagaacaggcagaaatntaacacattaaagacaaatatgtagaaggtatatactgagctgctaaaataaaccgttaagag

SEQ ID NO: 541993 - DNA, 1571 bp, Homo sapiens
  misc_feature (387)..(387): n is a, c, g, or t
  misc_feature (509)..(509): n is a, c, g, or t
ttcctaaatgtcgcccttctgtgctatccttaattctccgtgtccctttatttgttggtgaatttctacacagcggaaccgcttgttcttgttgtgaaacttcttttgtaactaattgattgttcctctcctgttcactttgtgtcacgaagttcataggacaccaggtgttgttacctgcattttactgtccgtgcagatcgatcactatctgtgcatcatatctggtccagcaacctatcacgatttgtattgccgcataccatggtgtgtgctttacaggagagccaacataacatgttgcgtcttgtaagggactggcatgaggccctatgtgttatacgtgtgcgattccctaacgttctttgggactatttccagcttggnatggagcaactcttttaatgtatacatagcaactgcaaaggagccttctaattgtctgtgccaaatgtgtaactaatctcctttacttatcatcctcccggctttgggtggttacgctgctntaacgttttggtacggagctcaagtctatataggctctaatcttgtgttctctggaatgttatcggtaattttcatctctctaaaggcttttttctaacactcgcttctgcactgtaatgctcatttccttcaaggaagtgttccccaccttgaaggctcccctttggtgggggtgtgtaacatacgttctttaaatgaggtacccgcgcttttatgaagaccccccgggtttttcctaactcgccttgtttttctacaatagaacttgtggtgccccggaaatgtggttcagcctctttgtatcttgtagttggtaatccctgtagaattaagccgtctgtgtgtcaccgagttacttttcccttggttctgcgttaccgttagctacattgtcccctgggttctcttatatctccgtaacacttgtcggctcgtactcggaagactcggtgctcccgatagagagttttattgcccttgtgagaggatattctagagacaccattgtgtcaaatatttcactggttaaaattgccttctgtaatggcaattgaagccattggttgatttcctggatgtttagccagccaaagttttgtccaattctagctataagtggggtaatccagacgagttggcatcaggacctggctgaaggaagccccgttatgaccctagtaaacgatacagatagtggaaatcctgacagcatatgccagcgccgtaggtataggaaccagctcaggctgcacgccagagtgaggtcttacggaagattcttcactaatagtcatatttcactgtcaaaggacaatcagcagtgatagactgaacgggttcgcagcgagagtcccggacttgtctagaaatgagcaggttgtacaagtactgttctaaatgttcacacctgttgcagtttatattctttccattgtgtctatcatgtcagtgaatcgaccaggagtgctttcatttgcaacttgctgtaacattttctgttttttcaggttttactgatgaggcttgtgaggccaatcaaaatatactcggagctctactaa

SEQ ID NO: 541994 - DNA, 182 bp, Homo sapiens
gttctccccgagaaagcagagagagcagagcaacagtgagaagaattggggatgcttgcctcatccaggttataaaaaatagaaaaaaggcctccgagcctgtgggtgagggcaaggtggttggtggcggttacaatgtgcagcagtattttacattttggccctctttggcaagacctatt

SEQ ID NO: 541995 - DNA, 319 bp, Homo sapiens
tgaataaccgagtggtcgttatcctaatcgttaaaacttttctccatccgagaggaattctctcgttcggagacttagatccggctcctagtcccaaggatgactgttcccgtaattcacgtgtcggggacaccgtctcgggactagttgtggattgtggtgtccgacccgactcctcagccgacatccgtgtttctgtccgtactgtcttttgacgtagtgcccatcaaattggtttcggtgaaacccgaaaccattttcgttgaagactcctatagagccaccacaaacattctcagacgaacagtcacaatctcgg

SEQ ID NO: 541996 - DNA, 1150 bp, Homo sapiens
  misc_feature (368)..(368): n is a, c, g, or t
  misc_feature (868)..(868): n is a, c, g, or t
ggctagcgcgggtatcagcgacgggagccctacaagggacataggcaactacagcggcgccggcgggcggcgcccggaatgaggaggctaagtgcgggaagtaggggaggggaacgaaggaaaacataccatgagcgatagacactggcagagatgaaatcagaataagaacagatgagagaaaccgacagactacagacgaacataaagaaaaggatggcatcatacagtaccgactcgtattaatcaagataatacatagacagcagaatctacatgtactggaggggacgtggatgaactgccgaaacagaaggtagcgggaaggaatagcaacaagatccggctgtatagacttagacataggngatcatggcgatgagatgatgctatatgtacctatggcctatggtaagaaacgctcaacatgcaacgtacggactataatgctgcggaaaaagatatgccgacgctgtaaactgagagctgtctccaaggagtactcggaaaacgccgagaccaagatagattcaatggaggccctaggggcaataccaggttgaagaccgctagaaaggccacggcgaaagcagggcgattcgggggcgaagggatcagacgcaacaccgaggtgagaaagggagcaacaaaaggactgaaggaggccgaggaaggaacacgtcaaacaggggcacgagctcggaaatgcgagcgaacggcgtgggagcaaatggaggagggctgcgagcccgaaccagaaagcagagccgaagctcaaccgaaaaggcaagcagcccaagaggaggatccaaagccaagcgttaaggtgaaaagcggccgattaaaggccgtataataggccggctgnataaggggttcacaaaaaggcgggaaaaacgccaaggaagacaaaggactccgagagggataaataacgcccacttcctggtcagccttttcccttatcgaagatagaaggcctatcaaaagctaaaaccaaacaagaacaaagaggtgaagaagcacactaaaggccgcgggcgggcagagtcgtcgccagaataaacgtcggcggaggacagacgtaataccgacagattaaacaccggttaaatgtggtgccccagcgggcgagaacatgtaggtagac

SEQ ID NO: 541997 - DNA, 106 bp, Homo sapiens
tacatgattacgaaccgaggtgatacccctagttttagaagtttcaactagcttttataatcagaggtacattagcaggctcagcctaggggaataattgccaaca

SEQ ID NO: 541998 - DNA, 208 bp, Homo sapiens
tgttgtgttactgtactgaatactgtaggcattgtacacaatggatagacttgggtatctaaacataatctaaacatagaaaagacagtaaaaacatgccattataattttatgggaccaccatcatgtatgcagctacattgtagaccaataatgtcatcatgtaggtgcatgagtcgtacttcagtacaaagtgtgaggttgacac

SEQ ID NO: 541999 - DNA, 338 bp, Homo sapiens
gaaaaatccatgtatattttttgaacctaaaatactttaccgggcaagcagtggaacaggtcccagtagaaccctacaagatccccttgtctcaggctgaagtcaatccaggagggcagcgatgtgactctggttgcctggggcactcaggttcatgtcatccgggaggtggcttccatggcccaagaaaagcttggagtatcttgtgaagtcatcgatctgcggacaattgtgccttgggatgtggatacagtttgcaagtctgtgatcaaaaccgggcgactgttgatcagccacgaggctcccttaacaggcgctttgcctctgagatcagctcc

SEQ ID NO: 542000 - DNA, 519 bp, Homo sapiens
tctagagtgatcacgaagtccccgcgtacctgccgcctgaacgaagaccctcaacaaatttcggcgcttcaccggccgggctgaaggcatgtcgatcagtttcgaagcgcatctgctgggcgacaagattgagttcgacgaagccggcggcacgctgataatgcgcaatttgccaacccagctcgcagatcaactaaaacgtgcagttgcctgattagagttgtccgcgccacgaaatcgtgattaacgaaaacgtggcgcggctttttaagcaggattcgggaaattgcgcgagattcaggtgatgaagttatccgatccaccctgcttagatattagaacctaatgcatgatcgattctatccttcgccacttctctacccctatcaacagcggcctcataggaactgtattgcgctttctccacgatcgctaggcctttgtaattcgcatgatctatatggatggcgactccaaccggaatggtattcacgctatcccacgcggggggtaccgagc

SEQ ID NO: 542001 - DNA, 541 bp, Homo sapiens
gggcgctcgtggtgcgtgtggtgtgagcgggcgctggttgtttgttgtggatgtttatggcgggtgtgcgtttcgttggctggtgtgtgcggcttgagctggagtttggtcttgttgctagctgtgggacggggctcatcttgtgctcgtgcgaggtcgctctggtttgcggtcactttcgtgcgcgcctcgtggcagctgaatttcggcgcggcctcagccggctgatgtgttgtggttgcgcgtagagatggggtttcgtctcgttgtcctggctggtgtcgaacgtcgtgtcctcatgttgacccagagcggcttggcgtcgccaagtgctgggtccaccccgtatggagaccgagccgcgtgcccacatggtggacgtgtctcactctgcagactggggtacccccccttgtttgggacaccccaattcccggcctggggggggccccaagtttccttccagaggccgagagtatttaataggagcggggatcccgaccgagagggcccctccaccggggacaaaaagaaattatgc

SEQ ID NO: 542002 - DNA, 463 bp, Homo sapiens
cccacctttcctttcctggttccgacaggtttgggaagggccgtggacctgcatatggggtttgccctcttggccccgcccttttttttggtgcctggaaaccccttttttttaatgggaggaaaattaaaagggcttccccctttatcccccttcctttaaccttttatttttttaagggccaaaaaaccatcccaccccccgccggagctttttttgggcccttggttgcatcagggcagggggggccccaggagcccctttggtttccccccagggtacctgcccaggaaccccttcttttccctgggaagtcaaggggggaccattgccccccccccggggggttttgtttttttacctgggagggggggatttttttttttaaaggcctttaaatttcctttttaaaggttgggagccgccttttttttttattattaaaggagtgccccagccgcca

SEQ ID NO: 542003 - DNA, 809 bp, Homo sapiens
  misc_feature (489)..(489): n is a, c, g, or t
gagcggcgcgggccgtgtccccggggcctccatgatgtgaggagcgagcggccgcctgcggtctgccgccgccgcctcctcctgcctgtccgtctctggctcagtgctgcggtgccctgtgccccactggtggctggccctggtctcctgcacccatgccccctgtggccggtgccctggcatggtaagggatggcaggctgtgctggagtgcatgcccctggtgcccactggcagggcaccggatgccccatgaagcctgactggggatcctgcactttatccatgcactgatgtgggcgctgcttcgaaagccgagaaatgcccagctgtggaggccgagcgctgccgagttacaggctcacggtggccttccttcagggagagaggaaaagtggcaggagaatctaaagacggacctgttgcggcggatcaagatgctagagtatgcgctgaagcaggaaagggccaaatatcataaactgaagtntgggacagacctgaaccagggggagaagaaagcagatgtgtcagaacaagtctccaatggccccgtggaactcggtcaccctggagaacagcccgttggctgtgagaaggaggggcggcagcttctccgcacaataccttgatgaacgatctatgacacgcatggcctactcacatctcccaaaggagtacctggacagacggtgggctacacaagacaccatccctcgacaatgcggaccaacgcagcgtccgttcctgctgggccgctcgctggagcatacaacggggcacgtgaagccgacgtgaaaggggccccca

SEQ ID NO: 542004 - DNA, 210 bp, Homo sapiens
ttcttttccacagggtaaaattatcagtatccacgtaatgagtttaccacgagtctccactagactattttgaatgcgtgctggtagttatgaaggtgtacacattattttcagatgatatcttcaaatcagacgcacttttgaacttagcatccccagatttgatgcacctggatacatgggctgtgcctgacctaaaacgtgtgtctg

SEQ ID NO: 542005 - DNA, 391 bp, Homo sapiens
gggccaggggatccctctctcccctagtgccttcccccctttactccccagagcagcttggcccagggaggggggattctgcttatctggttcccccctggcccccaggcagcccctggttgtttatcagggtttgtttaccccgtggaattgaccccttccccccggggtggttgggtgggggagcccagggcccctgtgacccctccttttttccccccgtccccaggttgggtttagctgccaaattagcctccccatggccccctgtggtttcctgggggggcaggggggtgtccccccccctctgtttacctctcccctcttccccgctgtttcgcatattgatgagttttctttttttgcccaataaaatgatggaaactcatga

SEQ ID NO: 542006 - DNA, 83 bp, Homo sapiens
ctctagtgcatcaatcgccacatcactcgagacgtaaattatggctgatgatccgctacctacacgccactggctctcaatat

SEQ ID NO: 542007 - DNA, 276 bp, Homo sapiens
caatttacttcccatatactacctcaacacaacctcactccttcctctctccttttactttagctacccatctcctctccctccctttacacatcttaccttatatatcattataactccatcttcaccttcccaccactacttattacctactttctccccttccatcacctccacctctactcctcccaccctccataccccacttccccatctcccttctctttctccctctacccacccccatcctcctccccctcccctccccttcctccc

SEQ ID NO: 542008 - DNA, 143 bp, Homo sapiens
ttaggactctgtgggccctgagtgtatactagcgaggggcacagataagggacatcatagccactaggggcagaacagctatcagctccaagctgcacgcgccgtgggtagagtgatcgcgccgacttgtcactagccacata

SEQ ID NO: 542009 - DNA, 1028 bp, Homo sapiens
ggtacccatcaatgctctactgtaacggggacggcgatttgagctggtgcccaatcgggcgctgcatgtgcaaacgcagtgcttcgatgccgttgagaactggcaccgtctgcccgaggttgtccatctaggtgactttcaaggcccaaccaaggtcgatgatggcctgtacccactgtcccatcaacatgccggaccacttctgaatgggggccaccaactgtgtctgcctgcaatggctactacagagcatgacctgtgaccccctgtgacattgccctgtcacaacacatcccctccgcgccccattgctgttgattttccatgttgtcaattgagaactcccattcaatagcttggatgttggaccccataccacctgcgaactcctgtgacggcccgatcagtgaacctctcgtctactaaccattcattctgcaaagatgcttgtggccttcgcgggcctggagtctggccatagacaacccatgcctcgctgggagactaactcgataccacgtgtcaccggcaaacacaaccgcccaatgccttaagaggtccctgcaccccggaagtcaccacacaccaatatttaaccattcacgttagacaccttgccattgggcacccaaacaacacactacgatctaacacacgttttctgcagtcaattacaagtgatcttgttcgacaaaacgggtcgcatttcaccattgtaaccaactaataccccccttttacttctggccccgtaccaatatattacggccccgttcttgcgttgaaacgcgatttcgacagcaacccacaccgcgatgtgcggcaggccattcccaagtccgggtcacaattgtaggttccgtattccatcttgccacttccagaggttgacgccccgtaccacgcgttggtggcaccctagccattttactcccataggtcgctcggggccccccagcgcacagggggacgcccacggcgcacccacagtgcggcaggttggaactcctatgggaccatcacttggc

SEQ ID NO: 542010 - DNA, 82 bp, Homo sapiens
agtatggtgatgcatgtggaaggatcacatgagattgaggagctagggacaacctgggcaacatagcaagaccccgtctctt

SEQ ID NO: 542011 - DNA, 342 bp, Homo sapiens
ggatattggtatctgtgggaggtactggaaccagtcgcacacagatattgaaggatgactgtacttatttagcctgtagactgttccttctgcttccctgggacccctgagagcagagattatgtctggaaagtacactgctgcgtccccagcaaatggcggtgtctgagccacagcaagtgcttacaaaaagctgggtgagtaaataaatcaaaggcagaggtctatccattaaggcctcagttcccagggatgaaggtgggactcaggcaggtagggaaatttcctggtgaatttagggtcaagaggaatcagctgcctaggccccctacagcccactcc

SEQ ID NO: 542012 - DNA, 160 bp, Homo sapiens
atggctcgtggtcccaagaagcatctgaagcgggtgcagctccaaagcattggatgctggataaattgacccggtgtgtttgctctggtcatccaccggtccccacaagttgagagagtttcttcccctcatcaattttccgaaggacagatttaagtat

SEQ ID NO: 542013 - DNA, 690 bp, Homo sapiens
gaagggagagggagggcctggggtgggtccccactccccaccccaagccacagggactcccaccagggtctgggagaggacaggagctggcatctgatgagcgtctgatggcacacacagtatatcttgcatgaccatatgacaattcagacacaaccatcatcactggacccatcccgtagatcccgcacctgcgtgtccacgcagtgagtaggagggaggtgcagtccccagcccccacccctcaggtctgtgttacttggtttttaagcgactggttgggatagaaccctaaagaaataaacttccagtggataccggaaaaaaaaaaaaaaaaaaaaaaaaaaaaaaaaaaaaaaaaaaaaaaaaaaaaaaaaaaaaaaaaaaaaaaaaaaaaaaaaaaaaaaaaaaaaagaaaaaaaaaaaaaaaaaaaaaaaaaaaaaaaaaaatttgggcccgtttggcccaagtgatttttaaattgaagaaattttagaaatgggcccaaaattggggcaaattgggcaaatggccctaatgggggggcatttaaaaataaagtgccggagttttaaaaacattgaaatgggaaaaacctggggttccccaatttaaagcccttgaaaaaaaatccccttttggaaagtgggcaaaatacaaggccccccagtaggcctttcagatggggt

SEQ ID NO: 542014 - DNA, 185 bp, Homo sapiens
gagcttcgacagcacatgaaactatcaacagagtaacagacaacctacagtatgggagaaaatatttgcaaactatgcatccaatgaaggtctaaaatccagaatctataaggaacttaaacaaatatacaacaagcactgtcccaaaggaagggcagtcagtccagtcgtggcatcgataaaca

SEQ ID NO: 542015 - DNA, 366 bp, Homo sapiens
  misc_feature (314)..(314): n is a, c, g, or t
  misc_feature (366)..(366): n is a, c, g, or t
gtgaactggtagatagtggattgccaaccatatgaaatgacatctgtatatggcagctgacatgtataaagctcatgacggctagatgaaagtaatgattaattaagagcaacacatcattcgaattacccaggaatagcatatcgtacggcggtgcatagaaagcagtgatagagctcacagaaacggatcctcggtatgtatactttagaccacctgacaatccacctgcactacactaggaatctgatcctgtccgaacgctgagtctgcaccttacctgttatgaggctaagaacaccgtcgcggccgantggaatactgcagactgtagccggccttaccatgccgtccagggcctgtttn

SEQ ID NO: 542016 - DNA, 602 bp, Homo sapiens
gcacagagccagctccgtggcgtcgtggccccattactgctgccttgcttcagccacctctcctgcccctccctagtccctactcatggtggacagcagtggggactagggaggggcagtgagtaggagggaggtgcagtccccagcccccacccctcaggtctgtgttacttggtttttaagcgactggttgggatagaaccctaaagaaataaacttccagtggataccggaaaaaaaaaaaaaaaaaaaaaaaaaaaaaaaaaaaaaaaaaaaaaaaaaaaaaaaaaaaaaaaaaaaaaaaaaaaaaaaaaaaaaaaaaaaaagaaaaaaaaaaaaaaaaaaaaaaaaaaaaaaaaaaatttgggcccgtttggcccaagtgatttttaaattgaagaaattttagaaatgggcccaaaattggggcaaattgggcaaatggccctaatgggggggcatttaaaaataaagtgccggagttttaaaaacattgaaatgggaaaaacctggggttccccaatttaaagcccttgaaaaaaaatccccttttggaaagtgggcaaaatacaaggccccccagtaggcctttcagatggggt

SEQ ID NO: 542017 - DNA, 875 bp, Homo sapiens
  misc_feature (338)..(338): n is a, c, g, or t
aatgagaaaaattatatctgaatcaagattcatgttttatttttatttttttgatacagagtctcactctgtcactcaggctggagtgcagtgacatgatctcagctcactgcaacctccgcttcctgggttcaagcaattctcatgcctcagcctcctgagtagctgagaccacaggcacccgccacacacccagctatttttggtatttttagtagagacagagtctcaccacattgcccaggctggtctccaattcctgagctcaggcagtctgcccaccttggctcccaaagtgctgcagttacaggcgtgagccatggacctggcctcatgtntgtcaaactaattgccttttatatttaccccttttgtcatcactttagaatgaaacacttcccatttacaatctgaaagctaccttaatagtcctctgtgttaataggaccgtactattatagtacttataattccatgagatctaaagtatcttctcttttcctttttcttctgctgctttaggggacaattaaactgcacactattgacacgcttgaacattttattcctacctggaaagttacccgagttctggtggagcataacgacactggcgttaatccacctctggtcctcctgtgttgactgctggcccatagttttcatttctcctccctttaacatagaagtgtccgcttcgtcagctaggtaccaggcatgtatagaactgtgctataagggattaaccctatagtttttggcgccctaacagttgatcggccccgaacttattgcgtggactcaaacacgtgcagccctcgctctaacacacgcgacgcacaatcccctctctggtcaacccccccagcactctt

SEQ ID NO: 542018 - DNA, 1172 bp, Homo sapiens
cgtccccctctttctcttctctgcgggtggtgtgtgtgtgtacaaccgcagggttctgtgtttaaggggagcccgtgttccgggttcgcccctgtggggtgacgcccccatattcccaccccctgtgttttgtgcagccccccccgcattagaggaggacacctcgggggcccgatcttccccggcccttctccgggcactttctttagccctttaggccccgcggggggagcgggagtaaccacgagagttttcgacccacccacggggaaaccacgccttatggcagccactttaggggcgcctaatttttagaggtgacccacccatatttatggaaccacacagtttttggtaccacacaaaaaaacgcccagggcgtttgggttaaccccgcggttctccgggaaattttctccccggggattatttctggtctggaccccccaaaggcgggtccctcggtctacaagaggtttgtgtggagagatttcaacccacagcgcccatataaatggggccacacctggggtgggcgccaagtcccactctctattaggggggaggaaaaatttggagaagattgtaggggaacttttcactcctctctataggccactatacggggtttcccctcggacacttcctttgttccccactgggccacacaaattgcttgggagcgccccccaacacacccacaaatggggtgtcccccaactttttcaattctgcacctcgcccacaagagcttgaagttggttttggattggcacacgcacacgttggttgttttggcacaaagtgggaaagagaaggcactcggatattgtttgggaaggcccctcggaggcgctcttgggtgcccgcgagatggcccaagagcccggccacgaagattcaccccttggctcgagatcgtgggagccaactcgcagataaagtttgagactctgtggttgttattcttaaccacccacgagtcacttccttctgtagctcacggagagcaccccctccacccccactttgctcgcacgtatcctagagattctttgtgcttctcgctgcacgttccctcttgggttccactgttttccttgttccctcccacatgcctagctggattgcagagttaagtttatgattatgaaataaaaacttaataacca

SEQ ID NO: 542019 - DNA, 298 bp, Homo sapiens
gtgaatagtgactggcgtgtggtgttagataggggtgccggaggtggatcacagcacgggcctttaggactttgcggcgaggccctgccaccatccacagataaccactctcctttggagagacagggcttggcctgctgccgtgccttagtagaaactgaatgtttgaccatgggccaccaagttaccctgtgatctgagctgcccaccatgaactggggaattatctgacccacgtagccataaagttgggcatgcacagcagtgctccgtcatccaacagagaggtatatacatg

SEQ ID NO: 542020 - DNA, 484 bp, Homo sapiens
caacatagtttctgtataatgtttgaaaacttctacaaggtttcacattgaagctttgtatttttagttattaaatacgcatttaacagaaaagtcacagaattctcacttgaaagaattctatctttcaaaatccttagtacaaaatatagttttccatcatccttactagtggcaactaaaaaaagaaacaaacagatgcttattttaaaatctaggccgggtgtgggggctcacacctgcaatcccagcactctggggaggccaaggcggacggatcacgaggtccggagattgagaccacggtgaaaccccgtctctactaaaaatacaaaaaattagccgagtagctgggattacaggcgtgcaccaccatgcttggctaatttttggtgtttcttttgtttagttttggtttttaatttttttgagatggagccactgtactccagccgatagagtgagtgagactctatttcaaaaa

SEQ ID NO: 542021 - DNA, 642 bp, Homo sapiens
  misc_feature (69)..(69): n is a, c, g, or t
gactgttacatgttacccatgctatcattagttcatctatagggtcatagactggtccgattgggtgtnatgagtccagttatatgttcgggatcctttaggtagtcagtgttgagcttgaacgctttcataactggtgcctgcgtttagccatactatgggtgttaacagtaatactctctgtacaaggctatttcctagtgtccatagatctgttcctctttggactaacagttaaattgtccagcggatttagagggatctgtgagcaaacttagagttgctctaaagtccgatcgtgcactaccagccatatccaggctcggtaagtttgtcgcctctacctatatatcttcccgctcttttacatcatatccgggtgtgctcttttagctgttcctaggtagctcgtctggatgctctgataagagctttggctagccgaacgaagttatttctagttaatgcaatatcagagcgtaataccggattagtccatagcatactatgcatggttatcatattacatcttcaccatccggtactatatcccacgtcaccatttagcttccatacagagtattcccaattttcgttgttggaagttcaaagtttgcaagttagtaatgtgtagttaatgag

SEQ ID NO: 542022 - DNA, 818 bp, Homo sapiens
  misc_feature (43)..(43): n is a, c, g, or t
  misc_feature (101)..(101): n is a, c, g, or t
  misc_feature (115)..(115): n is a, c, g, or t
  misc_feature (117)..(119): n is a, c, g, or t
  misc_feature (125)..(125): n is a, c, g, or t
  misc_feature (174)..(174): n is a, c, g, or t
  misc_feature (209)..(209): n is a, c, g, or t
  misc_feature (227)..(227): n is a, c, g, or t
  misc_feature (255)..(255): n is a, c, g, or t
  misc_feature (286)..(286): n is a, c, g, or t
  misc_feature (303)..(303): n is a, c, g, or t
  misc_feature (310)..(310): n is a, c, g, or t
  misc_feature (324)..(324): n is a, c, g, or t
  misc_feature (342)..(342): n is a, c, g, or t
  misc_feature (354)..(354): n is a, c, g, or t
  misc_feature (357)..(359): n is a, c, g, or t
  misc_feature (365)..(366): n is a, c, g, or t
  misc_feature (371)..(372): n is a, c, g, or t
  misc_feature (375)..(375): n is a, c, g, or t
  misc_feature (383)..(383): n is a, c, g, or t
  misc_feature (438)..(438): n is a, c, g, or t
  misc_feature (444)..(444): n is a, c, g, or t
  misc_feature (449)..(449): n is a, c, g, or t
  misc_feature (454)..(454): n is a, c, g, or t
  misc_feature (459)..(461): n is a, c, g, or t
  misc_feature (466)..(467): n is a, c, g, or t
  misc_feature (477)..(477): n is a, c, g, or t
  misc_feature (511)..(511): n is a, c, g, or t
  misc_feature (521)..(521): n is a, c, g, or t
  misc_feature (564)..(564): n is a, c, g, or t
  misc_feature (574)..(574): n is a, c, g, or t
  misc_feature (576)..(576): n is a, c, g, or t
  misc_feature (581)..(581): n is a, c, g, or t
  misc_feature (583)..(583): n is a, c, g, or t
  misc_feature (598)..(599): n is a, c, g, or t
  misc_feature (620)..(620): n is a, c, g, or t
  misc_feature (623)..(624): n is a, c, g, or t
  misc_feature (631)..(631): n is a, c, g, or t
  misc_feature (637)..(637): n is a, c, g, or t
  misc_feature (641)..(641): n is a, c, g, or t
  misc_feature (653)..(653): n is a, c, g, or t
  misc_feature (777)..(777): n is a, c, g, or t
ggaaaatactttgtttaaaaaaaaaatggggttatttacatanaacaaaaagtctcaaaagtgtaaatggggaaatcttccatttttagattagaattatntatggaaaaaaagnannntttctntagtctatgtttatataaaggaaaatggaactagttatgaatttttagnaaactcctcaaatataaacagaagccaatttaacnaaaacgaagtaaataaantgtgtacagtccctacacagattagtanagtttacaattaaatatacagaattttaaangtgctaaagggaaaggnatcttanattttgggtaaatnttactcaatctaaattanattttggttttnaannngagganngtgtnngtncaggcagnggtgcgtgatatactttctcttctttatttacttctatcattctctttctcttgntcaatntcctnagtgntaagnnngtcanntccttttcgnctttagatcttaaggcttgcaaagaaattatcanggtttaagcntccagtgtcaatttcgctataaatattaccattactttttctnaactcttctngngtttntnttcataatttccaanngtctttttttttttttttttnttnnatatggnaatggncagnaggacaaccacnggaataaccagaagggttgtaatgagaacaacaggcactcccgagcctggctctttgatcagtttctgtttctcttgcatcttctgcaattctgaggaggtgggtttgttctcattttggtttnacaactgcctcggcttctttgatttctggacctcaatgcaa

SEQ ID NO: 542023 - DNA, 1154 bp, Homo sapiens
ggagctactgagggtctaagtacgggcagtcgaagagtgtggttggccaagatgaatcaaatgatgcgcaagatgtagaagtcgagcagtattaaacgcgaagaagttgatgagaacatggtggagaatagagaacggctgaatgagttgcgtagagagctaagattaattgaattgtggtctggagaggatcatgttgacaggcatctaattgtaagaagaggttaatcttacaatgacacaatagggacttagatagactgttcactggttgatgcactaggttggattgataatcactgctaaaaggcggagacgttggtacgcatgaaagtgtagagaaggagctcgcgtagcaaatgatatagaggaacattcctttgtcatcacgtatgcgcatgccattctataggttgggagatttaagaattggtgtcggttgtggtctagagtgatctgagacatgtcagaaattttgccagtatagttgtagatagaagaaaagtttgcccagaagattatcaaagtcgcggtatttcgcggacattgaaatgcgctaattactaggctctttgtgcaagttaaaatggcattcgcttatagcaattgtggataatgttgggagtttttgggtgccccattaatgaatgtgtggttgattactttaatgtgaaaccaataatctttctaaatgtaaaattgtaaggtaattggacacgggttatggacttgggcgggagttggtggcaagattggacgattgggggaacctttgggggtccttttggtaattttaaacttgaaagttgtccatcccaatagcaatttatggtttggaaggccggccaaattgaaggcgacatttttaacatggtcaagttttttgaaaggtattcaaaacaggaaatggttaacgaggattgagctccagggtggtgtcaaactgcagaaatggaaggaaaaggttagacgcacaaatgggattgtaaacgtgggaagttggcattaattggggtggggtaaatataccttaatgtggagaaggtatacacggactcaaattattagtacagttaaaaatgtgggtgaagttgctccccaaagtgttggggtaaacgtaaccagagggtggagaatgaaggttgacgagcaat

SEQ ID NO: 542024 - DNA, 219 bp, Homo sapiens
gctctaaagaaaagaaaaatggaggctgggcgcatgtgcacgcctataatcccagaggctgaggcaggcggatcacctgaggtcaggagttcaggatcagcctgaccaacatggagaaaccctgctgaaaatacaaagttagccaggcatggtggtgcatgcctgtaatcccagctgctcaggagcctggcaacaagagcaaaactccagctcaaaaaa

SEQ ID NO: 542025 - DNA, 419 bp, Homo sapiens
atgacgagttagtgggtgcagcgcaccagaatggcacatgtatacatatgtaactaacctgcacaatgtgcacatgtaccctaaaacttaaagtataattaaaaaaaaaaaaaaagaaccaaaatgcagaaaaaaattccaattccaaagaacaaaaagataggttgggcacagtggctcaccctgtaatcccagcactttgctaggctgaggagggcagattgcttgagctcagcgattcaggaccagcctgggcaacatggcaaaacctcgtctctacaaaaaatacaaaaattagctgggcatggtggctcatacctgtaatcccagctatggagaggctgaggtgtgaggatcacttgagcccaggaggtcgaggctgcagtgagctgtgatcacaccactgcacttcagcctgg

SEQ ID NO: 542026 - DNA, 313 bp, Homo sapiens
  misc_feature (204)..(204): n is a, c, g, or t
  misc_feature (238)..(239): n is a, c, g, or t
tattggtaattaattgaggatttaatttgcatttccttgataacttatgaagatgaacacttttttctgttggccatttggaattctacttctatacactgcttgttgaagagtttaactcatttttctgccaagctatctgtgtcagtcgtctttcgattattctgctggctttctcttttagtgttatagtcacgtccacanctcaaccacttcaaatatcggtgatggcttgctnnaaaattcctatattaaacaggttcttataggaaagtgatgttatatattcacaagggatattttgccatagtca

SEQ ID NO: 542027 - DNA, 668 bp, Homo sapiens
cagcagtggcccctcgttttatcattcccagtccatgtcatcacgtcagagaaaaatcttcaggggtgctaatcctgtgcatcagttgatcatactaacgagaacggtaatgcgacaagatacacatgccttcatctgtacattctgtgataccaggcaaattaccaattacacacagctacttatattttatgaagggcattttttagatgacctcatcctctgtgttattgtgatgggttgttttctgttgtggttgttgtttcttccacgtaaggaaaagtagtgtaaacagtagcgagaaaatggaaaccacagaggaagatgtatttgcatgtttttcctttcagtgttcttacacgttgtatcactgcattgtggtaatagcttctataaaatctgccatagttggattatgcagctttgcaaaaatttttactagattttgcactaactcatattagcttggtcctaccaacttctggaatttatctaattatggtttttcaaagtttctttccttttaatgtttccctgctatgcaaaacctttccagacctcagtttcttaaaagaaagatgtgctacagtccgatcttcttataccggtcaggtgtccggtattcgggttaatttatctaatgaagccatccttttggccttaagtgg

SEQ ID NO: 542028 - DNA, 122 bp, Homo sapiens
aaaccctgacgaagaatgagagaagtaagccgagggcgtctttgattgtgtatagggtggaagtgatcttatcggaatgggaggtgattggtcccaggttgtgactggttccaggttgtgct

SEQ ID NO: 542029 - DNA, 542 bp, Homo sapiens
gcgtcgaccaaggtgtcccgatctcgaatcgctcgtcagattgctgtgacgtacgttgcgggggaagacgtcgcatcggcggtcgataaggctgctgatcaggtgtctaagggcctagacgtcagcctgcacccccttgatcccgatcccgctgacctagcccaggcccgacgagcaatggtcaggctgtgcggggttatcgagagactcggcgctgatccgtcctttaatggtcatgctgaagtgtcgattagcttggcggctctggggctgaaaatcagcgacgatctggcccgggaccacgcccgacaggtctgccaggttgctcgcgacgaccacgttagctgtgaccgttgacgacgaaagccccgacatacatgaccgctcgcatcgcattgtggtggatctgctgagcagatacgaaaacgtcgacgcgcaggaaattttgttataattcaacgagaattccgagagggaactgaggaggacagtttcccgaaatggggcgggtgaagatgggggaaaaagggaagaggttcttt

SEQ ID NO: 542030 - DNA, 815 bp, Homo sapiens
agaggggtcttgaagaagattagattgggaatagaaggtgagtcctacctacaagagaaaatagtactggaagaaggcctggcaggccgaccagaagtgatctacaactatgtccactagaaccctttattacgatagtgtccgtggttagaaggaagaaggaaagagtcgtgcatgtcagactttactgctggtgttaaaggagttagatatctatcatccaatctgtgcaggagactgctagcctaagtacattccccaggatccagactggtgagtcatgctttccaaacttcgcatcaagtggatgatgctggatattctccctattcgatccccctttctggcgaacagtgacctcggatcctgtaagtgcgacagaatccagtgctgtgatgctgatcttccttgaaaccatagccgatgctactcttcgcagtgacgtcgtactctcctcattctgcgctgcaaggccactcttcttcatgtgtgagatgcacataacaatgtttaggatattcgcagtgtaggctttttaaagaccaaaggtagctgaatggttttttgaaatgagtacaactctagcattgtgaagttccagttgtaaatgtatttgtttaccagtaggttttgtggaaattggttcttgtatgggggatggtcctttttcacacagctaggtcttttcagaagtggtggaaattggcagatggggtacttacagtttggactgatattcatcacacctcagataaatgcagagtaatatatagttgcactttataaatggtggttcaagggaaatgtcaaagctg

SEQ ID NO: 542031 - DNA, 755 bp, Homo sapiens
  misc_feature (549)..(549): n is a, c, g, or t
  misc_feature (687)..(687): n is a, c, g, or t
aaattttaccctgattgggtttcacaaggttttcgtaaacttaagggccaccgaaaaaaaccggaaagctctttgccctttggaatggccctgaggttcaaccagggtggtatctcttttaaagtctgggaaccggtgcaatgccttggcccactactaagtggagaagaacttcccagccatttgccatccaccgtggaatgccccagaggagagggctttctcggtatcagcagttaaaaaatttccagggggttattcttgtgtctaacgaatctatagaagttacagcaggcctccgagcgggtgaacattgcttttaaataggacaggcctgaggattctaacacctacctgcatcgggtggccagagcaggccggtttggcaccaagggcttggctatcacatttgtgtccgatgagaatgatgccaagatcctcaatgatgtgcaggatcgctttgaggtcaatattagtgagctgcctgatgagatagacatctcctcctacattgaacaggacacggtagaagactctgccacatttggnaatgtgccgtcttgtccttcaggagagagacaccaggtgtgggtggtgaagagatgacacttactgccacccacaccctgactagcccccaaacccatggattgctcatctttttcatacaccaccatctcactgaancccccatttcgtgatattgtcagaattttttttttaacaaaacttaaaaaatgaaaataaaacaataa

SEQ ID NO: 542032 - DNA, 101 bp, Homo sapiens
tttgtctgcaatccctcctcgttaccggcctaatatcaggcttgtgtgcagagttgggggcacatgcagaactgatgtggagagacttccttgactgaaat

SEQ ID NO: 542033 - DNA, 964 bp, Homo sapiens
tatggatgccaagctggaaaccctgaaggacttggccagcctctcccggtatgtcacgtatggccattggaatatataacaccctggatgtgtatctctctgcctcacgcatattgtggcaggagcgcgcactgatgcgataccagaaatagcaaagagatcatcgaacgccttgcgtttgggagaccattgctgtccttcaccctgaacggcctctcgtctgagctcgatgtgaccagtaggctatagttggtccgtggagtatacgattggccggatggcgtgcatcaaggaagataggcaaggttctgtgaacaatgtcagacagagactatctctgatcctgctagctgggccttggacattccgcagtcgatggtgctcagatagccatgacctctaccagtatagtgcgacgcatggagtatcacgcatcggaccaggtcattccactacctgcaagaggtcagtatcaagaaatcctaataactatagaatattgcacgtgattattgcgcattttcctgcaaggcctcctgaatgagaggcaggctggagatggcgaatattcttggttcagagagctgttgcgttccatcattggacctcatgtcatccgagtcgccagcgggctcatgaagaatgagatggtgcaccgagtctgtctgtactacgagtgctctacctttaacctccgggatgacgggtggctgactggcatggtcccccgggaccgcatccgaaggggcttccatattggacgtcgaagaactgcgatgaatgctgggttgaaactgtataaacagtggggctgtgaacccagggcaggtgacgcggaaaataaggagagggggccaatagtaaccgccaggtacccaaaacaacggggtgtgtccgggaattggttttcaccccaagtgatgctatggttaaacgaccaaactgtcatatcacagactacatg

SEQ ID NO: 542034 - DNA, 396 bp, Homo sapiens
cgtgcactcgttgttatactttataatggtaggaatcttatttctgtatatattataggaatcttatcttttctctggaaggattatttatccagcaccccctggctatccattgccagctaggctatatagcgagttgtctgatagatctgtggttccttcgatgagctctgtgttccactgatctacttatctcagctctctgtctgtacaggcgggtttgcttgtgcttcactttttcgcacttcacagacactgcgtatttcactatttgacggtttgtgtgctaccctgtattgagcatgtctattgttgccctctttgggtgccgggctccacttcgttctccttgtcgtcgtctgtttcctgtgttggccccctgttgaccctgtcggg

SEQ ID NO: 542035 - DNA, 288 bp, Homo sapiens
gcgagtcaagaacaccacacacgtttcctggctaaagcacccagtggtgtcatctaacagagtaaaagaaacaccagaggaagtgtaggaatcatacattccgttctggatgtgtacggtataaggggcatccaaatggaaacattcagtagcaattcgcatagagtggtccctcagcactcaggagcagaggtcaaaacactgaagcacatataaaatgacatactcaagcaactacaagcatgcaaacaatgcacacatcagaaaagcgcatgcagcaaagcccta

SEQ ID NO: 542036 - DNA, 319 bp, Homo sapiens
  misc_feature (16)..(16): n is a, c, g, or t
  misc_feature (143)..(143): n is a, c, g, or t
  misc_feature (214)..(214): n is a, c, g, or t
  misc_feature (265)..(265): n is a, c, g, or t
  misc_feature (292)..(292): n is a, c, g, or t
gaattcggcacgaggngaactagtctcgagatatgtgtgcactggagagatgagggaggacagggtgttgtgattcttatggttatgggttctttctaatttggtcttgaggtctgtcaagagtggccataagtcaagacagncactctaggagagccctgattgggaaaagttaggtttgggtgtgtggttcaggtgagacgcaatgaggagntgaatgtaaaatgcatgaaatagaagaaatatgttacttacagatccaggngaggttagcggtgccaacgggaggctnaagaggaagtttagagatttcagggag

SEQ ID NO: 542037 - DNA, 709 bp, Homo sapiens
  misc_feature (108)..(108): n is a, c, g, or t
  misc_feature (600)..(600): n is a, c, g, or t
tccggccaggcaagccccggcaaccacgagcccagccaattcagcgccccggactgcaccagagccatggtcggcagaagagcactgatcgtactggctcactcaganaggacgtccttcaactatgccatgaaggaggctgctgcagcggctttgaagaagaaaggatgggaggtggtggagtcggacctctatgccatgaacttcaatcccatcatttccagaaaggacatcacaggtaaactgaaggaccctgcgaactttcagtatcctgccgagtctgttctggcttataaagaaggccatctgagcccagatattgtggctgaacttggagtccctgccattctgaaaggctggtttgagcgagtgttcataggagagtttgcttacacttacgctgccatgtatgacaaaggacccttccggagtaagaaggcagtgctttccatcaccactggtggcagtggctccatgtactctctgcaagggatccaccgcgacatgaatgtcattctctggccaattcagagtggcattctgcatttctggggctttcaagtcttagaaccctcactgacatatagcattgggacactncagcagacgcccgaattaaatcctgtaaggatgggagaaacgcctgacgatatttgcatgagacaccatgattttgctccaagagctctttgcctaaacttcagcaaga

SEQ ID NO: 542038 - DNA, 224 bp, Homo sapiens
  misc_feature (12)..(12): n is a, c, g, or t
  misc_feature (34)..(34): n is a, c, g, or t
  misc_feature (116)..(116): n is a, c, g, or t
  misc_feature (121)..(121): n is a, c, g, or t
  misc_feature (201)..(201): n is a, c, g, or t
aggtggtgatancagcagagccccaactctgccnccttgtgtgcggattctccgctgtgctcccagagttactgctgccagactgaactgcaaggggaggatgtaggagcctgcanagctnacacctactcctgtggctctggagtgggcatcttcctgagagtacgggaatgtcaggtgctatttttagctggcaaaacnaaaggctgtttttattctcctcc

SEQ ID NO: 542039 - DNA, 98 bp, Homo sapiens
catggatttgctggtgcagtacaactaggcttaatagggacatggtgaaacactgtctctactaaaaatacaaaaaacgttagaagcttgaattcgag

SEQ ID NO: 542040 - DNA, 153 bp, Homo sapiens
gtatccccacctgtgcggtgacaggtactttgacccacccaacggccagttcagctaagtcagccaccagcccctaagggaagaagctgactacgcgcttctgccagctgatcctagaccccatcttcaaggtgtccgatgcgatcattaatt

SEQ ID NO: 542041 - DNA, 329 bp, Homo sapiens
cgactctacattactaccagacaaacttagccaaaccatttacccaaataaagtgtatgcggaagaaattgagacccgtggcaatagatatatggccgcaagggaaagatggttatataccaagcgttatatatgcaagggcttacccctataccttctggataatggattaacttgaaataactttgcaaggagaggcaaagcttagacccccgaaaccagacgagcgttcttagaacaggttaaagagcacacccggctatgtagcagaggggtgtgcaagatagaatattagatcaacttttttggccacagaccctcttttccct

SEQ ID NO: 542042 - DNA, 539 bp, Homo sapiens
tggtaacactagtgcagagcaaaggaggggagacatgccttataaaaccatcagatctcgtgagaactcactcactatcacgagaacaggatgagggaaactgcccccgtgattcaattatctccacccggcccctcccatgacacatggggactatgggaaccaaaattcaagaggaaattagggtggggacacagccagaacatatcacgttacgacactacggcacaattcatgacgctgtactttagacactacaaacgcagcactccgaaacgtcacgtgcacatgcgtgcgtgtgtgtgtgtgtgtgtgtgttagaccgccggactgaccgggcctaagacgactatctacatattcatgacggtattcgggagctaccctagacctgacgattaaaccatacaaacaacactaaatatacctgagtacttaatattcatgaggtcttacttagaccatccactggtgacacccattcaggcaccaggtatactctgcccagtaaaacaccaataacacccagaaaaagctcc

SEQ ID NO: 542043 - DNA, 603 bp, Homo sapiens
gaaagccattggcacgatgtgcagagttgaccgcctataccttctcacccggcaattctactctcaggttagtaccttagataaagggctgccaacgttcagaaaatgacaagcgtgcgaaagttcacggcagcttgactcctaagaagctggaaacagctcaaatgtccccagtggacggggcaggcaaactgtgacatgaagccagtgaaggagtcgccgctggggtcagcagcctggatgaaacagcgcggtggtgggctgaagaaacaagacacaggaggctgcctgattccacgagccacgctgaatttaggccgaacactcatggctgcgcagggagcagtcttggctggggtggggagttgtcaacaggtgggggcgctgggggccttccagggcctggaaatgtgccctgtccgccctttcccaccaggccgagcagctcccagctccatctgtccaggggaccctcacccccttgctgcccccacccagggcatttccagagccctcacccaggggacggcgcagaagccgagggtgcaccgggctccccagttgtgcgcgagcccgagtcacgggcagggggacagcggccgc

SEQ ID NO: 542044 - DNA, 335 bp, Homo sapiens
ccagctcagtgtatggtgcagttggcaagatcccaagagggttttctgtgaaaggtagaatgagagctgtggcttgagaagaaacaggcagcagggagtcccatcgtgtcagggtgtgttactactcccctgtaggaacacaagaaaaaacaaccaaccctaaccagctgtcacgtgtgcacatgttattagagtcctggtctcctaaggtattccaaccttggcccccatcacttccaaggacccaatattattgaaaaagaaaaacatattgcaaaattgaaaagttgttttgctcaccttacactttggtatgtttgtacccatcacaaact

SEQ ID NO: 542045 - DNA, 329 bp, Homo sapiens
cctttccgggggttttgtcccccccacggtggaaacccccccccttaaaaaagggtccggggccccccttccaaaaaaaaaggggccccccccccggggggttgtgggggggggtttttaaacccaatttttttacccgccccggttttttgacccccgggttaaaaggttttttttgggttccccctttccgggaggggtttgttcccccttgtttttgaagaaaaagggggaaaaggggatttcctttttttgaaagggaattttttttttcttccttgggttggcccccccccaaatccccaaataattgggatttggttttggta

SEQ ID NO: 542046 - DNA, 521 bp, Homo sapiens
  misc_feature (57)..(57): n is a, c, g, or t
ctcctgaatgagcacaccccacaacctgaggatgactacagcaatgacctgatgctntccgcctcaaaaagcctgctgacatcacagatgttgtgaagcccatcgacctgcccactgaggagcccaagctggggagcacatgcctagcctcaggctggggcagcattacacccgtcaaatatgaatacccagatgagctccagtgtgtgaacctcaagctcctgcctaatgaggactgtgccaaagcccacatagagaaggtgacagatgacatgttgtgtgcaggagatatggatggaggcaaagacacttgtgcgggtgactcaggaggcccactgatctgtgatggtgttctccaaggtatcacatcatgggccctagccttgcggtaaacccaatgtgccgggtatctacaccagagttttaaatttcaacacctggataagagaaactatggctgaaaatgactgagtatcacattgtcccatgttctcaataaagcccaccatgcagcaaatgaa

SEQ ID NO: 542047 - DNA, 749 bp, Homo sapiens
ggacggagccgagatgggggcgggcgtacggtgacgcactcgtctgtaccctcatctgcggtgctcatagacgaactccgcaatgaggacgttcagcttcgcctcaacaggcatcaagaagctgtccatcgcatgcgcgcttgtgacctgggggttgaaaggagccgaatgtgagtcttctgccatttccttacagataccatcatatgatgaaagatgaggtccttccgtggaccctggcagtaactagctgggaaccttcactaccctggctgggaggcccagagatacgtgcactgcctgctgcagcgatggagtcagctggccacgagtggaggagacagtggtgcgggacaaggcagatgagagtcctatactgggactcgatcgtcgacacagagcaactcgccctctgacctggaggcgcacttgtgtgccgctagtgaagcgagtggcgggtccggcgacgtggttgcacctccgcgcacctcggccatgcggtctcttactccgtctgcaatacccccgagtgtccagagctgtgaaggctggaaccttcgacagttacttccggaacctgtgctcagatgataaccccatggtgcggcgggccgcagcctccaagctgggggagttggccaaggtgctggagctggacaaccgtcaagagtgagatcatccccatgttctccaactggctctgacgagcaggactcggtgcggtgctggggtggatggcgtgcgtgaac

SEQ ID NO: 542048 - DNA, 281 bp, Homo sapiens
tgcatcctttcatagagtacatgtgtatgccttaagtctttataacccctggattagaggctgaattaagaccttatgtctggggacaagtagaccacttccacagcttcgatgttgaactcatggggttctgggtggccagggcatagtccagtatcaaaagaatttttaaaggcaatccctgctggcaaggtactttctgacttcagggacaaagcatcaatgaaattaatccagaaagaatgattcttgttgtccaggcctccttatacaaccacaag

SEQ ID NO: 542049 - DNA, 201 bp, Homo sapiens
tgcgccagagcgtgtaggccgacatcaacggctgcgccgggtgctggatgagctcactctgtctaagactgacttgggattgcgatcgagaggctgatgaagagtgctacttgaggaggacctgacgagggtgcaggactttgcacccgtgtcggcccatcaagtggtgtggtgtcccccggatgcttgcccgtttgcaaa

SEQ ID NO: 542050 - DNA, 417 bp, Homo sapiens
  misc_feature (79)..(79): n is a, c, g, or t
agcccatgtaattagtatcccttcccacattttccttcctccccctcaagagcaccttaaacttaactttgtaaaatanagtatttatttaatattgtgaattatttccttttaaagactttatccccaggctgggtgcggtggctcgtgccctgtgatcccagcactttgggaggctgaggtaggcggatcacgaggtcgggagttcgagaccagcctggccaacatggtgaaacctggtctctactaaaaatacaaaattagccagatgtggtggcgggcacctgtgatcccggctgctcaggaggctgagacaggagaggcccttgaacccaggaggtggaggttgcagtgagccgagatcacgccactgcactccagccggcgcgacagtgcgagactccatctcaaaaaaaa

SEQ ID NO: 542051 - DNA, 252 bp, Homo sapiens
tgaggtcacctagaggatccccttgggggtccatcagggtgacagaagtgagacttgtctcaaaaagaaaagagtacaaaaattagcgggggcgtaggggcacatgcctatagtctcagctactcgggaggctgaggcaggaggatggcttgagcccaggagcttgaggatgcagtgagccaaggaagtgatgcctttatgagcgggtagaacgggaaagtatcctcaggggtgacctagcggggaggcttt

SEQ ID NO: 542052 - DNA, 193 bp, Homo sapiens
cagatatatactagcatcttggatatctagtaacttctatgatcattactccaaagttgtaccagaaatggttctatttcttcattatccacctactccattgcttatatgaggtttaaggaaggaaggcggtatactccctattcaatatattttttctaaaatccaacttcatacgcccaggtcagcagga

SEQ ID NO: 542053 - DNA, 185 bp, Homo sapiens
taatagcggactgtatccagcattactattacagcataaactattacagcataaattattacagcataaactattacagcataaactattacagcataaactattacagcataaactattacagcataaactatggaagtccagaaggtttccatagtttatgctgtaatagtttatgctgtaat

SEQ ID NO: 542054 - DNA, 272 bp, Homo sapiens
ccgccccacatctcccattttcctagatctcaaagacctcagctccaggaggggagccatttccactctaagattctaagactctatagggcagagatgaggccgggcaggctgagtggcagagaggacgctgatcccacctgtatcctgcgtgctgtcttgcagatccccccctcccaccccatcttctctagttggcccctgagaaaatgggacgagaatggggggaagagggaggcagaagtacatctcctgcttacatgggggtttgt

SEQ ID NO: 542055 - DNA, 674 bp, Homo sapiens
  misc_feature (397)..(397): n is a, c, g, or t
  misc_feature (498)..(498): n is a, c, g, or t
  misc_feature (589)..(589): n is a, c, g, or t
  misc_feature (629)..(629): n is a, c, g, or t
tgtgcataaaatcatacgcgatgcggagggagcagatgcaaaccgctttcaggaacctgtgctcatgcgacaggggggctgcttttcaccaacggaacaggataacacttgatattggcttggatgtgaagcaagtgccatacttttctggagggaagggaaaatgtttcaaaggctatgaataacagttctagggcatctctgactcgcaacaagtagagtttccatctgattcgaaaaacatgccgctttatatttacccttgcggaacttatatacaaaagccgtatgtttacacatcggagcaccgaaactttatttatgagtgcccgactcgtgatttaaccgctcagcatgcagattggtgaacgagattacacactgcatatcatacagngagcatcttctgcctggtaagtgaatgaactatcctatattctcggcaacggtggatttcatgactattatgagttcctaaagaagccggctctagggagngagtactgtgtgactctggtgaatgacaattgtgctgtagtttccgatgcagacctcaggtctcgttgttgccctacggatagacagtttnaccgcatgcttaatgttccatatacgttctttggacaatnaaaacctttttttctttgggattgggacttttccaaagatgtggg

SEQ ID NO: 542056 - DNA, 324 bp, Homo sapiens
cagagcttatcccgggtctgggtacagtatagtagttctatctgtattagtacgttttcatgctgctaataaagacataccagagactgaataatttacacaggaaaaaggtttaatggacttacagttccacatggctggggacgcctcacaatcacggcggaaggtagggaggagcgagtcacatcttacatggatggcagcaggcagagagagagcttatgcaggaaactcccgtttttaaaaccatcggatctcgtgacactcattcactatcacgaaaacagcacaggaaagacctgcccccataattcaatcacctcc

SEQ ID NO: 542057 - DNA, 217 bp, Homo sapiens
ctcggccgtgtagagcggtctcatacagctggccaagaggcacaattaaaggtgctcaacactgctaattattacagtgaatacaaatcaaaaccccagttaagaatcacctcacattggtcagaactggtatcatccaaaggcctacacataaatgctggagggtctggagaaaagggaaccctcctatactactggcagagatgtaaattggttc

SEQ ID NO: 542058 - DNA, 222 bp, Homo sapiens
ttttttagggtttacctccccccccccccccccccggtttgggttttggggggcccaaattaggagcccccttattaggggccctagggtacagggttttccccccccggttcccccccggtttttttttttttttttttcgcccccttttcccccaaaatgggcaagggggggggtttggtttttcccccctcccatttttcccataaaacggggtgggga

SEQ ID NO: 542059 - DNA, 162 bp, Homo sapiens
gtgcttaagtaaaagtcacagggttgctatgggcatgtcacttacatcaatagatagtagaaattatgacaggcaaacttttcaaagattcagtgagccctaagggaggacttgatttcagacgggaaggggaattaatagtcaataaagaaggaaactccg

SEQ ID NO: 542060 - DNA, 407 bp, Homo sapiens
gttgtggacaggaaagcaatgctgtgcctactgggggactagtgctcataagaaccgatgggcactgacttctcacgcaccccgcgtccctgtctatgcgactcatgaatggagacaggcctctgactagacatccagcagcagactgagataccgagcacaagaccggcgtgtcagagagatgcagactcactggcaatgggtccaactcatcttgaataaaatacacaaagaaagaaagagagagagagagagagacagagagacagagagacagagagacagagagacagagagagagagagagagaacccgagaaaccgaaaattgtttttttatggaaggtttaaacaaacttggaaatagctggttctctccgaaaactatttaggtagtgcctcttgtat

SEQ ID NO: 542061 - DNA, 501 bp, Homo sapiens
  misc_feature (77)..(77): n is a, c, g, or t
  misc_feature (86)..(86): n is a, c, g, or t
ccccctctgtaaacggggccgccttcctttccacattccaagggtacctttaggccttttagagaggttaatttctnccttaattntagggccctcaacctcttggtgtttggggcaattcttttcccttcaggcttttccaaaccccaacggtttgatttgggtttaagaaatgtggtaattccccatggagaagccgggaaaggggcttaaaaccccggagttttcctgatccatgggcccgatggacatagacccaaggaaaaggaaggacgttttagaaataaaattcgagctggtcatgagaaggccttggaagaaaccaaagaaaaatttagaaagtccagagagggaattcgaagcagaaattcagacaaagaaaaataaggtagtcccaagaatgaagaataaaaagagaacaagcccactgcccaccagtccctattcccaacccttgtaggaatacgtggtggagacccagaagataatgacataagagag

SEQ ID NO: 542062 - DNA, 245 bp, Homo sapiens
ggttcccattgaagtgtcctaaagcagctccttggtccctgttggatcaggttcccatttcccagtatgaatggtcacatgcatcctccactttccacaaaacactgtgatttgaggctcagcaacagcaaatcctgttccggcattggctgcaagagcctcgatgtagccggccagcgccaaggcaggcgccgtgagccccaccagcagcagaagcaggagcctgaccgtggctgcggcggccg

SEQ ID NO: 542063 - DNA, 114 bp, Homo sapiens
  misc_feature (106)..(106): n is a, c, g, or t
tctatgaggatccccggaaactggtgatggtacatcttgcgttggaatggattcaagagagaaggaggagacggtgcatttagacaaccctcttgaagagttttanctcctcaa

SEQ ID NO: 542064 - DNA, 662 bp, Homo sapiens
gtgtcgtttgtttgtttcggacagttctgtgtggcacgacataggttcctgcttgacacaaccaaagaaattgggggagcgagggtccgattattgttcgcattatttgttgtatatgaagtgggtgaaagttctccactgtattgtttgcaattctggaatgcatctttctttcaataatctagagttagagattccagaaacagataattaatgttgaaatggatgtagaggaagttgaagcaaaaatgtgtttagtctaaaagtacttagagaaatggaaaggtcttaatgttcgagtgttttttcccttcaatgatgaaatgttctttgctaagaacttaatgtgtatgcctgtaagtagatgtttatttatccttttaaatgtcgcaaagtgctgggattataggtgtgagccagcgtgcccaagtggaataatgtactctttaatgtctcccaaccataatcacttttgtcaggctataaactcatactcagggagtagtgctgtggaatcctaccattcgttcatgatagaaataggaatccgacattcttcaactggttggccctgatagtgggtttacaagcaattttcgcaaagaatcatgtggaccaagccctaatggcgccttgacaacggtaacctcaccgcctttgtt

SEQ ID NO: 542065 - DNA, 92 bp, Homo sapiens
tggattcagaaaggcagtttaatttaagggcaaaattagggaagggttatgcccctccattccccctcctcctaccatcagtcctatcccaa

SEQ ID NO: 542066 - DNA, 1067 bp, Homo sapiens
cgtcgctgtgggtcccctattagccttctttgtgtgtggttcctttctggatatgggtgtgtatcttgtgaagctctgggggggagccccgtttttttgtgggctcttggggtgtggcgccccactccctcggagttttgtgggcccacactggtccgccgcctattgtgttggatactctgccagcggtgcggggggtgttttgtttgacagattgtctcgtgcgacacgcggccgctgacccgcagggggattcatcggggtgtgtgtttggggtgcgccgttggtaggcgccctctagagcggccggtctcgcgcccactgtgtgtgcccacccggccgtgggttgcccgtcgctgctccactgtgtggagccctctgggtggctctttggcgttttttgtgtggcacacccctttggggcacaagagccatattccccacaggtgtggagtccccgcacgagtgtgtaccacaatggcgcccgcacaaagggcccccctttgtgtgtcgcccacatagtgtggccactctcttgtggcacaaaaaagggcgcgggtttgagaggtttctccactgagagatattggggcgaccaaagagtgttaggacacacgggttctcctcgctgtgttctggaacacttctccacagcacggctctgtccacaacacaccagaggggtctccaaagacctttaaggggttcattggacacgaaatttgggaaaggcacacaagggaggaaaggggataactccttactcacccctaggagccccaagggttttggacacaatctttgacttgttctcttctgtctcccctctcacagacgctttgcgcccttggcgttttttatgaccctatttaccttccagcgctgagacccacatttgtttctcctttctccccagcgatctcactctccccaggaagagacccaagttttcccaccccataatcctttttgcccgacccctagttccctttggtccacccagacttgttatcagcttttagggcccagggtccaccaatagaaataaaggtagtaattaggaaaaa

SEQ ID NO: 542067 - DNA, 172 bp, Homo sapiens
gttttagaacaaatcgacaggatctaaagagatatcaaagcacgattttagataacctaaacggaccagcctatacgaagttgatttatatctcgatgtcatgtaaaagattgctgttcttggagtctggcaggtctagtcgaattgatttcctgcgtttctttcagttttt

SEQ ID NO: 542068 - DNA, 1602 bp, Homo sapiens
aatgaagcatcgcggagagaagtgagtgctgtgcctggtgacgacgtgcgtgctgtgtctgtgcacctgtggtgtgtccacctgagcagcctgcctgcgtgcacctggtgaacacaaaaaacacaaggcacctgtgagttgtgctgtgcatgtgtgctgtgtagctgtgtgtgctgaactgactgtgaatgctgtgagcctggtgcaactgttgggtgtgctgatgctgctggtgacgctgtgtgctgtgctgctgtgtgtgcctggaaggcttgagtgccctgtgatgcatgcatctgcacggtggctgtggatgcttgcatgtccatgtgcatgatgccctttcctgagtctggggctgctgttgaatgctgtgtgagaatgctgctgattgaccgggggtactgatggtgcctgtttgccagcttcgcaaaagctatgctcagtgctgaattgcgctccttcgacttcaggcaatcggatggatgacttagacaaaggctcctgtgtgccagaaggtctggggagcttgaagaccctttgtggagtgttagattgcgcgattcaactgaacatgtgagcgtgctgggtgctacccaaatgtggaggtgacgcccctgttagagcagtgcttggattgtcagtacaagcgccatagttagggcctttgccggaacatggctgagcgatggatggcttgccgtggggagcggaacactggcttagcggcacagtctttgcgcatatcgtcggactggacagaggctgcccctttggcctttgacaagcgcagaaatgagggcatagcgtgtggacagtgacattaacaatgaccccccttacgtggaggcactgtggaatcgacgcccccttttggggctcttgcggacctgaaatcgaacctttagtcaagggcccctttggaggcatcttctgcatcggaaacgggcatgcgccctggaagccaaggtcctttggctcacggcacaacgtggcacgcgcacaacgcgtggacgcccttggggtccaaaggcacgggacaaacgcactggtggggcctcccaaagagggctatcacacctttggtggcagtgtgggacacgcgcattttgtgcgacgcgcaaaggtgagaagggtttcattgggggactgtctttcaaacgggcgacaccgttttcacttgagagagactttgggagacaaggctggcaccggctgtggcaaagggtctctccgggggggggccaggagagagtccggacgcggggcatagggatgtcatcccccatttgcttataacacgtggtgttgtcgccccccgtgtgttgggctaaacacgcttgttcgcaggtgggatgacgcctttcgaaaacccgtgctgttgtcgtgaactcccatttttgccgcagatattgtgagaatttaatccccacttctcaccccgtggacgggaaagggcgggagcgggacgcacaccgcaaggtgacgaatactctgttttttaaacccgctccttacaactgggctgatcccaacaagaggcgggtcgagtgattccttcaccacaggacaacgagataggacgaatacggaacaacggtt

SEQ ID NO: 542069 - DNA, 180 bp, Homo sapiens
aaggagagaatcagaagaggtggtatgtgtacggagaagttaggaaaggtatcgaggtttagcaggagataactgaacatttagaaaatcaggctggtgccagaaagagggtaggcccgtgaatgcaaggctaacagaatgtggaatctgtgggttccttcttccatagcgatgagattt

SEQ ID NO: 542070 - DNA, 809 bp, Homo sapiens
  misc_feature (27)..(27): n is a, c, g, or t
  misc_feature (70)..(70): n is a, c, g, or t
  misc_feature (84)..(84): n is a, c, g, or t
  misc_feature (92)..(92): n is a, c, g, or t
  misc_feature (118)..(118): n is a, c, g, or t
  misc_feature (134)..(134): n is a, c, g, or t
  misc_feature (146)..(146): n is a, c, g, or t
  misc_feature (211)..(211): n is a, c, g, or t
  misc_feature (241)..(241): n is a, c, g, or t
  misc_feature (278)..(278): n is a, c, g, or t
  misc_feature (296)..(296): n is a, c, g, or t
  misc_feature (298)..(298): n is a, c, g, or t
  misc_feature (557)..(557): n is a, c, g, or t
  misc_feature (617)..(617): n is a, c, g, or t
  misc_feature (623)..(623): n is a, c, g, or t
  misc_feature (625)..(625): n is a, c, g, or t
  misc_feature (694)..(694): n is a, c, g, or t
  misc_feature (804)..(804): n is a, c, g, or t
tggagtaccggcgatggcgccaggtgnccccagcaaaccccctccagagctgcccccggatggcacaganaaggagggggcttnggagtaanttgaggctgtgacgcgggtcgacccncggtgctgggcaagtnagttctgctgtngccaagagaggtgcagaggtcgtccctgaggcatagaggtcgaacacaggacgccgtgggccctnatgaaaattaagacataaaagcacaaaaanggcgcaaccagacagcattggcttcagacaggcaggncacggggcccctcgtgtnanctgtgaatttccaaaaagggcaaggacctggcactgactccggccagtggagaaggctgtgccgcccacccggccatgactcagacccagaggctgaaagcgacagacggggccgcaggcaggcagctcccgggcgtctcgtgaagacacttcagaaggaaaaaatcctaaggaacagaatcctgaatggagaaaacccaacttttttaaaaaagaaggaagtgtatgatgggaatctacggggtgggttttctttaanaggtgagaacttggaatcttgcaagcactgggagtggactccggcggcggcgcagaccgngagcangngagcgtcctcgggccacctgcctcaggaagagttcctctggcggacgttcttgcctttgtcattctggngctgcccgctgctcttcagggggtgcagagccggcgtcgtcatcatccagggacgtcctcgggcttccggcgcttctcgtagatgaagatgatggtgaccagcaccagcncctca

SEQ ID NO: 542071 - DNA, 111 bp, Homo sapiens
ccatgctctgctatatgacgcctggaaggggggtcacccaagtctccctgctgtcatttcatggaggccgacccaagtctccctgtgctgtccacctcctctgtgctatcc

SEQ ID NO: 542072 - DNA, 321 bp, Homo sapiens
  misc_feature (180)..(180): n is a, c, g, or t
atggggaggggagcaggcaggaggagcagaattgccaacattgcacagcctggctgtcgctctctgattcaccactgcatgtgggcacgtgttgccccatcaaaccatgaccgcctcttgtgccaatccctgacctcagagcacttagcttgggttcaggatcaaacagagtgacttganaaggaagtagggttgtgaggtgcaggacaagggcaagaagggttgcaaaaggtcttggagttgagctttggaaatgtttggtatcagcacattgggcttttacttcagcagcagagaccttcgccaattccaaggaggagg

SEQ ID NO: 542073 - DNA, 461 bp, Homo sapiens
  misc_feature (2)..(2): n is a, c, g, or t
  misc_feature (77)..(77): n is a, c, g, or t
  misc_feature (83)..(83): n is a, c, g, or t
  misc_feature (116)..(116): n is a, c, g, or t
  misc_feature (145)..(145): n is a, c, g, or t
  misc_feature (154)..(154): n is a, c, g, or t
  misc_feature (222)..(222): n is a, c, g, or t
  misc_feature (324)..(324): n is a, c, g, or t
  misc_feature (332)..(332): n is a, c, g, or t
  misc_feature (338)..(338): n is a, c, g, or t
  misc_feature (343)..(343): n is a, c, g, or t
  misc_feature (372)..(372): n is a, c, g, or t
  misc_feature (385)..(385): n is a, c, g, or t
  misc_feature (397)..(398): n is a, c, g, or t
  misc_feature (403)..(403): n is a, c, g, or t
  misc_feature (427)..(427): n is a, c, g, or t
  misc_feature (446)..(446): n is a, c, g, or t
  misc_feature (451)..(451): n is a, c, g, or t
ancggcggcggcggcagcggcggcacagctcccgcagctcctgctctggtccgcctcggcccggcggcggccatcancccccncggcctcggctcgaggggcggggagctgcggcncccctcggtccgaccgacaccctcccctncccgcccgnccgcgcgccccgcggcccgcggcccgcagtccgccccgcgcgctccttgccgaggagccgagcccgcncccggcccgcccgcccggcgctgccccggcccccccggcccgcgtgaggccgcccgcgcccgccgccgccgcagcccggcttgcgccccgccgcctgccgcnttcgccantgggcntgccncttgaacagtaatgactctgagtactcantcgcaacgagganaaggtcgcacgnngaggntaacaaaaagaactagaatcagcngtataaggacaagcatggncaacngggccacgca

SEQ ID NO: 542074 - DNA, 244 bp, Homo sapiens
tgaaatccgctggctgtagacttggtctactaaaatacagcggagatagtctctatcttagggcacttttctttctcctcctagtcagctcacttccagacctttctttttcctccctgtatatatccctgtgacaacgtataaggcagaaccgagatttgtatgttttagctctgttctttctttgctggttaaatttatagagtttaaggaagagctcattactcagaaccttaacattaaa

SEQ ID NO: 542075 - DNA, 1123 bp, Homo sapiens
cagaggccctaggaggcaagcacttaaccatgtttcaggactagaaacgaaacatgtgacaagacctttaaaaacaaatagaatgggatggaataaagttggatgagtaagcaggcatcaaatcattcagaaacttgttgtccaagttgaagaatttgtttagtattgtataataaatgcagaggaagctatatacacttataatttacattttttaaaggccacgttgtagctcaatcggatagtttgtcttttgatgggatgtagtatacagtatcatcatggtatattccaggcaaaaatatttaacttgaatctgtcaagcctttgcatctaacacagtttataaaaaatacaacagatagatgaacaaactaaatgatgccagaggaagtaactagacagatccagaaggtgaaacattctgcaggataactggcccatctcttcaacaatttgtcatgataaaagcaactgctttatgaaaagaaatttaagggacataacagtttgaattggatcctggtttgaacagactgtctataaaatgcattttcaggaccattaaagaaatatgaatgtagatggactgagtattggataaaatagaactgtattgccatggaaaagatcattaactgaaaagagcaagtcacgaaatagtatgttacagcatctcattttggtttaaaaatgcacatatatgtatttatgtacaactaaaaaaatagtgggcttataccctaagggttagtatgggtaatcttggaagtggaaatgtgtattttttcttgtgtttgcctatctttttcatgtaacttttccacgcctggcgacagagcaagactccgtctcacaaacaagcacaacacggtgtaggctgccttacagaggagaatcctgggacaagctcacaacaatacttctcaaatgagggcttcccatggctggtgggaacatctaagggccagtaaggcatttctggttaaaggtctcacaagacactcgggaaatatccagtggtccggccacaattccaaggacgggttccttagcagggttcattttccggaccagtgtcacgtcaacatccttggcgtgatcaaggctatagacggatgaa

SEQ ID NO: 542076 - DNA, 147 bp, Homo sapiens
cattaggggccagagctctacaaggaattctggcctgactaacaattaacaaagaaggacagtaggagcaacaaaagagaaatccaaagtgatatgcaatggaggctgcctctgtactggaagatcttcctgctccttgtgctcccc

SEQ ID NO: 542077 - DNA, 942 bp, Homo sapiens
gcctatccttgcgtcgccacagtcggccaccggggctcgccgccgtcatggagagcggtagtggcggcctctccttgtgtccagcttcatccctcctgtggctaccacactctgtgtgtgtctaccgtcgtccctgtcactccgtgtaccggcacgaaaggacccgggtcctcccaagagctcaagggagctaaaaaagttcagtttggagtgaagatttacactgagtattctttcatgcaagctccaggaaagactgcgtgccttatgctgtgatacgaatggagctgtgacgtggctgttacaacgaatacgtcttatagcagccacgtttcgttggggaacaatcatgcccgaacgagggtgctaactcacacgcctggacgtgaaacatcctattcaggaaggcaacaaaggaatgaggttggcttggcaacaatctgaaaactcaatcgccacccattgtgcgaattagaatccggcttcgaacatgaatgcatattcccttcaggaaagcgtacccagatcaagaagtcggccccttctggaaccgtggtgtgcccccacggatgcatagggcggtgtgcatagtgggccttgctgcggagattgctcgaagcctcccatggtagcctcagaaagcgagtctagcgtgtctagcagcactcgtgtattgcagtaaaggtaccaccccctttcgaattacagaaaccgttcaccagaattgctcagtcgagtccacttaacattcagatgagctggagcgtgcccccaagagtgccttccaaagagcaccgtaggaagcatgcatgaagtgcttggtggtgccaccattcaacaagggggttgtgggaaacatgtgtccattggaagaccaaatttttttccggacatgcaggccgcccaaaagaagtcgttcggtaaaaacttaaacacgaggac

SEQ ID NO: 542078 - DNA, 347 bp, Homo sapiens
ggatctctagactgactgattatccaaaataggaaagactctaaatagctcccaacaggagactgggcagataagccaagcatacccattacgatagcaccatcatgctgccaccaaacgagaggcagctctctatgtgagctgttactaaaaaaagtctgagacatactattaagagaaaaaaggaaggtgcagggaacacatgtacagcatgacccgacttacaggtttcctaaaggtctgtctttgcatagtatatatagtaggctatgcatgcttgcctatgcacagaaaatttctagaggaaaattaacaggcctttaacagtaggatagtacaaatgaagt

SEQ ID NO: 542079 - DNA, 215 bp, Homo sapiens
gagagagagagagagacagggtttcgccatgttggccaggatggtctccatctcctgacatcaggtgatccgccccactcagtctcccaaagtgctgggattacaggcatgagccacggcacccggcccaagaaaacttttttaatggcacaatttccacaacacttaacttgcacagaggcagacaaaatccagcacagtgctttccacattta

SEQ ID NO: 542080 - DNA, 120 bp, Homo sapiens
cccatctggtgacctgcgccgccgtgtatgccctgaccccctccatgtacaagggcaagggcaccgaggatgtggtgcagttccgcgccggcaagaccaacaacgatattaaataaatag

SEQ ID NO: 542081 - DNA, 529 bp, Homo sapiens
  misc_feature (106)..(107): n is a, c, g, or t
  misc_feature (120)..(122): n is a, c, g, or t
  misc_feature (133)..(133): n is a, c, g, or t
  misc_feature (159)..(160): n is a, c, g, or t
  misc_feature (198)..(198): n is a, c, g, or t
gctagctagagtgagcagctgcaccagtaacctgtttactaatcaaaatagcgggcgtgcgcgtgcactgaatcagctcctcgaaggctaggcagaagattgctgnnactgggagcgagnnntgcagtgagcntaagatcgtgtcactgcactccagcnntgggtgacaagagtgagactccgtctccaaaaaaaaanaaagaatttattaacctggttggttaataaattgtgtggtccctgccgggcgtggtggctcacgcctgtaatcccagcactttgggaggccgaggcgggcagatcacgaggtcaggagatcgagaccatcctggctaacacggtgaaaccccgtctctactaaaaatacaaaaaattagccaggcgtggtggcgggcacctgtagttccagctacttgggaggctgaggcaggagaatggcgtgaacccaggaggcggagcttgcagtgagccgagattgtgccactgcactccagcctgggccacggccacagagcgagactctgtctca

SEQ ID NO: 542082 - DNA, 145 bp, Homo sapiens
gagaaatcttacctcagtcttcactaaaagaccttataagaagacagaaagttaaaccaggagaaaataagcactaagaagttatgtgcacagatgccctggaagaatctttacagacagcagaaagaatgcgagattagaatcg

SEQ ID NO: 542083 - DNA, 465 bp, Homo sapiens
caataatcaggagcatttcatcttttattccgtagcaatagtttcagggggtctgcctacaatgattattgtaaaaattcaaataaaacaaaatttttatcttagaaactgaaagttcccctgtcatctgaaccttaaagacaactattgttaatatattattatttcaaaaattgtggcccggcagtggctcacgcctgtggtcccgccactttggaaggctaaggtggccggttcgcttaaggtcggaagttcggcaccggcctggccggcatggtgaagccccgtcttactaggaaacaagaggttacttgggtgtggtggtgcatgcctgtggtcccggctgctcggggggctgaggcgggagaattgcttgaacttgggaggtggaggttgcggtgggccgattgcgccactgccctccggcctgggcgacagagtgggactccatctcaaaaagaaaaa

SEQ ID NO: 542084 - DNA, 269 bp, Homo sapiens
aagagggtggcttgggagcagccagtgaggagaggcaagatggggtaagcttcgcacattgagggctgggcacagtggctcacacctgtaatcccagccctttggggggttgaggcggcggatcacttgaggccaggatttcgagaccagcctggccaacatggtgaaaccctgtttttactaaaagtacaaaaattagccaggcgtggtggtgggtgcctgtaatcccagctactcgggaggctgacaggagaatcgcttgaacccgg

SEQ ID NO: 542085 - DNA, 115 bp, Homo sapiens
gctagtgatgaaggacaatggcagaagctgtccccctgtcatgaggtttgcaaggggcgatgctggggtcctggatcagaagactgccagacattgaccaagaccatctgtgctc

SEQ ID NO: 542086 - DNA, 674 bp, Homo sapiens
  misc_feature (416)..(416): n is a, c, g, or t
caaaaaaaatactgattcatctgcagcagaatttattcctgaaaaaatctgttttataaaggaaactgacaatggctttaaaataaatgtttcaggtttttaaagacaaaaatgagtaaaaccctgaacataatagattacaacacatagacttgggagaaaagaaataatgatgagtaaagaaactgatgaaatatgtcagcaaatttaatgaagtattgactattttgggtgtgtgttaaacaacactgtgtttagagaaaaaaaacaagatggggaaagggagcaatttggttaattaaattgtgataagttgggggatagaaattgataaaaatagatttgtttaaaaattttatagttaaataggttgggtaaaaaaatttaggggtgccaccaaaaggtaaacaaaccanataagccttctggatttggttctacaacttggccaccaaatattaccaaattagcttctctttaaaatacctaccttattctacaggtttttgggggcaagaaattggcacaagctcgctgggcttttcttgttacgggttacccagcttgaaatcaaggggtaggctactgtgttctccagagaaaggtttctttttgagaaaatttccttcccaggcttctctaggttttggctggaattacgggccttgtctcga

SEQ ID NO: 542087 - DNA, 155 bp, Homo sapiens
atctagaggatcctgggtcaagtgatctcatctgaacacatatcagtaagaccacatggattagatacccatatgcttagcctaactccaagtagatcagaaaatgtcgcagaacactagagcacagcttaaaaactccaaggactggggggggt

SEQ ID NO: 542088 - DNA, 274 bp, Homo sapiens
gtggggcgccctctttgccatgaaagtcctatactaggaatgcatgataactaggtcctctggacgttgccgctagcactacataaatatctatccgacaccccttacaagaagaataaggaagatcttaagacctagaaggaaaactgattgcagaccaggctaggtggctcagtgcctgtaatcccagcactttgggaggccgaggagggcagattgctcgagctcagcagttcgaggccaacctgggcaacatagtgaatccctgtctcta

SEQ ID NO: 542089 - DNA, 176 bp, Homo sapiens
  misc_feature (68)..(68): n is a, c, g, or t
  misc_feature (75)..(75): n is a, c, g, or t
gtgatcgcagaacccaagaagaagagggaacgagatcttgagctggaaatgggagatgattatatttnggatctncagaaatactgggacttaatgaattcatctgagaagtatgataagataccagagatttgggaaggccacaatgttgctgattatatcgatcctgcgatcac

SEQ ID NO: 542090 - DNA, 224 bp, Homo sapiens
gcaattacctcagtacaggtttgatgaatgatttggagaaggtcagctctgtgagatagctcccgtttttttgcttgggaccctacttacttccgtgggctcccattgggagctgattaatttctgccagtcagaacccatccctaacacatcagatgatagtggctttgacctagggaagaagaggttgagcgaagaacccccaccaggtatggtttgagagt

SEQ ID NO: 542091 - DNA, 236 bp, Homo sapiens
acataactcagagtgtaatggttatagcaccatttgagttttcatctggttactggttcagtgaagccagagtctccagggcagtcgtcctttggattcccactccagcagtccagaggagctgcgcccactttggcctgagaatactttcacagaagatggccgcttcactcccagctcatcgcaaatctcaaagaagttctcctcggtcacctccagcggggccttagcagaag

SEQ ID NO: 542092 - DNA, 606 bp, Homo sapiens
tttcctttgtctcgggagagaagtctagacatgtagacctttcatacatcttgaacatgcatcttaggctcaagctaagggggaaggctgggcgagggaaagctgaggatttttcaggaggttccagctctggaaaacccagtcagtcttatgaatctgtccacttggcttctgggaccagcctgcctgcttttccctattgcttctccctttcctatgtcccacaacactcccttcattcctggccactgtggatggtgacacaggtgcccttcttactatcatgttactaagataacacaaaactctcttgaagtcttttgagaatgttacagatgagactaggagtaaaggaataagaacataaaaatctgggaatcctcagaatataggactatttgaaattagctattgcataatcctaacctttactcacttggatatggagctagaccttctctttcctaggtcctttgttgtatccctaatgaacacatcttttgtaactctcctaggaatgggctgtatagttccccatcagagtcaccataacttctttcatttacctctctcgtctcttttagataagctgcttgggcaagacaa

SEQ ID NO: 542093 - DNA, 232 bp, Homo sapiens
ctttgctatataattaatacccccccccccccccccatatacatataatagtgctgtaatgaacatgggagggcagctatccctttgagatactgctttcatttcctttggatatatgcccaaaggtaaaattgctgggtcataacatgtttttagtattttgaggcccttccatattgttttccatgttcgctggaccaatttacatcctctcccggcccgcccccccata

SEQ ID NO: 542094 - DNA, 716 bp, Homo sapiens
ttcatttatgtgtgtgtatacatgtctagatgtctttatttgcatgtacacttactgttatatgttatgtctaccaaattggcttataagtaaaagagcactcataagtaagtctaagcaattttcaagttcatgtgacttaaagtataactttactaaacaagctagctttaaaattattggtggaataaaaatataaatgccttcataattatcagcatacattttgtctgaattttatgtttgtctttgctaaatatttttaaatgtcagtgttaattcaagctgggagctacttagggtgagcctgccttcttccattctatccgaagtctcttctaaagttgcggaattgtccatatccattagttcaggattttttgttttttagggtttcactaaagtttcaggtttctatttaacatgtaattctgtataccaaatgtaccagaaagggttatgttattcatgaaaaaaaaagagaatagttttgtctaattcaatagttatctaaaagttggttcaaattacagatttaaaaaggttattcataaaacaatgtagtaaggaatcattaggcaaaaaatgtgggaaaagtttaaatcataaaatattttttaaaccctgataaagaattggagacgtttggctaattaaacattttcataaagctgttagttttgattaaagtaaaataaaaagtattgtaaaaatga

SEQ ID NO: 542095 - DNA, 875 bp, Homo sapiens
tggctggataaacagacttgtaaaggatagctggctctccacagagaatgtctacggaaaactttaaatctataacccaggagtatatacccatgcgcacagaccaattagccaaaggcaaaataaactaaattcttaccacaactatcctataaacacggcaactattcttcccaaagggaccctaatcttatgtgaaaacacctagcggggggggaaccagaaacctagctatcgtggccaaagggaaaaaatagcaatctcaggggcttaatgggtgaaagcgaggaaatgtatgcccttaaacgggtgctgcgtgtgctgcatgctgcatgtgcatgctgcgtgctggctaaatgtcccagcaaaaaagatcaccggcgcgagtaaaagggctccagcccagagggttccctggcccagaaagccagggccaagaaaggcaggcctggcctccaaaagctcagaggggtcaaaaagctccagcccagaaaagcacctgctccaaagggcttctgggaagaagcataggcggcgctcataacaaggtcctaggggtcttctgggccggtctcaaaacaacaaaacacaaaaaaacgcgggggcacacaaatgcggggggcgggacacagagggtcattgcgaatcggcccatggtccatagtgtgtttctggccccagttttctttgtcccaggtggaaatcgggggcccctaaaaggagaccgaaaatcgaaagccggtacgtagttcccccccgcaccaactaccaaaagcacaaaaagagggtccaccgtgacaccaacacgctcaaagatctaagtacaaaaatacaccacacaagaacaacacacaaagaaaaaaaacaaaaacgaa

SEQ ID NO: 542096 - DNA, 195 bp, Homo sapiens
tatacaccggaatcgtaagtgatattgacaactggcacattctgccgtggcacggtggaacttcttctgggcggcactccgaccaatggtcagtctgtgaatgagctcatcctgaacttcctccatctgaaattccctacctggatgccaacgtggagtgggttatgtgtggtggcccctgtaacaagcgatcac

SEQ ID NO: 542097 - DNA, 1342 bp, Homo sapiens
ggagaaggggaggtcatcaaggcttgggacattgccatagccaccatgaaggtgggggaggtgtgccacatcacctgcaaaccagaatgatgcctacggttcagcaggctaagtccatccaaagattaccccccaatgaccacgcttggtattttgaggtggagtcgtgtgagattttaatgggagaagatctgacggaagaggaagatggcggaatcattcgcagaatacagacctcgcgggtgaaggctatgctaagcctcgaagtgaagggtgctagtctgctggtaagtgtctgcagctgtgagacgcgtgatactactaaggagcaatgcgtctttgaaccagacgtggagctccggcgtttgaagattggggccgaaggggtggaagacaccgtgggaatgctgggccttcatgagtgcttgggagaatggcgccaattccagtcggcaatggggatgcacaattggaggaagctaattacgcacttcgttggtgatcgctaccaaaggaccgctacgacataatgtcttgtatgggtggcagggtggattgcgggcacaggcaaaaaaagttttccagaaagtcacgcaactcgagaaatggtcgtcgtaagggcgtgttagacactccattggacatttaacgatccctgccataggcaaggtgttgtttggaagagaaggccccccaaaggggaggttcctacggggcgtaggcattgcgagagtctccgaggaccaagggaagaaagggctggagtagatcgaaggaaggtcaaccgccaattagcgttggaacacgcaaggcagggggcgccaccttggttggttacctcttccaaaaggggacacggctgtgagaaacttaaccataggaccaaaaagggcctcttgtggacctttaaaccagggttattacacccggagaaccggaactccaggcgtgtaccttgggggagcgttagtgcgcacactcacatgcgcacggtcccttgaagggtataattttacaccccgaacatcggatggggcaaaggcacgcccaccagaaaaaagagggcaacccaaatggaggaccgcccggtttcagggacctttggtgcgccctttccttccaaacgcccttcaagaagacccgtgggggcgccattttgatatggtttccatatgcgcttggaaaagacccttaacagagggggcctttttccttccttgggcttggcgccagattttggaataagggccttaggttacaacccacacgtggggccccgttaagggaaaaacgtcttggtggaccacaccggcgagagcaccaataaggtcgactggacacg

SEQ ID NO: 542098 - DNA, 1151 bp, Homo sapiens
atttaaaaaaaaaaaaaaaaatttcttgagaacagggatctggctaatgttggcccaggctcgtcttgaattcctgttctcagaagggtccttccttatgttggcttcccaaagcattgggtattatagtgtattgagccaccaccactagcacttctgcctagaactcgtaacaaaatttctttcccccatctgcatagtctggtttcattaaatggattcttaccctttttaaaggtttagtctggtcttttattttggatggcttacttcaaatggccttggggatcatttactggttcctcaaatttaagagctaagaagaaatctctctaaagctcccatgcatagagggttctcaacaggttggattttaactccagtgtagatttcactagaaccatttaatttggagggtcacccaatggtacagtatatgtattatgagcagagacatttgtccattatatatctgagaagaaattctctaatccacttgtcctgtgtgagtatatgtactttgccagtttactttgggggtgaggaggcagggacagtgtattagagatttaactggttcaaaatgtagacttcctacagtttccagtaaaatactctaccctgtctaatatgtggattcccctattccagactggattcaccttttcagagagctaagtcggagacatttccttaccactgtgaagggacacggcaaattacactttacagggaaggtattggggaccagggggttaggaccacacttatcacaccaactcagcgataaacagtgaaaacccctaattctaaacacaggacagaataccactacaggagaacaaaatagagccagaacacacaggtgaccccgtaatataaccaggccgcacaaaaattttgcattagtgccacagtgctccatcattaaaatgtcaggggggatcgtataaccagttgcttatattattatcaagacgagatgatatgtaacgcagttattgttagcgaacagatgcgggaaaatgtatagcagatataaagtagtaaaaagcaactagaacgtaaatatataaaagagtaataaaagcgcacattgaaaaggctgactaataaatatagtagattgaagagagaactataagaataat

SEQ ID NO: 542099 - DNA, 868 bp, Homo sapiens
  misc_feature (37)..(37): n is a, c, g, or t
  misc_feature (186)..(186): n is a, c, g, or t
  misc_feature (210)..(210): n is a, c, g, or t
  misc_feature (223)..(223): n is a, c, g, or t
  misc_feature (231)..(232): n is a, c, g, or t
  misc_feature (234)..(234): n is a, c, g, or t
  misc_feature (252)..(253): n is a, c, g, or t
  misc_feature (296)..(297): n is a, c, g, or t
  misc_feature (328)..(329): n is a, c, g, or t
  misc_feature (338)..(339): n is a, c, g, or t
  misc_feature (389)..(389): n is a, c, g, or t
  misc_feature (401)..(402): n is a, c, g, or t
  misc_feature (452)..(452): n is a, c, g, or t
  misc_feature (475)..(475): n is a, c, g, or t
  misc_feature (539)..(539): n is a, c, g, or t
  misc_feature (557)..(557): n is a, c, g, or t
  misc_feature (592)..(593): n is a, c, g, or t
  misc_feature (651)..(651): n is a, c, g, or t
  misc_feature (685)..(686): n is a, c, g, or t
  misc_feature (706)..(706): n is a, c, g, or t
  misc_feature (714)..(714): n is a, c, g, or t
  misc_feature (721)..(721): n is a, c, g, or t
  misc_feature (723)..(723): n is a, c, g, or t
  misc_feature (726)..(726): n is a, c, g, or t
ggcgagctcagctccggagagccggcggcgcggcggncatggctcgggtggcgtgggggctgctgtggttgctgctgggcagcgccggggcgcagtacgagaagtacagcttccggggcttcccgcccgaggacctgatgccgctggccgcggcgtacgggcacgctctgtgagcagtacgagggngaagagctggcgcgagagcgcgcngctacctggaggncggcgctnntnggctgcaccggctcctgnngcgacagcgaggccttctgccacgccaactgcagcggcccccnngcccgcggccaagcccgatcccgacggcggnncgcgcaganngagtgggcctgcgagctgcggctcttcggccgcgtcctggagcgagccgnctgcctgcggcnnctgcaagcggacgctgcccgccttccaggtgccctacccgccgcggcagntgctgcgtgacttccagagccgnctgccctaccagtacctgcactacgcgctgttcaaggctaaccggctgagaaggcggtggcggngggctacacttcctccanaggaacccgaagcacgagctgaccgcaagtatctnnaactactatcagggggatgcttggacgtcgcgacgagtccctcaacggacctagaggnccagcctacgagggccgtgttcctccgggctgtnnagctctacaacagcgggganttccgcangcagccngnggncattggccgggcctttcagagtacctggaaggtttggccgggcctgccggtttgatgggcctgagcagggggactcaagggtttaccggcgcaaaaatcttttggagccctcggggagggggtgtggccattgccccttgtg

SEQ ID NO: 542100 - DNA, 374 bp, Homo sapiens
ctaaaaatacaaaaattagccaggagtggtggcgtgtgcctgagtagctgggattacaggtgcctaccaccctgtctcttaaaaagaaatacaggccaggtgtggtggctcacacctgtaatcccagcactttgggaggccgaggcaggctgatcacgaggtcagaagatcgagatcatcctggctaacacagtgaaaccccctctctactaaaaatgcaaaaaattagccgggtgtggtggcacgtgcctatagtccgagctactggggaggctgaggcaggagaatcaattgaacccaggaggcggaggttgtagtgagccgagattgcaccactgcactccagcctgggagacagagcaagactccatctc

SEQ ID NO: 542101 - DNA, 169 bp, Homo sapiens
gctcgaagcccaccttccgcacagtcccgcgccctcccgcaagcccgagctgcaccgggagatgcctcactcccagaaggtggtccgggagatgcacaccttgcgggccgaagcgctgtaccgcctatccctggcgcagcacgtgcgcgtccgagtcttgtggcggccg

SEQ ID NO: 542102 - DNA, 804 bp, Homo sapiens
  misc_feature (98)..(98): n is a, c, g, or t
ttcaaaatataagatataagttctacgcatgcgagcaagatcagtgggtctaacgacacagatgattcgcatgactatttctcagtctagtgatcagnaagaggtatatcgccactgctccatatagtatgtagcagaggacatgtagtcatagcaccataagctcaggtcaatcttacagcatgacatgaatgtgtcccctctacagaaggctcctcgctttatagggatcatggtatgggatgatcatgtcgatcatcattcatttcccaggtgagagtaggatcttacacagattatcctgcgatataagctcagctagcatacgtattccagacagctatacatggatctgcagaacgcctatcgcaggcacgccagacatacttgagactatgcagctagtccaatcgctccaggtaccaagtacatggtaagagagtgtgtgtgtcatcatctcgatagacattcccgatattgtagcggcatgctaggcgtttctcctggtctaattcgatcacggcttcctgtacagggtagagtctatagcacgcatcctaggagactcagaatgaaaaacagagtgctcatagccacataccataataagaggctgcgtatagtgtagccagacagctctaagatagattggtaggacattagcgagccctggcaccggagcaggcatagaagtgagcatgcttctactggaagtgcagtaggcaaaggtgaaacgcatggtcttcactagtgagaacatgtcgctcagaggcctctagaagtgtccaatgcagcgctctcctg

SEQ ID NO: 542103 - DNA, 309 bp, Homo sapiens
gcttatttggaaattttagttaaagggtttaacgggcagggattaaaagggggggggttttttttttaagaaaaattccccaggtaactccccctaaccccttaccctttattttattgaaagggaaaattaacttacccgaaaaaagggtttttttgggggggaggggggcaaaccctttaaagggattccccctcctttaaacaaaaatccggttttagggggatcggcaaattttgggaaatttgtcaggccggggggggccccccattggggggaccccgcaaaaaaacttttccttttaaccca

SEQ ID NO: 542104 - DNA, 330 bp, Homo sapiens
tttttcagggaactgggaacttaggggacttaacttgggagggaggcaggtgggtggtaaaagggaaactttggagagcctgcccccaggttctgagtggggagtgtacaaacccctcccttgggggttccgggaataatgcaactggttttactagggggcaagggggttcatccccaagtttttttttgtcctcccatgcaaagttgggcatgcccctgagtgtgaacaggtttgcctacgttggggcaagtgggcatgggtgggggcttttcccttccccttgccccccttcctcccccacctgcaataaatccgcttttcctgcca

SEQ ID NO: 542105 - DNA, 175 bp, Homo sapiens
gctggtggtggccaagtatgcgcccgtggattctacattgcctccggcagatgtgtctgggaagctgactgatctgggataccacgcagaaggagctcctgttgaagtgttagtagcatgacctttcgctgtgaagatcaaatacattgcttggactgatggtatcagagatgcg

SEQ ID NO: 542106 - DNA, 140 bp, Homo sapiens
gcggccgcctactactactactgctcgaattcaagcttctaacgatgtacggggacatggtttgtacaataaatacatctgtggggcgggctctccgcagccgggaagggccaccgccacggttcagtccaaaaaaaaaa

SEQ ID NO: 542107 - DNA, 394 bp, Homo sapiens
caaggattggcctttcagaggtactacagggatagtagcctctggtccagggctggagccatccgtctctcctgatttttgcaggccagtgggctctgaggcataaaccttggcactccgacgttgtgggattaaaccacatgaaactgactgacaagccctgcctgtggccgatgactatagctggacatcattactgtttcctggagtccaatgggctttttggggaaaagcttgccaaccggggggtgtccaacttgaccacaatatacttacctacaagctcccagatcagcccccaacaccctgcttatctgtgatatgaagcaggagtcatccctggtgtcttcctgactgttgatccccataccacacgacatgccgtacccagtgc

SEQ ID NO: 542108 - DNA, 242 bp, Homo sapiens
aggatcccgtcgggccacgcaccgttgaggattctacgtggttctcttggttcccctggctgtgtgtgtgtgtgtggaggaggccgcggcccttagatcaccttcttgagctcgtcgtccaggaccagcccgagggcgccccccatgccccgcaggacgttggaccacgcacccttgaagaaggccttgcccccctcatctctgaagatcttcctccaacagtcgacggtgcgttggcccca

SEQ ID NO: 542109 - DNA, 209 bp, Homo sapiens
ctctgtcgactccagttaaatcacacctagctggctgctgactcagcctcttgcagaacgtccagacagatgttccaacattacctggtcactcctgcctggagctgcagcctccctgctggttcccatccccagggagccggcctgctcttcctgccctgccacctgtgttgctccaggctcagccctcatcctcggggagcatcaag

SEQ ID NO: 542110 - DNA, 125 bp, Homo sapiens
ttcaaatgccagaaagttacggcgtgtagggcagtgagactcaagtttatagtctggcgccactcagctcacaggttagcactatgggcaggtatttatcactacaatttctgtgcccatttcaa

SEQ ID NO: 542111 - DNA, 1015 bp, Homo sapiens
cgcttcctttccgctcggctgttttcctgcgcaggagccgcaggccgtaggcagccatggcgcccagccgggaatggcatggtcttgaagccccacttccacaaggactgcagcggcgcgtgcccagtggttcaaccagccggcccgtaagatccgcagagtaagggcccggcaagccaaggcgcgccgaatcgccccggcccccgcgttggggtccccatccgggccatccgtgccgctgcccaacgggttccgggtacccacaccgaaggtgcggcgccgggcggaggtttcaaggccgtggaaggagcgctcaggggtggccgggcattcacaaagaagggtggccccggacaccatcggcatttccttgtggatccaagaaggcggcggacaaggtcccaccgggatccccttggagaccaaacgtgcaggcgggtagaaagcgaagttaccggttccaaattcaatctttttccccaagaaaagccctcggcccccaaagaagggggaacaacacgttctgtggctgaagacgttgaaatgtgggccaccccaatgtttgaccgggaccggttcatgccccggttccggaacgtctataacggagggagaaacgtcgagtcatcactggacggaagaagacgattacacaggcctgcgaagtctcgtatggccgggcaacgcccggttcttcggcatcggacaaaaagagccaggagcccgagactggtttttgaaaagaaaattaacggccttccggggactggacaccgtgggtcaaacaacacacaaagaggggcgatagaatcccagaggccaatacgcatcccgtttgcaggggccctaagggacgtataagcagccgcccgttaacgtcacgaacgctgtgccttgagccttggcgcaacgccccacgaagccggatcatgatctgcactgctgggcatatatcatataataccacactcgtagtatactaactcacatatcgtatcagcacacaacaatactc

SEQ ID NO: 542112 - DNA, 114 bp, Homo sapiens
agacgtaactaccgaaagatatacaaatgaccaagcacagcacatgagaacagtaagtacactagggaaatagcaaatacagaaactaacaatagagatagccactatacatat

SEQ ID NO: 542113 - DNA, 198 bp, Homo sapiens
gctgcggtcgctctcgcgactcccctgcttctcgagcggctctgccttcgatgcttcccctttcttgcacacactcacttgcgcgcaaacacgctgcgctggcctggctttcttgttttttttgtttttttttttttttttttttttttgggcctgggccccccttttttggggtttcccggggcccccgggggcccc

SEQ ID NO: 542114 - DNA, 263 bp, Homo sapiens
gtactggcattgcatatatagtagtgacagtagcaggctcagaaagacagacatttacatgttctcacttatttgtggaatctaaaaatcaaaacaattgaactcatggagagagagcatagaaggatggttaccagaggctgagaagggtagtgaggcattgtggggttggtggggatggttaatgggtacaaaaaaaaaaattagattgattaagatctatccgataatacaacagagtgactatagtctatttaattggt

SEQ ID NO: 542115 - DNA, 301 bp, Homo sapiens
ccccgactagcccgaaggaggaggatgtgcccgtgtggctccgtaaagcatttgaaggtgccgatggaggggacatgaccatgctggaaacaggggttgatggaggtatgctctgcccagtgccgcccacagtggaggcttacagtggcgctgtcgtggctagtctggggctgtctgggctatgtcggggcttgtcgggctagtctggggcttgtcgggctagtctggggcttgtcgggctagtctggggctgtctgggctagtctggggcttgtcgggctagtctgggggtggtaccgag

SEQ ID NO: 542116 - DNA, 148 bp, Homo sapiens
atattatcgagggctcacaagaaaactgcagacttgaccaactgtcattagtaaattataagacttcctgtttggaaatcttcccatggaaccatatttttccttcatgtggatcttcttcccggcccacctcttctactaggtcttc

SEQ ID NO: 542117 - DNA, 378 bp, Homo sapiens
  misc_feature (286)..(286): n is a, c, g, or t
  misc_feature (378)..(378): n is a, c, g, or t
ttggagtctcgctctgtcgcccaggctggagtgcagcggtgcagttggctcactgcaacctctgcctcccaggctcgagtgatcctccctctgcagcctcttgagtagttgggaccacagatgcgtgccaccaagctcagctaattttttttgtatttttggtagagacagagtttgaccatgttgtcaaggttggtcttgaactcctgagctcaaagaatccagtgcccgccttggtctcccaaagtgttgggattacagctgtgagccaccgtgcctgggcatnaatggattgttttaggaagggatcttgggtgttagacttgtatagttggtgagactgaagtgttcttagatggaggttgtacctgcaggagn

SEQ ID NO: 542118 - DNA, 186 bp, Homo sapiens
agttgcttccaacacaaggcaggcaagtttttcctgcttccatgatgatggaaggtaggtaactcctttacggagtttcccttccaacagggaagatgaggtttttttttttttcctgctcctagtgacacaggagatagaagttatttaggcagatagtgagggtacgagttcttggcagggctt

SEQ ID NO: 542119 - DNA, 464 bp, Homo sapiens
  misc_feature (463)..(463): n is a, c, g, or t
tcctggtggcttactaattggttgtagtcctggtttcatgaatgtccccaagatcaaaggtacccacacggcaatgaaaagtggaagtttggcagcagaatcaatttttaagcaactaactagtgaaaatctccagtcaaagacaacaggactccatgtaactgaatatgaggacaatttgaagcaatcctgggtatggaaagagctacacgctgttcgaaatataaggccatcttgccacgggatactgggagtatatggagggatgatttacactgggatattttactggatattgagaggaatggagccatggactctaaaacataaaggctcagactctgatcagctcaaaccagccaaggattgtacacccattgagtatccgaaacctgatggacagatcagttttgacctcttatcctctgtggctttgagtggtactaatccatgaacatgaccnt

SEQ ID NO: 542120 - DNA, 137 bp, Homo sapiens
aaaagaaatagatattaaaatttaatactaactatggaaaagggtccattgtgtaaacatagttatctttggatcaatgtttgtctttggttttcaaagtagcttgtattttcagtattttctacatatatggtgga

SEQ ID NO: 542121 - DNA, 211 bp, Homo sapiens
cctgtactacttgactgatgcagcatcaatgaggttatccaattgggtgcggatgtatagtccgtccaaatgctgccaggttcttttgccatgccgaagcttgacctccagagaagcacaccaacattagtgattgcatgcaagggggaaaggttcattccacgttccttcacttaggttttcgattgggttgccaaaaataacagcaata

SEQ ID NO: 542122 - DNA, 403 bp, Homo sapiens
  misc_feature (23)..(23): n is a, c, g, or t
  misc_feature (51)..(51): n is a, c, g, or t
  misc_feature (68)..(68): n is a, c, g, or t
  misc_feature (80)..(80): n is a, c, g, or t
  misc_feature (111)..(111): n is a, c, g, or t
  misc_feature (182)..(182): n is a, c, g, or t
  misc_feature (237)..(237): n is a, c, g, or t
  misc_feature (290)..(290): n is a, c, g, or t
  misc_feature (315)..(315): n is a, c, g, or t
  misc_feature (347)..(347): n is a, c, g, or t
  misc_feature (360)..(360): n is a, c, g, or t
  misc_feature (380)..(380): n is a, c, g, or t
atcgcgatttatttagcatttanggcctgattttaatttccataaaaattnactcttacaaagatttnttcaaagaaatntgaccgccttcaaactacatgtttggtttgnattacatggaatagatttccacatatgaaaaaatcataaaatgaaggctacgttttccaccgctatttaantactgtttagaaactatcgttgaatgaatgaaccctgattttgcctcatcgggtntatctaaaagaagtcttttgaaagatattaattttcatttttctttacatggnccctcttttttcaatcctgtaaatnaaaattatgagcaatttaaggacacaattttnacaacaccaattntttctggtaattggtctggntacccccaaggccccctttaaga

SEQ ID NO: 542123 - DNA, 882 bp, Homo sapiens
aaaagtgcacaccttaaaaaaaaaaaaaaaaaaaaaaaaaaaaaaaaaaaaaaaaaaaaaaaaaaaaaaaaaaaaaaaaaaaaaaaaaaaaaaaaaaaaaaaaaaaaaaaaaaaaaaaaaaaaaaaaaaaaaaaaaaaaaaaaagagcgaggcggcgcgcggcggccattagtatttcttcttgtctctaggtgaggccggactctcatatcactcccgacgctctctgtcttttttgctcatacggagtgagggccctctcttgcgctggtgtgcgttattctttaccccccaccgcccagtgctctctttcttaatactacacctactcacgtgtgacgagagccagaggacgaccctcagtggccctacacgtctatgtatactttttctaacagacaaagcatccctacctttctctctatgcctcgataactgaacagataacagaagtgacgcccgcgaacaaaacacatccccctcctccatctactaatctatatattagaatcatcttcacagagcatcctctatctctccataataattacacacacaccagatatattctcgaaacaaagacgaagcacaacacaaatcaaaacaaatcaattatatatatactctatcccccctccctcacaatcaaaagacgaggtagtagttcgtgggtcgcgcgctagcgtgggcgtgggtctattgtctagtcgtgatctagctgtagttctcatttttgatgcttgacacgcgaggcggagggggatgggtatgagagcacggtaatgcacagagctggcggggcacgagcggcaagcgagaggtagaggctagtagtcaggggccacccgggcgggcagaacgggaggccaggacacgcccgca

SEQ ID NO: 542124 - DNA, 1045 bp, Homo sapiens
cacctttggtccctttccagggtgcacattgggctgctgtgtccccacacttggtttcttttgccccttctctcgctaccgcgccttgtccacccgggggtctcctatgggcaccccgctttcaacatgccagactttgaggacgatggtggcccctatggcgcatctgtaggctctctgcgccccagtggcccagagcaacccgcctggccactattcgcgtctcccgggacactcctccgcgtcctgttcccacgagcctccgaggagtccctctctgttagcgtgggaagacttattctgggttgccctcggcttgagccctttctgaggactctgtgagcgcgcgaaggatttccgggtattcctcggacgcgcgtgcgaacacacaacggcacgccttgcgctggcgcgcttccccgcataggtcttctaacgtcgccgcttggctttcgaccggctatccgccctggaacactgagcccgccactgtgcctcgcgcttgacacttccaccgagcgttgtcgatgagggccgcaaggcttgccttcccccgcttgtggcgtcacaacgccgcgtttgcctcccacacaccggattggctccctttcccgctgcacttctgccgcccccgggaattctgcaacccaccgcacccagcgcgcacgccctgtgcgcccgcaacggccaccgggccctgaagccctggcaacccgcctggccaacccacacccgcgcaccgccacactcggggcccctgccggcgcaatcctgcaagcccgccttaaggcgtaagtgcaacggggccgccccgccctggaacctggagaagggagacctacggaacgccctggaaactgcgaacgccctgcacctgctcccgcctccacccacgcgcctccccctgatgtcgtggtcccgggcctggccccggggcccctttacaagccctctccccttttataaatttcccatttaaaccccctatttttcttaaaaaaaagaaaaaactcgagatattcggtcgagaagagatatgggcccg

SEQ ID NO: 542125 - DNA, 167 bp, Homo sapiens
ggagccctgctatcatagataccatttgctggattgggagaggggccctacccgtaactggagttcaagactgtagacgcgttggaagctcgttagagtcgcaactgtcgtccttgatacgaccgtaccgggagtctttagaaagaatctctacgtgggcggggcgc

SEQ ID NO: 542126 - DNA, 148 bp, Homo sapiens
tcgcgatcctcaatggctcagcgacttgtggccttgagcattcgggaagggatgacctgcacgctggccggtgtgtcaggcgcggacccagccgtgtttgtcttgcgtttgatgtgctcggtgatactcataccgggactcggcttta

SEQ ID NO: 542127 - DNA, 94 bp, Homo sapiens
gatctctctcggggtggagtccgacatctgacgctaagctcgtgtgaacctgggcaagacagcaaaactgtgcctgccttaaccctgcttaacg

SEQ ID NO: 542128 - DNA, 813 bp, Homo sapiens
tcctaatttggacctgtttcaccagtgttttacccttgacgtgcccctttctagtgctgcttccaaaagctgactagtgtgctgtaagatttttaccttcctttctaaaggtttttttttttttttttaaagggtgaggttcgcggtctttcctatatttcttcacagcaaaatgtgaaactcccgggataagtttataagttactccaaggttattttgagacctcaggtaaaggctcaacagggtatattccctcccagggtgcattttaaatataaacccttttcatctccaagaaaaagatatagggtatatataggggataaaaactctctctgtgatgggggactcatctcataggtggtattctcaaggataaattaaatcttttctagagagaaataatataacggggctctctcggggggactggggctcttgagaaagagtttctgtgtgtcacgagatatctcagagccctctcgagtatagtaatagcgaacagtgtgccatgtggctggtgttgtgagggtttgggggagttcaaaaaaatattgagacactttttatgagtctcctctcccgtgggaaacacgtgtggagttttttatcatgaaacactactcgtatgagggaatatcaaacatattgtgtgaggatatccctcaacacaagagggggggctcgagagggcgtgtttggggaagggctattaaaaaacgaaaggcccaacacatttttgtggcaatattatgagttgtttgagggcgtcacgcggcataaaaaagggtgggaaattttaaggtgaaatc

SEQ ID NO: 542129 - DNA, 400 bp, Homo sapiens
  misc_feature (62)..(62): n is a, c, g, or t
  misc_feature (80)..(80): n is a, c, g, or t
  misc_feature (99)..(99): n is a, c, g, or t
  misc_feature (114)..(115): n is a, c, g, or t
  misc_feature (117)..(117): n is a, c, g, or t
  misc_feature (139)..(139): n is a, c, g, or t
  misc_feature (143)..(143): n is a, c, g, or t
  misc_feature (151)..(151): n is a, c, g, or t
  misc_feature (154)..(155): n is a, c, g, or t
  misc_feature (161)..(161): n is a, c, g, or t
  misc_feature (165)..(165): n is a, c, g, or t
  misc_feature (178)..(178): n is a, c, g, or t
  misc_feature (184)..(185): n is a, c, g, or t
  misc_feature (191)..(191): n is a, c, g, or t
  misc_feature (193)..(193): n is a, c, g, or t
  misc_feature (209)..(209): n is a, c, g, or t
  misc_feature (231)..(231): n is a, c, g, or t
  misc_feature (233)..(233): n is a, c, g, or t
  misc_feature (238)..(238): n is a, c, g, or t
  misc_feature (250)..(250): n is a, c, g, or t
  misc_feature (259)..(259): n is a, c, g, or t
  misc_feature (265)..(265): n is a, c, g, or t
  misc_feature (274)..(274): n is a, c, g, or t
  misc_feature (293)..(293): n is a, c, g, or t
  misc_feature (299)..(301): n is a, c, g, or t
  misc_feature (321)..(321): n is a, c, g, or t
  misc_feature (326)..(326): n is a, c, g, or t
  misc_feature (329)..(329): n is a, c, g, or t
  misc_feature (336)..(336): n is a, c, g, or t
  misc_feature (348)..(348): n is a, c, g, or t
  misc_feature (358)..(359): n is a, c, g, or t
  misc_feature (361)..(363): n is a, c, g, or t
  misc_feature (365)..(365): n is a, c, g, or t
  misc_feature (380)..(380): n is a, c, g, or t
  misc_feature (384)..(384): n is a, c, g, or t
  misc_feature (388)..(389): n is a, c, g, or t
  misc_feature (394)..(394): n is a, c, g, or t
tgtcaacatttcttcagttattcaaactcactgatatctaactgggagtagtttgtattctngaagacttcctaaggtanaagtatctttccctatttnccccacaatagatanntntaactagccgaactaattaacnctantgttgccnttnncagcantatngagatatctagtnctaatnnagacananaccacattaatttganatcaaatgatacaagaaataantntgaanccagttatcacncaaccccanacaggngagaacccntaggagggccctcaatgangttaannnggtataaaacaacgatagancaaanagnaaaaatnatcaaacttaanttacataganncnnntntaatttataaaacantagntgtnnatttnggacaa

SEQ ID NO: 542130 - DNA, 103 bp, Homo sapiens
ccgcgtcgactgctgcccagtgcatcaaaagtggaatgtgttttcttttggttggtttttagagacaaggtctcatgctatgcccaggctgggcgtgcggtgg

SEQ ID NO: 542131 - DNA, 119 bp, Homo sapiens
ctcccacctcaagaagaaataggatatccaaacatacctatatcaagaggttaaaaaaaatgaatttaaaaaaacaatcttccagctgggcatggtggctcacacctgtaatcccagca

SEQ ID NO: 542132 - DNA, 137 bp, Homo sapiens
tgagagacgtgttgcactgggtggtctgaactcctaagctcaggcgatccgcccactttacctcccaaagtgctaggattacaggcataagccataattattaaattgtatttaaaaatacaattctcattgcaaca

SEQ ID NO: 542133 - DNA, 194 bp, Homo sapiens
gaaaaaaaaaggagagaagctgaagcattgcttcaaagcatggggctaactccagaatcccccattgtccctcctcctatgtctccatcctccaaatctgtgagcactccaagtgaagttggagccaagactctggagatggcgccctggatctagacgcgggcccttaaacttggatggctaaatcacgaagt

SEQ ID NO: 542134 - DNA, 1004 bp, Homo sapiens
ggtcttggtcgccaagatggcgtcctccgcctccgcccggactcctgtgcagggaagcgagtgataaatcaggaagaattgctggcgtgttaatgaagtgagaagcagctgtctgagcaccagtcggaaactggatagaatctccattcgcgaagtacaaccgttctggggcagctgagttgtgccctgtgtaacactccgtgttaagagctgagctcctgtggcagactcacgtcctgtgtgaaagcagcaccgagagaaatgtggccgagctgaaaggcgcgcacagtgaagccagccagggttcgtccgccagttcagcgcctcagtccgtcacagacgcgcaagcgccggacgcagacgaccaagatgtcaagagagcgaaggccaccttggtgccctcaggtacagacctccacatctgcgtggaccaccaactttgacacacactaggacaggagctcattagagcgactcccagtaagccttcagcgactcacgtctactccccgcttactgccgactgaggacgccggccgccacgcacggacgccgaccgccacgcccacgccacacgcggccacgcccacaagccgcccccgacgccccgccacgacgccccccccccctccccccgcagcgcccccaacgaccaagcgccgcccacccgaacccccaccaccctactccgccccccccgccccccacacatccccccctcacggacccccgccaccgccacctcccccacccaccgcgcacacgaccaccactaccccacacccctacccccacctctcctcccaccccctcactcacctccccacaccacaccctcctgccccgcaccccccgcggccccacaccgccgccccccaacaccctcgccccccccccaccgcaccccctccccacgacacacccccccacccccccccgccccacgccacccacccccccccgcccccccccccgcccacacacccacccccacagccacacaa

SEQ ID NO: 542135 - DNA, 423 bp, Homo sapiens
  misc_feature (354)..(354): n is a, c, g, or t
catttcaaaaaaaacaaaaaaaaaaccaaaaaacaaaaccaaccaaacaagaaaaacacagcatcgagttcttcactatgataacttttactacaaaaccgaacacagttaaccttttaaggtttaaatgtaatcactttcttagaagtggaagactgcagaagctaagcgtatctatcctttccttaaaagacagccagagaggcatcagtgaaaatgaccctctcgtggttccgaagaaggagtcaatatttcacttggtatggaaaaagctcctcccatgggctccagccctccagaagcaggagaggaaagaggtacttggtttactacagttgcaaggggccccagtgnatgcgatgatttgggaaggtatttggaattaagtgacgatttcacaatttggaattggtcgccaatcgg

SEQ ID NO: 542136 - DNA, 432 bp, Homo sapiens
agaagttacaagcaaacattaatcaaatcaaaccgtagtggactcaaagattttctgattggcaactgattgaaagagttaagttgtgatttaaagacctgaaatcaatagaaatgaatgtctgggttaagataaggtggtatgtagagtactagaggtgtcttgattactgctagagtggatgtcttccagtagtatgcagtgcgttcatgagatgaataggtgtggtgaaagtgtattcgttatctgaaacttgtagaaatggtgaccataccctaccccatcagccagcggtccacaggcacaccactgctccctgaggcagccttggccctggcttgggctagggcaaaattagagaattttaaaattttgggaaaatggcagataggcaggactaacttgcagctcccactcagacagacagagaag

SEQ ID NO: 542137 - DNA, 240 bp, Homo sapiens
acgccgctgacggatcggtgttacctttgcctcatgggagctttgcagcttgaccttgggggtgcaccagctggtcctgctggcactgggaaaacagagactaccaaagatctggcaaaagctcttgccatccagtgtgtggtctttaactgttcagatggtttggactacaagatgatggggcgcttcttcagtggcttggcacagtcaggcgcctggggctgctttgacgaattcaat

SEQ ID NO: 542138 - DNA, 428 bp, Homo sapiens
cacgcctcaacagcaagtagctgggattaaggcatgagccgacagtccggctaagtttctgtatttctaacaggagacaggggtgcaccatgtaggccagcgacggtgtcgaactccgtgacctcaagtgatccacctgcttgggcctcctaaagtgttgggattacagacgtgagccaccacacccggcctagcacttttcagttgatggctctgtttagtttcttggtggctagctgaagtgcagatgaaggtcttaggagtttttgaaggtcagggtgtagaaagttcttgagcatctttgctgaagtcattgagaataatggctgaatttgggagcaagcagaattgaagttattgggtaggggaaataggagggtgttctggaggttggtagatgttgcagaaggaatggtttcagtgagtaa

SEQ ID NO: 542139 - DNA, 878 bp, Homo sapiens
cataagtgtagttttgatgtaattttagaagacttttagcaaacatgcattccttcatatgtatatattatcttgtatacgatagctatttataaaagtaagccaagtgctgtctagtctgctgtataaagtaggaattgcatcagagtacgtataattcttgcatgattacaactgcgcctggtgacagttgcacggaggagtgtctgtaagtgaaaagttgtatgctatgagtgactgcactcatatggcaggtctactaatgtgcgacctgactatctgtgttttgtaccccagaaatgatcgcacattgttgagctacaaagattaagctaattaaccaatttgtaacccatttttgtcactcataaacagactactcaatactagacaatattagtagtacaatgtagtgtgtatgtgacgtgaagatatcgatacgatattaatttacattagagtgaacaatataaatggtttgtttctggagagttgagttccgtaaagtagagttctcaggtgtctctgcagagaagtttactaacaatcatgttttatatgtggctgtaacatcagtgtgacgtacctcgcatcgtatacaggatatattcctcaactatatattatacgggagaattaatttgggatactccatgtctccagagctgaggatcattcttctgaaaaaatcccggtgaccaacatcgctcgttcgctccgggggggacttttggagcggacctgtcgtcgtaacccctcaacgttctcgcagtaaacacacaaaggccccaccgttgacctccacctcggcgggatttaacctagggagaaaggagcgaccacgaagcgcttgcaaccctttacccgtgttgctggga

SEQ ID NO: 542140 - DNA, 107 bp, Homo sapiens
gcctctggcggtgtgcttgatcttggagcggtacgacaggccgatgcgggtgtcttcggtgggctgcagcatgaagcccacgttccagccccacgcgtcgcccttca

SEQ ID NO: 542141 - DNA, 618 bp, Homo sapiens
  misc_feature (453)..(453): n is a, c, g, or t
  misc_feature (562)..(562): n is a, c, g, or t
atattggtaagatgtgagtccccatgaaagcagcttctgattttccatgaaatgaatatttatgaggtactggtaacttcctacataacatacaagttctcaggttcttttcagacacaagaatgactaatgattttgtttaatttaattcgacaaatttattgagcgcccatgattcttgatactgatgacatattttagtcctgatgtttcagcatattctatgacataaataaggtacatgatggccttttcatactattttttagcatgaagaatttttggtaaaaggtcacgcttactgtccactgtgtggcagtactacaaatgaccttgcaagtctgtactatgtcttcaattacaggatatgggaactggtggccacatatatcttgaattcagcatataaatatgagtgcagctattcaagtaacaacaacctgaacaggaccnaaacatacattcccatatctgggatctgatagcagtcattttgcatccaaaattattctaaagtgactttttttttaagtaattatcactaatcaaatgttttctgacntattttcaagcatttccaccggggcactccccctctgcaacctcctgcccaccgcc

SEQ ID NO: 542142 - DNA, 184 bp, Homo sapiens
tgctgcatgacccatcactgcaaatccaaggggagggagtgatcttgcctgtattgaggtgagtggtctgtccccttggaggggatggagttgatggtggtgggttgtcggcaggtggtcggggtgggggcggaggtaggtggtctcggccccccgatttgcagtgatgggtcatgcagcaggt

SEQ ID NO: 542143 - DNA, 250 bp, Homo sapiens
  misc_feature (186)..(186): n is a, c, g, or t
  misc_feature (208)..(208): n is a, c, g, or t
  misc_feature (240)..(240): n is a, c, g, or t
gagtacccagcaatcgggatgaggcatggtggtggcatgcgcttctagtcctggctgctcaagagggtaggcagaattgcttgaacccgggagttggaggttccactgagctgagatctgcactccggcctgggtacagagcaagactccatcttgaaaaaaaacaaaacaactaaaaagcctccnaatacttagctgagcttacatnttaaagagcggtactgcattattacgtagatncatttattga

SEQ ID NO: 542144 - DNA, 712 bp, Homo sapiens
tttgtggcgatggggtatgaacccagccagggctttgttcatgctaggtaagtgtactatcgttgagcaacattcctgatgcctagcatcgtcattggttgaactgggtgagtctggagttaaaccagagagattgatggatctggatgagaaatgatgggggcatgacttagactcaggggagggggcagtggcacattcactccctggagggtggcctagggggatgaggtgacaggctgagtgaggggaaacaaaagtgactccgagggttttcaggttagctgcccagtggaaaattgtccgtgatcctgcaaggactgataaccccgagaactctgacacagtgtctggtcaggttctctctgttgaataataacaataaaagttccttatgtaagtgttgtggttaaagattaaaagcaagggctttgatactggagttaaaacacactggtcttgcgctgtgtcccttcagagaatgaccaattgttatagaaggaaatcatagctgtcttctgggttaggatttcgctcaagtggagcaaaacccctagcagaaaaccaggtcattcgaagtaggacacaccgaatgcccagtggcttcattgcccttggttagtcttcctagactaagactggggatgtagtctggttaagtagaacactactgagtatgccctataccccagctcaagccccagtaccccac

SEQ ID NO: 542145 - DNA, 149 bp, Homo sapiens
gttaaggtacttagaggatgttataaaggcgagccgggtaggagaaaggctgcagtgctggtcagcctggtgtcgcttggggggtgagagtgccaggaagtggggaggggcggtgagacccgaggctttaaggcaaagcggggcaaggg

SEQ ID NO: 542146 - DNA, 590 bp, Homo sapiens
gcagaatcagcttatcccgccagatggagagtttgagcttatgaggtatcgcacaaccaaggacatcatccttcccttccggggtgactacccgcgtagctgctgaggaatgtggagacgcaccgaaacctggtaggtcagaggtggtcatctaacgtccaacgtattataacccgtacactggcatgggctcgagaaaggactcgcagagtgcacgcgatcgcccaatcgcgccacctgaaacagccaatcgcaggtgggtcgaccacggctcgactccttgccactcgagacgcgcgggacacggcgcaaagttaccaaacgtggccagtccggagacagtggccaatccggtgctgcgaaacgaatccaaagccgcaatggtcagtgccagtgtgaatgcgacactcggcaggactccaggcgcccagagagcgaatttgagccgttccatgccgcgttaccccaatcgcaccagaggcacaggcacacattcgagcggcggtcggaagcctctcccccaattctcttcccgaagtgaaaaccgtttttcgcactgcgttcggcgccattctccggaccgcctccga

SEQ ID NO: 542147 - DNA, 1425 bp, Homo sapiens
ggagagagagagaactagtctcgagttttttatttttttttatttaagggtggacgggaagtaaaatattatgggggagtattaaaaggggggacagcacattgggaacccctcagtgaggtgcagggcccgccattgtgtgtccaagagggccaagaagcgtggggaagtgctacttaaccccacagccatcgtgggcatgagccgctctttctcagccaccagtgtcttacaatattacttcaaggaatgagaaatctgggcgtgaaagccccacacatctctatggaaaagtggtggaactacattcgtgggcggccgaggaaaaactgtgaacactgggcccctggcggcaagggcctccaaactcacagtgcgctccatgtgagacacaggacaaacaactgtggcgcggcggagatgtgagaaacatgtgaataacccctggcgccaaacggcgtaaccccctgtggccccaaacgaggccacagtggaggcaatatccaaaaagggacacctctcgacaaaggccagtgacagaggagagaccgagtacgagaccccccagaaaactgaggaaccaacaatactgtgggcaggacatcggcggataagacaacggggagcaagaggtcgtcgacaaccccagaaaacagcggaaaaatagcgaaaagacacacacaaaagagacccaccacacaacttcaacacacacagtgagagacccacacatggagggcacacacaaactcctccggagaacaagccaccacccagagggacacaaccagacaagggcacaaagcagtgaccacaaacaaaaacaaccacacgaacacaccacagaacgacaacacaaaaaaccgcgagcaaaaaaaccatcccacacaataaggcctactaaacccagaacacccaacagaccaacaaacagtgacagaaaccactgggcgaataccgagcgaacccccccgcgcgcacgcaaccgcagcacaaaccgggaaacaccgagacagacaacccaacaaaaacacacgagatacaacaccagcggaagaagaaacacaacgcgcccaggagagaacacccaaggcaaacccaacacaggagcccacaacaaatcaaacaaaaaacaacaaacgaacccaagcaacaccaagtaccacacaaaaccagcacaccagaagcagtgcgaaaaaacacgaacaagacagaaccgagcacaataaaaacaaagatgagacagcaaaggacaaaagaagaaaccaacaagacacagcagacacgacgcaacgggaaaaacaaaaaacaaacaaaaacagagcggagaggaaagaaacccaaacagcaccacgagcaccccaacagaggcacacccaacaaagccctacagagagaagaaaacccgacaccgcagcaatagca

SEQ ID NO: 542148 - DNA, 281 bp, Homo sapiens
cttcacttaaagccaattttgaaatttcacagggatttctggataggccgcggagggaagtttgtgttaagaatcatcgggcctgtggcccagccagcccgcggaggtgcagccagggtggcccctaactgggccagctggaggagcacggactgccccgctggcaggaagttgatgttccgagagcgtgagagcttgaacgcgatgtcctttgcagcttccagcttgcgcagtttgataaggccatcccttgcagtggccagggagttgccattcagttc

SEQ ID NO: 542149 - DNA, 540 bp, Homo sapiens
tagtacactaattagctgggatgaagtatcggagcagttctcacatatgcacatgggcagggctatcagagagtatactcggaatcacaaggtagttagaaccatcttgtatttttgcagagctgcctagaggtgacatctaggtagctagagaacctcgggtggatgggcttataagctctacctcggggaaattcacgagggcttcgttgggcctatcctgtatatcatgactagtaatcctgtggtattagtagactgagccacattaattaagtcaattccttcctccctccctctctcctttcctccctcccttgcttgcctttttactctgttctgttcttgcctttcctttgtgtcttctcttctcgtctcgtctcgtctcttctttttttctcttttcttttttcttttctttccgatagggtcttcctctgtcacccaggtttaagtgcagtggtgtaattaaaactcactgaatccttgaattaaacccatctttgactgggtttaagtgagcctcccatttcacttttc

SEQ ID NO: 542150 - DNA, 340 bp, Homo sapiens
tgcaggatgtcccagtgcatgctgggactgtacttcggcttcctcttggtgatattcgccattgacatagctgcggcactctggggatattcccacaaggcatgaggtgattaaggaagtccaggaggttttacaaggacacctaccacaggctgaaaaccaaggatgagccccagcgggaaacgctgaaatgtcatccactatgcgttgaactgctgtggttaggctgggggcgtgatcactgtttatctcagatcatctgccccaagaaggaccgtactcgaaacctttcaccgctgaaagtcctgtcctgagtgccaatcaaaagagagtcttcgac

SEQ ID NO: 542151 - DNA, 430 bp, Homo sapiens
agactctgcaggatccccgtatacgtgtggaagcatgtacttctgggccatttgatcacatgtgtggattagtgtagtcaccaccacaatcaagatacggaacaggctcatccccacgaacgtctctcttgtactgtccctttacagtcatgcttcctcctcctcttactttccctaaactttggaaactactaatttgttctccagatagataattttgtcatttcaaaattatcatataaatcgaatcatatagtatgtgatttttaaaattatttttttctttttagagaccggatcttgtctgtcacccaggctggcgtgctgtggtgtgatcatagctcactgcagccttgattttctgggctccagtgatcctccatcttcaacctcctgagtagctctgactacaggtgcatgccaccatgcc

SEQ ID NO: 542152 - DNA, 673 bp, Homo sapiens
  misc_feature (8)..(8): n is a, c, g, or t
  misc_feature (28)..(28): n is a, c, g, or t
  misc_feature (45)..(45): n is a, c, g, or t
  misc_feature (54)..(54): n is a, c, g, or t
  misc_feature (59)..(59): n is a, c, g, or t
  misc_feature (62)..(64): n is a, c, g, or t
  misc_feature (85)..(85): n is a, c, g, or t
  misc_feature (97)..(97): n is a, c, g, or t
  misc_feature (107)..(107): n is a, c, g, or t
  misc_feature (111)..(111): n is a, c, g, or t
  misc_feature (137)..(137): n is a, c, g, or t
  misc_feature (147)..(147): n is a, c, g, or t
  misc_feature (149)..(149): n is a, c, g, or t
  misc_feature (151)..(151): n is a, c, g, or t
  misc_feature (158)..(158): n is a, c, g, or t
  misc_feature (161)..(161): n is a, c, g, or t
  misc_feature (165)..(165): n is a, c, g, or t
  misc_feature (169)..(169): n is a, c, g, or t
  misc_feature (174)..(174): n is a, c, g, or t
  misc_feature (197)..(198): n is a, c, g, or t
  misc_feature (207)..(207): n is a, c, g, or t
  misc_feature (221)..(221): n is a, c, g, or t
  misc_feature (246)..(246): n is a, c, g, or t
  misc_feature (250)..(251): n is a, c, g, or t
  misc_feature (257)..(258): n is a, c, g, or t
  misc_feature (267)..(267): n is a, c, g, or t
  misc_feature (271)..(271): n is a, c, g, or t
  misc_feature (288)..(288): n is a, c, g, or t
  misc_feature (304)..(304): n is a, c, g, or t
  misc_feature (307)..(307): n is a, c, g, or t
  misc_feature (333)..(334): n is a, c, g, or t
  misc_feature (339)..(339): n is a, c, g, or t
  misc_feature (342)..(342): n is a, c, g, or t
  misc_feature (344)..(344): n is a, c, g, or t
  misc_feature (347)..(347): n is a, c, g, or t
  misc_feature (359)..(359): n is a, c, g, or t
  misc_feature (362)..(362): n is a, c, g, or t
  misc_feature (375)..(375): n is a, c, g, or t
  misc_feature (394)..(394): n is a, c, g, or t
  misc_feature (403)..(403): n is a, c, g, or t
  misc_feature (416)..(416): n is a, c, g, or t
  misc_feature (424)..(424): n is a, c, g, or t
  misc_feature (440)..(440): n is a, c, g, or t
  misc_feature (455)..(455): n is a, c, g, or t
  misc_feature (462)..(462): n is a, c, g, or t
  misc_feature (475)..(475): n is a, c, g, or t
  misc_feature (485)..(485): n is a, c, g, or t
  misc_feature (500)..(500): n is a, c, g, or t
  misc_feature (507)..(507): n is a, c, g, or t
  misc_feature (540)..(540): n is a, c, g, or t
  misc_feature (561)..(561): n is a, c, g, or t
  misc_feature (565)..(565): n is a, c, g, or t
  misc_feature (567)..(567): n is a, c, g, or t
  misc_feature (577)..(577): n is a, c, g, or t
  misc_feature (640)..(640): n is a, c, g, or t
tgtgagtnggtttgttttcttcatttcngaaattcgggtcatggnactttttcnaaganccnnnggggggttcccggggattttncccccccctacngatgaagacntccnagggccccgccgccgtgacgaagacnaaagcctgancngntctgggnccnaagnggcncggcnggggcggggggcccgggggggcnncccccgggnggccggggggctgnggggtgcgcgccccgccccgggggnagcnncccccnnccccccccncccnggccgccgccgccgccnccccgcccggcctgcnccnccccccggcgggggggccaggggccnnccccnccncnccncccccggccctnccncggcccccggggntgccgcggaagggcccccnaagcctgcncatagccaagggncaggtatntggccaaggccccccncagccctgaactggngtgtgtntgaggctccggcnggggcccccncacttgggcgcggancctgggngtggagagagcggaccccacacctggggccggnccaacctggggtggcaaaaanggantncgggtctttnggttttatgagggcagagggaggggcatgcgtcctggtaaatcgggtgctgcggaggtgaggnggttccattttggaaactgaggaagcagagctt

SEQ ID NO: 542153 - DNA, 167 bp, Homo sapiens
gtacgtggcttgcagtaaagtgaatagtcagctccttcttcttcccggaggacaaaaaaaaggaaaaatagcatgcgatgacgttcagttgtgggttgttggggggaatcactgtatcgctctcctttgatagctggaaagcgggggcttcgggagacgttattctt

SEQ ID NO: 542154 - DNA, 358 bp, Homo sapiens
cccccccttttaaggggcccccccttaattaattagggcccatgaaaaaagcatgcccccctggggatattaaaaacatatttatatggtgtggtatggggaggaaacatttttgtttgaacccctcccaaataatttccgaccccgctcctttcccaacctccaagagattctggccggtttttcggctgggggtggtggggtgctttccccaaccaaattttacatttcattaaaaaagggtttggtagggaagtcgggaaattgggcctttccctcccctttattattaaagggtttttttaactggaacagccccaccccgggcccagggggttataaaaattttgtccggcca

SEQ ID NO: 542155 - DNA, 226 bp, Homo sapiens
cgcggtcgacttctgctctcagagccttgcggtgaggctcgccccccgcaggagcattaccgtgtgagctccgcctcctgcagagcattaccgtgtgagctccgccctcccgtcagagcattaccgtgtgagctccgcctcctgtcagagcattaccgtgtgagctccgccttcccggacagaagcattaccggtgtgagctccgccttcccgatccagagcatta

SEQ ID NO: 542156 - DNA, 153 bp, Homo sapiens
aatttaggtttggagcctggctcctttgcatttgggattggggatcctgggtgggtgtttggtccattttcagggttttaccaacacgtgtgtgtgtgtgtgtgtaaaggctatccacccaaaatcccttttggccaggggggccccccccca

SEQ ID NO: 542157 - DNA, 181 bp, Homo sapiens
gtacttgccctggtagatcaaagcccaccgcgctcttgtatactcggtctgcctgcacgccatacttactggcaaaacccactggagtagtctttctggcgaggcatgcttctcagctcttcccctgggtattcaaatgccatacagaggtgtacctgagccgtcgaatttcagtacatca

SEQ ID NO: 542158 - DNA, 938 bp, Homo sapiens
gggagacggaagtgaccggcggggtcgactgacggtaacggggacagacaggctgtcgcagaggcggcggaagatgaatgccagaggacttggatctgactaaaggacagatccagtactgaacttcagaagtggacctttttgaaagtcatgatcttcttcggaaaggtttatcttgtgtgacaaatgaacttttgcctagtcatccccttgaattatcagaacaaaatttccagctcaaccaagataaaatgaatgggcacactgagaaacattcagggtctatttgctccgctaaaattacagatggcacttcaacggcagtgcgagcaggtcagcgtcttccatttcttttcaaagctcaaatctttccctggactgttcgacggggtactgctcgagcactatggacttgaggatatcttcaatgatcatcaaccaacagcgaagtcactggtcacgagccacatttgatggtcggaacaataaacacttggtcactgtcaatcagacagtgctggtcatcggacaaccggagcggctgcatcttggtctattagtcaacaataggtccactgcaaatttgatgctaacaacaaccattcctaagttaactgaacactcgaacaatgcctgccccacgcaagacatccgcgagagatgtcaaatggacggaggacaagggaaacgaacgtgacacataaacaacaaacggaaaagccggcagaccaaaaagtacaccacaaaagacgcaccacagcataggggccaggcggtcagaaaaaagaccacgccaaaacgagccgctatggcaacagaggcagaccaacagagcacagaacaagacaacacgctgggtagaccaaaaaagacattacaggccaacaggaacataacaaccccacaccgaacagccacgaccaaagcagaaacccacc

SEQ ID NO: 542159 - DNA, 335 bp, Homo sapiens
tgcttcggggagaggcgacagtgagaaaggagcaatgccggtcattcctccaataagcacgagaagagtattgataatgggtttcctgaacaactgtattagaaaaaggatcctaggccaggtgtggtggctcacgcctgtaatcccagcactttgggaagctaaggtaggcagatcatctgaggtcaggagttaaagaccagcctggccaacacagtgaaactccatctctactaaaaatgcaaaaattagctgggcgtggtagcgtatgcctgcagtcccagctactagggaggttaaggcatgaaaatcacttgaacccaggaggtggaggt

SEQ ID NO: 542160 - DNA, 803 bp, Homo sapiens
aacgacggtgctggtgacagccagatcgggcattgctgctggctcagtgggccttggcaagagggcagcagttaaccgactgtggaaggcgatacacacaggcccccgtggccaccatggccttcgaacccaccatccactctgactagccacaggatgtgctgtgatgtgggccgtgcgacgtctgggaaatcgtgacggcactactgtggacacacacacttcctgaggactcagcccgagtatcgtgcaccatagtggccttccaagccggaccctacacagcctgctgcatcttcatacatcggacacaggatgcacgacatccagcgtgtggtcacatgaaaggaccggtcatgcctggctgtgcatgaatgaaccacatacagcgccagtcaccatacaaatggcacattcagagacccagacaggcacacaacctatgcttcaagaatccaggtccagtagacaaagactctgtcatcactcataggggacacttcaagtatggctgccaaggaaccaagaaggacccgtggcccttgctgttatggaggcaagcggtgagaagggacttggttagatgcgtggttagaccaatgaagggaaggctcaagatggattacccaaaggagttggggtttggtggacagattacacaacaagggacgatgtaacgatatacattgacagagacatgaggaggaacaaaatgggcaaatagttggagagcgattggttgagggaagaggacagaatataatgagggccaagatgatggtggtagccaggaccagggaaaa

SEQ ID NO: 542161 - DNA, 1292 bp, Homo sapiens
  misc_feature (373)..(373): n is a, c, g, or t
tcgggtcccctaatcggcaagagggtggtatcagccgttttaagctatatctcaagagtgtggctgtaacccataactaaaagagtgcaacggtgcactgtggttaatcccgggtgtccgctgggaaattgtttccccggggggaaatatttcgagttcgcgatgcctcgcaatcgagaggtgcccggtcgcgtcctttagtgcccatttgcatgtccgtgccttcagacgttttggtcaaaatcaatccgtttgcccgggcatggggccacctaaggcccctggttctgccggttaaacgtctaaggggacgtcgtccgccggtccgttaggaaaagatccgccgaaaaggcccgagtcaccccgtggcacnagggcaagtggtccacacgcattcaccgggaccatggccctggggcgaccattacaatgtactggacggaggccttgcaatcccctaatggggccccaatgcgacgcaaagattgcggcttgcaaggcccagtcctatgcagtccgggcatcgcctcgctatccttgcaatgtttgcgcttcgtgtcatgtcgtgtctttgcaggcaccctggcatatgcgcatggatcgtagagttggtctccatgactgggcaacgcatcatggcaaggctagtgcgttgggctcgtgtgagctcgtggctcgctcggcggcaacacactctcgtgcgtcacagcgcacttacttgcggtgtgtctttcacgctgtgatggaaacgtatactgactcgaggtctctgcgtaggctctgactatcgatctgtacgcgaggagcctgcagtggtaacccagccgagtcactagctagcaggcaggccttgtgcttcttatgcagtatgcaatagcagtttcatggatgtgtgccctagaactcatgggtgacagtcaaggctctgtgaggggtttcaatgaggtcgactgataacatgtgccgacattgcaaagcggaattggctcataatgaagaaggtctcaaacctggagagactggagaaatgcagctcgtcataacgtaaagttaactttaggtataaacaagtacgaagttgactagctgacgggtataagaagtgtaaccatcagttaagacctctcctgtcattcctagcttccttgcttcagtaattgaaatggaagtgggggtgtccctactctgtagaattctgggactgggcaaatgtttgtgtggcctccgttaaacgtagctgttatgttatgatgtttattataaccggggtaattagagtaagctatttctac

SEQ ID NO: 542162 - DNA, 185 bp, Homo sapiens
cctggaactggacctgcaaggacttgctcctccaggccctaaaggagtcccagtcctacctggtggaggacctggaacggaactgaggctcctttccaacaacactccggtcagcccctggcaatccccccaaatcatcctgaatttgatctttttataccccatatacgaaaagccagcttgga

SEQ ID NO: 542163 - DNA, 109 bp, Homo sapiens
tcctgcttttcggaggcttcgcaggtctcacctcgacggtgatttgcaggtggagagtgctgggatggaaggccgggatactcacaggctgccgagagccctctgaggg

SEQ ID NO: 542164 - DNA, 219 bp, Homo sapiens
gacgtcgaggatggtgagtcatacctgtaatcccagcagtagagggaggctaagtcatatcgagtcatctgaagttagagttcgcgaccggcttggccaacatgggatatatcccgtatctactaaataatacaaaattcgccgggcgtggtggcacatgcctgttatcccaggtactcgggaagctgatgcagcacaattgcttgaacccaagaggcg

SEQ ID NO: 542165 - DNA, 330 bp, Homo sapiens
  misc_feature (10)..(10): n is a, c, g, or t
  misc_feature (59)..(59): n is a, c, g, or t
  misc_feature (101)..(101): n is a, c, g, or t
  misc_feature (130)..(130): n is a, c, g, or t
  misc_feature (135)..(135): n is a, c, g, or t
  misc_feature (185)..(185): n is a, c, g, or t
  misc_feature (212)..(212): n is a, c, g, or t
  misc_feature (232)..(232): n is a, c, g, or t
  misc_feature (241)..(241): n is a, c, g, or t
aagcagcagncctagggtgaagtaggcaaaagtacttacagactcggtcggccgggttnggtggtcaacgcccgtaatcccagcactttggaaggccaagncgggtggatcacagggtcaggagttcaanacaancctggctaagatggtgaaaccccatctctactaaaaatacaaaaaattanccgggcatggtggcgggcgcctgtaancccagctactcgggaggctnaggcagganaattgcttgaacctgggagggggaggttgcagtgagctgagatcgtgccattgcacaccagcctgggctacaaagtgagattccgtctc

SEQ ID NO: 542166 - DNA, 161 bp, Homo sapiens
caccccaggggaaacgccaactataacccctccctcgagagcgagcagcatgcactggcacgtcaggaccagtcgccctgaaagggacccctttgaccgccggggacacggccgggaataccgggcgagagaacgcccaacgggggaagccgggacgggcc

SEQ ID NO: 542167 - DNA, 390 bp, Homo sapiens
ttccatttcagatctacaccggttgacttttgaggctatctacgttttccaagagttcctgcattttacacttggagatcaaccagggtttcggtacatcacgaggcgcttgtgcgcccgagttactggtcgtgactgttagaaaccttgcgaatggataagtttaaggaaggcacgtaggaagaggaaagtgggcaagagcagttagaggaaggagagctggaagaaatgtaggttaggagtgtttggagaggtaggaggagaaaacggagatcgcacttactctccagagtgaagcctgagctctagtcatatacagatcccacagaccttggagagcttcttgcaaggctcagctcacaaaacctcacttaaaaaacaattctctga

SEQ ID NO: 542168 - DNA, 415 bp, Homo sapiens
tgtagggtggctctgtatgtttatttttatttagagacagcatctctccctgtcacccaggctggagtgcagtggtaccatcatagctcactgcagcctcaaactcctgggctccatcagtcctcctgacctcgtgatctgcctgcctcggcctccctaagtgctgggattacaggcttgagccaccgtccccggcctttttttttttttttctattgtgaatgtgtttgagcagtggccagtattccactctttaagaccttacaccagggccccttgagacaaatgcccgagcccagcactttgtgccctgtactatatctcagctgctttctgtcactttggttgatgaagtgttcagaattgggattgttgagatttcacaggtcactattgtggggatcatcagacttgc

SEQ ID NO: 542169 - DNA, 400 bp, Homo sapiens
  misc_feature (235)..(235): n is a, c, g, or t
  misc_feature (238)..(238): n is a, c, g, or t
  misc_feature (254)..(254): n is a, c, g, or t
  misc_feature (258)..(258): n is a, c, g, or t
  misc_feature (265)..(265): n is a, c, g, or t
  misc_feature (268)..(268): n is a, c, g, or t
  misc_feature (279)..(280): n is a, c, g, or t
cctttccttgcccaaccctcccttctttcctttgccggcaaggcagggacccacagtggttgcctgcctccgggagggaaggaaagggagggtgggtgggtggaagggggccttcctccagggaatgtgactttcccaggccccagaatagtttctggacccaagcccaaggcccagcctgggacaaggctccgagggtcggctggccggaggatatttttcccttcccgccttnccnggtgggtccccccacntgangttttgntgnagagtttgacnntggattcccccccctcaccccgcccctggtcccattcctgcccccgccctacctccgccccaccccatcatttgtggacactggagtttggaataaatgctgtttgtcacatcaacacca

SEQ ID NO: 542170 - DNA, 331 bp, Homo sapiens
ggatactggagaaggtgcgatggagtactacccttcggactggtggtgacttgctgaactcgcctgttgctgagtcaaatgtacctgtcaccccacagcttcttcatcatgtcctctactttctcggccctgctcggaaggcccaaactgaacctcccccttggcggcgaacttgtgcacatacatctcggcaaactgcttcagggtgaagtgcccacctgtgtaggccagacccaaaagcccacgtgttacctgaggacaggatcgatcactgctgtttgcccattggggcctcgttctcagccctcggccggtaggttgggaggcattg

SEQ ID NO: 542171 - DNA, 909 bp, Homo sapiens
cgcggtggctcacgcctgtaatcccagctctcagggaggctaagaggcgggaggatagcttgagcccaggagttcgagacctgcctgggcaatatagcgagaccccgttctccagaacaaaggaacaaccacacaaaacaaccaaaggacaaaaaaaaaaaaaaaaaaaacaaaaaaaaactgttgtgtggggcggcgcccggcgcgcccgggagaaaaaagtttctacacacccacttcgcgttgggcgcgcgcgcggggccccagggaggttcaaggtgcacaccctggggcccaacgggggccccaaggagaaaaaacccggggcccagaaacagtggggcgtgtgggtttcccccccaaataaaaaaagacgccgggggggacaccccaggcggtgtttgggaaacaaactccccaagagtgggggggtctcccgagggggccaaatcgggggctcatactcacccagggaggctcccaagcgacgccggatactaaaattataccgcccccgcgcgtggaggaggatgatgagtaggaagactaggggacaaaacgtcgtaagctacggttcaagacgtacgaatagaagaaacgatcatgaagaaacactaagacatacataatataacaacgaatgtatatacgcagctagcgcacggagaacaaccgacgtgcaatagaacgaagagctacacgagaacaacaagacatagaaaagaaagagtaaaaacaagaaagagaagacaaaaagagaaaaagcatagaacgaacgaagaaaagaagagatgagagacaaagtggtgcgacaaggagcgatggcatcacagagaaaaagagagatcaataacaggaccaggagaaaaatgagccggactagcagagaaagacaagaaacacagaaaa

SEQ ID NO: 542172 - DNA, 227 bp, Homo sapiens
agagcagagcgccgagggcgctccaccgtaccgtttcgcccgccgtgccggggaggtggagcacgagcgcacgtgttaggacccgaaagatggtgagctctgcctggagacagaggagccggaccgaactgtgcgagagctgcagcatgctgccttaggaggcacagctactcgacagaacaattgagccgctctagcctcttcgaaccatctagtagcgggtaccg

SEQ ID NO: 542173 - DNA, 251 bp, Homo sapiens
gtaaggctaaggagaagaggaagataaggttaaaagttgttaatgaccaaacatttaacagacatgcaaaacacaagtttattttcaagccttggaactatttaggcaagcaaatcatttctaatgcatatcatttgtgagactttctcattaatatcctgactcattcattttagctaaggcttcatgttgactcgatatgtcatctaggacggtactatttcatggtcagacctgttgccatagttggt

SEQ ID NO: 542174 - DNA, 142 bp, Homo sapiens
ggttatggctggagtggttatggtgccatatgggcttggaactcggataatcagaagtttaactaaaacttggaaataattcactttcatctggctttctagatttggtacatctcagtccataaagcaaggctggtggggg

SEQ ID NO: 542175 - DNA, 896 bp, Homo sapiens
  misc_feature (4)..(4): n is a, c, g, or t
  misc_feature (227)..(227): n is a, c, g, or t
  misc_feature (307)..(308): n is a, c, g, or t
  misc_feature (311)..(313): n is a, c, g, or t
  misc_feature (318)..(318): n is a, c, g, or t
  misc_feature (320)..(320): n is a, c, g, or t
  misc_feature (322)..(322): n is a, c, g, or t
  misc_feature (331)..(331): n is a, c, g, or t
  misc_feature (339)..(339): n is a, c, g, or t
  misc_feature (342)..(342): n is a, c, g, or t
  misc_feature (354)..(354): n is a, c, g, or t
  misc_feature (364)..(364): n is a, c, g, or t
  misc_feature (367)..(368): n is a, c, g, or t
  misc_feature (372)..(372): n is a, c, g, or t
  misc_feature (389)..(390): n is a, c, g, or t
  misc_feature (392)..(392): n is a, c, g, or t
  misc_feature (397)..(397): n is a, c, g, or t
  misc_feature (403)..(403): n is a, c, g, or t
  misc_feature (425)..(425): n is a, c, g, or t
  misc_feature (438)..(438): n is a, c, g, or t
tttnttaatattcaatttacgtaacaggctcaaattttattaattgaattctgcatccatacgaatttagtcttaatttataaagcaacttacttcgatactcttccttgaagtatgttataaaatacaacgtttaaataaacatcacaaaaatattgtttgtcgatcatttttgtgactttaacagagaaatcttcaagtttataatccactcattcttgcttacngccagacactacataaatccttaccaaaacaaaacaaacccaggtaggttcactgttacccctaggtatgcttcgttggnnttnnnccagngncncccattttncctctaanggngtcaatgctttngttctctacnggnntctngggggtgactatgatgnngngatgngggttnggggggtctgggggggaatganacatttaattaanggcaatagttgttcaaacagtaagaatgtatacacagtttatatatagatagatagatgggtatgtattttttccccagagaaagggctcaagagacaaaacagtaaaacacttcaactttccctaactcttgagagggtatctgattttgagtgagtttacgaagttcttattttgatgagccacttgtgtggggacacatatgcgtaagggctttttgtgaaagagccaaagcttgcatctgagttaaaacttgatagtcagtacacttgtactgggacatacgtgcccctgaagtttttattaaagagctaaaatctatgtctggcttataacttaccaatcaaaacaagtcacacacatacataaagaaggaagccatacatggttactgaaaatacacaaattattttcacccagatgtgtcacttccaccatgaaagactgctaagctgaag

SEQ ID NO: 542176 - DNA, 502 bp, Homo sapiens
cgcaacaacaagaagctgctgggcagagtcaaagcattcgacaggcattgtaatatggttctggagaatgtgaaagaaatgtggacagaggtgcccaagagcggcaaaggcaagaagaagtcaaagccagtgaacaaagatcgctacatctccaagatgttcctgagaggcgactcggtcatcgtggtgctgaggaacccgctcatcacagggaaataaagctgacgtgtaacacgactgttcaagtacagggttgtctcctggacacacactcactcacacaactgtgttaaaagtgataattaggcttttcagctaattaattattacttcatacacagaatgccttgagctgaaacaataatgtttagctggaaaacgtttaacatcatctggagagattgtctggtcaacaaaatgataaagatgttggagttaattttgttgttgttattgttttgtcatttgtgatttgttttctaaataaatttttggatattca

SEQ ID NO: 542177 - DNA, 650 bp, Homo sapiens
aaagggagtcaagcaggagcgtctgtctgaactgagaccagatatgaatctttcaccacaaaaatgttaaaagatatgaaggaaggagttaaacaatatggacctaactctccttatatgagaacattattagattccattgctcatggaaatagacttattccttataattgggaaattttggctaaatcttccctttcaccctctcagtatctacagtttaaaacctggtggattgatggggtacatgaacaggtatgaaaaaatcaggctactaatcctgttgcttatatagatgcagaccaattaccaggaacaggtccaaattggggcactattaaccaacaatcagtaatgcaaaatgaggctactgaacaactaagggctatatgcctcagggcctgggaacaagattcaggacccaggaaactcctgctctgcttttagttcaatcagataaggctctaaagatccatatccagactttgtggcaggttgcaagatgcagctcaaaaatccattgcagataataacgcccgaaaagttatcgtagaaataatagcttatcaaaatgaaaatccagaatgtcaatcgggcataaagccataaagaggaaaggttacagcaggagttgatgtaattacagaata

SEQ ID NO: 542178 - DNA, 157 bp, Homo sapiens
  misc_feature (83)..(83): n is a, c, g, or t
tttgtcagctcgtgttatgggacgttgggtatcgttcagggccggacctggtctaagtggtattctaacggggacacttgcgnatgctccatgacatgctgttaaaggtctagttcgatgctttgtcgactcaaccctccttggtgctctgggccta

SEQ ID NO: 542179 - DNA, 116 bp, Homo sapiens
  misc_feature (32)..(32): n is a, c, g, or t
  misc_feature (47)..(47): n is a, c, g, or t
tgtgtatgtggatgagcgtgggaaccctgaanggagcctctctgcantttctgggacacaggttgcagttaacctaggacaaaaagtcagtagagtcctttatgggctgctgatga

SEQ ID NO: 542180 - DNA, 381 bp, Homo sapiens
tgcagcacacaacagcagcagctgttagtgagctaagttagcacatgactgcgtaaaataccactacatctggccaatctatggaaaagagaaaaacaatggagttacttaattgtgaataacaagaaacgaaagttatctcttcccaggagaggctagaaatagcttttctgtcttttggacagtgccgagtggaatgcctggtttgggggaggacgagggactgggttcagctgtggtgcttcgttcgttcacggcagtctggccttgtgctactgcggagaacgatggagcctgggtctcaagcccagcttcgctgtacctttgccacatggtattgtatgcttgccagctagaatgagggtcaggtattttttaccg

SEQ ID NO: 542181 - DNA, 538 bp, Homo sapiens
cattgtgaaggcagtgagccatgatggtgttaccatactccagcctgggtatggtattttaaataaaaacatttaaaaataattttctggccagtgcacgatagctcatgcctgtaattccagcactttgagaggacaaggcagaaggatggcttgagtccaggaattcaagaccatcctgggcaacagagtgagactcctttgctacaaaaaaaacatggtggtgcacacctgtagtctcagctacccgggaggctgaagacttgggaggctccttgagcccaggaggtcgaggttgcagtgagccgagattgtgccactgcactccagcctggatgacaagagcaaaactccatctccaaaaaaaaaaaaaaccaaaaaaaaaccaaactttgtttttggtttttttttcccctctctcgcctctaattgcgggggggtgtctctgaaaagaggccagttcatgagggcaaaaaatatgtgttcccaaagggattcgggggcccttttccccaggccggggctgaagggggcactt

SEQ ID NO: 542182 - DNA, 187 bp, Homo sapiens
  misc_feature (104)..(104): n is a, c, g, or t
ttggtactggccaaatggcagccagagccctggcccaggcactgagaagtttcccctacatgtaccccctatcccgtgcagtccagccctgggctatggcacgntgctgtgccgggcaggctggggccctgggcacgggggctcttactaaaactaggctgcatcagtgaggaagcccaggagagca

SEQ ID NO: 542183 - DNA, 389 bp, Homo sapiens
agggggggtttcctctgtggactacaagttaaatttacaatggttatataaagggttctgtgcgccaatttacatgttgaactaagattctatcttggtcacacagctgccacataggcgggtgtgctctgttagctgctcttaggtagctagtctggtttcgtgggtcttagcagtggctctccgtgcaaagctgtttctagttaattcattacgcacaaggtataggggttagtccgtgctatattatgctcggctataatttttcatctttcccatgcggtactatatctactgcgccaggcctcactttccatcgcctagcctcaatttgggtcaatggtttggctaagggtgtctggtagtaaggtggagtggctcgtgccgaa

SEQ ID NO: 542184 - DNA, 887 bp, Homo sapiens
  misc_feature (31)..(31): n is a, c, g, or t
ctggcgccgaccgctggtgtgcggtgatganttagagcggagtctggcaccaacgaggagaacgcgcggccactctttctcgatgaaaacgatgaacgcgcttgggacgacccgccccgccgtttgctccacgcggtagcgtttcgacggtcgggtcaatatgagacctctcctggtgaagtgcctcccctctagggaagggacaaccgccgccccgggggatcacgacggccccgccccggagattgtgaagagccgagaacctgggaggaaacaacgcccccgccctgcgaaaaaagcggacgggttgtttccaaaagcaagaggggtcaggcccttttaaaccgcgccagagaggggcaagtgcccgccccccctggcacgagttgccgtgccccgcccggtacaaatggggcccgcgcagggcacgcctgaagcttcgcacaacagggcgcccccctaagagtcccctgtgggctgcggcgacaccaagtacatccctgttagcagggcagaagtccaggactgagtgaatggccccaagcaccaagcaagggcccccgccaacgaccaacaggcgcagaaaccacccgaaagacaaataaaggaggcaaaatctgtacgcaaaacaatgggaaaccccgttggcgccccccaaagcgaaggatattagggcggcaatgcgcatggaaaaagaaaggcggccagagcattggggccaaaacaagtaaaacacggggaacccaggaatacacaccggtggtcttgccacccttgggcaacaacgggggccgacagtccctcccccggcggggtgactccccggcggaataccccccaatacccttgtgtccaacaaagcaaaacaattccccgcccacatgaca

SEQ ID NO: 542185 - DNA, 1353 bp, Homo sapiens
aaccatgcgtacgctgtaggcacttggtcagtgctcgaggtggatgtgttggcgttgaggtgactgacaagctcggcaaggagatatcccgtccgacgcattacaacttcttaatgtcaaccatagcgttcaagatggccgtataactctgcataaacacgcgctgggcctagggctgcttgcgcgacacgatatcaccgctaagagaggaaactatgtcaaaggtagggtagatcggagattaatacgcagggctactcaaatatggcgatgttccaagtgaaaacactagcagggaccttgtggtgcgtccattccactctgcgttcgcaagagccatctacgtaggtcactgagaaggggctaggaccatgatgttgaagctgtggcatggcggccgtactttactggcggggattcgtgatacccccagtaatgcttcagggcgtctgctgtctgttagctgctgtctgagcatgtgctcgccattgggcctccaaggcagccgctttcggactacggtggccgctgcagtgcaagttgccatactctgggtctgtgagagaaacgtaggggctgtcccggagttgacatcacgcgtcaaccatcaccaatcttgttgcctcgagtattgtactccacgatatactccaagttggctcgcatgggtggaaccggtacggaccttagctgcaaagtttgagtgaggataatagaccggctgatggttgccgctctgcgaagctccattccggtcgtcccctggagattaggcgcgttagctggttgttaaacccccaggagggaactacctatgacccggtggatcaacacaggctgaggagtcgaacaactcagtgcagccacagaaccagattgagttgaggggtccccaaagacaaagcccttaaacctggtgaatgaaccgcccgatcaccaggcgtctccagtattacctcaaaggggccctcaacccaaagaactccaagccatccagcaaatcggcggaccctcagtaaaacacagaaaaatcgggaacagcacacatatcccgagaagaacacaatgcgccacacctatctaccccgggccccacagcataatatacatcaaagccaaacctagctaacccactccgactcaaacacccaggaacacaggacacagagaaccagggaaaagacgaacaacaggagcacactataacatcacgaagacaagacacaaaccaacgtagacgccaacacgtagacgtcgtcagtcttctcgtaaacaactaaacagcacaaacacccactaagaagacagcacacaaagacaagcacgcagacgctaacaacaacaccgcaagaa

SEQ ID NO: 542186 - DNA, 138 bp, Homo sapiens
agtgacgtggcttgtggctggcctcaaactccatggtctcaggcgatccacccacttcaccccccaaagcgcttggatcacaggtgtgagccaccgcgccaggccgagatgtttttgtctgtattgttcattgacggt

SEQ ID NO: 542187 - DNA, 153 bp, Homo sapiens
ggcggcgtcgggtgggggtgctatagggtaaatacgggccctatttcaaagatttctaggggaagtatgtggagtgaaatagccgcgatgggcgggtcatagtgccttagagccgacagactctaagaggcaacccctcaaataccgcacaac

SEQ ID NO: 542188 - DNA, 550 bp, Homo sapiens
  misc_feature (18)..(18): n is a, c, g, or t
  misc_feature (22)..(22): n is a, c, g, or t
  misc_feature (45)..(45): n is a, c, g, or t
  misc_feature (61)..(61): n is a, c, g, or t
  misc_feature (95)..(95): n is a, c, g, or t
  misc_feature (459)..(459): n is a, c, g, or t
gccgccacactaggatangaanagagcagaagcgtagatctaggncagcggtctttaaagngttaaaatttcctctcgctagtaaagcttacagncggcaagaatataatatatacacacaaatacagttataatggtgaaaactggaaacaacttaaatgtccaacaatacaggcattaattctctataaagtgaatatcaaatagccatagaaaagacattaaagacccagaagtgttgctaatggagcaaaaatacatcctttccggtcagatgcagtggctcacacttgtaatcccagcactctggcaggccgagatgggtagatcgcttgagaccagctggggcaatgcagcaaaaccccatctttgcaaaaaatacaagaatacaaaaattagccaggtgtggtggcatgcgcctctagtcccagctactcaggagacagaggtgggagaatngcttaagcctgggaggtcaaggttgcagtgagccctgatcatatcactatgttccagcctgggtgacagagtaagaccctatctcaaaaaa

SEQ ID NO: 542189 - DNA, 1019 bp, Homo sapiens
  misc_feature (37)..(37): n is a, c, g, or t
  misc_feature (67)..(67): n is a, c, g, or t
  misc_feature (70)..(71): n is a, c, g, or t
  misc_feature (73)..(73): n is a, c, g, or t
  misc_feature (79)..(79): n is a, c, g, or t
  misc_feature (85)..(85): n is a, c, g, or t
  misc_feature (94)..(94): n is a, c, g, or t
  misc_feature (101)..(103): n is a, c, g, or t
  misc_feature (106)..(110): n is a, c, g, or t
  misc_feature (128)..(128): n is a, c, g, or t
  misc_feature (131)..(131): n is a, c, g, or t
  misc_feature (137)..(137): n is a, c, g, or t
  misc_feature (147)..(148): n is a, c, g, or t
  misc_feature (150)..(150): n is a, c, g, or t
  misc_feature (155)..(155): n is a, c, g, or t
  misc_feature (176)..(176): n is a, c, g, or t
  misc_feature (186)..(186): n is a, c, g, or t
  misc_feature (188)..(188): n is a, c, g, or t
  misc_feature (191)..(191): n is a, c, g, or t
  misc_feature (200)..(200): n is a, c, g, or t
  misc_feature (202)..(203): n is a, c, g, or t
  misc_feature (219)..(219): n is a, c, g, or t
  misc_feature (229)..(229): n is a, c, g, or t
  misc_feature (246)..(246): n is a, c, g, or t
  misc_feature (260)..(260): n is a, c, g, or t
  misc_feature (264)..(264): n is a, c, g, or t
  misc_feature (280)..(280): n is a, c, g, or t
  misc_feature (285)..(285): n is a, c, g, or t
  misc_feature (614)..(614): n is a, c, g, or t
  misc_feature (937)..(937): n is a, c, g, or t
  misc_feature (955)..(955): n is a, c, g, or t
  misc_feature (959)..(959): n is a, c, g, or t
  misc_feature (974)..(974): n is a, c, g, or t
gcttcttaaaattcatagaaagaaataatatatttgncccatcggccaccccccccgtctcccactnacnncnatactnccaganaacacgctnctacaannnatnnnnnatcacaaaaaagatagcntantgaaanttcaaaattnngntacgntccgagggtttcggcgtgtangaggttgctnangtnttttttttntnntatataattatttaantattataagngactctgtatgcaaagngtacaaggaaagtnagangttagtgaggtatgangatgngggggggttttgttgaggaaaaataacttagtctagtttataagttgttgcagaataaaggaaggaagaaaagatacaggtaaaactgaatgcatataaaagttggaaagagagaatcttttgtggtcaaactgaccaaaattgagtgaatttattatgtcttaaaaatgagagtgaatttattatgtcttaaaaatgagccctaatatcaagggtacattgatgcaaaactagaatttggcattatcttttaaaatgcaagattttcttgtagtattgataaaaaagagtgaaagattttctttttcaccttttaagtaatctgccanaaaaaattatgtcttatcaaaataattttctctttcatgttatcttttatcaggccttcaattactttccaagaaaataaaatcctattaagagagctaatatatatatttttacaactatataactttatttgccttcaaagccttttaataattaccctggtgattatgaaatgaatattaataaatattaaatgctcattaaatacttaaatcataaaatattaaatgattataaaatgaacagttgattaaataggatcccagatcactatataattcaataatcactctggtaccagactaattattagtgactaaantaatagtacctgagatcntatnatcaaatttttcttntttcttttcttaattcaaaaattgggaggctcatgatttgtgagt

SEQ ID NO: 542190 - DNA, 900 bp, Homo sapiens
  misc_feature (1)..(1): n is a, c, g, or t
  misc_feature (176)..(176): n is a, c, g, or t
  misc_feature (209)..(209): n is a, c, g, or t
  misc_feature (230)..(230): n is a, c, g, or t
  misc_feature (245)..(245): n is a, c, g, or t
  misc_feature (285)..(285): n is a, c, g, or t
  misc_feature (362)..(362): n is a, c, g, or t
  misc_feature (403)..(404): n is a, c, g, or t
  misc_feature (440)..(441): n is a, c, g, or t
  misc_feature (452)..(452): n is a, c, g, or t
  misc_feature (465)..(465): n is a, c, g, or t
  misc_feature (480)..(480): n is a, c, g, or t
  misc_feature (490)..(491): n is a, c, g, or t
  misc_feature (496)..(496): n is a, c, g, or t
  misc_feature (498)..(498): n is a, c, g, or t
  misc_feature (502)..(502): n is a, c, g, or t
  misc_feature (504)..(504): n is a, c, g, or t
  misc_feature (507)..(507): n is a, c, g, or t
  misc_feature (510)..(510): n is a, c, g, or t
  misc_feature (517)..(518): n is a, c, g, or t
  misc_feature (534)..(534): n is a, c, g, or t
  misc_feature (536)..(536): n is a, c, g, or t
  misc_feature (540)..(540): n is a, c, g, or t
  misc_feature (542)..(542): n is a, c, g, or t
  misc_feature (547)..(547): n is a, c, g, or t
  misc_feature (560)..(561): n is a, c, g, or t
  misc_feature (578)..(579): n is a, c, g, or t
  misc_feature (583)..(583): n is a, c, g, or t
  misc_feature (596)..(596): n is a, c, g, or t
  misc_feature (598)..(598): n is a, c, g, or t
  misc_feature (600)..(600): n is a, c, g, or t
  misc_feature (610)..(610): n is a, c, g, or t
  misc_feature (617)..(617): n is a, c, g, or t
  misc_feature (625)..(625): n is a, c, g, or t
  misc_feature (639)..(639): n is a, c, g, or t
  misc_feature (681)..(681): n is a, c, g, or t
  misc_feature (683)..(683): n is a, c, g, or t
  misc_feature (692)..(692): n is a, c, g, or t
  misc_feature (696)..(696): n is a, c, g, or t
  misc_feature (703)..(703): n is a, c, g, or t
  misc_feature (735)..(735): n is a, c, g, or t
  misc_feature (805)..(805): n is a, c, g, or t
  misc_feature (852)..(852): n is a, c, g, or t
ngacaagttgtacaaaaagcacgctgtaccggtccgaattcccggatcccgacccagctctgctctactggggccccgggctccccaatggcctctttcaggagatgaagacatctcctccattgcggacatggacttctcagccctgctgagtcagatcagctcctaaggggttnacgcctgccctccccagagaactgggttgcagnggattgaagccctccaaaagnacttacggattctgntggggtgtgttcctactgcccccaactttgtggatgtctnccttggaggggggagccatattttattcttttattgtttttatctgtatctctctctctttttggaggtgcttaagnagaagcattaacttctctggaaaggggggagctggggaaanncaaacttttcccctgtcctgatggtcagctcccttnnctgtagggaantctggggtccccnaaccccaaccaccancttctggaannctccnanaaananaancangctggannaaaggcctttgagccnanaaancnttaanaagtaacttccannatggaaacaaaacagcnnaaanaaaataacgcccnananaccagccccnaaatggnactggcantgtccctgtgcctnacaccagcgtttgaggtgctggccttcctgccctacagaggncnctgccggcncttnccttgcncaaccatggctgaaggaaaccagtgcaacagnactggctctctccaggatccagaaggggtttggtctgggacttccttgctctcctctttctcaagtgccntaatagtagggtaagttgttaagagtgggggagagcaggctggcagntctccagtcaggaggcatagtatcttcctgggacaatcaaagcacttt

SEQ ID NO: 542191 - DNA, 476 bp, Homo sapiens
gccaggcctggataggccagaggtgctccgtggattgcaaaactcctcttctcacctgccaaagatggagaagagtgccagggacccctcaagggagtggagacggctccagtatcccagggacataggatcttgcgaggttgcctatggtagcaaggagcaatctcccgatcgtcagcgtgacgtgttctgcgtcttctggagaactttgcgtcacaatctggcgaagacgcgagtcctagtccgtctcgttacgtgtcgtggctccatcgtcttgcatgctgcagtcgagtcacgtaggtggatggctggaaccatcttcagaagaagttttttggtatatggatgaggattttcgttataattgttggatagcaagggtctatcgtactgatcccctaggatatctcatctggatgtgatttttgagacaaattccacttcgtaggtttcatactttaacttgtacacaatat

SEQ ID NO: 542192 - DNA, 539 bp, Homo sapiens
  misc_feature (274)..(274): n is a, c, g, or t
  misc_feature (327)..(328): n is a, c, g, or t
  misc_feature (356)..(356): n is a, c, g, or t
  misc_feature (521)..(521): n is a, c, g, or t
  misc_feature (536)..(536): n is a, c, g, or t
ttaggacataccaggatctcacatgtcacccagtgctggagtacagatggcgccatcacagctcactgcagccttgaactccctgggctacggttatcctctcacactcagcctcctgagtagtatgggactacagacgcattccactatgcctggctaattgttagtattttttatagacacggtggtctcattatgttgcccaggctgttcttgaactctgggctcaagcaatctgcctgcctcagcctaccggagtgctgggattacagtngtgatacatttctgataagagtgcaattagtacagtggttgctataaccattnnagagaatggtttgacaaaaacaaagttnaaaatgcaattcgactccttcctagtacagtagagagacttttaccctgtgtacatgagaagacattatagcagggtgttccttataatattatttcataatggtgaaatttgggaaacaattcctaagtactcaatcagggcttttttttttttttgagacggnttcggcttctgtcanccg

SEQ ID NO: 542193 - DNA, 262 bp, Homo sapiens
  misc_feature (16)..(16): n is a, c, g, or t
  misc_feature (167)..(167): n is a, c, g, or t
ccctggggtccccccnttttccatataaacaaagacaaaatacaagaattcatgattaacaaatgaattagccatttcccatagtaattcttaagtcttttgtctgatttttaaagaactttcttataaatttggatcatgttatgatttgtaacattcacacaacncctcacttttgaatctataaaagaattgcacgtatgagaaacctatatttcaaaactgctgaaacagacatgaaataaagaatttaaagagggaa

SEQ ID NO: 542194 - DNA, 631 bp, Homo sapiens
  misc_feature (492)..(492): n is a, c, g, or t
atagcgacaccgtacctcgctaaaaaccggttgcgcccacacttacgcccagccaatgggactcttggtgccatattgatcgctgcaagctcaatctttctggtgaaaatatcgatcaacctgtggtgaataactgcccttagaaatcacctaccctattctgatgataaggacgatgttccctatttaaaaatatgccccctcttggtcagtcacggcatccgctccatggctaacaccatcctgaacgagcgtgggtagcgtccggagctaatcgaagtcgcgctggcgcatgttgatagagatgaagtccgaagtgccataccgggctaattacagcgaccccgagacacccagtgaatactgcgcactccatcctcacgggctcacgcttaaggtctatcagacaaccgcgacttttgcctttctacggcggatcaaccctgctgttaactcgtagtagtagatggtagctggagctgagcatcgcanatagtgctccagaaaccatctcacgtgcttttctctccaggaccagggagtcgcgcaaccccagcgttcacgaatcatctcgtgcatcctttctgcttgcctgatgtgccgctgctgcgtggcagtacggtgtcgctat

SEQ ID NO: 542195 - DNA, 876 bp, Homo sapiens
gctgggaggagactctctgagggtgtagagctagagggagcattcatggccatgcagtagttaccactgatgctgagtcagaaacaggtatcccaaaatccctttccaatgagcctccctcagaaccatggaggaaatcagagcacacatgcccacagcctcgatgaccctgatgcacctgccccattgtgtgatgaaaccaatgccagtgtcaagcaccccatgaacaatgaccatgggctcaggcccgcttaggaacaccagcgtgacaggcctgtcaagagtatcggccgatggaatattggacctcttccactcaggtcatgcaaagagcccttatgcaatgcaaaaaaatgtttcccaaagctatgtgtggggtaggagttggcagtgatgattctcaccacaaatttcaaaggtttcaccgtgatgaatgaaggcgagagatagaagtctccagaatgtcgtacgtagagaggttttcaggagatgtccgtggacatcacgccagagtttctggaaaaacacaagattggcttggtggttcatgatgaatccgtattcctctgtggtctgatgatgttaccacgcacattaaggagcaggtatgtggtccaacgcgagaacgaggttctaatctcggactatacaagaatgtgtgacatgatgttatgcccgcgtacttcaaagggtttagccagactggcgcacgtttactaggacgcgtcttccgaccgggccatcgcactcgagttgggcagctcgcttcgcggggccaagcgctcacacgggaaccggattggctcacggccggcagcaatcaagagcgtcgtccacgtgacgggcccctttacccatctgggggggcaggcgctt

SEQ ID NO: 542196 - DNA, 170 bp, Homo sapiens
ttggggtagacgtggacggaactgactggacgggtaggacgacgccttgacgcctgcgacgaagacgtctcttagacatagacgacacgctgacacgttaaacgttgtggaacgagacgtggggactaacctgacgtgaccacgataactcacggacgacagacaaacgg

SEQ ID NO: 542197 - DNA, 237 bp, Homo sapiens
cctcaggactcatatattgatacttttcatttaacagtagggagatctggagtaccagagaactgcctcattgttcacttctgcactgtattctgtagttagccatcctgctgtagggaattacagtatactaatcttttgatattaccaaccggtctgtgcgaatcatcgtcatacacaacccttgtgcccatggatgagtgtttctcagggtaggttacccaggaagtgaaaatc

SEQ ID NO: 542198 - DNA, 852 bp, Homo sapiens
  misc_feature (42)..(42): n is a, c, g, or t
  misc_feature (206)..(206): n is a, c, g, or t
  misc_feature (248)..(248): n is a, c, g, or t
  misc_feature (325)..(325): n is a, c, g, or t
  misc_feature (368)..(368): n is a, c, g, or t
  misc_feature (411)..(411): n is a, c, g, or t
  misc_feature (459)..(459): n is a, c, g, or t
  misc_feature (477)..(477): n is a, c, g, or t
  misc_feature (490)..(490): n is a, c, g, or t
  misc_feature (498)..(499): n is a, c, g, or t
  misc_feature (501)..(501): n is a, c, g, or t
  misc_feature (517)..(517): n is a, c, g, or t
  misc_feature (521)..(521): n is a, c, g, or t
  misc_feature (542)..(542): n is a, c, g, or t
  misc_feature (833)..(833): n is a, c, g, or t
acggctgctgattctggtggctggtcaggaaaccaaggaganccccccccccaaccatggacccaccgtcgccaagccggacctcccaaacccagcccacagccacctctccgctgacttcctaccgctggcacacagggggcggtggggagaaggcggctggagggttccgctggggccgctttgctggctggggcagggccctnagccaccaggagcccatggtcagcacccagccagcccctcgntcgatattccgtcgggtcctatctgcgcctcccaaggagtcacggaccagtcgccttcgactctccaaggccctctnggggaggcataagaacccaccgccggagccagacccggagtcnggagcaggaggccccagagctggagccggagccagagctgganccccctaccccacagatccctgaggcccccacacccaacgtgcctgtntgggacatttggggcttnaccctgctttatnggaatctnntnttttttggatgatatnattntttttttttaatgttcctttnttttaattgctagctccgagggcagcatccacgtggccatggggaacttcagggatccagatcggatgcctggaaaaacagaaccggagactgctggtcccaaccaggtccacaacgttcgggggttgctcaagaggctgaaagagaagaaaaaggccagaccccccagtgctctgggctctagggagtcgctggccacactctctgaactggacctgggtgccgagcggggatgtgcggatctggccactgcaccccagcctcctgggggagcccactgctttcaggtanctggacgggtggaagcgct

SEQ ID NO: 542199 - DNA, 210 bp, Homo sapiens
cacaccaccgagtcacgagctttggtctaggaatgatttggaaaagaactgaagcgcataattccacaggtacattctcagcttgtgtgctacagacagagaggagcagtgaaagtgttttatgaaccatttgcgcgtggacaatggacaggcccggtcttcatcggtattccgtgtttgctcgatcctacatctgcgtggaagcgtgga

SEQ ID NO: 542200 - DNA, 442 bp, Homo sapiens
gcacgaggaataattacattattgattgctacgtccaatacgcatccagtgctctggctacaaaggttttcttaagatccgccggtggtgctgccttccccttgtttaccattcaaatgtaccacaaattgaatttgcactggggttcttggttgttggctttcatctccactgctatgattgctttaccttttgcattttcttactggggtaagggcttgagacataagttgtccaagaaggactattccatcgacagtgttgagatgtaagctggtgcaagtttacggtaaaaataatgatgttctagtcattcatatatacgatacaaaaataacaaatttccacatatattctgaaaaattaatttttaatattttatattaggaacttctcaaaaaaaccgtcgggacatttctacatactctttaacgaaatatca

SEQ ID NO: 542201 - DNA, 611 bp, Homo sapiens
ccgcgggtgcagtgggtcggttcgatcgcgccgcgacctgacatcggccggagttggcgtccttctcctctccgagtgctgctcctgtcattgtggccatggacggtaccctgtccagttgaagttcacgggaagcagctggagaagctggccaggaaggcggagaacggactccagcgcggaggaggcaagtgaagaaggcccttctgcagaaaatgtaagtgtgcccgtgtgtatgccgagaacgccatccgcgagaagaacgaatggtgtgaactggcttcggatggcgtcccgcgtaacgcagtggcctccaaggtgcaggacagctgtgacgtatcaagggggtgacccaagaatatggcccaggtgaccaaagccctggactgggccctgagcaccatggacctgcagaaggtctcctcatgtgatggagcaggttcgagcagtaggtgcagaatcctggacgtccatacatcggtgatgggggactccatgagctcggcagcatcctgagcacgccgcaggagcatggtggacaggctcatcatgcagatcgccgagggagaaatggctggaggtgctggtaccagctcagccagttgcacgag

SEQ ID NO: 542202 - DNA, 156 bp, Homo sapiens
  misc_feature (129)..(129): n is a, c, g, or t
actagagctctggccgtgtgtatatgtatacatacgtgaacacatgcctgtgtgtgtgtgtgtgtgtgtgtgtgtacttgtatgcacgtaggcaccagcacaaagatctgatgatgcaccccacccccnccccataaagaaataacagaaaacccg

SEQ ID NO: 542203 - DNA, 324 bp, Homo sapiens
gatttaaaaaatcaattatgctaagaaaatgatgagttatgtttgctcatatagtcccagaggattcaagttacttggatgaatctattagattaatagagtaattctttgttatagttttttatcagtctagatatatttttcttaacggatcagatgtccatggtgttaacgtgtattgggcaagcgttaagaagactatgaactcacagtaaatctggactgaagtaaaacaaatgttggtggcaatgtggttgtacagaagagaaatatcgcagccattgatcagtcagaagatatagcagaaagagattctattctaca

SEQ ID NO: 542204 - DNA, 173 bp, Homo sapiens
gttaggcactgaagcctgtattgtcaggcttctagtgctgcacaggcttcagtgcctaaccaggcttcagtgcctgaccatactggcttcagtgcctagacaggcttcagtgcctgaccaggcttcagtgcctgaccaggcttcagtgcctgaccaggcttcagtgcctgacc

SEQ ID NO: 542205 - DNA, 695 bp, Homo sapiens
  misc_feature (158)..(158): n is a, c, g, or t
  misc_feature (427)..(427): n is a, c, g, or t
cgtccttttttcttttttttctttactaaaaattattttcccttttagaaaagttcaccaggaaaccagttcccctcccaccaggcggggcaggccagagccttcttttaaaatccgcgacggatttaccctcacacccccagaacaggaactcctcnaggatgggcctcagaggggctgggagtctctccctgtctgggcggggacaccctgtgtggcggtgaaggcccctctgccacagacggagggttgctgattggtggggacaccagtctgggtttgtgggtgttctgtcctggtcttctaacttgaaagacgacttccctggggtgacaggcccagtgcaggaagtgtgagctatcgaagacaccctggtgtgaagtcttcgcagggcccaagcgaaaattgtgttgacattcgctcagcngctagtgacttgcttgtggaagtctgtacgtcgttggtggtgtccctggtgacagctcccagggttggtttccttggcggcaaccctttaaggaattttctagccatcgacaaaaagtcgtgtctggtcaaccctgcttgatctcccagagcattacagccacattcctggtagggtataggggggcgggcaaacgccgccggtgtgcagcacgtggctgacaagtctgctgtccaagctggtcatcacctgtcaatcagttcttccg

SEQ ID NO: 542206 - DNA, 394 bp, Homo sapiens
caggagcttttcaagcgcatctcggagcagttcactgccatgttccgccggaaggccttcctcccctggtacacaggcgagggcatggacgaaatggagttcccccaggctgaaagcaacatgaacgaccttgtctttgagtatcaacagtaccaggatgcccccccaaaaaaggaggaggatttcggttaggaggcccaaaaggaggcctaaggcaaagcccccatcccctcagggttttcagttcccttaaccgttttaatcaaatgcccctttcctctccctcaaaatttgtgtttgctgcctctatcttgttttttggttttttttttgggggggggtttaaaacagtgcctggcccatagtaggcgctccataaaaacttgtttgttta

SEQ ID NO: 542207 - DNA, 195 bp, Homo sapiens
  misc_feature (82)..(82): n is a, c, g, or t
  misc_feature (98)..(98): n is a, c, g, or t
gccacgtatgctcagcttctttcacgctcgacacagccacaagaagatattggttgtcccccagaaaagtaatgtgattganttttcaaactctacantgatttttaaaactgcaaggccgtgaattcaagattccgtgactagaaaatgcctggcacttccttacaaggctctaatattgtcactcaaatgacg

SEQ ID NO: 542208 - DNA, 1145 bp, Homo sapiens
ccacgcgtcgggtgggcgcatcatgccaggacgaggtggagcgaatacctggaggtgcaggggtgagtgtagccttgtgtggggtgtccacgatggacggtgggaccagtgatggcatgaccttggatggtggacctgtggggaatggagccatgcggtgtgtctggccttggttgtgtggtcactggcaaggctaaaatgtctgtggcgtaaggtgcccatcgtgtagatccgagggcactagccaagagtgggaacatcagggacactggacggaagctatcccatgcgagagcaggaacccagggacggcaccgcgccgtcgatacagagactgagaagcacaagagaagaggcaacgataaaactgagctcgggaaggccagagatgagcggcgcatcgcacaacggagcgggcatgcggttggggtacccatgaggccaacatggcgggaacaggggtggccgatctggctcaattcacagagagaggaaagggggcacgcggacaaccacagagacagtcggacagacggcggaagacgccacacagggtgagcatgggcagaacgagaaggaggacggaaaaggcgcaaggcacggcgcacatagtgatacggctcacagaattctgaggcgaaacatagtgggggggtgagatacttcgaccaattaccttagtagagcgttgggacggtatgagcggatataaatcggtgggataagaaagtagtggggcgcgtttataagcgcaccgtagagcccacttgttcagcgaggagcagtggtagacagaagttaccagaaagacaaaaaatgtcgacaaacttcagatagattcaatctagcgactagtaacgggacatacagcgcgatagcgcgtggacagagacacagacagagcagcagcaatagcgacgaacagccgagagaagcgccacgcgggtatacccacacgcaagacccacgagtacccaaacgggggggagaaacataccgacaccaaacatagaggcgcagccccgcgacgggcaccgaacgaaaagtagtaagccccgcgaagaagacgacgccaacgagtccacaaccgctggtcggcagcacatcgaggcgacacgcacatagtacacggagggaaacgacgt

SEQ ID NO: 542209 - DNA, 115 bp, Homo sapiens
ggtactcgtatagggggagttctctggaggatacagagcctgtctgagaatcatgcagtacttttcccagcttgtccagacggtgtgatcctcctagagatcgactctgcagtgc

SEQ ID NO: 542210 - DNA, 866 bp, Homo sapiens
ggccagatgtactgctaccccggcagccacctggcccgggctgctgacgcgggcgctggctgctggccctggtgctggccctgctggtcgggccgttcctgagcggctggcgggggcgatcccatgcgccggggtggccgctgggcgcgcgatgggccggtccctccagcactcacgcaaggccgcatcggtgctcctggacgtctcgtgcgggacaggctgacttatggtggacggaacgccaccctgacgcccgatggacactggagccaaacactcaccaaaagccataccgagagacttgggttgggccttccttggagcttgggcacaagtaggccaatacaaatgacaggctttgcagggccttatagcagacgagatagtggtgagaggcttagcttgtgtacgagaaccgcacactatatacatacatgcaacaagaggactggaaagcacaggcagcgatagaaagttgaacaagacatataacaaccatatacctcaacattactagcaacagtaagagaataacccgacaacaagaacagtcactagaacaagcagaagaaacaacatagacagggccaccacaaccataaaaaaaaaaatagagcacaaatcgaccaataaccaatacaactcacataaacatatacgaaacaccacatataaaaaaaaatcaacaacactacaaacaaaaaaaaacaaccaacaagacaccaaatctaatccaaaaaatatatacaaaaaaaaaacacataccacacacaacgaacaaaataccaacataaaaataacaataacacaaaacaccaatcacaaaaataacaacaataaaatgacaaacaaacatacaccaccat

SEQ ID NO: 542211 - DNA, 298 bp, Homo sapiens
ttggacacatagatggtgttgccaaaggtttggaacacttttttttcaaggattaaatttaaaacccgggttaaacatcattgttcggggtttgcttaatttggagctattccggaattgcggagaaatccattttcccagaaatcaggttgttatttttttttactttttcacttagacaactgtgtttcatttgctgtaaccagtttttaaaagtcggttggaaggagcaattgaagtcctggaaaatggaaatttaattttaaactttcccattaaagttggggggggaagggga

SEQ ID NO: 542212 - DNA, 266 bp, Homo sapiens
  misc_feature (3)..(3): n is a, c, g, or t
  misc_feature (9)..(10): n is a, c, g, or t
  misc_feature (15)..(15): n is a, c, g, or t
  misc_feature (22)..(22): n is a, c, g, or t
  misc_feature (24)..(24): n is a, c, g, or t
  misc_feature (47)..(47): n is a, c, g, or t
  misc_feature (56)..(56): n is a, c, g, or t
  misc_feature (59)..(59): n is a, c, g, or t
  misc_feature (67)..(67): n is a, c, g, or t
  misc_feature (73)..(73): n is a, c, g, or t
  misc_feature (75)..(75): n is a, c, g, or t
  misc_feature (81)..(81): n is a, c, g, or t
  misc_feature (88)..(88): n is a, c, g, or t
  misc_feature (93)..(93): n is a, c, g, or t
  misc_feature (105)..(105): n is a, c, g, or t
  misc_feature (115)..(115): n is a, c, g, or t
  misc_feature (123)..(123): n is a, c, g, or t
  misc_feature (152)..(153): n is a, c, g, or t
  misc_feature (224)..(224): n is a, c, g, or t
  misc_feature (236)..(237): n is a, c, g, or t
  misc_feature (250)..(250): n is a, c, g, or t
  misc_feature (253)..(253): n is a, c, g, or t
  misc_feature (262)..(262): n is a, c, g, or t
ganaggcanntaggncgtctgncngtttgaggcaggtccgttaaggntttgttttnaantttttttnccaacnancctgtncaatatnccgtntagaatatttgncttaaaattncaaggccncaaaaacaatgtttgggggaaaaaaaagnnaaaatcatgccagctaatcatgtcaagttccactgcctgtcagattgttgatatataccttctgtaaatanctttttttgagnnggaaataaaatcngcnggaactganccct

SEQ ID NO: 542213 - DNA, 662 bp, Homo sapiens
ggacgactagagtcgttgggccctggtgcgaccctgcaggagcgtagagatgctgcgggactagggtgcagagctcctgggactgtggatcgtgagccggctgcgatgggctggagagcagtgaggagtgagctggttctgactggcatgttgctggccatggctcagcagcacgagggctggcgtgcaggagcttgtgaacaccttcttcagcttccttcgacgcaaaacagactttttcattggatgtgagaagaagggatggcagagaagcttatcacacagactttcatgccaccacaatcatgctggcacatgaagaccctggcagggagaaagagaagccctggcatggaggcctgagctggcgggagaaggctggagctgggctggccagacttggccaaaggaatgccaagtcagagacctcagggccccagatcaaggagctaacttgatgaagagtgcagaggagtgctgcagactacaagatatgaccagaaaaaggatgcagagaatcatgaggcccagctcaagaacggtagccttgactccccagtggaaagcaggatacatgacagaagatgaggaggaagatgagaaggacaaaggacaactgaagcccaacctagtgcaggggacagacctgccaattaccgctg

SEQ ID NO: 542214 - DNA, 472 bp, Homo sapiens
gcacggagtgacaattccacgtgcgtccttacgggggtttgcaaggcgtccgaagttattgagttccagcttaacaaggagtccagaagactcgccaagtataaatagtattgggctgtcctcttccaacacatacttcggaagaacactaattgttccgtgtcactacgacagggattccggcccataaaactttccataactgtgacagaaaagtcttggggagcatgttgtgccagacaggagtcgcgagttcgcggctccgttggttgggccacaagcgcttggagattgttgcattgggggcgtttggacctttggggttcaacttggaaaagcccttcgggccttcccccaggtcccaagggttgggttcctccgggccttcaggggtttcccggagtctaggcttggagatttaaccggatttcctcccttctgggtgcatcctgtgggggcctttttgcgcttg

SEQ ID NO: 542215 - DNA, 275 bp, Homo sapiens
cagctcggaggcgatatgaaggcccaaggtctccagactcttatactcctagcacacagaaatccactgatctcctctgtagcatcttcaggtaccatcttgacaacttcctctaaatccccgggggaagagttgtctagagactcctggatgccctgagggagcggctcccgagcttgccttccctcctctgtggacaccacggtccagcggttggcactgttctctgacaatccttcttggcactgttgatcggactggtaggcttgacgagt

SEQ ID NO: 542216 - DNA, 181 bp, Homo sapiens
ccgcactacagagtgtctttcaagaggcgagggtctgtacccagggagccgaaggacggagccttcgcgtgctcgtccgtagcacccttccacttctcgaagggattcctactgggtaggttcggccaggtggagtgtccggaaggaccctatgttccgaccgtactgagtgtagcacgcc

SEQ ID NO: 542217 - DNA, 427 bp, Homo sapiens
  misc_feature (363)..(363): n is a, c, g, or t
  misc_feature (377)..(377): n is a, c, g, or t
  misc_feature (383)..(383): n is a, c, g, or t
cggcaaaaagtggcctcggcgcaggcggaacatcatctggtggccgatatcgcctgggcggttattcaatactggcagaccacgggggatgaaagtttcattgcgcatgaaggcatggcgctacttctggagacggcaaagttctggattagccgcgcggtgagagttaacgatcgtctggaaattcatgatgttattgggccagacgaatataccgaacatgtcaataataatgcatacaccagctatatggcccgctacaacgttcaacaggcgctgaatattgcccgccagttcggctgtagcgacgatgcgtttatccatcgcgccgaaatgttcctcaaagagctatggatgccaganattcagccgacggngttttncgcagatgattcgtttatggctaagcggcgattaatctggcgaa

SEQ ID NO: 542218 - DNA, 118 bp, Homo sapiens
  misc_feature (71)..(72): n is a, c, g, or t
  misc_feature (85)..(85): n is a, c, g, or t
  misc_feature (118)..(118): n is a, c, g, or t
gcatttgttttcctggggagtcctggcggtttttattaaggcttttcatgttgaaagcccaagaaggatgnnaggtattgttctnttttgacaaccaaattgtaaagtttgccccggn

SEQ ID NO: 542219 - DNA, 177 bp, Homo sapiens
ctgctactgagctgcatagcaatcgttgagaaattctccagagagtcggacaagacagagtcagagagagaagcacatgaaacaagcctgtagtggtggctagaagccatggactgggttgggaacaattctagagctcccagaaggcaggccaagattgagtcacactttccacaa

SEQ ID NO: 542220 - DNA, 213 bp, Homo sapiens
agcacctgtttatagatagtagggagcaagaatcgaaggatagtggacagatgcagatggaaagcgtacaagtacaacagttatcttacagttccgctctcaagattgctggtggagggtggcaccaaaacctcttaacaagtggcagataatagctaaatcttaacagacaaagaagaaatattttccttggaataggctgctggtagttgg

SEQ ID NO: 542221 - DNA, 191 bp, Homo sapiens
gcgcgtggggatcgctcgaacgataaagagcatccggagctgttctccggcctggtatggtcgggcgagcaggcattgccgctggcttgattgacggcttgggcagcgccagctcggtggcgcgggatatagtgggtgagaaggagttggatggattttacggtcgaggaatcgccgtttgatcgcttctc

SEQ ID NO: 542222 - DNA, 528 bp, Homo sapiens
aactcgagtgtaagtctgtattgcacaaggaaaatatatgggaaaaacactcagctattactgatagctattactttgaaacaaatattagatcattcttatattaaaaacatgaaactgaatccaagccagacagtactgaggttgttacacaggcctcttatgtattcacggtcgtatatctaagagtgaatgagagaccactgccagacatgccaatgacacttcacattcaagggctggaagctggaaagcttcccgactgagtcactgtataagccttctgggaaaaagaaccaaagtgacatcaaatatgccatcttcatgcttgtagtctgtcatcagtttttttcaactttggggtctactggttagctgggtaggaggcttctttctaccctacagaaagactcacactcccaattcacaatgaacactgaatgcagagcaattggtgtgaacacaattctacgctgagtaactgttcttacagctgtttttccttaaatttccttatgataccgcgaa

SEQ ID NO: 542223 - DNA, 701 bp, Homo sapiens
  misc_feature (622)..(622): n is a, c, g, or t
  misc_feature (630)..(630): n is a, c, g, or t
cttgagcgtaagctaaataatttgcatacactagcatctgtatgtaatatggaaaaatatggaaatggttggggtgataagcaagtcttgcatattcttttctcctcaattttttttctccaaagtgggccaagccaagagtggcacagctgtgtggagatactgagctccaccttgtcagggaagatcccaactcaggagaaaacacctctaacaaaatctgtagccacgttggcacatctgcccttgaattcactttgtctcttttgctgcttccataaaaaggctttcccttgacaatgttaggcactttttagcaactaggcctgggtggtctgctacaatgcccaacacttaatacagtatcactattactgttagtagtatgctaagcgaatactattgttataaaaaaattcctaagcatgaaaattacggtatacaatttattgtgaaggcaacttcttgtgaacattaaatggtttatctccttcacctcatattaaagtccatactcttgggatatatctgacatctcaatattaaatgactaagatgactaagtcgtttatgttgctcccacctcacacaaagttaaactatttgttactttaaatagttngacaatgntattttaaaatctggacaatcacaaatataaaatacttatttaattttcttctgtaaaaatactatgctga

SEQ ID NO: 542224 - DNA, 360 bp, Homo sapiens
  misc_feature (40)..(40): n is a, c, g, or t
  misc_feature (75)..(75): n is a, c, g, or t
  misc_feature (82)..(82): n is a, c, g, or t
  misc_feature (89)..(92): n is a, c, g, or t
  misc_feature (100)..(100): n is a, c, g, or t
  misc_feature (108)..(109): n is a, c, g, or t
  misc_feature (113)..(114): n is a, c, g, or t
  misc_feature (124)..(124): n is a, c, g, or t
  misc_feature (127)..(128): n is a, c, g, or t
  misc_feature (140)..(141): n is a, c, g, or t
  misc_feature (153)..(153): n is a, c, g, or t
  misc_feature (157)..(157): n is a, c, g, or t
  misc_feature (169)..(172): n is a, c, g, or t
  misc_feature (176)..(176): n is a, c, g, or t
  misc_feature (179)..(180): n is a, c, g, or t
  misc_feature (184)..(184): n is a, c, g, or t
  misc_feature (189)..(189): n is a, c, g, or t
  misc_feature (194)..(194): n is a, c, g, or t
  misc_feature (198)..(198): n is a, c, g, or t
  misc_feature (225)..(225): n is a, c, g, or t
  misc_feature (232)..(232): n is a, c, g, or t
  misc_feature (251)..(252): n is a, c, g, or t
  misc_feature (254)..(254): n is a, c, g, or t
  misc_feature (257)..(257): n is a, c, g, or t
  misc_feature (280)..(280): n is a, c, g, or t
  misc_feature (282)..(282): n is a, c, g, or t
  misc_feature (287)..(288): n is a, c, g, or t
  misc_feature (292)..(292): n is a, c, g, or t
  misc_feature (295)..(296): n is a, c, g, or t
  misc_feature (305)..(305): n is a, c, g, or t
  misc_feature (311)..(311): n is a, c, g, or t
  misc_feature (315)..(315): n is a, c, g, or t
  misc_feature (317)..(319): n is a, c, g, or t
aacaaagattcaatatcagttttgtacaaaaacatggtgngaaaaaataaaaacaaaaaaaaaaaaaaaaaccgnactaacnacccgcnnnnccccctantttgccannaaannaggagaagancannaaaataaaaatnnggggaaaaaaanaaanatgaaaaaaaannnngggngtnnttcntgggnctccntttntccctatccccaatctagaaatttggngggggtngcggttcatggccatggcnngnggnggggggggggggggggggggggnanggggnntggngannggtgggggngggggngggntnnnggggggggggggggggggtggggggggggaaagatgttggg

SEQ ID NO: 542225 - DNA, 331 bp, Homo sapiens
  misc_feature (278)..(278): n is a, c, g, or t
  misc_feature (296)..(296): n is a, c, g, or t
aggcaggagaattgcttgaacccaggaggtggaggttacagtgagccgagatcatgccattgcactccagcctgggcgacagagcaagactctgtcttcaaaacaaaacagaaggggcagggtgtggccacaagcccagattcctgggtcaagtcaggccccagaagtgtagcatttcagggtgtatggggaaaggtgacagagcccaccaccagccctttaacttgctgggctgaccctaccccttgggccagtgtattggtttgatggaacagagntcccatttattccctttngttcagttgaacaaccttttacaacaggatttttg

SEQ ID NO: 542226 - DNA, 150 bp, Homo sapiens
cacagacacagcaccgtggaggacaaggatctgtggccttcacctgtgatcctgaggttcagaacacaacctacctgtggtgggttaatgtcatagccttcccggtctgtcccagtctgaaaccaataaaccttctgttcaatgacaaca

SEQ ID NO: 542227 - DNA, 235 bp, Homo sapiens
gcgggatggcgaggaccaaactcaggacactgagcttgtagagaccagaccagcaggagatagaaccttccagaagttggcagctgttggtggtgcctcttggaggaggagcaggagttacacaatgccatgtccaagcatggacggctttccgaggcccttcaaccctagagatgggagccctatctcccaagtccaccatccctatcggtggcatattttcctggcctgtctt

SEQ ID NO: 542228 - DNA, 955 bp, Homo sapiens
gggcgtgcgactatgatcgttgtgttggttgacgactctgttgttattaggtgttgctgcttctgcgtcgcggtgctctggttattgttgttcctcggttgtttgtgttcccttagttgctcgctcggtttggtatgggttgttctgctcccattgtcgtcttgtggtttatgtgttggtgcctcgatgtcgctgtatgtgctttgtgcgccgttgagttgtgtccttgtctccccctgctgtgtggcagttttgtgcttctttggtgttccatcatctccctcggttgttctgtctctttaccttcttgcttgtgcttctctctaatctggtgtctctttttgttgtctcccagcctgtgtcctttgttgttagcttgctccgccgtttggtcagtgtggtgtctctagttatgtgttccgggatcggagtgttgtaatttgattccactctcttttgtgtgtgttacccatatcggtgttttgtcggctgtcgtctgtctgttctttctgtgtccatgatcttcctctgtgttgcgtattttcttggcctcttttgtgtcgccagctgagtttgtctctctgttgtgtttctcatatttggtgccgcctctggtggcctggcaaatagcgtctgtactgagtttgcgttttctctgttggattggcgttcgtgctgttgcgtgtggcccagtcttggtggcgtttctccctgcttttcttgcgattcgatttgtagtaccctcgttgttcgttctcttcgtgacgtggtcgtggtaagcgccccccctttgtgtgtcgccccgcgagatgtgatcctgcgcgctatcttccttccgcatggcagaagtgtttgttgtgagcggtctcgttgtccaccggcggggtaaacagattgggtcgtgccgacccatttttttctgagggcaattatgcttttttaatcccccaaaaac

SEQ ID NO: 542229 - DNA, 844 bp, Homo sapiens
  misc_feature (844)..(844): n is a, c, g, or t
tgatcaatctacaatctaatgctacatgcttgttctgtgtatttggtatctcccacaaacctcctgtgtgctaccagtagctgccagaaggctatgttccagtgtgggttattgcagcagctttgtactatcctaatggctacttggggttccctgcttgatatcctgactgagagcataaatacctgtatcagaagtactcgaggctggcaagtaaaccaagactaccttgtgcatctgtaaatgcaccttcaaacccagcaagaacggacaatggtaagatacttctcatgtccatggttaattgaaaggcagaccatataggaaaatgcagctgatgctgtacatctacttgtattccaagttgtaactatgtataaaaaaagcaaaattggacaaatggcagaaaatcgctgtcaaacaaactatgtaaccccttctaaccatttgatgcaaacaggtcaattcaggattcaggctggctccagttcactacatgtgcgaggaaaggaaagtacatacatggattcaactaattacaaaaccttggagttgcttggatagatggccccatattggccccaaatgacaggtagcaacaagaccaaaattggccgaccccaatgaaaactggacacaatgtgtggatacctaaggatcaacaatttgagatccacaaagtaattggggcaaagaaccattccaagagaataacattaaaacaagcagaaaccacgtaggcaccaaaaactaattccttatcaaccaatgggcaaatgcaaaaaaatacacaaaacgcaaagaacgtttggacattaataccccatgggacgcaaagcggacn

SEQ ID NO: 542230 - DNA, 421 bp, Homo sapiens
ttgagctttgtacaaggagataagaatggatcaatttgcattattctgcatgatacctttcagtttacccagcaccttttcttgaaaatgctgtccttttttcccccactggatggttttagctcctttgtcaaagatcaagtgaccataggtgtgtgggttcatttctgggacttcaattctatttcattgatctacctttctgtcgctgtaccagtaccatgcagttggtttttgtttgtttgtttgtttttgttttgttttgttttttcacaattgcagatttcacaatctgcaagattttactgaaaggaccctgatatagctgtctcttgtgagactatgctggggcctagcaaacacagaagtggatgttcacagttagctattggatggatcacagggctcctaatgtcgacgc

SEQ ID NO: 542231 - DNA, 856 bp, Homo sapiens
gggaggctgaggcgggcagatcacctgacgtcaggagttcaaaaccagcctgaccaacatggtgaaacaacgtctctactaaaaatacaaaattagcttggcgtggtggcacatgcctgtaatcccacctactagggaggctgaggcaaaataattgcttgaacctgggaggcggaggttgcagtgagccgagatcatgccactgcactccagcctgggcaacaagagggaaactccttctcaaaaaaaaaaaaaaaaaaacttcgaaattagttctctctcttcttttcgcgcggacggcttgggcgtgctgcttgggcggccgcggggcaagcgggagggccgccggcacttccggtccccgccgttccccgtccccgttgttccttagccccttgccaggtccccggcggagcggggcttggcgccacccgggggcctggccgggaccgtgtgggccgtgaggatgaggacggctgggaacacgcgaggggaccgagggcccgggaagcccctggtggagaagaagcgggcgcgcggatcaacgagagcctgaaggagcttgggatgctgctggcgggcccccgaggtgcaggccccaagctggaaaacgccgaaagtgcctggacctagaacggggcgagagggccccagggtgttggctgcgagggcaggggcgcgcaaaacgcaaacagttgcaggcgaaaacgaaggggaacgcatcgatgccgggtaacacccagtgcatgtcccgagggggcccacgttctgtgtccccgtgccaggccacagaggcaaccgagtgcgaagttcctgaaccattggtccaaatcaggccgtggtgagaggagccatc

SEQ ID NO: 542232 - DNA, 256 bp, Homo sapiens
gtaaatcttttttgctttttgattttttttttcggggggaaatccgcccacattaagggggggggagagagggatctatcctaaggcctttttacggttaaaaaaagtttcctagccatgaggccttgctcctgatttagacagggtttttgggtatttatttggaccccttatctttccaggccttttgggaccttaggcggtttttcctgaccccccaccccttaagggggttatcctacggtctttggttaaa

SEQ ID NO: 542233 - DNA, 989 bp, Homo sapiens
tagaggagcatacaaggactctacatcgctgctcagtacagcggggctcaggtacagcgtgctctccgaaccaacccacttccatttggggcaaaccaaccgcacccctgaatttctccgacaaatttcctgcctggcaaggtcccagcatttgagggtgatgatggattctgtgatgtttgagagcaacgccattgcctactatgtgagcaatgaggagctgcggggaagtactccagaggcatcagcccaggtggtgcagtgggtgagctattgctgattccgatatagtgccccacagccagtacctgggtgatatccccacctatgggcatcatgacaccacaacaaacaggccacatgagaatgcaaaggaggacgtgaggcgaattctgggagctgctggactgcattacttgaagacgaggacttaatctggatgggcgaacgagatgacataggactgacatcacagtatagtctagaaccctgtaagatggactctataagcaggtaactagagacctatacttaatcccgaccaggccatatatacacacaactacacaacacggcgtgagataccatcagcatgacaattaaaacaagagcaccaagtatccatgaggcatggtctcgggagggaaagtgaaaaacatggcgcatgagaaacgactggccaccagagaaggaatagcgtcaacacaaggatcagggcagaagaacccaaacccctacaaaacgcgccaacagaccacaggacacgagtacgacaaggggggattcaacagggagacaaagcacggaaacgaccaaacaaaggcgcccccccaagtggcatatgaacggccgcagacaaggcgacagggcacagaccaacccaagaggctcgggacattggccccaccatggcaatacccaatgaggacacaggacagaggaaagacaaacgtggccatggcaacagagtggagcacaacccagaggga

SEQ ID NO: 542234 - DNA, 896 bp, Homo sapiens
gggtgatcctcttgcactggtggcgctggaagaatgaagtcgctgtgcagctgaagcaggatcacgctgtgctcatgagtttcctctggcggaatgtaaaggctccacagaaggagattgtggagttcacagatgagtgctgctgcgtgacgggtctgaggatggacgccgcaagacgcgctgtggacgctggccgatgcgtggccactcgacgggacaggcctgcgctgtagcggctagcctggtgatggggaaataggaacgtgtttgtagacggcagggcctcagaagtgaagacccctggggcagtcctcgtgggccccagcactctgtcgcgagaagaccctctggtggagtgctgagccaggtggagcccagtgatggcagtgagctggtttcggcatgccgaggctgtgagcgtcgcagacgtctagcggaaatccgcccatacccacgaggggtcagtcgggagattaggagcatagctcgccgggcatttgaacatgggggcaagtgggagtgacaaagctactcgtttgactgggaaggccgcgggccgctcaggtgaaggtcctatacggcgatccgtagggggcgaaaggagggaggggcatttcagtagaactttcctatatgttctagcagaacgacagataaaattcgagctcaaattttttgccaaagtgggaactccaggtggaaatggggcccaacgtgaggttgcttggttgaacaaatagactagagtgtgtgcttctggggatcattgctttgtgggttggcgaaattgggagaatgccattgatgtggcgaatgtggccgaatggaaagggagcacggggttgtggttgacgcgggttagctttgacagggaagggggattctggccataggag

SEQ ID NO: 542235 - DNA, 157 bp, Homo sapiens
tggtccccgggtccatagatcggcacttgactttgaaccgggcaccaaagggcacaatatctgatacccgggtacaagagtctataagagagtgcggccacagtagagtgggcaaaacgtgagccactcagccgtggggcatcctcataaagctcga

SEQ ID NO: 542236 - DNA, 181 bp, Homo sapiens
tgcctaatgtacttggccctgttatgccagtatctagccagcagaatggcattgtgccatcgatggagcctgagatcctccctgatggggaccatgactatgaagctgctgccagtaatgtgacactgagaagtgtgctatggcttgctgtctacaagtgctacttgagtgaacaccacat

SEQ ID NO: 542237 - DNA, 105 bp, Homo sapiens
tgcgtccgatggagttgacgccgcaaggtccaagtagtctactcctctataaccatcatctatactccaggtactaatgcagatgtcctgcaaacaccggcctat

SEQ ID NO: 542238 - DNA, 305 bp, Homo sapiens
tcccaacacgcacaattagcacatagtagatgtaccttttttaaaattttttattttttttgacaggatctcactttgtctcccaggctggagcgcagtggcacaatcatggctcagtccaacctcaacttcttgggttcaagcaatccttacatctcagcctcctgagtagctgggaccatatgtgcgcaccaccatgcctagctaattaaaaaaaaatttttgtagggatagggtctcctatgttgcccaggctggtctcaaatgcctaggctcaagtgatccttgcaccttggcttcccaaa

SEQ ID NO: 542239 - DNA, 612 bp, Homo sapiens
  misc_feature (491)..(491): n is a, c, g, or t
  misc_feature (507)..(507): n is a, c, g, or t
  misc_feature (598)..(598): n is a, c, g, or t
gcttgcgttcccgctgtgtgtgcgcctaatctcaggtggtccagccgagacccttgagcaccaatcctaatcacccggcggtcccttatgcgctccggagcaagatgaagagaaacaatcatgaaccaggaaacactcgcctgactgcaggcacaagtgcgcattggtgggaaaggaactgctcgcagcaaacgagcaccggtggttcatagaacagccgatcgagcagatgacagaaagagattcttcacgtgtctccttaacgtatgttcagtgggtacaacaatatctctggctacttgacagaggtgaagtatgttgtacataaccacatgagttacagcagatgatccagtttaacgaccctaaagcttcaggcatctctggcgagcgaacactttcgccattactggccatgctgagacaaagcagctgacagatatgctacccagtatcttaaaccagcttggtgcggatagtctgactagttnaaggagactggccgangctctgcccaaacaatctgtggatggaaaagcaccacttgctactggagaggatgatgatgatgaagttccagatcttgtggagaattttnatgaggcttccaag

SEQ ID NO: 542240 - DNA, 321 bp, Homo sapiens
  misc_feature (156)..(156): n is a, c, g, or t
  misc_feature (186)..(186): n is a, c, g, or t
  misc_feature (206)..(206): n is a, c, g, or t
  misc_feature (249)..(249): n is a, c, g, or t
atgagacagcatcttgctctgtcgcctaggctggagtgtagtgctcacgacagccttcctccagggcttaagtgatcctcttccctaagcttcctgagtagctgggaccacagccgtgcaccaccatgccctgctaattttttgtagatacgaganttttgatatgttacccaggctgggtctcgnaactcctgagctcaagcaantcctccctcctcagccctcccaaatgtgctggagattacaggntgtgagaccaccgcaccttggcgccttctgtcgtcattctcagacagcccgccatagtagtagtagtaggcg

SEQ ID NO: 542241 - DNA, 582 bp, Homo sapiens
  misc_feature (15)..(15): n is a, c, g, or t
  misc_feature (67)..(67): n is a, c, g, or t
  misc_feature (70)..(70): n is a, c, g, or t
  misc_feature (75)..(75): n is a, c, g, or t
  misc_feature (127)..(127): n is a, c, g, or t
  misc_feature (183)..(183): n is a, c, g, or t
  misc_feature (189)..(189): n is a, c, g, or t
  misc_feature (199)..(199): n is a, c, g, or t
  misc_feature (221)..(221): n is a, c, g, or t
  misc_feature (237)..(237): n is a, c, g, or t
  misc_feature (255)..(255): n is a, c, g, or t
  misc_feature (259)..(259): n is a, c, g, or t
  misc_feature (311)..(311): n is a, c, g, or t
  misc_feature (337)..(337): n is a, c, g, or t
  misc_feature (362)..(362): n is a, c, g, or t
  misc_feature (366)..(366): n is a, c, g, or t
  misc_feature (394)..(394): n is a, c, g, or t
  misc_feature (418)..(418): n is a, c, g, or t
  misc_feature (424)..(424): n is a, c, g, or t
  misc_feature (434)..(434): n is a, c, g, or t
  misc_feature (443)..(443): n is a, c, g, or t
  misc_feature (521)..(521): n is a, c, g, or t
  misc_feature (582)..(582): n is a, c, g, or t
gggtgattaactgcntgtacaattacgtctcacttttaattaattgtgcttaaggctttaattaaanaanggggntcccttcttagagcagctcgtactgacgaaggtgcatgcgctgaatgatggnacggcagtggttgaacacacggcggatgtactcagtgtccacagcgcaggggaaangagggnagcagtagtnacgcccatctccactggcagtnctgaccctcagaaacncatctcgaatgaagtacntggnccgggtcacgcgtgggtcctctccgggcgcgggagttgcatcctcaggagtngtgtagcgagcaaattctggaaagtngttctcaatcttcgatttcccagcnaggnctttctcagcgagcagatcttgcttgtngaggaacaggatcacagagatggngcgcancaatctagtngttccagangctcttgaagaggttcagagcctcctgcaggcggttggtctggttgtcctcccggatgaccatgttgtagctgctgcnggccaccacgaagatgatggcagttacatcgttgaagcactggatccacttgcggcgttcn

SEQ ID NO: 542242 - DNA, 296 bp, Homo sapiens
cggcatggggtctgtactaaagctgcctttcctggcactcagaagcgcccttccaggcctaactgcagaaggtgggcctcagcctcctcctcatgctgcttgacttcctcctcacggatctgcaccagcaactgaaagagggctggggctgctccttccccagccccggtaagccacagctgccttcggatggccccgctgcagatgcccacggcaatgacctgctctaggcgcgcatgattcacattatcattatcaatggctccattctctaccaccttctgtagcagaggctc

SEQ ID NO: 542243 - DNA, 126 bp, Homo sapiens
aaaaaaaaaaaaaagtttttttttgacaatcgttggtcggtaaggaagggcattggtctcaccgctcaggtcatattctctactctattgatcatgtggccacgccagtatttgatttggaagcag

SEQ ID NO: 542244 - DNA, 307 bp, Homo sapiens
  misc_feature (32)..(32): n is a, c, g, or t
  misc_feature (140)..(140): n is a, c, g, or t
  misc_feature (159)..(159): n is a, c, g, or t
  misc_feature (171)..(171): n is a, c, g, or t
  misc_feature (197)..(198): n is a, c, g, or t
ttccccccctgcaaacttcagccccttctggncgcatccccacccaatcaccaggtgccctggatcccgccctcttcccccaacaccttccatctccactgcccacagcccacgtggccccccggagcatcgcagggggngcccctcagaaagccatgnagccatggatgncagagatgagactggacgccactggnntggagcagggggcagtcagggttgtggggacacagatgagggctgggagggggggaacgcaagagggcggggggtttcttcacgatcgcactggaagattttataagag

SEQ ID NO: 542245 - DNA, 437 bp, Homo sapiens
  misc_feature (264)..(264): n is a, c, g, or t
  misc_feature (267)..(267): n is a, c, g, or t
agtcctttggccaggccaagcaccagccaacagccatcattgccaagaccttcaagggccgagcgatcacgggggtagaagataaggagtcttggcatgggatagcccctccccttatacatggctgagcagatctatccaggagatctacagccagatccagagcataaagaagatcctgagcaacccctccacaggaggacgcaccctcagtggacattgccaacatccgcatgcccagcctgcccagctacaaagttgggnacnagatagccacccgctaggcctacgggcaggcactggccatagtctggccatgccagtgaccgctatcatcgtcctggatgggcacaccttttattcctaccttctcggagatcttctaaaaggagtacccggaccgcttcatagactgctgcattgttgaagcagtatct

SEQ ID NO: 542246 - DNA, 489 bp, Homo sapiens
tttaaccgagactgagtctaaaacgagcctggatgatagcgaagcccgaatatatgacggtggccagaaataatccggctcgccgaatatataaactagacgcgtggagatatacgtctggcgtcttgcataacgggtcctcagttccagaaaaaccgagtcgctgagtaaatctagaatgacatcgcttcagatatagaacaagatcagctacttctatgctacacgggtagaacaatgggcgtatcaaaatatgggatgtctctacaggaaaactcctccttaactaggtagatcatactgaagtggtcagagatttaacaaatgctccagatggaaagcttgatcctggtgtcagcttcaagagacaaaactctcagagtatgggacctgaaagatgatggaaacatgatgaaagtattgagggggcatcagaattgggtgtacagctgtgcattctctcctgactcttctatgctgtgtacagtc

SEQ ID NO: 542247 - DNA, 388 bp, Homo sapiens
  misc_feature (385)..(385): n is a, c, g, or t
ttcataggcaaatagtggtgcttttgaacatccttaacgtatatctttgtgtacttgtgcaggtatttctggcagtatagaaacagtaagtggacttgctggtcaaatggtagctacatttaaaaaacagtgatggctactgcttaattgtatatcaaaagagatttataccagtaactttcatacatttctgtttccttattctctcacttaaattcaacaacatcattcctcttaacatttttgccaatggtgaaaagtatttcgtatacaaatttacatattcttactcatgtggttaagtttcttacatgtatttgttgaacttcctgtgaattgcttattcatatctttttcgcactttttcctaatgagttttgtattnttc

SEQ ID NO: 542248 - DNA, 251 bp, Homo sapiens
agcgaaggtgatgccttttatcaactgccactgggttatacactattatgagctgataacactgcagaccctactaacgctttagacaattgtatttgtgccgagctaacgatccaagacgctgtgatgccacttgtcaagagcgctcattctaactctgtcttcgcaatgatctccacatgcttccagaccagcgtgtggctatcgaatgtgaaggggacagctagattgttgttgacaggtgcctgtgc

SEQ ID NO: 542249 - DNA, 250 bp, Homo sapiens
  misc_feature (134)..(134): n is a, c, g, or t
  misc_feature (196)..(196): n is a, c, g, or t
  misc_feature (206)..(206): n is a, c, g, or t
  misc_feature (217)..(217): n is a, c, g, or t
caatttggtgtctcattcaacagcatttcaaatgagtttgttttttctagaccaaaagcagtgggaaaacagaagtaaaactagccaagcatgcttttattccttaatatttctaggcatgatgcaagtgtttnactgacgttattcaattgtttttcataacaatcccacatgataagaaaaccaagattcaaanagttacgtancctaggctttncacaggttgagagggtacctgaagaccaccttt

SEQ ID NO: 542250 - DNA, 300 bp, Homo sapiens
  misc_feature (12)..(12): n is a, c, g, or t
  misc_feature (53)..(53): n is a, c, g, or t
  misc_feature (69)..(69): n is a, c, g, or t
  misc_feature (94)..(94): n is a, c, g, or t
  misc_feature (245)..(246): n is a, c, g, or t
atttgagatgcnacaaaacccagtaaaagattcaaaagaaatgtttcaaaccnacaaacagatggaccnggagaagagaagcagaagccttggnagcagccctgtaaaataatcacaagatgtggttttgaaattgccactgggaaatttctttccaaaaagaacaaaatatttcgctgaaactaatgagaaaggccatgataaagatttctcagagtttggttcccactttcattggatttcanngaaagggcttaattaaaagggcttgagaactttgggtaaaaaaaaaccccccaa

SEQ ID NO: 542251 - DNA, 100 bp, Homo sapiens
aatgtccacactcctctgtgctgtccatctgtccacctcctctgtgctgtccacctcctctgtgctgtccatcctcctctgtgctgtgccctctgtcggt

SEQ ID NO: 542252 - DNA, 108 bp, Homo sapiens
tgtagacacattgccaattccaggtgtgcacagaacgatatcaatcaatctttttcttaggagcaagaagaaaatgtggccctaaagggggttagttgaggggtaggg

SEQ ID NO: 542253 - DNA, 629 bp, Homo sapiens
atcactacctaccctgacaggtataacagacaagaaatggtggcatcgtgtgtggcaatcataccgtcaccgatcgatgtgatcatcattgggcatccgatggctattatgccatggtgggtcgagtgcacgggggactcactgtggtgtgattcagagagccatggtgaaggcctgcccacacgtctggtttgagcgctcggaagtgaaggatcgccacctggtggctacgagactgactgaagcatgtgcaagatacgagcaagcggtctatcctcatcttcccagaaggaacctgcatcaataatacatcggtgatgatgtgcaaatagggaagttgcgcaatcggagccacagtttaccctgatgctatcaagtatgaccctcaattgggcgatgccgtctggaacagcagcaaatacgggatggtgacgtacctgctgcgaatgatgaccaggctgggccattgtctgcagcgtgtggtacctgcctcccatgactagagaggcagatgaagatgctgtccagtttgcgaatagggtgaaatctgccattgccaggcagggaggacttgtggacctgctgtgggatggggggcctgaagaggtaggtatgatgaaggacggggt

SEQ ID NO: 542254 - DNA, 460 bp, Homo sapiens
  misc_feature (1)..(1): n is a, c, g, or t
  misc_feature (53)..(53): n is a, c, g, or t
  misc_feature (454)..(454): n is a, c, g, or t
natcttgattaggcaatgatttcctcaaatatgacaccccaaaactcacacanacctacatatatatatatacacacacacatacacacataaattgggcttccatcaaaaattgaaaaacttcccgtgcatcgaaaagacattatttagggccggacaccaagttcgcacgcctgtaatccccagcactttgggaggctgggactggcggatcacttgaggacagcagttcaagcccagcctgataaacatgcgaagccccgtctctactaaaaatacaaaaatcagctcggtgtggtgcgggcgcctgtggtcccagctatttgggagctgagccagaacaatcgcttgaacccgggaggtggaggctgcagtgagccgagatggtgccactgcattgcagcctgggcgacaagagcgaaactccgtctcaaaaacaaacaaaaaaactccntttcaa

SEQ ID NO: 542255 - DNA, 104 bp, Homo sapiens
cgtgagagctcagccttggatgatgttgtggctggtggtcaaccgtccgccgcagggggtgggcctaaagatagagtcgcccgtacggggtgggttgagagcgg

SEQ ID NO: 542256 - DNA, 193 bp, Homo sapiens
tgtcgcgtcaagacaacaacctggcagctggttgcaggagatcctgcggcgactggcgcttttggggacagaacaacgggccatgtgcaagtaagctaggtcatggtggtcaaccgaagtttcgaagaaacgctgcagtgtgaacgatgtgtggcaggagctttggagacagaacaacgggccgcgcaaagag

SEQ ID NO: 542257 - DNA, 199 bp, Homo sapiens
gtaagtggccttctaataaccaacaactcccagcaatgatgaaagtcaccatcatatgtcaagcaatttggtaaatctaaaaacatttccccaagaactgctacccctccaacacaccacacacacacacacacacagttttttcctcccctgtgatgaaacaggctgtgaaacacttaaagtatttgcttgcctctgg

SEQ ID NO: 542258 - DNA, 327 bp, Homo sapiens
  misc_feature (75)..(76): n is a, c, g, or t
  misc_feature (184)..(184): n is a, c, g, or t
gagacagagtctcgctctggagtgcagtggcgtgattccagctcactgcaacctccgcctcctgggttcatgtanntctcatgcctcagcctcccaagtacctgggattacaggcacatgtcaccgtgcttagctaatttcttgtatttttattagagacaggggtttcaccatattggcctgnctggtcttgaactcctggcctcaagtgatccacccatcttggcttaccaaagtgctgggattacaggtgtgagccacatgtccagccagaaaatatttttttaagtggagaaccattaagattagatatagcctagaaaaatc

SEQ ID NO: 542259 - DNA, 175 bp, Homo sapiens
ctaattggttcttcgatgacgcctctaccacctctcgccagaaccccatctacttcgcctcctcgcacccaacattattcttactatttgcaggctccttctctggattaggctgcaagtcccatgacagcagggatgtcccccctcccaccaacgtcatcgaagaaccaattag

SEQ ID NO: 542260 - DNA, 106 bp, Homo sapiens
tacattataggctcctacacgtgaggcccctacacataggtgtatctcgtgtgaatgagggttttatgttgttaatgtggatgggtgagggagccatcatggagga

SEQ ID NO: 542261 - DNA, 342 bp, Homo sapiens
ccccgagaagctgatgttcgtttcgatcagcatttcgtagtatgaagcaatataccattttatggctcttgtattgatgaaattgtgcatcattggcgcacggaccgtatggccaccctcttgcattaggtcttgctggaactagccacggttgtctggcccttccgggcgtaaagaagatttggactaatcgtaccgtgacttctgatcatacgatcggagtgccagaagtcacagtgtttctgtaccatgggcgaccaataaccggtagtgcacttgtctttttggaatctctgtagctctgaggcgccttccaggcttctcggggggggtacccgagct

SEQ ID NO: 542262 - DNA, 604 bp, Homo sapiens
  misc_feature (253)..(253): n is a, c, g, or t
gttcagtttctacaccccatttcagccataaagcccattttaaagacgaagaaacatacataggaagatgaatattcatttttaatgtattacacaatcaaaacaaaacgcggacacactcacgcttccaagtcttgaccaagcacacatgctcaagctccagttctaaccatactagtgatgtcactattaccactataaactaccatgtaactggcagactcatgttttactggtgtagacaattgaacantgtgtttgttgccagtggtaatccttgctctagtactgagaggaaccgcaggttccagaacattgtggtgtagacaatggaacgtacaatttctacacaattaaaacaaagcatcgagaaggcccgcggcggggtgtatgacgtgatgtgatttctgcccagtgctctgaaatgtcaaagtgtagaaatggaacgtacaattttctacacgcttcattcacaactcacctctgagcacacctccttcaaggaagccttccccgattagggaagccagggtagggattcctttcctcccccagaataccaggaataaaacaccaccccccatattctggcagtccatataca

SEQ ID NO: 542263 - DNA, 109 bp, Homo sapiens
  misc_feature (15)..(15): n is a, c, g, or t
  misc_feature (104)..(104): n is a, c, g, or t
cgccgcgcgctcagngctccccaaagtggctgagattacacgctgcagcgcggcgcttacgcttttctacttctaaattttgtaagcaagcccatgcatgcatntctat

SEQ ID NO: 542264 - DNA, 123 bp, Homo sapiens
ccgtagctgtactggctgtacctaaatggctgtacctaaatggctgtacctaccatggctgttacctaaatggctgtacctaaaaggctgctggatttggcgctcatgagttgccatataggt

SEQ ID NO: 542265 - DNA, 800 bp, Homo sapiens
gggttgggttcctgtctgccgcactgcgtggccgccgaaagccgctacacaagtagcggcgtgtctgccctagggaggcaaagcgcaaacttgttaccgcgccgggactgccccgggattctcccagcggctccgcaggacgcagcgcctgtgcctcgcgccggccctgtggaactgggcacaggcactgtccgcgccccttgggttgccgccgagggcgtgcttttacccctcctgttctggccgcggggcagcagagagagctcgtgggccggggcaaagcctcaagatggtggaccacggtgggcgagcccagaaccctggctggggagtccctccccgccggataccaaatggggcaaggagaggccactctacaagggtgcaaacttccccggtggggataaatcgttgggggccgcgacggcatctggtccagcccagcgtgtccactgaatggacccgaaggacagcaagtggctccagctggcgggcgggaatctttggaatacttccccgtgggaagaaacattcatccggcttgtattagaggccactcaattgggcagttcgcaaagggcggttttaagtcactggcacacaaattccattatcacagtgggcgtccttaaattcaggaacaaaacaggagttggcgggtcatccgctccttggtaacccccaagtggttgggcaaataccagtggggcgcataaattccttttggggcgatccaatttgggcaaagccctttcggtaaaccttccctatagagggttccaacggcacaatttcttccc

SEQ ID NO: 542266 - DNA, 757 bp, Homo sapiens
  misc_feature (10)..(10): n is a, c, g, or t
ttatggccgnggtaactacaaccttactattttccatcccatacattttgacagacctagttcaatgaatctgaggaggctactgagcagacagtcccagcctaacacgatcctgaacctttcacttaatctaacccttaattatggatcccctagctccctttaacttctaatcttggacggaaccgtctccatacaaccccctaaggaagaaccttcatttccgctaaatcccctttcaaccttatttccacattcaaagccgacccgggttaactttctttcctttccttcctaatggcctttaccctttttctaactgtgctctctagggctccccaagcaattttatccccaaacccaaccccttttacacacgttggccacatataagggccggaagagattttccgaatatgggctacacacaattctttgagaccgggccctataccaacttgggtggcgggctttgtcccatttcactatcctatccaaactacacaaaataccctcaccccccttatccccacacccaagctcacatttgtgccccacatggcgcacctcctttaggccctaatagcggcacacctcctatttaaaaccgggacggcgggctacctgccacttccccctttcccctatttggccacgcggagacccggatttaccttccacaacttcatcaccagtaaccaaattctccccaacgtgaacacaattcctaaatgggcctcatagcccaaaccctccc

SEQ ID NO: 542267 - DNA, 355 bp, Homo sapiens
gatttggtttgttcccactgtccctttataaatatttgtgtgctctcattttaaaaagagaaacaccagaaccatgtttttctgtggttggaccagtgctcactgcccttcccagtagcccagtcacacccatgaacattgcagcccctgccagttgtgctttgcagttcgcctttcctcagggacctccaaagtccccagcctctgaagccattggggagaatgcacagtgaattctgatgcttttgctggtacagacacttcccgtgcggtgctaaccgtcccctgtgtaatagtttatgttctaggatgaccaagtagaagaatactttgaaaaaattgataatgccttctg

SEQ ID NO: 542268 - DNA, 240 bp, Homo sapiens
tttttctccttgtccccatttaaaaaatcggaatagcccttaaaaaagatgctctatcaaaagatgtagtaaaagaataaaattcaatgaatactgctttaaaaatgctagctgaacaacaagtagatgctgttttatctgctggagaatcttctttattgttagctagttcaatgttaatgttaaaaagacttacaggaataaaacgtcctgcatttatgcctatgattcccacaatcg

SEQ ID NO: 542269 - DNA, 442 bp, Homo sapiens
cgctgtcacgactgacggctaggggaacacgatagcctccccatcctgacgtacgacgaaggtaaaagcggtggacgtgagtcatcctcttaggatatctggaggcggaaaagaatcagaactgctgcccaaaatagtgaagctgagccagatgaataagtccatctgatgtatattcggtgtatacaaaatgagcccagttgctcaacagtatggatgaaaaccttgctcatattatactgcgaaggctaagtgtcacccccttactctgactctggctgggccttgctaagggccaaggaaagacagagatataagagggggcagccagtccaaatgccaaaagaagaccagtgcttgcacctgaatagtatgaaataagacattataggacacttataaaaaaaaaggggaccacacaaactgactaggaccacagacc

SEQ ID NO: 542270 - DNA, 372 bp, Homo sapiens
ggagacggtacacctgtcaaagggtttatccttcacccatttatctagcacgtcatccagaggtaaaccaattatacatgtgtttgtattcagtaaaccagctatgacaatttatactaaacaaattgaactagaacccatttgaatcaggtattgaatttgtttatttccatttttcattattaatacaacggcctgactgtgctcaatcgtcaagctgcatgcatggacaacactggccagcccaaacagtgtcttaatcattcagcaaatggaactttaaggagtccttcatcattaaggtagtacaagtatttatcttgtccaactgatgtgtagcttgatctttaggggacaggaccaccagcaata

SEQ ID NO: 542271 - DNA, 421 bp, Homo sapiens
gcgccctggatgaccggagtacagcaccagtgccgggtacaggatgcaggtggtgcgggcagctggagatccagcttcgctcgaagggagagtcgagacggcgtgcaggcacatgatggtccagcttgcattatgtcggctcctcgtgaacccaagtccctttcagaccagtgcagtgagccgatcatctggcagcagacatcaattcccagtgtggtctcagatgcacgccgccacgaacctctgcgcgcgcatcggctcgctgattagctcccttctagctggcctcgccttggtccatggagcttcttgcacgtcccgtgctagtggttgggggcccagggcccgtcaggatggaaggctaggtgacgataggttcgtgcgtgcacctccattcctgcgctctaggaggcatgtggca

SEQ ID NO: 542272 - DNA, 756 bp, Homo sapiens
cgcggggcggggtgttgtgggcggggtgtgtgccgcggagttgcgttcgtgaccgggccgagtggacggaggctatcgagggggcggtggtggcgggagatatagcgcggggtgttgggcggcttgtggtggcgggggtaggggtacggcgcccggggggtggtggagagagggaggtggtcggccgcggttgggacgccggcgtagaagcgtccgcgtcatgcggggtgtctcggttgcccgcgcagtgtctttcagggggcggccgcggtgggccagtgatgttgcctcgctcccccccggtgtgggtgcgcgcgctggccccgataaccgcgctgcagtttctggcgatcaggtgggccgcctgtgtgcggggcccgcccccggcggtggtctactgttgtgatgttccagcgtcctcgaggtgccattgtggctgggggggccagaccgcccgtggtctgtggcgccgtgtgttctttgtcccccgcgcgtgggtccccatctgaagttggtcccccacacgattgacggtccgccaggcctgtgcgccgtcgttgagagataatagccccccaaggagctctctgaggcggctctcacgccccgaggagaaaccgcggggccgccccgcgccctattttgtagtcgcctagatcacgaacggtctagcgcgcccccataacggtgtcctcgccccccgtgctatcttcgcacagcccatgaagaagagagaacttctgtccatcaaaaacc

SEQ ID NO: 542273 - DNA, 112 bp, Homo sapiens
ccaggatctagcgaatcgtggtgctgctcgggaattatggtgctgctgggagaaactggcaaggagaagctcccgcgatactacaagaacatcggtctgggcttcaagacac

SEQ ID NO: 542274 - DNA, 1250 bp, Homo sapiens
  misc_feature (82)..(83): n is a, c, g, or t
  misc_feature (409)..(409): n is a, c, g, or t
  misc_feature (437)..(437): n is a, c, g, or t
  misc_feature (511)..(511): n is a, c, g, or t
  misc_feature (516)..(516): n is a, c, g, or t
  misc_feature (589)..(589): n is a, c, g, or t
  misc_feature (612)..(612): n is a, c, g, or t
  misc_feature (902)..(902): n is a, c, g, or t
  misc_feature (908)..(909): n is a, c, g, or t
gctggagtttgctggatgggccgagccgggtgcgcactggggagtggcggaggcagcggcggcggcggcggcggcggcggcnnggcggacagatgaagaaactgaggccctgtgatgtgaagtgacttgccccccagccacacagctggaccattctggctgctgtctggacaagaagtcgtagggggtgagggtggaagctgggaaacccacaggaggcaaccacactagtttagatcttctggtgaccccacttctcgctgctcatgccgctgggactggggcggcggaaaaaggcgccccctctagtggaaaatgaggaggctgagccaggccgtggagggctgggcgtgggggagccagggcctctgggcggaggtgggtcggggggcccccaaatgggcttgcncccccccttccacccagtccctgcaggncccgcctcgtgtatccacagccagcatggcccatggcagtcccactggccgcatcgagggcttcagcaacgtcnaaggnagctgtatggcaagatcgccgaggccttccgacctgccaactgccgaggtgatgttctgcacacctgaacganccacaaagtggacagtggacaangctcctggggggccagatcgggctggaggacttcatcttcgcccacgtgaagggggcagcgcacaggaggtggacggtgttcaacgtcggaggatgcacttcgggcatcaccatcacaggacaccggggctggctacgcccttcatcaagcgcatcaaggagggcagcgtgatcgaccacatccactcatcagcgtgggcgacatgatcgaggccattaacgggcagagctgctgggtgccggcactacgaggtggcccggtgtcaaggagtgcccgaggcgtacttcangctgannctcaaggagctcgaaggcttcgaatgatcaggcagtgtaaagggggtggccgccctgggtctggcccacaaatgggcactggccgggtaccctgggggactccgatccggggcccggcacgggtgggaggatttgcctctgcttttgaagagaagcctttaaaggcggtctacctgcgagaatacctggttcagggacacgactggggcaccaggggactggaagacaaggacctgtatggcgagctgaaaaggggggaattgccacccaaaagcattagaatggggcccaggaccagggggaaagagccaacagagaacgcactgggccccgaaatggcc

SEQ ID NO: 542275 - DNA, 1249 bp, Homo sapiens
  misc_feature (82)..(83): n is a, c, g, or t
  misc_feature (409)..(409): n is a, c, g, or t
  misc_feature (418)..(418): n is a, c, g, or t
  misc_feature (422)..(422): n is a, c, g, or t
  misc_feature (436)..(436): n is a, c, g, or t
  misc_feature (438)..(438): n is a, c, g, or t
  misc_feature (447)..(447): n is a, c, g, or t
  misc_feature (450)..(450): n is a, c, g, or t
  misc_feature (458)..(458): n is a, c, g, or t
  misc_feature (489)..(489): n is a, c, g, or t
  misc_feature (491)..(491): n is a, c, g, or t
  misc_feature (510)..(510): n is a, c, g, or t
  misc_feature (588)..(588): n is a, c, g, or t
  misc_feature (611)..(611): n is a, c, g, or t
  misc_feature (901)..(901): n is a, c, g, or t
  misc_feature (907)..(908): n is a, c, g, or t
gctggagtttgctggatgggccgagccgggtgcgcactggggagtggcggaggcagcggcggcggcggcggcggcggcggcnnggcggacagatgaagaaactgaggccctgtgatgtgaagtgacttgccccccagccacacagctggaccattctggctgctgtctggacaagaagtcgtagggggtgagggtggaagctgggaaacccacaggaggcaaccacactagtttagatcttctggtgaccccacttctcgctgctcatgccgctgggactggggcggcggaaaaaggcgccccctctagtggaaaatgaggaggctgagccaggccgtggagggctgggcgtgggggagccagggcctctgggcggaggtgggtcggggggcccccaaatgggcttgcnccccccctngccncgagggcgtggggngnggcggtggngtngcgggcgncggggtggggggtgggagtcgcggtgggggnangggggggttggaggagggngaggggggtgtatggcaagatcgccgaggccttccgacctgccaactgccgaggtgatgttctgcacacctgaacganccacaaagtggacagtggacaangctcctggggggccagatcgggctggaggacttcatcttcgcccacgtgaagggggcagcgcacaggaggtggacggtgttcaacgtcggaggatgcacttcgggcatcaccatcacaggacaccggggctggctacgcccttcatcaagcgcatcaaggagggcagcgtgatcgaccacatccactcatcagcgtgggcgacatgatcgaggccattaacgggcagagctgctgggtgccggcactacgaggtggcccggtgtcaaggagtgcccgaggcgtacttcangctgannctcaaggagctcgaaggcttcgaatgatcaggcagtgtaaagggggtggccgccctgggtctggcccacaaatgggcactggccgggtaccctgggggactccgatccggggcccggcacgggtgggaggatttgcctctgcttttgaagagaagcctttaaaggcggtctacctgcgagaatacctggttcagggacacgactggggcaccaggggactggaagacaaggacctgtatggcgagctgaaaaggggggaattgccacccaaaagcattagaatggggcccaggaccagggggaaagagccaacagagaacgcactgggccccgaaatggcc

SEQ ID NO: 542276 - DNA, 922 bp, Homo sapiens
  misc_feature (82)..(83): n is a, c, g, or t
  misc_feature (261)..(261): n is a, c, g, or t
  misc_feature (284)..(284): n is a, c, g, or t
  misc_feature (574)..(574): n is a, c, g, or t
  misc_feature (580)..(581): n is a, c, g, or t
gctggagtttgctggatgggccgagccgggtgcgcactggggagtggcggaggcagcggcggcggcggcggcggcggcggcnnggcggacagatgaagaaactgaggccctgtgatgtgaagtgacttgccccccagccacacagctggaccattctggctgctgtctggacaagaagtcgtagggggtgagggtggaagctgggaaacccacaggaggcaaccacactagtttaggtgatgttctgcacacctgaacganccacaaagtggacagtggacaangctcctggggggccagatcgggctggaggacttcatcttcgcccacgtgaagggggcagcgcacaggaggtggacggtgttcaacgtcggaggatgcacttcgggcatcaccatcacaggacaccggggctggctacgcccttcatcaagcgcatcaaggagggcagcgtgatcgaccacatccactcatcagcgtgggcgacatgatcgaggccattaacgggcagagctgctgggtgccggcactacgaggtggcccggtgtcaaggagtgcccgaggcgtacttcangctgannctcaaggagctcgaaggcttcgaatgatcaggcagtgtaaagggggtggccgccctgggtctggcccacaaatgggcactggccgggtaccctgggggactccgatccggggcccggcacgggtgggaggatttgcctctgcttttgaagagaagcctttaaaggcggtctacctgcgagaatacctggttcagggacacgactggggcaccaggggactggaagacaaggacctgtatggcgagctgaaaaggggggaattgccacccaaaagcattagaatggggcccaggaccagggggaaagagccaacagagaacgcactgggccccgaaatggcc

SEQ ID NO: 542277 - DNA, 131 bp, Homo sapiens
tagccatataatcatcatagcctgccatagcctcacaacataagcaccacgcctcatcctctcaaagccagctgcctactgccaaatgctagtgatatcctctaccagccctcaggctctgtcataacgga

SEQ ID NO: 542278 - DNA, 838 bp, Homo sapiens
tgcctgtagtcccagctactcaggagactgaggtggaagaatcacttgagcctgggaggttgaggctgcagtgagctgtgtttataccactgcactccagcctgctgggtaacagagcaagactccatctcaaaaagaaaagaaaaaatgcctggcctcattatgtatgcaaagcaaaaaaaaaaaagttccgtgctgcaaatctatataagacaaatgattttgcgaaagcttggctactgtgcctacttgtaccaagtgtgggtctaccaaatgtgtcttcgtacactgggcaattcttataacttggattttctatggacagaagtttgattatatgtacaccattgtgcagagactcctggctcaagtgcttaatgtgctttccatttaacacatacgaattctatccattagtgctcccgaggtgtttgacttttgagccactcggaaattggtcacaccgagaagaaattgtatagacgaacctcacagggtgccttcatgggttcatcgtcttaaaaaagatcaacaggattacactatagaagcttcaagacagagagatgatagaataaaacaacttcccggtgggacctccttaatgtccagggtcagggagaagaaaaaaaggaggtggaacttgacaaggtgggcatcttagggtctccatataggcgtgttgtccctgtgtacccaccagttttgttgtgtaccccaaaggtgtgggaaagacctgcgcgcccggatcctcccctataatagaatgacgctccgcaatttaattgtcggaaataaggcccagtgatatacccggggttaggaactgcgcgcaaaa

SEQ ID NO: 542279 - DNA, 445 bp, Homo sapiens
  misc_feature (12)..(12): n is a, c, g, or t
  misc_feature (33)..(33): n is a, c, g, or t
  misc_feature (433)..(435): n is a, c, g, or t
tttttatcctanagtgtggccccttggtggggnaaaagctccccccattccctgctcctgaggagttgaactcccaatactggggcttgccccatgggtgctgcccacacccccagagagaggcgatgcaagcctgctccccaggcctgctctcccctccctcgacaaactggcccatctgttcccggggaaaaagaggggactctttcttcataaaagaaaacagtagtgggcacattttcctttagttatcctcaatatataagaaacttcaagaatggtagctttcaacagaaaaccatacaatgacctccagtacacacatacacacacacacacacacacacacacacaccccatttcactcagaatagtgcagggaaaactgagcaaaccacgagaccaagccaatgtctatgatgaagatgataannnaactgtggca

SEQ ID NO: 542280 - DNA, 1426 bp, Homo sapiens
  misc_feature (144)..(144): n is a, c, g, or t
acagaacctcgatacttgctccgtgacatgcttctatccagtggttgtatcatggacttatggtggccaccaaatatgagcgtgacgtgtctgtgctcctctagggacatcttctgagcatagtcagaccagtctctagggggntagatagtcaccgactcattggagacaatgtcagtccaccaaaaagggtctcgatgtgactacgcctgtctatcatgacgaccactcatcacctattacgactggtagaaccaccgcattgtaagaacgatcacatggcttccaagatatgatgtcctgttcactacgtccagatgtgacctaagtacgtccattgccagagagacccatcgaaagcccagatgtcgagtacgcttacatcctatcaactaggagtttagcgaatcaagtgcttcatggagcttacgaaagtatcttacccttgataacgccgttggaacttgtaccacaatggcttcggggaagctgcctcagtgttgggtcacatcgatgtgccctcacacttgctcatttgcattgcaactctattctcatagctcttggcgggttttgccgtgtgtcgctacgcaacaaacccatagtatctctttgtcggtgggctatcagtggccgatcccgtccaaccgttgcccccaggattttacccgggcttaccattcattccgcatggtattgatggaaaagccctgtggtgtcgtccccttcccagctaggaaaagtggggtgccccttgcagggccccccggttccgcttgggttgggttcatccaagggatgtcgccaacattagtgttaaccttggtgctccgttgggcaaacccgggtggaatccttgaaaatttattacccacatttgtttatgcgttccatgttgtcccccttggaatggaaagttacatgtccaagtgcatgaaaggtcgcatgggcccccttgtaccttttgcgaccatggggacacgaggaagcgactcgcgagagtgaacgtcgttccccgcgaaacgtggggttaaaatccccggtttcccacctaactccccaaaattctttcacttgtggatccgccagaagactcacttcggggggttggttcccctttcgcagcaaaggtggtcacgccagattgaacccccccattttggctgcttccggatccctaagccgcatgggtgggtcattggacgactcgtgggcgacaccactgggttcattccccaacgcctattcccttgtgtgcgacgtttcctggggttcctacgcgacaacgcacctcaggctggtgtttggaggggccagcgcacaaacttggcattcctttctggacgtgggcacccattggtgttcctctggtgcgcggacaccactcacgaccgctcctccgctctgcacggtcgcagcactcgca

SEQ ID NO: 542281 - DNA, 416 bp, Homo sapiens
atagatgtgcacatcttcaactttagtgactgtcttgtgtctgtacaaataaggatatccgtgaggaccgatgcatctcaccatcttgttatccttgacactctcctgcctttgatcttgtgtcctgtactctcttgcttctcctactacctctcaagttactgtttgtctcacatattccctcaaccttctcatggtagggacatgacaaagctaagggtgtgagggagtagtcatgggccctcaagttaaggatgagaaggtttgtatgtactacagctggaaaggtgttcggacacaacgcatgcagctctaggggccagctactttgtctcacacagcagatggtatgtccctttcctggtctttctgcttctctcattcttcatgctggctggcttatttgctcagttatg

SEQ ID NO: 542282 - DNA, 1006 bp, Homo sapiens
  misc_feature (978)..(978): n is a, c, g, or t
caagttgttcacgttgacgggtaccggactaaggccccggcatttggccttttccgtcgcgggcacacattccgaacacttcatggcccaggggtgaacaatctatcccttagttcatgtccggaatgcaagtcaaccagaagttgcaagccaaaatttaccaaaattgaattcgccctaaaatatcagtgtgttaaatgcactgtcctcacacaccgttactatcgaagtcccattcaaacctggacgacccctgtacataaacattagggccattctcaccaagttttctaaaagatgattttctaaacattaccaaggtctaaagtgctaatttccccacaaaaccagtttcttatcttgtttaaaatgagactggcttgacgataactccatgactcaccatgttatgtgctttaaggaattccaacgtgaaggagatgtataaggcaaccactaaatgtagaaaacaaatgctatgtattaggataatattctcccactgctattaacggtagaacaagcatgtgagattcttacatttcttctagtgtgccttagcaaatctgctgggcaaacgagtctagcttgttttgagaattcgaaaaacataatgtgtctctcaatcttgtcaattctaagcctcgctaaaggcacgaacacctatccacaccgtaatggacgtctggtagtgcctggagagaggcaaatgatcattggatgtcacaaaagctactagagaatagactaaaacaagaatttcaagcaaaactaacaaaaaattaaatccacaaaaaaatatcatttggtaaatgcactgtctcacacactttactactaagtcccattcaaaccatgacgaccctttacataaaattagggcattctcaccaagtttctaaagatgatttctaaacattcaccaaggtctaagtgctaattccccacaaaccatttcttatcttgtttaaatgaganctggctttagattaccatcacggtatta

SEQ ID NO: 542283 - DNA, 81 bp, Homo sapiens
aggattttcagtggctgtgaataagctaagaatggtaatgcagtttcaggggttagaaaatccaattcaaattagtcctca

SEQ ID NO: 542284 - DNA, 178 bp, Homo sapiens
cattgagcagtgcatacgcactcacgcacacttacacttgcactactctgctcatgcactccacactgtgtgcacacacgctacttgctcatacacgaactcattcgtgcactcacagtgcatttgctccacacaacttgcacacgttcatagcacacagttgcacgttttccacact

SEQ ID NO: 542285 - DNA, 921 bp, Homo sapiens
ggtgcctgcggacaggcccccaggtctagcggctttgtggagtggaacactggtgtatcctctccacagtccaggtgctgggaggccctccttgtgcttagagaggacacttccaaagctggggcgctcccaatggaggcaccagtggccagaatgtccacgcagagcacccaccccctgaaacctgaggccccacgtctgccatctgggatccccgagtcccacgaaatgctgttcagctggggcctacacgatctctccctgtccacaggtgacgtttcgcgtgccgtcaccccgcgagtgacgctgtcagcgccttttgatgcatcgagcgtgtaagccttcactcgtccgtcttggtgcgtctgccccctgttcctgtgatgaatgatccggtacttcctgaccctatgtccacagcctgtccctgggcgtggattcgacgtgatgggcatgccttgtggcccttcatcatctggctcgctcgtgggacaaggcgagactcactgctggagtcactgacgctgcacacggtctgggggccaccatagcccacctgcatgtgctggccgtgtcgccgtcgccttccgggcagcagggcatggggccccatcctgctgtggtgctacctgcaccacctgggcagccagccggccgtgcgccggtgccgccgctcatgtgcgaaggacgcgctggtaccccttctatgagaggtcccagttccacgccgtgggcccctgcgccattacccgtgggctccctcaccttcatgggggcctccactgtccctgcggggcacccctttctgcggcatgaacagcgggtgctgactgggtgccaactgggtgccaacatgatccccggtcttgcccgggtccctttactcatggctgggaggttcccgaggtgggggcgcccagg

SEQ ID NO: 542286 - DNA, 556 bp, Homo sapiens
atctctagagtcgcgctgccagagaagctgtgactggtcgtcgtgttacacgtcggacatgggtttaacaagcgggtgaacacggacaaaataatttctcccacaaaattatacccacacatccccagacagtataaatatatggtggagctaccattaatacacatcaccatttaatcaatcacttaataaaacaaatggtcaagtatccaaatattaagtaacacagctcaaagggcatataaaatattagatgtctgctcactccattagcagaaccccatttcttttttggcaagagaggtggggagggacaaaaaattcacattttcaaacaaaaatacgtgggtaaacacacttctgataagtaggggaacaaacttccaagaattccaggaagtacatgataacaataccaaagcatctctccctttaaaaacattatttacctaaataaaagacgcttatctacatgtgggcccaagacaagggcacctttgggttaaaaataattaatagccccctccaattcttttctcaggccctcccgtgtaat

SEQ ID NO: 542287 - DNA, 717 bp, Homo sapiens
ggtccggtcgagcccctgtccccacccttcctgagctgtccttttcccacaggcctctgggtggcatggtgtgcaaggcctggccgtggccttccttcctggccttagccacctggctctgtctgcagtcaggggcagtgctgctttcttatccatttccctggtaggcgggcccccctggcagcagtattgtaacggggctacaaggcagcgtgtgatgaaaggggcccatgcccagcctgtagctccactcacttcagtgacgctcactcacatagccccgcttgagggtccccctacctgttgaccatcgagtggtaatggctccatggggcccctctcgcaggacctcctggcccccaaactgattctgcccagtataatcgtgctcgtcctgcgctccactacagtcattgcttcttcagtcatgaagtgttggccactaggccccggggatccccattgctgctgtgggctcccatgtccctggggcagtgagtgctggtgcaggaaagtggagcgctaacgagcgggagtgccttcacatcaatctgttgaacccgcacacttggagggtgctgtggccgctgcacatccccgtttaccactcacttcgccttagcaggtcctgtgagaccgagtgacgagctgaaacgtgagggttgcagtggtgatcccgcccagactgtgctcaacgccccacatttgttcgcccat

SEQ ID NO: 542288 - DNA, 175 bp, Homo sapiens
agagaccccccggagcccttgaccctgaacgatcctgcatgtctgccatttgaatgtcgtgtggttacaggacccggtcagttcaagttatcaggggtccagcagctctgcggaggcatctggaacagaggagggggaggaagtgcccagtttcaccatggggcgatgacaatgt

SEQ ID NO: 542289 - DNA, 1615 bp, Homo sapiens
  misc_feature (1210)..(1210): n is a, c, g, or t
taggtttgagggggaatgctggagaattgtaaatgggtatggaaactatatcatataagtcaatgctacaggcgtgagtggtaaggaagtttttccaataaggaggtgtcatgagttgggtcgaagcggaatcgggggtatagctgttcgatattcataaacgacacagggcagtgttcaccaagtcgggctctctggtgcaccaaattatgttgttgtagcagttcagggcgacgatgctgcgtacataattgtagtgtaccctcaaggacagcattttgcacgtgggctagaagggtcgtccacattccatacaactccaattgtactagcgcgtatctccggactaaattgcaaacaaataacgcggccgcacagtgggagcccctaggcggcggcggttcatccacgacattgatcatagaaaaagccactgacaaaaattaacattactcgagaggcacagatacccccacagttagaagagacaaacacaagcggtatcccaaaaaacgcagggaggacgataaccaggaagaacgagagataccaacacaggacataaacaatagtcagcacgaagaaaaattacaacactaccagaacagtaaaaacggaggaccaccacaaaagcggggacgcgaccactagcaaacataggacgccaacgaagcatcagataacacacaaccaaagaacgaggagtagcatacacaataagacaagacaacagagacgaaacaaaacgacacgcacatacacaacccacgaggccaacccaaagagagaacaccacaaaactacacaaaaacacagaccaacgaagatataagcaacgtaatagacaagccaaaagaggacaagagagaacacaagacgagcaataacaaaactgacaaacacacgaaacaaacaaccaacgacaagcaagaccgaccgcaaacgaacgatgcaccacacccaaaccaagcacacaccacacacagacaccagagcacgccgcacgagaactcaacaacccagcggagacagaaacataagaccagtgagacaacaccaaacgcaatagagaagaccaacgacaaaacagcaaaacacgactaacactaacacaaaccgatgacacatagcagccacagatacagcaaacagaatagaagcacaagacacaaccaaaacgaaaagcaccgacccgaacaaacacacgcanctcacgacaaagagcaaatcataaaacaagaagatacatacaccgacagccacgcggagcaaggaggatagacagaacaaacaagacagagacgaaacaagaagcaagagatacatacacgtagagacacacacgaagacagaacaaacaagcacaacacaacaagcacaacacaatacagatacgaaggaaagagaccagagaaagagaacaagaacagaaacatcactacaaaacgacagagacacagaacacacaataaaccaaagcacacaagacacagacacaccaaatcaatcaaccaacgacacacaagacgaaacgacagacaacagcaacaagaacacacaataacaccagaaacaacagaacacaaacaacaacactcaccaagaaaagagacca

SEQ ID NO: 542290 - DNA, 227 bp, Homo sapiens
ttggcatacgatcccccaaagagcccgtctgcaccccagacccaggcctcaggcctccagctcctgggatcgggagtcatcccggcccagcacccccagcatcccctgtgtatggccccccgtgcaccattccttgtctcattccccgaatgatcctgtccccgctggccccttcacgtgtccagtgtctttgaggcgatcttgtgcatgggtacctgagcgtcgaa

SEQ ID NO: 542291 - DNA, 182 bp, Homo sapiens
acatcatgtcttttactgtccatgggttaaggctctaacacggccctgtaaaaactgagtaagtgagatgtaagagacatgagccaagtgctaaatggaggaagagggtaatggcagggcctaggaagggcagtagccaggctgcccaggagttacgaaatcaccagggccgggaatctgaa

SEQ ID NO: 542292 - DNA, 845 bp, Homo sapiens
ggtgccccctcaataattacaatgaggggaaagttttgggcgatgtttcaaccgggcaattggccgaccaaactgtccacctattaggccacaaatggcgcccctataagacccaacgggtcccaacttcccgttggccggcccgaattgggaccgactctcgcttaaaggggacttgcatggcgaaaacgcggaaaagggatccaggtttccgcccaactggagctctacgtctcgatgggtacccccttggcgctctaggcattcgttgattgctgtgatcccaattggcttcctaacatgtcgcgaaccactcggcgcgtccgccctaaggctcacaaacggggggtaggccatgactagcgcggatcacacttccggggttattgtcctgaggcctcctctacgtttacagcccagtttctcgttgacgagcccgtgtaccgagcacggggacccatgagactcaacaacgccggatggtaggctgccctgctgaagtaccatccacgcacctcccgacctgggataggggacgggtgtccgtaccgggaaatcgaaggaataagccacgaggaccggagctgcgggtgttatctctaaagctgctatcctagtgtcgcgagtctagcgtggacgggtagacgcacctgaatattcttgggtgttggttgggatagagtcaggatcgtcagccataaagtgccagtttgcttagttctcactgtctcctggtatgttgctgcctgctcctggggatcgcacaggcagcgcagggtaggggagagggaggttcctcgcaggtctcacgcccggtacaggattaccgccagcagcctcctgga

SEQ ID NO: 542293 - DNA, 504 bp, Homo sapiens
tagactgtcgacaggtaggagtgcagtggcaggatctatggctcatatgcaacttctagcctcccaggctcaagcatcctcccacctcagcctccgagtagctgggactgcaggcctgctccaccgcgcatggctaataattgtatatttttgtagatacggggtattgccatgttgcccaggctcttagtgattatcttaatggtgtctggaaactcatactgttgcatcttggtaggcaaaagctgctgtatctgttaccttgacatattttaaaacccaatttctattctaaaataatgaaaccatcttttgctggcattaaattctctagctttagatccttcaccttcctttagcttaagttgtcatatgatgacctctttttcttgaatcatattagagtctataggtatagcctttcttaggttaaaaattggagacagtctcactttgtcacccaggctggagtgtaataatggcacagtcatgacacaccgccgc

SEQ ID NO: 542294 - DNA, 500 bp, Homo sapiens
tagaggatccatcggccgcctttttttcccctcatgcaactcacagcttgctatttatcctctccctgtactgcagaccggagtgttgagatcaaggcatctcagggctgtgctccctctggaggctctaggggaggatccttcctgcctctcccagctcctgggggctccgggtgtccctgggcttgtagccgcatcactccagtctctgcctccatctccacgtggccttctcctctgtgtgtctcctcttctgtctcttagaaggacacctgccattgcatttagggcccaccctactccaggatgatcccatctccagatccttcccagccaacatttctaagtcctttccttggccctctgcttccttagaacttgccccagaccccaaatcagggaggaagattggaacctgcctcctgtctccttgctggctggtcttgcaataaagtctttcttttctcaaaggcagtaccagggtatggcttccgtgtaca

SEQ ID NO: 542295 - DNA, 400 bp, Homo sapiens
gtcttccattagtgtgttgactcacaagcagcacttttaagatctctgatttgcccacacatttgtgtaatgtggtctcagacaaacctgcgcattttctccatagaggcgtataaatgtggatttactttgtcacgtggtttgccgttggtcactcgtggcccaatcctttccccaatactggcagctttgtggccaacgttctctgggaaagctaggccctcaattttagactcgataccatgtggcccgtgtatggcacaggaaggtagcattgttgtgaatgagatcttcatgagccttggggggagatacttccctctcccaatcgcagaggggcttgtgcgcttcacaggagatggttgctgcgcatttaataactgtgcctgcgcgcgtgccg

SEQ ID NO: 542296 - DNA, 795 bp, Homo sapiens
ggtgagtcccccactggctgctctgaaaagccatctttgcatgtgcctcatccgcctccttgctcgccgtagcgcctccgccgtgcgtcctcctccgccgaccgcggaatctgccggcgagcttatatcgctcgagagatccctggaactcttcgccggttgctgtgtttaaatccccctggcaattcggatcaccggggatgcccgcaccatgttcagacgtcaggcgcgtaggacactcagcgttccgaaagtcacctagcaatggacgttgaaaggcagaagcaagggcgagtcgtgggacagacggcaggaagacatgggattagatgaatcgccgccgtcgctatacgtggaagtgcgtacatgtgaggacaaacctgggcgagccagggaggcctgatcacttgacgcgtagcacgacagcacagaacggacagaacggctgggcgaggacagacggacggacggaagcacgaacggtgactggtgacggaacgcaggatggacgactgaacgatgaggaacgcgtgagtcagctaccgggcaaagcgggcagctgaagatgatgaggatgacgatgtcgaataccaaagaatgaaggaaagacggacgaggatgactaggacggcaagaacaggagaagttgaatatagaaaaaagaaaggggggatgggcatagttgaccgcgattccggtctcaggaactgtaggttggcgcctttgattgaggggcacgccggcaaccggggggtgcccgggaatatgggggttcacgcaacaaagctgggatgg

SEQ ID NO: 542297 - DNA, 236 bp, Homo sapiens
tattttttcagggtttttcccccaggccttttttgtccccaaggtttgggattgggcagtggccctttccccatggaggtgcctttcccaggaaaaaaaaccctgggcccaggcaggggccgtgcctttaaatttttctttccccccaaagggtgggtcccaggttttggcccccccccgggcttttggaattttccgtgaattattttttattaaaccaaaaatgtccaggggga

SEQ ID NO: 542298 - DNA, 689 bp, Homo sapiens
ggttgttggcccccccccctttttgaaaccgcggctaccacaattttaatatcacttaacaccctgttatggtatttacatatacaccacatatcgcagatttataggggtgagacacaccatatatgagaatcgttcgcacaaggagattccaccacacaggttgtgtgtatacacacaataatgccacagcgcgcctttgttataaaacacgcagccgcgcgccacacgtataacttatatatacacgcggttctctataagagttatacgcgagaggccctcgtgggtgtgtcgagaattttgcgcacaccagaggcctgagagagacgcacacagagatgggtctacaccacacgcacagcgctgtatactctggagagccacccccgcgcgtaaaatttctcgcgccacagaggtgtcttctcgcgctctttgttctcgtgtctctgttctcaaacccggcacccggtttgagatcccgggaaatatatggccctccaataatgtggccccccactggtttctcctccagtaaccccgaaaggaatatatctcggtttcacattataagttggagctaaaatgcgtctttcccttcacagaaggattatcccgggcgatttacctccatgtgaaaaccctgataatttttttggaaattaaattaacccatttggaaaaaccca

SEQ ID NO: 542299 - DNA, 673 bp, Homo sapiens
tgacttcccgtgctgggcttttccattgtccccctggcctccaggctcctcctctgcctctccatggagtgggtggggaggtggtgggggccggcgtcccctgcgtgtgtgtgtgtgtgtgtgtgtgtgtgtgtgatgtatagaccgtgtgtttcccaagaagagcaggtgccacggtcctgccccgtcgtgccgagcgcagaattccctgttctcctgtgtctactaacaaggacatgggggtgggcggtgactctccgtatcctctcagagctcagagggtcctcgcgtgccagcggtccccccctagccgcgtcatcaggccggtggacaagctccatcttccattcgctggttattagggcagaatccgatggagcagctgcttccagaaaggtcatctggtctgctgatgttataaaattacttccgctgtgtcgctgagcaagtcacgctgtgggttcccccccttctccgctgtgttccatccctttcgtgaggacggagcgctggagtcagcggcgtgggttgctggagttaaccccatcctttccgtagttaaccacctttgtgtgcactattttcattcttattttggtgtgttgtttttctccggtgtggtgtggttccctaaactttattataccttcttgttcccccttttttccctttt

SEQ ID NO: 542300 - DNA, 238 bp, Homo sapiens
gcgaaaccccgtctctgctaaaaatacaaaaattagtcggtgtggtggtgcatgcctataatcccagctactcgggagtctgaggtgagagaatctacttgaacccaggaggcagaggttgcagtgagctgagattgcaccactgcactccagcctgggtaacagagcaagattccctcaaaaaaaaaacaattattttaaaataacaggccaggcgcggtggctcacgcagttttcc

SEQ ID NO: 542301 - DNA, 213 bp, Homo sapiens
gacaggcagtagtcgaactgctttgccttattttattcctcgagtcagtcgaaacacaaatcctcaggacagcttggttcagaagacagtggttccagggttcccattagatccattcttgaggtgtgttgactgtataccccaagagacagtaacggggcatcttcagtcccaccactccagcacacacaggtcctgtgtggatgccaatgc

SEQ ID NO: 542302 - DNA, 8434 bp, Homo sapiens
actttagctctctggccggcgcctctgttgcccggaagggaggcaagcccccttagagttgccagtaacggacatggctgcggcccccggaggaggggacgtgaagtgaggagggggttgggaggggagaggacgcgggcgaggaagaccagccccggggccccgatgttgtgactgtgacagactcactggggtttgtacatgctggggaggagccttcctttcaggggtgaccacattcatctgggcatgcctgcagtactcttggcccatggacctgaaggagaagcacctgggcgagcctccctcagccctgggcctgtccacgcggaaggccctcagcgtcctgaaggagcagctggaggcagtgctggaaggacatctcagggagcggaagaagtgtctgacgtggaaggaggtgtggagaagcagcttcctccaccacagtaaccgctgctcctgcttccactggccgggggcctcactcatgctactggccgtgctgctgctgctgggctgctgcgggggacagccagccgggagccgtggggtggggctggtgaatgcctcggccttgttcctgttactgcttctcaaccttgtgctcatcgggcggcaagaccggctgaagcgtcgggaggtagagcggaggctgcgagggatcattgaccaaatccaagatgccctcagggatggcagggagatccagtggcccagtgccatgtatccagacctccacatgccttttgcgccatcctggtccttgcactgggcctacagagacggacacctggtcaacctgccagtcagcctgctggttgaaggagacatcatagctttgaggcctggccaggaatcgtttgcttctctgagggggatcaaggatgacgagcacatcgtcctggagccgggagacctcttcccccccttctcccctccaccctcaccccggggagaagtggagagagggccacagagcccccagcagcaccggcttttccgtgtccttgagacccctgtgattgacaacatcagatggtgcctggacatggccctgtcccgaccagtcactgccctggacatcgtgcgcctcattgatgggcttgtcaacgcctgcatccgctttgtctacttctctttggaggatgagctcaaaagcaaggtgtttgcagaaaaaatgggcctggagacaggctggaactgccacatctccctcacacccaatggtgacatgcctggctccgagatccccccctccagccccagccacgcaggctccctgcatgatgacctgaatcaggtgtcccgagatgatgcagaagggctcctcctcatggaggaggagggccactcggacctcatcagcttccagcctacggacagcgacatccccagcttcctggaggactccaaccgggccaagctgccccggggtatccaccaagtgcggccccacctgcagaacattgacaacgtgcccctgctagtgccccttttcaccgactgcaccccagagaccatgtgtgagatgataaagatcatgcaagagtacggggaggtgacctgctgcctgggcagctctgccaacctgcggaacagctgcctcttcctccagagcgacatcagcattgccctggatcccctgtacccatcccgttgctcctgggagacctttggctacgccaccagcatcagcatggcccaggcctcggatggcctttctcccctgcagctgtcagggcagctcaacagcctgccctgttccctgacctttcgccaggaggagaccatcagcatcatccggcttatcgaacaggctcggcatgccacctatggcatccgtaagtgcttcctcttcctgctgcagtgccagctgactcttgtggtcatccagttcctttcttgcctggtccagctgccgccactcctgagtaccaccgacatcctgtggctgtcctgcttttgctaccctctgctcagcatctctctgctggggaagcccccccatagctccatcatgtctatggcaacggggaaaaacctccagtccattcccaagaagacccagcactacttcctgctctgcttcctgctcaagttcagcctcaccatcagctcctgcctcatctgctttggcttcacactgcagagcttctgtgacagctcccgggaccgcaacctcaccaactgctcctccgtcatgctgcccagcaacgacgacagggctccagcctggtttgaggactttgccaatggactgctgtcggctcagaagctcacggccgccctgattgtcctgcacactgtcttcatttccatcacccatgtgcatcgcaccaagcccctgtggagaaagagccccttgaccaacctctggtgggccgtgacagtgcctgtggtgctgctgggtcaggtggtccagacggctgtggacctgcagctgtggacacacagggacagccacgtccactttggcctggaggacgtgcccctgctgacatggctcctgggctgcctgtccctggtccttgtggtggtgaccaatgagatcgtgaagctacatgagattcgggtccgagtccgctaccagaagcgacagaagctgcagtttgaaactaagctgggcatgaactctcccttctgagccactggctgtggtggctgtagttgcccccgtccctggggctaaagccagacccatttctgaacaggggagtttgtatcatgaatgtttccaggtttgctcctgcacccgtggcactggaaacccagctccccgtgtcagaccccgctgtcttcctgagccctggggctcactgtggaggagctgacggcctgggcccttggccagtcctggctcttccctgggcctcaccagggacactcttgaatgtatggcctcaggcgctccctagagggggcctaaaccccctcacctgtgagctaccccctttagggatcccttgcccccttggagatcccttgccccccagtgcctctgctcgtgggtccctggacacggccttgaagccaaccttctttggaggagcaacagcagcagccttggccgacgcgtccaactcccaaggctgccgtggagggcaggggggtggtgcttgcctggatgtggccccgagtgcctcccctccctccctctgtgggggagtctcccgcctgaacctgaagatggagcagggcccccgcttcgccctggagcctcttcctgtgcctggctcaagctggctgcctgtcagtcttggggaatctggcccaggtctcctcagcctctgccccagttctgggagaagtttctactggtgtatattttttactggaaatgagccttttaggaatgaatgtagactggtttgtattaaaatgtgtcaattgctaagaaatacctgtggctggtctgtaaggccactccagggtctgcccacccccggcggtggctggcaaagggaggcctaaaccttcctccatctacgcgggtgggtccctcaggtctggctcaggcgagacccctagggtcaggggtccccatgtcacagaggcaaacacacagcccagtcacgtggaatggtgttttcattggtgttagttgggggaagaggttaatggttacagagccagggcctgggccaatggggtcaggctctccctgccctcaggtgggcagtcggggctcctgctgtggtccgaagcccctcccccattgtgtcctctcaggcagttgatagaataaattccatttaaaatatatgcatttctctctgcttagaaaataacatttacaattgaaaagttaggacttgtgggatctgttaaccccactgcctcccacccctgctagccctgcctcagtgagggaaggcgggggcaggagctgcctgggcaccaccgctgtgtatttacatgtcctctgtacacctacggagagggggcccggccagacacacgcctcctccagcctctcagggcctgggcaggatggtgggtggcaagaggcattcccttggcacaacttgggacatgggctggggggtacagagaaagcacccccaaagccccacccctacttcctccctgaggagagagctcttaccagggtccctgtccaggagcagggctgtcctgctcaatcgatcaaaccctgggaggggctttgctgagatgcagcggaggtccctcgctagtcaggttctaaggtgggctgccccacaagagctgtggtgcccacagccgcgggctgagtgggaaggggccctgctaggaggggcacttcagcctgaccagcccttggcccgtccctagggtggcaggggcctcttctgtgctggggcaaaggcagtggacttcggcaggtcacagtgggcactgctggagggctcagtccagcatggcgtccagctggtcagccagggcgtcgaacatggtgctgatgtcatccagaatgtgcttggtggaggcgctgggggtgccctcttgctccttggtgccaatgctcttctctgcggctctcagtgcagctgccagggacgagctggtctgctccagtctctgctgggcctggcctgggcccacagtcccagtgctctcaggccgtggaggaggcactgggcgggggccgagccggggcgctagcttagggccagaaaatgccagctgggtgcaggccaccgacacaggcttgggggctgttcctgctccgggcaccttgaggagggcagcaggggcggccgggggttctgtctccccattccaccgactagctgctgagctttccagacctggccctgggcagggcggcactggaggctgcatggcggggctgggagcaaggggggttggaactccttgggctggaaggctgctgggctcgggctggggaaggctagaagctggaggagactcgccaggagttggggaaggcagtggggcagcggggccaggcgtggcactggccactccgaaggccagcagtgcggtctgcagtggctctctctcccggcacttgggcctccgcttaacagtgtctgattccgtgaggttgaaatcgaggccggggggcacgggtgtctctcggggcggggggccagcgggcttcgggcgctgtttgatggtcaggttcccttcctctgcaaacggcagcccttccccagagctgccccgagatgggggcgtcccctcagggcctggctcctcctcctccgtgtctgacgcgggcccagccggggcaggtgggccagggggctctgaggggccagcaggttcactcagtgttcgccttcggggccctgtggccccttccttgggccctgggctcccatctagtggaggtggctccgggctggggccagagacggagctgaggcgcttggggggcgggggcggggggcctttgcgccgggcccgcagggcaaaggactggctgcgaggagtcccccgagctggggttggggtcacgctaggactggtccggacaagggcactgcgtcctggccgccgggtaagggtagcataactgcctagggtgctgcccactggcccttcggcctccccctcagcatccccctctgtgggccaggcggcttaggctgtgggaccggcgcttaggtcgaggcgggtctgggggagtggcagggggcccggccaagtaggagaaggcccagggtgcgccaggaggtggccctggggccgggctagagggtgagccctgggggtacataaaaacatagggtgggggtccttggccaggaagtgaagaacaaagcttaggggccgctctgtgccctctgggaggttcctctcctggggggggctgggatctccaccgctgggctgtggggcaggctgttcctgtgagtggccagacccccgtgagcgtgccccgatgctctcctggctgggagagcgggcaggtgggagggggagtggttcagggccaccccctgccatggccgcctgtagctctgggcttagttcgctgccctggaaggtgaggagccgtgggccagctgtagctgggccttctccgttctccagtccctcgatggccatcagctccggacccttggccagccggcgcccgccttcgctgagggcctccccctgcagcaggccccgccgaagctccgccagccgcttcacccccagcatgagcttcttctgatgcccgagcttgttgaccccaatctcctgcagctcctcccaggtgaggtcggccaccagccccatggagtcgtagccgctgctcaccagctgcttgtggtactgtggcagccccagtgcacacagccactccagcaggtccgttgggatgtagctgggcagccactcggcgatgctgagctgagcgatctctgaggcgatcttcttcctgtgcccaggcttggtcaccccgatggccgtcaggtcctcaggtgtcatgcggctgatggtaggcacatcatagccggcctgcagaaagtgggcagtgtagccctccagctggaactcgcttagccagttatgaatggcctgcgcgtccttcccctccagcagctgttctggccgcacgtcctgggtgaagatctgctccccagagcggcagttggccagagggcggtggctcaggttgtctgccagggacggcgggtggagtcctggcagcacctggtcctctccagcagagggcagtggctgggcgttctcaatcaggaggccagggccatggccattagtgccctcagagctctgcccgctgccggcactgcggatgctgcccacgctgccctcactgcccacactattcctgtcacctgctgggctgtctgggctgaggcccacccgaggaagctggctgtaggtaagagggtgcgggggttcttcggcaggaggctgcggtgtccgggagaagcctgggcgcaggggggtgggtgcggaggggaggcgggctgcagggatgcccacccgcttgctgaccacctcgacaatgcccggggggaagtagcctatgcggtctgtgcccctctggctctcgtggatgtggcccttccagcggccgtcgggatgctgttctagcaccgtgatgacatcccctgcccggacattgagagcagtgggatcgtggaggttccagaaatccttgagcgctcggaccttcaggatccctgaggcctcccgcagtagctgcttgatttcccggctggcctgggaggtggtgaactgattcactatgtccagcgccgtctggttatacgtattccggatgttcacgtccacacctccctccagaagcagccgcaccacctcggtcttgccatacagtgcggcctcgtggagcgccgtacccgtcttggtctggcggttgatctcgatcccagctctcaggagctgcctgatgacttctctgtggccattcttggcagccaagtgcaggggcgtggtgtagttggggtcacacgggtctttggcctcaccctccagcagtgccacacataagtggctgttcagaagcagctgggccaccttgagtcggccaaattcacaggccaggtccaggggcgtcttcttggccttgttgaccaggcatgggttggactgatgctggaggagcatttctgacacctcataatgtccatactgtgcagccaggtgcagggggatctgtccgtccagcgaggcggcattgacagccgcagaggcgcgcagcagcagcctcacaggctccagccggccctgccaggctgcgtagtgcagcgggcgcatgccattgctgtccttgatgtcaacagtggcctgagcctctagcagcaaggctatgagctccaggctgccccccaaagcagcgtggtggagggcagagaatccatcagcatcctggtagttcacgttgagcctctttgtggagcccaggagctttgtcttgtggccttgaccttcgccaccagtttctgcacaccggtcacatctccattcttgacggcgaggatcaggtcctgttcacgacccatactggctcctgggctgagctctacactcaggagtccagggcaaaggcaggcaacgggtccaagctggggcgtcagggcgccatgccacagccccttggagggctcccggttccgggggagcaagtctggtgtcccaggcagtgggctcctcgtcaggtactgagggatactcccaaaggtgctccgtgaactgccaccacacgaaggaaagctaatctttgagggggtgaaggctacatggaaatctggatggatatcagcttgtggcttccgacagctccaggatgggctgggactgggcacaccaatcttcccggcttggctgtggaacaccagtgcccacccagagagcagccagcattcccttgggcctcaggcagcagcggtgcactggtctcagggctctctcccgccgcccgccgggtccggctgcctgctcg

SEQ ID NO: 542303 - DNA, 8371 bp, Homo sapiens
tcccttcgtctaagaacaactggcattaatagtccatacaagcagactatggagcccaagaaggacaggaagcggatttcaggactgtgagcgggtggtaagaggacccagcctgggatggagagcgacccctacgaagcagaggactttgtgtgtgactaccacctggagatgctgagcctgtcccaggaccagcagaacccctcctgcatccagtttgatgactccaactggcagctgcacctcacctccctcaaacccctgggcctcaatgtgctgctgaacctgtgtgatgccagcgtcaccgagcgcctgtgccgattctccgaccacctgtgcaacattgccctgcaagagagccacagcgccgtgctgcccgtccatgtgccctggggcctctgcgagcttgcccgcctcattggcttcactcctggggccaaggagcttttcaagcaggagaaccatctggcgctgtaccgcctccccagtgccgagacaatgaaggagacatcgctggggcggctctcctgtgtcaccaagcggcggcctcccctcagccacatagatcagcctcttcattaaagacaccaccaccagcacagagcagatgctgtcccatggcaccgctgatgtggtcttagaggcctgcacagacttctgggacggagctgacatctaccctctctcgggatctgacagaaagaaagtgctggacttctaccagcgagcctgcctgtctgggtattgctctgccttcgcctacaagcccatgaactgcgccctgtcctctcagctcaatggcaagtgcatcgagctggtacaggtgcccggccaaagcagcatcttcaccatgtgcgagctgcccagcaccatccccatcaagcagaacgcccgccgcagcagctggagctctgacgaagggatcggggaggtgctggagaaggaagactgcatgcaggccctgagcggccagatcttcatgggcatggtgtcctcccagtaccaggcccggctggacatcgtgcgcctcattgatgggcttgtcaacgcctgcatccgctttgtctacttctctttggaggatgagctcaaaagcaaggtgtttgcagaaaaaatgggcctggagacaggctggaactgccacatctccctcacacccaatggtgacatgcctggctccgagatccccccctccagccccagccacgcaggctccctgcatgatgacctgaatcaggtgtcccgagatgatgcagaagggctcctcctcatggaggaggagggccactcggacctcatcagcttccagcctacggacagcgacatccccagcttcctggaggactccaaccgggccaagctgccccggggtatccaccaagtgcggccccacctgcagaacattgacaacgtgcccctgctagtgccccttttcaccgactgcaccccagagaccatgtgtgagatgataaagatcatgcaagagtacggggaggtgacctgctgcctgggcagctctgccaacctgcggaacagctgcctcttcctccagagcgacatcagcattgccctggatcccctgtacccatcccgttgctcctgggagacctttggctacgccaccagcatcagcatggcccaggcctcggatggcctttctcccctgcagctgtcagggcagctcaacagcctgccctgttccctgacctttcgccaggaggagaccatcagcatcatccggcttatcgaacaggctcggcatgccacctatggcatccgtaagtgcttcctcttcctgctgcagtgccagctgactcttgtggtcatccagttcctttcttgcctggtccagctgccgccactcctgagtaccaccgacatcctgtggctgtcctgcttttgctaccctctgctcagcatctctctgctggggaagcccccccatagctccatcatgtctatggcaacggggaaaaacctccagtccattcccaagaagacccagcactacttcctgctctgcttcctgctcaagttcagcctcaccatcagctcctgcctcatctgctttggcttcacactgcagagcttctgtgacagctcccgggaccgcaacctcaccaactgctcctccgtcatgctgcccagcaacgacgacagggctccagcctggtttgaggactttgccaatggactgctgtcggctcagaagctcacggccgccctgattgtcctgcacactgtcttcatttccatcacccatgtgcatcgcaccaagcccctgtggagaaagagccccttgaccaacctctggtgggccgtgacagtgcctgtggtgctgctgggtcaggtggtccagacggctgtggacctgcagctgtggacacacagggacagccacgtccactttggcctggaggacgtgcccctgctgacatggctcctgggctgcctgtccctggtccttgtggtggtgaccaatgagatcgtgaagctacatgagattcgggtccgagtccgctaccagaagcgacagaagctgcagtttgaaactaagctgggcatgaactctcccttctgagccactggctgtggtggctgtagttgcccccgtccctggggctaaagccagacccatttctgaacaggggagtttgtatcatgaatgtttccaggtttgctcctgcacccgtggcactggaaacccagctccccgtgtcagaccccgctgtcttcctgagccctggggctcactgtggaggagctgacggcctgggcccttggccagtcctggctcttccctgggcctcaccagggacactcttgaatgtatggcctcaggcgctccctagagggggcctaaaccccctcacctgtgagctaccccctttagggatcccttgcccccttggagatcccttgccccccagtgcctctgctcgtgggtccctggacacggccttgaagccaaccttctttggaggagcaacagcagcagccttggccgacgcgtccaactcccaaggctgccgtggagggcaggggggtggtgcttgcctggatgtggccccgagtgcctcccctccctccctctgtgggggagtctcccgcctgaacctgaagatggagcagggcccccgcttcgccctggagcctcttcctgtgcctggctcaagctggctgcctgtcagtcttggggaatctggcccaggtctcctcagcctctgccccagttctgggagaagtttctactggtgtatattttttactggaaatgagccttttaggaatgaatgtagactggtttgtattaaaatgtgtcaattgctaagaaatacctgtggctggtctgtaaggccactccagggtctgcccacccccggcggtggctggcaaagggaggcctaaaccttcctccatctacgcgggtgggtccctcaggtctggctcaggcgagacccctagggtcaggggtccccatgtcacagaggcaaacacacagcccagtcacgtggaatggtgttttcattggtgttagttgggggaagaggttaatggttacagagccagggcctgggccaatggggtcaggctctccctgccctcaggtgggcagtcggggctcctgctgtggtccgaagcccctcccccattgtgtcctctcaggcagttgatagaataaattccatttaaaatatatgcatttctctctgcttagaaaataacatttacaattgaaaagttaggacttgtgggatctgttaaccccactgcctcccacccctgctagccctgcctcagtgagggaaggcgggggcaggagctgcctgggcaccaccgctgtgtatttacatgtcctctgtacacctacggagagggggcccggccagacacacgcctcctccagcctctcagggcctgggcaggatggtgggtggcaagaggcattcccttggcacaacttgggacatgggctggggggtacagagaaagcacccccaaagccccacccctacttcctccctgaggagagagctcttaccagggtccctgtccaggagcagggctgtcctgctcaatcgatcaaaccctgggaggggctttgctgagatgcagcggaggtccctcgctagtcaggttctaaggtgggctgccccacaagagctgtggtgcccacagccgcgggctgagtgggaaggggccctgctaggaggggcacttcagcctgaccagcccttggcccgtccctagggtggcaggggcctcttctgtgctggggcaaaggcagtggacttcggcaggtcacagtgggcactgctggagggctcagtccagcatggcgtccagctggtcagccagggcgtcgaacatggtgctgatgtcatccagaatgtgcttggtggaggcgctgggggtgccctcttgctccttggtgccaatgctcttctctgcggctctcagtgcagctgccagggacgagctggtctgctccagtctctgctgggcctggcctgggcccacagtcccagtgctctcaggccgtggaggaggcactgggcgggggccgagccggggcgctagcttagggccagaaaatgccagctgggtgcaggccaccgacacaggcttgggggctgttcctgctccgggcaccttgaggagggcagcaggggcggccgggggttctgtctccccattccaccgactagctgctgagctttccagacctggccctgggcagggcggcactggaggctgcatggcggggctgggagcaaggggggttggaactccttgggctggaaggctgctgggctcgggctggggaaggctagaagctggaggagactcgccaggagttggggaaggcagtggggcagcggggccaggcgtggcactggccactccgaaggccagcagtgcggtctgcagtggctctctctcccggcacttgggcctccgcttaacagtgtctgattccgtgaggttgaaatcgaggccggggggcacgggtgtctctcggggcggggggccagcgggcttcgggcgctgtttgatggtcaggttcccttcctctgcaaacggcagcccttccccagagctgccccgagatgggggcgtcccctcagggcctggctcctcctcctccgtgtctgacgcgggcccagccggggcaggtgggccagggggctctgaggggccagcaggttcactcagtgttcgccttcggggccctgtggccccttccttgggccctgggctcccatctagtggaggtggctccgggctggggccagagacggagctgaggcgcttggggggcgggggcggggggcctttgcgccgggcccgcagggcaaaggactggctgcgaggagtcccccgagctggggttggggtcacgctaggactggtccggacaagggcactgcgtcctggccgccgggtaagggtagcataactgcctagggtgctgcccactggcccttcggcctccccctcagcatccccctctgtgggccaggcggcttaggctgtgggaccggcgcttaggtcgaggcgggtctgggggagtggcagggggcccggccaagtaggagaaggcccagggtgcgccaggaggtggccctggggccgggctagagggtgagccctgggggtacataaaaacatagggtgggggtccttggccaggaagtgaagaacaaagcttaggggccgctctgtgccctctgggaggttcctctcctggggggggctgggatctccaccgctgggctgtggggcaggctgttcctgtgagtggccagacccccgtgagcgtgccccgatgctctcctggctgggagagcgggcaggtgggagggggagtggttcagggccaccccctgccatggccgcctgtagctctgggcttagttcgctgccctggaaggtgaggagccgtgggccagctgtagctgggccttctccgttctccagtccctcgatggccatcagctccggacccttggccagccggcgcccgccttcgctgagggcctccccctgcagcaggccccgccgaagctccgccagccgcttcacccccagcatgagcttcttctgatgcccgagcttgttgaccccaatctcctgcagctcctcccaggtgaggtcggccaccagccccatggagtcgtagccgctgctcaccagctgcttgtggtactgtggcagccccagtgcacacagccactccagcaggtccgttgggatgtagctgggcagccactcggcgatgctgagctgagcgatctctgaggcgatcttcttcctgtgcccaggcttggtcaccccgatggccgtcaggtcctcaggtgtcatgcggctgatggtaggcacatcatagccggcctgcagaaagtgggcagtgtagccctccagctggaactcgcttagccagttatgaatggcctgcgcgtccttcccctccagcagctgttctggccgcacgtcctgggtgaagatctgctccccagagcggcagttggccagagggcggtggctcaggttgtctgccagggacggcgggtggagtcctggcagcacctggtcctctccagcagagggcagtggctgggcgttctcaatcaggaggccagggccatggccattagtgccctcagagctctgcccgctgccggcactgcggatgctgcccacgctgccctcactgcccacactattcctgtcacctgctgggctgtctgggctgaggcccacccgaggaagctggctgtaggtaagagggtgcgggggttcttcggcaggaggctgcggtgtccgggagaagcctgggcgcaggggggtgggtgcggaggggaggcgggctgcagggatgcccacccgcttgctgaccacctcgacaatgcccggggggaagtagcctatgcggtctgtgcccctctggctctcgtggatgtggcccttccagcggccgtcgggatgctgttctagcaccgtgatgacatcccctgcccggacattgagagcagtgggatcgtggaggttccagaaatccttgagcgctcggaccttcaggatccctgaggcctcccgcagtagctgcttgatttcccggctggcctgggaggtggtgaactgattcactatgtccagcgccgtctggttatacgtattccggatgttcacgtccacacctccctccagaagcagccgcaccacctcggtcttgccatacagtgcggcctcgtggagcgccgtacccgtcttggtctggcggttgatctcgatcccagctctcaggagctgcctgatgacttctctgtggccattcttggcagccaagtgcaggggcgtggtgtagttggggtcacacgggtctttggcctcaccctccagcagtgccacacataagtggctgttcagaagcagctgggccaccttgagtcggccaaattcacaggccaggtccaggggcgtcttcttggccttgttgaccaggcatgggttggactgatgctggaggagcatttctgacacctcataatgtccatactgtgcagccaggtgcagggggatctgtccgtccagcgaggcggcattgacagccgcagaggcgcgcagcagcagcctcacaggctccagccggccctgccaggctgcgtagtgcagcgggcgcatgccattgctgtccttgatgtcaacagtggcctgagcctctagcagcaaggctatgagctccaggctgccccccaaagcagcgtggtggagggcagagaatccatcagcatcctggtagttcacgttgagcctctttgtggagcccaggagctttgtcttgtggccttgaccttcgccaccagtttctgcacaccggtcacatctccattcttgacggcgaggatcaggtcctgttcacgacccatactggctcctgggctgagctctacactcaggagtccagggcaaaggcaggcaacgggtccaagctggggcgtcagggcgccatgccacagccccttggagggctcccggttccgggggagcaagtctggtgtcccaggcagtgggctcctcgtcaggtactgagggatactcccaaaggtgctccgtgaactgccaccacacgaaggaaagctaatctttgagggggtgaaggctacatggaaatctggatggatatcagcttgtggcttccgacagctccaggatgggctgggactgggcacaccaatcttcccggcttggctgtggaacaccagtgcccacccagagagcagccagcattcccttgggcctcaggcagcagcggtgcactggtctcagggctctctcccgccgcccgccgggtccggctgcctgctcg

SEQ ID NO: 542304 - DNA, 281 bp, Homo sapiens
atgcgatcgtgtggaggagctgaacagagctggaactggagcagaacggatccatgagccgagccgacttcgaggaaagggacgagtcgaagattcctgaaggcagagctctgacaggcggtgcccgccaatgctgcataggacctgggatgctgctggagctgaatcggatgccaccaaggctcggtccagcccagtaccgctggaaagtgaataaactccggaggggtcgcacgggacctgggctctctccacgaattctggcttgtatgccccaagga

SEQ ID NO: 542305 - DNA, 9835 bp, Homo sapiens
  misc_feature (7607)..(7607): n is a, c, g, or t
  misc_feature (7611)..(7612): n is a, c, g, or t
  misc_feature (7614)..(7614): n is a, c, g, or t
actttagctctctggccggcgcctctgttgcccggaagggaggcaagcccccttagagttgccagtaacggacatggctgcggcccccggaggaggggacgtgaagtgaggagggggttgggaggggagaggacgcgggcgaggaagaccagccccggggccccgatgttgtgactgtgacagactcactggggtttgtacatgctggggaggagccttcctttcaggggtgaccacattcatctgggcatgcctgcagtactcttggcccatggacctgaaggagaagcacctgggcgagcctccctcagccctgggcctgtccacgcggaaggccctcagcgtcctgaaggagcagctggaggcagtgctggaaggacatctcagggagcggaagaagtgtctgacgtggaaggaggtgtggagaagcagcttcctccaccacagtaaccgctgctcctgcttccactggccgggggcctcactcatgctactggccgtgctgctgctgctgggctgctgcgggggacagccagccgggagccgtggggtggggctggtgaatgcctcggccttgttcctgttactgcttctcaaccttgtgctcatcgggcggcaagaccggctgaagcgtcgggaggtagagcggaggctgcgagggatcattgaccaaatccaagatgccctcagggatggcagggagatccagtggcccagtgccatgtatccagacctccacatgccttttgcgccatcctggtccttgcactgggcctacagagacggacacctggtcaacctgccagtcagcctgctggttgaaggagacatcatagctttgaggcctggccaggaatcgtttgcttctctgagggggatcaaggatgacgagcacatcgtcctggagccgggagacctcttcccccccttctcccctccaccctcaccccggggagaagtggagagagggccacagagcccccagcagcaccggcttttccgtgtccttgagacccctgtgattgacaacatcagatggtgcctggacatggccctgtcccgaccagtcactgccctggacaatgagcggttcacagtgcagtcggtgatgctacactatgctgtgcccgtggtcctggccggcttcctcatcaccaatgccctgcgcttcatcttcagtgccccgggggtcacttcctggcagtacaccctcctccagctccaggtgaatggcgtcctgcccatcctccccctgctctttccagtcctctgggttctggcaactgcctgtggagaggcccgtgtcctggcccagatgagcaaggcctcacccagctccctgctggctaagttctcagaggatactctcagcagctatacggaggctgtctcctctcaggaaatgctgcgctgcatttggggccacttcctgagggtgctcggggggacatcgccaacgctgagccacagttccagcctgctgcacagcctgggctctgtcacggtcctgtgctgtgtggacaaacaggggatcctgtcatggccaaatcccagcccagagactgtactgttcttcagcgggaaggtggagccccctcacagcagccatgaggacctcaccgatggcctatccacccgctccttctgccatcccgagccccatgaacgagacgccctcctggctggctccctgaacaacaccctgcacctttccaatgagcaggagcgtggcgactggcctggcgaggctcccaagccccccgagccctattcacaccacaaagcgcatggccgcagcaaacacccatctggctccaacgtgagcttcagcagggacaccgagggtggtgaagaagagcccagcaagacccagcctgggatggagagcgacccctacgaagcagaggactttgtgtgtgactaccacctggagatgctgagcctgtcccaggaccagcagaacccctcctgcatccagtttgatgactccaactggcagctgcacctcacctccctcaaacccctgggcctcaatgtgctgctgaacctgtgtgatgccagcgtcaccgagcgcctgtgccgattctccgaccacctgtgcaacattgccctgcaagagagccacagcgccgtgctgcccgtccatgtgccctggggcctctgcgagcttgcccgcctcattggcttcactcctggggccaaggagcttttcaagcaggagaaccatctggcgctgtaccgcctccccagtgccgagacaatgaaggagacatcgctggggcggctctcctgtgtcaccaagcggcggcctcccctcagccacatagatcagcctcttcattaaagacaccaccaccagcacagagcagatgctgtcccatggcaccgctgatgtggtcttagaggcctgcacagacttctgggacggagctgacatctaccctctctcgggatctgacagaaagaaagtgctggacttctaccagcgagcctgcctgtctgggtattgctctgccttcgcctacaagcccatgaactgcgccctgtcctctcagctcaatggcaagtgcatcgagctggtacaggtgcccggccaaagcagcatcttcaccatgtgcgagctgcccagcaccatccccatcaagcagaacgcccgccgcagcagctggagctctgacgaagggatcggggaggtgctggagaaggaagactgcatgcaggccctgagcggccagatcttcatgggcatggtgtcctcccagtaccaggcccggctggacatcgtgcgcctcattgatgggcttgtcaacgcctgcatccgctttgtctacttctctttggaggatgagctcaaaagcaaggtgtttgcagaaaaaatgggcctggagacaggctggaactgccacatctccctcacacccaatggtgacatgcctggctccgagatccccccctccagccccagccacgcaggctccctgcatgatgacctgaatcaggtgtcccgagatgatgcagaagggctcctcctcatggaggaggagggccactcggacctcatcagcttccagcctacggacagcgacatccccagcttcctggaggactccaaccgggccaagctgccccggggtatccaccaagtgcggccccacctgcagaacattgacaacgtgcccctgctagtgccccttttcaccgactgcaccccagagaccatgtgtgagatgataaagatcatgcaagagtacggggaggtgacctgctgcctgggcagctctgccaacctgcggaacagctgcctcttcctccagagcgacatcagcattgccctggatcccctgtacccatcccgttgctcctgggagacctttggctacgccaccagcatcagcatggcccaggcctcggatggcctttctcccctgcagctgtcagggcagctcaacagcctgccctgttccctgacctttcgccaggaggagaccatcagcatcatccggcttatcgaacaggctcggcatgccacctatggcatccgtaagtgcttcctcttcctgctgcagtgccagctgactcttgtggtcatccagttcctttcttgcctggtccagctgccgccactcctgagtaccaccgacatcctgtggctgtcctgcttttgctaccctctgctcagcatctctctgctggggaagcccccccatagctccatcatgtctatggcaacggggaaaaacctccagtccattcccaagaagacccagcactacttcctgctctgcttcctgctcaagttcagcctcaccatcagctcctgcctcatctgctttggcttcacactgcagagcttctgtgacagctcccgggaccgcaacctcaccaactgctcctccgtcatgctgcccagcaacgacgacagggctccagcctggtttgaggactttgccaatggactgctgtcggctcagaagctcacggccgccctgattgtcctgcacactgtcttcatttccatcacccatgtgcatcgcaccaagcccctgtggagaaagagccccttgaccaacctctggtgggccgtgacagtgcctgtggtgctgctgggtcaggtggtccagacggctgtggacctgcagctgtggacacacagggacagccacgtccactttggcctggaggacgtgcccctgctgacatggctcctgggctgcctgtccctggtccttgtggtggtgaccaatgagatcgtgaagctacatgagattcgggtccgagtccgctaccagaagcgacagaagctgcagtttgaaactaagctgggcatgaactctcccttctgagccactggctgtggtggctgtagttgcccccgtccctggggctaaagccagacccatttctgaacaggggagtttgtatcatgaatgtttccaggtttgctcctgcacccgtggcactggaaacccagctccccgtgtcagaccccgctgtcttcctgagccctggggctcactgtggaggagctgacggcctgggcccttggccagtcctggctcttccctgggcctcaccagggacactcttgaatgtatggcctcaggcgctccctagagggggcctaaaccccctcacctgtgagctaccccctttagggatcccttgcccccttggagatcccttgccccccagtgcctctgctcgtgggtccctggacacggccttgaagccaaccttctttggaggagcaacagcagcagccttggccgacgcgtccaactcccaaggctgccgtggagggcaggggggtggtgcttgcctggatgtggccccgagtgcctcccctccctccctctgtgggggagtctcccgcctgaacctgaagatggagcagggcccccgcttcgccctggagcctcttcctgtgcctggctcaagctggctgcctgtcagtcttggggaatctggcccaggtctcctcagcctctgccccagttctgggagaagtttctactggtgtatattttttactggaaatgagccttttaggaatgaatgtagactggtttgtattaaaatgtgtcaattgctaagaaatacctgtggctggtctgtaaggccactccagggtctgcccacccccggcggtggctggcaaagggaggcctaaaccttcctccatctacgcgggtgggtccctcaggtctggctcaggcgagacccctagggtcaggggtccccatgtcacagaggcaaacacacagcccagtcacgtggaatggtgttttcattggtgttagttgggggaagaggttaatggttacagagccagggcctgggccaatggggtcaggctctccctgccctcaggtgggcagtcggggctcctgctgtggtccgaagcccctcccccattgtgtcctctcaggcagttgatagaataaattccatttaaaatatatgcatttctctctgcttagaaaataacatttacaattgaaaagttaggacttgtgggatctgttaaccccactgcctcccacccctgctagccctgcctcagtgagggaaggcgggggcaggagctgcctgggcaccaccgctgtgtatttacatgtcctctgtacacctacggagagggggcccggccagacacacgcctcctccagcctctcagggcctgggcaggatggtgggtggcaagaggcattcccttggcacaacttgggacatgggctggggggtacagagaaagcacccccaaagccccacccctacttcctccctgaggagagagctcttaccagggtccctgtccaggagcagggctgtcctgctcaatcgatcaaaccctgggaggggctttgctgagatgcagcggaggtccctcgctagtcaggttctaaggtgggctgccccacaagagctgtggtgcccacagccgcgggctgagtgggaaggggccctgctaggaggggcacttcagcctgaccagcccttggcccgtccctagggtggcaggggcctcttctgtgctggggcaaaggcagtggacttcggcaggtcacagtgggcactgctggagggctcagtccagcatggcgtccagctggtcagccagggcgtcgaacatggtgctgatgtcatccagaatgtgcttggtggaggcgctgggggtgccctcttgctccttggtgccaatgctcttctctgcggctctcagtgcagctgccagggacgagctggtctgctccagtctctgctgggcctggcctgggcccacagtcccagtgctctcaggccgtggaggaggcactgggcgggggccgagccggggcgctagcttagggccagaaaatgccagctgggtgcaggccaccgacacaggcttgggggctgttcctgctccgggcaccttgaggagggcagcaggggcggccgggggttctgtctccccattccaccgactagctgctgagctttccagacctggccctgggcagggcggcactggaggctgcatggcggggctgggagcaaggggggttggaactccttgggctggaaggctgctgggctcgggctggggaaggctagaagctggaggagactcgccaggagttggggaaggcagtggggcagcggggccaggcgtggcactggccactccgaaggccagcagtgcggtctgcagtggctctctctcccggcacttgggcctccgcttaacagtgtctgattccgtgaggttgaaatcgaggccggggggcacgggtgtctctcggggcggggggccagcgggcttcgggcgctgtttgatggtcaggttcccttcctctgcaaacggcagcccttccccagagctgccccgagatgggggcgtcccctcagggcctggctcctcctcctccgtgtctgacgcgggcccagccggggcaggtgggccagggggctctgaggggccagcaggttcactcagtgttcgccttcggggccctgtggccccttccttgggccctgggctcccatctagtggaggtggctccgggctggggccagagacggagctgaggcgcttggggggcgggggcggggggcctttgcgccgggcccgcagggcaaaggactggctgcgaggagtcccccgagctggggttggggtcacgctaggactggtccggacaagggcactgcgtcctggccgccgggtaagggtagcataactgcctagggtgctgcccactggcccttcggcctccccctcagcatccccctctgtggggccagctgtagctgggccttctccgttctccagtccctcgatggccatcagctccggacccttggccagccggcgcccgccttcgctgagggcctccccctgcagcaggccccgccgaagctccgccagccgcttcacccccagcatgagcttcttctgatgcccgagcttgttgaccccaatctcctgcagctcctcccaggtgaggtcggccaccagccccatggagtcgtagccgctgctcaccagctgcttgtggtactgtggcagccccagtgcacacagccactccagcaggtccgtctggaagagcaccgtcctcagnacanntnccagccagcctccgcccccagccagaggagaaaaggcaccgcaaagccacagctgagggcgacagcacgtgccccactccccagccacccttgatggctcactgggatgtagctgggcagccactcggcgatgctgagctgagcgatctctgaggcgatcttcttcctgtgcccaggcttggtcaccccgatggccgtcaggtcctcaggtgtcatgcggctgatggtaggcacatcatagccggcctgcagaaagtgggcagtgtagccctccagctggaactcgcttagccagttatgaatggcctgcgcgtccttcccctccagcagctgttctggccgcacgtcctgggtgaagatctgctccccagagcggcagttggccagagggcggtggctcaggttgtctgccagggacggcgggtggagtcctggcagcacctggtcctctccagcagagggcagtggctgggcgttctcaatcaggaggccagggccatggccattagtgccctcagagctctgcccgctgccggcactgcggatgctgcccacgctgccctcactgcccacactattcctgtcacctgctgggctgtctgggctgaggcccacccgaggaagctggctgtaggtaagagggtgcgggggttcttcggcaggaggctgcggtgtccgggagaagcctgggcgcaggggggtgggtgcggaggggaggcgggctgcagggatgcccacccgcttgctgaccacctcgacaatgcccggggggaagtagcctatgcggtctgtgcccctctggctctcgtggatgtggcccttccagcggccgtcgggatgctgttctagcaccgtgatgacatcccctgcccggacattgagagcagtgggatcgtggaggttccagaaatccttgagcgctcggaccttcaggatccctgaggcctcccgcagtagctgcttgatttcccggctggcctgggaggtggtgaactgattcactatgtccagcgccgtctggttatacgtattccggatgttcacgtccacacctccctccagaagcagccgcaccacctcggtcttgccatacagtgcggcctcgtggagcgccgtacccgtcttggtctggcggttgatctcgatcccagctctcaggagctgcctgatgacttctctgtggccattcttggcagccaagtgcaggggcgtggtgtagttggggtcacacgggtctttggcctcaccctccagcagtgccacacataagtggctgttcagaagcagctgggccaccttgagtcggccaaattcacaggccaggtccaggggcgtcttcttggccttgttgaccaggcatgggttggactgatgctggaggagcatttctgacacctcataatgtccatactgtgcagccaggtgcagggggatctgtccgtccagcgaggcggcattgacagccgcagaggcgcgcagcagcagcctcacaggctccagccggccctgccaggctgcgtagtgcagcgggcgcatgccattgctgtccttgatgtcaacagtggcctgagcctctagcagcaaggctatgagctccaggctgccccccaaagcagcgtggtggagggcagagaatccatcagcatcctggtagttcacgttgagcctctttgtggagcccaggagctttgtcttgtggccttgaccttcgccaccagtttctgcacaccggtcacatctccattcttgacggcgaggatcaggtcctgttcacgacccatactggctcctgggctgagctctacactcaggagtccagggcaaaggcaggcaacgggtccaagctggggcgtcagggcgccatgccacagccccttggagggctcccggttccgggggagcaagtctggtgtcccaggcagtgggctcctcgtcaggtactgagggatactcccaaaggtgctccgtgaactgccaccacacgaaggaaagctaatctttgagggggtgaaggctacatggaaatctggatggatatcagcttgtggcttccgacagctccaggatgggctgggactgggcacaccaatcttcccggcttggctgtggaacaccagtgcccacccagagagcagccagcattcccttgggcctcaggcagcagcggtgcactggtctcagggctctctcccgccgcccgccgggtccggctgcctgctcg

SEQ ID NO: 542306 - DNA, 412 bp, Homo sapiens
aatgtctctgcctagctaaaacacgtgcggatactatacagccatgaaaaagaatgaaatgatgtcctttagaggaacatggattcatctggagaccatcatcctaagtgaattaacagagggacagaaaaccaaataccacatgttctcatttataaatgagagctaaacattgagtacaggtgaacataaaaacaggtactacagacactggggactactggagagggtagaagggaagaggggaatggaccgaaaaactacccatcaggtactatgctctctcctgggcaacagggccatccatacccaaattcttagcatcacataatatacccatgtaacaaacctgcacttggaccccctgagtctataataaaattggaaattattttaaaaagaaaaagaaaaa

SEQ ID NO: 542307 - DNA, 87 bp, Homo sapiens
  misc_feature (45)..(45): n is a, c, g, or t
caacacccactacctaaaaaataccaaacatatgactgaactccncacacccaataggaccaatctatcaccctatagacagatcta

SEQ ID NO: 542308 - DNA, 10067 bp, Homo sapiens
actttagctctctggccggcgcctctgttgcccggaagggaggcaagcccccttagagttgccagtaacggacatggctgcggcccccggaggaggggacgtgaagtgaggagggggttgggaggggagaggacgcgggcgaggaagaccagccccggggccccgatgttgtgactgtgacagactcactggggtttgtacatgctggggaggagccttcctttcaggggtgaccacattcatctgggcatgcctgcagtactcttggcccatggacctgaaggagaagcacctgggcgagcctccctcagccctgggcctgtccacgcggaaggccctcagcgtcctgaaggagcagctggaggcagtgctggaaggacatctcagggagcggaagaagtgtctgacgtggaaggaggtgtggagaagcagcttcctccaccacagtaaccgctgctcctgcttccactggccgggggcctcactcatgctactggccgtgctgctgctgctgggctgctgcgggggacagccagccgggagccgtggggtggggctggtgaatgcctcggccttgttcctgttactgcttctcaaccttgtgctcatcgggcggcaagaccggctgaagcgtcgggaggtagagcggaggctgcgagggatcattgaccaaatccaagatgccctcagggatggcagggagatccagtggcccagtgccatgtatccagacctccacatgccttttgcgccatcctggtccttgcactgggcctacagagacggacacctggtcaacctgccagtcagcctgctggttgaaggagacatcatagctttgaggcctggccaggaatcgtttgcttctctgagggggatcaaggatgacgagcacatcgtcctggagccgggagacctcttcccccccttctcccctccaccctcaccccggggagaagtggagagagggccacagagcccccagcagcaccggcttttccgtgtccttgagacccctgtgattgacaacatcagatggtgcctggacatggccctgtcccgaccagtcactgccctggacaatgagcggttcacagtgcagtcggtgatgctacactatgctgtgcccgtggtcctggccggcttcctcatcaccaatgccctgcgcttcatcttcagtgccccgggggtcacttcctggcagtacaccctcctccagctccaggtgaatggcgtcctgcccatcctccccctgctctttccagtcctctgggttctggcaactgcctgtggagaggcccgtgtcctggcccagatgagcaaggcctcacccagctccctgctggctaagttctcagaggatactctcagcagctatacggaggctgtctcctctcaggaaatgctgcgctgcatttggggccacttcctgagggtgctcggggggacatcgccaacgctgagccacagttccagcctgctgcacagcctgggctctgtcacggtcctgtgctgtgtggacaaacaggggatcctgtcatggccaaatcccagcccagagactgtactgttcttcagcgggaaggtggagccccctcacagcagccatgaggacctcaccgatggcctatccacccgctccttctgccatcccgagccccatgaacgagacgccctcctggctggctccctgaacaacaccctgcacctttccaatgagcaggagcgtggcgactggcctggcgaggctcccaagccccccgagccctattcacaccacaaagcgcatggccgcagcaaacacccatctggctccaacgtgagcttcagcagggacaccgagggtggtgaagaagagcccagcaagacccagcctgggatggagagcgacccctacgaagcagaggactttgtgtgtgactaccacctggagatgctgagcctgtcccaggaccagcagaacccctcctgcatccagtttgatgactccaactggcagctgcacctcacctccctcaaacccctgggcctcaatgtgctgctgaacctgtgtgatgccagcgtcaccgagcgcctgtgccgattctccgaccacctgtgcaacattgccctgcaagagagccacagcgccgtgctgcccgtccatgtgccctggggcctctgcgagcttgcccgcctcattggcttcactcctggggccaaggagcttttcaagcaggagaaccatctggcgctgtaccgcctccccagtgccgagacaatgaaggagacatcgctggggcggctctcctgtgtcaccaagcggcggcctcccctcagccacatagatcagcctcttcattaaagacaccaccaccagcacagagcagatgctgtcccatggcaccgctgatgtggtcttagaggcctgcacagacttctgggacggagctgacatctaccctctctcgggatctgacagaaagaaagtgctggacttctaccagcgagcctgcctgtctgggtattgctctgccttcgcctacaagcccatgaactgcgccctgtcctctcagctcaatggcaagtgcatcgagctggtacaggtgcccggccaaagcagcatcttcaccatgtgcgagctgcccagcaccatccccatcaagcagaacgcccgccgcagcagctggagctctgacgaagggatcggggaggtgctggagaaggaagactgcatgcaggccctgagcggccagatcttcatgggcatggtgtcctcccagtaccaggcccggctggacatcgtgcgcctcattgatgggcttgtcaacgcctgcatccgctttgtctacttctctttggaggatgagctcaaaagcaaggtgtttgcagaaaaaatgggcctggagacaggctggaactgccacatctccctcacacccaatggtgacatgcctggctccgagatccccccctccagccccagccacgcaggctccctgcatgatgacctgaatcaggtgtcccgagatgatgcagaagggctcctcctcatggaggaggagggccactcggacctcatcagcttccagcctacggacagcgacatccccagcttcctggaggactccaaccgggccaagctgccccggggtatccaccaagtgcggccccacctgcagaacattgacaacgtgcccctgctagtgccccttttcaccgactgcaccccagagaccatgtgtgagatgataaagatcatgcaagagtacggggaggtgacctgctgcctgggcagctctgccaacctgcggaacagctgcctcttcctccagagcgacatcagcattgccctggatcccctgtacccatcccgttgctcctgggagacctttggctacgccaccagcatcagcatggcccaggcctcggatggcctttctcccctgcagctgtcagggcagctcaacagcctgccctgttccctgacctttcgccaggaggagaccatcagcatcatccggcttatcgaacaggctcggcatcagttcctttcttgcctggtccagctgccgccactcctgagtaccaccgacatcctgtggctgtcctgcttttgctaccctctgctcagcatctctctgctggggaagcccccccatagctccatcatgtctatggcaacggggaaaaacctccagtccattcccaagaagacccagcactacttcctgctctgcttcctgctcaagttcagcctcaccatcagctcctgcctcatctgctttggcttcacactgcagagcttctgtgacagctcccgggaccgcaacctcaccaactgctcctccgtcatgctgcccagcaacgacgacagggctccagcctggtttgaggactttgccaatggactgctgtcggctcagaagctcacggccgccctgattgtcctgcacactgtcttcatttccatcacccatgtgcatcgcaccaagcccctgtggagaaagagccccttgaccaacctctggtgggccgtgacagtgcctgtggtgctgctgggtcaggtggtccagacggctgtggacctgcagctgtggacacacagggacagccacgtccactttggcctggaggacgtgcccctgctgacatggctcctgggctgcctgtccctggtccttgtggtggtgaccaatgagatcgtgaagctacatgagattcgggtccgagtccgctaccagaagcgacagaagctgcagtttgaaactaagctgggcatgaactctcccttctgagccactggctgtggtggctgtagttgcccccgtccctggggctaaagccagacccatttctgaacaggggagtttgtatcatgaatgtttccaggtttgctcctgcacccgtggcactggaaacccagctccccgtgtcagaccccgctgtcttcctgagccctggggctcactgtggaggagctgacggcctgggcccttggccagtcctggctcttccctgggcctcaccagggacactcttgaatgtatggcctcaggcgctccctagagggggcctaaaccccctcacctgtgagctaccccctttagggatcccttgcccccttggagatcccttgccccccagtgcctctgctcgtgggtccctggacacggccttgaagccaaccttctttggaggagcaacagcagcagccttggccgacgcgtccaactcccaaggctgccgtggagggcaggggggtggtgcttgcctggatgtggccccgagtgcctcccctccctccctctgtgggggagtctcccgcctgaacctgaagatggagcagggcccccgcttcgccctggagcctcttcctgtgcctggctcaagctggctgcctgtcagtcttggggaatctggcccaggtctcctcagcctctgccccagttctgggagaagtttctactggtgtatattttttactggaaatgagccttttaggaatgaatgtagactggtttgtattaaaatgtgtcaattgctaagaaatacctgtggctggtctgtaaggccactccagggtctgcccacccccggcggtggctggcaaagggaggcctaaaccttcctccatctacgcgggtgggtccctcaggtctggctcaggcgagacccctagggtcaggggtccccatgtcacagaggcaaacacacagcccagtcacgtggaatggtgttttcattggtgttagttgggggaagaggttaatggttacagagccagggcctgggccaatggggtcaggctctccctgccctcaggtgggcagtcggggctcctgctgtggtccgaagcccctcccccattgtgtcctctcaggcagttgatagaataaattccatttaaaatatatgcatttctctctgcttagaaaataacatttacaattgaaaagttaggacttgtgggatctgttaaccccactgcctcccacccctgctagccctgcctcagtgagggaaggcgggggcaggagctgcctgggcaccaccgctgtgtatttacatgtcctctgtacacctacggagagggggcccggccagacacacgcctcctccagcctctcagggcctgggcaggatggtgggtggcaagaggcattcccttggcacaacttgggacatgggctggggggtacagagaaagcacccccaaagccccacccctacttcctccctgaggagagagctcttaccagggtccctgtccaggagcagggctgtcctgctcaatcgatcaaaccctgggaggggctttgctgagatgcagcggaggtccctcgctagtcaggttctaaggtgggctgccccacaagagctgtggtgcccacagccgcgggctgagtgggaaggggccctgctaggaggggcacttcagcctgaccagcccttggcccgtccctagggtggcaggggcctcttctgtgctggggcaaaggcagtggacttcggcaggtcacagtgggcactgctggagggctcagtccagcatggcgtccagctggtcagccagggcgtcgaacatggtgctgatgtcatccagaatgtgcttggtggaggcgctgggggtgccctcttgctccttggtgccaatgctcttctctgcggctctcagtgcagctgccagggacgagctggtctgctccagtctctgctgggcctggcctgggcccacagtcccagtgctctcaggccgtggaggaggcactgggcgggggccgagccggggcgctagcttagggccagaaaatgccagctgggtgcaggccaccgacacaggcttgggggctgttcctgctccgggcaccttgaggagggcagcaggggcggccgggggttctgtctccccattccaccgactagctgctgagctttccagacctggccctgggcagggcggcactggaggctgcatggcggggctgggagcaaggggggttggaactccttgggctggaaggctgctgggctcgggctggggaaggctagaagctggaggagactcgccaggagttggggaaggcagtggggcagcggggccaggcgtggcactggccactccgaaggccagcagtgcggtctgcagtggctctctctcccggcacttgggcctccgcttaacagtgtctgattccgtgaggttgaaatcgaggccggggggcacgggtgtctctcggggcggggggccagcgggcttcgggcgctgtttgatggtcaggttcccttcctctgcaaacggcagcccttccccagagctgccccgagatgggggcgtcccctcagggcctggctcctcctcctccgtgtctgacgcgggcccagccggggcaggtgggccagggggctctgaggggccagcaggttcactcagtgttcgccttcggggccctgtggccccttccttgggccctgggctcccatctagtggaggtggctccgggctggggccagagacggagctgaggcgcttggggggcgggggcggggggcctttgcgccgggcccgcagggcaaaggactggctgcgaggagtcccccgagctggggttggggtcacgctaggactggtccggacaagggcactgcgtcctggccgccgggtaagggtagcataactgcctagggtgctgcccactggcccttcggcctccccctcagcatccccctctgtgggccaggcggcttaggctgtgggaccggcgcttaggtcgaggcgggtctgggggagtggcagggggcccggccaagtaggagaaggcccagggtgcgccaggaggtggccctggggccgggctagagggtgagccctgggggtacataaaaacatagggtgggggtccttggccaggaagtgaagaacaaagcttaggggccgctctgtgccctctgggaggttcctctcctggggggggctgggatctccaccgctgggctgtggggcaggctgttcctgtgagtggccagacccccgtgagcgtgccccgatgctctcctggctgggagagcgggcaggtgggagggggagtggttcagggccaccccctgccatggccgcctgtagctctgggcttagttcgctgccctggaaggtgaggagccgtgggccagctgtagctgggccttctccgttctccagtccctcgatggccatcagctccggacccttggccagccggcgcccgccttcgctgagggcctccccctgcagcaggccccgccgaagctccgccagccgcttcacccccagcatgagcttcttctgatgcccgagcttgttgaccccaatctcctgcagctcctcccaggtgaggtcggccaccagccccatggagtcgtagccgctgctcaccagctgcttgtggtactgtggcagccccagtgcacacagccactccagcaggtccgttgggatgtagctgggcagccactcggcgatgctgagctgagcgatctctgaggcgatcttcttcctgtgcccaggcttggtcaccccgatggccgtcaggtcctcaggtgtcatgcggctgatggtaggcacatcatagccggcctgcagaaagtgggcagtgtagccctccagctggaactcgcttagccagttatgaatggcctgcgcgtccttcccctccagcagctgttctggccgcacgtcctgggtgaagatctgctccccagagcggcagttggccagagggcggtggctcaggttgtctgccagggacggcgggtggagtcctggcagcacctggtcctctccagcagagggcagtggctgggcgttctcaatcaggaggccagggccatggccattagtgccctcagagctctgcccgctgccggcactgcggatgctgcccacgctgccctcactgcccacactattcctgtcacctgctgggctgtctgggctgaggcccacccgaggaagctggctgtaggtaagagggtgcgggggttcttcggcaggaggctgcggtgtccgggagaagcctgggcgcaggggggtgggtgcggaggggaggcgggctgcagggatgcccacccgcttgctgaccacctcgacaatgcccggggggaagtagcctatgcggtctgtgcccctctggctctcgtggatgtggcccttccagcggccgtcgggatgctgttctagcaccgtgatgacatcccctgcccggacattgagagcagtgggatcgtggaggttccagaaatccttgagcgctcggaccttcaggatccctgaggcctcccgcagtagctgcttgatttcccggctggcctgggaggtggtgaactgattcactatgtccagcgccgtctggttatacgtattccggatgttcacgtccacacctccctccagaagcagccgcaccacctcggtcttgccatacagtgcggcctcgtggagcgccgtacccgtcttggtctggcggttgatctcgatcccagctctcaggagctgcctgatgacttctctgtggccattcttggcagccaagtgcaggggcgtggtgtagttggggtcacacgggtctttggcctcaccctccagcagtgccacacataagtggctgttcagaagcagctgggccaccttgagtcggccaaattcacaggccaggtccaggggcgtcttcttggccttgttgaccaggcatgggttggactgatgctggaggagcatttctgacacctcataatgtccatactgtgcagccaggtgcagggggatctgtccgtccagcgaggcggcattgacagccgcagaggcgcgcagcagcagcctcacaggctccagccggccctgccaggctgcgtagtgcagcgggcgcatgccattgctgtccttgatgtcaacagtggcctgagcctctagcagcaaggctatgagctccaggctgccccccaaagcagcgtggtggagggcagagaatccatcagcatcctggtagttcacgttgagcctctttgtggagcccaggagctttgtcttgtggccttgaccttcgccaccagtttctgcacaccggtcacatctccattcttgacggcgaggatcaggtcctgttcacgacccatactggctcctgggctgagctctacactcaggagtccagggcaaaggcaggcaacgggtccaagctggggcgtcagggcgccatgccacagccccttggagggctcccggttccgggggagcaagtctggtgtcccaggcagtgggctcctcgtcaggtactgagggatactcccaaaggtgctccgtgaactgccaccacacgaaggaaagctaatctttgagggggtgaaggctacatggaaatctggatggatatcagcttgtggcttccgacagctccaggatgggctgggactgggcacaccaatcttcccggcttggctgtggaacaccagtgcccacccagagagcagccagcattcccttgggcctcaggcagcagcggtgcactggtctcagggctctctcccgccgcccgccgggtccggctgcctgctcg

SEQ ID NO: 542309 - DNA, 8678 bp, Homo sapiens
actttagctctctggccggcgcctctgttgcccggaagggaggcaagcccccttagagttgccagtaacggacatggctgcggcccccggaggaggggacgtgaagtgaggagggggttgggaggggagaggacgcgggcgaggaagaccagccccggggccccgatgttgtgactgtgacagactcactggggtttgtacatgctggggaggagccttcctttcaggggtgaccacattcatctgggcatgcctgcagtactcttggcccatggacctgaaggagaagcacctgggcgagcctccctcagccctgggcctgtccacgcggaaggccctcagcgtcctgaaggagcagctggaggcagtgctggaaggacatctcagggagcggaagaagtgtctgacgtggaaggaggtgtggagaagcagcttcctccaccacagtaaccgctgctcctgcttccactggccgggggcctcactcatgctactggccgtgctgctgctgctgggctgctgcgggggacagccagccgggagccgtggggtggggctggtgaatgcctcggccttgttcctgttactgcttctcaaccttgtgctcatcgggcggcaagaccggctgaagcgtcgggaggtagagcggaggctgcgagggatcattgaccaaatccaagatgccctcagggatggcagggagatccagtggcccagtgccatgtatccagacctccacatgccttttgcgccatcctggtccttgcactgggcctacagagacggacacctggtcaacctgccagtcagcctgctggttgaaggagacatcatagctttgaggcctggccaggaatcgtttgcttctctgagggggatcaaggatgacgagcacatcgtcctggagccgggagacctcttcccccccttctcccctccaccctcaccccggggagaagtggagagagggccacagagcccccagcagcaccggcttttccgtgtccttgagacccctgtgattgacaacatcagatggtgcctggacatggccctgtcccgaccagtcactgccctggacaatgagcggttcacagtgcagtcggtgatgctacactatgctgtgcccgtggtcctggccggcttcctcatcaccaatgccctgcgcttcatcttcagtgccccgggggtcacttcctggcagtacaccctcctccagctccaggtgaatggcgtcctgcccatcctccccctgctctttccagtcctctgggttctggcaactgcctgtggagaggcccgtgtcctggcccagatgagcaaggcctcacccagctccctgctggctaagttctcagaggatactctcagcagctatacggaggctgtctcctctcaggaaatgctgcgctgcatttggggccacttcctgagggtgctcggggggacatcgccaacgctgagccacagttccagcctgctgcacagcctgggctctgtcacggtcctgtgctgtgtggacaaacaggggatcctgtcatggccaaatcccagcccagagactgtactgttcttcagcgggaaggtggagccccctcacagcagccatgaggacctcaccgatggcctatccacccgctccttctgccatcccgagccccatgaacgagacgccctcctggctggctccctgaacaacaccctgcacctttccaatgagcaggagcgtggcgactggcctggcgaggctcccaagccccccgagccctattcacaccacaaagcgcatggccgcagcaaacacccatctggctccaacgtgagcttcagcagggacaccgagggtggtgaagaagagcccagcaagacccagcctgggatggagagcgacccctacgaagcagaggactttgtgtgtgactaccacctggagatgctgagcctgtcccaggaccagcagaacccctcctgcatccagtttgatgactccaactggcagctgcacctcacctccctcaaacccctgggcctcaatgtgctgctgaacctgtgtgatgccagcgtcaccgagcgcctgtgccgattctccgaccacctgtgcaacattgccctgcaagagagccacagcgccgtgctgcccgtccatgtgccctggggcctctgcgagcttgcccgcctcattggcttcactcctggggccaaggagcttttcaagcaggagaaccatctggcgctgtaccgcctccccagtgccgagacaatgaaggagacatcgctggggcggctctcctgtgtcaccaagcggcggcctcccctcagccacatagatcagcctcttcattaaagacaccaccaccagctcctgcctcatctgctttggcttcacactgcagagcttctgtgacagctcccgggaccgcaacctcaccaactgctcctccgtcatgctgcccagcaacgacgacagggctccagcctggtttgaggactttgccaatggactgctgtcggctcagaagctcacggccgccctgattgtcctgcacactgtcttcatttccatcacccatgtgcatcgcaccaagcccctgtggagaaagagccccttgaccaacctctggtgggccgtgacagtgcctgtggtgctgctgggtcaggtggtccagacggctgtggacctgcagctgtggacacacagggacagccacgtccactttggcctggaggacgtgcccctgctgacatggctcctgggctgcctgtccctggtccttgtggtggtgaccaatgagatcgtgaagctacatgagattcgggtccgagtccgctaccagaagcgacagaagctgcagtttgaaactaagctgggcatgaactctcccttctgagccactggctgtggtggctgtagttgcccccgtccctggggctaaagccagacccatttctgaacaggggagtttgtatcatgaatgtttccaggtttgctcctgcacccgtggcactggaaacccagctccccgtgtcagaccccgctgtcttcctgagccctggggctcactgtggaggagctgacggcctgggcccttggccagtcctggctcttccctgggcctcaccagggacactcttgaatgtatggcctcaggcgctccctagagggggcctaaaccccctcacctgtgagctaccccctttagggatcccttgcccccttggagatcccttgccccccagtgcctctgctcgtgggtccctggacacggccttgaagccaaccttctttggaggagcaacagcagcagccttggccgacgcgtccaactcccaaggctgccgtggagggcaggggggtggtgcttgcctggatgtggccccgagtgcctcccctccctccctctgtgggggagtctcccgcctgaacctgaagatggagcagggcccccgcttcgccctggagcctcttcctgtgcctggctcaagctggctgcctgtcagtcttggggaatctggcccaggtctcctcagcctctgccccagttctgggagaagtttctactggtgtatattttttactggaaatgagccttttaggaatgaatgtagactggtttgtattaaaatgtgtcaattgctaagaaatacctgtggctggtctgtaaggccactccagggtctgcccacccccggcggtggctggcaaagggaggcctaaaccttcctccatctacgcgggtgggtccctcaggtctggctcaggcgagacccctagggtcaggggtccccatgtcacagaggcaaacacacagcccagtcacgtggaatggtgttttcattggtgttagttgggggaagaggttaatggttacagagccagggcctgggccaatggggtcaggctctccctgccctcaggtgggcagtcggggctcctgctgtggtccgaagcccctcccccattgtgtcctctcaggcagttgatagaataaattccatttaaaatatatgcatttctctctgcttagaaaataacatttacaattgaaaagttaggacttgtgggatctgttaaccccactgcctcccacccctgctagccctgcctcagtgagggaaggcgggggcaggagctgcctgggcaccaccgctgtgtatttacatgtcctctgtacacctacggagagggggcccggccagacacacgcctcctccagcctctcagggcctgggcaggatggtgggtggcaagaggcattcccttggcacaacttgggacatgggctggggggtacagagaaagcacccccaaagccccacccctacttcctccctgaggagagagctcttaccagggtccctgtccaggagcagggctgtcctgctcaatcgatcaaaccctgggaggggctttgctgagatgcagcggaggtccctcgctagtcaggttctaaggtgggctgccccacaagagctgtggtgcccacagccgcgggctgagtgggaaggggccctgctaggaggggcacttcagcctgaccagcccttggcccgtccctagggtggcaggggcctcttctgtgctggggcaaaggcagtggacttcggcaggtcacagtgggcactgctggagggctcagtccagcatggcgtccagctggtcagccagggcgtcgaacatggtgctgatgtcatccagaatgtgcttggtggaggcgctgggggtgccctcttgctccttggtgccaatgctcttctctgcggctctcagtgcagctgccagggacgagctggtctgctccagtctctgctgggcctggcctgggcccacagtcccagtgctctcaggccgtggaggaggcactgggcgggggccgagccggggcgctagcttagggccagaaaatgccagctgggtgcaggccaccgacacaggcttgggggctgttcctgctccgggcaccttgaggagggcagcaggggcggccgggggttctgtctccccattccaccgactagctgctgagctttccagacctggccctgggcagggcggcactggaggctgcatggcggggctgggagcaaggggggttggaactccttgggctggaaggctgctgggctcgggctggggaaggctagaagctggaggagactcgccaggagttggggaaggcagtggggcagcggggccaggcgtggcactggccactccgaaggccagcagtgcggtctgcagtggctctctctcccggcacttgggcctccgcttaacagtgtctgattccgtgaggttgaaatcgaggccggggggcacgggtgtctctcggggcggggggccagcgggcttcgggcgctgtttgatggtcaggttcccttcctctgcaaacggcagcccttccccagagctgccccgagatgggggcgtcccctcagggcctggctcctcctcctccgtgtctgacgcgggcccagccggggcaggtgggccagggggctctgaggggccagcaggttcactcagtgttcgccttcggggccctgtggccccttccttgggccctgggctcccatctagtggaggtggctccgggctggggccagagacggagctgaggcgcttggggggcgggggcggggggcctttgcgccgggcccgcagggcaaaggactggctgcgaggagtcccccgagctggggttggggtcacgctaggactggtccggacaagggcactgcgtcctggccgccgggtaagggtagcataactgcctagggtgctgcccactggcccttcggcctccccctcagcatccccctctgtgggccaggcggcttaggctgtgggaccggcgcttaggtcgaggcgggtctgggggagtggcagggggcccggccaagtaggagaaggcccagggtgcgccaggaggtggccctggggccgggctagagggtgagccctgggggtacataaaaacatagggtgggggtccttggccaggaagtgaagaacaaagcttaggggccgctctgtgccctctgggaggttcctctcctggggggggctgggatctccaccgctgggctgtggggcaggctgttcctgtgagtggccagacccccgtgagcgtgccccgatgctctcctggctgggagagcgggcaggtgggagggggagtggttcagggccaccccctgccatggccgcctgtagctctgggcttagttcgctgccctggaaggtgaggagccgtgggccagctgtagctgggccttctccgttctccagtccctcgatggccatcagctccggacccttggccagccggcgcccgccttcgctgagggcctccccctgcagcaggccccgccgaagctccgccagccgcttcacccccagcatgagcttcttctgatgcccgagcttgttgaccccaatctcctgcagctcctcccaggtgaggtcggccaccagccccatggagtcgtagccgctgctcaccagctgcttgtggtactgtggcagccccagtgcacacagccactccagcaggtccgttgggatgtagctgggcagccactcggcgatgctgagctgagcgatctctgaggcgatcttcttcctgtgcccaggcttggtcaccccgatggccgtcaggtcctcaggtgtcatgcggctgatggtaggcacatcatagccggcctgcagaaagtgggcagtgtagccctccagctggaactcgcttagccagttatgaatggcctgcgcgtccttcccctccagcagctgttctggccgcacgtcctgggtgaagatctgctccccagagcggcagttggccagagggcggtggctcaggttgtctgccagggacggcgggtggagtcctggcagcacctggtcctctccagcagagggcagtggctgggcgttctcaatcaggaggccagggccatggccattagtgccctcagagctctgcccgctgccggcactgcggatgctgcccacgctgccctcactgcccacactattcctgtcacctgctgggctgtctgggctgaggcccacccgaggaagctggctgtaggtaagagggtgcgggggttcttcggcaggaggctgcggtgtccgggagaagcctgggcgcaggggggtgggtgcggaggggaggcgggctgcagggatgcccacccgcttgctgaccacctcgacaatgcccggggggaagtagcctatgcggtctgtgcccctctggctctcgtggatgtggcccttccagcggccgtcgggatgctgttctagcaccgtgatgacatcccctgcccggacattgagagcagtgggatcgtggaggttccagaaatccttgagcgctcggaccttcaggatccctgaggcctcccgcagtagctgcttgatttcccggctggcctgggaggtggtgaactgattcactatgtccagcgccgtctggttatacgtattccggatgttcacgtccacacctccctccagaagcagccgcaccacctcggtcttgccatacagtgcggcctcgtggagcgccgtacccgtcttggtctggcggttgatctcgatcccagctctcaggagctgcctgatgacttctctgtggccattcttggcagccaagtgcaggggcgtggtgtagttggggtcacacgggtctttggcctcaccctccagcagtgccacacataagtggctgttcagaagcagctgggccaccttgagtcggccaaattcacaggccaggtccaggggcgtcttcttggccttgttgaccaggcatgggttggactgatgctggaggagcatttctgacacctcataatgtccatactgtgcagccaggtgcagggggatctgtccgtccagcgaggcggcattgacagccgcagaggcgcgcagcagcagcctcacaggctccagccggccctgccaggctgcgtagtgcagcgggcgcatgccattgctgtccttgatgtcaacagtggcctgagcctctagcagcaaggctatgagctccaggctgccccccaaagcagcgtggtggagggcagagaatccatcagcatcctggtagttcacgttgagcctctttgtggagcccaggagctttgtcttgtggccttgaccttcgccaccagtttctgcacaccggtcacatctccattcttgacggcgaggatcaggtcctgttcacgacccatactggctcctgggctgagctctacactcaggagtccagggcaaaggcaggcaacgggtccaagctggggcgtcagggcgccatgccacagccccttggagggctcccggttccgggggagcaagtctggtgtcccaggcagtgggctcctcgtcaggtactgagggatactcccaaaggtgctccgtgaactgccaccacacgaaggaaagctaatctttgagggggtgaaggctacatggaaatctggatggatatcagcttgtggcttccgacagctccaggatgggctgggactgggcacaccaatcttcccggcttggctgtggaacaccagtgcccacccagagagcagccagcattcccttgggcctcaggcagcagcggtgcactggtctcagggctctctcccgccgcccgccgggtccggctgcctgctcg

SEQ ID NO: 542310 - DNA, 10477 bp, Homo sapiens
  misc_feature (6274)..(6274): n is a, c, g, or t
  misc_feature (8249)..(8249): n is a, c, g, or t
  misc_feature (8253)..(8254): n is a, c, g, or t
  misc_feature (8256)..(8256): n is a, c, g, or t
actttagctctctggccggcgcctctgttgcccggaagggaggcaagcccccttagagttgccagtaacggacatggctgcggcccccggaggaggggacgtgaagtgaggagggggttgggaggggagaggacgcgggcgaggaagaccagccccggggccccgatgttgtgactgtgacagactcactggggtttgtacatgctggggaggagccttcctttcaggggtgaccacattcatctgggcatgcctgcagtactcttggcccatggacctgaaggagaagcacctgggcgagcctccctcagccctgggcctgtccacgcggaaggccctcagcgtcctgaaggagcagctggaggcagtgctggaaggacatctcagggagcggaagaagtgtctgacgtggaaggaggtgtggagaagcagcttcctccaccacagtaaccgctgctcctgcttccactggccgggggcctcactcatgctactggccgtgctgctgctgctgggctgctgcgggggacagccagccgggagccgtggggtggggctggtgaatgcctcggccttgttcctgttactgcttctcaaccttgtgctcatcgggcggcaagaccggctgaagcgtcgggaggtagagcggaggctgcgagggatcattgaccaaatccaagatgccctcagggatggcagggagatccagtggcccagtgccatgtatccagacctccacatgccttttgcgccatcctggtccttgcactgggcctacagagacggacacctggtcaacctgccagtcagcctgctggttgaaggagacatcatagctttgaggcctggccaggaatcgtttgcttctctgagggggatcaaggatgacgagcacatcgtcctggagccgggagacctcttcccccccttctcccctccaccctcaccccggggagaagtggagagagggccacagagcccccagcagcaccggcttttccgtgtccttgagacccctgtgattgacaacatcagatggtgcctggacatggccctgtcccgaccagtcactgccctggacaatgagcggttcacagtgcagtcggtgatgctacactatgctgtgcccgtggtcctggccggcttcctcatcaccaatgccctgcgcttcatcttcagtgccccgggggtcacttcctggcagtacaccctcctccagctccaggtgaatggcgtcctgcccatcctccccctgctctttccagtcctctgggttctggcaactgcctgtggagaggcccgtgtcctggcccagatgagcaaggcctcacccagctccctgctggctaagttctcagaggatactctcagcagctatacggaggctgtctcctctcaggaaatgctgcgctgcatttggggccacttcctgagggtgctcggggggacatcgccaacgctgagccacagttccagcctgctgcacagcctgggctctgtcacggtcctgtgctgtgtggacaaacaggggatcctgtcatggccaaatcccagcccagagactgtactgttcttcagcgggaaggtggagccccctcacagcagccatgaggacctcaccgatggcctatccacccgctccttctgccatcccgagccccatgaacgagacgccctcctggctggctccctgaacaacaccctgcacctttccaatgagcaggagcgtggcgactggcctggcgaggctcccaagccccccgagccctattcacaccacaaagcgcatggccgcagcaaacacccatctggctccaacgtgagcttcagcagggacaccgagggtggtgaagaagagcccagcaagacccagcctgggatggagagcgacccctacgaagcagaggactttgtgtgtgactaccacctggagatgctgagcctgtcccaggaccagcagaacccctcctgcatccagtttgatgactccaactggcagctgcacctcacctccctcaaacccctgggcctcaatgtgctgctgaacctgtgtgatgccagcgtcaccgagcgcctgtgccgattctccgaccacctgtgcaacattgccctgcaagagagccacagcgccgtgctgcccgtccatgtgccctggggcctctgcgagcttgcccgcctcattggcttcactcctggggccaaggagcttttcaagcaggagaaccatctggcgctgtaccgcctccccagtgccgagacaatgaaggagacatcgctggggcggctctcctgtgtcaccaagcggcggcctcccctcagccacatagatcagcctcttcattaaagacaccaccaccagcacagagcagatgctgtcccatggcaccgctgatgtggtcttagaggcctgcacagacttctgggacggagctgacatctaccctctctcgggatctgacagaaagaaagtgctggacttctaccagcgagcctgcctgtctgggtattgctctgccttcgcctacaagcccatgaactgcgccctgtcctctcagctcaatggcaagtgcatcgagctggtacaggtgcccggccaaagcagcatcttcaccatgtgcgagctgcccagcaccatccccatcaagcagaacgcccgccgcagcagctggagctctgacgaagggatcggggaggtgctggagaaggaagactgcatgcaggccctgagcggccagatcttcatgggcatggtgtcctcccagtaccaggcccggctggacatcgtgcgcctcattgatgggcttgtcaacgcctgcatccgctttgtctacttctctttggaggatgagctcaaaagcaaggtgtttgcagaaaaaatgggcctggagacaggctggaactgccacatctccctcacacccaatggtgacatgcctggctccgagatccccccctccagccccagccacgcaggctccctgcatgatgacctgaatcaggtgtcccgagatgatgcagaagggctcctcctcatggaggaggagggccactcggacctcatcagcttccagcctacggacagcgacatccccagcttcctggaggactccaaccgggccaagctgccccggggtatccaccaagtgcggccccacctgcagaacattgacaacgtgcccctgctagtgccccttttcaccgactgcaccccagagaccatgtgtgagatgataaagatcatgcaagagtacggggaggtgacctgctgcctgggcagctctgccaacctgcggaacagctgcctcttcctccagagcgacatcagcattgccctggatcccctgtacccatcccgttgctcctgggagacctttggctacgccaccagcatcagcatggcccaggcctcggatggcctttctcccctgcagctgtcagggcagctcaacagcctgccctgttccctgacctttcgccaggaggagaccatcagcatcatccggcttatcgaacaggctcggcatgccacctatggcatccgtaagtgcttcctcttcctgctgcagtgccagctgactcttgtggtcatccagttcctttcttgcctggtccagctgccgccactcctgagtaccaccgacatcctgtggctgtcctgcttttgctaccctctgctcagcatctctctgctggggaagcccccccatagctccatcatgtctatggcaacggggaaaaacctccagtccattcccaagaagacccagcactacttcctgctctgcttcctgctcaagttcagcctcaccatcagctcctgcctcatctgctttggcttcacactgcagagcttctgtgacagctcccgggaccgcaacctcaccaactgctcctccgtcatgctgcccagcaacgacgacagggctccagcctggtttgaggactttgccaatggactgctgtcggctcagaagctcacggccgccctgattgtcctgcacactgtcttcatttccatcacccatgtgcatcgcaccaagcccctgtggagaaagagccccttgaccaacctctggtgggccgtgacagtgcctgtggtgctgctgggtcaggtggtccagacggctgtggacctgcagctgtggacacacagggacagccacgtccactttggcctggaggacgtgcccctgctgacatggctcctgggctgcctgtccctggtccttgtggtggtgaccaatgagatcgtgaagctacatgagattcgggtccgagtccgctaccagaagcgacagaagctgcagtttgaaactaagctgggcatgaactctcccttctgagccactggctgtggtggctgtagttgcccccgtccctggggctaaagccagacccatttctgaacaggggagtttgtatcatgaatgtttccaggtttgctcctgcacccgtggcactggaaacccagctccccgtgtcagaccccgctgtcttcctgagccctggggctcactgtggaggagctgacggcctgggcccttggccagtcctggctcttccctgggcctcaccagggacactcttgaatgtatggcctcaggcgctccctagagggggcctaaaccccctcacctgtgagctaccccctttagggatcccttgcccccttggagatcccttgccccccagtgcctctgctcgtgggtccctggacacggccttgaagccaaccttctttggaggagcaacagcagcagccttggccgacgcgtccaactcccaaggctgccgtggagggcaggggggtggtgcttgcctggatgtggccccgagtgcctcccctccctccctctgtgggggagtctcccgcctgaacctgaagatggagcagggcccccgcttcgccctggagcctcttcctgtgcctggctcaagctggctgcctgtcagtcttggggaatctggcccaggtctcctcagcctctgccccagttctgggagaagtttctactggtgtatattttttactggaaatgagccttttaggaatgaatgtagactggtttgtattaaaatgtgtcaattgctaagaaatacctgtggctggtctgtaaggccactccagggtctgcccacccccggcggtggctggcaaagggaggcctaaaccttcctccatctacgcgggtgggtccctcaggtctggctcaggcgagacccctagggtcaggggtccccatgtcacagaggcaaacacacagcccagtcacgtggaatggtgttttcattggtgttagttgggggaagaggttaatggttacagagccagggcctgggccaatggggtcaggctctccctgccctcaggtgggcagtcggggctcctgctgtggtccgaagcccctcccccattgtgtcctctcaggcagttgatagaataaattccatttaaaatatatgcatttctctctgcttagaaaataacatttacaattgaaaagttaggacttgtgggatctgttaaccccactgcctcccacccctgctagccctgcctcagtgagggaaggcgggggcaggagctgcctgggcaccaccgctgtgtatttacatgtcctctgtacacctacggagagggggcccggccagacacacgcctcctccagcctctcagggcctgggcaggatggtgggtggcaagaggcattcccttggcacaacttgggacatgggctggggggtacagagaaagcacccccaaagccccacccctacttcctccctgaggagagagctcttaccagggtccctgtccaggagcagggctgtcctgctcaatcgatcaaaccctgggaggggctttgctgagatgcagcggaggtccctcgctagtcaggttctaaggtgggctgccccacaagagctgtggtgcccacagccgcgggctgagtgggaaggggccctgctaggaggggcacttcagcctgaccagcccttggcccgtccctagggtggcaggggcctcttctgtgctggggcaaaggcagtggacttcggcaggtcacagtgggcactgctggagggctcagtccagcatggcgtccagctggtcagccagggcgtcgaacatggtgctgatgtcatccagaatgtgcttggtggaggcgctgggggtgctgcagcaaggggaaggatgcggtcagatcagccagtggcctgcaccccactggccctggggcagggagctgtcatagctcccagaggctcaggnaggcaagggaccggccaggctcctgtgcctcttaaatggtagccaccaggattccctgatctaggtgactccaacacctggcctcttatcccattagtgcctgcaatgtccccctcacccctcttgctccttggtgccaatgctcttctctgcggctctcagtgcagctgccagggacgagctggtctgctccagtctctgctgggcctggcctgggcccacagtcccagtgctctcaggccgtggaggaggcactgggcgggggccgagccggggcgctagcttagggccagaaaatgccagctgggtgcaggccaccgacacaggcttgggggctgttcctgctccgggcaccttgaggagggcagcaggggcggccgggggttctgtctccccattccaccgactagctgctgagctttccagacctggccctgggcagggcggcactggaggctgcatggcggggctgggagcaaggggggttggaactccttgggctggaaggctgctgggctcgggctggggaaggctagaagctggaggagactcgccaggagttggggaaggcagtggggcagcggggccaggcgtggcactggccactccgaaggccagcagtgcggtctgcagtggctctctctcccggcacttgggcctccgcttaacagtgtctgattccgtgaggttgaaatcgaggccggggggcacgggtgtctctcggggcggggggccagcgggcttcgggcgctgtttgatggtcaggttcccttcctctgcaaacggcagcccttccccagagctgccccgagatgggggcgtcccctcagggcctggctcctcctcctccgtgtctgacgcgggcccagccggggcaggtgggccagggggctctgaggggccagcaggttcactcagtgttcgccttcggggccctgtggccccttccttgggccctgggctcccatctagtggaggtggctccgggctggggccagagacggagctgaggcgcttggggggcgggggcggggggcctttgcgccgggcccgcagggcaaaggactggctgcgaggagtcccccgagctggggttggggtcacgctaggactggtccggacaagggcactgcgtcctggccgccgggtaagggtagcataactgcctagggtgctgcccactggcccttcggcctccccctcagcatccccctctgtgggccaggcggcttaggctgtgggaccggcgcttaggtcgaggcgggtctgggggagtggcagggggcccggccaagtaggagaaggcccagggtgcgccaggaggtggccctggggccgggctagagggtgagccctgggggtacataaaaacatagggtgggggtccttggccaggaagtgaagaacaaagcttaggggccgctctgtgccctctgggaggttcctctcctggggggggctgggatctccaccgctgggctgtggggcaggctgttcctgtgagtggccagacccccgtgagcgtgccccgatgctctcctggctgggagagcgggcaggtgggagggggagtggttcagggccaccccctgccatggccgcctgtagctctgggcttagttcgctgccctggaaggtgaggagccgtgggccagctgtagctgggccttctccgttctccagtccctcgatggccatcagctccggacccttggccagccggcgcccgccttcgctgagggcctccccctgcagcaggccccgccgaagctccgccagccgcttcacccccagcatgagcttcttctgatgcccgagcttgttgaccccaatctcctgcagctcctcccaggtgaggtcggccaccagccccatggagtcgtagccgctgctcaccagctgcttgtggtactgtggcagccccagtgcacacagccactccagcaggtccgtctggaagagcaccgtcctcagnacanntnccagccagcctccgcccccagccagaggagaaaaggcaccgcaaagccacagctgagggcgacagcacgtgccccactccccagccacccttgatggctcactgggatgtagctgggcagccactcggcgatgctgagctgagcgatctctgaggcgatcttcttcctgtgcccaggcttggtcaccccgatggccgtcaggtcctcaggtgtcatgcggctgatggtaggcacatcatagccggcctgcagaaagtgggcagtgtagccctccagctggaactcgcttagccagttatgaatggcctgcgcgtccttcccctccagcagctgttctggccgcacgtcctgggtgaagatctgctccccagagcggcagttggccagagggcggtggctcaggttgtctgccagggacggcgggtggagtcctggcagcacctggtcctctccagcagagggcagtggctgggcgttctcaatcaggaggccagggccatggccattagtgccctcagagctctgcccgctgccggcactgcggatgctgcccacgctgccctcactgcccacactattcctgtcacctgctgggctgtctgggctgaggcccacccgaggaagctggctgtaggtaagagggtgcgggggttcttcggcaggaggctgcggtgtccgggagaagcctgggcgcaggggggtgggtgcggaggggaggcgggctgcagggatgcccacccgcttgctgaccacctcgacaatgcccggggggaagtagcctatgcggtctgtgcccctctggctctcgtggatgtggcccttccagcggccgtcgggatgctgttctagcaccgtgatgacatcccctgcccggacattgagagcagtgggatcgtggaggttccagaaatccttgagcgctcggaccttcaggatccctgaggcctcccgcagtagctgcttgatttcccggctggcctgggaggtggtgaactgattcactatgtccagcgccgtctggttatacgtattccggatgttcacgtccacacctccctccagaagcagccgcaccacctcggtcttgccatacagtgcggcctcgtggagcgccgtacccgtcttggtctggcggttgatctcgatcccagctctcaggagctgcctgatgacttctctgtggccattcttggcagccaagtgcaggggcgtggtgtagttggggtcacacgggtctttggcctcaccctccagcagtgccacacataagtggctgttcagaagcagctgggccaccttgagtcggccaaattcacaggccaggtccaggggcgtcttcttggccttgttgaccaggcatgggttggactgatgctggaggagcatttctgacacctcataatgtccatactgtgcagccaggtgcagggggatctgtccgtccagcgaggcggcattgacagccgcagaggcgcgcagcagcagcctcacaggctccagccggccctgccaggctgcgtagtgcagcgggcgcatgccattgctgtccttgatgtcaacagtggcctgagcctctagcagcaaggctatgagctccaggctgccccccaaagcagcgtggtggagggcagagaatccatcagcatcctggtagttcacgttgagcctctttgtggagcccaggagctttgtcttgtggccttgaccttcgccaccagtttctgcacaccggtcacatctccattcttgacggcgaggatcaggtcctgttcacgacccatactggctcctgggctgagctctacactcaggagtccagggcaaaggcaggcaacgggtccaagctggggcgtcagggcgccatgccacagccccttggagggctcccggttccgggggagcaagtctggtgtcccaggcagtgggctcctcgtcaggtactgagggatactcccaaaggtgctccgtgaactgccaccacacgaaggaaagctaatctttgagggggtgaaggctacatggaaatctggatggatatcagcttgtggcttccgacagctccaggatgggctgggactgggcacaccaatcttcccggcttggctgtggaacaccagtgcccacccagagagcagccagcattcccttgggcctcaggcagcagcggtgcactggtctcagggctctctcccgccgcccgccgggtccggctgcctgctcg

SEQ ID NO: 542311 - DNA, 126 bp, Homo sapiens
cgccagtaccggctgcccccgcataaattggtgctcgtccagtaaccccaggccgcccattccacccgcgggtcggtgacccatttccgcctcgcgcctgggggggggtcttggctcggggggggt

SEQ ID NO: 542312 - DNA, 109 bp, Homo sapiens
ctgctccgaatttgtacgaggagctcatgttgagcggccggggcccatcgattgttcaccagggtgggcttccaggtagtgttaccaatttgccctatagtttagccgt

SEQ ID NO: 542313 - DNA, 292 bp, Homo sapiens
  misc_feature (247)..(247): n is a, c, g, or t
gcgctcaatggaattcccctaacactaacgaaaacaaccacaggacgttgttaagaacccaggacaaaaggccaaataatttaacaaaagatattcttatggctctagtcacttaggaaacagcaaggcttataggagctgagaacccggaattatggacaaaacccaaaaaaaaaaaatgataatatcatgatagtattgagcatatgtaatattggattagggcccgccccaatgaccttatttnagattactggtatttggaccggcccgttttaagcgggggtggtac

SEQ ID NO: 542314 - DNA, 5187 bp, Homo sapiens
actttagctctctggccggcgcctctgttgcccggaagggaggcaagcccccttagagttgccagtaacggacatggctgcggcccccggaggaggggacgtgaagtgaggagggggttgggaggggagaggacgcgggcgaggaagaccagccccggggccccgatgttgtgactgtgacagactcactggggtttgtacatgctggggaggagccttcctttcaggggtgaccacattcatctgggcatgcctgcagtactcttggcccatggacctgaaggagaagcacctgggcgagcctccctcagccctgggcctgtccacgcggaaggccctcagcgtcctgaaggagcagctggaggcagtgctggaaggacatctcagggagcggaagaagtgtctgacgtggaaggaggtgtggagaagcagcttcctccaccacagtaaccgctgctcctgcttccactggccgggggcctcactcatgctactggccgtgctgctgctgctgggctgctgcgggggacagccagccgggagccgtggggtggggctggtgaatgcctcggccttgttcctgttactgcttctcaaccttgtgctcatcgggcggcaagaccggctgaagcgtcgggaggtagagcggaggctgcgagggatcattgaccaaatccaagatgccctcagggatggcagggagatccagtggcccagtgccatgtatccagacctccacatgccttttgcgccatcctggtccttgcactgggcctacagagacggacacctggtcaacctgccagtcagcctgctggttgaaggagacatcatagctttgaggcctggccaggaatcgtttgcttctctgagggggatcaaggatgacgagcacatcgtcctggagccgggagacctcttcccccccttctcccctccaccctcaccccggggagaagtggagagagggccacagagcccccagcagcaccggcttttccgtgtccttgagacccctgtgattgacaacatcagatggtgcctggacatggccctgtcccgaccagtcactgccctggacaatgagcggttcacagtgcagtcggtgatgctacactatgctgtgcccgtggtcctggccggcttcctcatcaccaatgccctgcgcttcatcttcagtgccccgggggtcacttcctggcagtacaccctcctccagctccaggtgaatggcgtcctgcccatcctccccctgctctttccagtcctctgggttctggcaactgcctgtggagaggcccgtgtcctggcccagatgagcaaggcctcacccagctccctgctggctaagttctcagaggatactctcagcagctatacggaggctgtctcctctcaggaaatgctgcgctgcatttggggccacttcctgagggtgctcggggggacatcgccaacgctgagccacagttccagcctgctgcacagcctgggctctgtcacggtcctgtgctgtgtggacaaacaggggatcctgtcatggccaaatcccagcccagagactgtactgttcttcagcgggaaggtggagccccctcacagcagccatgaggacctcaccgatggcctatccacccgctccttctgccatcccgagccccatgaacgagacgccctcctggctggctccctgaacaacaccctgcacctttccaatgagcaggagcgtggcgactggcctggcgaggctcccaagccccccgagccctattcacaccacaaagcgcatggccgcagcaaacacccatctggctccaacgtgagcttcagcagggacaccgagggtggtgaagaagagcccagcaagacccagcctgggatggagagcgacccctacgaagcagaggactttgtgtgtgactaccacctggagatgctgagcctgtcccaggaccagcagaacccctcctgcatccagtttgatgactccaactggcagctgcacctcacctccctcaaacccctgggcctcaatgtgctgctgaacctgtgtgatgccagcgtcaccgagcgcctgtgccgattctccgaccacctgtgcaacattgccctgcaagagagccacagcgccgtgctgcccgtccatgtgccctggggcctctgcgagcttgcccgcctcattggcttcactcctggggccaaggagcttttcaagcaggagaaccatctggcgctgtaccgcctccccagtgccgagacaatgaaggagacatcgctggggcggctctcctgtgtcaccaagcggcggcctcccctcagccacatagatcagcctcttcattaaagacaccaccaccagcacagagcagatgctgtcccatggcaccgctgatgtggtcttagaggcctgcacagacttctgggacggagctgacatctaccctctctcgggatctgacagaaagaaagtgctggacttctaccagcgagcctgcctgtctgggtattgctctgccttcgcctacaagcccatgaactgcgccctgtcctctcagctcaatggcaagtgcatcgagctggtacaggtgcccggccaaagcagcatcttcaccatgtgcgagctgcccagcaccatccccatcaagcagaacgcccgccgcagcagctggagctctgacgaagggatcggggaggtgctggagaaggaagactgcatgcaggccctgagcggccagatcttcatgggcatggtgtcctcccagtaccaggcccggctggacatcgtgcgcctcattgatgggcttgtcaacgcctgcatccgctttgtctacttctctttggaggatgagctcaaaagcaaggtgtttgcagaaaaaatgggcctggagacaggctggaactgccacatctccctcacacccaatggtgacatgcctggctccgagatccccccctccagccccagccacgcaggctccctgcatgatgacctgaatcaggtgtcccgagatgatgcagaagggctcctcctcatggaggaggagggccactcggacctcatcagcttccagcctacggacagcgacatccccagcttcctggaggactccaaccgggccaagctgccccggggtatccaccaagtgcggccccacctgcagaacattgacaacgtgcccctgctagtgccccttttcaccgactgcaccccagagaccatgtgtgagatgataaagatcatgcaagagtacggggaggtgacctgctgcctgggcagctctgccaacctgcggaacagctgcctcttcctccagagcgacatcagcattgccctggatcccctgtacccatcccgttgctcctgggagacctttggctacgccaccagcatcagcatggcccaggcctcggatggcctttctcccctgcagctgtcagggcagctcaacagcctgccctgttccctgacctttcgccaggaggagaccatcagcatcatccggcttatcgaacaggctcggcatgccacctatggcatccgtaagtgcttcctcttcctgctgcagtgccagctgactcttgtggtcatccagttcctttcttgcctggtccagctgccgccactcctgagtaccaccgacatcctgtggctgtcctgcttttgctaccctctgctcagcatctctctgctggggaagcccccccatagctccatcatgtctatggcaacggggaaaaacctccagtccattcccaagaagacccagcactacttcctgctctgcttcctgctcaagttcagcctcaccatcagctcctgcctcatctgctttggcttcacactgcagagcttctgtgacagctcccgggaccgcaacctcaccaactgctcctccgtcatgctgcccagcaacgacgacagggctccagcctggtttgaggactttgccaatggactgctgtcggctcagaagctcacggccgccctgattgtcctgcacactggtgagagggctccctgggagggcgtggatgatggtgggaaaggagccccactgtggaagtctgacccccacatcgccccaccttccccagtcttcatttccatcacccatgtgcatcgcaccaagcccctgtggagaaagagccccttgaccaacctctggtgggccgtgacagtgcctgtggtgctgctgggtcaggtggtccagacggctgtggacctgcagctgtggacacacagggacagccacgtccactttggcctggaggacgtgcccctgctgacatggctcctgggctgcctgtccctggtccttgtggtggtgaccaatgagatcgtgaagctacatgagattcgggtccgagtccgctaccagaagcgacagaagctgcagtttgaaactaagctgggcatgaactctcccttctgagccactggctgtggtggctgtagttgcccccgtccctggggctaaagccagacccatttctgaacaggggagtttgtatcatgaatgtttccaggtttgctcctgcacccgtggcactggaaacccagctccccgtgtcagaccccgctgtcttcctgagccctggggctcactgtggaggagctgacggcctgggcccttggccagtcctggctcttccctgggcctcaccagggacactcttgaatgtatggcctcaggcgctccctagagggggcctaaaccccctcacctgtgagctaccccctttagggatcccttgcccccttggagatcccttgccccccagtgcctctgctcgtgggtccctggacacggccttgaagccaaccttctttggaggagcaacagcagcagccttggccgacgcgtccaactcccaaggctgccgtggagggcaggggggtggtgcttgcctggatgtggccccgagtgcctcccctccctccctctgtgggggagtctcccgcctgaacctgaagatggagcagggcccccgcttcgccctggagcctcttcctgtgcctggctcaagctggctgcctgtcagtcttggggaatctggcccaggtctcctcagcctctgccccagttctgggagaagtttctactggtgtatattttttactggaaatgagccttttaggaatgaatgtagactggtttgtattaaaatgtgtcaattgctaagaaa

SEQ ID NO: 542315 - DNA, 529 bp, Homo sapiens
gagcggtagaggcagttgacttaccccctgcagaccctccctgacgactcacccttcagcattcactgggcaccttcccggagcggacaactgactcccatgtcacgatattgggtgaatcttccatcctgacctgtgaggtgggtgttcatctcattacgctccatacacatttaacttctcgaagcgtgccaggctctgccgatggatgctggggataagcgggaacccttaggatcacctctgtccacgagaaggaagctgaggctctgagcggatgcacaaggacacccactggcaggtgccgagcagcggtgtcaggaacccggaccggagactacagcgacaacggttcctcgtcccagcccccactcctcgctgggccggctcactcgtcaagacacgacacgtgccacaatggacacgggccaggccaacggcgactgccctcacgccgtccgtggccacgacggaccacgcggtcccggcacgacccccgagaccgccacgactggaaccaccgagaacg

SEQ ID NO: 542316 - DNA, 6885 bp, Homo sapiens
  misc_feature (10)..(10): n is a, c, g, or t
  misc_feature (21)..(21): n is a, c, g, or t
  misc_feature (26)..(26): n is a, c, g, or t
  misc_feature (30)..(30): n is a, c, g, or t
  misc_feature (41)..(41): n is a, c, g, or t
  misc_feature (47)..(47): n is a, c, g, or t
  misc_feature (62)..(62): n is a, c, g, or t
  misc_feature (66)..(66): n is a, c, g, or t
  misc_feature (70)..(70): n is a, c, g, or t
  misc_feature (85)..(86): n is a, c, g, or t
  misc_feature (90)..(90): n is a, c, g, or t
  misc_feature (102)..(102): n is a, c, g, or t
  misc_feature (109)..(109): n is a, c, g, or t
  misc_feature (211)..(212): n is a, c, g, or t
  misc_feature (242)..(242): n is a, c, g, or t
  misc_feature (248)..(248): n is a, c, g, or t
  misc_feature (262)..(262): n is a, c, g, or t
  misc_feature (272)..(272): n is a, c, g, or t
  misc_feature (293)..(293): n is a, c, g, or t
  misc_feature (329)..(329): n is a, c, g, or t
  misc_feature (468)..(468): n is a, c, g, or t
gttttattcnatcccctcacnagatngacntcacggcaagnctcccnagaggttcccttatnaaantganggacagagggtcatnntcancatccctctacntgatctntgcttttcagcatctctctgctggggaagcccccccatagctccatcatgtctatggcaacggggaaaaacctccagtccattcccaagaaggtaagcaaannagaccctgtgagccttgcaagtgagcatgnaagggnctgaggattggggnaggagagagnggctaatctggaaggctctgnatgggggattccagcagaactccggcacttggttcntagtcttcccccagatcaaagaggaggtagtggcacagagctgggaaagacccttgctggggcttgagctccctatccccccaggcctgaccatttactaagagcccgttgaatacgtggaagagctaggagcagccgncagaggggctgtgcgccccaggagtgactggccttgttcccgcagacccagcactacttcctgctctgcttcctgctcaagttcagcctcaccatcagctcctgcctcatctgctttggcttcacactgcagagcttctgtgacagctcccgggaccgcaacctcaccaactgctcctccgtcatgctgcccagcaacgacgacagggctccagcctggtttgaggactttgccaatggactgctgtcggctcagaagctcacggccgccctgattgtcctgcacactgtcttcatttccatcacccatgtgcatcgcaccaagcccctgtggagaaagagccccttgaccaacctctggtgggccgtgacagtgcctgtggtgctgctgggtcaggtggtccagacggctgtggacctgcagctgtggacacacagggacagccacgtccactttggcctggaggacgtgcccctgctgacatggctcctgggctgcctgtccctggtccttgtggtggtgaccaatgagatcgtgaagctacatgagattcgggtccgagtccgctaccagaagcgacagaagctgcagtttgaaactaagctgggcatgaactctcccttctgagccactggctgtggtggctgtagttgcccccgtccctggggctaaagccagacccatttctgaacaggggagtttgtatcatgaatgtttccaggtttgctcctgcacccgtggcactggaaacccagctccccgtgtcagaccccgctgtcttcctgagccctggggctcactgtggaggagctgacggcctgggcccttggccagtcctggctcttccctgggcctcaccagggacactcttgaatgtatggcctcaggcgctccctagagggggcctaaaccccctcacctgtgagctaccccctttagggatcccttgcccccttggagatcccttgccccccagtgcctctgctcgtgggtccctggacacggccttgaagccaaccttctttggaggagcaacagcagcagccttggccgacgcgtccaactcccaaggctgccgtggagggcaggggggtggtgcttgcctggatgtggccccgagtgcctcccctccctccctctgtgggggagtctcccgcctgaacctgaagatggagcagggcccccgcttcgccctggagcctcttcctgtgcctggctcaagctggctgcctgtcagtcttggggaatctggcccaggtctcctcagcctctgccccagttctgggagaagtttctactggtgtatattttttactggaaatgagccttttaggaatgaatgtagactggtttgtattaaaatgtgtcaattgctaagaaatacctgtggctggtctgtaaggccactccagggtctgcccacccccggcggtggctggcaaagggaggcctaaaccttcctccatctacgcgggtgggtccctcaggtctggctcaggcgagacccctagggtcaggggtccccatgtcacagaggcaaacacacagcccagtcacgtggaatggtgttttcattggtgttagttgggggaagaggttaatggttacagagccagggcctgggccaatggggtcaggctctccctgccctcaggtgggcagtcggggctcctgctgtggtccgaagcccctcccccattgtgtcctctcaggcagttgatagaataaattccatttaaaatatatgcatttctctctgcttagaaaataacatttacaattgaaaagttaggacttgtgggatctgttaaccccactgcctcccacccctgctagccctgcctcagtgagggaaggcgggggcaggagctgcctgggcaccaccgctgtgtatttacatgtcctctgtacacctacggagagggggcccggccagacacacgcctcctccagcctctcagggcctgggcaggatggtgggtggcaagaggcattcccttggcacaacttgggacatgggctggggggtacagagaaagcacccccaaagccccacccctacttcctccctgaggagagagctcttaccagggtccctgtccaggagcagggctgtcctgctcaatcgatcaaaccctgggaggggctttgctgagatgcagcggaggtccctcgctagtcaggttctaaggtgggctgccccacaagagctgtggtgcccacagccgcgggctgagtgggaaggggccctgctaggaggggcacttcagcctgaccagcccttggcccgtccctagggtggcaggggcctcttctgtgctggggcaaaggcagtggacttcggcaggtcacagtgggcactgctggagggctcagtccagcatggcgtccagctggtcagccagggcgtcgaacatggtgctgatgtcatccagaatgtgcttggtggaggcgctgggggtgccctcttgctccttggtgccaatgctcttctctgcggctctcagtgcagctgccagggacgagctggtctgctccagtctctgctgggcctggcctgggcccacagtcccagtgctctcaggccgtggaggaggcactgggcgggggccgagccggggcgctagcttagggccagaaaatgccagctgggtgcaggccaccgacacaggcttgggggctgttcctgctccgggcaccttgaggagggcagcaggggcggccgggggttctgtctccccattccaccgactagctgctgagctttccagacctggccctgggcagggcggcactggaggctgcatggcggggctgggagcaaggggggttggaactccttgggctggaaggctgctgggctcgggctggggaaggctagaagctggaggagactcgccaggagttggggaaggcagtggggcagcggggccaggcgtggcactggccactccgaaggccagcagtgcggtctgcagtggctctctctcccggcacttgggcctccgcttaacagtgtctgattccgtgaggttgaaatcgaggccggggggcacgggtgtctctcggggcggggggccagcgggcttcgggcgctgtttgatggtcaggttcccttcctctgcaaacggcagcccttccccagagctgccccgagatgggggcgtcccctcagggcctggctcctcctcctccgtgtctgacgcgggcccagccggggcaggtgggccagggggctctgaggggccagcaggttcactcagtgttcgccttcggggccctgtggccccttccttgggccctgggctcccatctagtggaggtggctccgggctggggccagagacggagctgaggcgcttggggggcgggggcggggggcctttgcgccgggcccgcagggcaaaggactggctgcgaggagtcccccgagctggggttggggtcacgctaggactggtccggacaagggcactgcgtcctggccgccgggtaagggtagcataactgcctagggtgctgcccactggcccttcggcctccccctcagcatccccctctgtgggccaggcggcttaggctgtgggaccggcgcttaggtcgaggcgggtctgggggagtggcagggggcccggccaagtaggagaaggcccagggtgcgccaggaggtggccctggggccgggctagagggtgagccctgggggtacataaaaacatagggtgggggtccttggccaggaagtgaagaacaaagcttaggggccgctctgtgccctctgggaggttcctctcctggggggggctgggatctccaccgctgggctgtggggcaggctgttcctgtgagtggccagacccccgtgagcgtgccccgatgctctcctggctgggagagcgggcaggtgggagggggagtggttcagggccaccccctgccatggccgcctgtagctctgggcttagttcgctgccctggaaggtgaggagccgtgggccagctgtagctgggccttctccgttctccagtccctcgatggccatcagctccggacccttggccagccggcgcccgccttcgctgagggcctccccctgcagcaggccccgccgaagctccgccagccgcttcacccccagcatgagcttcttctgatgcccgagcttgttgaccccaatctcctgcagctcctcccaggtgaggtcggccaccagccccatggagtcgtagccgctgctcaccagctgcttgtggtactgtggcagccccagtgcacacagccactccagcaggtccgttgggatgtagctgggcagccactcggcgatgctgagctgagcgatctctgaggcgatcttcttcctgtgcccaggcttggtcaccccgatggccgtcaggtcctcaggtgtcatgcggctgatggtaggcacatcatagccggcctgcagaaagtgggcagtgtagccctccagctggaactcgcttagccagttatgaatggcctgcgcgtccttcccctccagcagctgttctggccgcacgtcctgggtgaagatctgctccccagagcggcagttggccagagggcggtggctcaggttgtctgccagggacggcgggtggagtcctggcagcacctggtcctctccagcagagggcagtggctgggcgttctcaatcaggaggccagggccatggccattagtgccctcagagctctgcccgctgccggcactgcggatgctgcccacgctgccctcactgcccacactattcctgtcacctgctgggctgtctgggctgaggcccacccgaggaagctggctgtaggtaagagggtgcgggggttcttcggcaggaggctgcggtgtccgggagaagcctgggcgcaggggggtgggtgcggaggggaggcgggctgcagggatgcccacccgcttgctgaccacctcgacaatgcccggggggaagtagcctatgcggtctgtgcccctctggctctcgtggatgtggcccttccagcggccgtcgggatgctgttctagcaccgtgatgacatcccctgcccggacattgagagcagtgggatcgtggaggttccagaaatccttgagcgctcggaccttcaggatccctgaggcctcccgcagtagctgcttgatttcccggctggcctgggaggtggtgaactgattcactatgtccagcgccgtctggttatacgtattccggatgttcacgtccacacctccctccagaagcagccgcaccacctcggtcttgccatacagtgcggcctcgtggagcgccgtacccgtcttggtctggcggttgatctcgatcccagctctcaggagctgcctgatgacttctctgtggccattcttggcagccaagtgcaggggcgtggtgtagttggggtcacacgggtctttggcctcaccctccagcagtgccacacataagtggctgttcagaagcagctgggccaccttgagtcggccaaattcacaggccaggtccaggggcgtcttcttggccttgttgaccaggcatgggttggactgatgctggaggagcatttctgacacctcataatgtccatactgtgcagccaggtgcagggggatctgtccgtccagcgaggcggcattgacagccgcagaggcgcgcagcagcagcctcacaggctccagccggccctgccaggctgcgtagtgcagcgggcgcatgccattgctgtccttgatgtcaacagtggcctgagcctctagcagcaaggctatgagctccaggctgccccccaaagcagcgtggtggagggcagagaatccatcagcatcctggtagttcacgttgagcctctttgtggagcccaggagctttgtcttgtggccttgaccttcgccaccagtttctgcacaccggtcacatctccattcttgacggcgaggatcaggtcctgttcacgacccatactggctcctgggctgagctctacactcaggagtccagggcaaaggcaggcaacgggtccaagctggggcgtcagggcgccatgccacagccccttggagggctcccggttccgggggagcaagtctggtgtcccaggcagtgggctcctcgtcaggtactgagggatactcccaaaggtgctccgtgaactgccaccacacgaaggaaagctaatctttgagggggtgaaggctacatggaaatctggatggatatcagcttgtggcttccgacagctccaggatgggctgggactgggcacaccaatcttcccggcttggctgtggaacaccagtgcccacccagagagcagccagcattcccttgggcctcaggcagcagcggtgcactggtctcagggctctctcccgccgcccgccgggtccggctgcctgctcg

SEQ ID NO: 542317 - DNA, 169 bp, Homo sapiens
cctcaaggcgtccagtgctctctgtactaccatcactctccactgtacctcctgttttgggccacacactgctttgttcatttgtctgagatgtggcagaaccctgagtcccattccttagtagatttgcatccgtttgttaacgtcttaccattgccatttgcactgt

SEQ ID NO: 542318 - DNA, 6490 bp, Homo sapiens
acggctaggtacgaggctgggtgtgaatcggccgaggcgtaagtgcttcctcttcctgctgccataggtggcatgccgagcctgttcgataagccacctatggcatccgtaagtgcttcctcttcctgctgcagtgccagctgactcttgtggtcatccagttcctttcttgcctggtccagctgccgccactcctgagtaccaccgacatcctgtggctgtcctgcttttgctaccctctgctcagcatctctctgctggggaagcccccccatagctccatcatgtctatggcaacggggaaaaacctccagtccattcccaagaagacccagcactacttcctgctctgcttcctgctcaagttcagcctcaccatcagctcctgcctcatctgctttggcttcacactgcagagcttctgtgacagctcccgggaccgcaacctcaccaactgctcctccgtcatgctgcccagcaacgacgacagggctccagcctggtttgaggactttgccaatggactgctgtcggctcagaagctcacggccgccctgattgtcctgcacacttgtccctggtccttgtggtggtgaccaatgagatcgtgaagctacatgagattcgggtccgagtccgctaccagaagcgacagaagctgcagtttgaaactaagctgggcatgaactctcccttctgagccactggctgtggtggctgtagttgcccccgtccctggggctaaagccagacccatttctgaacaggggagtttgtatcatgaatgtttccaggtttgctcctgcacccgtggcactggaaacccagctccccgtgtcagaccccgctgtcttcctgagccctggggctcactgtggaggagctgacggcctgggcccttggccagtcctggctcttccctgggcctcaccagggacactcttgaatgtatggcctcaggcgctccctagagggggcctaaaccccctcacctgtgagctaccccctttagggatcccttgcccccttggagatcccttgccccccagtgcctctgctcgtgggtccctggacacggccttgaagccaaccttctttggaggagcaacagcagcagccttggccgacgcgtccaactcccaaggctgccgtggagggcaggggggtggtgcttgcctggatgtggccccgagtgcctcccctccctccctctgtgggggagtctcccgcctgaacctgaagatggagcagggcccccgcttcgccctggagcctcttcctgtgcctggctcaagctggctgcctgtcagtcttggggaatctggcccaggtctcctcagcctctgccccagttctgggagaagtttctactggtgtatattttttactggaaatgagccttttaggaatgaatgtagactggtttgtattaaaatgtgtcaattgctaagaaatacctgtggctggtctgtaaggccactccagggtctgcccacccccggcggtggctggcaaagggaggcctaaaccttcctccatctacgcgggtgggtccctcaggtctggctcaggcgagacccctagggtcaggggtccccatgtcacagaggcaaacacacagcccagtcacgtggaatggtgttttcattggtgttagttgggggaagaggttaatggttacagagccagggcctgggccaatggggtcaggctctccctgccctcaggtgggcagtcggggctcctgctgtggtccgaagcccctcccccattgtgtcctctcaggcagttgatagaataaattccatttaaaatatatgcatttctctctgcttagaaaataacatttacaattgaaaagttaggacttgtgggatctgttaaccccactgcctcccacccctgctagccctgcctcagtgagggaaggcgggggcaggagctgcctgggcaccaccgctgtgtatttacatgtcctctgtacacctacggagagggggcccggccagacacacgcctcctccagcctctcagggcctgggcaggatggtgggtggcaagaggcattcccttggcacaacttgggacatgggctggggggtacagagaaagcacccccaaagccccacccctacttcctccctgaggagagagctcttaccagggtccctgtccaggagcagggctgtcctgctcaatcgatcaaaccctgggaggggctttgctgagatgcagcggaggtccctcgctagtcaggttctaaggtgggctgccccacaagagctgtggtgcccacagccgcgggctgagtgggaaggggccctgctaggaggggcacttcagcctgaccagcccttggcccgtccctagggtggcaggggcctcttctgtgctggggcaaaggcagtggacttcggcaggtcacagtgggcactgctggagggctcagtccagcatggcgtccagctggtcagccagggcgtcgaacatggtgctgatgtcatccagaatgtgcttggtggaggcgctgggggtgccctcttgctccttggtgccaatgctcttctctgcggctctcagtgcagctgccagggacgagctggtctgctccagtctctgctgggcctggcctgggcccacagtcccagtgctctcaggccgtggaggaggcactgggcgggggccgagccggggcgctagcttagggccagaaaatgccagctgggtgcaggccaccgacacaggcttgggggctgttcctgctccgggcaccttgaggagggcagcaggggcggccgggggttctgtctccccattccaccgactagctgctgagctttccagacctggccctgggcagggcggcactggaggctgcatggcggggctgggagcaaggggggttggaactccttgggctggaaggctgctgggctcgggctggggaaggctagaagctggaggagactcgccaggagttggggaaggcagtggggcagcggggccaggcgtggcactggccactccgaaggccagcagtgcggtctgcagtggctctctctcccggcacttgggcctccgcttaacagtgtctgattccgtgaggttgaaatcgaggccggggggcacgggtgtctctcggggcggggggccagcgggcttcgggcgctgtttgatggtcaggttcccttcctctgcaaacggcagcccttccccagagctgccccgagatgggggcgtcccctcagggcctggctcctcctcctccgtgtctgacgcgggcccagccggggcaggtgggccagggggctctgaggggccagcaggttcactcagtgttcgccttcggggccctgtggccccttccttgggccctgggctcccatctagtggaggtggctccgggctggggccagagacggagctgaggcgcttggggggcgggggcggggggcctttgcgccgggcccgcagggcaaaggactggctgcgaggagtcccccgagctggggttggggtcacgctaggactggtccggacaagggcactgcgtcctggccgccgggtaagggtagcataactgcctagggtgctgcccactggcccttcggcctccccctcagcatccccctctgtgggccaggcggcttaggctgtgggaccggcgcttaggtcgaggcgggtctgggggagtggcagggggcccggccaagtaggagaaggcccagggtgcgccaggaggtggccctggggccgggctagagggtgagccctgggggtacataaaaacatagggtgggggtccttggccaggaagtgaagaacaaagcttaggggccgctctgtgccctctgggaggttcctctcctggggggggctgggatctccaccgctgggctgtggggcaggctgttcctgtgagtggccagacccccgtgagcgtgccccgatgctctcctggctgggagagcgggcaggtgggagggggagtggttcagggccaccccctgccatggccgcctgtagctctgggcttagttcgctgccctggaaggtgaggagccgtgggccagctgtagctgggccttctccgttctccagtccctcgatggccatcagctccggacccttggccagccggcgcccgccttcgctgagggcctccccctgcagcaggccccgccgaagctccgccagccgcttcacccccagcatgagcttcttctgatgcccgagcttgttgaccccaatctcctgcagctcctcccaggtgaggtcggccaccagccccatggagtcgtagccgctgctcaccagctgcttgtggtactgtggcagccccagtgcacacagccactccagcaggtccgttgggatgtagctgggcagccactcggcgatgctgagctgagcgatctctgaggcgatcttcttcctgtgcccaggcttggtcaccccgatggccgtcaggtcctcaggtgtcatgcggctgatggtaggcacatcatagccggcctgcagaaagtgggcagtgtagccctccagctggaactcgcttagccagttatgaatggcctgcgcgtccttcccctccagcagctgttctggccgcacgtcctgggtgaagatctgctccccagagcggcagttggccagagggcggtggctcaggttgtctgccagggacggcgggtggagtcctggcagcacctggtcctctccagcagagggcagtggctgggcgttctcaatcaggaggccagggccatggccattagtgccctcagagctctgcccgctgccggcactgcggatgctgcccacgctgccctcactgcccacactattcctgtcacctgctgggctgtctgggctgaggcccacccgaggaagctggctgtaggtaagagggtgcgggggttcttcggcaggaggctgcggtgtccgggagaagcctgggcgcaggggggtgggtgcggaggggaggcgggctgcagggatgcccacccgcttgctgaccacctcgacaatgcccggggggaagtagcctatgcggtctgtgcccctctggctctcgtggatgtggcccttccagcggccgtcgggatgctgttctagcaccgtgatgacatcccctgcccggacattgagagcagtgggatcgtggaggttccagaaatccttgagcgctcggaccttcaggatccctgaggcctcccgcagtagctgcttgatttcccggctggcctgggaggtggtgaactgattcactatgtccagcgccgtctggttatacgtattccggatgttcacgtccacacctccctccagaagcagccgcaccacctcggtcttgccatacagtgcggcctcgtggagcgccgtacccgtcttggtctggcggttgatctcgatcccagctctcaggagctgcctgatgacttctctgtggccattcttggcagccaagtgcaggggcgtggtgtagttggggtcacacgggtctttggcctcaccctccagcagtgccacacataagtggctgttcagaagcagctgggccaccttgagtcggccaaattcacaggccaggtccaggggcgtcttcttggccttgttgaccaggcatgggttggactgatgctggaggagcatttctgacacctcataatgtccatactgtgcagccaggtgcagggggatctgtccgtccagcgaggcggcattgacagccgcagaggcgcgcagcagcagcctcacaggctccagccggccctgccaggctgcgtagtgcagcgggcgcatgccattgctgtccttgatgtcaacagtggcctgagcctctagcagcaaggctatgagctccaggctgccccccaaagcagcgtggtggagggcagagaatccatcagcatcctggtagttcacgttgagcctctttgtggagcccaggagctttgtcttgtggccttgaccttcgccaccagtttctgcacaccggtcacatctccattcttgacggcgaggatcaggtcctgttcacgacccatactggctcctgggctgagctctacactcaggagtccagggcaaaggcaggcaacgggtccaagctggggcgtcagggcgccatgccacagccccttggagggctcccggttccgggggagcaagtctggtgtcccaggcagtgggctcctcgtcaggtactgagggatactcccaaaggtgctccgtgaactgccaccacacgaaggaaagctaatctttgagggggtgaaggctacatggaaatctggatggatatcagcttgtggcttccgacagctccaggatgggctgggactgggcacaccaatcttcccggcttggctgtggaacaccagtgcccacccagagagcagccagcattcccttgggcctcaggcagcagcggtgcactggtctcagggctctctcccgccgcccgccgggtccggctgcctgctcg

SEQ ID NO: 542319 - DNA, 9774 bp, Homo sapiens
  misc_feature (7546)..(7546): n is a, c, g, or t
  misc_feature (7550)..(7551): n is a, c, g, or t
  misc_feature (7553)..(7553): n is a, c, g, or t
actttagctctctggccggcgcctctgttgcccggaagggaggcaagcccccttagagttgccagtaacggacatggctgcggcccccggaggaggggacgtgaagtgaggagggggttgggaggggagaggacgcgggcgaggaagaccagccccggggccccgatgttgtgactgtgacagactcactggggtttgtacatgctggggaggagccttcctttcaggggtgaccacattcatctgggcatgcctgcagtactcttggcccatggacctgaaggagaagcacctgggcgagcctccctcagccctgggcctgtccacgcggaaggccctcagcgtcctgaaggagcagctggaggcagtgctggaaggacatctcagggagcggaagaagtgtctgacgtggaaggaggtgtggagaagcagcttcctccaccacagtaaccgctgctcctgcttccactggccgggggcctcactcatgctactggccgtgctgctgctgctgggctgctgcgggggacagccagccgggagccgtggggtggggctggtgaatgcctcggccttgttcctgttactgcttctcaaccttgtgctcatcgggcggcaagaccggctgaagcgtcgggaggtagagcggaggctgcgagggatcattgaccaaatccaagatgccctcagggatggcagggagatccagtggcccagtgccatgtatccagacctccacatgccttttgcgccatcctggtccttgcactgggcctacagagacggacacctggtcaacctgccagtcagcctgctggttgaaggagacatcatagctttgaggcctggccaggaatcgtttgcttctctgagggggatcaaggatgacgagcacatcgtcctggagccgggagacctcttcccccccttctcccctccaccctcaccccggggagaagtggagagagggccacagagcccccagcagcaccggcttttccgtgtccttgagacccctgtgattgacaacatcagatggtgcctggacatggccctgtcccgaccagtcactgccctggacaatgagcggttcacagtgcagtcggtgatgctacactatgctgtgcccgtggtcctggccggcttcctcatcaccaatgccctgcgcttcatcttcagtgccccgggggtcacttcctggcagtacaccctcctccagctccaggtgaatggcgtcctgcccatcctccccctgctctttccagtcctctgggttctggcaactgcctgtggagaggcccgtgtcctggcccagatgagcaaggcctcacccagctccctgctggctaagttctcagaggatactctcagcagctatacggaggctgtctcctctcaggaaatgctgcgctgcatttggggccacttcctgagggtgctcggggggacatcgccaacgctgagccacagttccagcctgctgcacagcctgggctctgtcacggtcctgtgctgtgtggacaaacaggggatcctgtcatggccaaatcccagcccagagactgtactgttcttcagcgggaaggtggagccccctcacagcagccatgaggacctcaccgatggcctatccacccgctccttctgccatcccgagccccatgaacgagacgccctcctggctggctccctgaacaacaccctgcacctttccaatgagcaggagcgtggcgactggcctggcgaggctcccaagccccccgagccctattcacaccacaaagcgcatggccgcagcaaacacccatctggctccaacgtgagcttcagcagggacaccgagggtggtgaagaagagcccagcaagacccagcctgggatggagagcgacccctacgaagcagaggactttgtgtgtgactaccacctggagatgctgagcctgtcccaggaccagcagaacccctcctgcatccagtttgatgactccaactggcagctgcacctcacctccctcaaacccctgggcctcaatgtgctgctgaacctgtgtgatgccagcgtcaccgagcgcctgtgccgattctccgaccacctgtgcaacattgccctgcaagagagccacagcgccgtgctgcccgtccatgtgccctggggcctctgcgagcttgcccgcctcattggcttcactcctggggccaaggagcttttcaagcaggagaaccatctggcgctgtaccgcctccccagtgccgagacaatgaaggagacatcgctggggcggctctcctgtgtcaccaagcggcggcctcccctcagccacatagatcagcctcttcattaaagacaccaccaccagcacagagcagatgctgtcccatggcaccgctgatgtggtcttagaggcctgcacagacttctgggacggagctgacatctaccctctctcgggatctgacagaaagaaagtgctggacttctaccagcgagcctgcctgtctgggtattgctctgccttcgcctacaagcccatgaactgcgccctgtcctctcagctcaatggcaagtgcatcgagctggtacaggtgcccggccaaagcagcatcttcaccatgtgcgagctgcccagcaccatccccatcaagcagaacgcccgccgcagcagctggagctctgacgaagggatcggggaggtgctggagaaggaagactgcatgcaggccctgagcggccagatcttcatgggcatggtgtcctcccagtaccaggcccggctggacatcgtgcgcctcattgatgggcttgtcaacgcctgcatccgctttgtctacttctctttggaggatgagctcaaaagcaaggtgtttgcagaaaaaatgggcctggagacaggctggaactgccacatctccctcacacccaatggtgacatgcctggctccgagatccccccctccagccccagccacgcaggctccctgcatgatgacctgaatcaggtgtcccgagatgatgcagaagggctcctcctcatggaggaggagggccactcggacctcatcagcttccagcctacggacagcgacatccccagcttcctggaggactccaaccgggccaagctgccccggggtatccaccaagtgcggccccacctgcagaacattgacaacgtgcccctgctagtgccccttttcaccgactgcaccccagagaccatgtgtgagatgataaagatcatgcaagagtacggggaggtgacctgctgcctgggcagctctgccaacctgcggaacagctgcctcttcctccagagcgacatcagcattgccctggatcccctgtacccatcccgttgctcctgggagacctttggctacgccaccagcatcagcatggcccaggcctcggatggcctttctcccctgcagctgtcagggcagctcaacagcctgccctgttccctgacctttcgccaggaggagaccatcagcatcatccggcttatcgaacaggctcggcatgccacctatggcatccgtaagtgcttcctcttcctgctgcagtgccagctgactcttgtggtcatccagttcctttcttgcctggtccagctgccgccactcctgagtaccaccgacatcctgtggctgtcctgcttttgctaccctctgctcagcatctctctgctggggaagcccccccatagctccatcatgtctatggcaacggggaaaaacctccagtccattcccaagaagacccagcactacttcctgctctgcttcctgctcaagttcagcctcaccatcagctcctgcctcatctgctttggcttcacactgcagagcttctgtgacagctcccgggaccgcaacctcaccaactgctcctccgtcatgctgcccagcaacgacgacagggctccagcctggtttgaggactttgccaatggactgctgtcggctcagaagctcacggccgccctgattgtcctgcacactgtcttcatttccatcacccatgtgcatcgcaccaagcccctgtggagaaagagccccttgaccaacctctggtgggccgtgacagtgcctgtggtgctgctgggtcaggtggtccagacggctgtggacctgcagctgtggacacacagggacagccacgtccactttggcctggaggacgtgcccctgctgacatggctcctgggctgcctgtccctggtccttgtggtggtgaccaatgagatcgtgaagctacatgagattcgggtccgagtccgctaccagaagcgacagaagctgcagtttgaaactaagctgggcatgaactctcccttctgagccactggctgtggtggctgtagttgcccccgtccctggggctaaagccagacccatttctgaacaggggagtttgtatcatgaatgtttccaggtttgctcctgcacccgtggcactggaaacccagctccccgtgtcagaccccgctgtcttcctgagccctggggctcactgtggaggagctgacggcctgggcccttggccagtcctggctcttccctgggcctcaccagggacactcttgaatgtatggcctcaggcgctccctagagggggcctaaaccccctcacctgtgagctaccccctttagggatcccttgcccccttggagatcccttgccccccagtgcctctgctcgtgggtccctggacacggccttgaagccaaccttctttggaggagcaacagcagcagccttggccgacgcgtccaactcccaaggctgccgtggagggcaggggggtggtgcttgcctggatgtggccccgagtgcctcccctccctccctctgtgggggagtctccctgccctcaggtgggcagtcggggctcctgctgtggtccgaagcccctcccccattgtgtcctctcaggcagttgatagaataaattccatttaaaatatatgcatttctctctgcttagaaaataacatttacaattgaaaagttaggacttgtgggatctgttaaccccactgcctcccacccctgctagccctgcctcagtgagggaaggcgggggcaggagctgcctgggcaccaccgctgtgtatttacatgtcctctgtacacctacggagagggggcccggccagacacacgcctcctccagcctctcagggcctgggcaggatggtgggtggcaagaggcattcccttggcacaacttgggacatgggctggggggtacagagaaagcacccccaaagccccacccctacttcctccctgaggagagagctcttaccagggtccctgtccaggagcagggctgtcctgctcaatcgatcaaaccctgggaggggctttgctgagatgcagcggaggtccctcgctagtcaggttctaaggtgggctgccccacaagagctgtggtgcccacagccgcgggctgagtgggaaggggccctgctaggaggggcacttcagcctgaccagcccttggcccgtccctagggtggcaggggcctcttctgtgctggggcaaaggcagtggacttcggcaggtcacagtgggcactgctggagggctcagtccagcatggcgtccagctggtcagccagggcgtcgaacatggtgctgatgtcatccagaatgtgcttggtggaggcgctgggggtgccctcttgctccttggtgccaatgctcttctctgcggctctcagtgcagctgccagggacgagctggtctgctccagtctctgctgggcctggcctgggcccacagtcccagtgctctcaggccgtggaggaggcactgggcgggggccgagccggggcgctagcttagggccagaaaatgccagctgggtgcaggccaccgacacaggcttgggggctgttcctgctccgggcaccttgaggagggcagcaggggcggccgggggttctgtctccccattccaccgactagctgctgagctttccagacctggccctgggcagggcggcactggaggctgcatggcggggctgggagcaaggggggttggaactccttgggctggaaggctgctgggctcgggctggggaaggctagaagctggaggagactcgccaggagttggggaaggcagtggggcagcggggccaggcgtggcactggccactccgaaggccagcagtgcggtctgcagtggctctctctcccggcacttgggcctccgcttaacagtgtctgattccgtgaggttgaaatcgaggccggggggcacgggtgtctctcggggcggggggccagcgggcttcgggcgctgtttgatggtcaggttcccttcctctgcaaacggcagcccttccccagagctgccccgagatgggggcgtcccctcagggcctggctcctcctcctccgtgtctgacgcgggcccagccggggcaggtgggccagggggctctgaggggccagcaggttcactcagtgttcgccttcggggccctgtggccccttccttgggccctgggctcccatctagtggaggtggctccgggctggggccagagacggagctgaggcgcttggggggcgggggcggggggcctttgcgccgggcccgcagggcaaaggactggctgcgaggagtcccccgagctggggttggggtcacgctaggactggtccggacaagggcactgcgtcctggccgccgggtaagggtagcataactgcctagggtgctgcccactggcccttcggcctccccctcagcatccccctctgtgggccaggcggcttaggctgtgggaccggcgcttaggtcgaggcgggtctgggggagtggcagggggcccggccaagtaggagaaggcccagggtgcgccaggaggtggccctggggccgggctagagggtgagccctgggggtacataaaaacatagggtgggggtccttggccaggaagtgaagaacaaagcttaggggccgctctgtgccctctgggaggttcctctcctggggggggctgggatctccaccgctgggctgtggggcaggctgttcctgtgagtggccagacccccgtgagcgtgccccgatgctctcctggctgggagagcgggcaggtgggagggggagtggttcagggccaccccctgccatggccgcctgtagctctgggcttagttcgctgccctggaaggtgaggagccgtgggccagctgtagctgggccttctccgttctccagtccctcgatggccatcagctccggacccttggccagccggcgcccgccttcgctgagggcctccccctgcagcaggccccgccgaagctccgccagccgcttcacccccagcatgagcttcttctgatgcccgagcttgttgaccccaatctcctgcagctcctcccaggtgaggtcggccaccagccccatggagtcgtagccgctgctcaccagctgcttgtggtactgtggcagccccagtgcacacagccactccagcaggtccgtctggaagagcaccgtcctcagnacanntnccagccagcctccgcccccagccagaggagaaaaggcaccgcaaagccacagctgagggcgacagcacgtgccccactccccagccacccttgatggctcactgggatgtagctgggcagccactcggcgatgctgagctgagcgatctctgaggcgatcttcttcctgtgcccaggcttggtcaccccgatggccgtcaggtcctcaggtgtcatgcggctgatggtaggcacatcatagccggcctgcagaaagtgggcagtgtagccctccagctggaactcgcttagccagttatgaatggcctgcgcgtccttcccctccagcagctgttctggccgcacgtcctgggtgaagatctgctccccagagcggcagttggccagagggcggtggctcaggttgtctgccagggacggcgggtggagtcctggcagcacctggtcctctccagcagagggcagtggctgggcgttctcaatcaggaggccagggccatggccattagtgccctcagagctctgcccgctgccggcactgcggatgctgcccacgctgccctcactgcccacactattcctgtcacctgctgggctgtctgggctgaggcccacccgaggaagctggctgtaggtaagagggtgcgggggttcttcggcaggaggctgcggtgtccgggagaagcctgggcgcaggggggtgggtgcggaggggaggcgggctgcagggatgcccacccgcttgctgaccacctcgacaatgcccggggggaagtagcctatgcggtctgtgcccctctggctctcgtggatgtggcccttccagcggccgtcgggatgctgttctagcaccgtgatgacatcccctgcccggacattgagagcagtgggatcgtggaggttccagaaatccttgagcgctcggaccttcaggatccctgaggcctcccgcagtagctgcttgatttcccggctggcctgggaggtggtgaactgattcactatgtccagcgccgtctggttatacgtattccggatgttcacgtccacacctccctccagaagcagccgcaccacctcggtcttgccatacagtgcggcctcgtggagcgccgtacccgtcttggtctggcggttgatctcgatcccagctctcaggagctgcctgatgacttctctgtggccattcttggcagccaagtgcaggggcgtggtgtagttggggtcacacgggtctttggcctcaccctccagcagtgccacacataagtggctgttcagaagcagctgggccaccttgagtcggccaaattcacaggccaggtccaggggcgtcttcttggccttgttgaccaggcatgggttggactgatgctggaggagcatttctgacacctcataatgtccatactgtgcagccaggtgcagggggatctgtccgtccagcgaggcggcattgacagccgcagaggcgcgcagcagcagcctcacaggctccagccggccctgccaggctgcgtagtgcagcgggcgcatgccattgctgtccttgatgtcaacagtggcctgagcctctagcagcaaggctatgagctccaggctgccccccaaagcagcgtggtggagggcagagaatccatcagcatcctggtagttcacgttgagcctctttgtggagcccaggagctttgtcttgtggccttgaccttcgccaccagtttctgcacaccggtcacatctccattcttgacggcgaggatcaggtcctgttcacgacccatactggctcctgggctgagctctacactcaggagtccagggcaaaggcaggcaacgggtccaagctggggcgtcagggcgccatgccacagccccttggagggctcccggttccgggggagcaagtctggtgtcccaggcagtgggctcctcgtcaggtactgagggatactcccaaaggtgctccgtgaactgccaccacacgaaggaaagctaatctttgagggggtgaaggctacatggaaatctggatggatatcagcttgtggcttccgacagctccaggatgggctgggactgggcacaccaatcttcccggcttggctgtggaacaccagtgcccacccagagagcagccagcattcccttgggcctcaggcagcagcggtgcactggtctcagggctctctcccgccgcccgccgggtccggctgcctgctcg

SEQ ID NO: 542320 - DNA, 370 bp, Homo sapiens
tggctctgagcgaactgctaggtggcacccataaagcttgtgatgacaccaggaactacagatccccaaagatgttgtcacagcccttgtttcatggcagctctctaggtctggactccccaaagggttcatagtcgtcttccgtccttttttgccagcagcatggtgagtggggggtaggaaggggtgtttcagcactgtttgtgttacagctcttcgagtcccaccatttggcgggtcccgagttcttgtcccacatccagagagaatgaggtacacagatagttggagggttagcaaggcgaagaggggctttattgagcagtagcacagctctcaggagacccaaagtgggtggctcctttccaca

SEQ ID NO: 542321 - DNA, 345 bp, Homo sapiens
  misc_feature (15)..(15): n is a, c, g, or t
  misc_feature (214)..(214): n is a, c, g, or t
  misc_feature (248)..(248): n is a, c, g, or t
  misc_feature (328)..(328): n is a, c, g, or t
  misc_feature (343)..(343): n is a, c, g, or t
tgaaggtagagtttnctgttaacagaagcaacataaagcatggtgtctagtagagggatgcaaaaagggagagaattggttagctagggtgttttggtaaaggaccaatgatgtgcctcatggaaaagatccctattacactaggtggggctgctggccttgaaatgtcatgtgcttttcagaccaagggcagagagagatgctccctatggtnagggtgaccctctgttccttgaaaatcacaaagntgccctcccttgagctatatccctgggttactatgacattccctcatcttgccaaacaaggttacctccctggaactatnaaaatttcccatacntt

SEQ ID NO: 542322 - DNA, 846 bp, Homo sapiens
gcttaacgggtgtccgacgcgtcttcggaacccagttgggggggcgaagaagcgccaaagggcgatgtggagcggtacgttgcctccgtgctgggtctcaacccgtcggctccaccgaagtccatgaaagggttctaattttggcaagctggattatgaagcttaagaatatgatcttggctaaaaaatacatatgtacttacattaatggtgccagagagggatccccaagctcacagatttctggggtcttctttatgaacttggaagaaaacacagagaaagccggctgaaatggtacagggggttcagtggaaattaacccaacacaaaaagaacttggtggttgaagattggagaaattggtttggtaaaaatgatgttctgatggaagaagcaaaatactggggtcgaaagagcagcaaaaacttttgccaagaaggtctggccatttataaactaaagggacagcttctaaattgtgaaggggaagatgggtggcatataactttttgacttgattccgtccgaactttatgttagaaccgatggacggtcccatgtgaaccttcggggctaaggggacgttggatcgtccaaattacacattgcagggatgctggggcccccggccatgaggacagcaggacctagttagggtccagttacagggaatccggtgtggacaaccctacgggtccggagcctacgggtggagccgaaccgacggcccccaaacattgggggcaggaaaagatgccccaaaaatgcccacaactgggaggaaagctcggacccggggaaagggcccgggacgcccccagccaccccccgcgcctccacagc

SEQ ID NO: 542323 - DNA, 298 bp, Homo sapiens
cttatactttattgctcaactttaattaaaatgattgataataaccactttattaaaaacctaaggttttttttttttccgtaaacttgcccctttttttaacggggggggggatcctgtggtttttaattttccctatttttaagggttttggtggtttttgaggtttcatcgggttttgccttaactttttaaatgggtttttttaatcggtttacctaattttaaattcaaatttcccatttttaaatttagggcaaattttgggtttttgtttggggcttttgaattcttaaaa

SEQ ID NO: 542324 - DNA, 711 bp, Homo sapiens
  misc_feature (394)..(394): n is a, c, g, or t
  misc_feature (679)..(679): n is a, c, g, or t
gaccaggtgcaggcctgtggacgagcctgcttctaccagagtagaggattccctttggtgcgctatgcttacaatctaccaagagttaaagactgcaactgactgtgtgtgtacaccgttctcccccggtcaaccgaatagatcgagctgttttatgagagtggaaccctagttctcatctttcatctgggaaagcgacttctgtgaatcgactgcctggtgtcacttagaagaaaggcagtaggtggcaggttatatttctccataccagtcattcttccaagaggaacagggtgccctagagattatcaacagttggggtgagagagacatgcgaatggtccgaagcagagtgtattgatcgtgctttggaaacgaaatatatgcacgttgnacaccaaggcagtctataggctgtacgtaggcaggcaatataactggttaggtgtgttaatgcgtggagttctcgagttagagcaaagtcaaaaatattgatacgctgagttttggtttgattaatctcaaatgccgagccaaaggaattagaaatgcaatcaggactcgttttgaaagttatgtgtatctctgagaaaaaactgctaaatgttttgagaaatagtggtgaaatttgtctccctcagtaaacctttgaaaagggaaacataatcaattcgtgtgnccttaaacttttcttgaacccctttagagtgg

SEQ ID NO: 542325 - DNA, 92 bp, Homo sapiens
ggaaagccatattattgcaaataaataatagctgatttttcaacagacccagaagcagccagaagacaatggattagcttcttttaaataca

SEQ ID NO: 542326 - DNA, 651 bp, Homo sapiens
cagactagatctctaaggtccaagcgcccctcacctcgaggagattaaattttactgagatacagtagtgactttagggaccgaccgtggacgcaagggtcatgtcttaaatgccaaagaacaggccttcaccgaaaggatggcggtaagccagaataacaacgatgagcaaaagcgagcaggaactaaccaagaattcaaacaatctggataaagagcacggctcaaaaaggaggttggagctaaaagaagaggatgatgttaaaaggaatgtttaaaggaacaccacctacgaggaaataaagcaaagggaccaagacatgttactgttgctgaccgggtactacaaatgcatacaaaaggcttaagcctgaaagcctgattgcgaaacggaggatctccttctgggattaccaacgaatcgtgatcaatatgccagacatgaatatcgaactttatggggtcgaaacgggcctatttcagcaagtaaaatttgtcagaattgactaaatggccctcccaaaaaaaaaactcttttagaaagcaagatgacacaccttacaactgcatgcattcaaaaaaaagggtaattttccctaaattgcctgagctctaaagaaaacatttcagggaaggaggcttaaaaacaaa

SEQ ID NO: 542327 - DNA, 295 bp, Homo sapiens
cggaccgcaccaccctcctgtcaccccgcaaacccgctccccggccaacctcaggagaggatggggccacgggcgccccatggggtgctgtttgccccctccgccaccggccccaacctgccggcgggcaaaatgaagccacgcgagatcccgcttcagactccttagctggacgaacccgcgccattgagggccgcggggccaccacactggtcgcgtttgatgtccgcgttaggtcccccctcgcaccgtgatgacctctgagagtgagctgcacgtccccgcggtttcccac

SEQ ID NO: 542328 - DNA, 173 bp, Homo sapiens
  misc_feature (65)..(65): n is a, c, g, or t
  misc_feature (73)..(74): n is a, c, g, or t
ccgttttcacatacataacagcaattttatgacctgtatggccacagggagagcaaatgcaaatnaggaccanngtggaaaccccaacaaccaaacttgctgtgggggtcaagaaggaggaaaataacccacgggagcaacatattgacagagcaacctaaaatccactctgg

SEQ ID NO: 542329 - DNA, 498 bp, Homo sapiens
tacagcgtgacatgcccaatgcaggcagggatgctgtgtggtgatattgccaattgttcctggcgtggtactgggagggcaggcctcctaggtagaacaacccctcgacatccagcatggttccatctcccaccagagtcaccaggggagcctctcggccgtcacctgttactgaacgccttatcttgtacacatacgtctggcttgactcgtgtgccagttgccatcactgagcagggccgggggagacgaccttggttctgcctttgccacggtcgaggactgaagtggaggcggtccccgtgcaggtggagcacactggtactcagcttggttctgactgacgccacggtacgtagactcaggccgctggaggtgacacgtgcggatgcgttagctcaccccgtgagcttctttctgaccagccgcctgacttcaacacggccgactgacagacgggctgtctggtgtgagagcaacgtgatgagcgccgggaac

SEQ ID NO: 542330 - DNA, 111 bp, Homo sapiens
ccacttggtggcatggtcttggctggtacataagctttttcacttccaggtaatcctcattggttcactttggctcaggtggcctcagcaacaagtgcatggttccccgct

SEQ ID NO: 542331 - DNA, 554 bp, Homo sapiens
ataggcagtgatcgaactcgtgtacctgttggagtgttgttgcccaggctggagtagtggcaccatctctgctcactgcaacctccacctcctgggttcaagtgattcccctgcctcagccccctgagtagctgagattacaggcacccaccactatgccaggctattttttttttttaatagagacagggttttaccatgttggcaaggctggtctcaaacttctgacctcagatgatccacccatcggcctcccgaagtgctgggattacaggcatgggcaccacgcctggccagatttgcattttttttactgttatattgagtaatggtgctatgcacattcatgtacaagtatttgcttgagtatctgttttcacttcttttaggtatatgcctaggattgaaagtgctgagtcgtatcgtaattctgtgtttaactttcaaatgaggaacggcgaaactattttccaaagcagttgtaccagtttacattcctacctgtagagtatgagggttccaatttctccacatcctcaacaagcactccaaca

SEQ ID NO: 542332 - DNA, 141 bp, Homo sapiens
cccctttttgggggggccccccccccctttttttttttcccagggggggtttttttgggtcccccctttaggggggaattaaattcgccccttttgggggtttttttttccccttttttaaaaattcccccccaggcccca

SEQ ID NO: 542333 - DNA, 712 bp, Homo sapiens
  misc_feature (605)..(605): n is a, c, g, or t
ggcagcgagaggtcgcgggtgcagcgcacaggagaccagtgtcgggggcagcagctgcgagcacagaccccaagccgggtccagtccccgccagctcgccgggtggtgctcggagacggagatgcagctcccggccggagtgactacagcacgacccccggcagtgtacgctcttcagcaccaccccgggaggtaccaggatcatctagtgaccggaaattcctgatggagtgtctggaaactcacctgtgaccaaaatcactcccacaagggattctgtcccatccattccgggggtcatccatgcccttccagtgatgagccccccatgtgaagccagcctatgagccacctgcgtcaagtagcccagaagataagcgcggcgtgccgggtgacagagtcaccagtttgagatgtacatttagacagcacgcagccatcggtgttggagcacataccaaggggcccctcagggccttcctgggaggagtcccatcctagcacagtgccttatgaaagtgagtcatactgggcaggctgttggcgtggggtcgggacacctccatggcctttctccctctacttcgagggcaccgtgctccccntctctcttcgtgatcgactcgatgcagatacctccttgtgctctccatctgattgctacggagcttgccgatgcccagggtggacgtgaccgccgtgccagcacacc

SEQ ID NO: 542334 - DNA, 962 bp, Homo sapiens
ttcaggttttgcccaccgagtttgccgttctttgattggttctgtcacttcgcgctggtgccctttgtcccactgcggaacccgtgggctatgctcgtcccttttagaccttgggcctctcgtctggggttaactgggagaactcctgcgagcgtggcacgcggtgccccccggccgtgcccacaggtggtgccgcctcacagggcccacgttgtgttttgactcgccgccaccaacaggcattgtcttgtccccgccgcaatttgcttgttgctacagagcctcgctacctaccatgtgtgggtacgaacaccccgtgtgcgttgtgaacacttaacgggcctggaggcacgttcgtggagaggctccccccgcaatttggtggctgtgcccccccggcccgcccctgggggccgatcaccaggtgcgggcacccctcttgttctcgggccccgcgcccctgtttgtgttgcaagaccccaggcttcgtatccatagcgttggtactaccccccggaaatacttggtttctgttgggccggcccatgcggcgcgtgctactcctccctttgcaagcatcggcggcatccctctagcgcccttgatgccacgaccacagtcttctgaacgcccgccctttcttttctcacataatcattttccacaggcctgccactgttggcttccacccacccgggcacgcggagcacacaaagtcttctgtcttctctaacagaatggtgctctcaagaggacgaggctggatggtggagagagacctgctcgggacaccacgcttcgtgacggatctttctcggcccttggatcttcttccgggagagaggagaagacgacatcgacacgacgtgttcgatgtctcatgttattctgtaaaagtgttcgaaccctccttgcccccaaaaaaccaagtaatctttccccctgaacaaacatagacgcaa

SEQ ID NO: 542335 - DNA, 600 bp, Homo sapiens
  misc_feature (1)..(1): n is a, c, g, or t
  misc_feature (72)..(72): n is a, c, g, or t
  misc_feature (76)..(76): n is a, c, g, or t
  misc_feature (190)..(190): n is a, c, g, or t
  misc_feature (198)..(198): n is a, c, g, or t
  misc_feature (202)..(202): n is a, c, g, or t
  misc_feature (238)..(238): n is a, c, g, or t
  misc_feature (240)..(240): n is a, c, g, or t
  misc_feature (249)..(249): n is a, c, g, or t
  misc_feature (256)..(256): n is a, c, g, or t
  misc_feature (274)..(274): n is a, c, g, or t
  misc_feature (330)..(330): n is a, c, g, or t
  misc_feature (367)..(367): n is a, c, g, or t
  misc_feature (399)..(399): n is a, c, g, or t
  misc_feature (408)..(408): n is a, c, g, or t
  misc_feature (434)..(434): n is a, c, g, or t
  misc_feature (439)..(439): n is a, c, g, or t
  misc_feature (441)..(441): n is a, c, g, or t
  misc_feature (447)..(447): n is a, c, g, or t
  misc_feature (466)..(466): n is a, c, g, or t
  misc_feature (540)..(540): n is a, c, g, or t
  misc_feature (550)..(550): n is a, c, g, or t
  misc_feature (552)..(552): n is a, c, g, or t
nttaggctttctctattaagtaattaatcctaactatatccttgggctgatttggtttctgcccccacccgncagnctgacccttgtcccccttccccattccagctcaaggcacttaatattacaaagaaggcagtggctggctggagagatgggcctctagtcagaaatcccccagtgcaacttaagncaaacagngagnagtcaccttcctcttaggcccctccctgggttagcngncggccagancccagangtcttcagtaccacagtnggcttcggtatctccctagcccggtgaggggccccccggcgttctccctgcccgcnccgcgtctctcttccccctggcttcttcctggccgcncgtatggctctgccccttactttctgctctgngctgcctgnctcccggccgccagagttccctctgncccgngntcccgnagcctgccagggggccccngcagctttccggactggggggccggtggccccctgtggcctgctctgtcttttagcgtcacaagccaggagccngccccggggngntgctgttccgtgctggcctgtgtaggttactttgctcgttctattatc

SEQ ID NO: 542336 - DNA, 1074 bp, Homo sapiens
ggatatcaggacttccaataaataaagactgttaattcctaaaaaaaaaaaaaaaaaaaaaaaaaaaaaaaaaaaaaaaaaaaaaaaaaaaaaaaaaaaaaaaaaagaagaaagaagaaaagaacaaaaaaaacaaaagaaagacaacaacaacaaaagcgcaaagacacgaacaagagtgactgaagagatggaggatacaagtgcgagctgataagcacctcgctatcctacctcaacacatcactctcgcccatgcaccaaatgcgccgagccccaacagccaagccaaaggaaaaaaatacacaccaacaacaaggaacaaaaacaagagacacaacaaggacaacaacaacaaaaacacgacaactcgctcgacggggcgtagacgagggtgcaaacaaaccaagaagaaagaacgaaagaagaacgaaaggaaaaacagagaggagaagaacgaacgaacagcctcaaagagagagaggcaaccaagagaggcaagaccgagaacagcaactgaggactatagtacgcagagagagtaacaagaaacgctcacaaaagtgacggctacaaccagcagagagaaggggatagcgccggacgcaagagatgcagaaagatagagggacgcgaagagaccaactcaggtacgagaagcataatcgacccaggaagacaagagacgaatcatagacaccgccaaacatcaagagaagaaaagaaacgacaagaagaaaagagacacaccacaaacagaccaacgagaagacccaaacacagccaaaaaagacaaagaaagaaaaaagagagcagaggtagaagcgcaggaaaaaaaaagagacagcacaagaccaacccgcaaaaaaaaagaagcagaacaagaacgcaagcccacaaaacaagaagaaagaaagaacccacaaaagaaccacaatgcagaaacacgcaagaagaagaaagaaaaaaacacaacaaaaggaaagacagcaaagagacacaagcaacacaacgaccaacggacaccacaaaacaacaaaacagacaacaacgacaaaacaaccacagcacacc

SEQ ID NO: 542337 - DNA, 932 bp, Homo sapiens
tctctaagatgtgctttaaagtagatagtatactttacattgataaaaaaaaaatcaaatttggttcttcatttgtgtgtgcctgtgagtgttggtctgaaagtgaatgatagtggttgacgtgaatccgcattgtggtatcgattccatactatgcgatgaagtattagtgatactagccatgtaagtagcatggatggcatcctgtggaatgaatggggaaatctgcacctgaaggaacgtgtagaagattatagaagtagctcgcgtaatggaaaaaagtgccctgaatgtattagaacaaactgtacgaattgcttacttcttgtatcggcagacatacgtgaaaatcatattgggggatgtatactatgaagcaatggtctccatgtcttaagttggctgtaactaagtctgaaagaacgagaacacggttttgtaaccttagagtagccctactatatggttgtgctcatatagatccgctaaggtcggcacgtgtctccgagataagaggaggagagatgtttttaaaccctctttctgaagtttgtgtgacctgacatggggctaaatatgggatactaaaaacactaccttggggctaagaaagaaactaggcctgcggagtataaccggtggctcggccttatacgcaccaaaatcccggacggaccgtcgggggctgatcataccaccctggactccagacagcttgccccgcggcagtacaagggcgggggaccaaccccaccagaaccctaagggcacgggacacacagtcagtcggcggcaagcccaaacagacccaccgcgcgccacaacacaacaaaaaacgaggcacaacaccaacgggagcgcacgacagaccaacaccgccaccgcccaaccgccacgccacgcgagacaccacagcgcacggcgcaccgcac

SEQ ID NO: 542338 - DNA, 653 bp, Homo sapiens
tattaagattatgactttttaaattgcataggcaaaaattattagtttaaaattccagatctcttcatttctatcaggcatatctattggtaattttatcaatgtttatgctcatgcctagttagtacttcaattagcaaattaattgtacttttcataaaatacctttttaaagtaaggttgccagattaaatgcagtttgcccagttaaatttgaagttcagataaacaacaaatagttttgttccagttaaatttgaatttcagataagagcaaatcgttttgttttgttttcagacatactttttcacatagtaagtacctatacaaaaaagtatttgttattcatctgaaatccaaatttcactatttttttctttgttatttatttgtatatttattttatttttgtctggaaatcctactataaagaaagaagtataggaaaatttattggttaaaaacatgttatatatcaagctatctgtcttagttggttcaggttgctataagaaagaccttaggctgagtaatttagacagaatctatttctcacagttctgggtgctgggacctccaagatcaaggtgccagcagattcagtgtctggtgagggtctctccttcaaagttggcaccttctatatttcctc

SEQ ID NO: 542339 - DNA, 782 bp, Homo sapiens
cacattgctattttcatagtacctatttttgtcttaagaaaatgacattagtttgtaccttcactgatcttatcagaaaattctttaagtattaggcaactcttacactcttggcggcagaaaatagttttccaaattcaatttttcatttgaaaacttgaattttatctttcacaacatatgctgtgtaattgtttttcttgaagtgacacatttacttcattcattttagagaaaatgtccaccaaatacccaagtctgaacaaccatagtttgtctgttagtcattctttcaaataaaaatggtgttacatgaagcaaaaagcaactaattcagttcacaactcaaaggttcacgtaagtgcttttcctggagacaatgatcagacttcagagtgcaccagaagtactttatttctgtttcccattttaacacacaaaatgttagaaagtcttgcagtcaagggtcaagatttaattaaatgaagagtttttacagcttcattaaggagattcttaaataaatttggctttttattccttttcctacaattgtctggcagtgtaatgttttctacttcatgaattcaatgattattattattgttttgtgtccttgccttaatttgtgctaagtaccaggaattttacctaactttgttttataccaaatttggttccgtattacaatggacatggaacatgtcaacagagtgaaaaagacatcttagaattatcatgaaatagttttgagcccctgtgccctctcaaagtgtcccagg

SEQ ID NO: 542340 - DNA, 173 bp, Homo sapiens
taggaatccgtcaagataggaatccctttgccgtggcggtgccgagtttcgcctgaattctataatcacgtaacagcgagtactgtatgtatgtcggtaaactgttgtgacatttcatgaggactatcttgttgccataagaacttccagagagaatctatctctgaaaaaga

SEQ ID NO: 542341 - DNA, 405 bp, Homo sapiens
aaattccctgctgctcttaaatgtgccaaagccaatttcttctgtacgccgactcacaaatgtcttatgtcgcggtgaccagactcaatgtatggcattgttatttagcttcccctatagtatgtgtctatttcacagatagtcatagatgtaggtccgaaaaggcagggcctggcatggctgaacacttcagagttcatacttacgcttacggatggggattaattataatcagatgccctcacccttgtttaggtaatggccgctccacccgtcggcatgcattattctgccctaacatggctagtcacagcagcctgtgatgtgaatgtatgcatcaaagcacttacagttcatgcttatccaagtttaagtcgtttttcccctaatatccaataagatagt

SEQ ID NO: 542342 - DNA, 177 bp, Homo sapiens
gggtacccctcaccaatgaccctgtcctcacaaaaaaaaaaaaaaaaaaagggaagggccaactcttttaagaataaaaaagtttttaaattaattcctaagaatgtgctttagttagtttttattttaagaagaagttttaaaccttctctatatttttaaattgttgggtgtctc

SEQ ID NO: 542343 - DNA, 872 bp, Homo sapiens
  misc_feature (305)..(306): n is a, c, g, or t
  misc_feature (381)..(381): n is a, c, g, or t
  misc_feature (427)..(427): n is a, c, g, or t
  misc_feature (441)..(441): n is a, c, g, or t
  misc_feature (554)..(554): n is a, c, g, or t
  misc_feature (594)..(594): n is a, c, g, or t
  misc_feature (602)..(602): n is a, c, g, or t
  misc_feature (604)..(604): n is a, c, g, or t
  misc_feature (850)..(850): n is a, c, g, or t
tcacccaggcatctcctccatatttatcctccatcccttccatcatcaccattttttttaccaaactccttccatcccttcttcttcatcatttcctccttcatctcctccttctccccatcgccatcccctattcatattgacaaattaaaataataaatacaattcattaattcaaaaaatcatcaaatactaccctaatcaaaatatatccatcacttaatataaaaaccaaaaaatttaatactgcataccaattttctaatatatttactattaataaattacttccattcactttcaannctttttttttttataaatcaagaaaacaattcctcttgttccccttcaatagcatttcaagttgagttaaaaaanaattttgccattaattttacctctattaaaacaaagactacattanaaacttcatcattngtaaaggacgcagctacaagggaacagtatctatcactaagagtggcatcaaatgtcagccctggagttccatgataccacactaacacatcttttttccttctatctatctnggtaaagacctacaggaaaactactgtcgaaatcctctangtgaatangngtgacctggtgtttcacaagcaatccagaggtacgctacgaagtctgtggacattcctcagtgttcagaagttgaatgcatgacctgcaatggggagagttatcgaggtctcatggatcatacagaatcaggcaagatttgtcagcgctgggatcatcagacaccacaccggcacaaattcttgcctgaaagatatcccgacaagggctttgatgataattattgccgcaatcccgatggccagcngaggccatggtgctatactctt

SEQ ID NO: 542344 - DNA, 270 bp, Homo sapiens
  misc_feature (206)..(206): n is a, c, g, or t
  misc_feature (268)..(268): n is a, c, g, or t
catggcccctttgaacacctgctggttattatacagcagccacgtggcatggccatcacctgtggaatagcacagagtaacacacctggttctgagtctcgatgcttcatgcattggttatcagttcattcaggcactgcacggtctagtcaatattctccgggcttagcaaagatccccgtaacttcttaacatatctgctccanagctcttgaggccagaaccctcttcctccttgctggtcttccagatagtcacggatgatgtntg

SEQ ID NO: 542345 - DNA, 365 bp, Homo sapiens
cgtcgacctgaaactgaggaagtctggtcagttatttttactagttgagaatagaacatagtttacatacttgcctacccactagaagagtggttagggagccagaaccacctccccagcattgctgcccagcaccttctgctcacctgtgctacctcaaaacatggcagcaaatctttctgcccatcttgacctctcctactggcatgggctccctggttcttttctggcaaacctgaggcagataggacattacatgactccctagctagggttttccttatgcatgcatttgtgcctgtgtgtgttgtttgtgtgtggggtatgtgtgtgtatgtctgtcacttcagattgtgcgtcgacgc

SEQ ID NO: 542346 - DNA, 5486 bp, Homo sapiens
actttagctctctggccggcgcctctgttgcccggaagggaggcaagcccccttagagttgccagtaacggacatggctgcggcccccggaggaggggacgtgaagtgaggagggggttgggaggggagaggacgcgggcgaggaagaccagccccggggccccgatgttgtgactgtgacagactcactggggtttgtacatgctggggaggagccttcctttcaggggtgaccacattcatctgggcatgcctgcagtactcttggcccatggacctgaaggagaagcacctgggcgagcctccctcagccctgggcctgtccacgcggaaggccctcagcgtcctgaaggagcagctggaggcagtgctggaaggacatctcagggagcggaagaagtgtctgacgtggaaggaggtgtggagaagcagcttcctccaccacagtaaccgctgctcctgcttccactggccgggggcctcactcatgctactggccgtgctgctgctgctgggctgctgcgggggacagccagccgggagccgtggggtggggctggtgaatgcctcggccttgttcctgttactgcttctcaaccttgtgctcatcgggcggcaagaccggctgaagcgtcgggaggtagagcggaggctgcgagggatcattgaccaaatccaagatgccctcagggatggcagggagatccagtggcccagtgccatgtatccagacctccacatgccttttgcgccatcctggtccttgcactgggcctacagagacggacacctggtcaacctgccagtcagcctgctggttgaaggagacatcatagctttgaggcctggccaggaatcgtttgcttctctgagggggatcaaggatgacgagcacatcgtcctggagccgggagacctcttcccccccttctcccctccaccctcaccccggggagaagtggagagagggccacagagcccccagcagcaccggcttttccgtgtccttgagacccctgtgattgacaacatcagatggtgcctggacatggccctgtcccgaccagtcactgccctggacaatgagcggttcacagtgcagtcggtgatgctacactatgctgtgcccgtggtcctggccggcttcctcatcaccaatgccctgcgcttcatcttcagtgccccgggggtcacttcctggcagtacaccctcctccagctccaggtgaatggcgtcctgcccatcctccccctgctctttccagtcctctgggttctggcaactgcctgtggagaggcccgtgtcctggcccagatgagcaaggcctcacccagctccctgctggctaagttctcagaggatactctcagcagctatacggaggctgtctcctctcaggaaatgctgcgctgcatttggggccacttcctgagggtgctcggggggacatcgccaacgctgagccacagttccagcctgctgcacagcctgggctctgtcacggtcctgtgctgtgtggacaaacaggggatcctgtcatggccaaatcccagcccagagactgtactgttcttcagcgggaaggtggagccccctcacagcagccatgaggacctcaccgatggcctatccacccgctccttctgccatcccgagccccatgaacgagacgccctcctggctggctccctgaacaacaccctgcacctttccaatgagcaggagcgtggcgactggcctggcgaggctcccaagccccccgagccctattcacaccacaaagcgcatggccgcagcaaacacccatctggctccaacgtgagcttcagcagggacaccgagggtggtgaagaagagcccagcaagacccagcctgggatggagagcgacccctacgaagcagaggactttgtgtgtgactaccacctggagatgctgagcctgtcccaggaccagcagaacccctcctgcatccagtttgatgactccaactggcagctgcacctcacctccctcaaacccctgggcctcaatgtgctgctgaacctgtgtgatgccagcgtcaccgagcgcctgtgccgattctccgaccacctgtgcaacattgccctgcaagagagccacagcgccgtgctgcccgtccatgtgccctggggcctctgcgagcttgcccgcctcattggcttcactcctggggccaaggagcttttcaagcaggagaaccatctggcgctgtaccgcctccccagtgccgagacaatgaaggagacatcgctggggcggctctcctgtgtcaccaagcggcggcctcccctcagccacatagatcagcctcttcattaaagacaccaccaccagcacagagcagatgctgtcccatggcaccgctgatgtggtcttagaggcctgcacagacttctgggacggagctgacatctaccctctctcgggatctgacagaaagaaagtgctggacttctaccagcgagcctgcctgtctgggtattgctctgccttcgcctacaagcccatgaactgcgccctgtcctctcagctcaatggcaagtgcatcgagctggtacaggtgcccggccaaagcagcatcttcaccatgtgcgagctgcccagcaccatccccatcaagcagaacgcccgccgcagcagctggagctctgacgaagggatcggggaggtgctggagaaggaagactgcatgcaggccctgagcggccagatcttcatgggcatggtgtcctcccagtaccaggcccggctggacatcgtgcgcctcattgatgggcttgtcaacgcctgcatccgctttgtctacttctctttggaggatgagctcaaaagcaaggtgtttgcagaaaaaatgggcctggagacaggctggaactgccacatctccctcacacccaatggtgacatgcctggctccgagatccccccctccagccccagccacgcaggctccctgcatgatgacctgaatcaggtgtcccgagatgatgcagaagggctcctcctcatggaggaggagggccactcggacctcatcagcttccagcctacggacagcgacatccccagcttcctggaggactccaaccgggccaagctgccccggggtatccaccaagtgcggccccacctgcagaacattgacaacgtgcccctgctagtgccccttttcaccgactgcaccccagagaccatgtgtgagatgataaagatcatgcaagagtacggggaggtgacctgctgcctgggcagctctgccaacctgcggaacagctgcctcttcctccagagcgacatcagcattgccctggatcccctgtacccatcccgttgctcctgggagacctttggctacgccaccagcatcagcatggcccaggcctcggatggcctttctcccctgcagctgtcagggcagctcaacagcctgccctgttccctgacctttcgccaggaggagaccatcagcatcatccggcttatcgaacaggctcggcatgccacctatggcatccgtaagtgcttcctcttcctgctgcagtgccagctgactcttgtggtcatccagttcctttcttgcctggtccagctgccgccactcctgagtaccaccgacatcctgtggctgtcctgcttttgctaccctctgctcagcatctctctgctggggaagcccccccatagctccatcatgtctatggcaacggggaaaaacctccagtccattcccaagaagacccagcactacttcctgctctgcttcctgctcaagttcagcctcaccatcagctcctgcctcatctgctttggcttcacactgcagagcttctgtgacagctcccgggaccgcaacctcaccaactgctcctccgtcatgctgcccagcaacgacgacagggctccagcctggtttgaggactttgccaatggactgctgtcggctcagaagctcacggccgccctgattgtcctgcacactgtcttcatttccatcacccatgtgcatcgcaccaagcccctgtggagaaagagccccttgaccaacctctggtgggccgtgacagtgcctgtggtgctgctgggtcaggtggtccagacggctgtggacctgcagctgtggacacacagggacagccacgtccactttggcctggaggacgtgcccctgctgacatggctcctgggctgcctgtccctggtccttgtggtggtgaccaatgagatcgtgaagctacatgagattcgggtccgagtccgctaccagaagcgacagaagctgcagtttgaaactaagctgggcatgaactctcccttctgagccactggctgtggtggctgtagttgcccccgtccctggggctaaagccagacccatttctgaacaggggagtttgtatcatgaatgtttccaggtttgctcctgcacccgtggcactggaaacccagctccccgtgtcagaccccgctgtcttcctgagccctggggctcactgtggaggagctgacggcctgggcccttggccagtcctggctcttccctgggcctcaccagggacactcttgaatgtatggcctcaggcgctccctagagggggcctaaaccccctcacctgtgagctaccccctttagggatcccttgcccccttggagatcccttgccccccagtgcctctgctcgtgggtccctggacacggccttgaagccaaccttctttggaggagcaacagcagcagccttggccgacgcgtccaactcccaaggctgccgtggagggcaggggggtggtgcttgcctggatgtggccccgagtgcctcccctccctccctctgtgggggagtctcccgcctgaacctgaagatggagcagggcccccgcttcgccctggagcctcttcctgtgcctggctcaagctggctgcctgtcagtcttggggaatctggcccaggtctcctcagcctctgccccagttctgggagaagtttctactggtgtatattttttactggaaatgagccttttaggaatgaatgtagactggtttgtattaaaatgtgtcaattgctaagaaaaaaaaaaaaaaaaaaaaaaaaaaaaaaaaagggggggggggaaaaatttccgaggggcccatctcccgttttttggacaggggcgcccctaatgagaggcgatttataacgacaaagagcggggccggcgttttaaacaacgttcgtgagtggggaaaaacggtacgtggcgattcttgggagagcggaaaccctattctgggggggtgaaattatttggccaactcaccctaaagaaaaattttaacgcgctttcagggtaaatttacaactttcacggtgatttagggtgttaaccaacgctcatatatatggctgccggtaaaacaaggttggctacaccgaagtattagttttttagaaatttttttaccagaacgttggtataa

SEQ ID NO: 542347 - DNA, 211 bp, Homo sapiens
acggagtcttgccctattgcccaggccgtagtgcagtgtgattacacgcgtgagccaccatgtttggccagaatattcttttttgtaaaattttaatctttaatttcattgtcttgaagagttttatatctaattatattttccatttctccttgagttaattttgtacaaacagtcaataaagattacaagactagtttaagtaaattaa

SEQ ID NO: 542348 - DNA, 5440 bp, Homo sapiens
actttagctctctggccggcgcctctgttgcccggaagggaggcaagcccccttagagttgccagtaacggacatggctgcggcccccggaggaggggacgtgaagtgaggagggggttgggaggggagaggacgcgggcgaggaagaccagccccggggccccgatgttgtgactgtgacagactcactggggtttgtacatgctggggaggagccttcctttcaggggtgaccacattcatctgggcatgcctgcagtactcttggcccatggacctgaaggagaagcacctgggcgagcctccctcagccctgggcctgtccacgcggaaggccctcagcgtcctgaaggagcagctggaggcagtgctggaaggacatctcagggagcggaagaagtgtctgacgtggaaggaggtgtggagaagcagcttcctccaccacagtaaccgctgctcctgcttccactggccgggggcctcactcatgctactggccgtgctgctgctgctgggctgctgcgggggacagccagccgggagccgtggggtggggctggtgaatgcctcggccttgttcctgttactgcttctcaaccttgtgctcatcgggcggcaagaccggctgaagcgtcgggaggtagagcggaggctgcgagggatcattgaccaaatccaagatgccctcagggatggcagggagatccagtggcccagtgccatgtatccagacctccacatgccttttgcgccatcctggtccttgcactgggcctacagagacggacacctggtcaacctgccagtcagcctgctggttgaaggagacatcatagctttgaggcctggccaggaatcgtttgcttctctgagggggatcaaggatgacgagcacatcgtcctggagccgggagacctcttcccccccttctcccctccaccctcaccccggggagaagtggagagagggccacagagcccccagcagcaccggcttttccgtgtccttgagacccctgtgattgacaacatcagatggtgcctggacatggccctgtcccgaccagtcactgccctggacaatgagcggttcacagtgcagtcggtgatgctacactatgctgtgcccgtggtcctggccggcttcctcatcaccaatgccctgcgcttcatcttcagtgccccgggggtcacttcctggcagtacaccctcctccagctccaggtgaatggcgtcctgcccatcctccccctgctctttccagtcctctgggttctggcaactgcctgtggagaggcccgtgtcctggcccagatgagcaaggcctcacccagctccctgctggctaagttctcagaggatactctcagcagctatacggaggctgtctcctctcaggaaatgctgcgctgcatttggggccacttcctgagggtgctcggggggacatcgccaacgctgagccacagttccagcctgctgcacagcctgggctctgtcacggtcctgtgctgtgtggacaaacaggggatcctgtcatggccaaatcccagcccagagactgtactgttcttcagcgggaaggtggagccccctcacagcagccatgaggacctcaccgatggcctatccacccgctccttctgccatcccgagccccatgaacgagacgccctcctggctggctccctgaacaacaccctgcacctttccaatgagcaggagcgtggcgactggcctggcgaggctcccaagccccccgagccctattcacaccacaaagcgcatggccgcagcaaacacccatctggctccaacgtgagcttcagcagggacaccgagggtggtgaagaagagcccagcaagacccagcctgggatggagagcgacccctacgaagcagaggactttgtgtgtgactaccacctggagatgctgagcctgtcccaggaccagcagaacccctcctgcatccagtttgatgactccaactggcagctgcacctcacctccctcaaacccctgggcctcaatgtgctgctgaacctgtgtgatgccagcgtcaccgagcgcctgtgccgattctccgaccacctgtgcaacattgccctgcaagagagccacagcgccgtgctgcccgtccatgtgccctggggcctctgcgagcttgcccgcctcattggcttcactcctggggccaaggagcttttcaagcaggagaaccatctggcgctgtaccgcctccccagtgccgagacaatgaaggagacatcgctggggcggctctcctgtgtcaccaagcggcggcctcccctcagccacatagatcagcctcttcattaaagacaccaccaccagcacagagcagatgctgtcccatggcaccgctgatgtggtcttagaggcctgcacagacttctgggacggagctgacatctaccctctctcgggatctgacagaaagaaagtgctggacttctaccagcgagcctgcctgtctgggtattgctctgccttcgcctacaagcccatgaactgcgccctgtcctctcagctcaatggcaagtgcatcgagctggtacaggtgcccggccaaagcagcatcttcaccatgtgcgagctgcccagcaccatccccatcaagcagaacgcccgccgcagcagctggagctctgacgaagggatcggggaggtgctggagaaggaagactgcatgcaggccctgagcggccagatcttcatgggcatggtgtcctcccagtaccaggcccggctggacatcgtgcgcctcattgatgggcttgtcaacgcctgcatccgctttgtctacttctctttggaggatgagctcaaaagcaaggtgtttgcagaaaaaatgggcctggagacaggctggaactgccacatctccctcacacccaatggtgacatgcctggctccgagatccccccctccagccccagccacgcaggctccctgcatgatgacctgaatcaggtgtcccgagatgatgcagaagggctcctcctcatggaggaggagggccactcggacctcatcagcttccagcctacggacagcgacatccccagcttcctggaggactccaaccgggccaagctgccccggggtatccaccaagtgcggccccacctgcagaacattgacaacgtgcccctgctagtgccccttttcaccgactgcaccccagagaccatgtgtgagatgataaagatcatgcaagagtacggggaggtgacctgctgcctgggcagctctgccaacctgcggaacagctgcctcttcctccagagcgacatcagcattgccctggatcccctgtacccatcccgttgctcctgggagacctttggctacgccaccagcatcagcatggcccaggcctcggatggcctttctcccctgcagctgtcagggcagctcaacagcctgccctgttccctgacctttcgccaggaggagaccatcagcatcatccggcttatcgaacaggctcggcatgccacctatggcatccgtaagtgcttcctcttcctgctgcagtgccagctgactcttgtggtcatccagttcctttcttgcctggtccagctgccgccactcctgagtaccaccgacatcctgtggctgtcctgcttttgctaccctctgctcagcatctctctgctggggaagcccccccatagctccatcatgtctatggcaacggggaaaaacctccagtccattcccaagaagacccagcactacttcctgctctgcttcctgctcaagttcagcctcaccatcagctcctgcctcatctgctttggcttcacactgcagagcttctgtgacagctcccgggaccgcaacctcaccaactgctcctccgtcatgctgcccagcaacgacgacagggctccagcctggtttgaggactttgccaatggactgctgtcggctcagaagctcacggccgccctgattgtcctgcacactgtcttcatttccatcacccatgtgcatcgcaccaagcccctgtggagaaagagccccttgaccaacctctggtgggccgtgacagtgcctgtggtgctgctgggtcaggtggtccagacggctgtggacctgcagctgtggacacacagggacagccacgtccactttggcctggaggacgtgcccctgctgacatggctcctgggctgcctgtccctggtccttgtggtggtgaccaatgagatcgtgaagctacatgagattcgggtccgagtccgctaccagaagcgacagaagctgcagtttgaaactaagctgggcatgaactctcccttctgagccactggctgtggtggctgtagttgcccccgtccctggggctaaagccagacccatttctgaacaggggagtttgtatcatgaatgtttccaggtttgctcctgcacccgtggcactggaaacccagctccccgtgtcagaccccgctgtcttcctgagccctggggctcactgtggaggagctgacggcctgggcccttggccagtcctggctcttccctgggcctcaccagggacactcttgaatgtatggcctcaggcgctccctagagggggcctaaaccccctcacctgtgagctaccccctttagggatcccttgcccccttggagatcccttgccccccagtgcctctgctcgtgggtccctggacacggccttgaagccaaccttctttggaggagcaacagcagcagccttggccgacgcgtccaactcccaaggctgccgtggagggcaggggggtggtgcttgcctggatgtggccccgagtgcctcccctccctccctctgtgggggagtctcccgcctgaacctgaagatggagcagggcccccgcttcgccctggagcctcttcctgtgcctggctcaagctggctgcctgtcagtcttggggaatctggcccaggtctcctcagcctctgccccagttctgggagaagtttctactggtgtatattttttactggaaatgagccttttaggaatgaatgtagactggtttgtattaaaatgtgtcaattgctaagaaaaaaaaaaaaaaaaaaaaaaaaaaaaaaaaaaaaaaaggggggaaaaaaaagaaaaattcacacttagaagggagccaaaagaataaaagataacacacggggcgtcctgtgtggagaaaggtggcgccgccatagggggagaggctctatattacaccgcaagcggcctgtggcgccggcaggtaggtgtacacacggtcgtggcggtgggataaacatctgcgaagcggtggcgagcctctttggtgagaggagaccaattacgttctggggaggcggaagcagctaatggggcgcagaacatctacctgcaaggaggaagcacctccaagggcgtcggaga

SEQ ID NO: 542349 - DNA, 5524 bp, Homo sapiens
actttagctctctggccggcgcctctgttgcccggaagggaggcaagcccccttagagttgccagtaacggacatggctgcggcccccggaggaggggacgtgaagtgaggagggggttgggaggggagaggacgcgggcgaggaagaccagccccggggccccgatgttgtgactgtgacagactcactggggtttgtacatgctggggaggagccttcctttcaggggtgaccacattcatctgggcatgcctgcagtactcttggcccatggacctgaaggagaagcacctgggcgagcctccctcagccctgggcctgtccacgcggaaggccctcagcgtcctgaaggagcagctggaggcagtgctggaaggacatctcagggagcggaagaagtgtctgacgtggaaggaggtgtggagaagcagcttcctccaccacagtaaccgctgctcctgcttccactggccgggggcctcactcatgctactggccgtgctgctgctgctgggctgctgcgggggacagccagccgggagccgtggggtggggctggtgaatgcctcggccttgttcctgttactgcttctcaaccttgtgctcatcgggcggcaagaccggctgaagcgtcgggaggtagagcggaggctgcgagggatcattgaccaaatccaagatgccctcagggatggcagggagatccagtggcccagtgccatgtatccagacctccacatgccttttgcgccatcctggtccttgcactgggcctacagagacggacacctggtcaacctgccagtcagcctgctggttgaaggagacatcatagctttgaggcctggccaggaatcgtttgcttctctgagggggatcaaggatgacgagcacatcgtcctggagccgggagacctcttcccccccttctcccctccaccctcaccccggggagaagtggagagagggccacagagcccccagcagcaccggcttttccgtgtccttgagacccctgtgattgacaacatcagatggtgcctggacatggccctgtcccgaccagtcactgccctggacaatgagcggttcacagtgcagtcggtgatgctacactatgctgtgcccgtggtcctggccggcttcctcatcaccaatgccctgcgcttcatcttcagtgccccgggggtcacttcctggcagtacaccctcctccagctccaggtgaatggcgtcctgcccatcctccccctgctctttccagtcctctgggttctggcaactgcctgtggagaggcccgtgtcctggcccagatgagcaaggcctcacccagctccctgctggctaagttctcagaggatactctcagcagctatacggaggctgtctcctctcaggaaatgctgcgctgcatttggggccacttcctgagggtgctcggggggacatcgccaacgctgagccacagttccagcctgctgcacagcctgggctctgtcacggtcctgtgctgtgtggacaaacaggggatcctgtcatggccaaatcccagcccagagactgtactgttcttcagcgggaaggtggagccccctcacagcagccatgaggacctcaccgatggcctatccacccgctccttctgccatcccgagccccatgaacgagacgccctcctggctggctccctgaacaacaccctgcacctttccaatgagcaggagcgtggcgactggcctggcgaggctcccaagccccccgagccctattcacaccacaaagcgcatggccgcagcaaacacccatctggctccaacgtgagcttcagcagggacaccgagggtggtgaagaagagcccagcaagacccagcctgggatggagagcgacccctacgaagcagaggactttgtgtgtgactaccacctggagatgctgagcctgtcccaggaccagcagaacccctcctgcatccagtttgatgactccaactggcagctgcacctcacctccctcaaacccctgggcctcaatgtgctgctgaacctgtgtgatgccagcgtcaccgagcgcctgtgccgattctccgaccacctgtgcaacattgccctgcaagagagccacagcgccgtgctgcccgtccatgtgccctggggcctctgcgagcttgcccgcctcattggcttcactcctggggccaaggagcttttcaagcaggagaaccatctggcgctgtaccgcctccccagtgccgagacaatgaaggagacatcgctggggcggctctcctgtgtcaccaagcggcggcctcccctcagccacatagatcagcctcttcattaaagacaccaccaccagcacagagcagatgctgtcccatggcaccgctgatgtggtcttagaggcctgcacagacttctgggacggagctgacatctaccctctctcgggatctgacagaaagaaagtgctggacttctaccagcgagcctgcctgtctgggtattgctctgccttcgcctacaagcccatgaactgcgccctgtcctctcagctcaatggcaagtgcatcgagctggtacaggtgcccggccaaagcagcatcttcaccatgtgcgagctgcccagcaccatccccatcaagcagaacgcccgccgcagcagctggagctctgacgaagggatcggggaggtgctggagaaggaagactgcatgcaggccctgagcggccagatcttcatgggcatggtgtcctcccagtaccaggcccggctggacatcgtgcgcctcattgatgggcttgtcaacgcctgcatccgctttgtctacttctctttggaggatgagctcaaaagcaaggtgtttgcagaaaaaatgggcctggagacaggctggaactgccacatctccctcacacccaatggtgacatgcctggctccgagatccccccctccagccccagccacgcaggctccctgcatgatgacctgaatcaggtgtcccgagatgatgcagaagggctcctcctcatggaggaggagggccactcggacctcatcagcttccagcctacggacagcgacatccccagcttcctggaggactccaaccgggccaagctgccccggggtatccaccaagtgcggccccacctgcagaacattgacaacgtgcccctgctagtgccccttttcaccgactgcaccccagagaccatgtgtgagatgataaagatcatgcaagagtacggggaggtgacctgctgcctgggcagctctgccaacctgcggaacagctgcctcttcctccagagcgacatcagcattgccctggatcccctgtacccatcccgttgctcctgggagacctttggctacgccaccagcatcagcatggcccaggcctcggatggcctttctcccctgcagctgtcagggcagctcaacagcctgccctgttccctgacctttcgccaggaggagaccatcagcatcatccggcttatcgaacaggctcggcatgccacctatggcatccgtaagtgcttcctcttcctgctgcagtgccagctgactcttgtggtcatccagttcctttcttgcctggtccagctgccgccactcctgagtaccaccgacatcctgtggctgtcctgcttttgctaccctctgctcagcatctctctgctggggaagcccccccatagctccatcatgtctatggcaacggggaaaaacctccagtccattcccaagaagacccagcactacttcctgctctgcttcctgctcaagttcagcctcaccatcagctcctgcctcatctgctttggcttcacactgcagagcttctgtgacagctcccgggaccgcaacctcaccaactgctcctccgtcatgctgcccagcaacgacgacagggctccagcctggtttgaggactttgccaatggactgctgtcggctcagaagctcacggccgccctgattgtcctgcacactgtcttcatttccatcacccatgtgcatcgcaccaagcccctgtggagaaagagccccttgaccaacctctggtgggccgtgacagtgcctgtggtgctgctgggtcaggtggtccagacggctgtggacctgcagctgtggacacacagggacagccacgtccactttggcctggaggacgtgcccctgctgacatggctcctgggctgcctgtccctggtccttgtggtggtgaccaatgagatcgtgaagctacatgagattcgggtccgagtccgctaccagaagcgacagaagctgcagtttgaaactaagctgggcatgaactctcccttctgagccactggctgtggtggctgtagttgcccccgtccctggggctaaagccagacccatttctgaacaggggagtttgtatcatgaatgtttccaggtttgctcctgcacccgtggcactggaaacccagctccccgtgtcagaccccgctgtcttcctgagccctggggctcactgtggaggagctgacggcctgggcccttggccagtcctggctcttccctgggcctcaccagggacactcttgaatgtatggcctcaggcgctccctagagggggcctaaaccccctcacctgtgagctaccccctttagggatcccttgcccccttggagatcccttgccccccagtgcctctgctcgtgggtccctggacacggccttgaagccaaccttctttggaggagcaacagcagcagccttggccgacgcgtccaactcccaaggctgccgtggagggcaggggggtggtgcttgcctggatgtggccccgagtgcctcccctccctccctctgtgggggagtctcccgcctgaacctgaagatggagcagggcccccgcttcgccctggagcctcttcctgtgcctggctcaagctggctgcctgtcagtcttggggaatctggcccaggtctcctcagcctctgccccagttctgggagaagtttctactggtgtatattttttactggaaatgagccttttaggaatgaatgtagactggtttgtattaaaatgtgtcaattgctaagaaatacctgtggctggtctgtaaggccactccagggtctgcccacccccggcggtggctggcaaagggaggcctaaaccttcctccatctacgcgggtgggtccctcaggtctggctcaggcgagacccctagggtcaggggtccccatgtcacagaggcaaacacacagcccagtcacgtggaatggtgttttcattggtgttagttgggggaagaggttaatggttacagagccagggcctgggccaatggggtcaggctctacctgccctaaggaggggagtcggggattctggtgggggccaaaacccccaccccaaaggtggcctcataaggcaggtgatagaaaaaaattccttttaaattgatcaaataaatgtgaaaattaaaaaaaaaaatctgagggggggggccggaccccaatatcgc

SEQ ID NO: 542350 - DNA, 102 bp, Homo sapiens
tggacgggggggaagggaaatatacacttggctttaatattaaatacttgggcggatgctttggaaattgttaatgccaaagtcttcgccggaggggtcccg

SEQ ID NO: 542351 - DNA, 664 bp, Homo sapiens
gttttgtggtgggaggacagttgggtaagtagacctacagaacctgtaggtgggctgtgtggcacttgtgtagaaagtttactaagagaaaagtcctgtttcaactaatgccagttgtcttaggggcttaagaccaggggctgtctttgctgtgagcaggggtcaaggtattgcagcctccagtgcagacagggctctgtaaacctctggccgtagcccggcggagttgttggctgaacacaaccagagtttggctgcctcagggggaggaggcctcactgaccctcaggtgggggccttctaggtcttgaggcccagactccaccaagcaggggcttgactccttagaaaaatgctggcttgtggctacactttaatttcccttcattttgtgtagagccaagggttgggttaggctaaaacatgatattgttcttttagaagactaggtcggtgtgcaaatttgtctagtatccaaataaaagctgggtgttgctgaaggtttagtttgttgaagtttagatcttatcattacgtcttgttaagggtatgcccagtttagataacccgtcctcccaccacaaacgtgggatccgtgcacgttaacgattactaggacatcggatacctctttgttgtgtttttcttttctttttttgtgttt

SEQ ID NO: 542352 - DNA, 5754 bp, Homo sapiens
  misc_feature (884)..(884): n is a, c, g, or t
ttggtgtggttttgtctccgttttggtttattgttttttggtgtctgtgttcgttccttatctatctgtgttgtgtccctggttccgatgtgcgtgtgttccttgacgtttctcgttgttcgtgtcattttgttgtgtttgcttatctatatgtgttttctaatttttggctgttattgtccttgtgtttttggctcacctgggctcctggtcttttttttttgccctgttttggcttggttcttgttctcgcgtattttttgccctcttgtctagttgttgccgttggcgggggaaattccctttgtttcacgttgtcgttgttacttgctctttgctcgttggctatattttcctggtttattgctctttagattgtctgtggtgcccgttgttcttgttttttctctctctggtgttctattcctgttttccactctctgttcttggtggaccctttttttcttttcttgttttcctcctttcggttcttttgtcccatgttttctggtgtgtcctacatggtccttctcgcttggtctcgacttccatatgggggtctttgtttttcttagctccttctcgttctcttgttgttgttccgttctcttttgctgcttttttttgttggtctcgtgttttcctcgcttgtatagccttgtgcgtgtggtgcttggctatggttcttgttgtgtcttctgctgttcgtcttccctggggtctgtgcctcatgctcctgtttccccttccaaggggtcggtggcccgtaaatgtttggacacaccgattaccgcgcgggtcgcctttcctgtgttgacccctcgtagtagatgatgagagagagtgaccctatgtgttgccaacttttttgtgttttttcgttntttttttcacgtggaatggtgttttcattggtgttagttgggggaagaggttaatggttacagagccagggcctgggccaatggggtcaggctctccctgccctcaggtgggcagtcggggctcctgctgtggtccgaagcccctcccccattgtgtcctctcaggcagttgatagaataaattccatttaaaatatatgcatttctctctgcttagaaaataacatttacaattgaaaagttaggacttgtgggatctgttaaccccactgcctcccacccctgctagccctgcctcagtgagggaaggcgggggcaggagctgcctgggcaccaccgctgtgtatttacatgtcctctgtacacctacggagagggggcccggccagacacacgcctcctccagcctctcagggcctgggcaggatggtgggtggcaagaggcattcccttggcacaacttgggacatgggctggggggtacagagaaagcacccccaaagccccacccctacttcctccctgaggagagagctcttaccagggtccctgtccaggagcagggctgtcctgctcaatcgatcaaaccctgggaggggctttgctgagatgcagcggaggtccctcgctagtcaggttctaaggtgggctgccccacaagagctgtggtgcccacagccgcgggctgagtgggaaggggccctgctaggaggggcacttcagcctgaccagcccttggcccgtccctagggtggcaggggcctcttctgtgctggggcaaaggcagtggacttcggcaggtcacagtgggcactgctggagggctcagtccagcatggcgtccagctggtcagccagggcgtcgaacatggtgctgatgtcatccagaatgtgcttggtggaggcgctgggggtgccctcttgctccttggtgccaatgctcttctctgcggctctcagtgcagctgccagggacgagctggtctgctccagtctctgctgggcctggcctgggcccacagtcccagtgctctcaggccgtggaggaggcactgggcgggggccgagccggggcgctagcttagggccagaaaatgccagctgggtgcaggccaccgacacaggcttgggggctgttcctgctccgggcaccttgaggagggcagcaggggcggccgggggttctgtctccccattccaccgactagctgctgagctttccagacctggccctgggcagggcggcactggaggctgcatggcggggctgggagcaaggggggttggaactccttgggctggaaggctgctgggctcgggctggggaaggctagaagctggaggagactcgccaggagttggggaaggcagtggggcagcggggccaggcgtggcactggccactccgaaggccagcagtgcggtctgcagtggctctctctcccggcacttgggcctccgcttaacagtgtctgattccgtgaggttgaaatcgaggccggggggcacgggtgtctctcggggcggggggccagcgggcttcgggcgctgtttgatggtcaggttcccttcctctgcaaacggcagcccttccccagagctgccccgagatgggggcgtcccctcagggcctggctcctcctcctccgtgtctgacgcgggcccagccggggcaggtgggccagggggctctgaggggccagcaggttcactcagtgttcgccttcggggccctgtggccccttccttgggccctgggctcccatctagtggaggtggctccgggctggggccagagacggagctgaggcgcttggggggcgggggcggggggcctttgcgccgggcccgcagggcaaaggactggctgcgaggagtcccccgagctggggttggggtcacgctaggactggtccggacaagggcactgcgtcctggccgccgggtaagggtagcataactgcctagggtgctgcccactggcccttcggcctccccctcagcatccccctctgtgggccaggcggcttaggctgtgggaccggcgcttaggtcgaggcgggtctgggggagtggcagggggcccggccaagtaggagaaggcccagggtgcgccaggaggtggccctggggccgggctagagggtgagccctgggggtacataaaaacatagggtgggggtccttggccaggaagtgaagaacaaagcttaggggccgctctgtgccctctgggaggttcctctcctggggggggctgggatctccaccgctgggctgtggggcaggctgttcctgtgagtggccagacccccgtgagcgtgccccgatgctctcctggctgggagagcgggcaggtgggagggggagtggttcagggccaccccctgccatggccgcctgtagctctgggcttagttcgctgccctggaaggtgaggagccgtgggccagctgtagctgggccttctccgttctccagtccctcgatggccatcagctccggacccttggccagccggcgcccgccttcgctgagggcctccccctgcagcaggccccgccgaagctccgccagccgcttcacccccagcatgagcttcttctgatgcccgagcttgttgaccccaatctcctgcagctcctcccaggtgaggtcggccaccagccccatggagtcgtagccgctgctcaccagctgcttgtggtactgtggcagccccagtgcacacagccactccagcaggtccgttgggatgtagctgggcagccactcggcgatgctgagctgagcgatctctgaggcgatcttcttcctgtgcccaggcttggtcaccccgatggccgtcaggtcctcaggtgtcatgcggctgatggtaggcacatcatagccggcctgcagaaagtgggcagtgtagccctccagctggaactcgcttagccagttatgaatggcctgcgcgtccttcccctccagcagctgttctggccgcacgtcctgggtgaagatctgctccccagagcggcagttggccagagggcggtggctcaggttgtctgccagggacggcgggtggagtcctggcagcacctggtcctctccagcagagggcagtggctgggcgttctcaatcaggaggccagggccatggccattagtgccctcagagctctgcccgctgccggcactgcggatgctgcccacgctgccctcactgcccacactattcctgtcacctgctgggctgtctgggctgaggcccacccgaggaagctggctgtaggtaagagggtgcgggggttcttcggcaggaggctgcggtgtccgggagaagcctgggcgcaggggggtgggtgcggaggggaggcgggctgcagggatgcccacccgcttgctgaccacctcgacaatgcccggggggaagtagcctatgcggtctgtgcccctctggctctcgtggatgtggcccttccagcggccgtcgggatgctgttctagcaccgtgatgacatcccctgcccggacattgagagcagtgggatcgtggaggttccagaaatccttgagcgctcggaccttcaggatccctgaggcctcccgcagtagctgcttgatttcccggctggcctgggaggtggtgaactgattcactatgtccagcgccgtctggttatacgtattccggatgttcacgtccacacctccctccagaagcagccgcaccacctcggtcttgccatacagtgcggcctcgtggagcgccgtacccgtcttggtctggcggttgatctcgatcccagctctcaggagctgcctgatgacttctctgtggccattcttggcagccaagtgcaggggcgtggtgtagttggggtcacacgggtctttggcctcaccctccagcagtgccacacataagtggctgttcagaagcagctgggccaccttgagtcggccaaattcacaggccaggtccaggggcgtcttcttggccttgttgaccaggcatgggttggactgatgctggaggagcatttctgacacctcataatgtccatactgtgcagccaggtgcagggggatctgtccgtccagcgaggcggcattgacagccgcagaggcgcgcagcagcagcctcacaggctccagccggccctgccaggctgcgtagtgcagcgggcgcatgccattgctgtccttgatgtcaacagtggcctgagcctctagcagcaaggctatgagctccaggctgccccccaaagcagcgtggtggagggcagagaatccatcagcatcctggtagttcacgttgagcctctttgtggagcccaggagctttgtcttgtggccttgaccttcgccaccagtttctgcacaccggtcacatctccattcttgacggcgaggatcaggtcctgttcacgacccatactggctcctgggctgagctctacactcaggagtccagggcaaaggcaggcaacgggtccaagctggggcgtcagggcgccatgccacagccccttggagggctcccggttccgggggagcaagtctggtgtcccaggcagtgggctcctcgtcaggtactgagggatactcccaaaggtgctccgtgaactgccaccacacgaaggaaagctaatctttgagggggtgaaggctacatggaaatctggatggatatcagcttgtggcttccgacagctccaggatgggctgggactgggcacaccaatcttcccggcttggctgtggaacaccagtgcccacccagagagcagccagcattcccttgggcctcaggcagcagcggtgcactggtctcagggctctctcccgccgcccgccgggtccggctgcctgctcg

SEQ ID NO: 542353 - DNA, 4322 bp, Homo sapiens
  misc_feature (4224)..(4224): n is a, c, g, or t
  misc_feature (4254)..(4254): n is a, c, g, or t
  misc_feature (4289)..(4289): n is a, c, g, or t
actttagctctctggccggcgcctctgttgcccggaagggaggcaagcccccttagagttgccagtaacggacatggctgcggcccccggaggaggggacgtgaagtgaggagggggttgggaggggagaggacgcgggcgaggaagaccagccccggggccccgatgttgtgactgtgacagactcactggggtttgtacatgctggggaggagccttcctttcaggggtgaccacattcatctgggcatgcctgcagtactcttggcccatggacctgaaggagaagcacctgggcgagcctccctcagccctgggcctgtccacgcggaaggccctcagcgtcctgaaggagcagctggaggcagtgctggaaggacatctcagggagcggaagaagtgtctgacgtggaaggaggtgtggagaagcagcttcctccaccacagtaaccgctgctcctgcttccactggccgggggcctcactcatgctactggccgtgctgctgctgctgggctgctgcgggggacagccagccgggagccgtggggtggggctggtgaatgcctcggccttgttcctgttactgcttctcaaccttgtgctcatcgggcggcaagaccggctgaagcgtcgggaggtagagcggaggctgcgagggatcattgaccaaatccaagatgccctcagggatggcagggagatccagtggcccagtgccatgtatccagacctccacatgccttttgcgccatcctggtccttgcactgggcctacagagacggacacctggtcaacctgccagtcagcctgctggttgaaggagacatcatagctttgaggcctggccaggaatcgtttgcttctctgagggggatcaaggatgacgagcacatcgtcctggagccgggagacctcttcccccccttctcccctccaccctcaccccggggagaagtggagagagggccacagagcccccagcagcaccggcttttccgtgtccttgagacccctgtgattgacaacatcagatggtgcctggacatggccctgtcccgaccagtcactgccctggacaatgagcggttcacagtgcagtcggtgatgctacactatgctgtgcccgtggtcctggccggcttcctcatcaccaatgccctgcgcttcatcttcagtgccccgggggtcacttcctggcagtacaccctcctccagctccaggtgaatggcgtcctgcccatcctccccctgctctttccagtcctctgggttctggcaactgcctgtggagaggcccgtgtcctggcccagatgagcaaggcctcacccagctccctgctggctaagttctcagaggatactctcagcagctatacggaggctgtctcctctcaggaaatgctgcgctgcatttggggccacttcctgagggtgctcggggggacatcgccaacgctgagccacagttccagcctgctgcacagcctgggctctgtcacggtcctgtgctgtgtggacaaacaggggatcctgtcatggccaaatcccagcccagagactgtactgttcttcagcgggaaggtggagccccctcacagcagccatgaggacctcaccgatggcctatccacccgctccttctgccatcccgagccccatgaacgagacgccctcctggctggctccctgaacaacaccctgcacctttccaatgagcaggagcgtggcgactggcctggcgaggctcccaagccccccgagccctattcacaccacaaagcgcatggccgcagcaaacacccatctggctccaacgtgagcttcagcagggacaccgagggtggtgaagaagagcccagcaagacccagcctgggatggagagcgacccctacgaagcagaggactttgtgtgtgactaccacctggagatgctgagcctgtcccaggaccagcagaacccctcctgcatccagtttgatgactccaactggcagctgcacctcacctccctcaaacccctgggcctcaatgtgctgctgaacctgtgtgatgccagcgtcaccgagcgcctgtgccgattctccgaccacctgtgcaacattgccctgcaagagagccacagcgccgtgctgcccgtccatgtgccctggggcctctgcgagcttgcccgcctcattggcttcactcctggggccaaggagcttttcaagcaggagaaccatctggcgctgtaccgcctccccagtgccgagacaatgaaggagacatcgctggggcggctctcctgtgtcaccaagcggcggcctcccctcagccacatagatcagcctcttcattaaagacaccaccaccagcacagagcagatgctgtcccatggcaccgctgatgtggtcttagaggcctgcacagacttctgggacggagctgacatctaccctctctcgggatctgacagaaagaaagtgctggacttctaccagcgagcctgcctgtctgggtattgctctgccttcgcctacaagcccatgaactgcgccctgtcctctcagctcaatggcaagtgcatcgagctggtacaggtgcccggccaaagcagcatcttcaccatgtgcgagctgcccagcaccatccccatcaagcagaacgcccgccgcagcagctggagctctgacgaagggatcggggaggtgctggagaaggaagactgcatgcaggccctgagcggccagatcttcatgggcatggtgtcctcccagtaccaggcccggctggacatcgtgcgcctcattgatgggcttgtcaacgcctgcatccgctttgtctacttctctttggaggatgagctcaaaagcaaggtgtttgcagaaaaaatgggcctggagacaggctggaactgccacatctccctcacacccaatggtgacatgcctggctccgagatccccccctccagccccagccacgcaggctccctgcatgatgacctgaatcaggtgtcccgagatgatgcagaagggctcctcctcatggaggaggagggccactcggacctcatcagcttccagcctacggacagcgacatccccagcttcctggaggactccaaccgggccaagctgccccggggtatccaccaagtgcggccccacctgcagaacattgacaacgtgcccctgctagtgccccttttcaccgactgcaccccagagaccatgtgtgagatgataaagatcatgcaagagtacggggaggtgacctgctgcctgggcagctctgccaacctgcggaacagctgcctcttcctccagagcgacatcagcattgccctggatcccctgtacccatcccgttgctcctgggagacctttggctacgccaccagcatcagcatggcccaggcctcggatggcctttctcccctgcagctgtcagggcagctcaacagcctgccctgttccctgacctttcgccaggaggagaccatcagcatcatccggcttatcgaacaggctcggcatgccacctatggcatccgtaagtgcttcctcttcctgctgcagtgccagctgactcttgtggtcatccagttcctttcttgcctggtccagctgccgccactcctgagtaccaccgacatcctgtggctgtcctgcttttgctaccctctgctcagcatctctctgctggggaagcccccccatagctccatcatgtctatggcaacggggaaaaacctccagtccattcccaagaagacccagcactacttcctgctctgcttcctgctcaagttcagcctcaccatcagctcctgcctcatctgctttggcttcacactgcagagcttctgtgacagctcccgggaccgcaacctcaccaactgctcctccgtcatgctgcccagcaacgacgacagggctccagcctggtttgaggactttgccaatggactgctgtcggctcagaagctcacggccgccctgattgtcctgcacactgtcttcatttccatcacccatgtgcatcgcaccaagcccctgtggagaaagagccccttgaccaacctctggtgggccgtgacagtgcctgtggtgtgagtattgctaggatggagggcggagtgtgggctggggaggagagggccttctgcagggctaggatcggagggcgggaccggggccagtggtttaactgtaccctgcctgagctaactggtgnactgggaagagcagggaaggaagcaagcantgtcgggttcacacggggcccggcaacttctgcangctgctgggtcaagtgggtccaaaacgggttgg

SEQ ID NO: 542354 - DNA, 843 bp, Homo sapiens
cctgcccgtccaatccagcgtctattcgtactctcctcgctatcccattgccgttgcactgccctccatcttcccttctactgtccatcttatcatcccacgatgacacatgattagatcacaccacatacaggctgcattgcgtcgaggtacaaccggccttacacatggcgcttgcgtgttgccacttgctagacgcttgtgactcccaggccagactgctgctgcaacaggattgtattgtctgctacatctcagatgcgccacgaattattctcacagagctggcgatactcactgtgccagaatattcattgctcaatggctcatactagacctgggtcatgtccgtcccactatataaacgtgcggttgtccttgttcccgggatacatttaaaatcagatacatagctcacagcgcaatccacatcacatatacaatatccaataggaaaggagcactagccggactgacctgcttgggaagtatagcagactgcagttcatgtcacatctcgtccccgcggtcccctgaaaagccaattctgtctgttgatgccgaaaaggctcctatagcaaccactttaggactaggatccttggcttgaggtggtattgtataggacgccgatgcgttcgctattaaccagacctacgctattcaaacgaggtgctaatcaatagacttcatcggcttcatttggcataaacacatgctatgtttgtacttttcacccgcagaatagcagattctaaggcatcacgtggtttgcaccccccggcttgccacaattcgcacactaacagccccgcttcattttctctctaacccgacccttgc

SEQ ID NO: 542355 - DNA, 107 bp, Homo sapiens
aattttttgtgcatgtagtgagagactgaagtctcattacattcttttgcatatggatatctagtttttccagcaccatttattgaagacagtacctttttcccaat

SEQ ID NO: 542356 - DNA, 2324 bp, Homo sapiens
actttagctctctggccggcgcctctgttgcccggaagggaggcaagcccccttagagttgccagtaacggacatggctgcggcccccggaggaggggacgtgaagtgaggagggggttgggaggggagaggacgcgggcgaggaagaccagccccggggccccgatgttgtgactgtgacagactcactggggtttgtacatgctggggaggagccttcctttcaggggtgaccacattcatctgggcatgcctgcagtactcttggcccatggacctgaaggagaagcacctgggcgagcctccctcagccctgggcctgtccacgcggaaggccctcagcgtcctgaaggagcagctggaggcagtgctggaaggacatctcagggagcggaagaagtgtctgacgtggaaggaggtgtggagaagcagcttcctccaccacagtaaccgctgctcctgcttccactggccgggggcctcactcatgctactggccgtgctgctgctgctgggctgctgcgggggacagccagccgggagccgtggggtggggctggtgaatgcctcggccttgttcctgttactgcttctcaaccttgtgctcatcgggcggcaagaccggctgaagcgtcgggaggtagagcggaggctgcgagggatcattgaccaaatccaagatgccctcagggatggcagggagatccagtggcccagtgccatgtatccagacctccacatgccttttgcgccatcctggtccttgcactgggcctacagagacggacacctggtcaacctgccagtcagcctgctggttgaaggagacatcatagctttgaggcctggccaggaatcgtttgcttctctgagggggatcaaggatgacgagcacatcgtcctggagccgggagacctcttcccccccttctcccctccaccctcaccccggggagaagtggagagagggccacagagcccccagcagcaccggcttttccgtgtccttgagacccctgtgattgacaacatcagatggtgcctggacatggccctgtcccgaccagtcactgccctggacaatgagcggttcacagtgcagtcggtgatgctacactatgctgtgcccgtggtcctggccggcttcctcatcaccaatgccctgcgcttcatcttcagtgccccgggggtcacttcctggcagtacaccctcctccagctccaggtgaatggcgtcctgcccatcctccccctgctctttccagtcctctgggttctggcaactgcctgtggagaggcccgtgtcctggcccagatgagcaaggcctcacccagctccctgctggctaagttctcagaggatactctcagcagctatacggaggctgtctcctctcaggaaatgctgcgctgcatttggggccacttcctgagggtgctcggggggacatcgccaacgctgagccacagttccagcctgctgcacagcctgggctctgtcacggtcctgtgctgtgtggacaaacaggggatcctgtcatggccaaatcccagcccagagactgtactgttcttcagcgggaaggtggagccccctcacagcagccatgaggacctcaccgatggcctatccacccgctccttctgccatcccgagccccatgaacgagacgccctcctggctggctccctgaacaacaccctgcacctttccaatgagcaggagcgtggcgactggcctggcgaggctcccaagccccccgagccctattcacaccacaaagcgcatggccgcagcaaacacccatctggctccaacgtgagcttcagcagggacaccgagggtggtgaagaagagcccagcaagacccagcctgggatggagagcgacccctacgaagcagaggactttgtgtgtgactaccacctggtgggtccctggacacggccttgaagccaaccttctttggaggagcaacagcagcagccttggccgacgcgtccaactcccaaggctgccgtggagggcaggggggtggtgcttgcctggatgtggccccgagtgcctcccctccctccctctgtgggggagtctcccgcctgaacctgaagatggagcagggcccccgcttcgccctggagcctcttcctgtgcctggctcaagctggctgcctgtcagtcttggggaatctggcccaggtctcctcagcctctgccccagttctgggagaagtttctactggtgtatattttttactggaaatgagccttttaggaatgaatgtagactggtttgtattaaaatgtgtcaattgctaagaaa

SEQ ID NO: 542357 - DNA, 417 bp, Homo sapiens
tattaaaaaaaaatgtaactaattaaaaagggggtcaccaaaaaaaagcaaaaatgtaggtattttcccaatgtcaccctccctccattaaaaaatgactcataatcccgggaggagtgacctcccctccgaagtaatggaaaactgttatttattggcagggaaatcccatctggtggtgtagctagaggtcttaatcccccttctggccacgtattagaggttcgctcagggctggccactttttggaccacctgggggttcccacgtctgcccctgtgtcccagagagagtctcatccgattacaagggcagttttgcgtggccagctggcaggaccccattgcccacgcgatgggctgtgtactcttggggggaactgatttccaaagggtccatgtcctctatagtcatctg

SEQ ID NO: 542358 - DNA, 2263 bp, Homo sapiens
  misc_feature (2018)..(2018): n is a, c, g, or t
  misc_feature (2245)..(2245): n is a, c, g, or t
actttagctctctggccggcgcctctgttgcccggaagggaggcaagcccccttagagttgccagtaacggacatggctgcggcccccggaggaggggacgtgaagtgaggagggggttgggaggggagaggacgcgggcgaggaagaccagccccggggccccgatgttgtgactgtgacagactcactggggtttgtacatgctggggaggagccttcctttcaggggtgaccacattcatctgggcatgcctgcagtactcttggcccatggacctgaaggagaagcacctgggcgagcctccctcagccctgggcctgtccacgcggaaggccctcagcgtcctgaaggagcagctggaggcagtgctggaaggacatctcagggagcggaagaagtgtctgacgtggaaggaggtgtggagaagcagcttcctccaccacagtaaccgctgctcctgcttccactggccgggggcctcactcatgctactggccgtgctgctgctgctgggctgctgcgggggacagccagccgggagccgtggggtggggctggtgaatgcctcggccttgttcctgttactgcttctcaaccttgtgctcatcgggcggcaagaccggctgaagcgtcgggaggtagagcggaggctgcgagggatcattgaccaaatccaagatgccctcagggatggcagggagatccagtggcccagtgccatgtatccagacctccacatgccttttgcgccatcctggtccttgcactgggcctacagagacggacacctggtcaacctgccagtcagcctgctggttgaaggagacatcatagctttgaggcctggccaggaatcgtttgcttctctgagggggatcaaggatgacgagcacatcgtcctggagccgggagacctcttcccccccttctcccctccaccctcaccccggggagaagtggagagagggccacagagcccccagcagcaccggcttttccgtgtccttgagacccctgtgattgacaacatcagatggtgcctggacatggccctgtcccgaccagtcactgccctggacaatgagcggttcacagtgcagtcggtgatgctacactatgctgtgcccgtggtcctggccggcttcctcatcaccaatgccctgcgcttcatcttcagtgccccgggggtcacttcctggcagtacaccctcctccagctccaggtgaatggcgtcctgcccatcctccccctgctctttccagtcctctgggttctggcaactgcctgtggagaggcccgtgtcctggcccagatgagcaaggcctcacccagctccctgctggctaagttctcagaggatactctcagcagctatacggaggctgtctcctctcaggaaatgctgcgctgcatttggggccacttcctgagggtgctcggggggacatcgccaacgctgagccacagttccagcctgctgcacagcctgggctctgtcacggtcctgtgctgtgtggacaaacaggggatcctgtcatggccaaatcccagcccagagactgtactgttcttcagcgggaaggtggagccccctcacagcagccatgaggacctcaccgatggcctatccacccgctccttctgccatcccgagccccatgaacgagacgccctcctggctggctccctgaacaacaccctgcacctttccaatgagcaggagcgtggcgactggcctggcgaggctcccaagccccccgagccctattcacaccacaaagcgcatggccgcagcaaacacccatctggctccaacgtgagcttcagcagggacaccgagggtggtgaagaagagcccagcaaggtgacgggagggggtggcacggggcagccacaccctcggccacaggctgtcctggcctccctggccagcctggcctcacaaggtctaaaagagcaggcgtctctgccctctgtcccagcacctccaggctaggccagtggtccctgaggcnctccccaagtctgctgcgaagtaggtggagcctccccctacccttccattcttgtaatcgcaatcactggtgtccctactggaaccttccaaatatacacagcccggagctccctcttagagatgttctctggccacagaagatccctcaactgtgtcctctttggtctggccacccctctttttagctcctgccagtgtcatgagatatattaatagtcatagaanagacaggagcccagaagg

SEQ ID NO: 542359 - DNA, 171 bp, Homo sapiens
ctagccccctgacatcttccgtttccgccgtttgctagggctgctgacgtgtgggctccgcagggggtgctaccatgcgctgccacttctggaaaaggggcaggttgaaacaggtgggtcaggaaaggcctcactgagtgggacatggaaggaaggcacttgaaagagctg

SEQ ID NO: 542360 - DNA, 971 bp, Homo sapiens
actttagctctctggccggcgcctctgttgcccggaagggaggcaagcccccttagagttgccagtaacggacatggctgcggcccccggaggaggggacgtgaagtgaggagggggttgggaggggagaggacgcgggcgaggaagaccagccccggggccccgatgttgtgactgtgacagactcactggggtttgtacatgctggggaggagccttcctttcaggggtgaccacattcatctgggcatgcctgcagtactcttggcccatggacctgaaggagaagcacctgggcgagcctccctcagccctgggcctgtccacgcggaaggccctcagcgtcctgaaggagcagctggaggcagtgctggaaggacatctcagggagcggaagaagtgtctgacgtggaaggaggtgtggagaagcagcttcctccaccacagtaaccgctgctcctgcttccactggccgggggcctcactcatgctactggccgtgctgctgctgctgggctgctgcgggggacagccagccgggagccgtggggtggggctggtgaatgcctcggccttgttcctgttactgcttctcaaccttgtgctcatcgggcggcaagaccggctgaagcgtcgggaggtagagcggaggctgcgagggatcattgaccaaatccaagatgccctcagggatggcagggagatccagtggcccagtgccatgtatccagacctccacatgccttttgcgccatcctggtccttgcactgggcctacagagacggacacctggtcaacctgccagtcagcctgctggttgaaggagacatcatagctttgaggcctggccaggaatcgtttgcttctctgagggggatcaaggacacggaaaagccggtgctgctgggggctctgtggccctctctccacttctccccggggtgagggtggaggggagaagggggggaag

SEQ ID NO: 542361 - DNA, 185 bp, Homo sapiens
tgatctacagtgcatcataatcatatgccttatcagcgttggatcctctatcagatcgaactgcagtgcctgcaagtcagagtcactgtacgacgttgtacagagacatgaccgtgattgccctgtcgaaactccacagctcttaaaaataagcacttatccctaacatggccttatcttggtgt

SEQ ID NO: 542362 - DNA, 219 bp, Homo sapiens
gtgatgtctttggtaacaggcggggtaagcattagccgcagtacctttcactatatttaacctttccttatgagcatgcctgtgttgggtagacagtgcagggtaataatgcacttgctggttgattgtcagatcattgggctgttacatatgtcagttcagttgtatacaatctgcactgcaggcttatgcggacggacgacactgttttcactgtta

SEQ ID NO: 542363 - DNA, 2670 bp, Homo sapiens
  misc_feature (1)..(1): n is a, c, g, or t
  misc_feature (442)..(442): n is a, c, g, or t
  misc_feature (446)..(447): n is a, c, g, or t
  misc_feature (449)..(449): n is a, c, g, or t
ntgccctttctgggccaccccggggccgactccggctggaccgccgtggaggggatgtcagccccccctgcatgcccccctagctctggcttattcctgcctggaagtgaggacctggccagctgtagctgggccttctccgttctccagtccctcgatggccatcagctccggacccttggccagccggcgcccgccttcgctgagggcctccccctgcagcaggccccgccgaagctccgccagccgcttcacccccagcatgagcttcttctgatgcccgagcttgttgaccccaatctcctgcagctcctcccaggtgaggtcggccaccagccccatggagtcgtagccgctgctcaccagctgcttgtggtactgtggcagccccagtgcacacagccactccagcaggtccgtctggaagagcaccgtcctcagnacanntnccagccagcctccgcccccagccagaggagaaaaggcaccgcaaagccacagctgagggcgacagcacgtgccccactccccagccacccttgatggctcactgggatgtagctgggcagccactcggcgatgctgagctgagcgatctctgaggcgatcttcttcctgtgcccaggcttggtcaccccgatggccgtcaggtcctcaggtgtcatgcggctgatggtaggcacatcatagccggcctgcagaaagtgggcagtgtagccctccagctggaactcgcttagccagttatgaatggcctgcgcgtccttcccctccagcagctgttctggccgcacgtcctgggtgaagatctgctccccagagcggcagttggccagagggcggtggctcaggttgtctgccagggacggcgggtggagtcctggcagcacctggtcctctccagcagagggcagtggctgggcgttctcaatcaggaggccagggccatggccattagtgccctcagagctctgcccgctgccggcactgcggatgctgcccacgctgccctcactgcccacactattcctgtcacctgctgggctgtctgggctgaggcccacccgaggaagctggctgtaggtaagagggtgcgggggttcttcggcaggaggctgcggtgtccgggagaagcctgggcgcaggggggtgggtgcggaggggaggcgggctgcagggatgcccacccgcttgctgaccacctcgacaatgcccggggggaagtagcctatgcggtctgtgcccctctggctctcgtggatgtggcccttccagcggccgtcgggatgctgttctagcaccgtgatgacatcccctgcccggacattgagagcagtgggatcgtggaggttccagaaatccttgagcgctcggaccttcaggatccctgaggcctcccgcagtagctgcttgatttcccggctggcctgggaggtggtgaactgattcactatgtccagcgccgtctggttatacgtattccggatgttcacgtccacacctccctccagaagcagccgcaccacctcggtcttgccatacagtgcggcctcgtggagcgccgtacccgtcttggtctggcggttgatctcgatcccagctctcaggagctgcctgatgacttctctgtggccattcttggcagccaagtgcaggggcgtggtgtagttggggtcacacgggtctttggcctcaccctccagcagtgccacacataagtggctgttcagaagcagctgggccaccttgagtcggccaaattcacaggccaggtccaggggcgtcttcttggccttgttgaccaggcatgggttggactgatgctggaggagcatttctgacacctcataatgtccatactgtgcagccaggtgcagggggatctgtccgtccagcgaggcggcattgacagccgcagaggcgcgcagcagcagcctcacaggctccagccggccctgccaggctgcgtagtgcagcgggcgcatgccattgctgtccttgatgtcaacagtggcctgagcctctagcagcaaggctatgagctccaggctgccccccaaagcagcgtggtggagggcagagaatccatcagcatcctggtagttcacgttgagcctctttgtggagcccaggagctttgtcttgtggccttgaccttcgccaccagtttctgcacaccggtcacatctccattcttgacggcgaggatcaggtcctgttcacgacccatactggctcctgggctgagctctacactcaggagtccagggcaaaggcaggcaacgggtccaagctggggcgtcagggcgccatgccacagccccttggagggctcccggttccgggggagcaagtctggtgtcccaggcagtgggctcctcgtcaggtactgagggatactcccaaaggtgctccgtgaactgccaccacacgaaggaaagctaatctttgagggggtgaaggctacatggaaatctggatggatatcagcttgtggcttccgacagctccaggatgggctgggactgggcacaccaatcttcccggcttggctgtggaacaccagtgcccacccagagagcagccagcattcccttgggcctcaggcagcagcggtgcactggtctcagggctctctcccgccgcccgccgggtccggctgcctgctcg

SEQ ID NO: 542364 - DNA, 1200 bp, Homo sapiens
  misc_feature (491)..(491): n is a, c, g, or t
  misc_feature (494)..(494): n is a, c, g, or t
  misc_feature (551)..(551): n is a, c, g, or t
  misc_feature (624)..(624): n is a, c, g, or t
gccaatctctcgcacttctgttcttcctgacgggtccgccgttcgcgtttctctgccggtcgacaatggaggaagagatcggcgtcgctggtcattgacaatggcttccggctatgttgcaaacgcgtggcttttgactggggactgatcgcttcacaccgagaccgttgtgtccattcgcatcgatcgggcgtcgcgccagagatccatgggccagttcaatggggtgcgtgcactgggtgaccgacgtacaggtagcgtccatgagcgtggggccgatcggaggtgctcccaagatgtcaaggcccgatgagccaagttcgcattggaacgcgcatgaacacgtaacgcaccgagtatgatgtcattggccagtctgatacaacctagacttggtgaagcgaccatgggtatggaacgtatgctcggacagccaacaacgcttgctagcgacaggagtctgggcgtcggttgggcacgccgcgtatggnagncgatccgcagcatgactgggtgggagcccgagggccccgcccctgaacccgcaaggncccaaccagaagagacggatcggactcaggattgactgttgtcgagagccttcagacatcccccggcacatcngtacgtgtgcccattccagggcctgttgcttgtgcccttctttacgcgcttcttgggccggcacccactgggcgatttgtgcatgtgacgtccttggagaccggggtcacgccaacactggtgccccatcttacgaagggcttacgcccgtctccccaagccagtccttgcgtcttggaccttggctgggccggggacctgtacgaatacctcattgaagatcctccatagagcgagggtacaggttcacaaccaagggcgagacgggaaatcgtgcgcgaacttccggggaaactgggctacgtcgcccgggattctcagcccggatgggccccgcggatatatcctctttttttgcgaaaaagtttcaaatgtcccaaggcccggtttcaccatggacaagacgggtccccggtacccgaacgcgggtctacacccctacacgggggaagacacctgcggaccccaagaaccttctaccacaaagagaggagaccccaaacgttgccacagcgcatccggagcccacataccgcttcacaggcagagagaccgcgcaccagaaaaacctccggg

SEQ ID NO: 542365 - DNA, 1351 bp, Homo sapiens
tgtttctccttttatcatgtgtatctgtcggtgggtctctctttgacagtgcggagtgtgcctcgttgtgttgtctgtgcttgttactactctatggtgtccccttgtggcgggctctctgtgtctgcccaagtattgggggcacaccctttattttggccggtaccagttttgtggtacgaacaccgtgtaaacaatcttgttataatttgtgcccccgccgtgataacacaattgggggaacccctcttatagtctcctccgggggttcaatggcgtgcgacgaaaccagcttgtagaatatgctcccctgttaagtggtgttccccctttttgggagatgttagagcaaaaccgggggggaaaacctccttgggaatttgccgttccgagcgccctttttgtgtaaaagaccactgcaaagaattttcttatgagggtgaatccgcactattacacactgttaaatgttaaacactgggggatagccttttgcacataccacgtgttaggtgctccccggtgtgcccaagtaccccgttgcgtacgaaagcttcacttccactgggaggtcatttcccctctccccaagtgcctttttttggaaaaaggggaaacccccattaaattgaaggaggatatcccccgggggtataaagcggtttataggaaaaaggtgttctgttcattcaacacccaaacccctcttgccacaccacggaatagttgttatattggagagatgaacccttgggtacaatatgtgaagaagaattgttgggaagaacgcctcttaagtgcacttttttacagttgtccacactctgggaagccactctggaaggaaccaccacccacaaagaggaaaagcgttctttggaatatgaacgccaagggtgccacacccgctgtttttagcccacgcccaccacagcgctgttgcacaccacaacacaggtgaaagaaatgtagcccctcggagtcacaaaccacctattataaatgtggaaaactacccaaggaaaggttttccacttaataacttttataaagtcactttgaagggcttctggcttctcgtggcttttgtgggttaaagtaacttgtctggccaaccacggagatgcctggagtttcacaatcccacgcacgggcctcacctacattgacggtatttgaaatttgaacacacgaatgttttggctctcggctgggtctggtggctcaccacacccgtaaatccccgccctttgggaggctgagcccggaggatcacttgaggtcacggaatttgagacccgtgtgccaaacactagcacagacctcatctcccaaaaaataaaaaaataaa

SEQ ID NO: 542366 - DNA, 320 bp, Homo sapiens
ccttcacgcacatacccgtggccacctgagacctgctccacgacccttccatgtagagccgagagtttgccccaacccttccccaggcccagtgctttatacatatttacaaggggtttcttggcctgcagctttatttgcgatagtgtcgaggcagtatacagactacagctgtgctggaagtgtgggtagtacccggacagctcagtcctgccagcagccgcaaagagccgaggctgccaggcccatttatgtccctcatgtctctagattttctcgtcacccagcctcaaaaatatatgtgtctgcacccctcagtc

SEQ ID NO: 542367 - DNA, 325 bp, Homo sapiens
agaaatgttaatcagattgtctttctgaaatttgtattatcagctttgtaattgaggaatatacagccaatttcttcggatggcggcattctcaaggaattaattccttattgttcagaaaatctagaataatttcttcattcctggccttgctgttacctgcctggtcagcattctctttttagtgatgtaactatattatcattatttcaaaaaataccaggtacccacctcttcccactattttttctttaagttgactgcattatctttaaattgtttttaattccaaattaataaatgatacattgagaatttcttaaaa

SEQ ID NO: 542368 - DNA, 394 bp, Homo sapiens
tgttcccttgtctcagcctcccgagtagctgggactacaggcgctgccaccacgcctggctaattttttttggtatttttagtagagacggggtttcactgtgttagccaggatggtctcaatcttctggcctcctgatctacccgcctcagcctccagaagtgctgggattacaggcgtgagccaccatgccgggccaggagctaaacggttttaaagaggtaaaagttaagactcatggtgagtatattttagtttcattttctgacttttatgcctttatggtctgggaaaagacatagtaatttgggagtacttaaactttattttctaaatattaagccccattttacggcagtgtggctggtccatggcagtgccaagattagaagta

SEQ ID NO: 542369 - DNA, 520 bp, Homo sapiens
  misc_feature (386)..(386): n is a, c, g, or t
  misc_feature (396)..(396): n is a, c, g, or t
  misc_feature (430)..(430): n is a, c, g, or t
  misc_feature (444)..(445): n is a, c, g, or t
  misc_feature (467)..(467): n is a, c, g, or t
  misc_feature (482)..(482): n is a, c, g, or t
  misc_feature (491)..(491): n is a, c, g, or t
  misc_feature (496)..(496): n is a, c, g, or t
aactggatcctgcaccagtgcactcaagacgtctcaacactgcttcttgagccacacccgcatcctcaaggtgggtgacttctggctggcgcgggagtacggatcccctcttgaaggcctacacccccgctccttggtgaccctgtggttccgcgccccagaacttctgctttgttcccaaaggaatactccacggccgtggacatgtggtcactgggttgcatcttcggggagctgctgactcagaagctctgttcccgggaagtcagatatcgatcagatcaacaaggtgttcaaggatctggggacccctagtgagaaaatctggcccggctacagcgagctcccagcagtcaagaagatgaccttcagcgagcacccctacnacaacctccncaagcacttcggggctctgctctcagaccagggnttcgacctcatgannaagttcctgacctacttccccnggaggaggatcagcnctgaggacngcctnaagcatgagtatttccctgaatac

SEQ ID NO: 542370 - DNA, 301 bp, Homo sapiens
  misc_feature (28)..(29): n is a, c, g, or t
  misc_feature (31)..(31): n is a, c, g, or t
gtgaataagctgagtcccataccacacnngnaaggttttaataaatctaatcctatttctacttaaagtatggttttcagacagtgctggtgcttctgcttcttaagttcatcaagggaatgaggagtcttgtccttctcctcctctttaaaatcttttccactttctccttcaggattaaagattttgctgcacaattgttaatttgtaaggttaaatttggacaaatattcaaagcacacataggcatataagtaaggagaaaaatgttccaggggagtaggttgggcagtgacaggac

SEQ ID NO: 542371 - DNA, 455 bp, Homo sapiens
tcctcggtcctgcagctctctctgatgatgagtgctactgttcttaaatgctggtatgtcccggacgtttgttctttctgatgttcagacgtgtttggagtttcttccttctggtggatttgtggtctcactggcttcaggagtgaagctgcagactttcacagtgagtattacacctcttaaggcagcgcgtctggagttactcattcctcccatgggttcatggtctcggtggcctcaggattgaggctgcagagtttcacgaagagtgttacagctcataaactcagtgtgtacccaaagaatgagcagcagcaagttacctcaaagatcaaaaaaaacaaaactcccatagcgtgagggtggaagagaacctgagccagttgccactactaagcgcaggaagcctgtttttattcccttttctgacccaacccacatcctgctgatgtggc

SEQ ID NO: 542372 - DNA, 143 bp, Homo sapiens
gccccgcatccaataggcatcctgcccgaatcaaccctgcactcctctcattctctcgttatgcagcttcctacactattaaagtttaccgcaagcatcaccccatcatactctttcacctacagcaccgatcctacctccat

SEQ ID NO: 542373 - DNA, 205 bp, Homo sapiens
aatgataggtcatgccagagccagtggtccgggccgacaccaaagaggagttctgaatccaaatagcagacagatgagatccgggtggtggtctagtacgagtgtggggctaagttttgtcccgaatttctgggtgaggcactgtcgccttcccggggtgaaggacatcaaggaccattggtgtccccggaagattgcgtggtgg

SEQ ID NO: 542374 - DNA, 655 bp, Homo sapiens
cttagttaaaaacagaaagttaatctttctgaaagacagttggaaagttgatcaccgggtgcaagggttgattggaatcttaggaagcaaacccacagagacaccaggaaggatgtggcatctctggtaaacttgaaacaaggcatgcacttacaggttccctattattaacctcattttggacataaagtggctggattaatttcctgtggctgctgtaacaaatcaccataaacgtagtagtttaaaatgacagaaatgtattttctggcagttttgaaggccagaagtctgaagtctgatagtatcactgggcccaaataaaggtgttggcagggtactccctctgtaggttctatagaagaagacattccttgcctctttcagcttctggtgagagcaggcactccttggcttgtggctgcatccctgcagccttcaacgccagcatcttcaggtctctctctgctccatcttcacatcaccttctcctctgtatgcagtaaaatctcctccttcatccctcttataaggtacatgtgattacctgtagtgcctacccagataatctaggataaactccctatctcataatacttaatcacatctgcaaggacctccctccctttttgctatatcaggaaatacgcacagg

SEQ ID NO: 542375 - DNA, 845 bp, Homo sapiens
  misc_feature (41)..(41): n is a, c, g, or t
cgacaaaggaggcctaaattgagttgcatacggtgtcgcanagggacctttctattaagcccttgatttttatggattatggaaaggaaataaggcacaaccccagctttttctttctttagagttcatcagctgttgatgtggttcttttttgtgtttaaacaaaagaaagtgcaactatccaaacctacctaaattataggagtaatatttccccttctggctgatttttaaagtataccatacctcatacagtactttaccagccagcttaaatggagataaagttgaaatcactagaagatgcccatgacctttccaaatcgcaccccatgtgttctgaaactgttcgctgactaataccctgcatctgtgatccatgaactatgtggttttgaatcggatgtagacccttagtactactacttgagctaaacttctgcctggttcataatttttaaagtgtgtagttaatatgcactgttatcgtcctttcttccacttcttaaccacgtatgtgcccactttgccaaaccaaaatgctcataatcacgtaatagtcctataaaagatgttaacctctgtttagtcacttgagctgatcttgctctaaccttaaaattttgtgattattgacctctgttgcatttatttctaaagccccccccaaattatctagccgctttcgaatatcaacattaccctggtgtattcactgctgtatgcattattgttctttgttgctgttttatgccttcatattagccaatatgaaattctgtgaaaaaaaaccctttgatccttaaaaaaaataaaaccaccccccccttctgtagcagacacac

SEQ ID NO: 542376 - DNA, 355 bp, Homo sapiens
tgcacgagtccaacttccattcttaccagtatgtgcccatttgcaaaacaaacatgctactacttattaatacacctataccctacttctaacctgcctgttcttatgctgatcttgctctaaccttaaaattttgtgattattgacctctgttgcatttatttctaaagccccccccaaattatctagccgctttcgaatatcaacattaccctggtgtattcactgctgtatgcattattgttctttgttgctgttttatgccttcatattagccaatatgaaattctgtgaaaaaaaaccctttgatccttaaaaaaaataaaaccaccccccccttctgtagcagacacac

SEQ ID NO: 542377 - DNA, 1226 bp, Homo sapiens
  misc_feature (1219)..(1219): n is a, c, g, or t
agcggactgacgtccctgcggggctcctcctgagcgtccctcctgccagccaggtcgcagccgcagcggcggccgcagctcttagcccacacaggacttgtaaactcttactgcacccttctctccattaggagcttttcctccctccttccccccaacccctctgtcctcctcactttggggaatttaatgctttctttagcatctttttgtgtgcgtgatctaggggaggagacaccccagagctccaactagctctcagctgaattctacttttgtttttatgtcttcctcgcctcctctcgtgtccctcttatctgactgatctgcgaagtctgatgcttctgccagagggagaggaataaatagatgttgctgcttccgaaggcttagacgttgggaaagagcagcctgggcggcaggggcggtggctggagctcggtaaagctcgtgggaccccattgggggaatttgatccaaggaagcggtgattgccgggggaggagaagctcccagatccttgtgtccacttgcagcgggggaggcggagacggcggagcgggccttttggcgtccactgcgcggctgcaccctgccccatcctgccgggatcatggtctgcggcagcccgggagggatgctgctgctgcgggccgggctgcttgccctggctgctctctgcctgctccgggtgcccggggctcgggctgcagcctgtgagcccgtccgcatccccctgtgcaagtccctgccctggaacatgactaagatgcccaaccacctgcaccacagcactcaggccaacgccatcctggccatcgagcagttcgaaggtctgctgggcacccactgcagccccgatctgctcttcttcctctgtgccatgtacgcgcccatctgcaccattgacttccagcacgagcccatcaagccctgtaagtctgtgtgcgagcgggcccggcagggctgtgagcccatactcatcaagtaccgccactcgtggccggagaacctggcctgcgaggagctgccagtgtacgacaggggcgtgtgcatctctcccgaggccatcgttactgcggacggagctgattttcctatggattctagtaacggaaactgtagaggggcaagcagtgaacgctgtaaatgtaagcctatttagagctacacagaagacctatttccggaacaattacaactatgtcattcgggctanagtaaag

SEQ ID NO: 542378 - DNA, 1174 bp, Homo sapiens
  misc_feature (1167)..(1167): n is a, c, g, or t
agcggactgacgtccctgcggggctcctcctgagcgtccctcctgccagccaggtcgcagccgcagcggcggccgcagctcttagcccacacaggacttgtaaactcttactgcacccttctctccattaggagcttttcctccctccttccccccaacccctctgtcctcctcactttggggaatttaatgctttctttagcatctttttgtgtgcgtgatctaggggaggagacaccccagagctccaactagctctcagctgaattctacttttgtttttatgtcttcctcgcctcctctcgtgtccctcttatctgactgatctgcgaagtctgatgcttctgccagagggagaggaataaatagatgttgctgcttccgaaggcttagacgttgggaaagagcagcctgggcggcaggggcggtggctggagctcggtaaagctcgtgggaccccattgggggaatttgatccaaggaagcggtgattgccgggggaggagaagctcccagatccttgtgtccacttgcagcgggggaggcggagacggcggagcgggccttttggcgtccactgcgcggctgcaccctgccccatcctgccgggatcatggtctgcggcagcccgggagggatgctgctgctgcgggccgggctgcttgccctggctgctctctgcccctgtgcaagtccctgccctggaacatgactaagatgcccaaccacctgcaccacagcactcaggccaacgccatcctggccatcgagcagttcgaaggtctgctgggcacccactgcagccccgatctgctcttcttcctctgtgccatgtacgcgcccatctgcaccattgacttccagcacgagcccatcaagccctgtaagtctgtgtgcgagcgggcccggcagggctgtgagcccatactcatcaagtaccgccactcgtggccggagaacctggcctgcgaggagctgccagtgtacgacaggggcgtgtgcatctctcccgaggccatcgttactgcggacggagctgattttcctatggattctagtaacggaaactgtagaggggcaagcagtgaacgctgtaaatgtaagcctatttagagctacacagaagacctatttccggaacaattacaactatgtcattcgggctanagtaaag

SEQ ID NO: 542379 - DNA, 229 bp, Homo sapiens
gatctagaggtccctggcgtacggacgcatcaagctgttggatggccgggtaagcaactgatggcagatcagcaagcgcgcaccgagcaggatttcgtgatgttcagccacccgaacctctttgtcagcgatgtcgcggaatacgcgcaaaacatcggcgcgcaagcggatggcaagaaggtcctggctttctttcccaagctcgacccgcgcagggcgtccgtagcgg

SEQ ID NO: 542380 - DNA, 955 bp, Homo sapiens
  misc_feature (88)..(88): n is a, c, g, or t
caaatggttgcacgagtcgtggtccctagagtcatgccctctgcgtgcctgtgccgaatctggggcatagtatgcgtatacgcatatnttgggagagttgacacgcggaaaggtttaccagatcaaagccgggtgtgaataacggggcctaactttaatgtcagcgccctagttgagtttgagtgccccactttgagagcctcgccaacgtttgtaaaacttgtggttgcaaacgcagaggatattttcggggaaactgtgcccaaataaggttgtgccaaagggaactgtgggaacacgagaaagagtggggtccccgattcaacggtaacttcaagtggggaactcctgtgaggaaaccacaggagtaaggacccaacaatctgtgttagaaggagaaaacatgggacaatgctgaacaatgtggtcaagttaccaaagaacactgcccaatccaagggggacattctcccccgcccccaagtgatgaaaagccaaggatggtgccagaggaatggccccccccgcccggctggttacacgccagaataagtgtcacgaaaagcccatcctactccagatggcgcacccccagagaagagaggatcgtctccccgcgccaagaagttcaagcgtgtctcacatccacatctcatcgctcaccggaggcagccgctgcggcctataatctgcgtcacgacgccccaagtcgtcacgcgccagacattgtggaccaaacatcgtgcgtgcccaacatccagatcggaaatgtacaagaggaatgggcgaaacttaatccccagcggccacccgtctgcgacaagatttcccccaggggcagtctaacaggagacggcctgtttccccgccgaccagcaaacgagacctaccaacaaccaaatagaaggcaaaggggggcaaaaataaaaagagggaggcccacaaaaaacaaaac

SEQ ID NO: 542381 - DNA, 140 bp, Homo sapiens
agcatctcccactgcagcctccaagtgacacagtacatgccagcacccctggctaatttttaaaatttttttttgtagagacgtggtctcactatgttacttaggctggtcttgaattcctgggcttaagggacccttgg

SEQ ID NO: 542382 - DNA, 249 bp, Homo sapiens
gagaatggcgtgaacccaggaggcagagcttgcattgagccaagatcacgccaccgcactccagcctgggtgacagagcgagactccatcccccgaaaaaaaaaggacaaaaaaaatttgtgtcacacaggccagatgcagtggctcatgcttataatcccagcattttgaaaggcaaggtaagaggatcgcttgagcttgagtctgaggccgcagtgagctatgaccacaccactgcacccagtctgg

SEQ ID NO: 542383 - DNA, 255 bp, Homo sapiens
agtctggagacgacgtgccagaaaatggccacctcgaaaaggggaaggggaaaagaagggaggaacaggtcataagcctcggacctcaggtggcttaagggagaaaatgtatttggtgtctgccatatctttgaatccttcaatgacacttttgtccatgtcactgatctttctggcagggaaaccatcttccgtgtgactggtgggatgaaggaaaggaaacccagaatgaatccaaccattgctgctattttg

SEQ ID NO: 542384 - DNA, 124 bp, Homo sapiens
caaaattggataaacttaaagctgagcttgaaacgttggtatcaccatttgatatcttccttgtgggaaattttgagaccagcaaggaccattgtgactattcatttgatgccccaggacaaca

SEQ ID NO: 542385 - DNA, 323 bp, Homo sapiens
  misc_feature (140)..(141): n is a, c, g, or t
  misc_feature (204)..(204): n is a, c, g, or t
  misc_feature (226)..(226): n is a, c, g, or t
  misc_feature (262)..(262): n is a, c, g, or t
  misc_feature (264)..(264): n is a, c, g, or t
  misc_feature (270)..(270): n is a, c, g, or t
  misc_feature (272)..(272): n is a, c, g, or t
  misc_feature (274)..(274): n is a, c, g, or t
  misc_feature (281)..(281): n is a, c, g, or t
  misc_feature (284)..(284): n is a, c, g, or t
  misc_feature (286)..(286): n is a, c, g, or t
  misc_feature (310)..(310): n is a, c, g, or t
  misc_feature (316)..(316): n is a, c, g, or t
gtccagcccccagctgtgggggcccatggccattttccttttggggttgcaaagatgatgaaagctgtgtggcccccccccccaccttgcccccggccccccaaagtgtccccattggaccaaagactgaccccccccanntggggtgcccaggggcagggccggccccccagggagggggcctgcattggctgcaaggatgancaaagaacaaggacaaaggccnggccctgaggccctggagacagctgttccccttgcncncacgcncncnctcatgntcncncccccagagatatattaaagcccnagtttntttttga

SEQ ID NO: 542386 - DNA, 335 bp, Homo sapiens
acatctctgtatgcctccacgtatccagtggctatgggggtgcagtggtttcggcgagtggcttatcgcctgggtggaggaagcagctactcgtatagtcagtggtcttgtgtgttggaggtggcttcatggtccacgcagtggcagagccattgcgtggtgggctcagctactgttggacggcggcagttccaccatccagtacaccgatcaactcctcctccagcgggaagagctataagcgactagagtgcgtctgttagctctcggtcccacagtcctcaggcccctctctggctgcagagccctctcctcatgttgcctttcggagaaga

SEQ ID NO: 542387 - DNA, 547 bp, Homo sapiens
gatctagaggatccctccggttcgcgaagactgttggccaatgatatatgaaaaaatgctcacatcagtaatcatcaggtaaatacaaatcaaaactacaatgagatagcaccttaccacagttaggataactattattaaaaacacaaacaacagaagatggcaaggatgcggagaaaagggaactcttatacactgggatggaaattagtaaagccattatgaaaaacagtacggagatttctcaaaacactaaaaatagaactactacatacttcagcaatcccactactggctatttatccaaaggaaaagaattcagtattatcaaagggatacatacactcacctgtttaccacagcactatttacaaaagcaaggatatagaatcaacctaagtatccatcaatgagcagagagataaagaaaacgtggcatgtatacacaatggaatgctattcagccagaaagaagaataaaatgtttgcagcaacatgggtgaagctggaggtcattatgttaagtgaaataagccatgccaagcag

SEQ ID NO: 542388 - DNA, 348 bp, Homo sapiens
  misc_feature (4)..(4): n is a, c, g, or t
  misc_feature (101)..(101): n is a, c, g, or t
  misc_feature (109)..(109): n is a, c, g, or t
  misc_feature (201)..(202): n is a, c, g, or t
  misc_feature (262)..(262): n is a, c, g, or t
  misc_feature (268)..(268): n is a, c, g, or t
  misc_feature (318)..(318): n is a, c, g, or t
  misc_feature (331)..(331): n is a, c, g, or t
  misc_feature (335)..(335): n is a, c, g, or t
tttntatataactctatagttgggttgttgtaaaatcctttaacataattgacaaaaattccatatgattaaataccgaaaataaagtactgtgttaaacnattatagntatttgcccactcatgtttacagcagcattattcacaatagccaagggatgggggcaacccaaacgtccaccaacagatggatgggtaaccnnatgtggtaaatacatgcagtgggatattattccgccttaacatggcggggcatcctatcncattcnacaatatgggtggaccttgggggcattatgttaagtgaaatatgtcagcnacaaaagggcaantccngtatggttccctt

SEQ ID NO: 542389 - DNA, 132 bp, Homo sapiens
atatctattgctgtgtatatattaatacgcgatgcgcgatgtctggcgttgtatcacgtcacccagcaagtggtcgcagtaagcttcccctgcaggccctaggtctgactcttaacctcacactatcatatg

SEQ ID NO: 542390 - DNA, 336 bp, Homo sapiens
ttcttttcatgttgtcctctattcatgccctcacttccttctttacctcacttatacataatttccgagttcagcccttatgatcagtcatcgtatgctcttcagctctctggctcttctctccttccttatactctgtagggaaaactccagccctggtgaattgaactctctgcttcctccagggactgtagctggccagctgaacatgactgggacaaaaaacaagggcgtggtaagtgacctaaacaaacacatgcatagtcaaccaactaaactttactccctctacctcattcaagcatgtaggaaaacctataacagacactgctgtgg

SEQ ID NO: 542391 - DNA, 439 bp, Homo sapiens
gttctagccatagaaagactgtatgcaccgtagtgcctatttacacagaaggagcttcgagagaagggatgtagctcgtttctcactacgtgccctgtcctagcctcgctctaggacccaggactaggctgctaagttcccgtccagtcttcagagcaagtactgtgttagtcatgcacacacatacctatcaaaccttggagttagcaaagaattgccccagctctgggcaccctgtgccaccctggtcctgtggatccccttcgtcccacctggtccaccccagatgctgaggatgggggagctcaggcggggcctcatgctctcggggatgggaatgtgtttttctcccagacttgttttatatggctctgcttgaagggctgggagatgaggtgggtctggatcttttctcagagcgtctccattctatggtagt

SEQ ID NO: 542392 - DNA, 951 bp, Homo sapiens
catatcagagcacttcatcgcctacaagaagttccccatgaggttccaagtgtgtgacttgctagtggtcagatccaaggatgagtcgtaggatgagttgggggtatatctcactcgagcagctgtgttacaccgtttggcgcaagatatttctgagacatttaatcattgccaatggcctcacgttcggtgtctagagctcaccagctaggtgatggcgggactataactggtagccatgagcggaatgtagataaggattatcagtgctctaaagtgcatggttatcagttgtggaaaatcaatcgtgctattcatggtacttgacgaatactactatcaaagaactactgttcttggcagaaaggaccagcatgctcgtagagagcgagtccaaaatgtaaactacgtcgtaccccagactacttcatgtactgaaattgtcagactcgaagagtatgccatgaaccatgatatctgagctaatggaattgggatgaggaatgagtactgacaaagtgtcagaaaaatagttacccatcccaaaactttgttgcaccattgcaccaaaaatgattgtgcccctctttagaaataacaatagacgtcttggtcatccaacacggcggtgaacccctgtttaggaactgaacccagtgtcataggtattgcagaacgcgacatttggtggggcaacaaaaacaaggtttggacatagtcggatcaagcgtagtgccactattagctcctactgagagaccgccgataaacagcagtacccttacacactcgtgagtaaactttaactgcattagaagtgcgctaccagcatgcgtggaaagaaactacaccccggggatagaattataatcatttacagaacgtgcatgaggataaagggcgcattgcggagagcaaaaaactaagtcagtacaaacaaccaagataaga

SEQ ID NO: 542393 - DNA, 1174 bp, Homo sapiens
cagcgactaccgcaagaagttgcttgaacacaaggagatcgacggccgtcttaacggagttacagggaacaattaaaagaacttaccacagcagtactgcaacagtctgaaacactgatctgcaggccctacagagtgttgggcagcatcgtgggtgacagtgcttaacacagttaactgaagacaaaacttcacttgttaaacgctacccaactggacccaagactatgttgtagggttgtcgtccgacacgcttgaccaacaacgtacacgctgaccgccatggaaccaacgacgttgctcttgggatactgactacagctacactactcactgacgactacttctcgcccgagacgacggtggactccaactgcgtttactacaccactgtactcactgacggaccccttgggacactgttttcttacttcctgacgcacttcgcgcagggctcatcaagcaaccagaatcctggcgcacattcaacgcagccaggtgcatcagcaattcacctactatacgacaacctcagaagatttcattatacagcgctgtcaggcacatcacataaccatcctacacacagggcctgtattcgtgtactactgggaccccacccaggtactggggacacaaacacatctatggccacagaagccggttgcgtagcccagcctggacctgcaacatttcttcacaagggttggtatctaagttcctacatgtcagacccaagtttacatctgggtgaccacgctgccacggtccgacccacggcagacaatcgttcactttcattgatcagcacgactcgactcaaaccatggccatcactcttccactgcgcctgcacactagcactgctaacagcgagcggacgcaccggagtctactcatgacgcggaacccttccacgcttgacacgacagaggaacttccgactgaaaacgcgttaacactggccggttatccctggaaatacaaatgggaatgggaccttggagtaactccggcagtatagcgctataccacaggtaccacctgtgccataacaccctggatagccagaataaacttggagactccctgccagaactgccgtccagggccaatcttgagctcacacatcccaactggactctggccacttatccacccacgcaatagatca

SEQ ID NO: 542394 - DNA, 228 bp, Homo sapiens
acaggcacaagtaccaaggctgcacatgagtagcagcggggctgggcctggcccacaaagccatttttccctcctaggcctccctgtttgtgatgggagtgggctgatgccaagatctctgacatgctctggagacatttaccccattgtcttggcgattaatatttggctccttgttacttatttgaatttctctccagaaaatgggtttttcttttttattgcacc

SEQ ID NO: 542395 - DNA, 823 bp, Homo sapiens
gctccactgactgatagagcgaacggcgaccatggtgcccggagtgtgccctggtgggcccgatgccgtactggagtgttgcgcctcggtgtggcgccgagctgctcctgctgctcatcccggtggcctgcgtgcagtgagcctccccggagctgcttgttctcagaacacaaacaaaacctgtgaagagtgctgaagcaacgtctcctgtcttttggtgcaacactaacaatggcttgtcttggactacccagttacaagcgtttgccacctggttccctttgtaaattgagctctgcacgctggggagttttgttgggtgaacttatgaggcgctgatcatcactcatgtcggtagctcgggggaaccctcctcctgggcattgacatctgcttgactgctgctgctgcagtgaggacagaggagccggaagccggacaaggagtgagtgagaagtgccatgcgttgacgggaggagaggcgggatactgaaggagcgaacggagagccaagatgaagacaaggaccatgatgaccatcctgaagaaaaatatggactgtttcgagcagaacaacccgtatgctagatttctggacaatcgaactataagcgctccaggcacatcacgttccgaatgctttcctcgtgacgtgctgcacggctcctgaaggccaagcacagcgggagaccacggttggccatttgcggtcttctgacctttgacagttgacctgccaacattcgcgggccgggcgggcgagaggtgaccttaaggacggacttcctcttgaatggtgccttactcctgtcttctgtttagt

SEQ ID NO: 542396 - DNA, 771 bp, Homo sapiens
  misc_feature (328)..(328): n is a, c, g, or t
  misc_feature (618)..(618): n is a, c, g, or t
ggctggtaccggtccgccgcgctctgatcagagtgtctgtgtcaccatgggaacgattaagttttccacggtgcaaaccagcctcggggagcttcaggatcaatgagttactagctcatgagggaaatgtataaatatttaagtacatacctactatctgtacagagtgactctcattgacccagagaactgcgtgtaaaatattatttattcacagagttacacgagagaaccgaatcgtaaattcagtacgtgtttagtacgattctagttgtggaggaggtactgtaagggtgtcatgaggcaaagcaatattggttagtccaanggtcgactcacagagactgtgatgtatagcaggcattgaacgacattcgatggtttgggatacctaaattagagaagtgcattagagatgcaagatatcaagaaagagcacgttgtgggctaagcagtttgcaagttcatatttctctgagaacagggagtgttccttcaataagcaattccgccgaaaggtagatcttggtacatgttgtgtcaattgttagagggatgctaatgattgaactgctggagggacgcagatcgacagggtgcgcttaagcaggtcatagntagtgggtgaagcctagagcaataggaccagttgccatcgaaattcgagttccgattcgattgcaggtcaaaagtgtgattggaggaaccgtcactatgctgacccaagccaaatggtgcatggaggcaccgtaagtccattggacagcaagg

SEQ ID NO: 542397 - DNA, 144 bp, Homo sapiens
gtcctggacagcagctagcaactctctgggcaccccctccctccaacgcagtctcgtgggatcagctttcttatgctccaggctccgacttaaaggggaagcctgaggcactatagcacctgacctcaccccagccccaccttg

SEQ ID NO: 542398 - DNA, 585 bp, Homo sapiens
  misc_feature (435)..(435): n is a, c, g, or t
tgggttggactcaggattaaaaaaggggaacggggaaggtgacagcagtcggtgggagcgagacatcccccaaagttcacaaggtggccgagaacttggatggcacttggtggttttttaaaaagtcatgcccaaatatgaggagatggctttggtcacaggagaatgtacctcttggcaatccgtaaaagcacaccccacctttcttctctaagggaaaatgggcccagtaccttctccacaatgtcacaacacaggggagaggtagatagctatggcttccggtgtgtaaataatgtaatggcaaaattttttataattcttcgccttaatatctttttaaattgggattataacttatggaattagattagagcctctggtggccccccactttccccctttttagggtcccccaactctgtgagaatgttntggaagggctttaggggatcatcccgtggagagtggggactgaaaggcacgccagggcttttacccttgataacacattgatatgtgaaacccagtgggaaataaaaagtgtgcaccagcctgtataagaaaacaaaacaaaacaacggg

SEQ ID NO: 542399 - DNA, 1061 bp, Homo sapiens
aaagaacataaaaccaaatagttcagtagactcaaaatgcaagcgttggtgagggtatggagaaaagggaacccttttacacttggtgtgaatgtaaattagtacagacattgtggaaaacagtttgtagagcttcctcaataaaaacacatatgatccagcaatcccactactgggtatatatccaaaggaaatgaaatcagtatgttgaagagatacttccacgttcactgaagcattgttcacaatcgccaagacatcaacctaagtgtccatcaacagaagatagatagggctgagcgcggtggcccacgcctgtaatcccagcactttgggaggccaaggcaggtggatcatttgaggtcagaagttcttgaccagcctggccaacatgatgaaaccccgtctctacaaaagatacaaaaattagccaggcatcttggagggcgcctgtaatcccacctactcgggctgaagtgagaatggcttgaacccaggaagtggagatttcagtgagctgagattccgccactgcagtccagcctgagcgacaagagtgagaagagtgagacttcatctcaaaaaaaaaaagggtacatctaccaagggaactattattaaccttaaaagagggaaataactgatttacaacaaccatggattggacctgggaggacactattgctagtgaacataagacaggatctccacttggcatatggaatccacaaatttgaactcacaacgccagaaggggtagaacacggggggttcacagggcactggaaagcgacgggcgacaacaatgcgggcaacaccgtggggccaacgggggaccaaaaggtcaaggtacaccacgggaagtaaaaccagttccgggaaaaccgtgatgtgatccacaaggggtgaaccagcctacaggggaacaccggcgacacttggccggacgcataatcctaccaggggaaacaacaaaccggcaacagagcgccaacaaccaagacgcagaagggcacaccaaccacccaagcggcaccatctacaacaccccgcacccacca

SEQ ID NO: 542400 - DNA, 263 bp, Homo sapiens
  misc_feature (15)..(15): n is a, c, g, or t
agctcggttcccgtnctacagcacgccgaactttccggcgctgatgaccttgcccctggtgtttgtagagcatcgacagttgggtggcgctgcggccaagggcgcacgcgtcaattacctgcgcaacctgtgggtagaccaggtgcggccgttgccggggattgaagtgctgacctcggatgacccgcgactgtactgcgggatcacagccttcaagttcatcgggcgtgatcagcagatgatggtggaaacactatgtagga

SEQ ID NO: 542401 - DNA, 193 bp, Homo sapiens
ttctgactaggtgacctctaaagtctcctttcctctgtaaggtcgttattagtgtcacttatgggtgatatagtttatcttacttaagaaagagaatatgagtgtaaggacggaatgcctagatataaaatccacggacattgagagaagcggtggtcggggcccagacacaagggactgtcttataattact

SEQ ID NO: 542402 - DNA, 416 bp, Homo sapiens
tatcccttatctgaaatacttgggactagtagaagcatcttggatttgggatgtttttccaaattttggaatacctgcatacacacaataagatatcttggagatgggacccaagtttaaacacaaattcacttgtttcatatataccttatgcacatagcttgaaggtaactttatataacattatttttaataattttgtgcattgagaccaagtttgcataccttgaaccatcagaaagcaaaggtgtcattatctcagccactcatgtgggtaatttgtggttggttgatgtcaccatcattcctgactgaatgtatatgctaccaataagcagttattttcttatacttattcatgcataagtacttaacagtaaaaaatatgacataactcgcataggaacaaggatggc

SEQ ID NO: 542403 - DNA, 278 bp, Homo sapiens
aattggtctttttccaagggcacggggcaaggacacccgtgttgagctccgcccacccctcccccttatttttccagggccgtacaggtgcggggggctcccttcacaatagtcctccttttgttcctgcccccttaacacacagtgaaaagtaagggtggggcctttccagtcagacaaacttaagatcacatcctggcaagcccccttgcttgctgtgtggcattgggcaagtaactttacctttctggacttgtgataataaaagttcctacctc

SEQ ID NO: 542404 - DNA, 139 bp, Homo sapiens
tgagcataggctaaacatgtagctatgcgtgtagtaggctacaacactaggttgtgtaagcattctcagaacatgtccccgcactaagtaacacatgactatattagagtcaggtcctggctctacaatttactaacag

SEQ ID NO: 542405 - DNA, 351 bp, Homo sapiens
actctgagagaagtgcatggtctagtaggcgcagctggagtctgctcaagtatagattcagagaccgcattatgtcctccatctctgatgcagtcaactcgtaaacgatactaccagcctggactcagtggatcacacatatgttccctggcagcaccactgtatatcgtttgccatatgtgctcgttagaacgttgtgccatctcacactacatagctgtgtgaatgaatctttccttgcgctaaagactttacaggtatgcctggtttagcagggcaagtagtcacttcgaccactacacctggaagcctcataccgtataagttgttagccatagctgtaaattcatt

SEQ ID NO: 542406 - DNA, 140 bp, Homo sapiens
tggggttctggacctccatggggttcctcgactcatcatccaaccctcgcctgggaccccggtcatctatccatgcctcgcctgggaccccggtcatcagccatgcctcgcctgggaccccggtcatcatccatgcctcg

SEQ ID NO: 542407 - DNA, 324 bp, Homo sapiens
aggcgggaccagtcccggcgtgcagtgaggggggcgggggtgtctttccagaaggtcacgtggaaatgtctcgggattggggtcccggagggcccgtgaagcgggtttggctccggaggtgcattttctcatcatcctggctataccacaaggagcaagggggtagagagccgggcaagcaggctctctaccttcttcttcttctcctcctcatcctcaggcagctccagaccctcctgggtaactgagaccaggctcttcccatcaaattcctggagcggcggcacacagtactcgtcagggggctcggtcatatataccagg

SEQ ID NO: 542408 - DNA, 454 bp, Homo sapiens
tttctttcgccctgcgctgcctctggtttggagatgttcgagcttcctcagacaatccacatgcgggtatgcccagggacggctggtactgcacgcgttggctgctgtgcgtgcctgggcgctggcgtggccgatgccgtggtgttcgtgtttgccatgagacttcatcaaggtgaagttcatccacgaccagacctccccaaaccccaagtacagaggattcttccacggggttagggagattgtgcgggaacaagggctgaaggggacgtaccatggcctcacagccactgtcctgaatcagggctcgaaccaggccatccgcttcttcgtcattgacctccctgcgcattggtaccgaggggacaaccccaacaagcccatgaaccctctgatcactggggtcttcggagctattgcaggcgcagccagtgtctttggaaacactcctctg

SEQ ID NO: 542409 - DNA, 296 bp, Homo sapiens
gtggccgggtggggcagctcagcctgtaatcccaacactttgggaggatgaggcagatggatcacttgaggccaggagttcaagaccagcctggccaacatggtgaaaccctgtctctactaaaaatacaaaaataaacccggtgtggtggcacacacccgtaatcccagctgctagaaagcctgaggaacgagaatcgcttgaatcccagaagtggagttgagtggagtcagtgagctgagatagtgccactgcactccagcctgggtgccccagcaagcaagactcggtctcaa

SEQ ID NO: 542410 - DNA, 417 bp, Homo sapiens
tatatgacctaacttgtgattcttttattcataaaagctaatgggaaacggatccctgattaagctgatgactagacctacaattaattttcctgcagtatatgcacagtcattgtaccagcaatattaaaagcatatgtaatcattttatttataaatctatcctttaaaaggacatacgttttaggatgtcatcattttgatgtgcactcatgtcaatgttgataatcatgctgttcattatacatttcagtgtaacacagcagattcacttcaattgcctatatagcccacgtatattatgtagtctattagcaactgttcttcaaaaaaatgacattcaaaacaatagtttcatgtagagaaacattagtggatgttaattgtctccccaactatatttatgggtgttcagcg

SEQ ID NO: 542411 - DNA, 300 bp, Homo sapiens
aaatgcccccctttttacccttcggcaggggaaaggcatgccctgaagggcgggatccaaaaggaagatttggggccagattcccttcttcttttcccctctccgggcttcccttttttcccagggatgatgatggaaataaaatggcgggggtgatgcctggacccaagggggtgttcctcccccctccgggtcccttccttagtttcccccggggtaaaaataatcccggggggggggtttgctttggaaaacccccgtttctctccttgaatgataaagaattaaatttgtttccca

SEQ ID NO: 542412 - DNA, 699 bp, Homo sapiens
agactttgcgttagatacactatgtctcaaacatagaggacgcttacaagaaatcatgatacatgctctaatctgagcgcagcaggagaaccgttaagattaccaccttatgcctactacaaatgcaagcaccagttctcgaaatattacatcaccttcactataaacagctctgatacagctatctcctgctagctcttcgctatactgctgctcacggggatcacatgacacatctcgatagcggaagctcgaagcatgagtgcatgctcattaagtcaccccacgcagacaagcaagacgtgaatgatttatagggaaatgatcacatgctagattgagactttctgatgagcaagctccatgcctgtgtgaacctagattagaatgtcagtttgatatcaacggagaggactacctgtaggagagatcacttgtcacaagatgtgcgaacgagaccgggcactatgaccaactcactgccaagaggtacttgtacggagttaggcgacgcaaagcagccatggattgttcacggctctatcagtgcgaaacttgcccttgcaatcatcgacgacaatgtgactaggaaagagcctaatggtagtctctatgacccaacttgacaaagaatggtgagtttcaagccacacttggactggtcaccactgctattgctcggagcccaggagcattcgg

SEQ ID NO: 542413 - DNA, 566 bp, Homo sapiens
agctcttctcatcttcttccctcacacttcctctcactcaaataagaaccttccaaaaatgtgtccacctgggcccctgccctgggactcatggatttggagttgtggccacacggttgagggctgcagtgtccagtggaatggggcaattgcgggcctgggggcccttggcctgtccgtggcgggagcatctgcaaggaggagccccagagtccagggagcactgtggggagctccttagagctgaactcacccggcgtcaactcatcaaccctccacccatggacaggggtgcccccagcacaggagaggactcagccctctgcccccacgcacggtgggtgcctgtcaccctgtcctgcccagcggcccgagggcagcagtgggtgtgagggcagcccccggcctcccaagagcagctgagaggatccctgcgggaatccgggcttcgggtgcatgcgatctgatctgagttgtttctgacagtgacagagtgacaatctataagtatctcaagatcaaatggttaaataaaacataagaaatttaaaacgattaaaaaaaaa

SEQ ID NO: 542414 - DNA, 253 bp, Homo sapiens
aatggagatgtcagaacagggagtatacacgcctccatgggttcatatatatcaagagctcagcagacagaccaacgaaagcgtcccctattatgaaaggggtgtgttatcgggttgaaatgtgtctcctgtctccaaatacatatgtagaagccttaacctatagtactacaaaatgagatcttgctaggagatagggtctttacagaggtcatcaagttaaaatgaggtcgttagaatgggccccaattca

SEQ ID NO: 542415 - DNA, 277 bp, Homo sapiens
cacaccactgagtcttccatataaagatcatattcctgctccaagtggccattactgagctgagagatgtcgttgccgcagtgaggacctataggcacatgtaggttgaatgaaactctagttctacctggaagcccagacaagggatgggtcagtgagcaagactctcttcctagtctcaggccatacctgtggcgccctgatcctattctcatgacattggacctgggcagatgtgacaaattcagagaactatgattttgactcaggtggtgtg

SEQ ID NO: 542416 - DNA, 423 bp, Homo sapiens
  misc_feature (28)..(28): n is a, c, g, or t
tgtatgatatagttaattggagcatgtntcatagtggtacatttataattagtgaaatcttagatctgatgaaatagatatgatttctaagagtgcgaaagtttagtgttatagacagtttgcaggactttttattttgtaggtacttaaattttgaggacttaattattctctaataaagtgattgacaaggattaatgtataaattataccttgtcagtctgaacaatctgcagtttggacattgattcaaattcatttaggctgaataaattttgataaactaagtaagttttgacagctatttaaatattgggaaaggggatattcaacatttttcttacatcctgagagctttgttacatttagttatttgagacccattgggttctgttttctgtttcagcatgttgctgtaatggt

SEQ ID NO: 542417 - DNA, 255 bp, Homo sapiens
acgcccctgattctcgcgcgggtggcgcttccttcggtgcatgagtcggtggcctgcagtcttgttcgcggttaggcgtacggccggggctatgggttgactgcgtaggctgctggtttctctcctccctcgtctggggctccggggtgtcggtgtgccttgtggtcagaagtgggccagggcatttttaatctcagagcgaaagcctataatcactgcgcccgctcataaggggatggccatggctaggttaat

SEQ ID NO: 542418 - DNA, 351 bp, Homo sapiens
ttcatatccagcgctttcatgcggcagcaggtagcaaagccagaaagcaagtctaacaggatctaagatgaccatcaggagaaggagtttgagactgtgtatgcaacccccaattagacccccgttttactcgtgatctggaagaatgtatcgtggcttcatacttttcacagtcacagtgtctctctagaccccgtggattcagcaaccctaaggccacataatctataggcatgaaatgcgctcgactatgattcatgtcgagtgctttaatcccccatgccacagtgggaactccccaccattgttaatattggcatgaaggcgctggacatgagggtaccgagctcg

SEQ ID NO: 542419 - DNA, 166 bp, Homo sapiens
  misc_feature (34)..(34): n is a, c, g, or t
  misc_feature (42)..(42): n is a, c, g, or t
cggagtttgctaaggtttggtaagtcgccatgancccctagnctaaacagtgctctacccccgcaggtaatacttgaggcactacctaaatagttttcggagagaaccagctatataccagtttgattagcctttcacccctatccacagccgtggggtaggaggt

SEQ ID NO: 542420 - DNA, 856 bp, Homo sapiens
ggatgtagtggatacgtctgcggtgggtctcttccttcgctaacgcctcccggctctcgtcagacctcccgccggccgtctccgttaacaactggaacaccatgccttcaagttaagtggcagagtgtctgatggagagatatgtgtgaaagtagatgtggaaattgcgaaactaaactgtgactgattaggcacatgttggaagattcgggaagggatgatgacaggagatgatgaccctagttccgtcgtaacgaaagtgtgaatgcgagaatatattaaaaaaggtcattcagtggtgcaaccaacagaaggatgagccatcctcctcactgaagatgatgaggaacaatggaaaatgtgaagtagatgatagtccctgtgggggagccaagaattcctgaaagtagaccagggaacactttttgaggctcattgctggttgcaaagctaatttagacatcgaaggttgcttgatgtgacagtgcagactgtggccgactatgatcagggggagaaaagctcctggggagattcgaaaagaacttctgtatcaaaatgtttgtactggacaggagggaagccggtacggcaacgagaaaccagtggggtgcaagcaaatgaagtgttggggcggcatgggaaactggtaggatgtccaaatacactgggcggccgactatacaatggatattgacgacggtcacaatggcggcagccaggtttgagaaattgcccgcaggggatggggccatccacctcggcagtttcagaagaaaacctgttctggggcaaaaaccgctcaagagcgggaccccttagagcagcgcctgcgacaacgcacacgggtgacaaa

SEQ ID NO: 542421 - DNA, 342 bp, Homo sapiens
tgagctcctgttcggcacacaggaaaaatgaggtcgcaccaacaaactgaaggatggtaaatgttgaggattttattgccaatgaaagcggctgtcactgggagctgaaaaggtgatggaaagctgaaaagcggataaggtgggtaggtacctgaagtctggccatctacggcagctggattcttctccaaagttatactgtcaagctgtccctctgaagccaagccacttctctttgacatccagccgtagtctctgctcctctccaactgagtatgagggagatgtttcctattatccttcataatgtgccatgaacatatgaaaaaacataaaaacatg

SEQ ID NO: 542422 - DNA, 226 bp, Homo sapiens
attcatagcggtgagccatcattcaattgcggtggtggtggtagatggtgacggtggtcatggtggtggtgatggtgatggtgagtgatggatggtagatagtgagtaggtggtgatggtgatgatggtgatggtggtggtggtgatggtgatggtaggtgatgacggtggtgatggtgatggtggcactaggtgatggtgtgatgcttgtggtggtgatgatagt

SEQ ID NO: 542423 - DNA, 331 bp, Homo sapiens
ccagaaatccaataattacaaataaaatttacactgtggctgggcatggtggctcatgcttgtaaccccagcactttgggagactgaggcgggcagacaacttgaggtcaagggtgtgagaccaccctggctaacatggtgaaatcccacctctactaaaaaaatacaaaaattagccaggcgcagtggagcgtgcctataatcccagctacacaggaggctgaggcaggagaattgcttgaacccgggaggtggaggttgcagcgagccgagatcgcgccatgaacttcagcctgggcaacagagtgagattctgccctgcagattcccc

SEQ ID NO: 542424 - DNA, 326 bp, Homo sapiens
  misc_feature (15)..(15): n is a, c, g, or t
tcaagattggccgtngtgtgactgatatggtggtggtggtgataacggtgatggtgatggaggtgacttgcacatgtttgaggtgcttctgacagggaaacacctgtcagtgggaacaccacaggggaaacaccaacgagagtcgtcatgatacgtggtgaagacgagctcacgacgtgattcaaatcttgtgggtcacctgtcacacggggggtgtgcgtacgagacggacaggtgacaacagagactgacgatcatgtgaagaacacggatggaactaatatggaagactcccactatttaagcagttaaactagactgactga

SEQ ID NO: 542425 - DNA, 140 bp, Homo sapiens
gagtagggagggtactaaagatagccagcatacatagctcccagcagcatacctatacactacaacgccccaacacacataacagacatagcacacacataagtactagtacaggtacagctaagactaactagaagata

SEQ ID NO: 542426 - DNA, 141 bp, Homo sapiens
  misc_feature (27)..(27): n is a, c, g, or t
  misc_feature (35)..(35): n is a, c, g, or t
  misc_feature (115)..(115): n is a, c, g, or t
  misc_feature (117)..(117): n is a, c, g, or t
cagttggtaagccaggtgggcaaaganctactgcncctggcctacagcgagccgtgcgtcctgcggggggcgctgctggacgtctgcttggagcagggcaagacctgccacagcntnggccagctggcactcgaccccagc

SEQ ID NO: 542427 - DNA, 306 bp, Homo sapiens
ctgtttctttaagccagtacatatattatgcctgcctaagtctgaactggggctgtatttcagctagttgtatgaattattgatatttagttatgatagctaatgtttaatgtgtttggatctgcacagttaggttgttgcacaatagtcatttcacaaaatctgagtaattggtcaaatattaaaagaaagatattcttcctgttaggaataacgttgtcagtctaagtggccattacatcctctttttgatttacatcatacagatactttagaaagttgttgtggtgttgtatgccaagaaaa

SEQ ID NO: 542428 - DNA, 1190 bp, Homo sapiens
  misc_feature (447)..(447): n is a, c, g, or t
  misc_feature (685)..(685): n is a, c, g, or t
catagattacaacggtgatggcgggcaagcggtccggctggagccgggcggctctcctaccagctcctactactactggaatccgaaggaaagaaatcagccacgccgaatcgctgtgagagaacaactactggtgcttagtggaaggaccgagccgatatatagagcctattctcctaaggaagactatcgaatgaccgcatgataccacctaatactataaacgaacgaagtaacgcgccaaataataataatgacgatgtttaagctcaaggagggggagtagctacgagcaagctagggaacttgggtccagagccgcgtagcgtgtcagggcgcttaatacacaacttgacgcgaagatagctggctcggaaatgctaccgaatcggaagatatgatagaaggatctaacaggactggatagctatggaatccagaagcacngcgtaagaaaattcggatgtaccaagcgcaatttcaaaatgcgactataccctactccgaaggcgattaataccaacactagcttacctcggaacattgcgtacttgaaggacaggctgagaagaccagaaaagcaacatcgtgattagccggtacaacttgaaatggacacataactatacaatgcaaaccgccgagaaaataccgcaaattacctccgattggataataaacatgncagcatgaataaaaaatcggggcctacaacctgccaagaggaagaacgatggaaaagattaattacgacgaaaatgtacatcagaaggggtggagaccgcgaaatgatcccagggagatcactggaaaatcgaaagggaaaggctgagacgacgaaatgatagcctaagggaagttaagagagacaaaaatacaaacaacttcttcgaagaatagggcaaacggcagccaatacgaggggctaacctaccgcgatggccgttcacctgcgaaacgcaggacgatggggacggcatccaactaataaagaacagctatctaaactctgcgaggcatcagcgggaacacagccatgcaatttcataataaaggggccatggaacattaaagtaatactacctattaaaacttcggggactggaataaagcccaggctcgaaggaattgactggaccacctttggccccggaggcatgaatttgttcacgaaggtcccaatgaagggc

SEQ ID NO: 542429 - DNA, 142 bp, Homo sapiens
cgtagtggtatgcgaacttagccttatccaaatacccgtcatatacctagaatccgtacataccaagttgcaccatcgagaaggtatgcgcatgagctggcaggacgaattcaggcagtggtttcccatcacccgcgacaag

SEQ ID NO: 542430 - DNA, 136 bp, Homo sapiens
tcgagctcggtaccgattccatccaacgccgctgactgcagtcagcggtggatgcatgtcagcggcgttggatgcatgtcagcggcgttggatggagtcagcggcgttggatggagtcagcggcgttggatgcagt

SEQ ID NO: 542431 - DNA, 1126 bp, Homo sapiens
tacggcactgttagagccctcttgtcatgtagacattagcatattaaagtttctgaattgtctagccagaatgaatcctggttaacttcatgcaaaccatttattaaactgatttaatcacaaaaccttttctaaattgtacacatctttaagaagtgttactctggagaatcatcattaaccataattgaagtggtgactctagttcctgctgaatatttgagagtttcgtacatcctctctgttgaatttgtggcacagacactcatctaacatttactgagctgttctatgctggaagcttatttaatctcctcatgaacttcatgaggtagatgctattattccaatcttaaagatgagaaaatagacttaaggaggttacgtatctaaacccaaggtcacatagctagttagtagcagacctaggatttgaactccgctctatttcattctaggcccaagctcttatacattgtgctttgctacctgtgtgcttaacttagttcatcatgtcacttttccatttaaaaccttctagtagcttcatattgcacttggtctaatatccaaacttcttatttcgggtcttcaaagccctgcatgatctgatttcttttctacttctctgaatgctttctgtgtttcagcgttttctggctctctctgttctgtagattcatacatgagagacccattgctgcctttgcacctttatactgctgttctttggccccattcccagtcctacttgcatggccagttcttcatgtttttcgtctcaaatatcagttccccagaaaggtctgcttaagaaagacctagctaagtagaagccccagaaaagttcagcctcaattacgtggttgcactgtcttgaaagtgcttaccaacgaccccaaagtatttatcgtaagcttagatggtctctcttctcccattagaatgtaagctttatggtataacagattctatctgtcctggtagcccaaccgaagtcctcaggaacaaagtgtaatacatggtgtgtcataagacatcgaatgactgatgactgacaggaagaaatgggaatataaggacatggtaaataaattaggaaggatcaggaacttaaaatgtaaat

SEQ ID NO: 542432 - DNA, 204 bp, Homo sapiens
agcagattcagaactctgagtatttacataagagtgaaattactggctcatatagtcactattaataactgtttgaggaaaggcagaaaaactgttattccaaagatggctgtaacatcatcaacaatagggttccaatttctccacatccttaccgacacttgtaattgttgatcttttttcttattaatttattaccatctt

SEQ ID NO: 542433 - DNA, 1396 bp, Homo sapiens
ggcaaatggagtgtccgctggtgcccgggcctgcaccatggagcgtgccggaccttcatcgacatcagtgaagatagtatcattggctgtctgagcttcgtgctaatcttgaaatctaaagaggagctgcaccatttgcacgaagagaactcggagagggtggcacttcactgttagattgtgagctcatacattcattggaagcctggggatgtgtgtctgaatcgggaggcactcgatgtaatgcatgttgaaccggtgctgactgaacaagagtgggtagtcccttatctcgtgtggatccgtggtaaacccatggactagaggcgatagtaaggcgtttgagatctgcaaagaccgttatgtgccactaggctggtcaaaaattgttcgtctgtaagggtgaatcgacccccagatgcatctggaagactaggcagcatggattaaagcagactcttttttcctcaacgggaatgggtatcataagaatagtagctaccttgttaagggatcaccatcgacggtggtatttggctaagacccttaatttagaaagtgtggtccatgccattgcatctgttggggggccgattgtcaagttatcattctctcaaaatcatggaatgcttgggtaatcccacccggtgtaagaccaagttgtgcactttggaccttgggaacttgggaccagtgctctaactccactggtaaagagagcacaagggccactagcactctttttttaaaggtaacttaacctttgaattgaaggggcgacttatggttgggacctttggttggagcaaaggcaagttggagtagacctttggtaacaaaagaggtccctaccgggttgtgcacaatttgtgacgttcggggaaaatgctaacaatcggcatggaagcgcacccaaattttggcttattccccccaatggggctgccagacagctcttggcagttggccccccacaccaggtgttggtcaattccggttaccggaggcccatttcgaagagggaattccctagacacgtgggcacttttacaatatttaaagagggcaaaccattttggttatcgtatttatattacaaccgcaagtttcaaatggtttaagtggggcacgggggcgggagacgtttaattttcacgatggaaattcatttttgtgtaagaccacatattgtgtgggtgaaagtgtggtctaaaaatatgaggcccattcgatatatgggttcaaggcctggttgattacgggaaggtaaactaaagggagcagttacaggttggagtgtcaagcatgtggccatggttgtgcgagtgtaacgtagagaaaattatggggggacaactgagtgtgagaactatatattaggagctttaaagggaaa

SEQ ID NO: 542434 - DNA, 178 bp, Homo sapiens
gtagggggaggaacgaggaggaggagtactctgacagcagcagcagcagctgatggggatgtggcgccctccggagtgcgcagcctccgctcccacgcccggagccgctggttgtgaacgaggccaatgcctaaatatgatacgacacgctatagagacgttggagagaaaaatggtc

SEQ ID NO: 542435 - DNA, 213 bp, Homo sapiens
ctggttatgcattactgataacattgttacagaagaatggcagcttactccaggtgctggagttgagaatggatatacctgattatcctagcttgctagatgatagatactgcttcatcatcatggaaccgatccgcacacgggacggtgcgtcttaccataaactccacaccaaccgtatacgcgaacgtccaaacaaaacaaaaaaacaag

SEQ ID NO: 542436 - DNA, 412 bp, Homo sapiens
tgaggattgtaacccatatattgcatgggggtccccaatctgaagtcagttaattaactaatttcacagcgtggttatggcaaaatcaataagaagcgaattgctttgcacgataacgctttgattgctcgatctcttggtaaatacggcatcatctgcatggaggatttgattcatgagatctatactggtggaaaacgcttcaaagaggccaataacttcctgtggcccttccaattgttttctcccccaggtggaatgaaaaaaaagacccccccttttgtagaaggtggagatgctggccacagggagggcccgatccacaggcttattagaagaatgaactaaggtgtctaccctgattatttttttaagctggttggttaataaacagtacctgctttccaattta

SEQ ID NO: 542437 - DNA, 782 bp, Homo sapiens
  misc_feature (650)..(650): n is a, c, g, or t
tgaactgtgctcgatgtgcggattgtggccgcggtgcgcccatggcgctctggctgcatgcctgtggctgcctggtgttttttgtcgttggctggcgtgtggtgtgctgtgctgtgcagcggcggagcagcagtgtcccgctggttgctgtggtcgagtagaccgggacttgttgggctcctgcggccgacactccatgaaggccacatacaccagctgacttgcaggctactactacctaactatagatcccgcccttggagctggggtcccaggaatgtgctgctgttcctgcagtgacaagctgagcattgaggatttcacaggcatatggcggttgtgtttggaaacaagcaggacagcgcctttttctaacctaggagaatgccctggaccttggccccctcctacactggttgcttccttgccgtcgacttggtatgcagtcatgcacctctagaccatctatacctgcaggagaagctcggggccagccccttgcattgtggaccttggccaccctgcgggagcttgaatgctcaagtgccagcctccctgctctggtgctcattcggctgccctacaaagccacgctcatggtctgaatggcacccaggggaagttcctcacaatggcaacgaatagggttntcggggcagtgaccttagaacaactcaagtccgaagaatttccataaacagggggcctacaaagggggtacgcgcttcccgtggtgcgccttaatatacccgtggtgggcgaggggtatagcacacgtttaa

SEQ ID NO: 542438 - DNA, 208 bp, Homo sapiens
gtatcaagtctgatcatcagctttggggaggttggagtggctgtgggtcctagggagcactttgcacatggagagcaagcaatatagatgtttatgcacctccaaacattcccgacctttgatggttccactctcacttgcataagcctaatgtaggtcatctggcatttaacattcacctaccattctatccacggtaacaccacag

SEQ ID NO: 542439 - DNA, 493 bp, Homo sapiens
gagctcggtaccgagagatccctaacagtttcagtgaatgctgacacgatgctagcaccagttcagcgtgagaatttgctaataaatcttttcgtgatactacaaactgcttccgtttatactgtccaaatggtcctgcccaacctaagggaagagaaaacagccctgagtttcctggaggaaattcccaagtcaatgtgctccctctttacaaggaaataggggcagagagagcaagttccagcctcaaagaaagaaggattaacggatagtgaatatgctgctacatctttcttacgagggctggccacccttacaaaggaactacatccttaaaccacaggtagttttcagcgtggcagtagctcacactgtttcttgcggcagagggcctgggctcctcctggagaatctaacaccagcggtagtggggcagggcacggtttggctctgacatcttgtgcaagtcattgttcctcttgatcacggggcc

SEQ ID NO: 542440 - DNA, 305 bp, Homo sapiens
caggagctagctgggcgcggtggctcacacccgtggtcccaacattttgggagaccaaggtgggaggaatgcttgagttgtaggagttcaaaccagcctggcaaatatggcaagaccccatctctctaaaaaaaaaaaaaaatcagccgagcatcatatcacatgcctgtagtcccagctactctggaggctgagatgaagactgcttgagccagggagggcaaggctgccgtgagccaagatcacaccaccacaccctagccagggagacagagcaagactctctctcaaaacaaacaaccaaa

SEQ ID NO: 542441 - DNA, 296 bp, Homo sapiens
gctccaggattaggcagctatcggttcacggcgtctatggccctcaaaatcattttctttttcttttctttttttcttggagacgtgtctcaccctgtcacccaggctggagtgcagtgtcatgatctcagctcactgcaacctccacctccttggtttaagtgatcctcccacctcagcctcccaagtagctgggactacaggtgtgtgccaccatgcccagctattttttggtatttttagtagagacaaggtttcaccatgctgtccaggctggtattgaaccggatagcttg

SEQ ID NO: 542442 - DNA, 999 bp, Homo sapiens
agcggagtcagtgtgtcggattctgtactcggatgaggcggagtaaagggatttgagcgagccagtggccggattattctatttcccctctgtctatcgcggccggcatctctttggagcgcttctgacactctcgatgcgggtaggcatggcgggattgcgccggggagcactctggtctcctagttcccatcttgcgcatcggtacggttcctttcaggacgccgaaacacggtcgcgcggccgcggcagtgggcgggaggaaggcgccatggatgttggcacgcggagcggtggaggtagaaacgtagctgcagcatccgtccctgtgcggggtcggcccggatcctgtatctggctcggaacatgatgtgaagaggtactcgggttatgtatttctggggacacgctgtatctatagctggacttatgcactggggatgccatttgcaagttagttctgtcaaggcggtagggttccattaggcatcaatcactgggtcgttcctcgtcatgctccagcaagtctgggcttgcacgggatcgtacccaggaccgggttgatcgcaaggctgctgaggaagacatgtctaggaaggaaaggtgcactcctggtgtctgcagtcataccctgtgaggtgagatcattgactcctgctgcgtctagaaagcttgaacattcaatgtattctgaaatggtctgcaatgggtgcgacgaattcaaggagggcactctgaagaaatctagttaattcaggtgttcttttcatggataagaaggaatcctggattgacgtgactttgaaggcttgtcctgatgtttcaatggtgggtcttgaatgaccctattgttgggttgggggcaaagatacctggggatcatggatggatgttgagttgcttgaactagctatatttgaggagtcccgcgcttggttgctgaaacgtattggacggggatggtcatgagtgggttgaacggaaggcgaaaagtcatgg

SEQ ID NO: 542443 - DNA, 167 bp, Homo sapiens
tggacagcactggacagcacagaggaggtggacagcacagaggaggtggacagcacagaggaggtggacagcacagaggggtggacagtacagaggaggtggacagcacaaggaggaactctcgatcaagatgcccaaccctgtgatcagaacctcctccctcctct

SEQ ID NO: 542444 - DNA, 107 bp, Homo sapiens
  misc_feature (9)..(9): n is a, c, g, or t
  misc_feature (34)..(34): n is a, c, g, or t
  misc_feature (47)..(47): n is a, c, g, or t
  misc_feature (69)..(71): n is a, c, g, or t
aagttgatncccgggggagaaatgagaattagcntaattgctgccgntaatgtgtttttgaggaacgtnnnattttctttcatgtcgctgatcatattaccgagttc

SEQ ID NO: 542445 - DNA, 386 bp, Homo sapiens
  misc_feature (148)..(148): n is a, c, g, or t
  misc_feature (290)..(290): n is a, c, g, or t
  misc_feature (338)..(338): n is a, c, g, or t
gattcagagtctcactctgttgcccaggctggagtacaatggcgtgatcttggctcactgcaacctccacctcccaggttcaagtgattcttctgcctcagcctcccaagtagctgggatccacaggtgtatgccaccatgcccagcnaattttttgtatttttttagtagagacagggcttcgcatgtcggtgcaggctggtcttgaactcctgacctcaggtggatccgcctgccttggcctcccaaagtggctgggattacaggtgtgagccaccgcacccggcctnccatttagttttaaatgtaccagagggcacaaacacaccaattcttgncattaatttataaaaaaaaatggctagggtgggtctctctccctttgg

SEQ ID NO: 542446 - DNA, 399 bp, Homo sapiens
gttgcacagttattgtgtttatagcatatataacagtaaaaacatgacaactatgtcacaaaagacggaagtaaaggaactgtaaactacactgttaagttctgacattatacattaacggaataatattttaacagtggaatgtgattaaataaaggtatatcttgtagaactaggacaacctaatattaaaaattttcggttataggccgggcacagtggctcatgcctgtaatgccagtgacacgggtggattgcttgagctcaggagttcgagactaccctggacaaactggtgaaaatacgcctacaaaatatacaaaaattagccgtgtgtagtagcataccaaaagcctgttatcccagctattcggcaagttaaggcacgaaaatcacgtg

SEQ ID NO: 542447 - DNA, 450 bp, Homo sapiens
gccggggctgaactcctgatctcaggtgatctgtccaccttgacctcccaaaatgctgggattataggcgtgagccgctgcacccagcctaaattttttttaagtgacagagtctcactctgttactgaggctggagtgcagtggtgcaattacagctcactgcaaccttgaactcctgggctcaagcgatcctcccgcctcagtcttcagagtacatgggactacagacatgtaccaccacgcccagccaatttttcaatttttttttttttttttttttttttttttttttggaaaaaaattctcgctcgtgttccccgggcgtggagtgccagggtgtgatcggggcctcaggtgtccctcgtgcctcccgggtttaagcatttctgttgtcacagcctcccaagttgttgggcccacgggcactgtggcacgcgaattcgccgggg

SEQ ID NO: 542448 - DNA, 128 bp, Homo sapiens
caaatccatacagacatgtagaacctaatcacgggaagcgggaaacacagttcccctccgcatcattccgggggatggtcaagtatacctattatctctctctctctctctctttttctctcctctgc

SEQ ID NO: 542449 - DNA, 832 bp, Homo sapiens
gaaaaccaggaactggccaacagccgtatggcacagactgtgatgaaactgcaggccagtaacttcagagggctgtgcggaccaatgagcgcctctaggtggccctgaggagccttcctgaggaggtagtgcgggagacgggggagtaccgcatgtctgctaggcccaattctcactgctctacaacgatgtctctgtcgaagtgaagacccagttagaacgaggctcggggcctgctgcctgtgccacaatatagtaatctcccgcatcggctgcgaacactactcgagtcacatgtggattgagctgagccgagactggggactgcagtaagtaagctatcggcaaccagaggtcatttcaggctggaggcacaacgctggcccagcgtacgacaaggatgtatgagcatgcttgcgcatcgagtttgagcaagaatctggtcggtgccaaaccgacgcatggccgggtgcccattctaaactcgttgatgatgcgccacctgattcagtagtcttcaaaatcgccactagaccaccatgcttaaaagggtgatcgcccagcgtatacatgcggagacgcttcgagaagtacaagctgagatttggcaagctccgggcccaggccactggcatctgcccaattccaccccgcaaactgggcagcctagaggattctggcagtcagtggcccgagccctagtggtaaagagggagggtggggccaggcctgtcagtaccccgacatagagagaggagatggtccagtgctgggacacactatacacttcatgaagaacgggaggtggtccctctgaagaggacttcgggtt

SEQ ID NO: 542450 - DNA, 174 bp, Homo sapiens
caactctaaaggagaccctccgatatttatatcgatcgatctctcgatctctattgatacttatgtatatatatataatattactgcttaattaacctaagatataatatattataacttaatggtattattcttagaattcttattagaattattcttcttattagaataata

SEQ ID NO: 542451 - DNA, 85 bp, Homo sapiens
gacagcagcttctacatctgcagtgcggccccccgaccgggggcgagggagcagtacttcgggccgggcaccaggctcacggtca

SEQ ID NO: 542452 - DNA, 189 bp, Homo sapiens
tcactttcacacacatgagcatctagtacaaatgacagctcatttcccaccacaaacacatggaggccagaacgacatcaggtatagcagtttctcaaaagtgctgaagaaaaaaaaactgtcaaataagacttctatagccagcaaaattatccttcataaatcgaggtggaggtgtagaaattgaca

SEQ ID NO: 542453 - DNA, 134 bp, Homo sapiens
  misc_feature (30)..(30): n is a, c, g, or t
atttgcaaaacattcactgttttcttcaanactggtacactctcaaagttagtctcgccaattaatcatcaaccacacttctacatactttgaaggaaacagaagccaaactgtacaatggttcaattttgatc

SEQ ID NO: 542454 - DNA, 562 bp, Homo sapiens
gcagaagagttcatttgagggcagtgttgggctgtagacggaaccaggaggaggagcttgacctgcagaggcatcatgaggcagaggttggctctatagggccacgggagccaggaattgtgcccaggagcagctcacttgaaagataatattgggcgaacgtgacagagcatcaggcattaagattctcatagggacagcgcaacgtagatccctcacatgcatggttcacaatggggttgcatgctccctaatgagaatctaatgctgctgatgatctgagagaaggcagagttcaggcaggaatgtgagcaatggggagtagctgtaaacaccagatgaagcttccctcattcaacaccattcacctccggctgtgtggctcccttacagttccatagctccggcgtaggggaccctgcccaagtacatccagaaaggaccttccacaccagtcttcatagtggtcaagtgcagcagccacttagctaccaaggcatatcccacaggtggcatttcatcacaaatcaacactaagtggtactttgcgtcatagtgaggc

SEQ ID NO: 542455 - DNA, 407 bp, Homo sapiens
tctatcgcatcatcaggctgcaaatttttcaaacttttatgctttgcttctgttttaaacataagttccatttccaaatcatatctttgtgaatacataaaacaatgcttttcacaacacccaagtcacctcttgaacactttgctggttagaaatttctcctgccagataacctaaatcatctctctcaagttcaaatttccacagatctctagggcaggggcaaaatgccaccagtctctttgctaaagcataacaagagtcaccttagctccagttcccaacaagttcctcatctctatttgagaccactaggcctggacttcattgtccatatcactatcatcattttggtcaaagtattcaacaagtctctagtaagttccaaactttccacatcttcctgt

SEQ ID NO: 542456 - DNA, 113 bp, Homo sapiens
actgtcaggattacccacattcgctgcattcattgggcttctcacctgtgtgagttctctagtgctggatcagtggggcaatttggttgaaggtcctcccacacagtagcgaa

SEQ ID NO: 542457 - DNA, 762 bp, Homo sapiens
tgcagtggctcatgcctgtaatcccagcactttgggaggccaaggcaggctgatcacctgaggtcaggagtttgagaccagcctggccaacacggtggaaccccgtttctactaaaaatacaaaaaaaaaaaataatttagccagatgtggtggagggcacctgtaatcccaactacttgggaggctgaggcaggagaatggcttgaaccttggaggcggaggctgcagtgagccgagatcgtgccactgcactccagcctgggcaagaagaatgagactccatctcaaaaaaaaaaaagctgggccacaggtagcccctgaagcaacctccaacccttgtttcctaaaatgtccctggctggaatacccgaccaacttcggacttcattttccatgtattatgccagggctctcggagaggatcaagcaactgagagttaccaggggattgaaccacccttttggggcaacaacactgacccaagacggcacggagagaaggacatgtgggtacgtcccccacatttctccctatgtgttaaaaattccttatgggctacgcggaataccagaaacctaatctcataagatactattagattgaggtacaacatagcgtcgcaacttgcgctttattcgggacccttttccgatggcctgtgatcacgcgcgctaacattggcttatgcccgggggaattacccccatcttggaagctccacactaaggggcccctatcaacaataccgtgtgtctggcca

SEQ ID NO: 542458 - DNA, 1091 bp, Homo sapiens
gggtccgtgtgtgtgtgggcagcatagttgttgcttggtcttccccgtgtgtcgcgaggtgttgtttcctgctcgttctctgatttcaggtcttgcctgtgttctgcttgtcgtggccgggttgcactgtcggttttgtccctatttataggtgggcgttgcggccgccctggctgtgtgggccccctcgttttgttcgttgtttgtgtggggtttttggcatggttttactggtttttctagtgctgtctgtcggggttgtggtatctcctcttttgtgtgttgtctctgggttccatgtggtcctcgtttggcctttcctcttcttttcgtgtctgtttttttgtttatctggttactttcctgtagtttctcgcgtctagtgtgtgagctcaattttatttttgtgggttcataagtcttggctatcgggttttagccttagttgtatactcaaacgcttaaactgtgggcattatatcattttgtttttgccaccttgcaagtgtcctaatccccaaagtcccgttgaagcctcccgaatgaagtttatccttgtggaagaactgtttaccctgattccttttgctaactgtactagatccggatttggggcgcttgtatgctcgcgactgagctacttgttcattttttgatacacggcataccagctacagtatctgtgtgggattactctgttcaaaacgtcgttctccacagaactagtcttttcgaccaatctgaactgttttcaccactctttcaccaactttgtctcttatgtgtcttgtcactgtctaaatttaggtgtgtactactaaataggtcaccctattgtcactggttcgttgcaagtaaatgctacaaccttggtacgaccaagtggacgtgcactctgatgatgtgatagagacgctttgactgatatacgagtacatgttgattgtgtagaatgtttatgaatataattgttcctgtgtttttactaagttggggatattgttgttgttttacggcaacttaatttgattgcatttaaatggtttttatgtaatagaaatcacgcaaaatagtgataggacttacaaata

SEQ ID NO: 542459 - DNA, 103 bp, Homo sapiens
gaagtgtgatgcttgctgcagaactgctaatacactagacctcattgagttgtaccttttaaatgggtgacttgtatgatatgtgaattctctctccaatcca

SEQ ID NO: 542460 - DNA, 574 bp, Homo sapiens
atcttgaagtagacttgagagagagtattttattagattagctagtgtttatgaaatacgcctatttaaataaataattaccaattttattttcctatgactttttcaagtcatgttgctcctaatttctcttaaagcttcctgtggttatatggtcctcactgttgactcctcttagagactttcacaacaaggcctatttaaccagagtgagagatgctggccctttccttatataccagttggaatgaacaccttcactttgttctttagcagattaaactatgtgtaaaaaataggtctgctggaggcaactacgtattatatacagatctttacactatatgttgttttggtacctgagctcttatcttctattttgcatcttttaaataattgcaaataaatccaaacttacgggcacatcagggtcttgattgttctgtgaattagggatcatgattgaccattatgcctccgagttcttggattttagcaaatcttgactggcgttccaaatatttgtatgtacacgtatttatatatcacacagaacaataaaaacaaccaaata

SEQ ID NO: 542461 - DNA, 414 bp, Homo sapiens
  misc_feature (14)..(14): n is a, c, g, or t
aggtatacccgaanatcttgtggatcaaggaaatggaaaatttaagtctgcatgattctctgttggggtgaacggacactgtgcagcagtattcatgcatcatactcaactcccactgctttctgaagcatgctacagggcaaatctaaaggagacatttatttgcctggcctgacaaaacaatcccaatgagatggtcacagaagtctgcaaagagtcttgcagggacaaacccagctgtgcctacatcaatgactgcaggagctagggcgtggagactggcactcagtgcatcagggccgaacggatggttgcaacgtacacaggcaagcagccacacagtgcaacgattcacattggcttaccatcgacgtcagagaacatcagccatacggcaacccctggccttggtga

SEQ ID NO: 542462 - DNA, 664 bp, Homo sapiens
gctgaccttcagcgcctcggactccagcgccatggcgccctccaggaagttcttcgttgggggaacactggaagatgaactgggcggaacgcagagtctgggtggagctcatcggcactgctgaacgcggccaaggtgccgggccgacagccgaggctggtttgtgcatccccctactgccgtatactcgacgtgtcgcccggcgagaagcatagatcccaagagttgctggtgggcgtgcgttcagacactgctcacaaatgtggactaattggggcatttgactggaggagagtcagccgctggcactgatcagaagatctgcggaggccacgtggtgtggtcctggggcgcacctcagcagaaggacaggcgatagtctattggaggaagtcctagatggagactagatgtgggtcagccaaaggtgtgccctagtgctgctgagccaggagccggagctccgagagtagaatcgcacctgccagtatgggcgatgagagcgtacgatcgacacaggcgagagcgtgtgccagtcacttggagcagaaggttggttgctacaggagccacgcacaaaggaggtctatcagccagcattcactgttgcaaggactggggagccacaggtcggtccctgtgcctgatgcatgcctcgtgtagg

SEQ ID NO: 542463 - DNA, 922 bp, Homo sapiens
  misc_feature (922)..(922): n is a, c, g, or t
aaggaaatcttaaaatgtcctggaagtgtggattaagcaatgccgcctagaagcaatggttctgtcaatcatcagatgtagtggaagcataggagtcaagactgcttgttgaaacctttcttttgatagttactgaactgcgttggcttaaaggtaaatggaagcaatgtgctaatgttccacaagttattgaccggtatgaattgccatgtgtagtgaggtatttccctttacttgtggtgggccttggttccctctatgccctggtaatacaagtcagagcttccgggcagtggaatccgatctattgtttgttgccagaacagtgcaccctgtatggtctccgtgtctaatgtgtgggaaaatgtttattgcatgtgcaaggagtaatccgagtatttatagacagatagcatcacaataaattccatgcgtgggccgatgctcgtaatgaagataccaaggaattgcattgacgaatagatggttgggggggggctatgaacccgtgaagagacttttccaataacgcaccatcgttggggaaggggcgacccccagggggttgctgcactgattgggcggagcaggggcccagtcaaaaccgctggtgtcctgcagacccgggggccacccccaggaaaaaaaagtcgcgggcctgagcaggggctcaacaaatccgaaggtcggggggcccatgggtctaaccaggagtcccaggagcctataatccccccgcggggagagatagccagcgaacataagaccacggacacccccgacgcacgcgcctatgggggacgtggccagcggccccagcaggccaccgaaacactgtgcgccctcagtctaaacccaaactaggggacacgtcgtcacacacaatagatgagttacccgcaccatcaaagtatgtacatcn

SEQ ID NO: 542464 - DNA, 733 bp, Homo sapiens
  misc_feature (3)..(3): n is a, c, g, or t
  misc_feature (63)..(63): n is a, c, g, or t
  misc_feature (70)..(70): n is a, c, g, or t
  misc_feature (88)..(89): n is a, c, g, or t
  misc_feature (94)..(94): n is a, c, g, or t
  misc_feature (97)..(97): n is a, c, g, or t
  misc_feature (105)..(105): n is a, c, g, or t
  misc_feature (107)..(107): n is a, c, g, or t
  misc_feature (114)..(114): n is a, c, g, or t
  misc_feature (116)..(117): n is a, c, g, or t
  misc_feature (167)..(168): n is a, c, g, or t
  misc_feature (180)..(180): n is a, c, g, or t
  misc_feature (203)..(203): n is a, c, g, or t
  misc_feature (210)..(210): n is a, c, g, or t
  misc_feature (233)..(233): n is a, c, g, or t
  misc_feature (255)..(255): n is a, c, g, or t
  misc_feature (267)..(267): n is a, c, g, or t
  misc_feature (285)..(285): n is a, c, g, or t
  misc_feature (288)..(288): n is a, c, g, or t
  misc_feature (300)..(300): n is a, c, g, or t
  misc_feature (357)..(357): n is a, c, g, or t
  misc_feature (409)..(409): n is a, c, g, or t
  misc_feature (437)..(437): n is a, c, g, or t
  misc_feature (446)..(446): n is a, c, g, or t
  misc_feature (490)..(490): n is a, c, g, or t
  misc_feature (501)..(501): n is a, c, g, or t
  misc_feature (715)..(715): n is a, c, g, or t
gcnggggcctgtggcagcccatagccagtggcggttagggctgaagcacagggcgttgatgangtccccnccatctagcgtgtcacgnngtttnccnccgttganancccatancnnggcctggccatccttgcctccagaggcccagagggatccatctggggggnnagtgaccgtgtncagatagcctgtgtggccaatgnggttggnctccagcttgcagtgagccaggntccataccttgaccagcttgtnccagccacaggngaggatgatagggttgcngcngtggggcgagangcggacacaagacacccactctgagtggctctcatcctggacagtgtatttgcacanacccagggtattccatagcttgatggttttatctcgagatccagaaacaatntgccggttgtcagaggagaaggccacantcagcacanccttggtatggcccacaaatcgcctcgtggtggtgcccgttgtnagaacccagangcgcagggttccatcccaggagcctgaaagggcaaactggccatctgaggagataaccacatcactaacaaagtgggagttacccgcagagcacgctgtggaattccatagttggtctcatccctggtcagtttccacatgatgatggtcttatctcgagagggggagaggatcatgtccgggaactgcggggtagtagcgatctgggttaccnagccgttgtggcccttga

SEQ ID NO: 542465 - DNA, 1477 bp, Homo sapiens
  misc_feature (395)..(395): n is a, c, g, or t
  misc_feature (501)..(501): n is a, c, g, or t
gatcgggttctgcggtcccgctagtttggactactatggcttacatatccgctcgtatgagtacgagaaacgcgtatctcgaggcgtacttcatgtatccaaggcctctcgaatacagtccacttccgccattactcctcgtctcgcctaagctacactcgtcactgggcgcaactctatttctctcatcgagctccatcatccatgacattcatgcgtgaactcatgtacaacgataatcgagtacgcgtcgggtgaagataccatatctggtctagaacatatcccattgcacgctgccccatagattccctgtacgtacgcatacttattattgcccatccgcacatgtccgcgtaacgcgcaatcccgtttaaccatgcacatggagtacnacatgtgttcgtaacccgtaatgcccacgttgcctcttttaaaccaatgctaacattttcatatcttcgtgcgcgagctttccatgatgttactgggaacaccgcnttaaacttggaagttgtttcgagccctgcatcgtggaacaggggccgggttagcaatgaacaacttacctttttccatttattcgctccggcgtgaaaacaatttatagcgttctaccgcacgggcgcaagttataagttccgccccgtaagggaagacctcaaccggggacggcacaggtctttgccccgtaagggataccgcattgtgtcacaccagattaaacgcacacgaacgtttcgggaccggttgacgctggaccggccttccctgccatttttccgcaaaagcggcaccacacttccaattatgcaagaatgacctcacaaaagttcataagttataaaccaatttgcgaacactaagagggaagttgataacataataggcccaccatgacaaattggcacgactttggaaacacgccctaaggccacttttaaggggccttcttagggaaaagacaaaaagaattggcttagatatatccccaacgggggcaccctttttgttgagcacttccatttacacacttggacctcctttgaagagccttgtcttatgcccccgggaacaaccggggggaagcgcctcacactaaacttcattcagtggttcgaaaactttggccctcttgtgcaaaggaaatcctctcggctgtgtaccccttaaagaaactcgaacagggaaaacgtttcgaataggccttaaattccgaatcgccataaggaatacggtgtgatggaaacccaaccgcgttatggagaacaattatctctttttcgcaaacaaatgagagcctgggggcgcgatgtgggaatcttctagaggcacgcgggcaattgttgtgcggccatccgggcgcgccagttacggatataaattctcctcccgttttctttgaagaaaaagggcgcgcattatcaaacctctcacgtacgaagttggccacacaggaacactcttacacagggaa

SEQ ID NO: 542466 - DNA, 218 bp, Homo sapiens
  misc_feature (20)..(21): n is a, c, g, or t
  misc_feature (155)..(155): n is a, c, g, or t
  misc_feature (189)..(189): n is a, c, g, or t
gtaccttcatcagtgtaaannatattcacactgcttacaaatactgataataagcacacacaattattaaaggtgtaaaaggtttcagtaacaattaacagtttaatgcacatagaatcctagtacaacattagagaatatatattctctataancacatatggaagatgtataagaattattcactanagccataagcaagtattatcaaatttgaa

SEQ ID NO: 542467 - DNA, 141 bp, Homo sapiens
ggtatctcctctgctgtccggaatggcttggggcgtgggcggtgtgcccatggccatcatggagctgggatgccacgcgatgtcctcaaatgaccttgttctgccctggcccttcctgtcctggcctccagtgtggcacca

SEQ ID NO: 542468 - DNA, 127 bp, Homo sapiens
cactcatgcccagctcttatggttttaatttgtaattctctgataattattgatgttgaacatttgtcatatattttttggcaattttttttcttcttttaaaaattttgtttttagccataaggcc

SEQ ID NO: 542469 - DNA, 494 bp, Homo sapiens
cccagagggtaccagagatcttggagcatcacggttgggcgcgcggtcacgcgtgtaatccagcacttggggaggcgaggcaggcaaatcacctgaggtcgggagttcaagaccagcctgaccaacttggagaaaccccatctctactaaaactacaaaattagccaggcatggtggtgcatgcctgtaatcccagctactcaggaggctgaggcaggagaatcgcttgaacccgggaggcagaggctgtggtgagccaagatcatgccattgcactccagcctgggcaacaagagcgagactccatctcaaaaaaaaaaaaaaaaaattttccttaccagcagaaccaagagtgcaaccgggttgaacggagcccttaaatagatgtgaaacctacggggaaaattctttaaggcccgtgtcacagagcccccaaagagcagggcctaaattccggcaagggttcccagtaaaatggtctcaaaggctgagcg

SEQ ID NO: 542470 - DNA, 377 bp, Homo sapiens
  misc_feature (77)..(77): n is a, c, g, or t
  misc_feature (168)..(168): n is a, c, g, or t
aaagcactatggtgtgtgtggacaacagtgagtatatgcggaatggagacttcttacccaccaagctgcaggcccancaagatgctgtcaacatagtttgtcattcaaagacccacagcaaccctaagaacaacgtaaaccttatcacactaactaataactataaantgctgaccacactcaccccagacactaaccatatcctatccaagctacatactatccaacccaaagacaagatcaccttctacacgagcatccacataacccatctaactctgaaacaccaacaaagcaagaatcacaagatgcgcatcattacctttatagaaaacccagtaaaaaacaatgagaaaaatgaaataaacacagaaaag

SEQ ID NO: 542471 - DNA, 132 bp, Homo sapiens
ggcaggacactggcacaagagatattctggaaaagcccttcaggcaactctgagaacactaattgggtgagagggagaggggggcaggacccctccccagttctaggagtccttgcccacgccaccctggcc

SEQ ID NO: 542472 - DNA, 215 bp, Homo sapiens
caacgtgacttctttttactctcaccaacttcaacactttgggctctgcccaactcccacttaccgtgccgtgacgacgacgggacacggactacctgactttactcgtggactacgacacggtacaactggattactattgaggacctgggacgacgacggtggggacacggactgagggactccatcatagacgatcgacccatggcacgggc

SEQ ID NO: 542473 - DNA, 560 bp, Homo sapiens
tggtcgatctagagatccgaaaatgaatagaggcaggtctgggctcggctgccaggctggagtgagtggcatgccctccacctcctgggttcaagcaattcttggagctcagcctcccaagcagctggaattacaggtgtgcgccaccatgtccagctaattttttaatatttttagtagacagagtttctctatgctggccaggacagtctcaaacttctggcctcaagggatccacccgcctcagcctcccatagtgctgggaaaacaggcgtgagccactgtgcccagccagactcaacatttctaaccaatggtaatgttaaccattaaggaacacgtgtagaataccaaactagtaacaagtggttagctctagaaatgaaaagaaaaattgggattgaaaattgggattgaacaatacttccctttaaagattctggcaatatggaagcataatgtcacaatacctgaatcttacaggctatattattcactcattctcatatcaaaatcaccctttttggagattcataccattcagttattccaatactccc

SEQ ID NO: 542474 - DNA, 427 bp, Homo sapiens
gagcgaggcgcctcagaggactcccgctggggctttcgagtagcatcgcgcctcattggtatatggttagtgtgttggttagtaggcctagatatgaggagcgttatggagtggaagtgaaatcacatggctaggccggaggtcattagagagggctgagagggcccctgttaggggtcatgggctgggtttaactatatgatcggcatgtgattggtgggtcattcatgtgttgtcgtgccaggtcagcaggcttcatcagcacagtgtgcacacacgtcaggcttggcattcaaggcgcacagcgcatttctcaggcatgtcagtcagcacattcagcacattgtgcaagcatgctaagtgtcagcagggcacaggtcatggttgcatcattgctcagggtggcgcgcatgccaaatcgcaacag

SEQ ID NO: 542475 - DNA, 410 bp, Homo sapiens
cttttacgtacattacacacatacaccccacctcttcatataccttttatacacatacaggacacacacacaccccttacacgcgcaccctatatacacatgttgtgcacgtgcacactctacacatacacccacacccatttctcatatacaaacacacaaaacccactctatacatatgtgcacacccatttcacatacacataccacacacacacactccacacatacacccacacacactcttaaaccttccacacacatttgtgaggttccacacaccgacacccacaacccacaccccacttcacacatacacccacacttcaacacaatcccttcaaacataaacccacacacctttccccccctcacaaacacatacattttatcacacacacacacacaca

SEQ ID NO: 542476 - DNA, 339 bp, Homo sapiens
ctgtgaaaatctttcttttattactgtctcatgtggcaaaataacattttatacaaataagtcacctagtttactttggtcacttagacaataaaaactggaatgtgattttgggggaagcgggaaggaggaggaatgacatatcatgtcattgatgttttcttattttctgtaaaaaatagattttcaggaaaaaatcttttcttttacaatcttcaatgactttacacggtcctttgtaataccattggtaaatccatcttcaccaaattcttcttgaggcttgattcgttctgttacttggattgtgagttacacattggttcattgattaggctc

SEQ ID NO: 542477 - DNA, 843 bp, Homo sapiens
  misc_feature (353)..(353): n is a, c, g, or t
cagagttgcgccgatggagccggggccgcagagaagcacttaacagcgtgttgcatgcagccgtagaggacagtgggcagtgcgtctgaggaagacgtaaccgggctgtgattggcaccgtcgctcctatctgaagaggtcgccgcacgaagcgtgagggaatgtctcgccgtcgtgatcgtcttcgctcaggaatagactcaagtatgcgtggactggagatgaggtaaagaagatatgtatgcaacgtttcatcaaaattgatggcaaggttcgaggggactgtcacagtaccctgcgtggattcagtggatgtcagtcagacatcgagaagacgaggtgaacatgttcgngccgtggtcgtatgacactcaagggccgttttgcgtgttcaccgggatcacatttggacagaggcgaaagtacagagttgtgcaaaggtgaggaagattactgtgggagtgaagggaatccctcaccgtggtgactcatgatgctcgaaccgatccgggtacccagatcctgtcatcgaaggtgaacggatactgtgcagattgatttagggactggcaagataatcaactttatcaaatttgatacaggcaattcgtgtatggtgatgggtggagccaaacgtcggtcgtgtaggtgtgatcaccaagagggagaagacatccgggttcttgggatgtggtgcatgtgaacggatgccaagtgggaactagcttttgcacgaggctttacaacattgtatgtcattgggcaatggtaataaaccttgggattcccgtgccagggggaaagggcattcgacttactgttgctgacgagagagatacgagg

SEQ ID NO: 542478 - DNA, 901 bp, Homo sapiens
caggaggcgggcggcccgggcgcgagcgggcccccatggacgcccccagcacggggcggctgagaaccccgacgtcgcgtgcccagtcccggtccggcgcgccacgccgagggatctctggacaggacaagactccgaagctactcccccagcacacagcccgggacccacaaacccagctgaaaaaagaaagacacaaggagcgaagagaggggaaaagaacgaacagaagggaaaaaggaagaaaaggagggagggaaaagaagacacagaaagaggaagaagcaaaggcagaaagaggagagagagaaaagaagaaaaagaaagaggagcggggagaaagacaagaagaggagaagacagagcgaaagaaacgagcggcagcagaagcaaccaaacagacaaagaacaaacaccgccggcacaccacagacaaaaagcagagagagagaaagacgagaacacaaagaaagaagagaaaacaacgacaaaacccaaaccagacacacgagagaagccagcagcaaaaggcagcagcaacaaggaagagagaagaacaggagacggcaaaagacgcaacggagaggaggagacaacaacaagagagaagacacaagaccagcaaaaacagaaagaaccacaccaagcaaaagaagcaggacaaggcagcgcgagggacagcaagacaggaagagaacacgaaagagacgagaagaagagcagacgacgagcgggacgagagaagaagaaaaaacgaccgaggaaggaagcaagagacgagaagcacaacagaaagaggcacagaaggaacacgaacgacgaaacaccccccagacacagccagcacaaagacaaagagaaaaagaacaaaacaaagcaggacagaggaggaaggcaacca

SEQ ID NO: 542479 - DNA, 238 bp, Homo sapiens
gggggggggggggagaaccccccccccccccccccccgggggggggggggggtttttttttccccccagggggcccccggggggggcggggggttttttttttttggggttttttccccccccccccccccgggagggggattttcaaaagaaaaccaccgttttttttttttttatgggggtggggcccccccctttttttttttcccccctaaaatttttttttttttggggaaga

SEQ ID NO: 542480 - DNA, 247 bp, Homo sapiens
agaacccaccatggcgctgtctgctgccgacaagaccaacgtcaaggccgtctgcggtaagggctgtgcgcacgctggcgagtatggtgcggatgccctgaagaggatgtttctgtgcttcctgaccaccaagtacctacttgcctgactataccctgagccacggcatcatgccaggttaagggccacggatcgatggtgaccgacgcacttaccaacgccgtggcgcacgtggacgacatgccca

SEQ ID NO: 542481 - DNA, 263 bp, Homo sapiens
gttagtggttgtgggtagagagtctggaggtgaccctgcagacgggcagatgctggagagaagcaaaggcctttatttcacttggggtgtcacagccttttgatgtgtgaggttcgcccttcttattaagcgaattatttccagccacaagaaaccttgaaagattcctacttgagggtgcctgggtgggactttttaaagttgaaccttgaaacccttggcaatccaacttaacacgttgggtgggattccaggcatttagg

SEQ ID NO: 542482 - DNA, 701 bp, Homo sapiens
tgcggcacacgacatcgtgggtgtagaaaacataataacgagcgtactccgtctagcaaaaacgccacctctgctggtgtgacaaataaaggacaacagttctttaagccccccgcactccttttcttagcagagggctgcacactatatatataagtagaaaggaaatctgatattttggtctctgcgtcgtcttgtgtcccccccacaacatgatttttgaagaaggaccagaagctttttgatgacgcgcagatatactatgtgagggatatctcgcgacacatatctcgctggtctctccacacgcccccttcaagaaaaggggttggtagatatatttcgacagcatcatcatattgtgtcgagcagagagatacttcgcccctgccacggcaccttttggtgcgcaagactattcgaaagagatatgggtgtcctttacatcacacgagatgtggccgcgtcacacgcataatatcttgtatagagagtcacacaaggggcgctctagtcaaaccgcgcatgcacatcacatacctcaagatagagaggggtgcaaccactgataatgcgcgagagcggtgaaatagatatttgatagcggcgagagcctctctgcatgagcgagtcgcctttgatgtttctgaaacaacacatttggcagtccaccgaagggcggcccaacaaatagcagaaaa

SEQ ID NO: 542483 - DNA, 209 bp, Homo sapiens
tgaaactagctgtcttggctagccacctagtaacccctcggagatccgtaagcgaactcttcggactagtgagccctgatgcctttttgccagccatactactatatggcatccagtctctcgtggcgattgattatgcttgtgtgaggtaatcatggtggcatcacccaataaagggaacacatttgcactttatcttctcatcattt

SEQ ID NO: 542484 - DNA, 816 bp, Homo sapiens
ggctgctgggcctgatctgtctgtctcgtttctgtactgcttctgccctgacatcccggctcccggtgcgcccgctgcgagagtcgatcgaggagccacagggctgactggtctgctgcccggtgcccaggagtgtctggtgtagcagtcgctggagccatcccggcgttttgctgtccatgaccgagcatctcccctctagatgcgtgagctcttctctctacgcggtggctgctgagacatgagtgaggctggctggctcctgtgcctgcgggaccgtgagacgggttcgtgggcggccatttacgtggacgctgcgagcactcggctgcgcccctccggacgtggctccttgggccccggaagctcgcggcgggccctgcgggtagtgcgtgcattgtctccccgcctggagtgcctgcttgcgtcggctgagcttggtcaggcgtgaacgcgcgtgggacgtggtgtgcctagagtggtcgcttacttgcgtccggattcaagtgcccgcattcagttcaacggtgcctgcggcgttgctggtcgtctgcgctaggaaaatcagcgtcacgtcctcttacctgcccgtcttctacctcccctaagatgctcagcgacctgcgtttctcctacggtcacgctcctggtagctcggcttgtacagtgacgtacctggcacatgcctcgtgcctttaatggcggcgataatcggcgtctacgatctgtgacgaggagaggatcacgcctgagggatcttcacctaattcccattatctcctaatccttaacccgacataaataccggtttcctct

SEQ ID NO: 542485 - DNA, 361 bp, Homo sapiens
ccatagaaaaccttaaactttcacctcaagattaatcttagtctcagtgaaagacttgataattgttgatgaagtgctccatcagagccactatgcaaagactgggaaaggtgtttgcttctttggttttgtgttttctctttttctggtttgcttgtaaaatctcctggtattgaagaaaatctctgtcaaaacattagctgaacatgatgttaggaaacagacatgaaaagggatacagtccttggaaaaatagtttggaaaagtacctaaaccaatggactgctacaacatttaataacagtgacaacaacagcaaccactgccaccaacaacaaagtgtttcaacaacaaaaataat

SEQ ID NO: 542486 - DNA, 720 bp, Homo sapiens
gcagcgactctttatatggcgatgctgggtatcggcttcctctccctgaccagtgtgcccagcgagtcttgacgcattggggagcagtcccccgaagggcagtggcaacatcaagcagaggtacagattgcccgaaagcttcagtgcattgcagaccagttccaccggcttcatgtgcagcaacaccagcagaaccgaaaatcgtgtgtggtggcagatcctcctcttcctgcactaccttgctttgaatggagaagagaacaggaacggggcaggccctaggtgcggagtgggcatgcccatcttcacatggggcaccaggaacaccgtcatggaacaggaaggacatcgggcaggactgacaatgtgatcttgtgaaattgtgtaaatagtcgatcataaacagtagctaagagaatttgattattaaaatttctctcatgagtgtacatacgacatacgtcaagcgggaactatctatactctgtcaggcccttgacctggaatggagggcctgtgtcaaacactgttacggagaggctgatagtgtcatgtgatggtgagccacttcccaaagggactcatgaacaagatagcatcgagcgaactggaggaaatacaaacaggtgacgcacaaagacacggaagggaagaactccagcagacagagggacacgagaacaaaacagcggaagcacagaaagaatcgagaaggagaga

SEQ ID NO: 542487 - DNA, 100 bp, Homo sapiens
  misc_feature (9)..(9): n is a, c, g, or t
aattcaagncttctaacgatgtacggggacatgctcataaggaaaggttaaaaaaaaaaagttgtactgcaccagcaaatccatgatgatgatgtcgacc

SEQ ID NO: 542488 - DNA, 142 bp, Homo sapiens
gtcggggcgactctcgaggatccctgatatgcgtctcacacagtgaataggaccaagtgtccttgtaggatactaattcttctccactattatgatcatacttataaagtttaaaatcttcaccggctggaacaagaaattc

SEQ ID NO: 542489 - DNA, 365 bp, Homo sapiens
ggatgtaaattatacctcattaaggctgtttttaaaaagtataatgcaaactaaagttcaaaagcaacacaaatacaagattcttaaactgaaacaggtttcagttgtatgtcctcaagtattcttacttggagagacaaagcaagtatttatgaggtgatctttttttacttttatttgtattttgagtattcaagatagaaattaaaagagcatataaggatagaatggtattaaaaagtggacagtggctgggtgtggatcacgcctgtaatcccaacgcttcaggaggccgaggtaggcggatcacctgaggtcagaagttcaagaccagcctggccaacatgatgaaacctcatctctac

SEQ ID NO: 542490 - DNA, 172 bp, Homo sapiens
  misc_feature (59)..(59): n is a, c, g, or t
  misc_feature (100)..(100): n is a, c, g, or t
  misc_feature (114)..(114): n is a, c, g, or t
tctttcaaaaacaaaacaaaacaaaagtggcctaagatctcacacagcatttgctgtanagactgttttccggatggactggtttgggaacactgtgctnggggaagtgcccangaagcgctcccgctgccggctttccggagtctctgcccagtgcactgcggggacctgg

SEQ ID NO: 542491 - DNA, 1879 bp, Homo sapiens
  misc_feature (231)..(231): n is a, c, g, or t
ctcttgctcgtcatgttggcaggcggtcgactgctgcgaatatgaagacttgtggccccatcactacttgggttgggtgcatacacgaggagggtccttgcttcgtcccttgcgctgatatctggaactcctagaatcaggctcttgcgccaatggtatcgacacatgatagcacgtgaagacagcatgcccaagaactcattcattctcaacatggatgtgctcgttccntgtggccctccatgcgattgtgaactggctgggattcctcctatcctaccagcttcttattccgcattggttccctgccttcgttcgaaggcttgtgatgttggaacgctttgcgccttccacccccttagacggattacgcggccctcattcagcattggaactatatggatttccatggttgggacggaataggggtcaacagaagacctttgggtatccgacatcaggtccccttcaccagggcctggaggatcgatagggggcgttgtgcaggaggagggccctttcgcatggagtcggccggtatggtgcgcgcttgggttattcccacattcaccacatgtgcgatgtcacccaaaaggtggcaacaacttaatggcactcgaaaaaaggcaattgcgcactggtgggatgggaaccgcaatgcaggacatggtggggcgttgtaccccattgtgtaggagaatgcgaacggcctatggcttctcctcgacgcttgtgtggaggggccgaaaaccgttgcggttcacgtttagtctaagtgcggcgttgggcaaaacccaaaccaaatgacacggcggttccatatgtgttcagcattctgtagtttgggcccaatgtgtggaaattcgtcacacccagataatccacttggattaattgtagtacccttcaaccccctcatcctcggatatctaatggacccggttgtcggaagcattttttatcaccctatgaactgaaggcacctaagcctttaagcgaccgtggattctccagtttacagcaccttttgcgttgacgacgaccttgaggaggtccgattccacttttgagaaacccgcggaatggcaaaaccgccggttgccggaagttggggtgtgggtccccgagaaaataaaaaaacttgggggtgaagacatgggcaggacagaggaccgtggtaatctcagaaggagcgctgggacccccacattataaagaaccgtcttggccacacaagagagaagctggatgtcgacaggcagcgaaacttacaacacgacggggaaggcacaagtgcagaggcacacaacacacaaaagtgagacaagaagacaccatataccaccgacgatataaagcaaacaatagtcaacaaaggagacaaaagacctagtggtagtagaccacccatcaaagacaacagggacaccccaccaccaaaaggagcggcagacacaaagagcggtgagagaacctgcacgggacacacagacgagagaagagaccaacaaggcgcgcacaccgcgaagagggaagaaacccccataagacatctccccagaaatgacagaccaaagaaccagggaacgaagttacgacgcacccataacaggagacggacgcgggaggaaacacgcgagagagcgaggacaggacggaacacaccgagcgccaacagggagacagcgatgccataaagaaaaagaaacggagcaagatgggccagaaccacggggcaaaagaaagaaaaacaagaacagcgaggagtgggaccccactgggtgagaacgtaccccacatcaaaacagaaggggagacgacccccaagcaggagaacagcatgaggagagagcgactacgctacgaaagcacgaggaca

SEQ ID NO: 542492 - DNA, 970 bp, Homo sapiens
gcggatccgcggtgcacaagatggcagtgcaatatatccaacgcaagaggaagttggtcgctgatggcatctacaacagctgaactgaatgagtttcttacttcgggagtctggctgaagatggctactctgtgagttgaggtgcgaagattacgaccgaagcctaggacagaaatcattatcttagccactcagcaactacagcaatgttcgtatggctgagataggggccggtcggtagttcgggacatctgagctgctgctagcttcaaaagacggttaggctttccagagggcaaggtgtagagctttatgctgaaaaggtggccacttagacggtctgtgtgccattcgtcgccatggcagagatctctgtcgttacaaatgtcctaggagcggcttagctagtgctgagagggcctgactatcggtagtcgctgctggtctccatcattgcgagacgtcgcgggccaaaaggcttgccgaaagtggaggtggtcttggcgaaactccgaggacatgagggctaaaatccatgacagtatgtgactggcctgatgatccgacagcaggaagagccatgcttaactactacgtttgacactgcttgtgcagccacggtgtggctcaagaccagggatagtagttgggcatcatctgtgaagatcatagctggccgtgggacccaatcatggtaaccatgtggcccgtaaagaaggccccttgacatgatcacgcgtgacgcatcgtggaagccaaagatgagaatactgtaccaacaacgcccaatcgcaagaaccagacagggtgggaaagccagaagcaggcctggcaggcaccaaacagtacccacagactaacacagggacttacctgggccagctggaatccaggggagccccccgaagcgatccactacgaaaagaccgttagccacaactccggacgacggacacagaagacaacaccc

SEQ ID NO: 542493 - DNA, 1107 bp, Homo sapiens
gaacagacctccggggctccggggagaagcaatatgttaaggatacctgtaaggaaaggccttagtaggccttgctaagtctcctaaaggatgtgttcggaacgaactgccacgagcatgcaagcaacgttgatcgaatgtattagtcgatggtcagatctgtcatggtagaagcgggaacgagcgtcctccaagcttgtgagaagggttggcaatgcaagatcccatcgatgtctgtacatcatgcaaacggttgtcatggttgctggaaactgcggcgatgtgcctatgtgaaattgagaaagcccctaaggttggtagctgcttgtgccatgccaggtaatgacaggcgttgcaatatcctaacaaactcagaaaaatccaaaaaagccagggaaggtgtgatggacgttcttaatcagcaaaatcacccatttggacctgtcctatgatggtgaccaggggaggtgactgtgagtctgcaggcatcatgtccatgatgctctggcacatgactagtgagcccgaatccttaagaaggggaacagcgtgctggtgtacagaaccagaaacatttggggcccattctgggtcaaaggaccaatcaatggacccagcatgtataaccgaggggcaccacggctggccatccaagggaacggcaaagatcgacgcactcgccagcgaacgcccgcatcacacacgggcgacaccggacacgggccagaacgggaaacatcggatcatggccacaggaatggggcaccagttaccgactttgtgcaaacacccgacatcgcgttcacacgggtccctggcagaagcgctgcgttcttggggcaaaacataactccaacaatcgtaggacaaaattccaagggaccacccgggtataaaacaggatgtagccgccataacagcacagccgcccaaaaaagggcgcgcgccacaaagggacgcccccaattaaacaaaggggtacccacggggcgccccaacggtggcgaccgcgacagccacatcagagcgacaaacggacaaagccagaaacaagaaccacgcaacaaatgaagatcgcgaaacataccgaagacggccagcacaaag

SEQ ID NO: 542494 - DNA, 257 bp, Homo sapiens
catttcatccctgaaaaataaacactctagagtattagtgtctcagaggtcatttagttgcctccttgtaacgcaacctgcatgacaatctccttttctagacctcctgagacatagatggtagaatctctgggcagcagtccttgtggtactcgcactcagtgcctggccaagaggtccataatgagatattctgtgcgtctctagagtcagaacattcctttttcatcttccaccgtggattccttctaatgctt

SEQ ID NO: 542495 - DNA, 401 bp, Homo sapiens
  misc_feature (41)..(42): n is a, c, g, or t
cagcaggcgtgggcccagataagatgtcatgtaactctttnntttttatcaaaaaaaaattttttgacacagtatcttgctgtgttgcccagactggagtgcagtggcaagatcacggctcactgcagcttccaactcctgggctcaagtgatcttcctgtcacatgagtctcccaagtagttggaacacaggtgccagccaccacacctggctaatttggtttggttttgtttttttagagatgggctcttgctatgttgcctatactggtctcgaactgctggcctcaggcaatcttcccccctcggccacccaaagtgctgggattacaggtgtgagccactgcaccctgcctcagtacctccattcttcccacacaccctcctcatgtgctccttcc

SEQ ID NO: 542496 - DNA, 950 bp, Homo sapiens
agtctgcctctcactcctcagatatcacgaccatgtctgtggttgcaccttagcgatgtccttatgaatgacctgctccatggagctgatggacaatcagctttcaccgctgtggaagtatccggacgacacataggcagcgcctggccttacgactcgacgagtagacacatgaagacgtgctatctccagagtccatagtatcattgcccacggctgacgctgagttgatccatgattactctagtagcatcctggatcggagagactgcacatggggctacccatctaaaaagactttatcatgagataattgataacgcatcgtctatggcgggcagtaccatctcctgaaaatcagctcatggtcccaacgctggattaggcacctattgccttggagttccagaaaaggagctcgtcggaggttagtctcagactatgggcagtggcgtgctatggggctttttgaatcgtccttcggatcatctgtaacatcacattccactcctgcccaaacatcgtgcactcaggactatttgaatatgctcggatgtatcccataaatgggagtccatgcaatggggtgcggtgtccccggtcgtgaaccgtacgggcttgtgaggatccgaattctggtcattctgcatgatctaacatatcgaacaacctggcctgtactgaagctatgggggttcacggattataatcatattgctacactaaatgtgtgtgccgaacatctgtccgtcagtcgaggcacttactgtacattgtgcctggacttaatactgcctaagagaaaaacctatacaaggctccttgccgtctgaatggtgcctactgagtactacctgtcttattacactggggaactgtagcgtatcaggcccgtaacatcatacccaatgaactagcggaaatccgggggaccggtgctgtccactccc

SEQ ID NO: 542497 - DNA, 269 bp, Homo sapiens
  misc_feature (148)..(148): n is a, c, g, or t
atctaaggactgtgacggaagcagtcactactgtaacaaatgatgtaggcgccggaatatgacacagggcggtgcaacagtgaacactttgtgcacgaacgccgcctggtagatgtccagaatgtctgtttccaggaaaaggtcaccntgcaaggaaaacggtgcagtggcaacttgctacaagagcaactccagcatgcacatccacaagaactggcgcgcctgacaaacggctccaggtacccccaactgtgcatacctggacagcc

SEQ ID NO: 542498 - DNA, 315 bp, Homo sapiens
  misc_feature (61)..(61): n is a, c, g, or t
  misc_feature (78)..(78): n is a, c, g, or t
  misc_feature (162)..(162): n is a, c, g, or t
  misc_feature (169)..(169): n is a, c, g, or t
  misc_feature (179)..(179): n is a, c, g, or t
  misc_feature (298)..(298): n is a, c, g, or t
  misc_feature (307)..(307): n is a, c, g, or t
tgggatgaggtgcgttcagaatcgttccgcttcgtgattattgatgaggcgttcgggcgcngctcggacgagtcagcngagtacgggctgcgctattccaaaagctcaacctgcaattgttgatcgtgacgccgctgcagaagattcacatcattgagccgntcgtctncagcgtgggnttcgtgcaaacaagggcggggtgtgactcgcagctacgctgtctgtccgatttgaggagtaccaaaccggggcggcagcttgagactcatcgggggatccttctagaagtcgacctggnaggccatgncaaagctt

SEQ ID NO: 542499 - DNA, 1819 bp, Homo sapiens
  misc_feature (495)..(495): n is a, c, g, or t
  misc_feature (1175)..(1175): n is a, c, g, or t
  misc_feature (1183)..(1183): n is a, c, g, or t
  misc_feature (1607)..(1607): n is a, c, g, or t
tcaacattgagtagctgaccttgacttgtatgcacctttgttggtgtgttgttgtcttctgccagatattgttttcgcgtactgctactgtttgtcgtcgctgcgcgtgagtaatgatgtatgaggcgctgcgcatgccttagcctgatgttcttctttcatcatgctgctccgggggtgtcgcccgctcttctcctcctcgagggtgtgaatcgtcgttcttccggcgcccttggtgatgactctccctgctttttctcccgcggtgtttctcgcgccgggcggcttgcgcctctaacacggggggttcccccgggggcaatgttttgttaggataaccttgtggagaggtgtagaagaaggagtggcacgcaagacacacgcgttgttgtattggttgatgatactgccgtattgggcgcctcaggaatttgcttgtgggtgtttctcccaaccaaggaggttgaataggatgccactgacgcctgttgctcnctggacggacccaccgcccagatgtgtgccccccgccgccgtcccacagaaaagatggtgtgtgcacgcaaaaaagcgggaaggcgttgcagaacgccttcgggtgggtgtcaccccacggggggcgcccccccaccgccggggaattggtggaaacgccgcaagggtgtcggaaacaacaacgataataagttgggggggaggccaacacatatgggtgggcacggaagagcgcgttgcccataaatgcctcctcttaactggggcggtgtcttaccccccggagtttttccagtggggttctcggttttcctcaacaggaggacacattctcggggggccacacaacacaccacttgtttgggggcgccttcttaatatcttgtgtcgtcacgacacacacagcggctggccgcacccttttggagggtctctactaacacgtgcgcatgtagcagtgtgctagcacgccggtgttcgaccaacaaggttgggggttacaattgctcgcggcacttggagacactgtccctcacagagactctcggggggacacacacaacacgtttcggcgagggggtccctcataggcccgctcaccactctttcagcttcacacacacacacggggtttttttactctctctccgcactctcggggagcacacaccggcgggttntttcttgnacacatattctctctctcgcagtaaagacgctcatatttgtcacgcgcgggtgctcccacacaagtatagtgtactcacgctcacacaccggcggttgtcatatacacacgctctgtcgcgcacacacactcacgcggagacgcatacttagacatatatatcactttctcggcgcgcacacacacatgtggtgataatagagaagagacaacgagacccacccgccccaacgtgtggagagctccacactggagagttcgcggggcacccgcgctctgttggagactggaagactgtgaacactggataccgcttctgggggcacaccctgggagacacacgaggagaggccacacccgaccaacgaacagctgggagatggcgcgtggccacacccttacacacccaataacccgccacagncacagaagaagattttccttgagccaccgagatgagccaccacatccacccacatccagtccaggaccatggacattggaacatccagaggatggggctgttcatagacagacccccccgtagggactgtcaccgaatggccttctgaactgggaatgtggagactttggcgggtggagaggtttgaattaaccgtttgtgtcaatggccaa

SEQ ID NO: 542500 - DNA, 304 bp, Homo sapiens
  misc_feature (15)..(15): n is a, c, g, or t
  misc_feature (125)..(125): n is a, c, g, or t
  misc_feature (196)..(196): n is a, c, g, or t
  misc_feature (286)..(286): n is a, c, g, or t
  misc_feature (288)..(289): n is a, c, g, or t
  misc_feature (291)..(291): n is a, c, g, or t
cctctagagggatcncccagatgagtctcaagctgccgcccgtttggggtttgccacggcttcatggcatcgagcctaatgaggtgaacgtgacattgccattagcgcgttggccacaccctggncctgggcacgacccgggtaggcaagaccaggctcgccgaactgttcatcacgcaggacatccgccgcaagnacgccgagggcgagcacgaggtcgtgatcgtcttcgatccgaaaggcgatgcggaccttctcaagcggatgtatgtggaggccaaacggncnncngcttgagactcat

SEQ ID NO: 542501 - DNA, 387 bp, Homo sapiens
  misc_feature (21)..(21): n is a, c, g, or t
ctataaaataagggcccaggntgcggtgtcatgctgtaatcccagcattttgggaggctgaggcaggcggatcacgaggtcaggagttcaagaccagcctgaccaacatggtaaaactccgtctctactaaaagtgtagaaattagccaggcatggtggcacgcacctgtaattccagctactcaggaagctgagtcaggagaattgcttgaacccaggagacggaggttgcagtgagctgagatcatgccactgcactccagcctgggtgacaaagtgagacactgtctcaaaaaataaataaataaataaataaataaataggagtcaatagagctgcaacatagaggcatgtgatgagcttgaagcaaggtaggcggggtctgg

SEQ ID NO: 542502 - DNA, 167 bp, Homo sapiens
tagaggatcccgtctactatagtgtgtccatatgttaaagccactttcgtagtctattttgtgtcactggaattttttacaactcaggtgagttttagctttattggggcgggggtgatctcaaacattctttacgccggcttctattgaacttgggttactcgtgt

SEQ ID NO: 542503 - DNA, 260 bp, Homo sapiens
  misc_feature (81)..(81): n is a, c, g, or t
  misc_feature (152)..(152): n is a, c, g, or t
  misc_feature (242)..(242): n is a, c, g, or t
  misc_feature (244)..(245): n is a, c, g, or t
  misc_feature (247)..(247): n is a, c, g, or t
tgggatgaggtgcgttcagaatcgttccgcttcgtgattattgatgaggcgttcgggcgagcgcgttggccacaccctggncctgggcacgacccgggtaggcaagaccaggctcgccgaactgttcatcacgcaggacatccgccgcaagnacgccgagggcgagcacgaggtcgtgatcgtcttcgatccgaaaggcgatgcggaccttctcaagcggatgtatgtggaggccaaacggncnncngcttgagactcat

SEQ ID NO: 542504 - DNA, 519 bp, Homo sapiens
gcattctccgtgctacctgcagaggggtccatacggcgttcgttctaggattcccgtcgtaacttaaagggaaattttcacaatgtccggagcccattgatgtcctgctgagaaggcagtgaccaaggagcgaagttccatgggtgtaatgggactgctcccgaccacctgagtagcagccctgactcttctttctccaatctccttcagacatctctgataacttcctaacagcatcactcgctgaacgcagacctcgcaaccgctcctccacgcaagcaccctgcggccaccacgcggtcctgcataccaagcgcccggctataaacccgttaagcacaacccgcaccaccccctgaaatgcccgacacaacagcgctgagataaccacccaaacgcaagggcaacattaccagcgaactcggcagacagagatcgcaactcgaaacgacacagagcgcaggaacatgccagacatggcgacagccatacgcacccaacacagccgctcggccacac

SEQ ID NO: 542505 - DNA, 386 bp, Homo sapiens
gatcgaatccttatctccaactggggagttccgtgtggaccgtgaaggttctccagttgctgctcaactgtctcatgtcaatgatgtgttattatcgctttggacaggtttacacagaagccaagcgttctccaggctttgaccgtgtccgaaatgctgatattgggattcaagactttgagcttgatttcctgcaggatagcatatatcacagaacattggctggtcaggatatacaacgtcatggatctgaataatctaggcttgtcaaggacataaatgtcacgtccagctctgatatgcttcgcactgagcacatcacatttaggacgttgaagattttttttaataatatttttattaaatatgcagttggaaaaaacaaa

SEQ ID NO: 542506 - DNA, 864 bp, Homo sapiens
  misc_feature (48)..(48): n is a, c, g, or t
  misc_feature (77)..(77): n is a, c, g, or t
  misc_feature (325)..(326): n is a, c, g, or t
ctgagtgtgagcttaaagtcccctggcttttgacccaaaatcttaagngtctgggatcgtggcttgaactcggcccngcctgggccccattgtaggaaacgtggctgtaggacagaagcctgtggtgcccagccccttggaagggctcagatgtgcccagaacgaatgccttgcctgcccatcctcctggggctccctagaccccaagccaaagcagagatacctgttatcaaaggttggggaagagcctccaaggcaggggcaaaacttccaatatctctttcccccaaactgatctagcttctccttcaccttcccccaccgnngccacccggccattttaaagtttagtggctgtggacttttagaatttggtttggtctgtgatccttaccgcacagacccaatgaccaccacctctttctttttgtcttttatctgctctccttttgagggggaggaaagtgctggcctgttccatcaagcccagttcgcatttgctttagcctctgatttctctttcttctttggaaatttcattgagatgtctctgtacttcgcttgtcagttatctttgttccttttaaataaagggcttttaaatggacttattgctcccagcgtgggttcctctctctaaatgttagaaaattgtgccatctacccgctatgctgagtactgtcacactcggagacctcggggacctccgggcaggcttcaatgctgcagtgtcaggggccgcgggcagcaggaggagggggcggctcacgtggatttttacagatctccgcctgcagccggcccgcgtggccacgccagggcacggcccgagacgcgcgcagccgccagcttgatggcggccg

SEQ ID NO: 542507 - DNA, 536 bp, Homo sapiens
  misc_feature (136)..(136): n is a, c, g, or t
  misc_feature (388)..(388): n is a, c, g, or t
ttgctggcccccccatatagccacccgcccctttcgcgcatgggattttttgggccttattatgtgttgcccaaggcccgctttgtggctcttgttttccgtttaaaaaaagaaagggttttccggggggattttnttctgtgggcgggggttttaaaagtcccccccccgggggaaaaattttggggtttgggtgggttttttttccggggggggccccccccctttttccggggaaaccggggcctttcccccccggggggtttttccccgtttttccaaaaaatggggggccgggcccgggccccggcccccccccttttttttttttaggggggggggttttcggcccccaaattcccccgggggggttttaaaaggtttcccnaccccaaaaaaaatgtttccccttcccccccgggttttgggcggggggccccaaccccctttttccccccaaggggccccccccttttttttggggggggggccctttccggggggggcccccatttattccggggccccccgggtta

SEQ ID NO: 542508 - DNA, 239 bp, Homo sapiens
  misc_feature (37)..(37): n is a, c, g, or t
  misc_feature (126)..(126): n is a, c, g, or t
  misc_feature (147)..(147): n is a, c, g, or t
  misc_feature (174)..(174): n is a, c, g, or t
  misc_feature (182)..(182): n is a, c, g, or t
  misc_feature (212)..(212): n is a, c, g, or t
ctgaggttgacctcaggagatgatgagggctccagangatgatgtttgcagaatcctcagcacgttgcaggcagctcagagcctgcccaagagatggatgatgccctttctagcccagagttccanttccagttgatacccccaggntggcattgatgcccacatcacacacgnatcctctntgggtgggatcacaccagagcactattaanttgtgggaaattcacagtccccatcct

SEQ ID NO: 542509 - DNA, 267 bp, Homo sapiens
tgggctgcctgggttttgttgccctcctttgtgggggcaggacctttgtggggttttgtgccctgttttggggcccagggggggttggtccccattcccaggccccaacagcctttaaaaatgggtaaaggagcttgccctccttgggcccccccccttggtgatttgcccccccacccccagccctgtccctgccccccctcttagtggggattagtgaatgacttgacctgtgccctcaatacaataaatgtgttccccccccca

SEQ ID NO: 542510 - DNA, 298 bp, Homo sapiens
  misc_feature (30)..(30): n is a, c, g, or t
aacatttacatagtagataagtagtacatngtggataacttctacttttaggaggactactctcttctgacagtcctagactggtcttctacactaagacaccatgaaggagtatgtgctcctatgatacctggctatgtgctcttccaaaccctactttagcccttcacacatcgcactttaagtttatgatgctgaaggatatggaagacacagatgatcatgatgatgatgatgatgatgctgatgatgatgaggacaactctctggctccaacaagagaccaagacgcctgggg

SEQ ID NO: 542511 - DNA, 327 bp, Homo sapiens
tgtctcatatataggtaacgctctaagactcctgagccatcttttatgtaactggcttacctaggcttggcgcttgaacataatgtaacagaagccaaggagttcagatctagatagcagagaagtaagtctcatactaaaaacattgcaactactgttagagtccacaccatgaagctgtatcagatggtgtatctttgactgaattctataagtatatatggaccagactaaaactaatgtggctagctaggtgggctgacgtgtctcagtaggacatggacagactccagcttccaccctcgagagaccttggacctaagtgcc

SEQ ID NO: 542512 - DNA, 762 bp, Homo sapiens
ggctgccgtcgccgcgccatttggatggcaggaagagtccggttctggacagctggagacagtggtggtgactgaaataactttaccaaaggaaagctatttgggcgaactatcttctccagcggagatggcccaatgtgcttgtgtaacagagccagactgtttcctaatctcccaggattggctctttagtaaaaagggtgtgtcaatcccaaaagccttttcgatgcaggatcatcaggtcccggatgagtctcatgtggctgtgacctccagatatatgctctcgaacagtgtgcctgatgaaactatgggaaccccttgtgaccctcaagatcagaggtcccagcttcctgggaacataggtttggatgtgtcacctcaatgggactgttcacaagaagaaaagcctgttcataaaactttggtgcctgatgtctagcagaacctttatcagtgaaacgccatgagtttgtgatggcccatatgtgactgaacttcaggggtaatgatgcacctggtgtgaacaagaaattaaccagtgcagaaacttacttgtgaaagtgccagagtagatgtggtgcaatacaaacatgtcagaatgggtgggaaaagatttgggatcactgtttccagaaagtagctaatggaactaatgattctggttgtaacacaaaactagaatggttgactgttgggtgacaattaaattggagagagggttttaaaagttctcatggggtcaggaaatgcatgttcgtg

SEQ ID NO: 542513 - DNA, 224 bp, Homo sapiens
  misc_feature (4)..(6): n is a, c, g, or t
ggtnnncgaccttttaaacctcttccacccctttatcacaaactggaagaaacaacctcctggattttactccctgcccaatcaatggacccctttgggccattaatattgatttatcttcaacacttagcaggagacaaaccggaacccccttcgaccttgccgaagggaggtccgaactagtctcaggcttcaacatcgaatacgccgcagccctgtcgacg

SEQ ID NO: 542514 - DNA, 99 bp, Homo sapiens
  misc_feature (67)..(67): n is a, c, g, or t
aaaattgtgtaggcgaatatgaaatatcattcgggcttgatgtggggagggtgtttaaggggttggntaaatataattgtctgggtcgcctatgaggtt

SEQ ID NO: 542515 - DNA, 941 bp, Homo sapiens
gaatagtagtatatggctcagcacctcatatcctccctactatgcctagaaggaatattactatcgctgtgcattatagctactctcataacctcaacagccactccctcttagccaatattgtgccgtattgccatactagtcttgccgcctgcgaagcagtgggtggaaggctagccctactagtctcaatcgtccaacacatatggagctagaagcgtgacgtacataaccctgaaaacctactcgcaatgctaaagactaaatcgctcccaaacgaatgtatatctacgtgacgccacgtgacagtggactgtatccagagaaaacacataatctctgaatcaggcacgaagcgcacgccacgaggcgtaatgtattgagacatcatcccgtcgtactatgtttggtagccgaagtcaagaacatcctatatagactgttgcccaacctgttcctccgaccgcctaacaagccccctgctaatagtagactgagctgagtcctaccccgtcaggaagtcatgggagaggccgaggtggcgcaacttgatccgagggaaggcacgtatcactgaagaaacactgctacctctctgatatcggaactcgacccctacaaatctcgttagttataaccattgacagtctcagaactaaatgatatttcatatacttaatcacgacatgcacaaattatacaccaatgttgtggtaatccagtcgacgccgatgaggcagaccagattcagatacgccttggaccgccaaggccacataactttcatatactagcgcctagtaaggtagcactttcccctaggcgtcgcatggtagcacatcaaaagacttaggctcagtagacctataatatcagtctcatggccagactattaaagcttgagcaagagttatgtgataggtacaaggttatggaagata

SEQ ID NO: 542516 - DNA, 309 bp, Homo sapiens
ctggacaacgtattcctatggaatcattattgattgatctcctaaggggatgtttagcttgaattgcacctctctgctctgcgtgccacggccacactatgttcagctggtctgaacaaaattgtcagattgtagaaatgataagaaatacggctagggttcctattatctggaaccatagcggtgtagtgtcacctcaacctcaaatggtatggccctttgtaggagctaaacattaggatttgtggaaactgtttatagctcttaataagatcataatttgggacagaataaaaaagcatctagaag

SEQ ID NO: 542517 - DNA, 188 bp, Homo sapiens
agctagtgagcacttccaacaatgtagaatccaataggagaaacagaatggagaatccagatggaagtccaatacacgtcaggcaggccatcgggtgcgacactaccaaggtccaccccagaatactcaccactcactccagcgggaagatcacattgtaactggagcttgcccacttcctagagttc

SEQ ID NO: 542518 - DNA, 408 bp, Homo sapiens
  misc_feature (5)..(5): n is a, c, g, or t
  misc_feature (61)..(61): n is a, c, g, or t
atatnaaaactgcaaccatttggaaacactggccaatgatgattccttttaaacactagtntaactccagtggtcattgttgttaaactgttcataatttctattcctcagtaatatgacccaatacttcatgttaccttgtgtattatgagtaaggttacataaataaaacagcaagataattctgaaaatttcttgcctcaattccaagggtaaagacaactatgagttactagagatactaagaattactagaataactaatagttactagagatagtaagaatatcttaagtttcataactggttaagatgttttaaaaattaaatataaaattatgatctattggattctaaaggtatagtctgaaaggtcatgtcatttggactgtgctttgttagtaaagc

SEQ ID NO: 542519 - DNA, 282 bp, Homo sapiens
tcgcccggccacgtccgtctggaacacggcctcgaccaggtgctcgaccacgctgcgcagctgctcttcgctgccgcgcaaggcgtcgaccgcgcgctgtcggtcgagcgcaaacgcggtgtgcgcggcgatgttgcgcacgagctgcatctcggccccgccgaactcgtgccgctcggggcgatagaccatgaattttccgatcgtgccgccgccggtgacgagcggaatcatggccagcgcaccgatgccttcgtcgcgaaacacgggcagaaagtcgcg

SEQ ID NO: 542520 - DNA, 141 bp, Homo sapiens
cacataagacaaaatccaaaactcttagatgaacacatcaaaaagccaaacatggagtataacatcctgacgacaggacatctatgaaaaacccgtagctgatatgttgatgcaaactactgtaaggccttcccccccaga

SEQ ID NO: 542521 - DNA, 202 bp, Homo sapiens
tcatttcaggccatcctgcagcccccagaaccttccacatgaaatgaaaggctccccccttcataggctttaaggaaatttttggccaggtgtggtgcctcactcatgtaatcccagtgctttaaaaggccaaaatgggaggattgtttgagccagctgtttgagaccagcctgggcaacgtcatgagcccccatctccata

SEQ ID NO: 542522 - DNA, 419 bp, Homo sapiens
  misc_feature (102)..(102): n is a, c, g, or t
  misc_feature (374)..(374): n is a, c, g, or t
ttgctcactccagggcctgctgccacccagatggctggcaaacaccaggactccgaacacaacaggattcagggattcagacaggagtcttgctctaccaanttattataggatcttgagatgcctttcccaggtaaagcttaacaaaaaaacaaaacagaaattaaaagccatatccagaaatactaaacaggctgtctccaaggatcagaagggcgatcagaaaagagccctcagagaggttgtctatatcccagaaggaaggatcttaagtgggggatggtgctccacagcaggaagaccttggaagatttcaggggaagtgaaattgttattgtcagagactttcagataaatatgtaagccaccgactnctgggagcgattaatataaagaattaccaacaaagcagaaaaaag

SEQ ID NO: 542523 - DNA, 340 bp, Homo sapiens
  misc_feature (67)..(67): n is a, c, g, or t
  misc_feature (167)..(167): n is a, c, g, or t
  misc_feature (192)..(192): n is a, c, g, or t
  misc_feature (203)..(203): n is a, c, g, or t
  misc_feature (214)..(214): n is a, c, g, or t
  misc_feature (309)..(309): n is a, c, g, or t
  misc_feature (327)..(327): n is a, c, g, or t
ggtctcttgaagtttggggtagtcaagaagcattagaagaagcaaaggaagtccgacaggaaaaccnagaaaaaatgaaacagaagaaatttgataaaaaagtaaaagaggttgttcccgccttcctgaataggcccaaagggctgagactggagtagacactgtanagattagacacaaggagcttactgngcaggtttctnagaaggcttanaacagagaggaattaaaagccaggctgtattttagtttgggaattggacctgggtcctctttgggcttctgatttgatccccaagaacttgcccnagttacttcttatggaanttgcgctagcagt

SEQ ID NO: 542524 - DNA, 334 bp, Homo sapiens
aacagactatttcctgaactgtaacattctcaaacactgcatacacagagaggatatgagacatggcatttgcggataggaaatgaggaaattttgcgataggacagctgtagatcctgttgcggacacccagccgggcagttggaggcggggtcagtccagaagccttcagataacaccagggtgtagtcctggcgagaaatcttcagttgcttcaggaccttttctagccccacgcgacggctaggtcctccgtgagagaaaactggttcgagaagcatggccaacattcccaatgatccgtgagtattgagaagttctccatgttctccca

SEQ ID NO: 542525 - DNA, 1166 bp, Homo sapiens
aggaaagactttttttcgaaggcatcactgttaggttgggggaaagatttatttttgaaggcatcactgttaaatgaggtttgggggctggtgtgcacatggagttatttccccccaaattctgggcctcatgtaggaaaacctaaaacatagcaaatgggatatgttgttatggctcttcaggtcagcttagttctcattaataatactttctcctgcgttaatcacagctatgtgtgtaggaaagggacaacagtaaagtgggtaggttaaaatttagaactcctttgcttcatgcacccattccttgtgctgaattggtagtactttagttgctttgtgagaccttttgaaacaacataattaaggacctattcataggagactacaaagtgttcctttataagataacacattcatttgcattgacccttgatgactgggaaagcaaatgccacatgacccatgtgtattttacagagaaatccggctaactaacaggagtcacactgggcgtggtggccttattcctgtgatccagcacttcgggaagccaagacgggtggatcatgaggtccggacgttcgagaccagactggctgacatggcgaaacccttgtctctgttgaaagtgccacaattcagccgggtgtggtgtcacacgctttgattgctaagttagtcgggaggttgaaggacaggagattactcggaaccatggaggcaaagttggcgtgacccacgattgggccattgggctccattctgggcacacgacagcttcgtttcgacaaacaacatctactctacaaacacatctttgtcggctccctctcagagttctaacacaattggcgcggcccatctgtcgacccgggacaagtgcccaaagaaccaggccagaccggggggtgcttcccaaaaaccggggacgcgagcgtaacaacaagttagtgacttgcacatgccgaccacaccccggccacgccgagcagcaccaacaagagacgacgaacgcgcagcagaacaacgacgttaactccctctagttgacgcgaagagagaccaacgtaagcgcaagcgactagacacacaccgagcagactgcgacaaccagaacgaagccacgccacaggcgctcgaatccaccagacacagacagccag

SEQ ID NO: 542526 - DNA, 241 bp, Homo sapiens
  misc_feature (133)..(133): n is a, c, g, or t
atacacccctcgttactacacagcatcatgataggggtagacgattaggcagctaattaaacactgcgaagtactggcacgaccaatacactcaagataaaaatttgaaacctattcctacggtacggcaacngaacatagagtctattacaatgaggcacgtgcgccactgatacttttccaaccggtaaaatgtactagacccaccgtaaatgccgacgtagatgaagacgtcgcatca

SEQ ID NO: 542527 - DNA, 625 bp, Homo sapiens
  misc_feature (163)..(163): n is a, c, g, or t
  misc_feature (275)..(275): n is a, c, g, or t
  misc_feature (407)..(407): n is a, c, g, or t
aaacttctctccctgaggcctgacagttatcaagtgaaatgagctgctgtggtttaccccaactctagcactccctcctgtctccagtactctccacagcaataacctcttttgtgagactgggcatatgctgaagcaactggaagtgagttgtctcaagttnacttggctttaactcccaagaccccagcaaatgtctttctttcctccttttgtgtcctttcaccatccctcttcctttgaaaaaatgattatcagaactgtcatcctgatgnttcccttcctaactgctttttatggatgattgtgaccacttttttcatctgtattcagcagtagtatacacctgtaatctctcttttttcatctcattttccttcccctgtggctagaatcatgctcagaantaaaaggaaattaaagctttccctggattctgttatcttttaaattgctctccagtggttctttttccagatttctctaaaggaaggctattcccttgctattcagagctgtgtccaaggaccagcacaaacatcacctgagtgctcatgagaaatgcagactccaatacctgctgagtcagaatgtgcactttccagaagctcctcaacgaattcat

SEQ ID NO: 542528 - DNA, 333 bp, Homo sapiens
agcctctctgtaggggacatgctgtccagcgcattctctgctgacacccagatgctcatattctagttacaacagctgtgtgctttgcagtggagatgcagcatgatggctctgcctgtccttgggcgcgcagtccaggatggagtccccttggatctgagagttgccccggctcttgaaactcttcagagtgaagcgggtggttaggtgggtctcaggtcctggctcgcactgggagatgagtgtgtttggttgtgaggttcatgaggcaggagaggttgtgtcggtatggctggagggtagccggcgctgcagctctaatctggtcgcatg

SEQ ID NO: 542529 - DNA, 174 bp, Homo sapiens
tcggatgtacacagaacacaaatggggcgtttttcaaggtgatttatcaaaacaaaaatgaggggtcactttcaggagatcggaagaggtgaaaatagagccaattcccgtgtgtgctcctttccccttttcccggcatagggttctctcatctggtagagattacggcaaccg

SEQ ID NO: 542530 - DNA, 233 bp, Homo sapiens
cggctgacctgagtatcccaagcttacgaggagacgtgtgcaggacatgtacagcaagagctggcaggctgggttgatgaggggaagtgctgggctcacatgccccgaaatgcccgaactcatcccagcagcctactcttttttaggcacggttcgcagagagggtctcattctatcgccctggctggagtacagtgtcatcatcatagctcactgtagccttgacctcgttc

SEQ ID NO: 542531 - DNA, 551 bp, Homo sapiens
gcacgagggaagacctccaaagtgaggtagactggcccaagtgaacaccagcagacattaagctctcaacagtaatgttttctgggaggggcggatagaaaatgtccttatgaggatagtaaaccttcgaaatagtggcacccaatttagcggtacgcatggaatggtttagttgacgcaagaaaagttcttgagaggaatatggtttgtcattggccgaaggtataaggttagggtaaggcttggttggcgtggctgctgctgtcgttgtaaaagattgtccatctaatgtcttgctgtcaaacaacttgttcaacagagcataatttctgaaaaagtcactcaattcagcctccagctgctgttctttgtcagagagtttgtcttgctctaatgactttttcaactcaggtaatatttcatcttctggtacctgagatagagacttcaattctgatctaatttcatcatacaaaagtttctgttgcaacagcatcacctcatcgttattgttaggggtgttggccgcaccggatgctgacgactgaaac

SEQ ID NO: 542532 - DNA, 229 bp, Homo sapiens
  misc_feature (77)..(77): n is a, c, g, or t
tctacggatctccgatggcgaagtcgatgggagtgtagtcaggaattttgattctgcagttacataccagccagggnccgtggaggagggctggatgaactgagtgaggggggcaggtagcagccagctgcgactgaggcttgagaccccagggtgggggtgctgatccatctctggtaagatgtactgtggtggctgtcaaaggtggatgcacacattgagttcatgg

SEQ ID NO: 542533 - DNA, 340 bp, Homo sapiens
tatggggaagctatgggagcagatacagcaaacgcatatgggcatcacacatttcttctctggtatcaggagaacctggttgcttctaatgagaggtctctcttatttggcaggatagaatccaatggggtaggagaataagagaagggaaaaggatccttgcgagatcatgctcccacatctattaaaagatacataagcttggccaaacttaaaaccaggagcatatcatcatggcacaaaacacatccctaataggggcgggatcactcttttttttttcttttttttttatcctctccggtctggtgggaaggggtttccccacgggacattttta

SEQ ID NO: 542534 - DNA, 92 bp, Homo sapiens
ttcaagcttctaacgatgtacggggacatgcctatttactggaaacctgttatgccaaacagttgtaccactgctaataaatgaccagttta

SEQ ID NO: 542535 - DNA, 109 bp, Homo sapiens
cattctaatgggtggaagtttaaccactaacaggatatttcatggtctcaaagcctcttcccacaagatgtttataataaaaaataaaaagcagaaacttcagagcaaa

SEQ ID NO: 542536 - DNA, 200 bp, Homo sapiens
aatcaaatgtcatcgacttagtatattctgagcaagtttgactggagatagaattggacaagatttcggccattgattaaccacatcgagagatagaaccacgcgtatcctgatgctagtgattaatccctcattcctggcctatggggtacaagttcatgagcggccagaacgctggggagctgtataccatatcataa

SEQ ID NO: 542537 - DNA, 128 bp, Homo sapiens
gggtggcgccgcgcagtcaccgcggagcagacgcggaggctggtggcccctgggcgagatgccgtacgccaaccagccttcctggcttatcagggtgctcactgacgagaatgtcttgttcatcatcg

SEQ ID NO: 542538 - DNA, 265 bp, Homo sapiens
  misc_feature (178)..(178): n is a, c, g, or t
tcggaagggccaggatcgtcacttggcccacgtcccccaatgcctgcacatgcgtaccgccgcacgataggccggcagctcgccaaaacccacttcccgcgtgccctcatccagtgccatatggcgcggcaggttggcggcgatccattggtcgacttgccgctgaatcgcctcgggntccatgggttgagccgaagtaccgcgaataaaggtgatcttgccttcgcccggccagtgatgggccttgatcggcatccagtcgacg

SEQ ID NO: 542539 - DNA, 427 bp, Homo sapiens
gtaactacctgctagtagagcgagccaagagtagaacctataggctgctagcccaaatagagcaacaccacctactgctccgaacacctagcacagctagcccccaagacactgtagagtgacctgatccagagtaaagtgcctctccaaggagaacgctaccaaggacctacctcactaaagctgcctgcgcacacagtagggggatgtgaaatagtgacatggaaggtgggctgcccaagattgctatacctagctgccgtctacagtacgggggcctaggggctactagccctatttacccagagctgtgtagctcgtgagagaccacataacgactgcatgtcccagcggggttttacagtgtgacacagcagacagggtaccctgtgaacagagggccccatccagtgtgcccttggattgg

SEQ ID NO: 542540 - DNA, 1558 bp, Homo sapiens
  misc_feature (613)..(613): n is a, c, g, or t
gcttcatgtgtggtgttttgccacaccaccgaatggtggtgtgttatctatgtcgtcgtgttatgggggggcggcgccccccctgcttgtggtggtgtgttagctcacgaccgctgtgggggggtttgtgtcgtgtggttggttggttggtgccaccctgcctgtgtgggttgctccatgagcgccgctgtgtttgatgtgtttggtcgttgttatcttccccgggggcgccgctcgtactgcactcgtgttgtatctcttcttggtcccgcccagtaatattttgtgtgtgcgtggtgtcgccccacaagcgaggatgtagtgtgtttgtttgcatgcgcaccgttttcgttgggaatatttgaggggcgccaacaaatatgtgtttttgtctctgtgttttgcctcgtgtgtgtggtatgtgagaaaccacagtgtggcccgccctgcttatgagactgttcccacgggaggtgtttccgcgcccaccgtgggcgcccccgtttccgccccaacttgtggtgtgaggacgtgtgtgtggccgcctagaacgtgggggtggggtccttttaggaggtgtttgtccacgagctttcctcaacgttctcctccncgcgaaatttgtcttgttaataccgtcccccacacccactctgtgtgacacaagtcctgtgcacagcccacacccaccgcgtggggggtgttctcgaatataggatgttgtgctggagtcttcggtgcgccccccacgtgtgggcactctcggagattgtctcgctcctcgcacaccagctgggtttcctcgtgtttccactcgtgtggagagggctctcccacacgctccagatagccctgtggcacatctcgtccctatatgtgtcacaccgtatagagggtgtgttgtgtggggttcacacatgctccacatcagtgtcacccgctacacacagtgtgtagtgagaattgtgtgagatgtgtctacagagatacgtcgcacaccacagggcctctcaccacgcgccacagcgtgtgtgctttgtctcgctgtcccctttgtcacattgtagagagagatgctcacacagagatgtcacaccacgcgtgttgtgtctgtgtgtcacacacactggtgagaaggggacacacaccccgctgtgagatgtacaccgctctacaccacctatagaccctcgttatataaactttcacctcgccacactggcccacactctttgagaattctctctcgttataagggtttatatttatatttgtcacaccctctctcggaagaaaaagaatgtttgtttaccccaacacctctcttagtgtcaccttcctcccttctttactgccatacccatgccccacgtgcccaccatagatagtgtgtgccacatagaaataaaaaggaatattaataatttctataagtgataataccccggttctcccagattcttttaagactgtactatagaggcctcggggaattattatagcccctcgaggccaactatgaatttaaagtgttgtggatcccccctgaatccccttt

SEQ ID NO: 542541 - DNA, 173 bp, Homo sapiens
  misc_feature (71)..(71): n is a, c, g, or t
  misc_feature (82)..(82): n is a, c, g, or t
  misc_feature (152)..(152): n is a, c, g, or t
cgtcgaccagcatcccaagtagttgagactacatacgtgtactgtcacgcctggctagttttttgattttntgtagaaatgngggttctcactatattgcccaggctggttttgaaatcctggtctcaagcggtcttcccgccttggcaatntagtgagaacccacatttcta

SEQ ID NO: 542542 - DNA, 1390 bp, Homo sapiens
ggtggcctggctggtcgtggtgccgctgctgggtgtgctgggctggcgcggacgtaggtggctggctggccatggcctgaggcgtcgccgcattcccgggacgggtacttcttgccattgctggctccgtgggagcatcgtcccgcgccgtgccgggatatatattcttgtccaagaattgcgagctcgtgcgtaaaatacagagagaggcttccgggacagagacccagggagacaacagaaaacttgtgttctgccccccttccaaaagtctcccaacagacccaagaagcccggtgcccacacggattgggaggcggccacacacaggaaagacaatgcaacggggcccttgaaagccccaccaagggcacaacgcaccaccatatacattctcccccaagcaagcggttggaaaccaagccaacctgtataacaacgctatagccggcagaaggaggcataacagcgaaacaaggataggcgctagacaccgggcacaagtcgctacccgacatggaaacaagggcctgccgaggaataccccacaaggagttatccccataccacatggaggcacgtacaagagcgtgacagtaacggggcagaggggaaaccccttggcaggaagccccgtggcgatgcagaagaagaaccaaaattcacgggtaccccggggcacacccgggatacacgagacgaccatcggaaaaaaagaccgcgagtgggcccccgggcagttacaaccacacgcgcaggaacagaggcgcacaaaccggggtagctgaggaacgagtaagagaggaaggtaccgccccaaacgcaatggaaaagagagacgattcaatccgaagcgagacagtactgctacaaggcggagagtacaattacacgcccgagaggagacaatatcacccgagggactgagggaccacccatgggggacaggcctagcaatacaacagcactctaatgggaacactaccggcctaggaggagggacaagcgcgcaatggagaaggcaaaccagaacaaaacagggcgcctacagacgcaaggtcggagagacaccaggggccacacaacagggaagacaaaagagagaaactaggagagcgaactcaccgaaggtccacaggtcagatgagcagagccgagaatgcgacctgggacaaaagagcactagatgcaaggacgaaaaacaccagggaggcgcagagtaagagaaggacaggacaccactagcaccaggaaggatagaacagtggtgaaacaagagtgcacgcatagacagaaacactgagacacgacggcagaccacgtcagaaggagggcgaacatcagagatacactcacattaagcagtagtgacagaggggcaggagcacac

SEQ ID NO: 542543 - DNA, 485 bp, Homo sapiens
  misc_feature (479)..(479): n is a, c, g, or t
ggcctccgccatccggggggtcttatacctggccaaggtttctttcgtctccgtggccagaggtccttgggggaacaagattggcaagccccacattgtcccttgcaaggtgccaggccccccggttttttgttgggcgcctcatccccggacccaggggaacgggtatggtctccgcacctgtgcccaaaaaactggtcataagggctggtatcgatgtctgctacacctcagcccgggggtgcactgcccccctgggcaaatttgccaaggccccctttgatgccatttttaagacctacaggtacctgacccccgccctttggaaggagactgtattcaccaagtttccctatcaggagtttactgacccccttgtcaagaccccccccaaagtttccgtgcaggggaatcaggctccagctgtgggtccaacatagggtttttaaacaagaaaaataaagtgaatttagggtggnaacaca

SEQ ID NO: 542544 - DNA, 160 bp, Homo sapiens
  misc_feature (19)..(19): n is a, c, g, or t
  misc_feature (78)..(79): n is a, c, g, or t
agttaggagacaccttttntaggggcaacagcacaggcccagagataccctctgccttcactccggcttgccttgggnnaattaggaccttaggttaacgacaggttccaggccctttaacttctttggccaaaggtttggggaaggttgccaaaggggc

SEQ ID NO: 542545 - DNA, 274 bp, Homo sapiens
ctctgcatttagctagctcacaaaagcatatcatcatccacactgtattataaaaaactcataatagccatgtccaggagaggcaatctagctggtgtcaggtgatccagtccatacctgtcaaagcctccaacagatacagaacaaacaccatcagtttgcgatggctggggggccttctggaagacgagaggcaaagacagtcttgaagacaagccatgctgtgctcttaaaggagggactgaacatgctcgccatctagtacatccctgtc

SEQ ID NO: 542546 - DNA, 214 bp, Homo sapiens
  misc_feature (212)..(212): n is a, c, g, or t
aggcaagagaattacttgaacctgggagtcggaggctgcagtgggccgagatcataccactgcactccagcctgggcaacagagtgagaccctgtctcaaaaacaaacaaacaaacaataccttggggcataaagtgttccacggttcaatccaattaaatttttttttttttttgagacagagtctcgctctgttgcccaggctggagtgnag

SEQ ID NO: 542547 - DNA, 416 bp, Homo sapiens
gtctcatctcccttacggtctcatctcccttaccgtcgtgtccaactgatctctcaaacccaagcaccttctgcaaaacaacaactcctattccttacctaggcatggttagcgcggtcagaattcttacacaagagccaggaccacaccctgtagcctttctggccaaacaacttgaacttactgttttagcctagccctcgtgtctgcgtgcagtggctagctgctgctttaatacttttagaggccctcaaaatcacaaactatgctcaactcactctctacagttctcataacttccaaaatgtatagtcttcctcatacctgacgcatatactttctgctccccggctccttcaggctgtactcactctttgttgagtctcccacaattaccattgacggtcagggagatt

SEQ ID NO: 542548 - DNA, 521 bp, Homo sapiens
  misc_feature (315)..(316): n is a, c, g, or t
  misc_feature (328)..(328): n is a, c, g, or t
  misc_feature (330)..(330): n is a, c, g, or t
  misc_feature (338)..(338): n is a, c, g, or t
  misc_feature (341)..(341): n is a, c, g, or t
  misc_feature (348)..(348): n is a, c, g, or t
  misc_feature (359)..(359): n is a, c, g, or t
  misc_feature (366)..(366): n is a, c, g, or t
  misc_feature (370)..(370): n is a, c, g, or t
  misc_feature (381)..(381): n is a, c, g, or t
  misc_feature (387)..(387): n is a, c, g, or t
  misc_feature (389)..(390): n is a, c, g, or t
  misc_feature (394)..(394): n is a, c, g, or t
  misc_feature (404)..(404): n is a, c, g, or t
  misc_feature (413)..(413): n is a, c, g, or t
  misc_feature (418)..(419): n is a, c, g, or t
  misc_feature (422)..(422): n is a, c, g, or t
  misc_feature (428)..(428): n is a, c, g, or t
  misc_feature (436)..(436): n is a, c, g, or t
  misc_feature (441)..(441): n is a, c, g, or t
  misc_feature (448)..(448): n is a, c, g, or t
  misc_feature (515)..(515): n is a, c, g, or t
gcacatgtccccccccttgtattgtaattcacttccttgtctgtaagccagagtgaggtggaagcgtcaatcaaccttaattgccttaacaagttccccctggtgaaggccttggcccttaacctttttcttacgccgagccctgcagccctttgccttgaaggcctggggcgggaagaaggagaacttgaagctgcgcaggaggagtatgtcaagcgagccctggccaacagccttgcctgttaaaggaaagtacactccgagcggtcaggctgggctgttgccagcgagtccctcttcgtctttaaccacgcnnattaagcggagntnttcccagntgnccccaanactccaggccngcccccntccnactcttgaagnggaggncnnctcnctcgggctcncaggtggcntgccnncgntctttnttccctgngacantggtgtntggtgtcgtctgtgaatgctaagtccatcaccctttccggcacactgccaaataaacagctatttanggggga

SEQ ID NO: 542549 - DNA, 336 bp, Homo sapiens
gggaagcgagttgttgggaggcgagttatggctcagtgtaaagaaaaagctttctggccaggtgcagtggctcatgcctgtaatcccagcactttgggaggctgaggcaggcggatcacctgaggtcgggagttcgagaccagcctgaccaacatggagaaaccccatctctactaaaatacaaaattagccgggcgtggtcgcacatgcctgtaatcccagctactccggaggctgaggcaggagaatcgcttgaacccgggaggagaagtttgtggtgagccgagatcaagccattgcactccagcctgggcaacaaaagcgaaactccgcctc

SEQ ID NO: 542550 - DNA, 972 bp, Homo sapiens
gggtgtcagttgaaatccggttctaagcgatcaggggttcccatgcgttataaaaactttataaatccccccgtagccctgagcagtgtgagagaagaggcgagaacgagcccgaagcgaacataagcacgagcgcaggtagactccccggtgtccagctggctacgtcccggctgccgtcgctcgcacggcatcgaatgtccatacgatgacaggctggcagggggattgttacagggagataatgcagagggtgaaggataaaccaaagagaagatcccgcgaagtaggtctgcttgaaacctgattccttccaataagaccatgagccccacaaagcttaaaaaaggccccgtgcgaaaaaaagtgcagcacaacgggttatcgaaaagggaaacagaggggaatagggttgattggttgacaaacgggagtgtggaaataaccttgacgagacaagttgtagatggcaaagatgactagtgataagaaacagctgaaaggtgcttgcagatgaccatgtgaattgtgtgcattttagagtaactgtgtaagttctggtgacctgtgcaggtttgggacatcactatttaatcgagtgtgttataccaaattgcagaatttgttttaattttaactttttttggctaaacagctatttgtctgttatgccatcaggaacacttcaattaggtggttcggggggcgacggcggcatattggtcacctatagagaattgtttccacaggtggggttgctgtggaagacaaagcgttccatttcaagttataggaaatcctctgggtcccaggaggggggattccctagttggaccattgggccttggaaaagcttgcgttcagacaccattttgttgtctcgcctctgattggaagatactctaccgaattttgaaccccattgggagagagaagatcagtcagaagagcaagaaggattatggaacatac

SEQ ID NO: 542551 - DNA, 460 bp, Homo sapiens
catatgcccggaagctctagtcctagatatatacccaagacaacgtgaaagtatgttcacataaaaggttgtgcatgaatgttcatggcagcatttgcttggtaatagtcaaaaagtagaaacaagccacatgtccttcaacggatgactggaacaatgtggtatctccacactatagaatattacgtcagcaatatcgaggcatgcagtgttcaatagcttctacaacacgaatgaaacttgggctacgtgaatattctggaaaaagaccgatataaaggccacacattacatggttccatttgcctataatgcctcccaggttccagtgattctcctgccacagcctccccagtagcttggactgccggaatgtgccaccatatccggctaagttaggtatataacgcaaagacgggtttaccccatataggccgggatggactcgaagtcctgacct

SEQ ID NO: 542552 - DNA, 303 bp, Homo sapiens
gctcgccagactgcattctctggatgtcccaatagataacctcaaggagcttggcgtcaggaagcagttgccctcagcaaaccttctggggcaggcgcagtcatgagtttgcccacattctgtattcatgataaacagtttgctgtttgatcgtatagactcagtggaatgttggtcacgtcccatgggcctttggctctctgtatatcctcctttctgtttatgtattaattgaaggagtgtaaggccagggtgggcagctctcattttcccattgatggtccatccaactttacagactgt

SEQ ID NO: 542553 - DNA, 223 bp, Homo sapiens
agaggatccccgtcagcatttccagcagcggggactataggcacgcaccaccacacccagctaagttctgtatttttagcagagacgggatttcactaggttgcccaggctggtctcaaactactgacctcaagtgatccacccgcctcggcctcccaaagtgctgggattacaggtgtgagcacgcgctgacacatctctatctaatgtatgtgttctcatg

SEQ ID NO: 542554 - DNA, 338 bp, Homo sapiens
  misc_feature (24)..(24): n is a, c, g, or t
  misc_feature (198)..(198): n is a, c, g, or t
  misc_feature (255)..(255): n is a, c, g, or t
taaaacccccacaatgagatatcnccccttatcccccggtagaatggcctacctataaaaaaatgaagtgtccatccaaggatatagagaaattggaaccccttccttcactgcctggagggaatggaaaatggtgtagcccgttatgaaaaacagtacggaggtttctcaaaaattaaaaatagaactgctatatgntccagcaatctcacttctgtatatatacccaaaataattgaaatcagaatttcaagnaaatatttacactcccatgttcattgtggcactcttcacaatcactgtttccaaagttatggaaacaacccaaatttccattg

SEQ ID NO: 542555 - DNA, 204 bp, Homo sapiens
atgtgttggctctattagcactaaagatagcacactgttacatattgccaatttcatatcaatgtcatcagtggctttgaaggaaaataacagttatttccacactatgtgtatgatttttattattgtcatctaaattcataacatcctattccttttaattacccttagcagagtactttgaggagtcatagatgcatccgg

SEQ ID NO: 542556 - DNA, 809 bp, Homo sapiens
atctcaatttgaattgtatctcccagaattcccacgtattgtgggagggcaccagagggaggtaattgaatcatgggggccggtctttcccatgctattctcgtggtggtgaataagtctcactagatctgacgggtttatcaggggtttccgcttttgcttcttcctcatttttctcttgccccttgccacgcaagaagtgccttttgcctcccaccataattctgaggcctccccaaccatgtggaactgtaagtccaattaaacctctttttcttcccagtctcaggtatgtctttatcagcagtgtgaaaacggactaatacacatggtaattccatgtttaactttttgaggaacagccaaactgttctccacagtggctgcaccattttacattcctgccagccgctcatgaagcttccaatttttccatatctttgccaagatttattattgtctgtctttttgattgtagcctttctagtgggtgtggagtggtatttcattgtggtttgatttgcatttccctagtaattaacggtattgataatcactttcatgaacttattgccacttgtatgttttcttttgggatacactgtcttttccggtcctttgcctattttacaactggtaccatttgtctttttattcgacttctcttactcatcatggtatccggatactagatccttattatactatctcattgcgcaatatttcctctcattccggggtattgccttttactttcctgacagggcctttaataaccaaaagtttcaattccaaaacaaaactacccc

SEQ ID NO: 542557 - DNA, 221 bp, Homo sapiens
ttttttttaaaaaaacccgggtttcttggcccaaaattgtccgttttcaaaggttgtttaagcccccccagggggtttttgggggggtaaaccaaaggggggaattttcattgggccccccctttttaggatttgaaattaggtttctttatttttccaggcggggtccggccccggttttttaaaattgggttcttccattaaccctggggggcttggga

SEQ ID NO: 542558 - DNA, 440 bp, Homo sapiens
ataacattcttgtttatcacccattggataccatagaatataagctccacagaggcagggtttttaggtttgcttggggttttttttatcttatgttcactggtgtattctccaacatcatataaaactaatgacctggcaagaataagtagactgttcaatacaatacacgctgaataaatctgttgaaccaacgtgtatatgcatatgtctttttctggaaacagaattcacagtttttatcagattaatgaagtgatctgccacccaaaaaaggttccccaatcctttgttctcaagctttaagtggttaaggaacaggcaattccatcctcaaagaccccaactctcaaaaaaagccaacaaaaccccaaaaacactcacaccacgactccgcatctcaccaagcgcagacaccaagttcaaatttcacactccca

SEQ ID NO: 542559 - DNA, 422 bp, Homo sapiens
agatccctgtgcagacaatattgcttatgaacattggtaaaaattcttaggaaaacagtgccaaactggttgggcacagtggctcatgctggtaatcccagcactttgggagattaaggcaggtggatcacttgagctcaagttcaagaccagctgggcgtggtggcccatgcctgtaaccccagcactttgggaggccaaggcgggtggatcatgaggtcaggagatcgagaccacagtgaaaccccgtctctactaaaaaatacaaaaaaattagccaggcgcagtggcgggcacctgtagtcccagctactcaggaggctgaggcaggagaatggcgtaaacccaggaggctgagcttgcagtcagccgagatcgtgccactgcactccagcctgggtgacaaagtgagactccatctc

SEQ ID NO: 542560 - DNA, 780 bp, Homo sapiens
ggatgaccttgggcacattacacaacctcactgtacctcagtttccttcatctataaactgcctccctagggttgctgatgtatgttgatctattacaaaggactgaaaacagccactggcacataggaagccctcacgtaagtgttcaccattatttgtatgattaccatatcctgtgcaaggtccctcctaagatgtaagctgccttaggtctccaggctccccctttggaatgtgagccccttacagattcagtacctgatttctgggcttcgaggcaagacagacatggccaaggggagaaaagcagtattggaaggatgctcccagacctatccaccaaagtgagacaaagcattgggtgaaccctcttctcagtaccagcttcacagaatagtaagcagctgcagcgtggggctcagagtggctttggcttctgtgcttacttagcaagtgatccgtcacaagttctgccagctccctttggaactctgtcaccccgctcagccatggacaagcagacagccacggatattatagacaatgcaagtctggagggttgcatctctgatatgggaggagtcagagtaatcctttccactcttccccgaagatgcttttcaaaagaggagctgctttgagttttgaaacatctgagtctttcagaaggaatgtggggaagttcaagggggttttcttgcctgagaatgtgattggcttcagaaggggaaagccagaggcctttttttttttctccttttttggggaaaaaactgttc

SEQ ID NO: 542561 - DNA, 176 bp, Homo sapiens
cgttccctgtacttcccggggagtgtgtgggttgggttcgtaccagcatgtagactaggaactgagccccggaaagggggatgttttcctggtgtttggatggtcatgctgggatgtgtccgatcatctaggggaacgatcataccacagtgtgcactacagctagcccgagggcc

SEQ ID NO: 542562 - DNA, 181 bp, Homo sapiens
cccctgagttacctcggtactgtcatcggcgactcaactcccgccgcggcagatccaagagatggttgaggagcacggaaacaaggtcgtgcgcgctttggtcccgctatctgagatgtttggatacgtcggtgacttgcgctcaaagacctccggacaggcttcatactccatggagttt

SEQ ID NO: 542563 - DNA, 841 bp, Homo sapiens
  misc_feature (659)..(659): n is a, c, g, or t
ctacaaagctacaaagacattggaagactatacctattattcggcgcatgagctggattcctaaagcacagctctaagcctccttattcgagccgagctgggccagccagggcaaccttctaggtaacgaccacatctagcaacgttatcgttacagtccatgctgttttgtgagatagagtcgtctcgttcgatagtgagatacgccatcataagtcggaggcttggggcgactggagctagattgcccctagataattcggtgacccccgactatggagttttccccggcgtaaagcaagcataagcttctgactcgtgtacctccctctctcctaatacctgactgcatagtctgctgatagatggaggaccggtagtcaggtagacaaggtcgaacacgttgcgtacaccctctccttaggctagggggacactatctcccacgcacgtggaagcctccgttcgatccatatacgcattcttctgccttagctagactagtcatggtgtcctccatcatattcttaaggggccgattcaataattcagtcacgaacatagtatatcaagtataataagtccccatgctcaataagcgaaatatcggaacgcccctgcgttcgtgctagaatccggtgcgtaatcaccagcaagtngtactttttgcgtatctgcgtcccagtcctgggactgctggcgtttactagtactactaatcggagcagcaagcttcaagatcacccttcttcgaccgcgccggaggaggcgagccgatacttatgacaatcactagtcgagttgcggcgaccgaagtgatgtctatctacaggttggaata

SEQ ID NO: 542564 - DNA, 103 bp, Homo sapiens
cacgaggaattgcgcatgcacagaggttgactgaactcactttccatgcggagggaccacagctaacaaccagcacaggcgctgtgcagatagagtggcttga

SEQ ID NO: 542565 - DNA, 388 bp, Homo sapiens
tagcctgggtgacaaagggcgcctatgtctcaaaaaaaaaaaaaaaaaaaaaaaaaaaaaaaatatatatatatatatatatatatatatatatatatatattattaatactttttttggtaaaacagcctctccaaggagcaaatttgtaaatataagcctaaactctatggcaaaataaagtatcagaggttgaattccaactatataggaagcacatgggaacgtagatgactagaaatacagatataggtatattaattagcaatgagatatgtatttttatacttaatgaggtcatataacacaactgttttgtatttagttatatttagtctgagctatccacaattttttaaaatttaaagccctttgtttcaatatcgcg

SEQ ID NO: 542566 - DNA, 100 bp, Homo sapiens
ctgtttcgatctagaggatcctgccttattgtcagctggtggctcacctggagccactgcccgagcctgcgaggtcaccaacagcctccgcaagatttcc

SEQ ID NO: 542567 - DNA, 535 bp, Homo sapiens
tgttacacttttcattctatggtgttcatagtgcacaacggtaccaagtaagtaaatacaaacaagtctcttctttttcatagctaaagcaaaataacgatcttcttgatatctgtactggtcaggaggcatgagttcggggattacctgtaccgtaattaggtaagatggcagtgaccaatgcccctgataaacaccttcctctccgtctcatgtcaccgtgacatgagaggtacgtggggacgcgtacgctaggctgggagtgtacgtgggggaactcattcacagggcaggtctgaagtcagtggcaatcgcgctcaccatgctgtagtgagaacttgggtgggttactatgaccgctctaagcctcagtatcttgctctatgcaaacagggatagtggccctggaaattgtctctgttcagagcattcaggtcaatgatgggcagtggaaagcagtgggccctggaagtgaatggcacactatgctcgctggggtctagaacaacgttatactgcgtcgggcacaagcccc

SEQ ID NO: 542568 - DNA, 365 bp, Homo sapiens
  misc_feature (42)..(42): n is a, c, g, or t
  misc_feature (60)..(60): n is a, c, g, or t
  misc_feature (74)..(74): n is a, c, g, or t
  misc_feature (81)..(81): n is a, c, g, or t
  misc_feature (88)..(88): n is a, c, g, or t
  misc_feature (106)..(106): n is a, c, g, or t
  misc_feature (162)..(162): n is a, c, g, or t
  misc_feature (164)..(164): n is a, c, g, or t
  misc_feature (169)..(169): n is a, c, g, or t
  misc_feature (211)..(211): n is a, c, g, or t
  misc_feature (213)..(213): n is a, c, g, or t
  misc_feature (271)..(271): n is a, c, g, or t
  misc_feature (286)..(286): n is a, c, g, or t
  misc_feature (301)..(301): n is a, c, g, or t
  misc_feature (327)..(327): n is a, c, g, or t
gggtaccccgggctgtaggaattctgcacgaggtgtttttgnaagcgctcaaccatatgnctctagaatacacntctgttntgtgcangcgaatattcgatgactntgggactcaatactctaactctggcttcctgtgaggcgtgtatgaacctctctatnangttancagtgagggactaaagaactcaaggttaaccgcgggagaagncnaacactgtgtcaggattggaacaaagaaacgcggtttatttgcgttagcatttatacngggaggagagaaatncatattcctgattcnaggtggaaggagtgaatatggagcanctttggcatgggaggggagctcttgctggaggaggact

SEQ ID NO: 542569 - DNA, 164 bp, Homo sapiens
cctttgacatgcatggcgtcgaaagcttgggcagcacagttccaagcttcggtcagtgcgaggcgagtgtcaaacccgcgtcaggtcagcacgtagtccgctggctccaacgctggcggcaggttgacttcacccaaggcggagaggatctcgcgctccaatgt

SEQ ID NO: 542570 - DNA, 188 bp, Homo sapiens
gacgctctctcggtggggggttgggataaatcaccatatctgggcttctatcgattagtggtgattaattatgtggacaggtgataggcagtcaggtggtttctacttccgggggattaccagcagccaagtctgccaaaaaggagcaagtcgggacaatgcatatataatatgatgttttatgagtg

SEQ ID NO: 542571 - DNA, 137 bp, Homo sapiens
tctggtgggcatgctggcgcacgcgttcggtatcagtgccggcgaccgctacctgtccccggcgcccgtataccacgccgcacccctgaagtggtgcggcggtgtgcacgccctcggcggcaccgtggtcttgatgg

SEQ ID NO: 542572 - DNA, 367 bp, Homo sapiens
tctagaggatcccggtgtcccttgtctgtcttagagacggagtttgctctgttgcccaggctggaatgcaatgtcacaatctcggctcactgcaacctctgcctcctgggttcaggcgattctcctgcctcagccttccaagtagctgggactacagacgtgtaccaccatgcccagctaatttttgtatttttagacagagatgaggtttcaccatgttggccagactggtctcgaactcctgaccacatgatacgcccgccttggcctcccagagtgctgggattacaggcgtgagccacagtgccctaccttaaaaacaatttttttttttacctttggttaaaaatgacgacaaagggaaaca

SEQ ID NO: 542573 - DNA, 393 bp, Homo sapiens
  misc_feature (136)..(136): n is a, c, g, or t
gcagccttcttcaggtagatccacctagtaatgcatatggctgcaaaggatactttgaaggtttaaatagtgatttaaaataataaaataatttgtctggtcttgtgtgctttctgtgctgaattctccacatttntaactgtttaagctagttttagagtatgatatgttcttaagcataatactcccatgtctctctctagaacataataatggtgtgtgatcgattggtatatttttgatattacatctgttgtaatttatattgtgtgtgcatttatacatggttgtctttttctatcaaatacctgttcatctttgtatgtaattttcttggcttaaatggtctaatttctgaatgtgaataaatgctttatttatttaaaaaaaaaa

SEQ ID NO: 542574 - DNA, 735 bp, Homo sapiens
cccggtccgaatcgtgcccagccagttgttgtgctgccttcgtcttcccagcagcctgtaactcagtgtgtgtacttcactgaatgtgatggttagaaacttcgtggatagttgtggaaatcatccaattaaacatactgcttaaaacagtgttgctgtgacttcaggagacaagcctgggaaggggcaccttaggaagccccttcgcttgcagtttgctcgcttctggggtgtgctcccttcgaaggcccagataagagcagggaacactgtgtgagcacacagagcagcatctgatgccctgtggtgtaatggcatgtgccccactgtaatactgaccaagtcacgtgtggcatgaggcgccacgcctatcgcaaaggctttcacttatccaaagagcatagcgcgtggctccacccagtaccatgtcctagccgtgtctgcatatgtatagtggtaatattctttatgtataagtaaagtgtcagagtagcccgtagagaaagagagacaaggaagaacccaggcaacggagacgacaaagacaaccaaaaggtgccacacggctctcatataaaaaaatacatgaccgccaaagaggaccggcaccagaatcgagagccgaccataaaagtcacgccagaggcaaaaggaagtcgcccaacaatgagaatggcaacggaacccacgcgaacgcagacaggcacggacgtacaacatgacatctgaactgaa

SEQ ID NO: 542575 - DNA, 109 bp, Homo sapiens
gcatagaaagagcagcgtagtcgtagtagcccgtggtagccaggtagagaccggtggcacgaactaccagctgcttggcaggcatcccaagggcacatcttaacgttgg

SEQ ID NO: 542576 - DNA, 483 bp, Homo sapiens
accaatttcaaatctggtcttctcggcttagcggctgaagactgacactgcccgatcgcctcggaagccccctagaccatcacggatgccgagctttagtataagaagacaggaatgtcaggcctctgagcccaagctaagccatcatatcccctgtgacctgcacatacacatccacatggccggttcctgccttaactgatgacattccaccacaaaagaagtgaaaatggcctgttcctgccttaactgttgacattatcttgtgaaattccttctcctagctcatcctggctcaaaagctcccctactgagcaccttgtgacccctactcctgcccgccagagaacaacccccctttttcctttacctacccaaatcctataaaacagccccacccttatctcccttcactgactttcttttcggactcagcccacctgcacccaggtgaaataaacagctttattgctcacaaaaaaa

SEQ ID NO: 542577 - DNA, 411 bp, Homo sapiens
aagaagaaacagcgccagaaaataaactgacattaggcaatctgtcaaaagagttatgttgaagaccgcttttgacttcttttatgacatggacctttctacgatatgggcactgaaactaaagcaaatggtggaagaaggtttggttccatgtagaaatatttttagagaactgaaaaagcaaaatgataggaattatgatgtttctgtaaagttacaccaagtgtgcctgcctctcctgcctcctctctcaactgttacacattttccatctctgtcacccctgagatatcaagactaacccctcctctttctcctccttcttagcctactcaatggggaaaccatgaggatgaagacttttataatgattcatttccacttcataaacagtaaatgtattttctaaaa

SEQ ID NO: 542578 - DNA, 200 bp, Homo sapiens
ggaaggaaggagaagcaggcctgtcttcatgtccaggcaggattcacatcacccgtgctgcaggcttgtggggggtcgcagggtggtggggcgggactcgggtgtgagccggtgcgaggcggtgcgggatgctcttgatgcactgtctgcgtggggcctccgggtggccgggaggtcgccctgggaagttggtggtggct

SEQ ID NO: 542579 - DNA, 515 bp, Homo sapiens
  misc_feature (504)..(504): n is a, c, g, or t
tagcagggtatctgggttctacagtgcacacagcatgtagctctgattcttcctgcattttttttttgtgtggatgacagcgtctcactccgttgccaggtgggagttgcaggggcacgatctcggctcacggcaacctcggcctcccaggttcaagcgatttttatgcctcagcctcccaagtagctgggaccaggggcggacgccacctggcccagccaattttggtatcttcagcagagacggggcttcaccattgtgggccagggtgggtcttgatctcccgacctcgtgatctgcccgcctcggcctcccaaagtgcggggactataggcgtagagccaccgcgcggggcctcttcgggctccttaacgtggctgctcaaaactcttaatctctgcgactcattttaccctttcattgggggcagagaagaaggggaaaggtgtgtaaatcaatagaacgggaagtggtgtctatcccgtgtgtggcgtggctaagcanggcacccagcc

SEQ ID NO: 542580 - DNA, 895 bp, Homo sapiens
gtcgaaggctaaggggagggtgcgaaggaggcgcctgcgtgcaaaactgcgggcaattgaaaaagagccggctaggacttccccaaaacttgtggggaactccgggccgcgccggcagcaggagcggaacgcagcgcagcggcggcagttgccgggagatgcgagcatagaccggactgtgagcacctttccctcttcgggctgtaagggagcgagacagccaccggagcgaggccactccagagccggcagcggcaggacccgggacacaagagtagccccgagacacccccagacgtagcgggcgctccaggtgatcgagtccacgccgctccctgccaaggcgaaagggacgccccctggcagcccggccggtggtcttccctcccgggatcaaacttttcttgcaagccctttggaccaaacttgtcgcgcgtacaccggtcgccaagcgggtccggcgtagagcggctcatctatagcgagatgtctgagcgcaaagaaggcagaggcaagggggaaggggcaagaaagaaggactgggatcccggggaagcccggggcccgacgaagggcagacccagatgcccaggaaatgggcctccccagaattggaaagcgacactgagagcccagggagtacaggattgcatgggcccccaaggctccgtgagcttcgggtgtgaaaccaagcttctgagatacgtccctcactcagaattcacgtggttcccagaccgggaagtgagcttgagccggtagggaataaacccacaaaagttcgggatccagaagcagcccaagggaaggtacaaggcttgaatcaagaaagcgtccctggttaatcgggagagttattgcaagggacagagagtatggaacgactgtgcttgca

SEQ ID NO: 542581 - DNA, 782 bp, Homo sapiens
gggtgttaacgccaggacgctgatgcgtagggttctcgtctggcagaccctctggagcctggtcacgattgccataatgtaccacaacagtagtcgagaagcgggcgactgggaccttcgtccagcgaggtagcagctggcactgactgcgggttgtaagccacaaccgtcaggattcagatgcaagagccgtggccaaggggaaggtgcttccgaatgatccagtctttcttgagccctcatgaagaagtgagactcgtgcgaatgactgatgagaaaaggtggatttgggatgtccgtctcggggttcaagccagagaatggcaaagatacttgtgtgtgggtgttcacgagtgtgtgtagtgtttcacagaagggttgatatctttaagtaggctcagtaggggaatatcaccgccaggatatgtgtgcgcccactgggttcatctgtggggctgcagaggtaggatgaattcaatgtatctacgctcctcagttgtggaagcctccgggagcagtcctcttggtacatggagaaggcagtgtcgaacatgatacgtgggatatgaactagtttttgatacagcaactgaattccatgttatgtccacgatccttacagagccatttgagggctgcctcatcgattaagaccgctatcccatatgcgagtccgcagattgaggacaacagtgatgaggttctgatagaactggtggcggagcttacttttatatcacttccaatgcctggtgcaatatcaaggcccaggggatacatga

SEQ ID NO: 542582 - DNA, 413 bp, Homo sapiens
aggcccagccagagcctgtcgggagaagaccagactctttacttgcagtaggcaccagaggtgggaaggatggtgggattgtgtacctttctaagaattaaccctctgctgctttactgctaattttttcctgctgcaaccctcccaccagtttttggcttactcctgagatatgctctcccaatcacgagagagaacatgcggtctgccaagcatgccactccttctcttcgaactcttccctcccctacaccctcccgtcgtcttacaatacagtctctcagacaagtgtctctacatcgatgtgaactccttaactcatcaagtaaggtggtactcaagccatgctgcctccttacatcctttttggaacagagcacggtatcaataataaactaataataatatgccaa

SEQ ID NO: 542583 - DNA, 234 bp, Homo sapiens
aaagcgcccaaaaaagattttttccccggggtggggaatcccggtagcaagccaaaaaaaggggggactttggccatttccccctttttttttttaaaaaaaaaaatggtttaaaagccccctttttttccgtttttccccgggggaaaaaaaaataaggtttaaaggttttttttttaaattaagccaaatttttttttgtttttttaaaaaaaaaaaaaagggggcccccca

SEQ ID NO: 542584 - DNA, 127 bp, Homo sapiens
  misc_feature (65)..(65): n is a, c, g, or t
  misc_feature (85)..(85): n is a, c, g, or t
gcttaatgagggcactatggggcctaaaggtgtgaatacagagacatgtgtaagaatgggccggnaggctgaagatcttggaggnggctcctctgatgtcccacaaattcccatggagcccgaaaat

SEQ ID NO: 542585 - DNA, 1441 bp, Homo sapiens
atgccctctgtgtctccagcggggccctcggccggggcagtccccaatgccaccgcagtgacaacagtgcggaccaatgccagcgggctggaggtgcccctgttccacctgtttgcccggctggacgaggagctgcatggcaccttcccaggcctgtgcgtggcgctgatggcggtgcacggagccatcttcctggcagggctggtgctcaacgggctggcgctgtacgtcttctgctgccgcacccgggccaagacaccctcagtcatctacaccatcaacctggtggtgaccgatctactggtagggctgtccctgcccacgcgcttcgctgtgtactacggcgccaggggctgcctgcgctgtgccttcccgcacgtcctcggttacttcctcaacatgcactgctccatcctcttcctcacctgcatctgcgtggaccgctacctggccatcgtgcggcccgaagctcccgccgcctgccgccagcctgcctgtgccagggccgtgtgcgccttcgtgtggctggccgccggtgccgtcaccctgtcggtgctgggcgtgacaggcagccggccctgctgccgtgtctttgcgctgactgtcctggagttcctgctgcccctgctggtcatcagcgtgtttaccggccgcatcatgtgtgcactgtcgcggccgggtctgctccaccagggtcgccagcgccgcgtgcgggccatgcagctcctgctcacggtgctcatcatctttctcgtctgcttcacgcccttccacgcccgccaagtggccgtggcgctgtggcccgacatgccacaccacacgagcctcgtggtctaccacgtggccgtgaccctcagcagcctcaacagctgcatggaccccatcgtctactgcttcgtcaccagtggcttccaggccaccgtccgaggcctcttcggccagcacggagagcgtgagcccagcagcggtgacgtggtcagcatgcacaggagctccaagggctcaggccgtcatcacatcctcagtgccggccctcacgccctcacccaggccctggctaatgggcccgaggcttagtcagcagggctctgccaggggccgaaggtcaggactcatctgggcatgccagcgtggacacccaccatgccaggggtggcaatcggttccatctcgattgattggtgatggctacccagagcaccgcattgagcgtctaaggccactgtgctgtggttgattagcaatgtctgccactggctccgatgggatgtggtggcctgaatgccggtgatttgctgttcctggggtatagcacgtccactgaaaactcacaggggtagccgggagctgctcctcactttggccagtttgtctccagaaggagttcctcagaaaaaagggcacagtggattccattgattagaaggatgagatgaaaaag

SEQ ID NO: 542586 - DNA, 329 bp, Homo sapiens
attcactgtagagtctcttctgagacggatccggcaaagcccactccccctggtgatcacaatacaacctgagatttgggcagcggcacaaattcaaactatatcattctgcccctgacccctcccaaatgtcatgtccttctgacactgcaaaatacaatcatccatctcaatagtcccccagatcttaactcatttcaccattaactcagaaagtccgcagttcagtctcatctaagacaaggcaaatctcttctgcctataaagcccataaaatcaaaaccaagttagttacttccaagatacaacaggggtataggcatttggta

SEQ ID NO: 542587 - DNA, 103 bp, Homo sapiens
gtggggctctatgaccgacaaaggacactgtgaatcacagtagcgtaaacgagatgcttcctttctaatgacaatgacagggtataggtgaaggagctaatgt

SEQ ID NO: 542588 - DNA, 492 bp, Homo sapiens
  misc_feature (180)..(180): n is a, c, g, or t
  misc_feature (334)..(334): n is a, c, g, or t
tttgggacaagcaaccgatagaaagacttctcttcaggcagttctgtgataccaaacccactctaaagaggcacattgaattcttggatgcagtggcagaatatgaagttgccgatgatgaggaccgaagtgactgtggactgtcaatcttagatagattcttcaatgataagttggcancccctttaccagaaatacctccagatgttgtgacagaatgtagattgggactgaaggaggagaacccttccaaaaaagtctttgaggaatgtactagagttgcccataactacctaagaggggaaccatttgaagaataccaagaaagctcatntttttctcagtttttacaatggaaatggctggaaaggcaacccgtaacaaagaacacatttagacattacagagttctaggaaaaggcggatttggagaggtttgcgcctgtcaagtgcgagccacaggaaaaatgtatgcctgcaaaaagctacaaa

SEQ ID NO: 542589 - DNA, 244 bp, Homo sapiens
gaactctcacttctagatgggatggcggctgggaagaggcgctcctcacttcctagatgggatggcggccgggcagaggcgctcctcactttccagacggggtggcggccgggcagaggctgcaatctcggtactttgggaggccaaggcaggtggctgggaggtggaggttgtagtgagccgagataggtaggtcttaaaaacttgattgagaattgaacttgtgtagagagttgcggtggtg

SEQ ID NO: 542590 - DNA, 148 bp, Homo sapiens
tatacatatacgaatcgagctcgtgtaccccgctggccaatggcaaacccgcatctactaaataaaaaattagccgggcgtggtggcggcgcctgtaatcccagctacttgggaggctgaggcgtgagaatctcttgaacccaggaga

SEQ ID NO: 542591 - DNA, 910 bp, Homo sapiens
agcctcccgagatagctgggactacagctctttcagtctcacatggcaacgaaaacatacttgcttactgtcttcacaatggatcagactgatgaacagatactaccaaccaatagttgactacatagatgctcacgtttgaggcctactctccacagaacgaacatgacaccgcactctacaacgcccgcctctcctccatcactatctaacccataacaaaaatgaaacttcatcgccaatcacatgactgatgctcctcctacctctcactctctcacccgcaccagcgaccacactctctcctgcacagcaacaccacttgcactcatcatctacacccactgcaccgcacaccccatctggcaccacagcccaaacgcgccctacacacccacatttacttacacaagactgcactctgccccaacagccccaccgactaacggcttctcatacaacacctgcacattaacaagaacgctctatcaagcactcacaagcatcaatgcagctgcaactcggcctccacgccccactgcgcgtccatgactactacccagctctcccaaccggcactgcactgaccacctacttcgcctacaggctcaaccgctagcaacctgacactgccaacatgctctgccgctcactgcctgctccgctgcgccaacgctactggcactgcacggctacacacacgctccggcaaaaccaaagcactcgttcaaaacgcattcgtcccagctacccccctttagccgcgcgctggctctgctaccacacgcctgcgcccacacttgcacactcatccaatcttgactgcacctccccggctcccatgtcattgccgcgcgcacccacttcgcctcactttctgatacccaccaccttcactgcgcccgcgacc

SEQ ID NO: 542592 - DNA, 425 bp, Homo sapiens
ctgcctgtacacggttaatccgagttactccttgggtcttcaggcgacgatggccaagggcttgtgacttctgcagcgacgtgactcgaaaccacgcagcacttcacagggttcctagtgtgttctctgctggtgattccccaggggaggctcctcctgctgctgttgcaggggcaccagctggtcagctgaggcactcagtgacagggcaaaccggctggcaggcagctctgtcagaccgagccttgtgttgatcggagcagcttgttcctccaggacgtgtgcgcgttcaagccagtttccaaaaagccgttcatagtatattgagcactttcagtggttttcaatgttaaacaggtttaggtgtggtttttaaaaagtgagagaaaacaggagtatttacaggtttggatttttagttttac

SEQ ID NO: 542593 - DNA, 397 bp, Homo sapiens
  misc_feature (28)..(28): n is a, c, g, or t
  misc_feature (62)..(62): n is a, c, g, or t
  misc_feature (64)..(64): n is a, c, g, or t
  misc_feature (74)..(74): n is a, c, g, or t
  misc_feature (77)..(77): n is a, c, g, or t
  misc_feature (85)..(85): n is a, c, g, or t
  misc_feature (93)..(93): n is a, c, g, or t
  misc_feature (97)..(98): n is a, c, g, or t
  misc_feature (101)..(101): n is a, c, g, or t
  misc_feature (106)..(106): n is a, c, g, or t
  misc_feature (113)..(113): n is a, c, g, or t
  misc_feature (124)..(124): n is a, c, g, or t
  misc_feature (137)..(137): n is a, c, g, or t
  misc_feature (143)..(143): n is a, c, g, or t
  misc_feature (158)..(158): n is a, c, g, or t
  misc_feature (174)..(174): n is a, c, g, or t
  misc_feature (196)..(196): n is a, c, g, or t
  misc_feature (208)..(208): n is a, c, g, or t
  misc_feature (252)..(252): n is a, c, g, or t
  misc_feature (260)..(260): n is a, c, g, or t
  misc_feature (262)..(262): n is a, c, g, or t
  misc_feature (278)..(278): n is a, c, g, or t
  misc_feature (379)..(379): n is a, c, g, or t
  misc_feature (385)..(385): n is a, c, g, or t
tatctcgcttcaggaatttaaaggggtngtttgaaataggttcatagggaaattttaggttntnttttaatttnttnttccaaantttttttntaannttncctgntctgggncagatcttggngaccaggtttgtnttgtcnaaatattctccccanataaaagcttttccancaattaccagagccttctgctnaggggtaccttnaaatgccaggggttccactacgtagaaatccttccagtcagggnaataggananaaggttaaggtaaaanggggcagaaaaaagggcccggaagccggccttggtaaaaagattaaagaatccttaatatagttaaatggaatatcctctcgccacacctgtatgattgtntctggntgaatctttact

SEQ ID NO: 542594 - DNA, 616 bp, Homo sapiens
  misc_feature (72)..(72): n is a, c, g, or t
  misc_feature (85)..(85): n is a, c, g, or t
  misc_feature (137)..(137): n is a, c, g, or t
ggaggaaccccgacaacaggacgccccttccgcgccgccgcccgcatgtgagtgccattccttggggcaccnctgccactgcagncctcagtcctgctgcatgcggaagaccgagcttgccccactcattgcgctcnggttccagcccagcaaagttattcagcaccagcccctcatgccatgcacccgctgccacccagcatgcaccctattttaagggtacagccgctgccaatggagagctcacagacctaagccttgatgaccttaaggggaaataatcggcgctctccccctatccttcggatttccaccctttgtgtgtcctacagacattcgtgcttttagcgacatacgctaacgaattttaccgttgtgaactgctgaagctgtcgcaccctcagcggattccccactttagtccacccccgcctgttaaatacacccagacaggaacggcgccttggcccacaacgacaccggactataggccgccccgaccacgccctttccccacgaccaccggggccctggtagaaagctcctggatttgcctacataggattattccatacctgcccccaaggcgtgcaaacaagaattctcccctccacct

SEQ ID NO: 542595 - DNA, 345 bp, Homo sapiens
ttatgtggatatttttctctttttaaccctataaaccattaaaatccagtcatcccttggatacgctaggggctggtttcagggcccccccatattaccaaatcttgcccatactcaagtcccccagaaagtcttgcagaacccatatgtagaaaagttggccctccagttgaccccccggacccatgagtttcccatcccatgcccaaatgctgatctgtgtgacctcccctgcatttgattgaaaaaagtatgcgggtaagtgtaccccccccgttcaaacccgtgtgtaagggtcccctgtacaaaaaagtttgtgaaataaacgtcctggagaatctttta

SEQ ID NO: 542596 - DNA, 339 bp, Homo sapiens
acaacctccatctacgttatgtactctcactgatatcctagaggagcagtctacagtatatgtctctggcagtcactctccgttcaccattcgactgtccccttttcccttgtggttccacaactcctactctactagttctctattactgattcctatactcttagcaccccagcccaaacatcatcatcttccagagttaaactcccataacccaatatataaaacaagtctacttatctctagcagtctaactctggggccaatatccacaaactcaatcacctagtagactgctactagtagatcttctggaggaatctcaaacatggtttaaac

SEQ ID NO: 542597 - DNA, 1467 bp, Homo sapiens
  misc_feature (352)..(352): n is a, c, g, or t
  misc_feature (868)..(868): n is a, c, g, or t
  misc_feature (1113)..(1113): n is a, c, g, or t
gcaaaaaacaacacccgcccgttttggatgtgtagccctccctctgttgagttgtccctccctgtggtgggacagcaacacttacccacaccccctcggtgggtgtgtcggcgccctcccagctgaggtggagacactcccccggggggcccggtattactagactccgtcgcgcgggctttatcattccatccattatgccccccccgggcgcgcgggagtaaaacaacattggttgtctcgcccacgccggggataatacgtctcggtgtttggtgccccatctatggcggccccctcatccttttattgttgggggcgcccccctccttatgtaggaacgacagcgtgntgtgttggcaccacacacaaaacaacaaaggcgccgtgggtgtaccaccccgtccggccggaatatcatttccccccccggcggatgctaatcaattattgtgttggcgcgctattataggaaggacggccgtcccgctttaatataatccccccccccctctcaaataaatcattgtgcgtcgcgtacacaccaccctctattgagggggggggcctacacacaccccccttgtttgtttatacgccacgtcctagcacaccgccgtccccgcgccgctcctctttggtggggtggggcgctatatcaaacaaacaccccgcgtctggtcgcacgatgattttgtccccagccagcaactaatacgtttctctatcgtctgcgtcggtgaaaaaactcctccctccccccagcctctcggctcgcacgctctggtctagaaagaattgttgtgagtaatcatctcgcgggcggggatgagagttattttctcttgtgtctctccctcgcgggaangagaaacacacaccacggggagtgtctctcttctctcggcggctgtgttttgagcaacacgcacccacgttggcggcgccacactctatcgccgctgactttctctcctcgcgggaagtaatgagctcccctcttttgttggcaccccgcccccctctttactcctctctcgcgagggaggacatctcacaattggtagacgcgctctcttctccccccccccagtgggtctctcatcggtcgcnccgttctctcttcttccccgcgcgttgttgttatagatacgccgcccctctcgaatagcctgagtgtttaggcccataatccctctcggcgcccccctcttataaaggtgtttttatgaaaggggatagagggtgcccccccctcacgaattgtgaaatcccccccccactcatctcttcgagaaaagttaaatacccccacactcttctcactcgcggtcccctctaggggtgttgtaaaagaggagagttttttataaagggggaaaaaaaaaaggggtttttttgaaaagggtgggggggtttttttttttttctctcttttaaaaaaaaaaagaggggtttttataagta

SEQ ID NO: 542598 - DNA, 218 bp, Homo sapiens
acacttatttattgtaaagaccagtgaccatggtatttaaaattagggtacttaatgattttcaaaggtgatttcagcttggttttgagataatcaaatgatttttactttaactcctatttttttaaactagcttttatttgaagatggaagctaagcaatgaaagcattactatattttttacattaagtggtaccaataaagtattttgttacca

SEQ ID NO: 542599 - DNA, 191 bp, Homo sapiens
ggaattttggtcagcaaaaaaacccccccctttccggggtttttttttatttggcccaaaaggttggggaggggggggttgggcaaaccctcagggcccctcctttttggggaaacccatccctgacccttaggtttttttccccaccctttgcggggggaaatttggaaaaaagggggtccggggcccca

SEQ ID NO: 542600 - DNA, 588 bp, Homo sapiens
  misc_feature (413)..(413): n is a, c, g, or t
aatcagtgtttccagcagcaaaagtaattggaaaatcgctagttttattaggttaattattctcccttatcgtagtgtggcatcagcgtggctattattcttaaattgcctctttaaaacaagggctggtgcttcttacaggcaattcctaactcttgggttttgtagagagcccaaaactctttagaacctataattcaaggaaaggctccactttggttttgcattttgtctggtgtctttggctgacagaatttatgtcacaaggtgcacatatttgggggaggctcatggacagcccatcgtgcttgtgctttggtaggaagtacgtgccgttaaggggaaggagatagttactgattctagggaacaattgggtagaaagagatggactccctgtgtttgaaattcanaactcaagcttggctctaagtgtttccttgctttgctttgctccaggggagtcactgagcagaacgaagcgagttgcctgagattcttcaaagccccagcccttttggaggttacattgttattctcagagcctttatgatgcataataaagacctagcttgtaccaatattaaa

SEQ ID NO: 542601 - DNA, 233 bp, Homo sapiens
  misc_feature (5)..(5): n is a, c, g, or t
  misc_feature (7)..(7): n is a, c, g, or t
  misc_feature (65)..(65): n is a, c, g, or t
  misc_feature (88)..(88): n is a, c, g, or t
accgngnacagcatcattatgaacggagaggccatcgcctgccctgagggctgccagtccattgntgacactggctcttctgtccggnccaaccagccccattgccaacatacagagcaacatcgtagccagctagaactcaaatgacgacatggcgtgcagctgctcagccatcagcagactgccctacatcgtattgaccataaaaggaatccagtaccccgcgccaccca

SEQ ID NO: 542602 - DNA, 232 bp, Homo sapiens
ttgttcaaccccaaaaaattttatttacaaaatttgtcctgaatactataaatccggccccatcaccatggaaacaactcccaatcctgcctggggatttgtgccccagcccaacccaagagggctttaaaaaacaaaggtgttttccagcctgcgccatacaaaaaggaaaacctttccccaatattgcctgggggggggcggtgaactcaacccccccaaaggggaaaaa

SEQ ID NO: 542603 - DNA, 423 bp, Homo sapiens
ggggctacgcacttgtctgaatctgtcatacataccactgctgtcttttccgagtggtcatcccaagcaacgatttttggtggtgtgttcgttctcaagagaaatgccaaggcttccagataaagctcaagatgataatgcattgacatggttctgctcttttatttgggtaaaaaaggaaagttgaggggtcagaacacagtagcctgattagtaccattctgtttggtcacactgttccccattagcttgtaccagttctcctcttctcggggatgtagagccacaatgtcactgtgaccaaacaatctgttcaattttttctcctcaatggcgaggtgatggtgtggcctgggtgtttctccaggagtgtgagtgggcagctctgtgggataagtcctaggtacctacatgccatctcta

SEQ ID NO: 542604 - DNA, 381 bp, Homo sapiens
  misc_feature (24)..(24): n is a, c, g, or t
aaaaaaaaaaaaaaaaaaagtttnctcccgccccttgtttttaataaacaaagagatctattttagtagtaaactgaaggtttagttgtgagcttcaaattttgtgaaccccaaatgttgggcgggggttttttttttttttaagaccaccactaaaaaaaatgcaaggaatatgtaccctggaactgtagtgggagctttcagtattgtaaaaagattgttctatacggccccttttgctgtttatcctgtatgtaataaagtcccttttagatcctatgtgaaaaaaaaagtgaagcaactgaattttcagcatgttttcatcggcggagcctttttgtgtaatgtaaactgtgccatgttattaaaaaatgtgaacta

SEQ ID NO: 542605 - DNA, 410 bp, Homo sapiens
atgcacgtagctgaggccggatgcggtggctcacgcttgtaatcccagcactttgggaggcctaggcgggcggtcaggggttcgagaccagtctggccaacatcgtgaaaccctgtctctactaaaaatgcaaaaattagccgggcgtggtggcgggcgcctgtaatcccagctacttgggaagctgaggcgggagaatcatgtgaacccgggacgcaggggttgcagtgagcggagatcgcatcattgcactctagcctgggccacagggcgagactccgtctcaaaaaaaaaaaaaatgcacatagctatcgagtggtggcttaagcttggaaacggtggaccttggcaacttccatggccaacttctgggctcctcaaacagtaaggttgggcagtaagggcacggg

SEQ ID NO: 542606 - DNA, 861 bp, Homo sapiens
cttccccttcggctttgcctggtcaggctcctgcctcccgcaggacccacctgtgtcccccagcgccgctccacccagcagtgcgcttatcccctctctgctgccagacaccccctgctgcccactctcctgctgctcgggttctgaggccagcttgtcacaccgaggcagcacttctctttctctttctctttctcttgctggcccacgagccgcagccaattggcgctgagttcctctgctggagttcatcctgctagctgggttcccgagctgccggtctgagcctgaggcatggagcctccttggagcactgggggcctcctccctggagatcctcctcccataaaccgtacgtcttgaggtctgtgtgctgtatcttcagccttcctgggagccccctgctacgccccagatctgccgtcctgcacggaggacgagtacccagtgggctccgagtgctgccccaagtgcatgtccaggttatcgtgtgaaggaggcctgacggggagctgacgggcacatgtgtgtgaacccatgtcctccagtgcaccatacgatatgcccacctcaatggactataggcaatgtttctgccgtgcccaagatgtgtgacccagccatgggcctgcgctgcgagtccgtaactgctccaggagcagagaacgcctgtgtgtggctgcagccctaggacaacttctgcatcggtccagtgacggggaccatttgctgccggtagccgcgcttaacgccacctccagcccgaggccaaaggggtgccaaaaggggaggcaccgaaaagtcaagaaacccctgagtcaagaatgccccccggggacccttctctcccaaatgggacca

SEQ ID NO: 542607 - DNA, 518 bp, Homo sapiens
caggaggctgaggcaggagaatcacttgaaccaggaggcggaggttgcagtgagccaagatggcgcactgcactccagctggggcaacaatagcgaaactccgtctaaaaaaaaaaaaaaaaaatggaacaattacacagctgtcgttggtaaccagtcatttttatgactgagagttaggcttgctgaaaataaagaactagaacacactttctagtcagcagagtgtggttggctctcaatggggttctggaaggttatatgtcgaaccaataatgggctgcccaagactattagggcatagatagagtagatctcatctccagaacagggtgggggtagctcaatttcaagccttggggatatatgatatctctggagcctgaggagcccacgacagcttagaaaatcaacggaagcataaaacatgctcacatctgaatgggtctctttggacttcatttgggaattggtgacaccaaggggaaaagcaccatgtcgtcacgggttttacaggc

SEQ ID NO: 542608 - DNA, 587 bp, Homo sapiens
  misc_feature (5)..(5): n is a, c, g, or t
  misc_feature (12)..(12): n is a, c, g, or t
  misc_feature (15)..(15): n is a, c, g, or t
  misc_feature (33)..(33): n is a, c, g, or t
  misc_feature (39)..(39): n is a, c, g, or t
  misc_feature (43)..(43): n is a, c, g, or t
  misc_feature (48)..(48): n is a, c, g, or t
  misc_feature (84)..(84): n is a, c, g, or t
  misc_feature (88)..(88): n is a, c, g, or t
  misc_feature (111)..(111): n is a, c, g, or t
  misc_feature (116)..(116): n is a, c, g, or t
  misc_feature (156)..(156): n is a, c, g, or t
ttganaatgaantanttaaaaggcagaaacccnactganttgnttggnccacagagggaaatgggaatcgcatgacctgaaggntganggaggaactgaacagaaaccatncttgnttcctgaatctgaacatggcaccctcttttcacagtgttngtatctgctcagtccggcggcccctcaaaaagaggcaatcttgattttcaaacttaaaatttggcccaaagcccactgctgcccacaatgcccgccagacacattcctcttcccttttagattctatgggaatactctctttgaagaacccatgaagcagagacaggctggtgagagaatcagcagtgatttctttgaggaggagagccgttacttcactcacagtccatgactgagtggatcaagaagaacagagcgcccttttatgagattttgtctgtgtagaccattagcttgtgaaaaatgccaaaaccatcctcgttctttaatagcagattatgttggactcttctctgcaagaagcagcatgggcattcagatgcttttaaggacataatgttctttctcatcaccagacctggtgctctgga

SEQ ID NO: 542609 - DNA, 363 bp, Homo sapiens
aggagtgtgactagactagaagatggtagaggagtgactaagttgggaggggcgacagtcacaagtgagtgggggtgacatgtgtagaagccgctgttgcaaaggagtagggtaaggatgaagtagagctaatagaatgaagggatatattaggctcataagggttattactgttctgcagaaatgcaagtgagtttaagggaagcaggggagagtacttgcgatttccaggaggaagaggagagatcaggctggctggctggcagacacagctttattctggaatggtgaacccaatacagagggtcctgcaggcggacagcagttggggtactatagatgactaagcagggtccagtccat

SEQ ID NO: 542610 - DNA, 294 bp, Homo sapiens
catctaggcttgcaaaactttggcaaggtatatggataaggggctgggcgcggtggctcatgcctgtaatcctagcattttggaaggccgagtcaggcagatcacctgaggtcaaaagttcgtgatcagcctggccaacatggcgaaaccccgtctctactaaaaatacaaaaattagttgggcgtagaggtgggcgcctgtaatcccagctactctggaggctgaagcaggacaactgctgaaacccgggaggtgatggttgcagtgagctgagatcataccactgcactcca

SEQ ID NO: 542611 - DNA, 972 bp, Homo sapiens
  misc_feature (538)..(538): n is a, c, g, or t
aggtgggtccagcaatccggttaggatcgcggtgccgaaaaaatgactgaggatccgaaattgaatgtactacctgaagaccagtcgcgtacatcagtgaccacatgtccctgagcattcgtcgacgcgaatgataggctccggcccgaagcgtacaaccaagctatatatcgaagcctgataccaaacttcacacgattctagagtcgcttctgttcatattgccattgcgtattgaaaccaagggtgtaggctcaccaaagtcctgtacacgggcaagagaatctatatatttgaggcgacacacccagttgctcaggaccaatgcaaccgcgtcacataaacttgcctgatcaaaatgttttccctagatttttcaacagcgcggaggcctcccttggtgccaacatttctttgcaggctagcctacaacattcaaagagtgcaccagggatgtgcggtgttacgatttccagaaatccatcagcgcatgggacctgcaactgtggaaaatgtttaattgaccattgcagaagtnccttggttgcagcaataattgccttgtctcgacctaatccattttttctgttgcccagaaacattgagccccaaactactaggggacaattacaggacacttatcaaagagacaccaggaaaccagtcactgaggattaagaaacaatgcctccccattgtgtgtgtatcctgtccccggggaatctagacggaaagaggattggttacaaccagttcatgaagcagggattaagcagggttctttctgcacatggggctactaatcctgacagttacaacaacgtgatcccaggaattgaaattgcgcgctctggtggaagatgtccaattctggagaaacctaagacggtccatgcaatggatctgggaccgaaccttccagaatggattaaataggaacacagagaatagtgaaaacctgttcccgaaaaa

SEQ ID NO: 542612 - DNA, 298 bp, Homo sapiens
  misc_feature (215)..(215): n is a, c, g, or t
agaaacaagagcgaaactcctgtctttaaaaaaaaaacagaggtgcattatttggcaataaaaaggaatgaagtactgatacatgctatatcatgatgacccttagaaacatcatgctaagtgaaagaagccagccacaaaagaccatatattgtatgatttcctttatatgaaatgtacagagttgacaaaaccatagagtcagaaagcagatnagtggttggtagggtttgagaagagggggaaaggaggagtgactacttacctgcaaaccaaataagagggatccatctaaaaa

SEQ ID NO: 542613 - DNA, 381 bp, Homo sapiens
  misc_feature (9)..(9): n is a, c, g, or t
attcgcggncgcgtcgaccccctctggccccaccgccgcacaacgggttgccagcgaattgctcgaaggcatcaccccggccttgctcgacgagcgttttgcccgggcgaccctctattactctcagcgcgagttcgaggaacaactgctgctgcgctgcctggagcccgggcaggacttccaggccctcgcccactgggggctggagcatttccagtggctgagcccctggcaacgcgccgacttgccgaaacaagcattgctcgaactcgatcagcgtctgttcaagagcctggaagagccctgcggcctgcttgggcgcggggatgtcgaaggattctggcgcgaatactccaacctggagcagctcggttggctcaa

SEQ ID NO: 542614 - DNA, 359 bp, Homo sapiens
  misc_feature (12)..(12): n is a, c, g, or t
  misc_feature (41)..(41): n is a, c, g, or t
  misc_feature (72)..(72): n is a, c, g, or t
  misc_feature (343)..(343): n is a, c, g, or t
  misc_feature (345)..(348): n is a, c, g, or t
ggaataaggggnccataaaagccttgccccaggcccaaagncccagaagtttttccccaaggttatcctccnagaattttatgattttaggtccttagatttaaagtcccctgatatatgttgaagttgatttttgtataaggtgagtgatgtggatcccaatttcattcttctacatgtggcttgctagttatcccagcaccatttgttgagaagggtgtccttttcccactttatgtttttgtttgctttgtcaaagatcagttggctgtatttggctttatttctgggttctctattctgttccattggtctatgtgcctgggtcttagtgttttgcttnannnnttgacaaacgt

SEQ ID NO: 542615 - DNA, 534 bp, Homo sapiens
ccaccttatgcgtgggtatggtggccagtccaatttcatggcattgcttgcagacccatggaacattcaaagtcttaggttacgtgtgtcgcccagggcttaaaatcaccaagtttgttaaatgcacagtattagcagctgtctctggagttattggccagcctattttttatttttatttttttaagatggagtcttgctctgtcacccaggctggagtacagtgattgtcctgcctcagtcttctgggtagctgggaccacaggcaccccaccatgcctggctaatttttgtatttttagtagagatggggtttcaccatgttggccaggctggtctcaaaccccagacctcaagtgatccgcccaccttggcctcccaaagtgctgggattgcatgtgtgagccaccatgcccggcctcattgtgattttgatttgcatttctctaatgatgagtgatgttgagctttttttcgtatgcctgttggccacatgtgtgtcttcttgtgaaaagtgtctgttcatgtcctttg

SEQ ID NO: 542616 - DNA, 271 bp, Homo sapiens
cgcgaggtatatccaggctgagtgcgtggacaatcttggctcactgcaacctccgcctcccaggttcaagcgattctcgtgcttcagcctcacagtagctgagattacaggcgtgcacccccacagccagctaatttattttattttatttttatttatttactttttgtgtatgtgaaaaagagtctcgcactgtcaccgaggctggaatgcagtggtgtgatattggttcgctgcaatctccgcctcccgggtccaagtgattctcctg

SEQ ID NO: 542617 - DNA, 583 bp, Homo sapiens
  misc_feature (26)..(26): n is a, c, g, or t
  misc_feature (63)..(63): n is a, c, g, or t
ttgaaatgtgaatttatggataggtngtaatttagttattagtatttggtttatatttaattnagaagtaaaaatgagaagaaatttggtatttaaaaattgattttaagggttggtaaaagtatttttttagtaagttttttattggatatttgtgattaatgtttatttatgtaatgtttttgtatttgaattgtttatgtatgttttttattatattgatttaataagaagattaatttatgttggtatggtgatggttttgttatggtaaaattaaagggttgattatatatggtgttttttgggaagggggatggtgtggggttgagtatttttgggttgaatgggaatgggttagattgggaagtttaggaagagagttttattgtagattttttaggtattgttttgttgaaataggaatataagtttttagtaatattttgatttaattgggtgatattgataataaagtatgttatttagatttatttaaagtgtgtataattgtatttgaaatgtgtttttgtgtgtgtgtgtgtagaatgggtaaataaaattgttgagtaatttgaattta

SEQ ID NO: 542618 - DNA, 252 bp, Homo sapiens
tgggacacctaccctgggggacgtgactggacatggctgtgaggaatctcaatgatgagaccagcctgaatggcgtactatggagggacatcatcgtggttgaatgggacggatgtatggaaaacaataaaatcaatctctgccaagtcttcccattataaacactggcctaccggtttcctcgtgagtgacgtgactctcaacccaagacgagctcacaagaagatgtctctaggacgtgagcatgcactg

SEQ ID NO: 542619 - DNA, 305 bp, Homo sapiens
tcttctccttcccacttctctctttcccttctttccgcttctattctttccttccttccctcccattccatgtttaatccttattttagaatagaaagaatcagagttgagaccttgtgcaactttgaacttgcatcttttcttttgaacattcatagttgtttcctaagtagcatcttctttatctcagaggctgaatggctgtaatgtgcaaaaggtttgtgaggccaagctgctgagcagctcaggcgaactcacggtcagggagatccggggcctgcgattctgcttctaggtcctttctc

SEQ ID NO: 542620 - DNA, 123 bp, Homo sapiens
tagagaagctagtggtctggatcctgggtgcggagctcgagaagtagtcgatcttgagagtggcaggcaaaagtatcccagcaccagaaatggcagagagaggtcccggaccggaggcggcag

SEQ ID NO: 542621 - DNA, 712 bp, Homo sapiens
gcttcgatgctgaaggaagatgatggctgactgtgaaccccgtcatggccgatagctcaccgtggttgctgtcttccgtggtcggatgtccatgaaggaggtcgatgagcagatgtttaatgtgtagaagaagaaaagcagatactttgtggaatggatcaccacaacaatgtcatagacagccgtcgtgtgtacgatcccgaagcctcgtggaccgtcgaagatggtcgagtcaccttcacttgtgcatagtagcagagacatccaggcagcatcttcaagagctatcgtcggcatcagttcagtgccatgttccgccggaaggccttcctccactggtacaccaggcgaaggtgctatgcgcacagaggattgggagttctaacccgcaacgtgttgtgattagccacaatatgaaccgatcttcgtcatctgagctcatctgacgcagtatcaggcatgcctcacgcagaagcaatggaggacggatttcaggatgaggaggccgaataggagagtctaaaggtcatgagggcccctagtcaacttcaatgcttcctcgaagtgcccgttaaggtcgggtatctactcaaacctggtcccatttccatcgtccacttccagacattaagttagttatgcttggcactcttatcttatgctttgattggtttctattgcattcatggggggggggggtcgtaagtacaca

SEQ ID NO: 542622 - DNA, 193 bp, Homo sapiens
  misc_feature (62)..(62): n is a, c, g, or t
  misc_feature (187)..(188): n is a, c, g, or t
agaacaaaaaaattaggaaagcaatgtctcatccaatacagaatatcaataaagagattganattgtagaaaagaaccaaatagaaattctggagttgaaaagtattataactaaaactgttcactagaggtattcagcagcagactggagaagtcagaaggaatcaacaggcttcaagataggtcnntgatt

SEQ ID NO: 542623 - DNA, 85 bp, Homo sapiens
ctgtgacccaggagttctgggataacctggaaaaggagacagagcggcctgaggcaggagatgagcaaggatctggaggaggtag

SEQ ID NO: 542624 - DNA, 136 bp, Homo sapiens
tgacttcatccgccactctgttgtgcagcccaccggccttccttctaccctgctgtgatgtccaggcgtttgccgtcctccccaactcctccctggcttccctcttcctgattggcatgaaaggcctggacagggt

SEQ ID NO: 542625 - DNA, 1777 bp, Homo sapiens
  misc_feature (1697)..(1697): n is a, c, g, or t
  misc_feature (1722)..(1722): n is a, c, g, or t
  misc_feature (1777)..(1777): n is a, c, g, or t
ttctatctgaagcttagagatctagagcttaggatctttcgggtatatgtccaatggcaggtcattattttatcaatcactttgccattgcaccatgaagtgggttccatgggggcaacacaccatgcagctgtgcaaccattggtcagcaacacacagccatcatcattccatttcaacaactttcctatgctattatagccagcagagcaagccctgtatcatcgttcaccatagtgtgcacatttacagtcagtttcaacagcagcatagtattcgaacacacacattggtacgccatggtttatagtgcatagccacattttgcgggacacattggtatatcacgtatcgcacgacagtgctcaggatcgcattctaataacaaaacaaaaattcccatgcacacacatcacgttgacaccaatcaatgtatgtagcaggcaatatataattctatatatcgcgtctatttccaaagtatattatatacaatattaaatgtcgtagcagaaagcgggacggaactactaggcgtacctataaaccagccacacacaggcctaagagcaagttagcacaacgtgagggcagacaggaatacctaatggaggactataccactggcgacaacaacccttaacacaaacacacaccaccgaggggtatcaccaaaagaccagaatataactacccatgagaccctaccgacagccctccgcggaggaaagaaatcacggcacgatgggcgcacacatactaaccaaaagcgagcgaggacaccccgagacacaaacagccaagcaagactacacccggggggcccatacaaagagtatctgacagtgcataacataatcaaaccacagagactcaagcaacgcaccccggggagaggacatcataaagagggcagaatacacatagacatcgagaggacacgaacaggggatcgattgaggactcagtccacaaaagccttacccgatggagaacaccattcgacacaggaataggacagatcaccaaacatcgttatgaggcgcatacagaggggcgacatactcctcacaagaacagacgtgggcttagtcgaggagaaagtacaacgcaaagcgggattggtatcgacaagcacacatccccaggaagggccccccggaggagttgcacaaggaaagatgataagctagatgaacgtgtagggaccaatgacaacaacgtaaattatgccaggacaaatatgatgatgagccaacatattgggaagaacacgagacacactgtaatggggcacaaacccacaagctaaacgaaccgcgtatggccaacatgagaacacaacaggaacgcgtatcagacgacaagttatacgtggcctcgaagcaaacacagcgtgcaccaggcatggcgtaaaacgataaaagacggacacacatgggcgaagacaacaccccaacaggccaacgaacacagggaataaacacactaaacagacaggtggcgaggcatcgaagcaaacagcgcgaacacggaaacagtatccacataccaagacatgatgagatctcccagcacacacaactgaggcactgtgctccgtccaatctaacgagccgtgatgaagacaacattatacggaagaagaagatcagcgacaagtctagaatacggaagatacttgaccacacacagcncatatcggaaacggcgacgcgccancaaacaaggcaggctcagcacgaataagtatgatcgacaggaacacaaacacacn

SEQ ID NO: 542626 - DNA, 244 bp, Homo sapiens
agtcgtattcgcctgcctcttccatgtgacatggtggcgatcaccgcttcctcctcagcactcgcatgtcagcctgcctcttccatgtgaaatggtggcgtccaggttcctctccagcatcgcatgtcgctgctcttccatgtgaaatggtggcgtccgggatacctctccagcactcccatatcgcctgcctcttccattgtgaattggtggcgtccggggttcctcctcagagctcgtatgt

SEQ ID NO: 542627 - DNA, 519 bp, Homo sapiens
gtctcatgtaattctgatagcagaattgcattgtgtgaactgtgtaactttagtaatgtaaatcaaggaacatcagttaagagatttcctaatttattttttaactgaataaatatcagttaaaagattgccagcatggttacaggtaaactgattttcagaattcactgaactactaaatgtgggattggataatagacttggagtgcccgctgaggctgagatctgtggccatttacatagcacatcattcctcctatagggatgaactttttttccgacacaaaaagtagccactgcggttaaagctttgcttattgtaacaggcttttatttccaggtaacctatctgtggaagacctaattctgaatagagtaatagatattactggaaactgatttgttttttttttcctattatactctgctttattgaaaaagtaaagcatttaaaattgtgctccagaaattcagatgttgtcttgcgatctttaaacaataaaatggatgatttcccct

SEQ ID NO: 542628 - DNA, 171 bp, Homo sapiens
attttcaaaggcaagcatgggaggggagaggaaagagagtggaatttcaggtggaagaattggccagaagtggaggctggcacaggtaagtctgggggacatttatgggagggaggtagagggattagaaatggccttttgcaaaatttgtgaccagtgaggccaaatcct

SEQ ID NO: 542629 - DNA, 181 bp, Homo sapiens
gacacctgcgcggaggagagcggggattccggaactagagtgtgggagccagaggcctgtagcgggcagggctcgagcactggagtagagcagtcctgacaggtagagaagtgagaccggctgcggtacagggcgggttagggctccatgcgtggcttgcgggccatgcgtggattgccag

SEQ ID NO: 542630 - DNA, 122 bp, Homo sapiens
ccctgcctcagaggcctaatgcttgctaaatggggggaaggtccaacttaaccttatggatttagtgtctgggattccagcaactcaaagtcaaaaaaattcaagaggtgggtcagaacata

SEQ ID NO: 542631 - DNA, 203 bp, Homo sapiens
gcgactctagagcatcccttatttccttctttattgagatagagtctcactctgtcacccaggctagagatgtaatggcatgatctcagctcactacaacctccacctcccgggttcaaacaattctcctgccttagcctccgtagtagctgggactacaggtgtgcactgccatactctgctgattttcgtctcctttccct

SEQ ID NO: 542632 - DNA, 408 bp, Homo sapiens
cccccgggttttccttttttttttccgggttttttttttgggggaatttgggggggaaaacatttttcccccgggaacagttttttcccttttttcccccaggttgaaatttcccccccccaaaggggaaaaaaagggggggtccccccggggggggggcccttttaaaaaagggggtccccccgggcccaggaatttgggccgaaaaaaaattttgggacccttttttaacccttttggttttttaaaaagggccaaggggtggggaaaaaaaaaatttccctttttaaaggaaacccccgaaattttttttttttttaaaaatggggggggggaacccccctttaaaaggttggggaaccccccccggggggcccccaaaacaaaaaaaaaaggggggttttttta

SEQ ID NO: 542633 - DNA, 219 bp, Homo sapiens
  misc_feature (6)..(6): n is a, c, g, or t
ctaggntggaaagcgacgtcaacaagaaaatcacaaggcacacaaagaaacagtgatatacggcccatccaaaagaaaactacaaatccaacagaaactcaccctgagaaagggtagatggcagatccactagaaacagactttaaaacagcgatcttaaagatgctctaaaaactacaggaatatgttgctatcaaaactgtataataaaacctgata

SEQ ID NO: 542634 - DNA, 968 bp, Homo sapiens
ggcaacagctgagccgtctgggaagggatgcatcttttcttctgtatgcttgagtcaagaactctaagtcatctggtaataccgggttggatgcttaaagctgcagcaaaaagagcagtaacttttcagggaaaaaagagagaaaaaaaaaaaaaaaaacaaggttttttgttttttgtggcaaaaagtttgtggggatgtgctttgtggtgtttcttggaaatccggggtgtgtttgccaaagtattaaaatttccaagcactcggggggaattgggaaaaaattttgatcgccgaaggaatatattttttacctttggggcaacaactggagactggggttttaacaacacgttgtatattccgtggggacgtgttttaaagaaacataaggaaccctttttatatagagagttttatgaacaacgggtgtggtggcaaactaagaattccggggcactaaccacccaacttaaattggtttggaaggggaacggaaaaaactgtactacgggggcactaacaactctcgcgaagggttttaaacaagtagaacgtgtggggcacgtgggtaacactatatctattatagggggtgtaacgtcccagcgtgtgataaaacgctaacagcgaaacgtgttacagcgttcgtgaacagtgtgtcataggagccacggtgtgacgcggaccccctcttgggcaaaaacaaacaattccgcggtgtcacttcctgccccttacgaagggacaacacaggagagtaccagtagaacccaagtgagggaattaaaaataccccagacgcggtagggacacacacagttgtctcccacaaacacaggggccaagcaacacggggaggggtctagacttacgggggaacgggcgggaaagtacggacagtcccggagaacacggatgctatgcgcgagaggacgcgagcgacccggtaagaacctcaggggaaa

SEQ ID NO: 542635 - DNA, 212 bp, Homo sapiens
ctagagctctcatctgccgagttttgctctgctacgctgaaccctacattggaaaggtcacatggctgagctccagctgacagcctcggaggagctcagcttcaagccatccctgcaaggtatcagccatataaatgaatcaacccagctgccagtcaagtatctttgcatggcttccatcagtgcctcatgaaacggaagattggctagcc

SEQ ID NO: 542636 - DNA, 487 bp, Homo sapiens
gcaaccactgacctgttttctgtccctataagtttatccttttatttaatagaaatccgtgtaattatggccaggcgcagatggctcacaaacgtaatcccagcactgtgggaggctaaggcgggcagatcacctgagtcaggagttcgagaccagcctggccaacatggcaaaaccccgcctctgctacaaatacaaaaattagctgggtgtggtggcacgtgcctgtggtgccagctatttagggaggctagggtaggaggatctcctgaggaggtcaaggctgcagtgagccgtgattgtagccactgcactccaacctgggcaacagggtgagaccctgtctcaaaaacaaagacaaaaaaacatgcaaatctgtagtatactatctttcgctgatgtaaacagtaactgtagataatgtaacagtttctcaattctttaatttgaatacttgtaacatatacactcctaaagtaatttacat

SEQ ID NO: 542637 - DNA, 132 bp, Homo sapiens
tagctggaccttctctgtcgcatctttcctgtcgcttttctctgatcgctcttctctgatcgctatttctctgatctgctctttctctgatctgcttttctctgatctgctccccccccccccgcttacgag

SEQ ID NO: 542638 - DNA, 178 bp, Homo sapiens
ggcgatcaggacaattagctcaccacaagacgagctgcatcttgccgccatgaggatttcttctggatgcactcgggtggggccaccggtgctgggcacaggcgcaccatgcacgggattttcttcactctgcccctcgctgcctgtcaagtctgtgtccacattgttcagcgtctga

SEQ ID NO: 542639 - DNA, 218 bp, Homo sapiens
ctttaacggatcagttaattgatgaaaaggagaaagggccatgtgtctgctgagaattcaagtaagtgatatagtatttcaggtgatccatacgtgtgatattccctgtgagtgagacctggcacactgcgagggtaatgtgccttgtgtacaaaatgcatcgaaccatccccattagacttacgattaaagcagccgaatttgaattttgaccagca

SEQ ID NO: 542640 - DNA, 112 bp, Homo sapiens
aggccaagctaaatactaccgatggcccaccataattacccccatactccttacacgatgcctgatcacccaactaaaagggaaacacaaactaccacctacctccctgacc

SEQ ID NO: 542641 - DNA, 249 bp, Homo sapiens
  misc_feature (67)..(67): n is a, c, g, or t
ttcttcccctgccccccctcacatacctctgccctgagacacagtctctgttgcccaggccacagtncagtggcacagtgtcagctcacctcaacctccgccttctgggttcaagtgattctcctgtctcagctactcggagaggctgaggcaggagaatggcgtgaacccgggaggtggagcttgcagtgagccgagatagtgccactgcactccagcctgggcgacggagcgagactccatctccaa

SEQ ID NO: 542642 - DNA, 159 bp, Homo sapiens
  misc_feature (38)..(38): n is a, c, g, or t
  misc_feature (86)..(86): n is a, c, g, or t
  misc_feature (98)..(98): n is a, c, g, or t
  misc_feature (151)..(151): n is a, c, g, or t
ttgccctgttgctcaggctggagtgcagtgtcaccatnatagcactgtcagccaccaactcttgggctcaagtgatgccttctggntcagcctccttngcagctgggaccacaggcacaggacaccaggcccagatagttaaagacaaaanaaattggc

SEQ ID NO: 542643 - DNA, 751 bp, Homo sapiens
gtgctgtgatactgttcagaggatcccgtgatatgcgtacaggagagcagcagcgaagactaaatacacattagatttctacagaagaagaggctgatgatgctgatgatagatgatagatgacaataatgatttagaggaattgaaagttaaagcatctcccataacaaatgatggggaagatgaatttgttccttcagatgggttagataaagatgaatatacattttcaccaggcaaatcaaaagccactccagaaaaatctttgcatgacaaaaaaagtcaggattttggaaatctcttctcatttccttcatattctcagaagtcagaagatgattcagctaaatttgacagtaatgaggaagattctgcttctgttttttcaccatcatttggtctgaaacagacagataaacgttccaagtaaaacggtagctgctaaaaagggaaaaccgtcttcagatacagtccctaagcccaagagagccccaaaagagaagaaagtagtagaggctgtaaactctgactcggattcagaatttggcattccaaagaagactacaacaccaaaaggtaaaggccgaggggcaaagaaaaggacagcatctggctctgaaaatgacggcgattataaccctggcaggaaaacatcaaaaaaaaagcaagaaccgaagaagactctttgatcaggatcagatgtggaatcttccctcagattccgagtgagcacttatctgcagaccggtgg

SEQ ID NO: 542644 - DNA, 172 bp, Homo sapiens
cctttttggggttttttggccaaagcttgtccccagccccatggcctttccaggggggttcatgcccccaacccgcggccagccccacgtggggccgctcacccttttttgcccctcctgggaatttgtcatttgtgggggcttcaaagtaaaatcaatgagtttttgagca

SEQ ID NO: 542645 - DNA, 337 bp, Homo sapiens
gctcggccctgtgagtggcgtttgacagcaatgccctggagctgtccgccgttaaaggcaaagcccacgtcgcggtggcgctcagcgccatggaagcggcgaaaatccgtcgcctgaccggcgtcaccgccagcctggagctgaccattacgctagccggtgcaccgctgcatctgcatctggtcgggcgccgcgtcaacaacctcgaatgggcgggcaccgcttccgccttcagcgacacccaatctgtggcgcgcgacctggtgcacggcctctccttcgccgagcaggtggtgtccgaagccaactcggtgatcgtgatcgtcgatcaacacgg

SEQ ID NO: 542646 - DNA, 122 bp, Homo sapiens
tgacgttcaccccagacgacgctggaactccatgacgacgcggctctctggggtaacgttgacgacccttcgtggtaacgtgttaccacgctcttacacgtgcatgtgcgagacggggactc

SEQ ID NO: 542647 - DNA, 220 bp, Homo sapiens
taacaggggaggggggtggtgcagtgccgttggtacggggctggctccttgagcacccttggtgaagagcacatgattcagtgcttggcagaccggggtaggtgccgtgtctgtcactctggggcctctgcatcctacacctgctcagctcgtgtatgacgtcaactgctaccttcctagagagtggtgggaattaactggcgatagctgtgtggccaag

SEQ ID NO: 542648 - DNA, 366 bp, Homo sapiens
gtagtagcagctccctttatacagtatcttaggtagagattattaactgactagagacgccgcgcaggcgtaaatttacccacgaagttacagatacccgtttctcggagaggttcaattttagagggcgaataggtagttagagagacttagcaaggaggaaattaacacggactgccgagtccctaagcatctataagaatctaccgcacgagcgtcaatactcggacgcggcgacgtagccagttacggaacttaagcccggagggtcagcttttgaactacgaccctcgtatccctcaggcaccgtcccgtcgggtacccctcctttcacggtcgaggcccttctaggagtacgagttattg

SEQ ID NO: 542649 - DNA, 393 bp, Homo sapiens
ggtactgacctgcggagcacccttacaggtattgaggttgagctagcagtcacagctagagcatagaaagctagcctatggaagacacactgagcagaaactggaggcgcgctatcggagcccagactggcgcatatccatggcgctagatcagcggtaattgaagcccagctagggcgatgtgcgagctagatagtgagcggcagaatcaggagtaccagcggctcatggacatcaagtcgcggctggagcaggagattgccacctaaccgcagcctgctcgagggacaggaagatcactacaacaatttgtctagctccaaggtcctctgaggcagcaggctctggggcttctgctgtcctttggagggtagtcttctgggtagagggaag

SEQ ID NO: 542650 - DNA, 748 bp, Homo sapiens
  misc_feature (1)..(1): n is a, c, g, or t
  misc_feature (175)..(175): n is a, c, g, or t
  misc_feature (215)..(215): n is a, c, g, or t
  misc_feature (224)..(224): n is a, c, g, or t
  misc_feature (238)..(238): n is a, c, g, or t
  misc_feature (249)..(250): n is a, c, g, or t
  misc_feature (262)..(264): n is a, c, g, or t
  misc_feature (275)..(277): n is a, c, g, or t
  misc_feature (280)..(280): n is a, c, g, or t
  misc_feature (283)..(283): n is a, c, g, or t
  misc_feature (299)..(299): n is a, c, g, or t
  misc_feature (307)..(307): n is a, c, g, or t
  misc_feature (314)..(314): n is a, c, g, or t
  misc_feature (351)..(351): n is a, c, g, or t
  misc_feature (359)..(359): n is a, c, g, or t
  misc_feature (362)..(362): n is a, c, g, or t
  misc_feature (366)..(366): n is a, c, g, or t
  misc_feature (372)..(372): n is a, c, g, or t
  misc_feature (516)..(516): n is a, c, g, or t
  misc_feature (563)..(563): n is a, c, g, or t
  misc_feature (580)..(580): n is a, c, g, or t
  misc_feature (596)..(596): n is a, c, g, or t
  misc_feature (608)..(608): n is a, c, g, or t
  misc_feature (623)..(623): n is a, c, g, or t
  misc_feature (671)..(671): n is a, c, g, or t
  misc_feature (705)..(705): n is a, c, g, or t
nacatctcttttacaataaagagaatttagagctcacttgtcaggaaaatatttttcattattaaaaaaaattgttataaagttatttcttctgatatggagtttcaaagcatctaacataaccgcttcagaatctccacagtgcaaaaataaacaacatgcatacacttaaganctttacattctttgaaaaacaatacaaattgggaaagcanaattcagtntgtgcatccaaagnagcagttcagnnctcaagttctgnnnctttgcccatnnnggncgntgtgatgcctgatganttattttngtttggnagtccatttaacagtccattagttctgtttcgttagntgttgacnttncagncagttntttcatgccaccaaccaaagcaacttcagctcctgggtgcccagcaacatcttccttttctgcagagtagaaaatataatccacagttatggcacttcgggaatgacaggtggtcacttctggaattccagtgtcaggaaagtnatgtgaataaacagatgacaactgaatggtgctgtaatttgacgcantttttctgctgtcactnggcctctgtttctctnctgtgtttgtgntgacacttgtcctgncgtttcctccttttggtccctgcctgttcctcaatacacacgagttcntgtgagatacctaggtttggggggccaaattggnatagataaaatttctttgtacccgtgaatgactgttcctgggc

SEQ ID NO: 542651 - DNA, 325 bp, Homo sapiens
ccggagcttatacgttatgtattaagtatctatatatttaagtatgtatgtatgtatgtatatgagacagagactcgctctgtttcgcccaggctggagggtgagtcggtgggtgaagggtaactgaaattgaaaagcctgggacatgactgtacactactataaactttataaatactgtacaccgaggctacactacatttattttaaatatttttttcaataataaattaaccttagcttactataacttttcgctttataaacttttaagtttttaaaactttttgactcttttgtaataacacttagcctaaaacacaaa

SEQ ID NO: 542652 - DNA, 457 bp, Homo sapiens
  misc_feature (98)..(98): n is a, c, g, or t
gaagaggagatccaaaacctggagattgacgtggatgagctcctggacatggagagtgacaatgcccgggctgccagggtcaaggaactgctggttgnctgttacaaacccacaaaggccttcatttttggcctgctggacaaaatccggggcatgcaaaagttgagccccccccaaaaaaagtgagggtccccgacccaggagaacggtgggttccacaggacaattgttgcccccccaaccttgtagcaacagcaataccgggggacccttcggccaggcctggtgccataaacagggctccttgtgcccctggcccaggggttttttcccctgccccctcagttttccccttttggggttttttattgttattaaactgatgggcctttttgtgtttttatattgactttgcggcgcgggccctttaataaagttaggatacccctttggtgca

SEQ ID NO: 542653 - DNA, 652 bp, Homo sapiens
gggggacgaaaggacctcctggcactgacttcgttctgtcaggaggactggtttccagccataccgtgttcatggaaggcagaggggctgtgaggcactccactaggcacaagctgagaggcagcagcttggctaatactcgacgcaggctagtggggcaaattcctgccctctctcctctggccttctgggccgtttggtacgtaatcacccaggggctggtaaagcccctcctcttggcaacctcaggaatcaccaagtgttactagatcaagggattgtgaggctgctgttgggggtggcggggaaggggaatggggcaggcaaacgccagtcttctgtcttcctttgctaacttagggttttgagcaggattggggtaaggtgcctgtcataccgcaccctgccaaccctgggaacctcactgttctctctttcagcctagaacctgctagatcacagggtgtgtgtgagcttgagggtgggtggaggggtttgcagtgtgggaatgtggccctgcagttgacctgagctgcttaacatggttgtccattctggggcttaaagaaactgggatccagaccaagtagaggccttggtgctggttggggtggggcctgcagtatcttccgtgggtgatttcatgtgttcc

SEQ ID NO: 542654 - DNA, 133 bp, Homo sapiens
gctttacagaagggaagaccttttaacttgacagcaggctctcttgagtccacagaacccatatattttctacaaacgacaagggccagggagtcacggttgcctccaacgccttcgggcaggtcggcaccaa

SEQ ID NO: 542655 - DNA, 162 bp, Homo sapiens
gactttagagtattccccgcgggcacatatcctaatctatgttaacctacctaccattgcgctgtgtaacacagattctccctctgcgctatgtgtgacattgccatcccactgctatcaaccagggagctcactcagtgggtttgatcgtggtggatgctg

SEQ ID NO: 542656 - DNA, 960 bp, Homo sapiens
ctcgtattgggcccccgccctgttggggtcgcccatttggggtcctcccgcgcgggcaagacttccgcgcatgggcgctggtgcggtggacaattttgtcacccgcgtgcggggcgacgaaactggggtctgtatcccacgagcgccccgtttgttcggccctatgtctccgggaggtcttcttcctcgagggttccctctccccttgtcggtgcgcgaccccgggtgggccccctgcgaaggaggggcacgccctaggtgtgcaccccctctttgtggacgtgtcctccgacgagtgttccttcacgcagcgccgccggcgcctaccaatgttttggtttctcagacccctttccctggtcaaattgaggtcttctcccctcaccgcccgcgttattctgggcggaaagggcaccgcgcgatggcggctaatttctgtgcgcgtaaaagtgcggccgcacacggttacacatagaaaggtttgggaaaaaatagaatagcgccgactagttacaggatgctgtgagaccagctattcccccctctgtgtctacaggatacgtgtgcgtgtcatacatgcataggcggagtgctcccccctgtgtgcagttcaaggagacaaggtacgacgatccaactgcgctacaacagagagataatccctctgttgcgcaagtgaggaagcctagatcgcacttgactcggacggcaacctattgtgtgtgtcgccacgaaccttccggcgatgaaaaccgccccccaaagtacgtgacaaacagtgagcgagcaatcttacactcgagccacctctcatacatgcagtggtgtgaaccacgcctgagcccgcataccgctccattatgttgaggcaaagtacgcacttggggaattcccaggcccctggacatgttttttcccccccggcgccccctattgccctttttaacaacccacataaca

SEQ ID NO: 542657 - DNA, 210 bp, Homo sapiens
tacccccctgctctggtgttgctgtgagctgtggtgtaggttgcagatgtggctcagatctgatgttgctgtggctatggtgtaggccagtggctacagctccaattcgacccctagcctgggaacctccatatgctgcgggtgcagtcctaaaaaggcaaaaaataaaaaataaaaacgaaaagatcagcagggggtggcggggtggcc

SEQ ID NO: 542658 - DNA, 409 bp, Homo sapiens
ctcgacggcttcacggaacttcagataaagattgaatatgcatttattttcgagataggatcttgttctgtcacccagagaggagtgcagtggcacaaacacggctcactgcagccttgatctcccagactcatgcaatcctctcacctcagcctcccgagtagctggacctacaggcgcagccaccatgcccagctaattttagtgttaacagtagagatggggtttcaccatgtaggccaggatggtctcgatctcttgaccttatgatcaaactgcctcggccttccaaagtgctgggattacaggtgtgagccaccatgcccagcaaatttttttttttattattttcggacacaaagtctgggactgaccccacaacctggagtgcaagggagcacacacacgg

SEQ ID NO: 542659 - DNA, 699 bp, Homo sapiens
  misc_feature (289)..(289): n is a, c, g, or t
  misc_feature (365)..(365): n is a, c, g, or t
actacaacgaccaagtttagttcaacctggcatcaagtcgcctccatggcaaattaccctgaaacatagcctaaatgtacgcctaactttgatatgacgtcttgtgaaccaggtcaagtcttgaaattgcaatacaaaattcaaatccaagcatcagtcagtttgggttacaaaaaacgcctcagcagtaagcttagactatattcatagagcacacaagatggtcatgtcctcattgctcagaagattcactattaacagcaatggctcgactcattagagctacgangatactagtatggacaggatgtgagtcacacaggcagtagagtctctggccccaatcagtatctggggaatactcncagcacagcgtcctaggtctgcatgtcagcctgttcagcagatctgtgaataatcactccagtagtctgaccagtccttgtgaaacatccagtatatcatgactgagatacttacatacgacctcaagtcagtgtctgtcaagcatggctactctggcatatgatccagctaagcagcagtagtgagttcatacttatcactcataggataatggcagccaaatctcaatgggtaggtcctggaaaggccaaggtcgttcccagtgaagcacagttcagacaacaagtcctgtaacatccgcatggccataccctcacgtgcctcacatccttg

SEQ ID NO: 542660 - DNA, 168 bp, Homo sapiens
gacttggtacgctgcttctatcagagcaatacgccgccgtttgtagctagcaggacacgtaggagtaacaagacgctgaatctatgggtagctatatggtcctaaggtattctatacctatactattatattaacgggctatatctataacagacataactagggcgg

SEQ ID NO: 542661 - DNA, 198 bp, Homo sapiens
gtcacagagggcggctcccaggagaggtgagcaccatccgaacttttgctgattataatggcacaaggggcccctgggaaaccaggcagagcacgtcttaaaggctgagatttcgctgaagggctggagtcagaggtcagagtttagctctttcctggtattggaatcttcattttttcttcttggcttaaaatcata

SEQ ID NO: 542662 - DNA, 1285 bp, Homo sapiens
  misc_feature (405)..(405): n is a, c, g, or t
  misc_feature (407)..(407): n is a, c, g, or t
  misc_feature (423)..(423): n is a, c, g, or t
  misc_feature (493)..(493): n is a, c, g, or t
  misc_feature (688)..(688): n is a, c, g, or t
  misc_feature (729)..(729): n is a, c, g, or t
  misc_feature (762)..(762): n is a, c, g, or t
gcaggtggcagttgaagtatcttatgaattagctcgaaggtaatgtcagatgccagaatgaaggctgtagccagtcgttttgccgatagtgccccttggagcctccacagttatctgatggccatgacagaattaggatgcacgagactgaaggtgagcatatagagagtggtctgcgaaatgtgctctctgttattcaccgttcagcgctgctctgcattgcgtgcatcgtgtctctctcagtgcataacatgtaggtacgtgcccaggggcgagtaagttatagtgatcattgccgcgagtagcgattcacgagtctaggtttacctggatcaaatctcctgaaagaaggaacctgggcggcatttcatgacaagctcatgtcccgcctgtactccaccacgntntagactgcagctgtgngatgtatgcactcttgtgctccatatagggaagtgcggttcaatctcgctcctatacaatgacacagccntcgtactcaagcagaggctgtacaacgtatgtgtgtgcggtcctcgtcgcgcgccacatatgtttgtccatatgtcccctagggcgagccgcgaagtaatgtcgagggcgatccccatgggatctgaacgaacgtgggctcttgtcttcccagcatgcccctgggctttaaaattcgagggagcaacttatcagncgcttccgagctagggcgtgcattgttggcgagctgtgagnatcgctgaacctacgatctggggagcatcgagnaggggcaggcaagttcgttgggacaccaacgaaggaagctagaagctgactcgccagcatccgccgtaatattaccatgttctcgacaagtacactcctggtattcaattgaccaagttggcaaaaaggcttgttggggcgaagcgggtgcccaactaatagtcgaccttttctttaaaagcctttgaggaattctcccaagggagaacccacatattctggcgtcgcacgggcgggggggcgcgcccacttttggttccgcttgtgggaactagcaagccccttggtagagccagcaaattgaggcgaggtcggcgaccagcccgggcctacagcggacgcgggtactggtcaggggacaggcggcggcacaagggtcagcgctgaaagtgttgcgcacgtgggcacaacggcccggtcggggtgaaacgttctcccatgctctggggcctcaacatccagggagagcacgcgcaatacaacagatatgccccaaaggtccccccggcgattgggggcccca

SEQ ID NO: 542663 - DNA, 980 bp, Homo sapiens
  misc_feature (269)..(269): n is a, c, g, or t
  misc_feature (801)..(801): n is a, c, g, or t
taacactcatagtaagatactctgtggtaacatttacagtcatacttggcgcttgggccatcatcctgcatcatataacgttacatagtcacaatgcaagcaaaggaacagcgaatcatggacttcattatgaaatattaaatgctgtatgtgtccattgaaaagcgaatatggactcaagaaaaagtggaataaggatatcccctagtaggaattgtgagatagaaaacataatagtgctgatatatcatttgtactatggtagaagnatgatcatgaacaataagcgttcttataagagctggtaccaataagcgactactgaattaaaaacgttcataactactgattaattgtcataaacagtgggagcataataacgacatcacgtgaagaaatgacctagactcgtatgatatcattctagggtacattgcagaggtatacaatggcatatatagacatgatatctcacctaattgcagtaatactcatctttgcgtggtctccatattaagatattggccttatggctaaaaggcatgaataagtaatgaacagtagttgaataatgagcatattgggtatgaatattcgggagatggcatccagattacattgcttgggcttgaagacgtagctaagtattgggtcgcataccatctattgttgaagtactagatttgaccacttaccctacagatttgaatataagatgacccagaaagctaagacttatttcaccctatgtaaactacacggctccctgatggatataatccacccctggttgatccattnaccccactaaaatgttactcttccggaaatactcgtttaaagggcaatgctctaagccatcattgtttctgatactagcccatattaggtggaaccccctcccattttgcgtccaccgggggacaggggcttacaaacgtcggacactcattaccggtcactacatccgccagttcggg

SEQ ID NO: 542664 - DNA, 440 bp, Homo sapiens
tggctgcgtcgggctgcaggagaagatggcggtctccacagagtcactcatgtggttgcatcagctggtgaagggataggcttgttgcccgggacgccttgctccccctccctgcagcctctccaggtggccagttaggacttcctcacatcccggtggtgtcagggtgttcagaattcttacatgatggttggcttccacaagaacgaaagcagaagttagcattcctcttacaaggacgttaaagttcctcgtaattttcgcttgttggacgaacttgaagaagggacaaacacggactaggcgagggtacagctacgctggggccttgaagaatgactgacagactatgcacacttacaaggtggacaggcagtgacttattgggccaccaaggcacaaattatgacaacagaatatatagcctgcaaagtagactg

SEQ ID NO: 542665 - DNA, 611 bp, Homo sapiens
cctcttctatatacatgtatacgaggatgtgtggctggcagacccaggaagacacaagtgcattttcagcataaagagcaggtgcagttattcccaggacaaagccatttctgccagtgctgttatgcgcctgcaaatgcatgaaaaagcctgggaggccaccagactgtcttgatgctacctcggggcccgggattcaggagctgggctcactgcaggctttgctcacatgtctctagattggatttccacttgctctcagcagaaattacttttagaattaaaagaatggacattgccacttcatatatttctgtcgatttttaattttttttgaaattgtttttccaagagtcctagtctttggtgtcaccgggattttttcacacctcaggtgagtctaagcttcatgggggagggggtgatctaaaacactctttacgccggtttctatggacttggtttactcgtgtgaccgcgttggctgccacgaatttgaccacccctggggttagtatagcttagttaaccttccgtttattcgctaaaggtaaatcactgctgctccccgtgggggtgtggcaggctaagcgtatgagctgcttgctgct

SEQ ID NO: 542666 - DNA, 373 bp, Homo sapiens
ttaagcacatgcaataaaacagtttgagattgtgggatagagtgtggcagggaggttaaaagcatgggctttgtaataagaaatctgattttgggccaggcacggtggctcacgcctgtaatcccaggactttgggaggctgaggcaagaggatcccgaggtcaagagattgagactatcctggccaacatggtgaaaccccgtctttactaaaaatacaaaaactagctgggtgtggtggtgtgcccctttagtcccagctactcgggaggctgaggcaggagaatcccttcaacctgggaggcagaggttgcagtgagccgagatcccgcccctgccctccagcctggtgacagagcaagactccctttca

SEQ ID NO: 542667 - DNA, 332 bp, Homo sapiens
cgggcggatcacttgagctcaggagtttgagaccaacctgggcaacatatcaaaacccacctctacaaaaaatacaataaaaaaaaaattagccaggcatggtggtgcatgcctgtggtcccagctactcaggaggctgaggagggaggatcactggagctcaggaagttgaggctgcagtgagccatgatcgcaccactgcactctagcctgggtgatggagtgaaaccctggcctaccccccaaaatataaaaaataaaaactcacagagcctcagggacttgtgggactataaaaacagatctaacattgttgtcatcagacaatgtat

SEQ ID NO: 542668 - DNA, 315 bp, Homo sapiens
ataactcttctctcccttgtcatagagtattaaaagctcacagcttgtataaatgtaaccattaggagtcagcatataacttggactagtgtaactccttcatgcaataaactagaacaaagaccatgctgtctaatcttgaagtccctcattaaaacaacggtcaagcaataggcgcctggaagatgtcacgcctgaaaccaagcaataccgtcatgttatcagccaagcccagagccctaagattacaaacaactatggctggaacctcctcagctctccctcagcagagttccctaccctaagagaatgaac

SEQ ID NO: 542669 - DNA, 132 bp, Homo sapiens
tagtggcgggctgccaggcaactgtgaggtgtggggtgaggatgaggaagaggacagtccattgggtgtacggggtcagctgcctctcccgtgtacggtcacagaaaggcacgccccccccggccccccgcc

SEQ ID NO: 542670 - DNA, 326 bp, Homo sapiens
tggggatgaagtttcgctcttgtcgcccaggctggaatgcaacagtgtgatctcggctcactgcagcctccgcctcctcctgggttcaagcgattttcctgcctcagcctcccaagtagctgggattacaggcatccacaacaatgcccagctaatttttgtatttttagtagagacggggtttcaccatgttggtcaggctggtctggaactcctgatctcaggtgatctgcccgccttggcctcccaaagtgttgggattataggtgtgaggcaccacgctggccaaaaatttacttttttggaatgctgtcttagtttgggct

SEQ ID NO: 542671 - DNA, 114 bp, Homo sapiens
  misc_feature (15)..(15): n is a, c, g, or t
gtcttgttgacccgnaagtgcatgggaggataagcaccgaagaagccatccggaagggttcatagatggccgcgcgcacagaggctgcaagacaccagcagctatgccaaaaaa

SEQ ID NO: 542672 - DNA, 169 bp, Homo sapiens
ccttacggtaacaggggagcacaaccgttggaagctgcggggctgccattaatgctgggacttcaggccaataggtacgagctgaggcagccccaaaggaggacatattctgcagcgctgttgcaccagtcgcaaccaggtccggagaaaggtctctcttgtggaagaa

SEQ ID NO: 542673 - DNA, 912 bp, Homo sapiens
ctcctccccatgcatggtgtccactgtcgcgccttctgctacatgctgcgctgtgtcactggcggcacatcttcttcgccatttggacacgatatagcatttgatgagctgaaggactgattacaagagtcctatagaccagtgtaataccctgaatccccttgtactcccagagtacctcatccaggcttcttcgtgtgtcaggtgctttgtgcagcagagtggttacactggtctcaagtatgcgccgtcttgcatatcatatttgcaggtatatgagtagaccaggtgatgagtgccccaggactctatgacgtagaagcatcttgaccttgcagatatttctagcaattttgtccgaaggcaggattgggtgcaaaatctagcttgataatcttctagcattttttcaactcacctatatggcatgatctaatgtctggagagctcttagaacaacagcgcgagaagactggcctccagttaaggtgcttgcaaaagagccaccaaaggagcggggttctatccagcaagatcttgtccaggagtagctgtggaatctgagtcaagctagcttagaaaatgacttccttattttcaaactgttgcccccatttttggctggtgggactgactgtttcatatgtcattcctcggctccacgcttcaacatgggaatcacgtaatacattaacatgcgatggttacccctgtgttgacaacttgagtggcctcttaaggggaagccaactcctcgagggcctaaacgcggccgcaacatgaagcgtgggcaagcacgccgctatgggcgtcacagcccatatctgggcacgcgccgcggcgatctctccgagcgggccacggcgatatatcacaagggggccgccctgtgcactctctcaactccctctc

SEQ ID NO: 542674 - DNA, 160 bp, Homo sapiens
acttcacccccaatattttttgggatgtttgtataaaatggaatttaaagttcccttttgattgtttttgaaccccaggggggccccttttttaataaaaaacttttttaatagttaaatgtagggggaaaaaataaaaaaaaaatgggaaaccttgtta

SEQ ID NO: 542675 - DNA, 1166 bp, Homo sapiens
ctgagactgcggcggagcctaactgtgtccctgcagtgcctgctgctgaggaatgtgccaccgaagctcggggacgcgaggagccggcgttgccctggaaagactgccccgatccggacgctgtgtgcagcgcatccaccagctgcatggctgagcgctgcgcagggcttcctgcctgactggatgtgatgtgagtggtggtgctgcgtgagtggtgctcagtggttctggtccccctgccctgctcctggtgccgtgggctgtgttctcgcgcttggctgtgcccttggaggacggagcttgggtcctatggtgttggctgcagaagtcaggattgggcgctggaggatattcctgggggacaacctggtgatcctacacgctatcgacggacaaacagggcgccctcacatgtccactggtacgcgcagtaagacacggaggtggaacgtcgactactttgcgcttgggctatactacgttcgtgccgttaccccgcgcaatggaaatgcgagtgggtgtctgtgtgcccctatgatacctacggcacgggtttacccacagtgacgttgagaaagtgtctacggtgcacacgcctgttacccagtagacgcagtacacataacggagggtgccttccacgccagtccgtgcggttgctccctgtgggcggacaccagcgtttccaccattgcggctggtgggcgaccccagatattacccacgtgtggttatgcgcatcttgtggctcctggcccctggccgaccttacctaatcggtgtgaccgccgatagtgaaatgtacaagaccccacattgagggtgttggaccgcgtgcgattagcgacttacgagatgggggggaatcccggccagaaccaactatagcccactgccaggcaagggggcccccagacgcctgccacataagggttacaccctttgagtggacgcagcgcgtagggagcaccccgttgacatgcttatagcgggcaagctattcaccgactaggccctgtccgcttatacccgcgggacgacggcccgacaagggagctgggccaccctggtgttgagtgtattgaaccgcaccagacgcgtgcgcagttaccatagccacgtgtgccgtggccctttcagggtccgtgagcgggaacgtagggttg

SEQ ID NO: 542676 - DNA, 203 bp, Homo sapiens
cctgcccaatgcagctcgccataccactgcattggcaagaagtgacctggcatcttggcacatcaattgtgtgtcttcaggagaatgtgcagtgtcttgtcaacaactaattataatgcaaattagggctacattgtaatctgctttgttaatgaaactgctaaaacagaatattgacaagctaggacacctgtggttaagac

SEQ ID NO: 542677 - DNA, 119 bp, Homo sapiens
gagagccagcttcaacaaccctacagagcagtgagtatcttttaatgggaatccctgagatagagaaagtcaggctgtgttgacccccttaagcagctagtcctcgggctcctagtctt

SEQ ID NO: 542678 - DNA, 237 bp, Homo sapiens
  misc_feature (28)..(28): n is a, c, g, or t
  misc_feature (52)..(52): n is a, c, g, or t
  misc_feature (58)..(58): n is a, c, g, or t
  misc_feature (129)..(129): n is a, c, g, or t
ccagtggccgcggagcccgtccgtgctncctgcttcttgtcttttctggcgncctggncaccatagccctccggccgggccttaagggccgtcggcagcctacacttgccaaccaaccccacatccctnccggctgtagcaagaactattcgggttctctacttccaacagaaggttgatcattttggatttaatactgtgaaaacttttaatcagcggtacctagtagctgataaa

SEQ ID NO: 542679 - DNA, 146 bp, Homo sapiens
ctcgcttggcgatacgctgttcgagcacaagctctggaatgagtcgctgattgctcaagtgcgatcgggcgagcttgagcctcattactactggcagcttgagcagcagttgctggtgaccggcgctgagaaggtgatcttcgggt

SEQ ID NO: 542680 - DNA, 176 bp, Homo sapiens
ctctcgttgcgtggcgcgtgggggccatcaatttcatcacaacaattatctaatattaaaccccctgccataacccaacgagccacgaagagccacacaatgggccgcgcgaagagccacacaacgagccgcacaaagagccacccaatgagccacccaatgagccacacgatgag

SEQ ID NO: 542681 - DNA, 154 bp, Homo sapiens
ttaaaagcccccccctttttttttaaggagaatggcccagtcctttcccaagtccccccaggggaggtgatagcattgcttttgtgtaaattatgtaaagcaaaatttttttaatcttcgccctaaaccttttttattttgtttttttttgaat

SEQ ID NO: 542682 - DNA, 438 bp, Homo sapiens
  misc_feature (159)..(160): n is a, c, g, or t
  misc_feature (237)..(237): n is a, c, g, or t
  misc_feature (272)..(272): n is a, c, g, or t
  misc_feature (291)..(291): n is a, c, g, or t
  misc_feature (365)..(365): n is a, c, g, or t
  misc_feature (380)..(380): n is a, c, g, or t
  misc_feature (386)..(386): n is a, c, g, or t
  misc_feature (394)..(394): n is a, c, g, or t
  misc_feature (399)..(399): n is a, c, g, or t
  misc_feature (423)..(423): n is a, c, g, or t
  misc_feature (433)..(433): n is a, c, g, or t
gagatggagtcttgctctgtcatgcaggcaggagtgcgatggcatgatctcggctcactgcaacctctgcctcctgggttcaagccattctcctgtcagcctcctgagtagctaggattacaggtgcacaccactaagcccagttaatttttgtatttnnagtagagatgggattttgccatgttggccaggctggtttcaaactcctgacctcaggtgatctacccacctcagccncctaaagtgctgagattataagcatgagccatcgngctcagctgcaggttgtcnacttttttccattacagcctggatcagccagtgttcaccaaagaggtatatataagacacacatacataaatanaccatgcacacacancatatntctataangcccncatatattaaatatttaagccaanagggaatgtntggtt

SEQ ID NO: 542683 - DNA, 99 bp, Homo sapiens
  misc_feature (1)..(1): n is a, c, g, or t
ncatgcagagactgcagtgagccaattactcaccatagccctacagcctgggtgacagagtgaaactccatctcaaaaaatacatacatacatacattt

SEQ ID NO: 542684 - DNA, 360 bp, Homo sapiens
  misc_feature (9)..(9): n is a, c, g, or t
  misc_feature (35)..(35): n is a, c, g, or t
  misc_feature (39)..(39): n is a, c, g, or t
  misc_feature (55)..(55): n is a, c, g, or t
  misc_feature (117)..(117): n is a, c, g, or t
  misc_feature (138)..(138): n is a, c, g, or t
  misc_feature (265)..(265): n is a, c, g, or t
  misc_feature (319)..(319): n is a, c, g, or t
  misc_feature (333)..(333): n is a, c, g, or t
  misc_feature (350)..(350): n is a, c, g, or t
cggaggagnaaaatgccaccagataaatccatggntccncctctggctctcttcngcccaaatgagggcaacagtgccggccacttccctggcaaatctgcagctcaggatagggangcataagaccctctgtttcgntagagagtcaagtaggtcaccaaagccaagctctgtccaaggtgctttggagttgctaaattgaggagtgcatccttgctgtcttgaaccattctgtttgcaatggtgagaccttacataacctagncttgcagggccgccacacaaccctggagtcctagagtttggaggaacctttgtntccagctggacttntcatttttgtcagaatntgtttgagga

SEQ ID NO: 542685 - DNA, 85 bp, Homo sapiens
ccacgcgtcgcccacgcgatcggcgcgtctattatgctgccggggccggcgagccaaagaggagccggccgcgcgggccgggagg

SEQ ID NO: 542686 - DNA, 539 bp, Homo sapiens
gcgagcggtccgcggcggcagaggcagtgtctggcggtcgcgcgtggaggtcggacgctcagagctgctgggcgcaatatctccgcctgctgcttcggcgcggctgtatcggcgagcgagcgagataccgcgagttctcggtggcgctcccccttccttatagtctccacggactggcccctcgtccttgtacttgaccgctcccgtcttacgccgccttctggcgcttttcgttgggccgattgccgaccgctttctactgcttaccatcgaagctctagaaatgaatgtttccatctcttcagagatgaaccagactatgatgcatcattatcacaagagaaattcgtgtctatagctattaaggacttgattacatcatttttaagcctgataggtttggcatcaccattagagctcacacctgccttcaatttaaccacctggcttataccctgacgaagtgcacctttaacactccttggccttgggatacttaagagttccggaatacatttgccaccaccagagtgctttgg

SEQ ID NO: 542687 - DNA, 363 bp, Homo sapiens
cttagtcttccggaggatatggccaacagacaacccaaacaaccaacaaaagagcagagatgctgcaaaaaaaaaaaaaaaaaaacaaaaaaactttttttttttcccccacgtttggcttttttacccaaaaaattttttttttttgtaaaaggtttccgaaaaaaaggtccaaaaaattttctttttttaaaaaaagggcaaccctttttaaaaaaaaaaatttttttttttttaaacctaaactatcctataaactacctaatgggcaaaaatttttttttttttttaaaaagggggggggaaaaaaataaaatttttaaaactttttttatagttaaaaaaaaaaaatttttttttaat

SEQ ID NO: 542688 - DNA, 257 bp, Homo sapiens
gggtaaggtgggatttgggccccttaaatttttctaaaaacggggtttgggtccggggctctaaaaaatcaaaagtttctttttaaaaattttcccaaactttttcccattttaaaaagccctggtaaaaacgttgaactatcccaatgttaaaatggtaaaaatttggaaaaagcaacttcttttctcttcaaatgaaagccaagatttttttggacaatgattaaaaaatggaacttatccagaggaaccccgga

SEQ ID NO: 542689 - DNA, 1109 bp, Homo sapiens
cacagaatatttcaacgaacaacggtgacttgcaccgtctgggctgtgttcctgctgctgcacttgcgggaacacatccacgacacagagattatcctacgatggacacgtaccctcacagacatctcctttcagagcaatgtgctctttcgctgaaggcgagggccagacttctcgaactgctgcgttacgagctagtataggtgggcctgtgtggaacgaaagatggggcgccctgaccaggcggtcccacacagcaggcttgccactcaaagcgtcagcgaggcctcccgcctggagcccgccgtccctcgagcgggaggtcgatgtcgcggcgccaatctgtctgggcttcagatgcttggcggcgttcatggcgagaccgtccgcatcttgcctcccgcagcccaggttgcttggttggtcgctcgattactcatccgtctgtggctcaagaccagggactcacccgtgtgcacagcaggtgcataggaatggatgttcctgcatgacattgaggctcgaccgcttgcctagtcaatgagggagaaccccgtgccgtggctgccccttcttaatgcctaagcagtgctgcttgccgtcctgtcaagggtcacgccatcgtctagcactgaacgtcttggcgccaacatggcagacggttggataccccctacagggttgccaggcaaggccttggcggaggaatgcagcatagcatgaggaccagcgaagttgcaattggacggtatcatgaaaagggacacaaaccctcgttctggttacccggaaacctgcaggatgcagacaactgtgggaaagagccgcttgtctttacttattgcttgtcaaacaaggagactcgagtccggggcaaggggagcctggaccaggctcttaggacgggccttcaaccctaaagcatcagttaaacccagtaatgggcgattgatgacgcgtggacaaaccagcgccttcagaacaggaaaagtcgggaacgcacttgtcagcagctggattggaggctcttgtcgccagttgctttgacattggcccaatgaagccgggctggtatgaatctgaaaatgaacttctgttcccggaacacc

SEQ ID NO: 542690 - DNA, 1250 bp, Homo sapiens
agtagcagccaaacttgcaggttgccccgatttctgatcatcattgcaatcaagtcacctgacacactctgctgcacgcacacctactcttactgcacggcacacactgctcctactgtacacgctgacacgtgctgcatgagacacagctgcaacacgtgcttttcttgtccgctggtaacactccatttggatgcatgcaagcaatcaaggtggtcggctacgtgccaagttcacgacaaagggcatcagagtatcttccaccagctggacaattatcatgagctgcgcttgtaccacgcaaacttacacaatacaacgttgagtcgcacccagaagcatacacagcgttgcccaacagctggcctgcgctaatcctaggctgtgctcgcacggcctctgacacgcagctgcgcagagcaacctctctaacgccttgctctactactgcacctctgcgccacgcactccaaccatagcaatgcatgccagctctgcgctgcatttccctgttgtctgtctgctctgactgcctgtgcctcttgattctccaagtgaacactgcaaagattgcgacacgactgggcaaacacactacgtcagcagccaagatacattctatacttcgacgtgctcgcgcagatactcctcggacgtcctatctcaaaccactttcagactaggcgcactgcacacgtcacagccacagcacatactcgctgcgcaacattcaactactcacgactccagcaagtcttccatcttctctcccaacggcttgggctcgcacttattgcgcaattagggtacgcacccacctctcctctccacccgcggctacagctctcccctgccacctcgacttgccgcactcatctcgcacaccacacaccactcgcctccagcgactccctcgcctctctagcactagggcaaagaaaccctctctccaggctcaaccagacggctaaatttcgcaaccttgtacaacacatccaccaggaactaaaatctcggaaggagcgcaaatctaactaaacccaagacctctaatctcggtcacaaacacctccactcgtcgcgcgccctgctctagcgctctttccacctaacaccattcgctacgcgctactaagctcttattataagtcgctaatttcctcatcatatatgcactcgacatatacgagctacgatgctcacgcgagaatcaccactctctaagcgactatagagagcgactcccactc

SEQ ID NO: 542691 - DNA, 419 bp, Homo sapiens
  misc_feature (236)..(236): n is a, c, g, or t
  misc_feature (257)..(257): n is a, c, g, or t
  misc_feature (277)..(277): n is a, c, g, or t
tgtattaggttattcttgaagtactataaagaaatatgtgagactgggtaatttataaagaagaggtttaattggcttatagttttgtaggttgtataggaagcatggtgctaacatttgattagcttgtagggaggtgttaggaagcttccaaccattgtggaaggcaaaaggggaataagtattttacatggcaggagcaagggtaaagagagggggagggaggtgccacacanttaaccagattttgtgagtantcaggttttgtgagggttgnttgaggttagggataccccatttaccctgatgtgttcatatacatttcatgactgtatcaaaatatttcatgtacccccataaacatatacacctatttgtacccacaaaaatttaaaaataatttcaatgtttgaagaaaa

SEQ ID NO: 542692 - DNA, 109 bp, Homo sapiens
ttatacctgggagaaaatcatcaagaagggatgcatgatgtttgcccaaaatttccaaaatccgaaaatcttttttgcttaaaaaaaagagtaaagttttgaaagggta

SEQ ID NO: 542693 - DNA, 194 bp, Homo sapiens
cgtgctgtgtcatgactacggggcattgagtcagctcccccaagatgagctgatgccccagagagagctctgaacgtcaccaagtaaccagtgcccatgctccatggccccaattctgccaggctctaccccgctctggatcctgcacttctaacgctcgactctgctgctcatgggaagaacagaattgctcc

SEQ ID NO: 542694 - DNA, 1998 bp, Homo sapiens
gcggcgcagcgcggcagctcctgcatggcccggcatgggttaccgctgctgcccctgctttcgctcctggctcggcgcgtggctcaacgctaggacacactggacaggctactagcatggtccaacctgcacgggctgcgcgcagcattcctgcactggcgcaacaaacttctccagcaccagccagcagcactgcgtgcaacggcgcctgtgccgcgcgcaaggcgcgacagctgacacaccccctcttgccacctccgcacactacttctcccctgctcaaccccaacccacacccgacttttccacgcgccactttctccgctccacgcggccaccaacacaacgctactcgggcaccaccacagccctgcagccactgatccttgcgcacctgcgcacggcctctcccgcctcccttctcggcaggcggaccctccccgcctcctccctgcactgcacgccccttgtacgcacacccccacccacgccccacccctcacgcccccatcacctgccccgccctctcgcctatccttcctgcccttgggcccttctcccaacccctgcgcccccccccgccgcaccctttcctctgcgccctccgcctcccgctctcccttgcccctccgggcctcccccctggccgccctctcccgtgcgcggccctcctcccctgcgacgccaacgcctcaggcccaccccttgatgcgcgcgtcaccacttcccccctagcgcttgtctctcaccgcccctcgtgcttgccaacgcgccctcgcgcgccaccttgcgaccgcgcctccgccgctctgcgccccttcatacactttgtgctgtcgccctcttctgcgcgcgaccgcgtcgcgccgtccaccacgcagcacgtcgcgtgacctcccctctgccccacgcctcacactccggcgcgccactggcgcgcaactcctgtcacggccttgccgcctcgtaccggtccttccgtcgtgcccccgcgccggccgcctgcacacctccgtggcgcgtcgccctcacggccaccacgccccgccgcctcccacgccgaccgtctctcaactgcgcgccccaccttcgtgtcgcgctcagtgccacccgctcttgcgccgcctcttcgccacctccctccacctaccgccctccggcgtgccaccgccgcctcctccacctcgtctgctgcgctctccgctcgctccaaccacccgcgttcttcgccccgctccgcggctgccacccataccacacccctcccctgcccccccaactcccctcactctcccccactcgtcccatcccttcacatccaccccccacgacccgtcacctctcctccttctctccactcccctccaccccacaccacgaacacacccacattaccagcgccccactccatcaacataacccccctcctcctcgccaccgccaaaccgactcattctcacacatcctctcagccaccccgcgcctcttcccctcatccgtccatcaccatcccaccatccacactcacatcccgaccactcaacacttcatcccacccatctaccactacgcaccaccacccacactctcacctcccaccatctacaacccacaccgccctctcacacttccctcctctaccacacacaccacacacgcccctcgacctcactccatcccagacatacactcaaacctcaccaccaagcttcactcgccactctcagccaccctcctcctctcctcccacctcccccctcccccctcttcctccactccgcccacaccacctaccaccacctccctctcacccacccacccccctcctcccaccactccctccgccccttccatcgcagccctccagcccacctactcacctctaaaacactctcccccaccactcacccccaccacctccctccaccatcctcttcctccaccctacctcccacaccctcacctctctctccactccactcctacactcccaaccct

SEQ ID NO: 542695 - DNA, 449 bp, Homo sapiens
  misc_feature (2)..(2): n is a, c, g, or t
anttcgggcacagacgaaatagacccatataaatatagtcaactcatcttctgagaagattcaaaggcaccacaatgcagaaaatggtcccacaatggtgctgggacaactagatgtccgcatgtgcaaaagaaatcaaacagaccctacaccctaaacagaaattaatgaaaaggagctgggcgcggtggctcatgctgtagtcccagcactttgggaagccaaggcaggtggatcacttgaggtcaggagttcgagaccagcctggccaacatggtgaaaccctgtctctactaaaaatacaagattagctgggcatgatggcgagcacctgtgatcccagctgctcgggaggctgaggcgggggagttgcttgaacctgggaggcggaggttgagacaagatcacgccactgcactccagcctgggtgacagggtgagattctgtc

SEQ ID NO: 542696 - DNA, 314 bp, Homo sapiens
cctgggatttaggggacttaaaattactaaaaaaaacggtttttttcccaaacaggaaaagggccgggattatttttaatggggccaaaggagggaagactgaaaagggttttaaaatttggaacgggagtcaaaaaaaggcatttttggcattttttaaaccaggaatttacattttttccgggaaagggaaaaaaatgaaatgggcggggcaaagcttttggaaaaaaaaacaaagttttaaaaaaagggaaaggttttttggcccaactgggaaaattttaattaaaaaattcccccatttttcaacccca

SEQ ID NO: 542697 - DNA, 360 bp, Homo sapiens
tgcaggaattcggcccaagggtcattctctagaacaccagatgcacaagctgaaagggggcgacagagcatatgtgacctcatacatgcgcctgaacctaacattatgaactataaattttttgagcctgcccacagaccagatgttatcatcttctgaacagcatttaccgaaacctgctgcaatgacggaagtggaacaactggattggctgagagatccaattcagaacgtaggctaggtcagccgatttggatgccatcaacactccttttacctaatcatgagccagatgcctaagaaggcatttcaacaggatcctgaggaccagcggttgcccatgtctagactgcgctgctg

SEQ ID NO: 542698 - DNA, 81 bp, Homo sapiens
ggctcgaaattcaaagcttcttaaccgatgtacggggacaatgtaccatcaataaagtaccctgtgctcaatcaaaaaaaa

SEQ ID NO: 542699 - DNA, 390 bp, Homo sapiens
tggtatccatgagagagagtgagtgtagagtgaggatcagagcggtgagaggctggcgggagttgggggcctggaggctggggcctggttacttggtgacgtgcagagctctctctggggggctgcagctcatcttggggggagctggactcagatgcccccgtaggtgcaaaagcaacatccacatctcactcctcccggtgcttttttgcggtattcctgcagcgctttctccgccacggtctccataaatttagggttcttcctggagacttctacagggaccgtcacagtgatggggcgcaaggcttttacaatcaagaacaccgcagtaagaccggaaggaacgtgcgagtcaaaagtcgagggaagccacgatgatacccgcag

SEQ ID NO: 542700 - DNA, 411 bp, Homo sapiens
tcagaagcatgtctgtagttgccacgagcagcagaaacgagggccagagagccggatccagagcggtgagaggctggcgggagttgggggcctggaggctggggcctggttacttggtgacgtgcagagctctctctggggggctgcagctcatcttggggggagctggactcagatgcccccgtaggtgcaaaagcaacatccacatctcactcctcccggtgcttttttgcggtattcctgcagcgctttctccgccacggtctccataaatttagggttcttcctggagacttctacagggaccgtcacagtgatggggcgcaaggcttttacaatcaagaacaccgcagtaagaccggaaggaacgtgcgagtcaaaagtcgagggaagccacgatgatacccgcag

SEQ ID NO: 542701 - DNA, 161 bp, Homo sapiens
  misc_feature (25)..(25): n is a, c, g, or t
tcgacggtaccaacactgacaacgngcttagcacaaaccaaaaggctctgctagagctcagaggcagcacgagattgggagagctggatgacggtttgctaagagaatttaaggtcggtacagtcctcctgtgtatccctttggattcctgttatgctgtt

SEQ ID NO: 542702 - DNA, 651 bp, Homo sapiens
  misc_feature (540)..(540): n is a, c, g, or t
cacgaggagattttgatgcacccatcacccagatagtgtacattgtacccaatatgtgattttcttatcccacaccctcacactcttcccccttagatatctccaaaatccattatatcactctatatgtctttacattctcatagcttacctcccacttacaggtgagaacacaaggtaatttgatcttccattcctgacttacttcacttataataatggcctccaactccatcctaattactacaaatgacattattctatttctctttatggctaagtaattctccacagtgtatacataccacattttctatatctactcattggttgattggtgcttcaattcattctatatctttacatttgtgaatgtgactaaaataaacatatatgtgcatttatatttttcatataatgacttcttctcctttagacacatacccaggtatgggattgctggatcacatatacatctacttttgattctttaacgaatctccatactatttcccatatacattatacattcccacctancactatatacaccatccctgttcaccacatgcacaccaacatctatgacttgttatatatttagatacacttcaccactgatactatattcttaacttttcttccgtgttt

SEQ ID NO: 542703 - DNA, 115 bp, Homo sapiens
gacaggcagcaatgcaagggagaagtgaatcagtcagcttcagcacgggaggtggacagggacaggcttcaaggagcattgattcctttgcattcatggggagggacaatttggg

SEQ ID NO: 542704 - DNA, 1672 bp, Homo sapiens
gagggattggtccgcgaaactgggacgtggccggaaaatacccagacagactccaatgtgcctaggcattgcggggaacccatttgctccagaagctccacaggtgatctacataggagttgccacgtatatctcgcacttgcccccactcgcggagaatcacgctgacctgctcaactcgcatgagtctttgatgaggcaaccataccctcgtgttcgtggccagcgagcatcgtctaacggagcgaagggtcgagccccgctgatgggtgtaacccgtgatagtgctggcctgctcgcccgcccggctaatgaagcacttgtacacttcatcgagcgtgatggctaagcaagacacagcagctctactatagtgcgcgcaacctggtatggacgctcaggggactgctaaccgtactagtagagcccgcgccaggcggtacagtactccaaggcacaaagaccagggagcgtacgaaacaagtggcctcggaaacaagggggaccccccgcattggacagagccccgaaacaaccatcgaaacgacccatcgacgcgtcccctgaagaacgcatacttcgcgccgcgggaccacggggcgccctcatctcccgtcggcgccccctttcgccccaatacctcttgcgactgcgccaatgctcgggcttgccccaaccaccctgcacatccacgcatcggtggtacacgaacagctactgcgccctactggctacgcccttacaacccaataacccgcggcccaccctggcgggaaccggccccgtgacaggatccacgcgggcgcaactttggtccccctccaagcttccacgaataacacaacacgcccactctcttgcgcgggccccattggctcaccctggcaacaaacccttacaaacacacttacgcggccccaccggcaatcttgaatcttggtaaggtcaccactgaacttaacgcccacaagaacggaaagcgacgccaaatggacctccccggacccctggatttgccctggccctgtttccacacggtccttgccctgattgatcaccgcgcgggccccccccgccgccgccgccgccacccctatcgcccccacccccctccgcggccgcctccatccctcgcgtcgcgccctccctcgccccccctcccgttcgcccccctccgcggctcatcctccgcggccccctccacccacccgtccccgcacaaccgaccccacacaccacacacacccgtcccccaccccacaaccaccactgacccacaccactccctccacacacccccccactcccccccaccccgacatctccccccccacccctcctctactcctcttctctctcacccaccaccctaccaccaacaccacaccacacccactacctgccacccaccaaccacacccctcacctctcccaccaccacacacccacacctacaaccccccaccaccacccctagcaaccccctaccctcctcccacacccgaccctcctctacccatcacacaatacccacacccaccacacaccactcactaccacacactccacctctaccccccatcctctcctcctcttcctctcgtccttcttctcctcgttcctcctccctccactcctcctctcccactctcacccacacccacccccccgc

SEQ ID NO: 542705 - DNA, 371 bp, Homo sapiens
tatacgctcagccaagcagcagatggtgcgacaaccatgactataggaaggactggggaagaagagaaagggagcctggcaaatctgagcttagggagtggttctggagactcgttgagcattactccatctgctacccgaggcttccatagagctccaagccactggctagcttgagaggaaggacgatggtcaaggtacatgtctcttctcctctgactctgggaatgagatttttctactcccacaggcgtagaacgctccttataggagtgtctccacatgccaaaatcagaggaagtcagaataaaccctcccaaggctgaaaactagagctggcacgtagtacatggtcagtaaatgtgtatagg

SEQ ID NO: 542706 - DNA, 471 bp, Homo sapiens
atcatggtgtcagctcaccataagctataaagctttacagaatgctttacaccacctaaccttatgagaatagcactacttttaaagttttagtgacatttatgtttatacaatactagaacaccttgcaacagctgcagatgaacaccatagatggctgggtacctgatgctcgaaatatcgtaaatacataggtacataagctaagtttaccagtgaagatacatagaaataaacgacgtatcaactaaaaaataactaaaaaacagaagaatagctaaacatatacaagacagacaaacctttttcacctgcacaacaacaaacgctaacacactaccagacaacactagaagtatttacgaccaatagtatatattgacaataatataccaaactctctaaacaaatataaaactcccattcacaatatatattaatcaacccaagactcatacttgccaatcccac

SEQ ID NO: 542707 - DNA, 368 bp, Homo sapiens
  misc_feature (101)..(101): n is a, c, g, or t
  misc_feature (107)..(107): n is a, c, g, or t
  misc_feature (117)..(117): n is a, c, g, or t
  misc_feature (141)..(141): n is a, c, g, or t
  misc_feature (146)..(146): n is a, c, g, or t
  misc_feature (206)..(207): n is a, c, g, or t
  misc_feature (233)..(233): n is a, c, g, or t
  misc_feature (242)..(242): n is a, c, g, or t
  misc_feature (295)..(296): n is a, c, g, or t
  misc_feature (301)..(301): n is a, c, g, or t
tgagggagggggctgcaggtcaggtaagatttggaagacaaacgtacagcttggagggcagggggactttaaggcaaggagatttacagttgggaaggagncagtgncaaaggggtnagggacaggggcccttaagtccancaagnaaagctcggtgtgggcccgctttacgctccgtttggggtgacctggaacgccttttttcnnagctccctccagccatcagcagcctnttgtcaagnttttgcctcgccccagtttatccccaaccccaaatcaagacccccttttttcnnggtcnctatttattttttgttcctttttctttttgtaagaaacattcccaaaaaccagtgcaaaaccctcca

SEQ ID NO: 542708 - DNA, 149 bp, Homo sapiens
  misc_feature (1)..(1): n is a, c, g, or t
ntcaggttgtcagcatgtctcgagaatctcagcacatacccactgctgagggtgcatcagtgatcaaacacggtatgaggagatcaggatggagctaagccctgacactcatactcaggctgcttgggcctggaaaaagtacctggtac

SEQ ID NO: 542709 - DNA, 128 bp, Homo sapiens
caggtactcagaatggttagcgctttcaaataatgacgtaggcttttttataataaagcgttaaaacaactaggtgtttggacacctggtaatagaattgttcactcttataaagaaggttgggaaag

SEQ ID NO: 542710 - DNA, 128 bp, Homo sapiens
ccccgttctatgccggaaactacacaggttcacactaggactacacatggactacacaggagctacacaggactacacaggactacaccggactatgcaggaacacacaggagctatacaggagctac

SEQ ID NO: 542711 - DNA, 277 bp, Homo sapiens
agcgacaattatgacgccattatagtgccactattgctcggccgtgagcccggaagctacacgaccaagaaatatttcttacaggcccggcagcgctggcgaagtatgtgccaccagtgcgtccaaggttccgctttcattggtttccacgcgtttgctcagcagtagctcttcagcaccgagtgggtctcgggtggactgctgctcttcgatgatgttcagggtggcgtcggaaggatcgttcttgtccgcctgacgctgtgccagccaagcgcgt

SEQ ID NO: 542712 - DNA, 861 bp, Homo sapiens
gcctgacgcggagacgcaatcgagccgagctgagttcgctcgagcacacgcggttaccgtacgggctgggtctatggtcgctccgcgtcgccgctccaccgggatgcgtagccttttatgactcatgggtcgaagcttgtggttccaatggcagggggaacttctgggcggaggagctccggcactagttattccaagcagtctacggctgaactagtcgttaaagttatagaacgaagcaagtgttatatgcacacgtgccgtacggctactagtttcaccgagatgtctagtgccaaggtaattctccttgaaaacgctatatgatcctagttattaataggcatccgtacatttgtgttgtgttggataggccatccagaagtacgaacgcgaatttgggacgtacgttgccaagactaccaacgatctcgacttcgctgcatcgctaactgctggtcactaaaacagaagcgtaagtctattttgcagtactagcgcgttttcactatagatgggacatttgttcgctggacataagtgacttgacattcactcattacttaacgtaaatggttgcacagtaacttgagtctggtagatgaaaactaccatgcgtaatactgtgggaccatggaatcaaggtttggtgcttggattacgcattacaaagggcaccgcttctgaggcattcagtgggcaactggctgggctcgtggggccacattgggacgggccaaaaggaagcgcacacaatggtacggtccaaagtcggcattttgcccaatagcgccgcgaataatggtcgataattgaagacccctgagcccgcgacaatcggacaatacttgatgacccata

SEQ ID NO: 542713 - DNA, 140 bp, Homo sapiens
ggtatgtcacatcttgtcccactgaagaggcttccagggcactcaccatggagccgtcttctcctatgataacaatgcattcttctgcaatagtccctgaaggacctgcttgaagcggttttaaagttatctttttaaaa

SEQ ID NO: 542714 - DNA, 342 bp, Homo sapiens
aaagcttttttgggcataaccccctgctttggggagggtttggggcgatttttgcctgcttactcgggaaatttgcttttgccaaacccgctttttgggggataccgggcccccctccttactttgggtggttttgggagccccaaccggctccgcccgctttggcggtttggatttattgccctcgtcctccgactcgctgacagggtacaggaccccccacaaccccaatccccgttttggatgccctgagaccccgccattcctcggtatttattgtttgtccccccctaggacccccccccccgaccctcgggaataaaaggccctccatttgcccca

SEQ ID NO: 542715 - DNA, 308 bp, Homo sapiens
gagctcctgggctcaggcagtctgcctgccttggcttcccagtgctgggattacaggcgtgagccaccgtgcccggctaaaaagtatttttaagttctgcatattgcttatttcacttaacactatattagagattgttttaaatcaaaacaaaaaaaaagctttattttgttgcacattgccaattttcccaacaaagataattacaggggcctttaaaccattttgcttttatttttagacaaaatttaaggaaacaagtggatgttttgtggttaaagctattaaaacagtggtttttgaccaga

SEQ ID NO: 542716 - DNA, 389 bp, Homo sapiens
ctagtagcaggctgttttagagccatctaatattacatcttgtaggttctcatccttagtgtgactttctattttcagatgcgtgtggagtagacccggatgatgaacaaatatactcccagggagtctctaagtatggagtgatgagagctattagatctacttgacactatcttgtaccttgcttagaactaagttactgtgagggattatagagacggtttgtcatttattccactgataagtttctgttacttattttgacattgcatttttagtaaggaaacagtgatagtcttctacagaagtagttctttcgatatttgattcttttactttggtgaagtggcttattcatctcaatttgtatgtcagttttataatacaaa

SEQ ID NO: 542717 - DNA, 218 bp, Homo sapiens
ctgcaccattgactgtccttcctcaagtccaaaggcccatgacatcctcatgcccagctgcatgaccgagtgggctaccagatgtcttactgtttaccaaagctctccaagcggactcagacgttagcttcctgggcctagtgtagactgttcagcaccagggacgatgagggtttaataaggatttacggggcagctggtacccaacagactggtgt

SEQ ID NO: 542718 - DNA, 994 bp, Homo sapiens
  misc_feature (994)..(994): n is a, c, g, or t
ggcaacgctatggatcccataaggacctatacatcctcatgagccacactagtggctctgcagccgaggcctttgctcacactatgcaggacctacagcgggccaccgttataggagagcccacagctggaggggcactctccgtgggcatctaccaggtgggcaacagccccttatatgcctccatgcctactcagatggccctgagtgccagcaccggtgaggcctgggacttggctggtgtggaacctgacatcactgtgcccatgagtgaggccctttccacagcccaggacatagtggtcctgcgtgctaaggtgcccactgttctgcagacagctgggaaactagtggctgataactatgcatcccctgaattgggggccaagatggctgccaagctaagcggtctgcagagccgctatgcaagggtgacttcagaaggggccttggctgagatgctgggggcagatctgcaaatactctctggggacccacacctgaagacagcacacattccagaggatgccaaagaccgaattcctggaatcgtgcctatgcagattccctccccagaagtctttgaagacctgatcaagttttccttccacacaaatgtccttgaggacaacattggctacttgagattcgacatgttcggggcactgggagcttggttaccagtctcgagctgttgggagaacacctcttggaccaagactgtgccactgatggcctgatcatcgacattgaggtcaacctgggggcccactctcaatcagcttgtggctaattttgaagaggcccccctttgtgggacgcttcaccgcccagatcggcggaattggccacacccagggagaattgccaaaaggaccgcaggggacaggcgcaaaaaacaaaaaggggccgcgacaaaggtggacacagagaagacaccaccgggagaaagagggagatcacaacacgagtcacgccgggcgctcacacggcn

SEQ ID NO: 542719 - DNA, 253 bp, Homo sapiens
gtcggggacatttctttgaactcgtcgtttcatgatctgtgatgatgccgagaacaatacgctaccgttctctgaacgttcgaagaatcataagaggtaagatagagtaaagctccggaggctctaactgtcacgcgggatcggagttttgtcctcttggcgcccaggatttcagagttcaaggctgaggccgcgccggctctcatgtcatcgggcaagggcctcttcccctcctgactcccgcgatacagcg

SEQ ID NO: 542720 - DNA, 822 bp, Homo sapiens
  misc_feature (391)..(391): n is a, c, g, or t
  misc_feature (479)..(479): n is a, c, g, or t
  misc_feature (484)..(484): n is a, c, g, or t
  misc_feature (486)..(486): n is a, c, g, or t
  misc_feature (553)..(553): n is a, c, g, or t
  misc_feature (572)..(572): n is a, c, g, or t
  misc_feature (582)..(582): n is a, c, g, or t
  misc_feature (592)..(593): n is a, c, g, or t
  misc_feature (596)..(596): n is a, c, g, or t
  misc_feature (612)..(612): n is a, c, g, or t
  misc_feature (624)..(624): n is a, c, g, or t
  misc_feature (746)..(746): n is a, c, g, or t
  misc_feature (786)..(786): n is a, c, g, or t
tggacaagcagtttgaagagagaaagaagcttgcagcttacatctgatcctgggcttccccatctggtgcttttcccatggagaacacacaaccagtaagtgaggttgccccacacagccgtctcccagggaatcccttctgcaaaccaaacgttacttagactgcaagctagaaagccaccaaggccaggctttgttaaaagaagtgtattctatttatgttgttttaaaatgcatactgagagacaaacatcttgtcattttcactgtttgtaaaagataattcagattgtttgtctccttgtgaagaaccatcgaaacctgtttgttcccagcccacccccagtggatgggatgcataatgccagcaagttttgtttaacagcaaaanaggaagattaatgcaggtgttatagaagccagaagagaaactgtgtcaccctaaagaagcatataatcatagcattaaaaatgcacanattantncaggtggaaggtggcaattgctttctgatatcagctcgtttgatttagtgcaaaatgttttcaagantatttaatggatgtaaaanagcctatttntacattatannaantgagaaaaaaatggtnggtaaagtgttntttaataataaataataagaaatggtaaaatttgaaggaaaagtgaagaatatgagtgttaaagggaaaaaaatgatggaagtaaattgtaaaaaggtatgggagaaaatgaattgatgggntgtttatgaaaaaggttttgtttgtgaaataaagttatanaaatttataatgaggattaaaattaatataatataa

SEQ ID NO: 542721 - DNA, 119 bp, Homo sapiens
cgcaggagtatgcagacccatgagtggactgctgcacagaaggacaggaagtgacggggctttccagccccccagcagtgtccagcccttgtgatgaagctaggaaaaccccatgaatc

SEQ ID NO: 542722 - DNA, 203 bp, Homo sapiens
  misc_feature (178)..(178): n is a, c, g, or t
accacgccaccggagaagggggctatgtaaattgcttcgcacttcacccatgaggcaagcgctccgaaggtgcaagctatcattgccttggcgtctttagacttacgcattttcttgggctgcctcttcggcctttgagaccttcctgtagcaatatatctctcgatgagcagccacnagtgagccttctccggtggcgtggt

SEQ ID NO: 542723 - DNA, 183 bp, Homo sapiens
gggattttttttttcattaccccccctccgcaaaccccagaccccctccctttttttttggattgtttgcccttttggggggggggccctccccttttcccctgcctgttcctccatgttgtgaggtgttttggcagttttttttttttgtgtagtcaggggaaaaccaaaaaaaaatgccca

SEQ ID NO: 542724 - DNA, 1441 bp, Homo sapiens
gaggcattgaggcagccagctgcaggggcttctgctgcagggggcaggctggagcttgaggaaaccgcagataagttttttctcatttgaaagatcagagcattaatacaactacttcaaacaaatcatcggtcgaataaggttcactcaagcatattggcttcagcgttcaagtttttaacggtcaattattaatcagcttcaagcattttcaagcagcaaaatcatgcacagcacttcagcaagaagtcagccatgcagagcaaggcaaacaagcatcaacacagggtttctaaaaaagcatgcacgggcagggtagcagcatgcacagctctctttccaacggggatgtaacaaaaattggtatttcaacaaatgacacaatatggaagcagcaaaagggcacatacacaggaagacccacggaaatatcaagtaccagaataaggaaagggtgcaaattggctgttcatagcatttcactaattggcaagggatgcactttcaaaaaccaggtctttagacaggtaaatcagatttataaacaaagttttagatacagggataggaatattaaaacatccaaagtctgtggcaatgaggcggacatctttcttataaaaacagaagaagccaggcattttgacacacgcgggcgacaggtgatgcatctaagcaaaagagacgctattggcaaaacatttcacccttgggcaccggacccagcgtgaccacgcacaactgtgtggccagattcccagttctctaaacacacggcccccttcagtgcatacacagcggtcgacctctactaccctaacacaacacggtgaccaagcactagaaaacaacaatgggggcacacatcgcatttcaacatcggggaggcagcctggaggaaagaggcactagcaaccagccacaagtgtaggcgcccaggacaagagacacaacagaaagagactatgcggcacacggcgctgggcgaacagacagaacggttgggtaccagccaaccccgccaagcctaaccgcgggaacaccagggctcgacaagcgcaacaacagcgacacactaccgcgcgagcaaaacacgccattagcggagcgaacaccaatcatacagacaacatggcacactaaacacacaaccagcactatcaagtccgtcataacggcaacctgcaacagaagcaacggacatattagaattcgtacacgcacgaggaaacaccaacgatcagaacaaaccgaccagcacacgaaaacaccaagcagcaccacagatacacaacgacgcacacaacacgaccaccaagcccacagggccgccacacacccggcaaccacaccaactcacagagcacaccaacacaagctggaccgaccactagacacgaccagaagacacacacacaaaagacaaagaatacaagacgca

SEQ ID NO: 542725 - DNA, 1068 bp, Homo sapiens
gaagacaaaaaaaaaaataagcgtaacttccctcaagagcaacaacccccccccccaccccttcgcccgttgcctccctcggcccagccagtgtgtgtgccgggcgtttggctgggcttgccctgtgcgcccgggcccttccaagccaagcctttcttgccgggccctgtgccgctgaatggaaggtgccccaagccgggagcccggcgcctaggcttcggctcttcagtccaagcagagggggtgtgtgggggtggcgacccagagggttccggggcccagacctctccgcgggccttcctgtgcgtgggaatcttccaagtggccttcctgtgggggttccccggtgtgacggcgcggtgccagctttcacatcgcgcgcggttcaaaccaaccacttcagaccccgagaacccaatgacccaggaacacttctgcccgaggccttgcggcagagtcgggaaaaccccccaaagagcatttcaaagggctgagcggacaccctgtgcgtcatctccccgcaaagcgcggtaaaggccgacccgtggaagcggccaccctatatctcgcgcgtgtctctctcaaacgggggacattcccgagaaaattccctccccgtgtgtccgcctcgtgaaaattccctcccgacacattcttccgtaaagtgcgaggttacatcgtggcattgagcactttccccccacaagcccctatatgtggggacccccccctaaaaaatgttgcgcgagagacggcaaacaaccgctgtaggacaacaagggcacaacactcaacagggcaaccctcaatgcccgcggagaaactcattttcacatcacacgagaaagaaaagttctggcccatctaatacaacgcgctttcacaggctcattatcgcccccgcgatgaagcgccttagctgtggggcccacaatggccccagggtgccatatcggggaaaaaattttaaccaaaatctttccccaagtggtgagcctcgatatggctccccggagctggaaacaccaacccatatggggtgggacaacatgtatacacctctcgaca

SEQ ID NO: 542726 - DNA, 1438 bp, Homo sapiens
  misc_feature (230)..(230): n is a, c, g, or t
  misc_feature (262)..(262): n is a, c, g, or t
ggttgatcatagaggacaccgaatagccctgaattcataacaggcaatagaagtcgagcgacgtggagcgtacccacaaagtgtgctcaacagtgtgtcaccgacagtatgcggcatgagtattgactcgtgacactgaccgtaccttcaccgtgttcagcctagactatggtatgcgcgcgcatgacgggttgagccttgttgagcgttgatccaaactgacgacaggncgaacaggtgggacgggctaggctggagaggnaccctaagagctgatttgaagtggtcgcttgagttgatgcacgaagagaatttacatgctgcacccgacgagatagtcccagcaaggaatgggctcggaagagggaattccttgagaagcaatgtgcgacaccttttcggtcaagcgcagttgtcgcgagttgtatgcaattcgcagaggcgccgagagatgctgacagaggaaccatatgaagctaataacagtcggtagggaatttgggcttgtaacgcattcgtaaggttcgggaagaaggaagtattctcaaagaaagcgcgccttatctaagcagaggaattaacgagacacataggggagcacggaagagattgaatcgaaaaacggaacggaagtggattatcgaacaaaaaaactttatcattggaaggacctaggtctgggggtaaaaccgcaaataagtcaaattttagtggatcccagagaatgtggggctttctgttgacatggaattgaaaggacgaagagagttctacggttttatcttttagttatctaggtgaaagcttacaacctttgggccgatgtcaggggatttcagacagatggccggtacatcgaagcgtaacccgtggaagaacctgtgtagagccttggcacttgaggccggatgtccaaggcacaaccaaagtcgccaagaggtgcccgtgggaagtcagggtactcccctaggggtatctccctctagaggaaggctactctaagcccagggctccaggagcgacacaaggacatgggagagggcctttttagacctcgaggttaccccctgagtaacccacagtggaccgaagttccttccaaattagtgggccaagaacacaagcatcaaacgcggcacttcaacgcacgaaattggtcgtaggcgcgcaattctcagaaagtgcgacgggaggtttcaaagggaacaacgcttcgccaaagaatcccctaggataaaaacgccaaattggtttgaaaattttaagccacggcgcacgcgggcaacaacactcaaatggaacttgaaaatgcacgtccctgcaagagatacatggcccgccaacaactgcgcgacatacccacgactttaatatgagcacaaagtgacgctccgaggcacagtttgcgtctagctacacggggctagtgacacacttg

SEQ ID NO: 542727 - DNA, 490 bp, Homo sapiens
  misc_feature (361)..(361): n is a, c, g, or t
  misc_feature (388)..(388): n is a, c, g, or t
tgaaagtattctagaggatcttagtctatacaccatgatcatcaaggatggtttccaggcgaggcttatccattgcactccggatgtgctgacccctgcgatttccccaaatgtgggaaactcgactgcataatttgtggtagtatagataggtcagtatagataggtcagtatagataggtcagtatagataagtcagtatagataggtcagtatagataggtcagtatagataggtcagtatagataggtcagtatagataggtcagtatagataggtcagtatagataggtagtatagataggtcagtatagataggtcagtatagatgcggaggtatagataggtcagtatagatangtcagtatagataggtagtatagatangtcagtaatagtagttaatagtcagatagatagtcagatagatacgtagtatagataggtagtatagataggtcagtgtgtatcctctagagtcagctatga

SEQ ID NO: 542728 - DNA, 466 bp, Homo sapiens
aaaacaaaaataataaaaatgtgacaactacagagagattgacaaaattctgaaactagcgaggtaaacaaaaatataaacaccatagaaaacatataaaataaattaaacctatctattctcttccccgagattaacagcaaatacagaaagttctcttagaagtgggtctgatgctgcagagccctcagacttcagcactagatgagatggagaccgtgggtagggacggagttgctttgctaattactcgagtgcaggtttggtccactccgcgctttgacaggtacgtccctgcccgtaatctgatacatacatgactgtggagagttcgctagagcatgtccttgtagtgggacctcagttcttcctggtactccagctggtcctctttgatgaggcgctcattcacgtcaagggcctgcccacatgcatctgcaaattgcctgaagatctccttcaaaag

SEQ ID NO: 542729 - DNA, 396 bp, Homo sapiens
  misc_feature (267)..(267): n is a, c, g, or t
  misc_feature (294)..(294): n is a, c, g, or t
ttacttaccttaccctaattcaattaacatacagccacgtaatccagatgatagataggtcagtatagataggtcagtatagataggtcagtatagataagtcagtatagataggtcagtatagataggtcagtatagataggtcagtatagataggtcagtatagataggtcagtatagataggtcagtatagataggtagtatagataggtcagtatagataggtcagtatagatgcggaggtatagataggtcagtatagatangtcagtatagataggtagtatagatangtcagtaatagtagttaatagtcagatagatagtcagatagatacgtagtatagataggtagtatagataggtcagtgtgtatcctctagagtcagctatga

SEQ ID NO: 542730 - DNA, 151 bp, Homo sapiens
gcggccgcctactactactaaattcgcggccgcgtcgacgggagataccatgatcacgaaggtggttttcccagggcgaggcttatccattgcactccagatgccctctgaatgacgcactgtatgccacaccgcataggatcctgctagg

SEQ ID NO: 542731 - DNA, 225 bp, Homo sapiens
aattccttttaatacatggtaggctttgacgcgacaggaaccgggggatccggatgggcttctccaggatcacttggacaaggtagtcctctgtgtacatgtaccgggttgtcggtagatgatgtcgaacggaggaagcgcccggaacatcatcgtcaaacatgatggactcccagtcgcccaccatgtccacgactgacacccgatactccatctccccgacag

SEQ ID NO: 542732 - DNA, 542 bp, Homo sapiens
  misc_feature (236)..(236): n is a, c, g, or t
  misc_feature (238)..(238): n is a, c, g, or t
  misc_feature (264)..(264): n is a, c, g, or t
  misc_feature (336)..(336): n is a, c, g, or t
  misc_feature (498)..(498): n is a, c, g, or t
atctctgcgtggttcgctccctcccttcgggtctccgttcagaggccttttcggatcacttcctctaatccagcgccctctctctcaacactttccgctgattttcttcacagcagtcatctaaaattacactgcacatgcttacggactgggccactgatagttaatgagcccttaccgtgtgccaggaccctgcacgaatcaactcagttaattacaatccgaataggtggggncnatgattagtctcattgtgcggacagnaaactgaggaacagagacgttaagcaactcatccactgtcacatagcctgtaggctgtgaacttggatttgnaagtcaggcttttccaccagggcagagaccttgttttgttcactggtgtatccccagctcctggcccacagaaggtgctcaagaaatatgtgtcgaatgaatgagagtctgggcttctccctctccctgcatcactccgcaacagccgggccggctctggcncgactttctcagcccctgcccaccttcagctacgccggcggccg

SEQ ID NO: 542733 - DNA, 151 bp, Homo sapiens
gcctccgtgttctattgaaagcttctccctggacaggcggcccacttctaatgttatgaatgggctggacaaagcctctacttgagtttttagacggatcacatccactagtaaatgtaaccgaactctaaattccaacctataattgacc

SEQ ID NO: 542734 - DNA, 1581 bp, Homo sapiens
  misc_feature (590)..(590): n is a, c, g, or t
  misc_feature (976)..(976): n is a, c, g, or t
  misc_feature (1581)..(1581): n is a, c, g, or t
ggcactatgtgcgccgcgagccccagtcgaaacgaggccacccgtgcagccgtgtccagttccaggtccgggtcggtgcccgggtggtgccttgtaatcatagcgctcggtaactcctctgcgcttcttgctcctcttctcacttgcgatgtctggtgctcactttgcgcccctcacttgcatagctcgctgcggtcagtcggggatgccgtcgcgagcgacgctagcccgagagctgcatcactgtcgagacatggacgctcgaagcgatagcacgcagttcaccgtcgggcaatgtctcgcattgtagtagctccctgggtattaggaggaaatcgcgaaggagttgaactttccgaaagccagagaatcgcaggcggacgtgcatcttgaggacttaatgtaataccgacggacgaatgatgtccttcctacagaagtcaccatttggtaatggccactcgctttcgctctggaaaggcaattgtagcgttagggcgacccacatctacatctaatggagattttgtctcgatgggttataatggttttcgcggtgaggtccatggcgagctcaaaatgtccaatcnatcacatggggcacctgtagttcacgagaaaaggcgaggtgggggaaaacacatgtgtagccccaaggattccccaaatgaactgttgtgaacaggggcccaaaacgtttatccggccttgttggcccaattaggaagacgttcccctgttggcccaaggaataattcggattgcgacgggttgacacacggaacccaggactggcacgtgaaccaaaaggtgcaacgcctcaatggcttgtcgcggaagttgtacccgggaattgcttttcccacgcttcttcaaccaaatgaaaacacagagaggaacacgctgcaacacgacacaacggtccgaaaagttcccaatgcccggaagaattggcttacaggaacaccacaggggncccacaggcaggggcacaggttcccataggctcggggggacttctcccaaggcccccttggagtttaaccctttatcttcctttggaattggggaagcttcccagggccaagtcttccccaacctttcttttggcgcttgtgagtttgggacccaaccaaggccaagggttaaccacccagggtttcccccagggggccttccccttttgccacggggacccttttgggccaggggttggggcagcccccagggggcgcccttggagagtttcccccagggcgttctctcttggggcacgacaccgcattccgggagctgtggtgtgaaaggcccaaaaccaaagaccgttgtcgcgtttcggggaacacagggggtaccccttaatcttccaattggagaccctctgtggaggtctctagagaccaaccaacctctatttggtgcgtcaattgggggcgagcctttacaccttgtcgtcaacgacgaggcgagagagcgcccacacacacatttttgaacataccgccccccagcggggggggagaacactatcgcgcggcgatagtccgaccaccacacagagtgagtctcacaacaaattan

SEQ ID NO: 542735 - DNA, 99 bp, Homo sapiens
catggatttgctggtgcagtacaactaggcttaatagggacatgcaaaagtctcgttgcatttctactcactagctacaaaccatctaaaaaaaaaaaa

SEQ ID NO: 542736 - DNA, 708 bp, Homo sapiens
  misc_feature (694)..(694): n is a, c, g, or t
cccctgtcctgcaagaggattcgcagtctctattagggaaggtggacaataccctgtctgtcattccaaggccagaagtgactgccaaggccagacatccttggggtgagaggaaccttgctttctatggccctcctgatggcgaggcctggtctcaggccaaggagatgcggaaagcagtcccagagggatgtctgaggcataccaggcactcgaagaatgataggaggtgcacatggaagagatgctagcagcagcctacacttggacttcacaagacgccactgagagcagcctgcactttacacctgcactccacaagacaccactaggagcagcctacactctacacttggactgtacgagacgccactgatagcagcttacacttggactttacaagacgccgctattgcgcgcatttgcttagctactcagacttacatacagactgtgactaacccttgacgacttggctcaacagctaactcctctatgaagtgcttgcatgccacggaccatcagcaagactccagctactgcgccctcacagtcttgatgagaactcctcgagccaggcactatactctgatcctatgaatcgatcatcagtctaattctaagcatgagatgagtttcatatacagcacggatatagacgttgtcattgagtaggagctcagacagcatgacntataggcaagactg

SEQ ID NO: 542737 - DNA, 149 bp, Homo sapiens
ccactgataaagcaatgtacagacccgagcgcagtatgttgctcgaaatgcttccttcgcgatggcgtcagtgttccgtgagggaatgaagccgcagtaggaaataaagaggctgtcgggctagtcggggactgtcgggctagtcgggg

SEQ ID NO: 542738 - DNA, 727 bp, Homo sapiens
ggccccggttttggctttttgtgtggtttgtcctttcgtggcttccctgttccgggtggtttcccctttgtgatttccctgggttctatcggtgcctggcttctgtgctgtcagccgtttcttgctctgtactgtttagcctttgtttcacccccctgggtgtttcttccggtttttttcactttttgcagtttgctgtatgttttacttgggctgttacttcctcccagggttgggtcgattttggtgccagctcgtcggcgttttgctcgtttttccccgttgtcgtttgttgtccggcgttgatctgtgttttaggtcaccccttcccctgttcttgttagtgctcgcttgagttgttattagctccatttttctttgatttgtctgcgtaattggctttagcgtttctgggcgccctttagcttagtccctctctgggtttagttcccccgctatgcttagccctaccgctctgcggtttgatcttctgttctgctcgcctgatctgtccgatcctcggtttggatctcttaggccctgtcggtgcttcttatccctctagaggagcctgttctgtactcgatgtgccccgttcttcctctccgcctcttgctcagctttttttccgccttcttcagcaatccctgatggtggcttctatgttagcgctagtaccctcgtacggtcgttaggtcatgttgtagcgtgttgtattgttattttt

SEQ ID NO: 542739 - DNA, 414 bp, Homo sapiens
gggggctgaacgtttgttgctcttttccgggaggcaggctaatccagggtcgtaggactgccgttcaaaggttcagtgcaatcggggcaagtctttggaagcaagaagacatcgacagctgtggcgcacttgatacgcggctatgggcttatcaaggcgaacgggcggcccctggagatgattgaaccatgcacgctacagtacaagctgctggagccagatctgcttttcggcaaggaactgatctgctggcgtagacatcgcggtacctgttatgggtggcggtcacgatacccagatttatgttatccatcatgccatctccaaggcctggcggccattaccagaacttttttaggtttccagatggggagaatactccttcggctccggaccctatgctagctgccctct

SEQ ID NO: 542740 - DNA, 311 bp, Homo sapiens
ccggcgaagcgagaagtctctctccggtgggtgttacagttgtacccgtgggtaccatggtcacctgagaccaggtgggggctggcggagtagcactcactagcccctgagaggtactggagtccatgtcccgtggttcaacctgggggatgtggtaaatgaggagaacatgatccctggctttctggatagtctgggtcaaacgcttgtgctgcttcacacagactcctgtgtattgagcatagaagatgataaccgtgtaggcgcagacaaaattctccaagaactacacgttcctcctaagttcagag

SEQ ID NO: 542741 - DNA, 144 bp, Homo sapiens
gctacagaactatgcatggaccttctatttctgtgccccaccatggggttacgcccctaaaacacactggcccagcaatgatatgtgtgctggcatagccagccaagtggcccgaaactccgaattgagatccacaattttaga

SEQ ID NO: 542742 - DNA, 521 bp, Homo sapiens
  misc_feature (13)..(13): n is a, c, g, or t
  misc_feature (15)..(15): n is a, c, g, or t
tgccccatccttncntctctcacggtctttgaccaccacatgaagctcagagccctggtccagggggatgcccttgaggtcccattcaaatccctggaagaaaaagagaaaaggcatcttaacctatggccctctaggagaagagactgtgtctggttcaccttcgtgccaccagggcactgagtaggcattcatgaatgattctagtggataggcagatggatcaatggatggatggaagcatggatggatggatggatggatggatggatggatagatgaagaccacagatccagaaattcagaggtgacagtatgagctgaagacagcagaagagaggagagaggtctttcacaggcccctctcccaactcagtttcaacccatccccaggaagccaagccaggagtgtggctgggaaaaagccaggtgaccctgaagcatcctcaaggaccaagattattgggctcatccagacgccaggccctggcgtgaaagaaggaagggggtaccgagctaaa

SEQ ID NO: 542743 - DNA, 229 bp, Homo sapiens
  misc_feature (28)..(28): n is a, c, g, or t
  misc_feature (134)..(134): n is a, c, g, or t
  misc_feature (145)..(145): n is a, c, g, or t
  misc_feature (164)..(164): n is a, c, g, or t
gccagttctacaaggaatcattgatganagttatgccttatgttgatatactttttggaaatgagacagaagctgccacttttgctagagagcaaggctttgagactaaagacattaaagagatagccaaaagncacaagccctnccaaagatgactcaagagncagcgaatcgtgatcttcacccagggagagatgacactataatggctacaggtccatgtgggaat

SEQ ID NO: 542744 - DNA, 468 bp, Homo sapiens
ctatcaagtaccttaaagccttgttgccccattcaaagccttgtactagtaatagaagtggcatacataataaaggccttatcaccaatcaccatgagcatggaacacctatgtgccaccagggcactgagtaggcattcatgaatgattctagtggataggcagatggatcaatggatggatggaagcatggatggatggatggatggatggatggatggatagatgaagaccacagatccagaaattcagaggtgacagtatgagctgaagacagcagaagagaggagagaggtctttcacaggcccctctcccaactcagtttcaacccatccccaggaagccaagccaggagtgtggctgggaaaaagccaggtgaccctgaagcatcctcaaggaccaagattattgggctcatccagacgccaggccctggcgtgaaagaaggaagggggtaccgagctaaa

SEQ ID NO: 542745 - DNA, 290 bp, Homo sapiens
  misc_feature (13)..(13): n is a, c, g, or t
gtcgacatctagnaggatccccgtgattattaaacaagtaccataataatatcagccatttgtcagttatgcggggagtcaggcatggtcccacgctgcaacatcagagatccctctttgaaataacccagctttgccaatgacatctcttttctcaactgcataacctccctaaacatctgatcaacatcctgctgttacacgagtccctgctgaatgtatcgaatgtttgtcaaaaagttacatacagaaatgatcctgtatctgcaaaaaagagaaatattataata

SEQ ID NO: 542746 - DNA, 294 bp, Homo sapiens
tttatagtatagaaagagaagagcaacattaaacaggatttcaatcttcttttttttgtttttgagacggagttttgctctgtctcccaggctggagtgcagtggcccgattttggctcactgcaagctccgcctcctgggttcatgccattctcctgcctcagcctccggagtggctgggactacaggcgcctgccacgatgcccggctaatttttttggtatttttttagtggagacggggtttcaccgtgttggccaggtggatcaactgaggtcagaagtttgagaccag

SEQ ID NO: 542747 - DNA, 232 bp, Homo sapiens
cctgggggcccctgtggacaaacgtgggcttcaaaagctcgctggcctgggccccccagcatttttttttatgaacatgaaacactttggccttcctttccccagcgcccctaagggccaaaggcaaatgtgggctgcaggctgcccagcccaagggtctctggctgcgggcggtgggccccttcatggggctcccctggtggattcacattaaaccggtttttgtgggcca

SEQ ID NO: 542748 - DNA, 211 bp, Homo sapiens
cggtctcaccctcccaaagtgctgagattacaggttgtgagccaccacacccagcatatcgagaagttttttccatttttggggtttggggggaagtttttggtcgtatgtgggtttacttggtttgggtattaattttggtctctgttttgagacaggatctctgttgcccaggcttggtcatctctctacttagggatcagtgggcatc

SEQ ID NO: 542749 - DNA, 769 bp, Homo sapiens
gggctgggatgtctgtgcttatcttgggttcatatcttagagttatgaaagtaatataatcaatactcatcacaattcagatttatccaagaaactggagaaatggaaaaatgccagcccttatgctatatgattaatataaatagccattattagcttagtagtatatctaattaccatcttttatccacagcatatatttaatgtgtgtatgatcataatgaacacagaatttggttcctgcctgtgttgcttccattagctgtgtgtcgacgcgtatgttgagagctgcaacataatatctatgctcctttttccaaaggctgttgttggatgaagggtctgccactttgtctgtaattgactcaaacagtccacactagttgggcacagagtccatccaccttttcactggtgtacccttgagctctgtgcatacagtcttctccgtatttaggatcactttccattggcacgactgtttgatcaaaatgctccctttccctgatcccggtgaggtgtaaacatgggtcaccaaaaagagagagagtgggtgtaaagaagaaaaccacatatactgggaagggtcacctcccacaccctaagggaaccttccccaaccgggtgtaaaacccaacctggagatgaagccagcaataacgctaaggggggctctaacgggccgccagaaaaagccaggaacgacggggcgcaaccacacaaaataacgaacacccccacacaacaccagaggccacagaccccgggc

SEQ ID NO: 542750 - DNA, 993 bp, Homo sapiens
ggagtgaagggtctgctgctgaacattggggggcaaataaccggagtaggtttgttcctgtgccttggcgagtcgccggcctgctgggaacgggacttctaacaaggaactatgtctggaaggctgtggtccaaggccattttggctggctataagcgggtctccggaaccaaagggagcacacagctcttcttaaaatcggaccggtggtacacgcccgagatgaacaacagacattctacttgggcgcaagagatggcgcttactgtactatacaagcaacagacacaacacacgtcactcctgggcggcaaaccaaaccaacaaccagagtcatctggggacacaagtaacctcgggcccagtggaaacaggggcaagtggttcggagccaaactccgaagcaattctacctgctaagggccatgggcacccagaatccgagtgctgctgtacccctcaaggatttaaaactaacgaaaaatcactcacctcactgtggactcgtgctctagtcataacaaagtggattcacgaacacgttacaagccaacaccagacacagaacacacaccaacaaacacacgcgagggcgccgccagcgcaccccaggcgcaaggctaaacgacaccacgcgccgggacgaccgggcggccacagaaggaaccagaacaaggagcactacgccgagcacacgaaggaaaaccggcggcacgacacacagcgcgcgggacacatcaaccacaaaaaaaacaacaccggagacaacacacaagtcagagaacaaaccaaaagacctccaggagaccaaggggaaatacgaaaggggccacaagggagcccatataaatctgcgccgccgcgcgaccaaaccgcagcacccatcgcgacgcacgcccgacgacgccacccgacgcgccgccacgcaccaacaacacaacccaccacacccgcgaagccgcacacaccactacgagacatccacgacagcga

SEQ ID NO: 542751 - DNA, 106 bp, Homo sapiens
gtttctcattctttagtgtattaacattgtcttcctcttctgcagttgatgtaattccttcgtttgaattagacagctgcataatccagtcaggactgtattaact

SEQ ID NO: 542752 - DNA, 490 bp, Homo sapiens
  misc_feature (142)..(142): n is a, c, g, or t
agatctcaatccttgcccattctaactgaaccttccttagatccgttcactgcccccttcctctggactacactccaccatctcttgcctggaccctgtgagaactttctgccttcctgcctttatccttctccctgctccngcgctttagctgatgatagttccggatttcaaaaccccttaatgattccctccattgatcaaagtcttccatattctttcaagttccttggtgatccaggacctgccgccttctgcattctccctactgatgccatagttttggcttctggcctcatatgtcccgtgtcatttctctgtgtcactggctctttttacccctgactcagctggcttcactgctttcccattggatctcaaccctgtgtacctggggagagtcgtgaactctgtatgtcttgtcttgtgcttgtagtcactcagtgtttatgtttggatatttatatatatatttatatttattttaaaa

SEQ ID NO: 542753 - DNA, 324 bp, Homo sapiens
ctgctccgcccctctctgtgagaaacacccaagaatgatcaataaaaaaaaaaaaaaaaaaaaaggggggggttatccccatttttggctaatcggccaggaaaaaggttttttattttttggggcaaagagcagtggacctaattcagtaaaacatgtttagggggttaaattaaaggaaggttcccatgatcaaaaacctcgaaggagctttaagtttctggggggacccccttccccccccccggttattggggctttgggacaggggctggggaaacatggtatgtggggcctttttgggaggcaaaaataacaaatgtg

SEQ ID NO: 542754 - DNA, 132 bp, Homo sapiens
ccacaccctcagttggattgtatggcttgcgacctgggggcccgacgggcgcctcctccgcgggtatgaccagtccgcctacgagggcaaggattacatctgccctgaacgaggcacctgcgctctgtggac

SEQ ID NO: 542755 - DNA, 602 bp, Homo sapiens
  misc_feature (44)..(45): n is a, c, g, or t
  misc_feature (55)..(55): n is a, c, g, or t
  misc_feature (59)..(59): n is a, c, g, or t
  misc_feature (63)..(63): n is a, c, g, or t
  misc_feature (65)..(65): n is a, c, g, or t
  misc_feature (69)..(69): n is a, c, g, or t
  misc_feature (74)..(74): n is a, c, g, or t
  misc_feature (79)..(79): n is a, c, g, or t
  misc_feature (93)..(93): n is a, c, g, or t
  misc_feature (95)..(95): n is a, c, g, or t
  misc_feature (98)..(98): n is a, c, g, or t
  misc_feature (101)..(101): n is a, c, g, or t
  misc_feature (106)..(106): n is a, c, g, or t
  misc_feature (110)..(110): n is a, c, g, or t
  misc_feature (113)..(113): n is a, c, g, or t
  misc_feature (120)..(120): n is a, c, g, or t
  misc_feature (129)..(130): n is a, c, g, or t
  misc_feature (132)..(132): n is a, c, g, or t
  misc_feature (136)..(136): n is a, c, g, or t
  misc_feature (156)..(156): n is a, c, g, or t
  misc_feature (159)..(159): n is a, c, g, or t
  misc_feature (162)..(162): n is a, c, g, or t
  misc_feature (165)..(166): n is a, c, g, or t
  misc_feature (168)..(169): n is a, c, g, or t
  misc_feature (171)..(171): n is a, c, g, or t
  misc_feature (173)..(173): n is a, c, g, or t
  misc_feature (179)..(179): n is a, c, g, or t
  misc_feature (183)..(183): n is a, c, g, or t
  misc_feature (189)..(190): n is a, c, g, or t
  misc_feature (199)..(199): n is a, c, g, or t
  misc_feature (251)..(251): n is a, c, g, or t
  misc_feature (254)..(254): n is a, c, g, or t
attggaatgccacagggctcactaggcaggcaaagtgtgtgagnngaaggaaaanattnatcncngttntggtnaaagnggaagagggccctnanttnttnaagtntggngangccgccntggttaaanngntccnggccagcccatgtgtgtganagnttntcnnannancncccttngggncgtttnntgtttgtantaaaacacaacacagttcgggtgggggtattcaaacaggtggacaaaaaggntgntggaggtggcaaggtccccaagtttgcccaaaaagctcagaagggttaaatgaatattttccctaaaaccggcccccccctttttaatcagggggggaagaggggtttcaaaactgtttgtttcaattggccctttaagtttaggaggtaaaaggcgggttaatgaaaccaatgcctggtaaacccttcaaaaggaaaggaaaatgttttggggccccctttggttttttttttgggggggggcagttttaaggtattagtttttaaaaacaggactttttaaggggaacaacttggccaaaaatttgtcccagaattttgagcccccttaaaaaagtttaatgggga

SEQ ID NO: 542756 - DNA, 612 bp, Homo sapiens
gcgtcgaccgcagcaccgcgcatgctccttcttttccagccccggtaccggaccctgcagccgcagagatgttgatgcctaagaagaaccggattgccatttatgaactcctttttaaggagggagtcatggtggccaagaaggatgtccacatgcctaagcacccggagctggcagacaagaatgtgcccaaccttcatgtcatgaaggccatgcagtctctcaagtcccgaggctacgtgaaggaacagtttgcctggagacatttctactggtaccttaccaatgagggtatccagtatctccgtgattaccttcatctgcccccggagattgtgcctgccaccctacgccgtagccgtccagagactggcaggcctcggcctaaaggtctggagggtgagcgacctgcgagactcacaagaggggaagctgacagagatacctacagacggagtgctgtgccacctggtgccgacaagaaagccgaggctggggctgggtcagcaaccgaattccagtttagaggcggatttggtcgtggacgtggtcagccacctcagtaaaattggagaggattcttttgcattgaataaacttacagccaaaaaa

SEQ ID NO: 542757 - DNA, 1418 bp, Homo sapiens
aaaaaaggtcaattcatagaagaacttataaccaaatggcaaaagaatgatcaggagttgattacggatcctttgcagcacgtgcttcaaacaaagatgaaacttttacgatggtgcacgaaatcaggcgaccatctaaatgcggggtacggaacgaaacgggacgaacaccagacatggaagttcctgcactttacctgaacctgaccacgactgcagagtgttaaaacacctttagatttggccaatgcacaagagaacagcaactccgtacagaagaatcacaaagtttagtcacaaatatacacaagagcagggacaggacacggcttgcacgtcctgctaccctggtcgtacaacccttgtgatatgcctgggccaggaacgcacacagctcatcaacttaactgtctgatctgtggcgcgcatcgtctgtgaacacgcacaggctcaggcccttgctctcatctctgtaggcactctggtgatgttactcatgacggcaacaacgcatactactacagcgctgactcaacacaccagccctacaactgcctaacgcacacacttcatgtcacggcagtggacgactcctggacacagggtgtgacaatctcctaacaaaagaaccgttatctacacacattccacacattcgccaaattaacgacatggtctgctcagaaagtctatcgaagccattcaccgacacaactgttaaacagaattgacaagaaactaaatattacgaaggaacccagtatttgtcttcatgaacacaacacactacctctgctccagacaattccaaaacccaatgacatatccacaccataaacgctccaacacattagctaacacacatcaacatccttacaacacactcactactaacaccacctcacctctctaacaagagctcccctagcaatacaaccgcacaaacaccctacacaaccaaccactacaacaacacacctctctaccactgcttccttaccacaaccagcacctattccataccacccccaacctccaatcaaaatcgcatcaatcatcacaaacataacaaacacataaaaaccacaatcacacccacatcaagaaactacctaacatactaaaaactgctaataatgtactgaaaatataatatacaacaaaacgacacaacgtcaacaccatcctacaatgccgaccacacacacattctataattatctcactcactcactacacatatcaccaaacaccaaaataaacacacatcaaacacaaccaaacacaccatcacacacactgcactcactaacaataatacacacatctccaacccacttaaacaagcacctccacacccccatcaatcacccacaaacaacacaaaccactcaccagaaccatgacaaagccacaaa

SEQ ID NO: 542758 - DNA, 596 bp, Homo sapiens
cggacgcgtgggtcgacccacgcgtccggtaccggaccctgcagccgcagagatgttgatgcctaagaagaaccggattgccatttatgaactcctttttaaggagggagtcatggtggccaagaaggatgtccacatgcctaagcacccggagctggcagacaagaatgtgcccaaccttcatgtcatgaaggccatgcagtctctcaagtcccgaggctacgtgaaggaacagtttgcctggagacatttctactggtaccttaccaatgagggtatccagtatctccgtgattaccttcatctgcccccggagattgtgcctgccaccctacgccgtagccgtccagagactggcaggcctcggcctaaaggtctggagggtgagcgacctgcgagactcacaagaggggaagctgacagagatacctacagacggagtgctgtgccacctggtgccgacaagaaagccgaggctggggctgggtcagcaaccgaattccagtttagaggcggatttggtcgtggacgtggtcagccacctcagtaaaattggagaggattcttttgcattgaataaacttacagccaaaaaa

SEQ ID NO: 542759 - DNA, 807 bp, Homo sapiens
gcgtcgaccgcagcaccgcgcatgctccttcttttccagccccggtaccggaccctgcagccgcagagatgttgatgcctaagaagaaccggattgccatttatgaactcctttttaaggagggagtcatggtggccaagaaggatgtccacatgcctaagcacccggagctggcagacaagaatgtgcccaaccttcatgtcatgaaggccatgcagtctctcaagtcccgaggctacgtgaaggaacagtttgcctggagacatttctactggtaccttaccaatgagggtatccagtatctccgtgattaccttcatctgcccccggagattgtgcctgccaccctacgccgtagccgtccagagactggcaggcctcggcctaaaggtctggagggtgagcgacctgcgagactcacaagaggggaagctgacagagatacctacagacggagtgctgtgccacctggtgccgacaagaaagccgaggctggggctgggtcagcaaccgaattccagtttagaggcggatttggtcgtggacgtggtcagccacctcagtaaaattggagaggattcttttgcattgaataaacttacagccaaaaaaccttaaaaaaaaaaaaaaacaaaaaaaaaaaaaaaaaaaaaaaaaaaaaaaagcggggggcattattggggggggggaaaaaaaggagttataaaggggggagtggtaaagggtttttggaccccttttttttaaagagggggaaatggggggccccaagagggggggataattggaaacggggtacacgtataa

SEQ ID NO: 542760 - DNA, 866 bp, Homo sapiens
ttggcctctgcctattcatgtgaaaggctttcgctcatgtctggtgatcatctcatcactgtgtcatgtgtgcttactgagcttggagtttcactgaaggaatgatctggctggactgcttattaggtggtagccctgaagccagaatcttcagaatctttacttttgtgtcagttatgttcctcagaatatggctttgacattctcctgcctgtgcagacgctgttcatgaatgatgattgtggacaggcagtatatgggcgtgtctaaagcggaagtgcatcgtgtggggtgtctgccttcttgtaccgatggcactatcataagtgtggactctgctgggaaggtgcagttctgggactcagtcactgggacgcttgtgaatgagccatctcatcgctaatgctgactgtacagtccattgctgtagcatgaccaagaagacagtttcgtggtgggcgctgccgaggcgaacagtcttaccattttcagctggtccctgtgacgtctaagcagcagtgagaagcagtgggtgcggacaaaatcgttccagcatcacactcatgacgtgctgcactgtggcccacagcccaacatgcgctgatatctggcagggaactgaagtacgccacttagtcttttcggtacctctcatggaggaacgtgtgggaaccgtacacgaagtttaccgaatgccagtgactcccgaatgacaattcgcccttttcccccacgcgaatgttcttcagtccaccatggtttgtaacacgacgaacggcagtcttctccctcgttaccaaggtttggctccatccactttaggaaccttgagggcgaattggggagtccatccatgtctgctatgc

SEQ ID NO: 542761 - DNA, 229 bp, Homo sapiens
cctcaccagtctgaagtgctggcctctgtcggagggagcatgatcattggaggtatcgaccactcgctgtaccaggcagtctctggattacacccatccggcgggagtggtataataggtcatcattgtgcgggtggaatcatgtacaggatctgaaatgactcaagagatcactatacagagcattgtgacagtgcacacaaccttcgtttgccaagaagtgttgagc

SEQ ID NO: 542762 - DNA, 154 bp, Homo sapiens
aggttccttttttgtttgggtaaactctaatttctatcaaggggtcagggatttttaaaattagtatttcatcccaaatgtttcagcattggttaaataatttttgcccgggccattattgatcaagcaaataaattccccagccctttgggga

SEQ ID NO: 542763 - DNA, 755 bp, Homo sapiens
cggacgcgtgggtcgacccacgcgtccggtaccggaccctgcagccgcagagatgttgatgcctaagaagaaccggattgccatttatgaactcctttttaaggagggagtcatggtggccaagaaggatgtccacatgcctaagcacccggagctggcagacaagaatgtgcccaaccttcatgtcatgaaggccatgcagtctctcaagtcccgaggctacgtgaaggaacagtttgcctggagacatttctactggtaccttaccaatgagggtatccagtatctccgtgattaccttcatctgcccccggagattgtgcctgccaccctacgccgtagccgtccagagactggcaggcctcggcctaaaggtctggagggtgagcgacctgcgagactcacaagaggggaagctgacagagatacctacagacggagtgctgtgccacctggtgccgacaagaaagccgaggctggggctgggtcagcaaccgaattccagtttagaggcggatttggtcgtggacgtggtcagccacctcagtaaaattggagaggattcttttgcattgaataaacttacagccaaaaaacttaaaaaaaaaaaaattgggggttttaggagggggggggaaaaaggggtttggaattgggcttgggtattagggttgttcctggacccagtttttttggcccaggggtagtctggggggttccctaaagggagcgataattgaaaagcagtaactgta

SEQ ID NO: 542764 - DNA, 157 bp, Homo sapiens
cacgaggcgtactgctgaccaccaagtgtctgctgatccaccctaaccccgactctgcactcaacaaggatgtgggccgcctgctcttggagaactattaggagtatgcggtccgggcctctttgctcacagagatccacgggggcgcctgtgggct

SEQ ID NO: 542765 - DNA, 512 bp, Homo sapiens
cagggtcccggtccggaatttcccgggtcgacttcctactactaaattcgcggccgcgtcgacgccatgcagtctctcaagtcccgaggctacgtgaaggaacagtttgcctggagacatttctactggtaccttaccaatgagggtatccagtatctccgtgattaccttcatctgcccccggagattgtgcctgccaccctacgccgtagccgtccagagactggcaggcctcggcctaaaggtctggagggtgagcgacctgcgagactcacaagaggggaagctgacagagatacctacagacggagtgctgtgccacctggtgccgacaagaaagccgaggctggggctgggtcagcaaccgaattccagtttagaggcggatttggtcgtggacgtggtcagccacctcagtaaaattggagaggattcttttgcattgaataaacttacagccaaaaaaaaaaaagtcgtatcgatgtcgagcgatcatgatgatgatgtcgacc

SEQ ID NO: 542766 - DNA, 103 bp, Homo sapiens
tggctcccaggtaaaaaaagaaaagaagtatcaatcctcccttccactaagatgccagcctgcattgtgtttgtgtcaaaagtaaacacaatatcatggaatt

SEQ ID NO: 542767 - DNA, 656 bp, Homo sapiens
ttttgacggggcccccccccctctggtgtgcctttatgcgggcccctcttttgccgtctcggcctaatttgcggtttccgcacggtggcaccggtcgaccctgttggggttaccgacgcctgttgtgcgtggatgtccccccgcgcctgtcgttctggagcgggtttggtacttcggtcacgttttctgctatcacaccccgtggggcgcagcacgcctctcatccccgctcctcgccgcgaggtcatcttgcggggaattgtacgccgccaccaccctcgggtgaaccctccttatagaggatcggcgtacaatgctgggtgattaaatgaagcacgcctcccggtgtggtttctcctccctgcaaacaagcgagcgcccctctcataatcagagaggttgtcatttgcaaattctatatgcctcgtcctgccgaggatataacgcacgcttctctatctatctggtggggcataatacatctacttgtgccaaataatttctttcttttccttctggtgtctcacaaattccaccaccttagcacccttctctcttctaccatcgaccccgaccattgtcatctgcacctccctctttgacaaacaaacatcagatctctctatgcaaacagcccaacagaaataacaaaacaa

SEQ ID NO: 542768 - DNA, 781 bp, Homo sapiens
  misc_feature (12)..(12): n is a, c, g, or t
  misc_feature (28)..(28): n is a, c, g, or t
  misc_feature (93)..(93): n is a, c, g, or t
  misc_feature (115)..(115): n is a, c, g, or t
  misc_feature (137)..(137): n is a, c, g, or t
  misc_feature (155)..(156): n is a, c, g, or t
  misc_feature (183)..(183): n is a, c, g, or t
  misc_feature (187)..(187): n is a, c, g, or t
  misc_feature (228)..(228): n is a, c, g, or t
gagaggtgagtntctgtggcgtcgagtnccatcggctcccatccgggctatcctgccgccttagcggtgcttctccccaggatgcgggcaggnggcctctctcccactccccacncaccgatttctgagtagcgatnggggctgaggcttatttnntggggtagggggccgctggtaggcgangatngtccgagggagagggggaggatgaagccagtgcgtgcgganacttgccagatgttgatgcctaagaagaaccggattgccatttatgaactcctttttaaggagggagtcatggtggccaagaaggatgtccacatgcctaagcacccggagctggcagacaagaatgtgcccaaccttcatgtcatgaaggccatgcagtctctcaagtcccgaggctacgtgaaggaacagtttgcctggagacatttctactggtaccttaccaatgagggtatccagtatctccgtgattaccttcatctgcccccggagattgtgcctgccaccctacgccgtagccgtccagagactggcaggcctcggcctaaaggtctggagggtgagcgacctgcgagactcacaagaggggaagctgacagagatacctacagacggagtgctgtgccacctggtgccgacaagaaagccgaggctggggctgggtcagcaaccgaattccagtttagaggcggatttggtcgtggacgtggtcagccacctcagtaaaattggagaggattcttttgcattgaataaacttacagccaaaaaa

SEQ ID NO: 542769 - DNA, 761 bp, Homo sapiens
gcgtcgaccgcagcaccgcgcatgctccttcttttccagccccggtaccggaccctgcagccgcagagatgttgatgcctaagaagaaccggattgccatttatgaactcctttttaaggagggagtcatggtggccaagaaggatgtccacatgcctaagcacccggagctggcagacaagaatgtgcccaaccttcatgtcatgaaggccatgcagtctctcaagtcccgaggctacgtgaaggaacagtttgcctggagacatttctactggtaccttaccaatgagggtatccagtatctccgtgattaccttcatctgcccccggagattgtgcctgccaccctacgccgtagccgtccagagactggcaggcctcggcctaaaggtctggagggtgagcgacctgcgagactcacaagaggggaagctgacagagatacctacagacggagtgctgtgccacctggtgccgacaagaaagccgaggctggggctgggtcagcaaccgaattccagtttagaggcggatttggtcgtggacgtggtcagccacctcagtaaaattggagaggattcttttgcattgaataaacttacagccaaaaaaaaaaaaaaaacaaaaaaaacaaaaaaaaaaaaaaaaaaaaagagggggggggcgcccataaaaaattctcccgcggggggccccccaataggggcacccccatttttgtggaacaaaggggggccccaaaagagagggggccgcgataa

SEQ ID NO: 542770 - DNA, 994 bp, Homo sapiens
gcgtcgaccgcagcaccgcgcatgctccttcttttccagccccggtaccggaccctgcagccgcagagatgttgatgcctaagaagaaccggattgccatttatgaactcctttttaaggagggagtcatggtggccaagaaggatgtccacatgcctaagcacccggagctggcagacaagaatgtgcccaaccttcatgtcatgaaggccatgcagtctctcaagtcccgaggctacgtgaaggaacagtttgcctggagacatttctactggtaccttaccaatgagggtatccagtatctccgtgattaccttcatctgcccccggagattgtgcctgccaccctacgccgtagccgtccagagactggcaggcctcggcctaaaggtctggagggtgagcgacctgcgagactcacaagaggggaagctgacagagatacctacagacggagtgctgtgccacctggtgccgacaagaaagccgaggctggggctgggtcagcaaccgaattccagtttagaggcggatttggtcgtggacgtggtcagccacctcagtaaaattggagaggattcttttgcattgaataaacttacagccaaaaaaaaaaaaaaaacaaaaaaaacaaaaaaaaaaaaaaaaaaaacaaaaaaaaaaaaaaaaaaaaaaaaaacaaaaaaacaaacaacaaaaaacaacacacaaaaaaagacacaacataaagaatcgacgctcgcgagacggcaccacaaaaacaaaaagaaatgacacgacagtgcgccaacaccgagcgaggcacatcacaaaaagaagtgatacaggtacaaaagaagaaaacaaaagaacagcacaacacgccagcaagaaggaaacaaggacaatcaatcgttcgcgcaaaaaaggttggcacacacactgagggcgacggaacaacgagggagacaacactaacaagacaaacaggaacgaagcgaaagcaaccacgaag

SEQ ID NO: 542771 - DNA, 362 bp, Homo sapiens
  misc_feature (242)..(242): n is a, c, g, or t
  misc_feature (249)..(249): n is a, c, g, or t
  misc_feature (296)..(296): n is a, c, g, or t
  misc_feature (332)..(332): n is a, c, g, or t
  misc_feature (336)..(336): n is a, c, g, or t
cggcccgaccggagttaactcctggggtgcattgaatcgcacaggggacttaaatctggaaggtaaaacgtgaaactttataaagtcagcataaaaagcaccataaaaattggaggaaagttgttagttatatgacggaggatgactgcccgtttattgctcgagtgtggtcgtggagattcactctgaggctaaagtgctcttaggcagaaggtaggtggaactgcaggctgctgcttgcnatagggnacaataaacccagttacttgggaggtaagccttcagtctgggttgtnaaattatactccatgctcaaggcttttcagagggcncaancacctgtacagatgagtgtgctgcca

SEQ ID NO: 542772 - DNA, 727 bp, Homo sapiens
  misc_feature (101)..(101): n is a, c, g, or t
tccttgttaacccccctctttgaaggggaaggttgtgtctcccccttgtcagactgtgggggatatttgatggggcccccgacccacaccctggtgttccnacagccccgtggccatctccatacattgtgagcgtgtccccacggggtgtgtttgggggcccccagccatccgcgccctgtgcggtttagcccgcacaccccctttgtcggggtggcaccccctgcttatgatcccccgcgtaaatctgctaaggggcccctcttgttttcccctgataagggccccgccacccaccacccgggtgtttttggagggagtcttctcataatgtgttttatacacggggccgacccttgtccccgttccctcgagaggcttccccagggtggtcttaaaaacccctgggcacgacgagacccgcgggggttcccgggcccctccctgtggttccccacacgcttttcacgtgttcccctcttcctctggtgtagtcttcttattgtgagtactcacgggtttgcccgcattccgcggggcaccaccagagggtgtgtggtgaacactctgggggtatttgttctggggaaaccacccccacggtcccccccgcgccctccccccgcggccactcctcttttgggccccccgaatcttttctaattttaccccccggggccccccttccaaatgactcggggaaaaaagaaaattttttttaaattta

SEQ ID NO: 542773 - DNA, 971 bp, Homo sapiens
  misc_feature (767)..(767): n is a, c, g, or t
  misc_feature (776)..(776): n is a, c, g, or t
  misc_feature (780)..(780): n is a, c, g, or t
gcgtcgaccgcagcaccgcgcatgctccttcttttccagccccggtaccggaccctgcagccgcagagatgttgatgcctaagaagaaccggattgccatttatgaactcctttttaaggagggagtcatggtggccaagaaggatgtccacatgcctaagcacccggagctggcagacaagaatgtgcccaaccttcatgtcatgaaggccatgcagtctctcaagtcccgaggctacgtgaaggaacagtttgcctggagacatttctactggtaccttaccaatgagggtatccagtatctccgtgattaccttcatctgcccccggagattgtgcctgccaccctacgccgtagccgtccagagactggcaggcctcggcctaaaggtctggagggtgagcgacctgcgagactcacaagaggggaagctgacagagatacctacagacggagtgctgtgccacctggtgccgacaagaaagccgaggctggggctgggtcagcaaccgaattccagtttagaggcggatttggtcgtggacgtggtcagccacctcagtaaaattggagaggattcttttgcattgaataaacttacagccaaaaaacaaaaaaaaaaaaaaaaaactcgaaactagttctctctctcccgggaagggcgtggaggctcacacctgtaatccagcacttagggaggccaaggctggaggatgcgctgaagatcaggagttcaagaccagcctgggcaccttagttagacctngtctcctantctnaaaatatacacgaggcacggttggccacgtcttcagtcaggggtcagaaggtgaatgggagggccttttaacccaagagttgaggtgggcgaagcatgatcacccattgactccagtgggtgaagagaaaacccgttcaacttcttaaaagaagagacaccttcacgccgggagggagagggggggaattg

SEQ ID NO: 542774 - DNA, 106 bp, Homo sapiens
gtatgctacttaccctgctgctgtaatgttaaagcagccacagacaatatataaacaagtgggcatactgtattccaataaagttttttcaagaagcaggaactgg

SEQ ID NO: 542775 - DNA, 1057 bp, Homo sapiens
tatccttagttgagatagtttggtgaagttgccgacggggataagttaactctggatgcgggtgctgtataagggttcaggccatttcgtcaggccgccggtcattgccgtggaaccagcggactaccattcgggttttgagctactgcacgggcatttttgggcgaacgatgccctggctacctcacagcttgctgcacccgttggggcgtaatagcagtttagagcgttcttccgccgggccgtttgcaaaccagccgtctggtccttcacatgcataaccagccgcacgtccggctgtcgttggccgaagtgaactgtgggagaagatgcccagtttcaaggggaaaagctggcgagacccaacctccaaggacacagcacggaaagagacagggttcacgggaagagaagcaggaagccccaggctggagcggaaggaggagtacaagtcgcctgcccctgctcctgaggaggagatggatgcaatgtgagcaggcgacctgggctggctagagcaccaaggccaaggaccccttcgctcaccggcccaagagtacctttgtgttggaggaaattgaagcgcaagtatctccaatgaggacacactgctctgtggctactgccatactttctgggagcactttgataaggacggctggtccctgatggtactcagagtatcgcggtccctgagagaactcactcagaccttcatgagctgcgatctcatcactggaatgttcccagcgactggacaagtcatgaggaagaacgccttcgccagtgtcatccttgttcggaaccaacaatcgcagctccatttctggagtctgggtcttccgaggccaggagcttgcctttccgccgagtccagattggcaggtggactacgagtcatacacatggcggatactagatcctggcagcgaggagacccagatcgctggttagatgagtactttctcctgtcagtgcgccatgacagcatagtagggcaaagccttcaatccagggcaagatcctacaagcgaacataatctggccagtcacctag

SEQ ID NO: 542776 - DNA, 402 bp, Homo sapiens
cttttcccgcccccccccccccaaagattttttatcccccgggtttccaatttcccaaagtttacctgagtaagtgttcctgggggcccagggggccctttggtaggcccgggggaactttttaaagcctacccctatttttctggggcccccccattttttttttcccgggaatttttttgggggttttccctttggggcccgggaccgggggtgccccgggtttttaaaggggtttccccccccccttttttttgttttttttattttgtttgggggttaaaaattcctttttccgggtttttttttttcccgggggggtttaaccccccccccttgactggggtttcccccttttggtcttttgggttggggcttaattaaaaaaaaaagcccaagtta

SEQ ID NO: 542777 - DNA, 818 bp, Homo sapiens
gcgtcgaccgcagcaccgcgcatgctccttcttttccagccccggtaccggaccctgcagccgcagagatgttgatgcctaagaagaaccggattgccatttatgaactcctttttaaggagggagtcatggtggccaagaaggatgtccacatgcctaagcacccggagctggcagacaagaatgtgcccaaccttcatgtcatgaaggccatgcagtctctcaagtcccgaggctacgtgaaggaacagtttgcctggagacatttctactggtaccttaccaatgagggtatccagtatctccgtgattaccttcatctgcccccggagattgtgcctgccaccctacgccgtagccgtccagagactggcaggcctcggcctaaaggtctggagggtgagcgacctgcgagactcacaagaggggaagctgacagagatacctacagacggagtgctgtgccacctggtgccgacaagaaagccgaggctggggctgggtcagcaaccgaattccagtttagaggcggatttggtcgtggacgtggtcagccacctcagtaaaattggagaggattcttttgcattgaataaacttacagccaaaaaaaaaaagaaaaaaaaaaaaaaaaaaaaaaaaaaaactccggggggcttttgggggggggggcacaaacgtgtctataagaaggcgccagtgcgcaccaaaggttgtactcgtggacccagttttctctgcgcccaagcgcgaaaatccgaggggaccccaaaaagagggagcggaatagatgcagaacacggagaacccggttagga

SEQ ID NO: 542778 - DNA, 112 bp, Homo sapiens
gattagcaggatctttaggcacgaatcgagtcagcctcttgtcgccggggacgccggtcgcgagtcgcaaactcggagacgaaggcgggtagctgaagaccagaccgtggac

SEQ ID NO: 542779 - DNA, 114 bp, Homo sapiens
  misc_feature (69)..(69): n is a, c, g, or t
aaaacagtaagctctatgccatacggttaccctccacgatgccattataaagccgcgacaagctgggtngggaatttgccaaaatactcaaccaagaggcctaagagctggaga

SEQ ID NO: 542780 - DNA, 160 bp, Homo sapiens
agcaaagcaaacggtagaattagagagatatacaagatgcatagaaggcggatgcaaactgaagtgtccaccgcgccaggcaggttactgtcaacatcaatgaagcaagccacacaaatagttcctttttcatttttcctgtaacatgtggctttctcca

SEQ ID NO: 542781 - DNA, 350 bp, Homo sapiens
  misc_feature (165)..(165): n is a, c, g, or t
atccggaaaaaaatagtggaattttttcccccgaggggggcgccaaaattttttaaaaaagggggccataaattttttccccccccccttgggaaaaaaaaaaaaaagggggccccccttttttttcccccccccggggttttttttaaaaaaaaaaaaaaggtnaaaaaaccccctttttttttggggaagcccctggggttttttggggaaggcgggggtttttgaaaaacccccgggggggaaccgggggttaaattttaacaaattttgggaattaaccccccccccccaaaattttttttaaattccccctccaaaaagggggaaaaaaaaaaggttttttttta

SEQ ID NO: 542782 - DNA, 127 bp, Homo sapiens
tatttcaatattcgtctattctttatgccttgccctagccagttggaagaagatgaagaaggaaaccaggtgaactcagcagggcagaagcaggaagcgggcagaagcaggaagcaggcagaagcag

SEQ ID NO: 542783 - DNA, 137 bp, Homo sapiens
tatactccgccggtaccggactccacctctacgtccaggacctgccggttaccagtgtctcagcgccgtgggggctccaggcggcctagggcctcatcatagtcttgctctggctctgggtcttcattggcttcact

SEQ ID NO: 542784 - DNA, 712 bp, Homo sapiens
  misc_feature (561)..(561): n is a, c, g, or t
  misc_feature (634)..(634): n is a, c, g, or t
  misc_feature (669)..(669): n is a, c, g, or t
  misc_feature (680)..(680): n is a, c, g, or t
gttataatctatgcaataagattccatgagtctaatattaatataaacaaagtaaattggggaaagtaaagtttattccaaataataaatgtagatgcccagtgtggtggctcatacctttatgtaatcccagcactttgggagaccaaggtgggtggattacccgaagtcaggagtttgagaccagcctggccaacatggtgaaacctcatctctactaaaaatacaaaaaattagctgggcatggtggcgggcacctgaaatcccagctattcgggaggcaggagaatcacttgaacccaggaggcagaggtggcagtgagccgagatcgcaccactgcactgctgcctgggcgacagagcaagactccatcttgaacaaaataaaaaacaaataataaatgtagaaaaaataaagagaagtagaaagccactatttgacagccactatagtagcagtgacagttgctgacaagaatcatcaatggatgctaaaattagtgaaagtattgagagacagaatctctacattgtctcaaaatatctccccacaaagttctnattacaaaagaaaaaatagtaactttaccctgaagaacctggcagacactacttaaccaattggtccaagttncccccactactgaaacaaaaatccacaaaacaccntgtgcctctanatgaggtgccctgaaagcaatatcacttctga

SEQ ID NO: 542785 - DNA, 358 bp, Homo sapiens
  misc_feature (93)..(93): n is a, c, g, or t
  misc_feature (137)..(137): n is a, c, g, or t
  misc_feature (195)..(195): n is a, c, g, or t
tgccaaagcgtagtacagacccaactcggttcccatgcatgtcctactcccgccttcccggagagtgtgtgtcctgattttactgggttgccnctgttacagccgagtccccacgctcacagccagatcacgggctncacgatggctgttccttttccgtgtaccttttttgagttaaaaatgttattttttttngtttgcttaatgtttacatgcttatccctgagtcagcaccatgcgttctgccggtatctaaaactcagcttgggtactcagatgtgatacctgaattccacctgcggaactctcagagctgcttgatctgctctgttaagaccaaggagtagagctgccatcc

SEQ ID NO: 542786 - DNA, 176 bp, Homo sapiens
gtcaagtcatatggctcagtgactcctggttcactgtggcaattaaacatttaaataattggctattctacttgtaaaacagaaaatcacataagccccaaaggaagataacaaattatgtctactgtatgtgtgacgcagaatttcaatgagatggcaatttgcaaatattggca

SEQ ID NO: 542787 - DNA, 147 bp, Homo sapiens
  misc_feature (75)..(75): n is a, c, g, or t
  misc_feature (100)..(100): n is a, c, g, or t
  misc_feature (109)..(109): n is a, c, g, or t
  misc_feature (128)..(128): n is a, c, g, or t
  misc_feature (136)..(136): n is a, c, g, or t
gatctgcccacgttggcctccaaagtgctaggattataagtgtgagccaccacaccaggcccgtttcatccctgnctcagcctgcatgccaagctccctnggtgcccgnccacaggtgtcaccctttnaggagaangtggcctgggg

SEQ ID NO: 542788 - DNA, 337 bp, Homo sapiens
  misc_feature (295)..(295): n is a, c, g, or t
cacgaggaccatcgcgtactgcaggtggtcgggcgggatgttggcctgcacgagcggcgtgtcgaccacgcccggcgcgagcgcgttgacgcgcacgccgaagcggccccactcgatcgcgagcgcgcgcgtgaggccgatcacgccgtgcttcgaggcgctgtagtgcgcgcggcccgcatggccgccgaggccgtcgatcgaggccacggtgacgatcgcgccgcgccggcgctcgagcatgcgccggcccacgggctgcagcgagcggaacatgcccgtgaggttgacgtcnaggcagcgggtccagagttcgtcgggcatcgcgtgggcgggc

SEQ ID NO: 542789 - DNA, 935 bp, Homo sapiens
  misc_feature (3)..(3): n is a, c, g, or t
tanctctctcgaagatatataacccgtcgaacacaacaacgggtataaaaactcatgcaatgtggtctacgcggatttccactaagaagtcggcctttaatatatagtcgccctaggttgttgattttcccgccggtgttgattaattccttttttctcggccccctcttcccgatccttaattctttgggaccccttaaacccggaagggtttttcaaatggaaaattttaagcctctactttcggccttaaggacaatccttcacccggcgctaaaattttcacccattgcgggccaacctatatgtgctaaatcccccggtaccgcccgattttgacaagccttcccacgaaggggtctaccaatgatttacgcggcgcaataattcttttggccaagtgggtcgattcccaccagttctcaagatcggcgttctctcaatcgaggagacttcacttcaatctgcccgcaattatcacccagaaagtttttacattggagaatgttctcccccagcagaaggtgtgacgcaccaataaccccggggtcgcccaaaaaaggaggaagaatccttcttgactctcgccccactggttgagcgatttatcaaatacccctttgtgagtccacccccacagtttttaaactctcccagggatttcccaccaatgttcaataaatatttaatcctgcggctcacgggattacaaaatcccacattttgtgtgagaggcgactataaaccaaactagtttctccctactggtcacattgaagcttaaattctctctattgcatataaactgagtaaacaagagaaataagaaatctccacaccgaataatccgccggagtgtgtacttaacccaaatttttaacccattacgttttcccccccccaaaaaaaaataataaactttcccaaacaaaaca

SEQ ID NO: 542790 - DNA, 414 bp, Homo sapiens
acatccttctcctgtcacttccatcgtgtattccacagacatctctgccattgacacttgtcacagtcacagccggttgttgtgtgtccacttgaaattcgctgaaaaatgtccttgaagcctgaatagtcacttgtacagccttcacagtcttggtaaatgtgcctgctccatatttgcacaaattaagccattgtgagctccacaaagaaggcttgaaaggctcgaagagagccagtgaaagagatcccaagtccagctatcttcacacaggcaagaggcccttgctcttccactcggtaatggtctcaggctcgtgtcactcctacctcagccacacgttctgagtttccccccaccatatcacagatacgtgtcacaggagagctctctcgtgccgaactcctacagccc

SEQ ID NO: 542791 - DNA, 858 bp, Homo sapiens
aagttcttccatgatgttgtaggtgtatattcgcgtgtgctatgttggcaagagcatagtcggtcgtgagagtactatgctaggagcgattcgtggagatagattgcaataaaggtggtcggaaatctggggactagaggtcaatgcctcggagtaggacagtgggaacgatacctgaaaggacccttgaaggtaacccggggtgtccagggtgggcttcggggcacatggttgcgtgcggaggggaaatcgtcggtgtgacccagacgattctggctggttgcagttactgggcatgctgggcgaccatttaggcaattccagtcaaattgtgagggaagcaagccatattccgactgctgtttacataatctcaagtcgcgcaggacaagatggtgtttgatcttgtgagtgataacccagtggaaatttgaaatcccctttagctgacaacggttacgtggtgtgagctgcatccatgggaaagacatgtgcttacacttgtgagcatggcttgccggggaaaatggcgagattcgcacatgagcgattgcgtgctcatccgttgcaagagtatagaatctactgtggtgtgcgactagtagagttgaactttcgctcctagggtgtacaggaattagacttaggttgttggtctatcaggaagtacgatttaacgtcttgtctcttgggaaaatttaggctcggagcactttaggaaaggcctgggttatcccctgagctcgtcgggactgcacatttggacgacgttcttaggggagccccatttttcggcaaaacgcttacaatttcaaaattgccctgatttgtccaccacaagctcgagaatggttacgg

SEQ ID NO: 542792 - DNA, 101 bp, Homo sapiens
gaactgcgcagaaagttggctgctatgcaatggtagtcatacgcaagaagcactggaatgtgaactggtgccccggagtctgttgaatcccagaacccatt

SEQ ID NO: 542793 - DNA, 914 bp, Homo sapiens
cgcctcttccatccgactcctccattcgcctcttccatgcctcctcccggctatccgccgccgccactccagacctaatcccaaccccagtggcgaagcgatattcttatattatttcctgttttctcgccactacatgacctcctgacaaggtgatcctgtggcgggccccgcatggaattttatccccgtcaccgtgcctcacactagtatctgcatgtccactatccagaacctccaatcatttcgaccccatatgcatgactgcaacgtaagggatgacagacataacatcccgagaagggaactgcaggattacaattcagtatacagaatcacagccaactggaacggacagcaacatgaccactgcaacttcacatatgtatccaagggccacttggccacccattgcaattattgcacccaacaacaatgaaacctctgttgcaataagctttattcccaaacaaaagcacaatttcggccgtgctcacatgcgtaacctggctggccacaacgacacaactcccatgcacacttaccgcggcacacagtgctccaataacacagcccatatcaccccggctggcacccacacacgcacacacacacacccattccttgaccccacgcattccgtcatctgcgaacagcgcatccgggcacatcccgtacacacgcgggggacaggcggacaaccacgcgacagtacaacagcaggctcaacccaattgacacactaacccatacagcaccaatgcaaccacccccaccacgaccacacccggttggcgacagcaacccttgcccctctctgcccccacaacacgaccacggctcgcccaccttaaacagcaccccgccagcatcgtgcgccatggaccactctgatcgagacaacactggacctt

SEQ ID NO: 542794 - DNA, 271 bp, Homo sapiens
aatgacagcagacaaggccaccatgggatttgtccaccctgggtgtggcaactgtctgtgcagtgcctatgccctgcacagacataggcagaggcccacagcaactctaaagggccctcccagaaatagccagccaggttgagcagggctaaaaaagaagatgaaggggtctctttcctttccaatacctcctctcttcctgagcatcgtcccctcattccaaaaaggagctgtaacggagtgaaggggaatggagtgggaaattagtgac

SEQ ID NO: 542795 - DNA, 129 bp, Homo sapiens
agaggatcccctttaaacatgacgacctttgagacatgccttgatcagccacatcaactcagttgtccaccacagtgggaatttttgaatgtcttttgtattatgtatatattttatattatttttttt

SEQ ID NO: 542796 - DNA, 1142 bp, Homo sapiens
tggggggggggggggggagaggggggaaccccggggggggggggggggggggggacacaagcgggggagagacccacacacaaaagtttttggggggggggaaccccccacgggggggggggagaaacaaacggggggcgcggggggccacacaaccccacacacacccttcttggggttcttccacccgagagagggggcgccacacagagagaggggagaggagcagcacacacggggggggggggaggaaaaaaccccgggggcgccccacagaacacacacagaggggcagaaaagagagaggggcgccccccacccacacacaaagaaaaatatatatataaggcgagacgagaggggggggtcacacgaggggtggtacacacacagacgaggggagagaggtgggtgtgccacgagaggtcggggaaacaagaggggacaccgaggaggaaaatctcaaaaggtgggtcgcccggaggtgtgggtagggtgtagcgcgggggagcaccccacaccacccgcgcggtgggtgggtggagggagaaaaggtggggtggccctcatctaatatacaacaacaaaacaaaaaaatatatattcacacaaaggagtggtgtagaggggggtgcaaacccctcaccacacaccgcgcgggggagagaggagggaagcacgagagggggcggagcaaacacaaaaataacaaggagagcgtccggatggaggagaggggtgggcagggaggggtggaccaaaaaagtgggggagaggtcaacaaagcggtgaaaaaaaaacaccacgaaagtaggatggcgcaccccgccaccatggggggggccccaacataatgaataaaaacgcggccgcggaccacacaaagggggggaacaaacaaagaggggatccacaacctaggatgaggaagcaaaaaaacacaggcacccacaaaaaatagggcagccgcaatacaatactactcacagacgggctgctcaaacaagcgcacacagaggccgaagcccgccagtatgaacacccaccacatgaggtgtcgcccccaaccactgagtggaggggaggaaagaatcggaacacaccacatgatgtagcaaacacaaaacccaccccacgacgtg

SEQ ID NO: 542797 - DNA, 296 bp, Homo sapiens
  misc_feature (170)..(170): n is a, c, g, or t
  misc_feature (218)..(218): n is a, c, g, or t
tcttttagtagttttctactcaatcccagtttatggaaaaatcaggtctattgtattagattcagtattagtatcaaatatacaacaatatctagaattggtttatattaatttacaaagaaaacatttcatctattggatatgccattttcaaatcttttgaaattggnttacatagttagaaattataaaagcagaatcagaaattacagatatanagattggtgtgttgaagacagaaaaataaattgatccattaaaatcaatacaatgcttgaatttcgcattcaaatttt

SEQ ID NO: 542798 - DNA, 451 bp, Homo sapiens
atgtgattaaattgatgatttagatttcattggaacctgttgtgtgcccatgatatttgagaataacttcatatatattatttgagagataggttatagatggaaggacataactatacaacatgactacttgcactttaatatctctttgggggaaatttgaggctctctaaggcagcatttggtatcttgctctttgcaatcgtatgaatctttgagagcatactaaaatggtaattcaactgaatgcttattttgtaaatgttaataacaccacaatacagccctggtagatagcaaaaggccctgaaaaactgccctttgaggccgggtgcagtggctcagcctgtaataccatcactttggtagaccaaggcgggtggatcatgaggtcaggagattgagaccatcctggctaacacagtgaaaccccatctctactaaaaaatac

SEQ ID NO: 542799 - DNA, 198 bp, Homo sapiens
tcatcgaccagaatgacacacatgccgtgccctgtgtagccctgacgcccaggccgccttcacattcaggtcccgctgagtgacaccagacaggtaccactgctgaggaagcatgggttcctcaacctggtgccagatcttcggggactattaccacttcgtggcatcgagtagtgacgaagcggtccctgtcgcctc

SEQ ID NO: 542800 - DNA, 277 bp, Homo sapiens
ccggcacggtggctctgctgtcatcccgcactttgggaggcacgaattccaaaatgatttctaaaagggatattatatgctatttatagaactttaatatcgttaacattgttatctattattggtaacggcaatacattctcattataaatgacatgtactttcagtacaatattcagaggtaagagatttagtcggttaacttgtaacagctatgcttaatcattcacttgtagactgaatggctgagaaatccctggctgagaatacatcccaa

SEQ ID NO: 542801 - DNA, 1722 bp, Homo sapiens
  misc_feature (1172)..(1172): n is a, c, g, or t
gcaaattttttaaacttattgcactaaatacaggctctgtacaaaaaaaaaaaaaaaaaaaaaggcctcagcttttaatcatcccatggaaaggaaattctttggaaaaaaagcattggccttcctataccagaaatcatacaacgggtgaattaaaatctcggatattaagtcgaaatgtgcattacaacgttaaggtgttcactataggggcttaacataagcagcccgtttggactactgtgtgcttctcctttctcacaagggttgggaccctttctacaatgtggcttgacaacacagggtatacaaatgtggatatattatatttttaacaagtatattagggcgagatccttataaccacccataagctatgaggctatagaacattatggcctacaaagtgcctatggagactacacttatctacacaacacgctcacagtgataaatacttcccagtgaaaattatctaccgagaacatctatttggtgacccattcaacgaccgcatcgcgagacatctgttaccaaaccaagaccccacatggggcttttccagcacaccaaatatcaaagcacgactctcaagtgtgtccttacagcaccccacagcatctcgtggcgcacacaccccaaccatttggccgaagaaagcatcggcaaataataagagagaaaagagaatatacatccccctcccaagaaatgactaaaccgcaattctataagatattctacaggataagctacccgcaaacaaacagatctaccacggagggactctccctcagatagattaaatcctacataggcagaaagtgtggcaacatcactagccgtctatcttaataaagcattaagaccaaaataggagatcaaaacaaagatagcaactacaagcagagcagcccaacatgcccgtggatcgcagcacaacacagctgccccaagcaaacaccccagtagacgagactcaccaacagagaccccgcaaaacaagacaacataagcggacaataacacaccagcgacaaaccatgtggggccacaaccccaacttgcaccacactggcggccacaaaaagctaccaacgacaagaagagagggataccacatacacgaggaaaaagaactactaccccagaagcagcacatacgcaataanacagaaagagggtgatcaccacacgaacagagtgacaccagaaaagaacaacgccaagcagaacagtggcaaacaaagacagcactacaacaaccaccagagaggaaaacaccacgcaaagatcagaaggagaccggtccgcgacataccacaagctctcacatataacaacagcaacccgacacaacacacacatagacaaccactacccagcaaccgcacgcactcaacaccaccccatgcgcccgccagcaggactgatccgaaccagcaaaacccagctacacaggagaagtaccgaagagtgcgacccaacacaacagacgcgacacaacacaacacgcgcaccacaccacacacacgggccgcacacacacacgcccaacgacgaccccatcacagagctctgaccacctaacgcgggccagccaagaggagcagagacacagacgtgagaacccaaataacagaggaatagtaagaacgaaaacgagccgcggacgcgactgaccagcgcaggacaagaccgcagagacagcgccagccgaca

SEQ ID NO: 542802 - DNA, 279 bp, Homo sapiens
  misc_feature (250)..(250): n is a, c, g, or t
gttctacaggtatccccgcacgctcctgtggcgctgaacgtgcctgttctgagcgatgagacccatggtctgacagagtccggttacgcctttcccggtctcctcagcctttctccctgtgatcttatcacagtacatgatcagaagtagaaattctcatgttagctgaaattctcttcatgttttttcttgtgtgcagacctcgtttatgtttatagcgtcccatgttactgatgtatggccactgtgnaacctctgtggatatgattccctatgctt

SEQ ID NO: 542803 - DNA, 281 bp, Homo sapiens
ccccgcctgggatcactgagaatggggttcttcttctctcggtacctaactggggcccgccacagccatgaaaagccttgaagggctatgcgttgctatacgctatgagtcctttagcaacccaagctcagtatattcagagaagtccgccaaggatggtcccttctaaattgtcggacactgcagttgccagggcaagttgtgcttatcatccctaagtaacaaggtgcttcacggttgctacggagattttccaggcgccagtgaactccacgtctgcg

SEQ ID NO: 542804 - DNA, 150 bp, Homo sapiens
  misc_feature (63)..(63): n is a, c, g, or t
acgacctgaattttgtgaagtgtcgtggcgttaatcttaaatcaccatttccctaaaaatggngcactttctccttagaaatgctggatggcaacttgatgaaacagcccaaatgcacccagggcgagggcacttttcccaatttcgacg

SEQ ID NO: 542805 - DNA, 215 bp, Homo sapiens
agcggcgggtcgatctagaggctcccggctcacagaggcacagggccagggaactcagttaggtaccaacgctcctaccaggacgaccaataaaaaaaagggggggttttttttttttttttttttttttttttttttttttttttttttttttttttttttttttttttttttttttttttttttttttttttttttgttggattcccccccga

SEQ ID NO: 542806 - DNA, 621 bp, Homo sapiens
  misc_feature (171)..(171): n is a, c, g, or t
taggggactacgatgcccaagtggtagtatcctctacttctctggctgttctttaaataactatctacctacatttatatttgcttcaagaaaggagaaaatgaattgtctttagagtagtgtgtgtgtgtgtgtgtgtgtgtgtgtgtgtgtgtctaagtcctagcatantcattcattgaatgagaaaaattagtcctggagttcttttgttagctttaaataatcacatatacctacaattgggctctaagcaagggtgaaatcctattgtttgcaaattacatccctaatgtcaatcaaaatctgattaaatgaaaaacgttgaactgagaccaattcatgaaagattttatatttttaagagatgtccattgccctttgaaaatgtatatcacttttatatcaacaaatctatgttctcaacaaattatctgatattaggaatattaggaaatttgtaaatagcattgtatcagcttagattagatacactgattccctctaaaagaattgtctatgcatagcaaaaagttcactggaacaaatgttattgtctgttaaggtcaattctttttaaaataaactttcttatcaacatgtaaattggtgaaaaaaaaa

SEQ ID NO: 542807 - DNA, 223 bp, Homo sapiens
cttttggggccttggctcttattaaaggtgtgatattttggcagccactttcctgcgctattacagcccccagcgtggctgtacctgagtgcatccgtcttggggttcagtcgttgaacatgctgccaaaccaggacactggctccagctagtgtttctgctcttggccatcgtctggcagtggacatgcaagctacgtgggtggaggactcttataacgaga

SEQ ID NO: 542808 - DNA, 757 bp, Homo sapiens
cacgtggtgactcacgcctataatcccagcacttgggaggccgaggcaggtggatcacctgaggtcaggagttcaagaccagcctgaccaacatggagaaaccccatctctactaaaaatacaaaattagccaggcgaggtggctcatgcctgtaatcccagctactctggaggctgaggcaggagaatcgcttgaactcgggaggtggaagttgcagtgagccaagatcacgccactgcacttcagcctgagcaacaagtgcaaaatctgtttcaaaaaaataaataaatgaattttaaaaagtaaaaacggcaggcgtagtggctcatgcctataatcccaacactttggtaggccaaggcgggcagatcacaaggtcaagagatcaagaccatcctgccaaccatgatgaaatctcctctactaaaaatacaaaaaattagacgagtgtggtactgcaggcctgtaagtcccagctactcaggaggctgaggcaggagaatcgcttgattcctccaacagggaggcacaggtgtagtgagctgagatcgcaccaacaaatgccagcctgcaacagagtgagactccatctcacaaattaactatctaacactcaacgaattaaacaaacaataacagaaggtggcagggggggtcacgctggtatccagtctctggaggcaaacaggggatcaaagcgcagggtagaaaccggcactgggaaacccgtcacaaggcaaaaataccaggtggtgt

SEQ ID NO: 542809 - DNA, 217 bp, Homo sapiens
  misc_feature (37)..(37): n is a, c, g, or t
  misc_feature (60)..(60): n is a, c, g, or t
  misc_feature (160)..(160): n is a, c, g, or t
  misc_feature (196)..(197): n is a, c, g, or t
  misc_feature (201)..(201): n is a, c, g, or t
ctttatttgctggttgtctttctcacacatctttctntctgtctctctctttcctgctcntgtttttctgcccagaaaaacctgacttcgataccaaaaagataaatacgaactcaaatttaaaaaaaactttaaaagaaacaaaaaaattactcaacgnttctttcagctttattaacaatttccattgtttctnngcgncttgtgtctcgttctt

SEQ ID NO: 542810 - DNA, 87 bp, Homo sapiens
gatatagtaccgtcgaggcctcagcatggtaacattcattacaccgaggcataatatagtcaacggactaacccctataccttctgc

SEQ ID NO: 542811 - DNA, 652 bp, Homo sapiens
cggacgcgtgggtcgacccacgcgtcgcatctccgcatgatgaaacttcggctcactccttggcgcctgtcctgatcctccaaatcaccacaggactattcctagccatgcactactcaccagacgcctcaaccgccttttcatcaatctgcccacatcactcgagaccgtaaataatggtctgaatcatccgctaccttacatcgccaatggcgcctcaatattctttatctgcctcttcctatcacatcgggcgaggcctatattacggatcatttctctactcgagaaacctgaaactatcggcattatcctcctgcttgcaagcatagctaacagccttcataggctatgtcctcccgtgaggccaatatatcattctgcaggggccacagtaattacaacatcttactatcctgtgcatccctatactaattgggacatgacctagttcaagtgaatctgaggaggctactcagtagactagtcccagccctctagacgtattctttacctttcacattctatcttgtcccttcattattgcatgccctagcagaactccagcatcctattctgtgcacgaaacgggatcaaataagcccctaggaatcatctcccataccgataagatcacttcaccctttactac

SEQ ID NO: 542812 - DNA, 112 bp, Homo sapiens
tccaagcatcattcaatccgttcatcacattctcatgttttcaaccattcaatcaaccaaggcacatcacatgcatccatttccgtggaggtcaccgcagctctgcacattc

SEQ ID NO: 542813 - DNA, 414 bp, Homo sapiens
  misc_feature (23)..(23): n is a, c, g, or t
  misc_feature (31)..(31): n is a, c, g, or t
  misc_feature (33)..(33): n is a, c, g, or t
  misc_feature (157)..(157): n is a, c, g, or t
  misc_feature (195)..(195): n is a, c, g, or t
  misc_feature (218)..(218): n is a, c, g, or t
  misc_feature (303)..(303): n is a, c, g, or t
  misc_feature (310)..(310): n is a, c, g, or t
  misc_feature (354)..(354): n is a, c, g, or t
  misc_feature (393)..(394): n is a, c, g, or t
ttatttaacgccccaaactcacncccatacntnccctcagcctcgcgccgccctccactaaagtcagctttcaccctctctcccctctcagtgccatccacaaagcaaacgcacagtggcaggctgtgaaagattgtgtgaagagtgtgtttcgtgnatgtgtgtctgacaacgtaaagagaaccaaagcccatnagttggaatggaccacagtagcnataacaccgcaatcgaggagcgtctcgagagcacctgagggattacaactccaactcgagaagaagtcgttaaggtttttactgnccctctnattgcgcgcccggtggtgttaacgcgaaaacaggaacgagagtnaacacgtgaaataagaaggtccaattcagtcccagcctnnccgagtttggggcgttaaga

SEQ ID NO: 542814 - DNA, 181 bp, Homo sapiens
ccccccccccctttttccctttcttttggggggcgggggggggttttttgaccccttttttttcccttttttataagggggccccccggtttgaatttttgtttgcccaaaccctttttttttttttccccttttttccccgggggggtccctttaaaaaaattaaaggggttttttttta

SEQ ID NO: 542815 - DNA, 761 bp, Homo sapiens
agcggagaagccgagatggcggcagtcagcgctgggtgcaactccggcgtgctcctgctcttgctgatggcggtaacagtgcccagtcgagcccggggcagcggctgcctgggccgggactggtgcgcgaggggctggcgcggaaggtcgagagggcgaggcctgtggcactggtggggcatgctgctggagcactcatttgagatcgcatgacatgtgccaacttccggaagcggggctcactgctctggaaccagcacgatggtaccttgatcctgtcacagcggcagactcagcgaaggaggagctggggccgaatccgaggatgtggccagcgctgaatggcctgtaccgggtcctggatcccaaggcgacccgtggccctgtgatgggctggaagctggtgggctatgtctccatcctttgtaccctgtcgtgagtcctggtgggagtcgcacgatgtcggaccacgtgacccatgcaccgtggaattagatggaccggcaagcggctgcgtcgggcgtgatcacggccgtgtgacaggcacccattggggtggcacctgcgccgagggagccagaggagcgctgcgaccggcaccgttgtgacccatgggagactatgctccacaaggccaagccaatccatcagccacgagctgccacgcccgcggacccgaccaaaaaaggccacacagggacaccacgaggcacaggagaaggggcatcatggccgattggcagccgccctggggacagatg

SEQ ID NO: 542816 - DNA, 299 bp, Homo sapiens
  misc_feature (17)..(17): n is a, c, g, or t
gttttcccctccaaaantggggggtaaaaagggtgtacagttattttcccctccctgccttaaaacttgggaaaggagcactcaaggctggccccccaaaaggttttgtggccttttttctcacacaaaaaaggtcaacaataatgtccctgtgggcccagtttccctcctcccccccccccacttaaacagtagtttttgggccaaaggtcagggtgggcgggggcctgggaatacaacctttggaggctgcttactcaacttgtgttttaattaaaaatgacaaaggaaaccccgga

SEQ ID NO: 542817 - DNA, 1041 bp, Homo sapiens
  misc_feature (1041)..(1041): n is a, c, g, or t
accacgcgtcggagcctgggatgcattgctcagggtgggcgtggctagaaccatggtccgaaagatgcactgcacaggttgtgagaggcgtaagatgctgtccccccatccaaaatccgtgcgccactgcagtgagtgttgagggcacctctcctcccctcttacacctactcacatgagcgcagcggcagatcccatctcgcggaggagtactgttctgtatggcgcactaatatttctcatcctcgagtcatcttgctaacaggtcagcgcgtgagaaatcctttcccaggcgcaggccgtctgcgtgtacgctggaatggttctgccacagctgggcccaattggaaggagattcctcttaatgcatggtgggacaagaggcctgggttggcccctgcttgggacatgcccaacagctgggggagacgttactaggccagtcactgtagagattgagcagttttagccctcgcctggctttgctggcgggaggagtgggcctccttagggagacaggtgaccctgggtgtcatccctgtacccgtgtgtgccccgggtgttctcagtggttgctgaacgcaggtagagggtgctgtccagtattccccatgtgaatggtcacttccctttctcatggagtcagctgagcattagctcagcctgcatgttcccactcacctcctcggctctgttcgggcctgggtttctagcggagctgaagcatcactctgggccattgaccgatgagaggtctgaagccttctggcccagggcatgacaatttccactctcgatggccgagctgacccgtttgcggtgacggggccttgaagcagtgagacacaaacctaacacgaatcgccaccatgggtgggggggaaatcgcaaggaggcccaccctagaaggggtaccaccacacatgtgaggggggcatagctcgtggttcaattaaaaaggctaaaagcagggccatacacatacagcaaggaagtgctcacaaagctacaaggtacttcatctataaatttatcacacgn

SEQ ID NO: 542818 - DNA, 949 bp, Homo sapiens
tatttagggaccattcgtgctggcgcgcggtacccagaagcgtaatgtcacactatgcatcatagcatgctttaccctagcgaatgatctcgtggtctcagtgacttcagttgctctgtgtattcctctactcatagtatatccatacgtccctggtgtgccactcgatccgtatctgatcacaaatccaagattgagacgtatctagataggtcatttacatggagatctcatcgacatgagaagtcccaggctgaagcctcagttcatgaccatttactgcctcgtacgtgctcatcgccctcccatccctacgcatcctttacataacatgactgacggtcaacgatccctcccttaccatcaaaatcaatttggccctcccaatggtactgaacctacgaagtcacaccgaacttccgggcggacataatctttcaacctcctaacataacttcccccccaattattcctagaaccaggcgacctgcgacttctcttggcgttgaacaactcgcagtacgctcccttccccgattggacagccccgcacttcggtactaatacatgacactcaccaacgaacgtcttgcccttcattgagctgctccccaactattaggcttaaaccacaccgatgccccgtcgcgtgaccgtctaaacacaaaccagtttcaccgctacaaccgaccggggggtttactacggtcatgctctgagtctgtggcgcaaaccccagttctcttgcccatcgtcctagactttattcccctccccccttgccctcgggcggtttcctatgctcccctttacccctttgggcgagcacacatcctccctcttcgcgttccccccacacctaactctcgtgccggccccattcctgtcccctcccgctgctcaccgcgctcccccagccgcccccccccccctgtctcctgctcccgcc

SEQ ID NO: 542819 - DNA, 663 bp, Homo sapiens
cttaggcttcgaaccacacaacatgtggacacagtcacatcttggaattctcccaattcgcggttccgaagaaaagaagttggttgaccgacgggacccccccgcgcgtccccaccctttttattctgcggacccgagggcgtgttgttgtgccccgacaccccccaccagagacgggtggagtagtacttttacacgagacatccccacagtcccccgtagcgcgctagatcttttgccccgtactcccaataaatattttctgttatactagacatgccctttaaaacaaactccgcatctatgatgctactacgctttaatagagatactctcaattgcttcagcaaagagcatgaccaacccccccacactttttacagtggagcaggtttatatctccaccaaaatattaatgtatatttagctcacctaaacactagataatatatacgcaggcctcgcgggatctacaaagataaatgtgtattttcacagaaggacacagtgagtttagttttaacaggggcgataattgtgcgcagtaacacatcccccaccacgcgaaacatttctggagtggcagcaagctgacgcaccttaacacactgacgacaataaaaccactaggcgttcttcgaaccaatcattagaacaagaaga

SEQ ID NO: 542820 - DNA, 254 bp, Homo sapiens
cacgaggggagctcgttagtcatttctcccccagttcgaacagctagagtctcgagtcgtcttacctcacctaggagcccctctacactttccttgaggagtgagagtgagtctgtctcagcaactgaagatctggcacctgagtcatcccaaggggaggacaattctgggatcgaggaggtcttagaacaggaggaattcgaaaaggaaggatctgaaggaagctcctctgaggaagatgagcctctaccagc

SEQ ID NO: 542821 - DNA, 811 bp, Homo sapiens
cggagttgtcttgtttttccgaagtgtgttcccgtttctcccccttaaactgatgtcctttggagggaccttggcaagttcccagacctcctgggcgccaatttggcgcatttggaaaaaatggggccaaccttttgccacaattagcagggctggccccgccgcctttctcgcaccatgccccatccagcaacgttgggcgactcatagcctctgcctcagatgggcctgtgggagcctttctggagcccagcacttactccccctgtgcacgacctgctctgtctccactgtcccagcgctgagggcccagggtcttgttcttggggctgggggatgccctcttttctatatattatttcgatagaaagtctcctgcgggtagcggaaatccagtccggcctagggctccccagccccttgactgtcctcctgtgagggcctgaactgggcccgggcccgtcgctacggagccccctctcagcgagcccccacgggtccctccaggcatgctgcccgtgcgtggtcttttcttccgtccgttttcagaagccaatagccgccgggtctgcttaagccctgtccagcaccagactgggcccttccaaggtcttagcccatgtgtctgatgaccattcctggtgaagcacaaggagcaggaggatgggtcagaccctcactgggtgtcacaccctgagagaagtcctattgttaaggaacggaaaagtcaccaaaaagtttgtattaagacatatttttgtactacatggggactcttcctgcatgtcagccatacacttcctgatctgga

SEQ ID NO: 542822 - DNA, 104 bp, Homo sapiens
gtgataacaagatgataaccatacgcaacacttaatggacgaacctgatctcttatactagtatccttaatcatttttatcggcgctaaattagctcttcggaa

SEQ ID NO: 542823 - DNA, 342 bp, Homo sapiens
gattagtacctctcctcagctcccgaagaggttacatccaatctctcatgagggaggcgttcttcgatgcccctccatgtagttgcagcctccctcccttcttggcgcttggcagagcatacacgtatgtccaggatacatggtactagcctatgtgttgctgttcttcctccacacagcaggatataaactccataaaggcaggaatctttgcctgtttaagtcatggtgtctccttggcgccttgcaattagtagggactccataaatactcagtgactgaccaggaatggtggctcacacttgcagtaccaacattttggcaggctgaggcgggggcac

SEQ ID NO: 542824 - DNA, 275 bp, Homo sapiens
cgcccaggctggtctcgaactcccgacctcaggtaatctgcccgccttagcctcccaaagtgccgggattacaggcatgagcaaccgcatccggccgggatcggctattaaaggggtgaagttggggggcctttaacgctcttcgcgtcccatcccatccttcccttcccccttccgttcctgcccagtactctgggtcctgcggcctcaggggtgtccaggacccaccctgttgtgctccatgtccgtgaactgctgcacgaagaagcatatgg

SEQ ID NO: 542825 - DNA, 166 bp, Homo sapiens
acacctgtacgtcgctaaccccactaaaactcaccaagactcaacctctgacccccatgcctcagtgatactcctacaatagccatctacttgttcctggcatctactgttcctggcatcttggtggatccgtctacgagtctgaccttgcatggcattgcaatgc

SEQ ID NO: 542826 - DNA, 210 bp, Homo sapiens
ctcctgccatgtgcatttccaaatgtgaatagctggaatcaaaaatcattaatttaattttcatttcagttgaccctcgaacaacaaaagtttgaactgtgtgggtccacttatatgtagggctttttttcaataaacatattggaaaattttttgggaattgtgacaatatgaaaaaactagcagatgaaccatgtagcctagaaacat

SEQ ID NO: 542827 - DNA, 338 bp, Homo sapiens
ttgcagagacctcatgaacccacttaaccaggtcttcagtctgacacacaaaggtatgtggagtctcagcagagcagccactcaggcacgtgtagagacgtgatgcctttagatactctggctttcagggcttcctggcaaaagtagctgtagctcttgcaaagtggaaggttagaattgcaaagtgggaggctgaattcagggggctgagcagtgacagtctgcgggccccattttcacagcacctcacaggataagatccactggcttggaatttcaaccagccgtgatagcagtgttgggcctccctggaatggaactctcaggggtaccgagct

SEQ ID NO: 542828 - DNA, 223 bp, Homo sapiens
ttactaggtgagctttttgtgtgtatgtgcataagagtgatgggtctgtggtattcttggggtggtattgtggtaatgcgggcctcatgaaaatattgggaagtattctcttgcattttgggggaaagttcataatgaatatgaattcttatttaggatgaaagattgttgatttacagtgctatgttagtttcaggtgtaccacgacatgcctcgttaagct

SEQ ID NO: 542829 - DNA, 1051 bp, Homo sapiens
  misc_feature (737)..(737): n is a, c, g, or t
  misc_feature (739)..(739): n is a, c, g, or t
  misc_feature (745)..(745): n is a, c, g, or t
  misc_feature (750)..(752): n is a, c, g, or t
  misc_feature (755)..(755): n is a, c, g, or t
  misc_feature (757)..(758): n is a, c, g, or t
  misc_feature (763)..(763): n is a, c, g, or t
  misc_feature (765)..(765): n is a, c, g, or t
  misc_feature (767)..(767): n is a, c, g, or t
  misc_feature (772)..(772): n is a, c, g, or t
  misc_feature (774)..(774): n is a, c, g, or t
  misc_feature (788)..(788): n is a, c, g, or t
  misc_feature (796)..(796): n is a, c, g, or t
  misc_feature (798)..(798): n is a, c, g, or t
  misc_feature (802)..(803): n is a, c, g, or t
  misc_feature (810)..(810): n is a, c, g, or t
  misc_feature (820)..(820): n is a, c, g, or t
  misc_feature (822)..(823): n is a, c, g, or t
  misc_feature (1051)..(1051): n is a, c, g, or t
acgggatattcattcatgtatatgtatgtacgtatcaaccagctggcacactattcatttattgagatcttactcataacaagtcctctgttatatactgcagatatagataaactaattccttccctcaaagagttcaattctataagaagagatagttatgcaagcccataaattgcaatattgaaaatttcaagtttgaaggtaatgctgagaggtaggctctcacaggtgtgatatgaaaagtgaagccgtaacattttgtacttctctaccccttttgtatctaggctaacctagcagaatgtggtagaagtgatggtatgaagttctggagtgtaggccacaagagaccttgcagcttccaacttttgtctttctggaacattcctgataccatgtaaagaagcccaggaagccgaggcaggaggatcgagcgcaggagttcaagaccagcctgggcaacacagtgggatcctgtctctaattttaaaaaaatgtaaaccacaatgagatatcactgcacatacccaccagaatgactaaaactcaagactgacggtaacaagtgttgacaaagacatgaagaaatagcagctgtcatacattgttggtgagaacacaaagtggaacaaccactttggaaaacagttttgtagtttcttataaagctaaatgtaatttttttccatagaacccagccactcaccttctagatattttctcaagaaaaatancncactgncacannnacntnnatatnantnttcanancactttcttcatantggccctnanctgnnaataacncacctgtttntnnactggagattgaccgccttctctgctttacccatcccccgaatgcttttctcttatcatccttctctcttacctctttattgtgttagttgatcattgtcttatgtctttgcgacagagcccgcaaccctatactctctatctagttccttcaccgaatcaccatcatcatctctattgcccctttaatcctccctcggtgcttatttgattttaaatagtcctctan

SEQ ID NO: 542830 - DNA, 299 bp, Homo sapiens
  misc_feature (180)..(180): n is a, c, g, or t
  misc_feature (221)..(221): n is a, c, g, or t
  misc_feature (240)..(240): n is a, c, g, or t
  misc_feature (291)..(291): n is a, c, g, or t
  misc_feature (296)..(296): n is a, c, g, or t
atgattttgaaaaaaaactcacactaccatgctaaaaagtaatcattttcatttattattttttacttatctgtgcacctatagcattgtacaaccctaagtattcaattttgtatccttatttcatctacctcatgcttttaaaatgtcccaatattttctctcctagtcttctatcanataaaatgtgttatatctttttacattttaatatgatttgnaaactaaatacactatggnaaatccttaaaattcaccataatttttcttaaaaaatagttgaaaatacanaaaantat

SEQ ID NO: 542831 - DNA, 258 bp, Homo sapiens
  misc_feature (98)..(98): n is a, c, g, or t
  misc_feature (200)..(200): n is a, c, g, or t
tgtagtattgaattttcttgtcatagaatagaagaaatgctaaagaaaaccatgcttattccatggctcttgacattgccttgaagaccttgctgggnagcggggtggttccgcttagatcattacgtaacgtgaccaccccaaactggttctgatggtgtgagcgggagagggaggctggcctacaccagagccacagnagtgtgggatccgagccgtgtctgtgacctttcccacagctcatggcaacgctggatc

SEQ ID NO: 542832 - DNA, 628 bp, Homo sapiens
ccgttgtctggtgtacatcgatccacatgatactttttgaaatcctgaatccataaattacactttttttttttcaaattcacaaaattcccagtggtgctgactgtgtactaaccactattgggaaacttcccgtaaacctgcctgttgccttgccatatggagtgactgccctgctcaccacagaacaagcatgctttgtgtggctggtcgactgccaccgtagtgcatacactttgtacatcaggggtgaagggagggttttctagattatagggggagggtaaaattgggatttttttgttgtccctttattgatgggatgtgggggtctagtcactcagcttctgccctaaaataacatgtataaaaacccctgaagtatagtgtagggtgtgtacgtgtgattgtgtgtaagaatacgtctggcaataaaagcttggtctactggaacttagtgaattctttcctctttttcctccagaagtattggtaacaaaatttgtaaataagagctctacttagttggtatacccatgaacatgtagcagcaaaccttatgcatctaatccctacaaggtaacagaaaggcttaagacttgcaggttaagcacagccaagtctcaga

SEQ ID NO: 542833 - DNA, 332 bp, Homo sapiens
  misc_feature (172)..(172): n is a, c, g, or t
  misc_feature (330)..(330): n is a, c, g, or t
catattttcttttgctgacttgtctcctgatttttccctaccacagcttaatccttctcatttcaaaacaaatgtgtaaagcaaagctagaaggaagagtctttagatgtttcttaaaatatacaaaaaaaggtagggggtgatgggaaaatcatcacttttcaagtaagtntgccagatatagctagccacattttccagccatcaacctgcatggttgtgcatcactcatagactatctgcagtttgcttgatacatttacacaaatctggatacacttagaagaatataaaatttccatatttacctatcttcaaatatatattaanta

SEQ ID NO: 542834 - DNA, 105 bp, Homo sapiens
tccctcgtactcaccgaacaggacctgacaagagtaacttagtacctttgccagaagtacttatggtgcaggtcaagaaagatcttaagactggtcattcaaagc

SEQ ID NO: 542835 - DNA, 158 bp, Homo sapiens
aacaacagtcagaatgttgacacatctttatgtcactgaattgaagaaaagtgtcactgtttttcctgtcaggttccatgtgcgcatcaatgctaatgggcaatctcagctaaatagactgctagaagttatctctaggtaaaatccagaccagacaa

SEQ ID NO: 542836 - DNA, 925 bp, Homo sapiens
tatttttttaaaagttgccttatgtggagcgggaacctgaactaatgcccaaatgcctgttttccttgagcctccggaagagctccacctgcccgggatgtccctggacttggactgactagaactttcctcgagactgagttgcatgtacggggcctcctacctggaggcaagagttggggcagttctatcagagctgtgcccaggacacccctgctgttgcattgtctgaagccaatgtcctgtgtctgcacactgttgccactgtccttgttgtgcttgctgtcgcctctccaggcccactcagctctgctccgccccggcccgcccagccaagccctgggaaaccccaagggcaagtttgcttcagactgttgtaaacataattggtcttgcctggtacacacttgtcctcagtgtgcacatctccccaatccagaacaaggggttgaacacccactgatgtccacagcttaggtctgtgtctaaccttaacgacctttgacctcaaggaggtggagaaaaggtaccattctctaagggtctggtgtggtctttccatcttattaccaccaacccctggaagccatctctgccacctctcattggccctgcctggatcaaggggtgagaggaaccatggctggggaatctacggttggtgagcccatggcagcagcactgtcggcataaggtaccgacttgctcacaagcaatggtgagtggactagatgcaagatggtgagctgtgtacaggaccagagggagaagaaggccagggggagacaggaccaattgccggcccggtgccacgccagcaggaagtggacccacacacttacacaagggagcaccgagcaggttgagagtagaccgccaccggggaaacgccaaaccgagcacggccacccaccgtgaggggagg

SEQ ID NO: 542837 - DNA, 402 bp, Homo sapiens
  misc_feature (267)..(267): n is a, c, g, or t
  misc_feature (304)..(304): n is a, c, g, or t
gggaaatctgacccagaccaaatgatgtctaaaaagtatctattacaggactttatagatggtcccaagaactaaccaccatagttcaacatcttggcataaaactccatgatctgaaggccaggcgcagtggctcacgcctgtaatcccagcactttgggaggctgagacgggtggatcactggaggtcaggggttcaagaccagcctgaccaacatggtgaaaccccgtctctactaaaaatacaaaaattagctggacatggtngcgggcgcctgtaatcccagctacttgggaggctgangcaggagaatcgcttgaacccaggaggcagaggttgcagtgagccgagatcgcaccactgcactccagcctgggcgacaagagtgaaactccatctag

SEQ ID NO: 542838 - DNA, 724 bp, Homo sapiens
tggcaaaaccccatctgtgctaaaaattcaaaaattagccgggcatggtggcgggcacctgtaatctcggcctcccaaagtactgagattacaggcgtgagccatcacacccggcctatgttatttctttgttaaaacaaaaatatcaagacccaacagtaaaatgacaaacaaggctaggcatggtggctcacacctgtaatcccagcacttagggaggctgaggagggcagatggcttgtgctcagagtttgagcatgagcctgggcaacgtggtgaaaccccatctctgcaaccaatttacacaagattagctgggtgtgatggcatgcaccttagtcccagctgcttgggaggctgaggtgggaggatcgcctgggcctgtgaggtggaggttgcattgaacagagatcttaccacggtactcgtgcctgagcaacagagtcagatcctgtctctctcactcacacacacacacacacacacacacagacacacacacacacacgacgacaacaatactcaaacacgcgtggacacagaggtactcagactagtgcactactcccgccagcacccgagaagaagtagacacgtagggcccacaaataaatgtgcgctgaaacgagaactccaacacacatctcaaacagcaacatgatgatgcatagcgacgaggatgaaaactggcaaccatctactgttgcactactgtatctaccca

SEQ ID NO: 542839 - DNA, 576 bp, Homo sapiens
  misc_feature (8)..(8): n is a, c, g, or t
  misc_feature (16)..(16): n is a, c, g, or t
  misc_feature (27)..(27): n is a, c, g, or t
  misc_feature (30)..(30): n is a, c, g, or t
  misc_feature (32)..(32): n is a, c, g, or t
  misc_feature (44)..(44): n is a, c, g, or t
  misc_feature (48)..(48): n is a, c, g, or t
  misc_feature (52)..(52): n is a, c, g, or t
  misc_feature (76)..(76): n is a, c, g, or t
  misc_feature (80)..(80): n is a, c, g, or t
  misc_feature (89)..(89): n is a, c, g, or t
  misc_feature (91)..(91): n is a, c, g, or t
  misc_feature (101)..(101): n is a, c, g, or t
  misc_feature (104)..(104): n is a, c, g, or t
  misc_feature (111)..(111): n is a, c, g, or t
  misc_feature (127)..(127): n is a, c, g, or t
  misc_feature (138)..(138): n is a, c, g, or t
  misc_feature (154)..(154): n is a, c, g, or t
  misc_feature (161)..(161): n is a, c, g, or t
  misc_feature (163)..(163): n is a, c, g, or t
  misc_feature (166)..(166): n is a, c, g, or t
  misc_feature (174)..(174): n is a, c, g, or t
  misc_feature (180)..(180): n is a, c, g, or t
  misc_feature (186)..(186): n is a, c, g, or t
  misc_feature (200)..(200): n is a, c, g, or t
  misc_feature (206)..(206): n is a, c, g, or t
  misc_feature (213)..(213): n is a, c, g, or t
  misc_feature (221)..(221): n is a, c, g, or t
  misc_feature (233)..(233): n is a, c, g, or t
  misc_feature (246)..(246): n is a, c, g, or t
  misc_feature (267)..(267): n is a, c, g, or t
  misc_feature (269)..(269): n is a, c, g, or t
  misc_feature (279)..(279): n is a, c, g, or t
  misc_feature (296)..(296): n is a, c, g, or t
  misc_feature (300)..(300): n is a, c, g, or t
  misc_feature (336)..(336): n is a, c, g, or t
  misc_feature (343)..(343): n is a, c, g, or t
  misc_feature (345)..(345): n is a, c, g, or t
  misc_feature (377)..(377): n is a, c, g, or t
  misc_feature (410)..(410): n is a, c, g, or t
  misc_feature (441)..(441): n is a, c, g, or t
  misc_feature (446)..(446): n is a, c, g, or t
  misc_feature (565)..(565): n is a, c, g, or t
tggttgancacagggnactttattganggnanaagaaaaggggnggcncccnaggcccccccccccttcaaggggnctanatggcaacngngagggggggngantcagtgnggggggggactgagtntgggagggacnccccagcagtgagggnctctctntnccncttgtgcncttgcnggggcngggggtccaggggncttacnccttggnggccatgngggccaagaggnccaccaccctgtngctgtggccaaattcgttgtnanaccaggaaangagcttgaaaaagtggncgtngagggcaatgccagccccagcgtcaaaggggggggngtgggtntngctgtggaagtaagaggagaccacctggggcncagtgtagcccaggatgcccttgagggggcccnccgacgcctgcttcaccaccttcttgatgtnatcanatttggcaggtttttctagacggcagggcaggcccaccactgaaacgttggcagtggggacacggaaggccatgccagtgagcttcccgttcagctcagggatgacctttcccacagcnttggcagccca

SEQ ID NO: 542840 - DNA, 134 bp, Homo sapiens
ctagctcggtaccccagaaatcaccggtctgggacacactttctgtcgtataaacctctttttatgacacgttcgtgcctgagctacctactggtcttcaggcaacgcgggtgccatccccgtacgttcatact

SEQ ID NO: 542841 - DNA, 211 bp, Homo sapiens
acacttagtccgatcacctccgtcgtccctggtgtgctggtcgctcgtctaggcggtttaggcgccatatggggccattcagtcgaataattcacataatatatatcgtttctttattaatggatttattttatgctaattactagcgcattcctactactcaacttaaactccaacacagacgatcgacatcttgtgcacctcagagagt

SEQ ID NO: 542842 - DNA, 468 bp, Homo sapiens
  misc_feature (171)..(171): n is a, c, g, or t
ctggttgtggaagtggcccatcccaaaataatccatgaatttggggcacaaatcctgcgccatgccaatctcttgagccttggtgtcaccatggccacacaccccgatggcttccggcttgagggacccctggttgcagcccacagccttgggccttgcattgtgctttangaaggccctgtccgtgggttttgcccctttgccccgggaaattccaaccccatggggggggttgccctggctgcccccagcttgggtttcaatggggtgattggggtgctcgtggttgataccagcctgctgccagctcccctccaggccggggatccatttttgttgagaagcctcctccctcccgagacaagatcatttgcctggcctttcaccccccccatcccacccctgccctgccccacttccccagggtttcccttttgactcagtaaagatccccgctgcctcccccca

SEQ ID NO: 542843 - DNA, 105 bp, Homo sapiens
cttttacccagtatagatgcatgtgactcaggacggcgggcaatgattgtggctttatgtgtagtctttcaactcatgaggcatcgtgctgcaatccccggtcga

SEQ ID NO: 542844 - DNA, 348 bp, Homo sapiens
gtagggactgttaaattgtaagtataagatgtagaatatgggagagtgaaaattgatgttgatggaggaaattatcccattaggaaattgaaagttgtttaagacaagacagattctaagatcttagatataaagtctaaggtcttagatttctggacttcagaagagttttagttgtttttcttacccttggtatccatttggataaaataaatctgtttcaagtcttctgagcatatttgtttttacttttctaggatcaggggggtttgggtattgctatcagcgaagaagatacactcagtggagtcatcataaaggaacacagagagggagaggtcacatctt

SEQ ID NO: 542845 - DNA, 646 bp, Homo sapiens
  misc_feature (497)..(497): n is a, c, g, or t
ggacggtgtggggcggtcccggccccgcatgatctcgttcctagactgcctgccagcgttctcggccgtgcctgaggatggacccaggagatcccgctggtgaccctgcctgctggcgagcgccagcggatgggccaggaccccctcctgctcctgcaggccctgcagaccctgtggtccacgcgggagcggaagcagagacggagtcttgttctgtcgcccaggctggagtgcagtggcgcggtctcggctcactacaacctccgcctcccgggttcgggggattctcctgcctcagcctcccaggtagctgggactacaggctccactatgctggctagtattaaagtattatagggtagagacggagtaccgcatgtgtagcacagacttgtcttgaactcctgagctcaagccatcgggctgcctcgtcttctcaaagtgctgggattccgggcgtggccactgcgccttggctgatgccgtgtacctgcatnttgcccaccgactctcgtgtgtcaggcctgtaaccacagttgcaccgctcagtcaggtcgcttgctggctcacagagtccagagtcccgagggaccagagaagctgcctttacaccctgtctggccagcttacccgaggagccaatcca

SEQ ID NO: 542846 - DNA, 302 bp, Homo sapiens
gtgctgtctgttggtcgtacttcagaggtatccccctgtccacacttgtgcttgtacctgtcatcactcttggaccagtgcagtttataagctccttcttgtgctgatgatatggacgtctatttattttccacagttaacaaatctttatctcctcttagagccggcgctcttatggtgcgccttctattacctcgaagaattggcggttttcccttgcgccacagggaaggggttccctcatgccttggccctagtctccccttgatcttccccgagagagtgcatgtgcaaaagacggg

SEQ ID NO: 542847 - DNA, 832 bp, Homo sapiens
ggttggtccttagtactgtcggtcgtgtgggtgacgttggctgccggtgagttgggtgccggtggagctcgtgttggtcctcagaatccccgacgttagccgctgcctcctcctacacctcgccgtgtgtcttacccggtctgagtacgacaggggcgtgaatactttttgctcccgaaggaagattgattgtcatggtggaatatgccattgaggctatcaagcttggtgtctacaggcgcatagggatccaggacatcagagggtgtgtgcctagcatgtggcagaagagaattacttccccactgatggagaccgagcagtacttgagaaacagtagtcagagatggatgctcacttagtggtgtgtgccatgagtgggctacttgctcgatgtctaatgactttattctgataagtgctcagagtggagatcacctgatagccactggttcacgctacaatgagacgatgacagtggacgagttgtgacccaagtctgtgtcccagtcgggctttgcagtgggcgaccaggatgcaggatccagggtgcactgtcttcgtccttcggagatagcactgattattgggaggagtcgatgagaacaggtgccccagctggttcatatgggcccatcgtgcgaccttgtacaggtgatgctcgagcagtcggtcggtccagaggggagcccagaggttcttgcacgagtttcccatcagctatgactcgaacgaaggcgcagtgttcatcctcctctcccacagttatgggggcacctgctgcccacgttggtagctcgtgcgttggcgaattcctgtccacggggacgcg

SEQ ID NO: 542848 - DNA, 207 bp, Homo sapiens
  misc_feature (32)..(32): n is a, c, g, or t
ccttgggggggggggggttttgggcccccccnaaaacaaaaaaaaagcttttccttttttttgggttaaaatttgggggggcggggccccccccccccccgggttttttttttttgccaagggggttttgggggggcccccctttttttttttttggggggcccgggggggaaattaacccccccccgggccctggggcccccggga

SEQ ID NO: 542849 - DNA, 232 bp, Homo sapiens
gcagtgtgtcttctcagtgtgatcactgttgctttgagtgccagcttgcaccttgaagccccctgctcaggactcaatcagttcccttcactgcccccagccctggagggcagctacgattctctttttttttttttttttggaaacgggttctcgctctgtcgccaggttgattgcaggggcccgatttgggctcactgcaccctccgccctccaggttcaagcgattctc

SEQ ID NO: 542850 - DNA, 662 bp, Homo sapiens
acggaatagaatggaatggaaccgaaatggaatggaatggaatggaatggaaaggaatggaatggaatagaatggaatccacccgattgcaggggaatggaatggaatggaatggaatggaatggaatggaatggattcaacccgaatggaatggaaaggaatggaataaacccgagtggattggcatggaatggaatggaatggaatggtatggaatagaatggaatggaaagaaatggaatggaatggaatggaatggaacggagtggaatggaaaggaatggaatggaatggaatggaatagaatggaatggactggaatggaatggaatggaatggaatggaatggaatcaacctgagtgcaatggaatggagtggaagggaatgtaatgaacggaaacaacacgaatggaatggaatgtaatgagtgtaagggaattgaatacaatcaatccgaatgtaatggaatggaatggaacggaatggaatggaatgcaatggaatggaatggaatgaatgaaatggaacggcagggaatggaatggaatcaacccgagtgcaatggaatggaatgaatgaatgaatgaatgaatgattcaaccgatgatgaaaggatggataaccgagtggatgcatggatgaatgatgaatagaatcaac

SEQ ID NO: 542851 - DNA, 1051 bp, Homo sapiens
tggaaacaaaatttcactctgttgtggcctaggctggagtgcaagggcttgctatcagcctcacgtgcaaccttctgtgcctttgcaggtgttgaagcggattctccgtgcctcagccctcccaagttagcgtggcatttacaggcattgcgccaacaagcccggctagtttattggtatttttatagtagaaagcgggattttctctccatgtgtgtggctcaggcgtggttctctcgaaactctccgtgtactcctcagggtgtgtactccctcccgccctctctgtgccttcccaaaagtgtgcgtgggtattatacaggggccttgtaagccatgtgtgtgcccgcgggccataaatcttgcggatattttttatagtatagaagaagacggggtgttacaatctcgcgtgtctgtggtctcagaggtgtgaatcttttgacaacttcacgcgaaccccaccgagggggcgaaaatcccaccacgcgggcctctacatttcacaacacacaaaaaatgtggtctatgaggcgaaccaataacaagcgggacatattgtaacgcccaacgacaaaagacctgcgggacacagaattatataacgccgagactttatacacaagaggagcagtgtgcccacacaaatgagacgccattgtgagtgcgcaaagtgtcccccgatcagtagtctcacaagtggagaccacaagagaacgcacccaaggagggggtagaaaaacccacagtgtgatggggctcctcaaccagacacaagaagacgaaggtgcgcaacatactaccaggaggaaacccccccaataacgacgtaggagacaacagatgtgggcacaactccaaacgaaggacatacaaccaccaggggggagagatcatccattaggtcggaacggatcagagcggaacagaacgaattcaggacaacacagcgagcagaaaaaaacccaacagccaaccatcacaacgacggcaccagcccccaatgcaagacacacccagcaccccatccgacaaatatatgggatccaca

SEQ ID NO: 542852 - DNA, 490 bp, Homo sapiens
  misc_feature (95)..(95): n is a, c, g, or t
tagccgtcatacatgtctgatgacaaggagggtcttcttagaaatcataagactgatacttctgacagggactttatacttgtacagtaaaaaantcagctggatctgtgtcctctagctgcaaattaacaataaaagctataaaagatactgaggcacagaaagtctctacacaaaagacttctgaaattacacctcagaagaaagctgttgtccaagaggaaatttcccacaaaagccctcaaggtctggacagaaattcaagatcgtcagcaggcacaaatctccaagcaaaagttcagccctctaaagcaggaagcttacaaaggttctagatttctagaagaagtcaagcaaatccagcagcaaacctcccctggcacaaaatcctattggtcctatgcaggcaaatccactcaaatacatctacagcgcatccagcaagcaagtccagcaactctattgctcgagcattcacaagccattattc

SEQ ID NO: 542853 - DNA, 591 bp, Homo sapiens
ctagaggatcccgtcaccaggaccagatcgaatgccataaggacctacatctctcctcttaattatttctgttgttgtgatttcagtttcggatgtttctatggtgatttaattcaatagtattaataaccaactgaaatactcagagactaaaaaggtacatctggtgctttcaaaaagagacacacgtggaataaacttttggaaacacctgacttaattaacaggatcactaacatctagcaggatcactgctagactgcaacaatactgagcttcttcctcgctgcaaattcctaaacgaaacaaaatgctgctgggtatagctgagctcctggtggcaatactcaatcaaaataataaaaagcctaggacagaagcagcaagcacaggcctccagaagtcttagtttaaatttttaattaaacaatcataaatatcttttaaaaaatgtagactggttcacacataagtgactcactttataatctgaaccttcccttctggcccctgggattttatagcatgtgccaaacttcaacaaagctgtatgtgaaaaaaaaattttttttaagagacaggtcgatctgt

SEQ ID NO: 542854 - DNA, 178 bp, Homo sapiens
accagcttcacaggctcctgtgtgagatgcatcagagatcatggctgttaacactagcaggatatgcacaaacagattggatccgcgtggagactgccagtactcaagagcagcatggaccatcgatggaaaaatattaaattgatcagatggagatgtttgtgctggagggctctgt

SEQ ID NO: 542855 - DNA, 261 bp, Homo sapiens
ggacaaggtttttacatgttacagaaaaatgttaggacagtaggattctcatatatcctgtaccatctcccccttttattaacatcgtgcactggtatagtatatttgttaccgttaatgaactgaagtttatacagtgtaattgactgaagtccatactttatttagacctccttaatttttaccaatgtcctttttcttttctttttctttttttttttttttttttttttagggaaaagccctgtgggcccgcggggg

SEQ ID NO: 542856 - DNA, 182 bp, Homo sapiens
tgattctagaggatccgtcatttaggtcattgtctgtatgttgtttccttgcaaaagtgaacttgttggtcatggtgtggccccggagtagtgctgggaccaagtgaagtcctgcccatcctgctgcacctccgtgacgatcttgaagttgcgggccttttcgattacatcgctggagatcc

SEQ ID NO: 542857 - DNA, 163 bp, Homo sapiens
tgacatctacggatccttatcgattggcgggcacttatgcacgcttatacatcttaacaagctttgacgtgcgagagattgaagagttcaaatctgagccaagatgttgatgttggctatgagaattctctgctccccacctctaagttgcccgccaatcgaa

SEQ ID NO: 542858 - DNA, 296 bp, Homo sapiens
  misc_feature (2)..(4): n is a, c, g, or t
  misc_feature (6)..(6): n is a, c, g, or t
  misc_feature (30)..(30): n is a, c, g, or t
  misc_feature (40)..(40): n is a, c, g, or t
  misc_feature (48)..(48): n is a, c, g, or t
  misc_feature (58)..(60): n is a, c, g, or t
  misc_feature (69)..(69): n is a, c, g, or t
  misc_feature (71)..(71): n is a, c, g, or t
  misc_feature (90)..(90): n is a, c, g, or t
  misc_feature (95)..(95): n is a, c, g, or t
  misc_feature (102)..(102): n is a, c, g, or t
  misc_feature (118)..(118): n is a, c, g, or t
  misc_feature (154)..(154): n is a, c, g, or t
  misc_feature (170)..(170): n is a, c, g, or t
  misc_feature (200)..(200): n is a, c, g, or t
  misc_feature (210)..(210): n is a, c, g, or t
  misc_feature (212)..(212): n is a, c, g, or t
  misc_feature (217)..(217): n is a, c, g, or t
  misc_feature (230)..(230): n is a, c, g, or t
  misc_feature (232)..(232): n is a, c, g, or t
  misc_feature (248)..(248): n is a, c, g, or t
gnnntnaaactataaacaagctatctgtgnagaagcttgnaatatgtncattcatctnnnagatataancntgtattttgattccctggntgggnacactcnttttgtacagtctatnaagaaacatttctgagtgcattgaggcatatgttgnaaaatcgaatatctcntgataaaaactaggcaggaggtatctgtgnaaatgctttnanatttntgggtattggccncncagagttaaactgttnaatcaaaagttttttttttttttttttcagaaacaaagcatacatcat

SEQ ID NO: 542859 - DNA, 168 bp, Homo sapiens
atgcgatgtgatctagaggatccctttcctctttctatggatgttctctgcacatccttaggtaaaactcaaaaattactatggagattttggcaggaaccaaatgagacaggaagaaatgttttaaactggcggtctaacctctaataccagggaggcccaacaggg

SEQ ID NO: 542860 - DNA, 150 bp, Homo sapiens
ttcatagtgtgcacacgatatcccagctacttggaggccaggtgggagggtcacttgaggctagaagtttgagggggcacacagtgagaccctatctctacaaaagaaaaataaggccaggcatagtggctcacacttataatcccagca

SEQ ID NO: 542861 - DNA, 950 bp, Homo sapiens
gggaaggggtacctactcattgaacctggtagtccagcccagctctgtctatggagatttgagcctgcgaggaggaggccagaaatggacagcgcagggggggatatcggactgagtctacagtgtgtcttcacagatctgcctaacttggatgccacgctggtgtggacaggactgctgaccccagtccggttgcccatcctatcgcaggtccattcccatgtgcactcgtagcaaaggacccgtggtcgccctcttattcctctaggcaagcagagagctggtcgatcatggtgagatatggtgcatgagaagctggacttagtgtgggcccctcaacagccaagtgtgaccccactgccaagtggggatggggcctccctccttgggtcattgacctctcagggcctggcaggccagtgtctgggtttttcttgtggtgtaaagctggccctgcctcctgggaagatgaggttctgagaccagtgtatcaggtcagggacttggacaggagtcagtgtctggctttttcctctgagcccagctgcctggagagggtctcgctgtcactggctggctcctaggggaacagaccagtgaccccagaaaagcataacaccaatcccagggtctggctctgcacttaagagaaaattgcactaaatgaatctcgttcccaaagaactacccccctttttcagctgagccctggggacttgttccaaacgcagtgaatgtgaaggacagtgggggtcttcgggggcgaagctccctcaagctcagaggaagtctaccctgtcctgctttggttgaagggttgggaacaaactggccttttcgtgtgttctgccctttttgtccgagtggcactacaatttccccgaggcttgggcttgcttatataaggcgtgtggggcgccctctaacacagccaagcggggagaggactg

SEQ ID NO: 542862 - DNA, 366 bp, Homo sapiens
tacccagctgtgaaaaattatgaactagtgataaatgcaaatacatgaacaaatctcaaattaatactgattgaaagaagccagagacgaaaaagtacatactgtatgattgtatttatataaaactcaagaaaatgcaaactaatctatagtgagaaaaagcagatcagtggttgcctcgtaagagaaatgggagaaagtgttgagggagaggaaggagagattacaacgggactcaaggacaagtttcatgtttgcagatgatggatatgtttactgtcttgacatgtatacatatatcaaaacttctcaaattgcatactttagatttgtgccgtttatcatctgtcttttatacttctataa

SEQ ID NO: 542863 - DNA, 801 bp, Homo sapiens
gatctcggtggtggccattgcgcagaccagacttcggtcgtactcgtgcgcctcgcttcggattgcctccgcaagcgatgtctgacaaaacaccggtatggctgagatcgagaggatgcagatacagtcgaatctgaagaggcacagagacgcaagaagagaaatccacgtgccttccaaagcaatggattgaacaggagcaagtgagcaggcgaatcgtaatgagggcgtgcgctagccatctatgcgcgtgtacattccacaagcattgccttcgtccatcttgacttcttttagctgtataactttgtgaagatgcgacagaggttgcgatcaagtgtctacaggtgactgtgctgcccctttcacatcaacagaacgtactgaacgaacgaaggcgggcctgccctttcccatcgtgtcgtatcttatctggctggcagcgccaggaaatgaacttgcaatgtcggtgaaggaagaagtggggtggaacgaagtgggggtgggactgaggtgtgaaaatcctacgagtaaaaccaaagctgggcccaaggggtgtccgtgcacggctgtaaatgcatgtttaactccagaaggtgccagtgggcggggcggcgccgtccaagagtgattttccacattgctggggagagtgcccgaccttttgggaagttcttgccttaacacaggtttgaggagcgcttccacacaaaaaaaaacgcgccgggagatgtgcgggggcgcgggggacccccaagaagggttttaagccacttgtgggccggccccaggttagggact

SEQ ID NO: 542864 - DNA, 201 bp, Homo sapiens
cgctggcccgcacttccacaagaaaatcttctggccaatcgaaccaccaggttgccattgcagtgcacagggcggtcacgggccccttgctggctcgggctcgtgaaaggacttttgaacttggtcttgggtcaagggcttggccaggctccggcaaccacctgcaatgcacatgccatgaatgcaatgatgccggcctgc

SEQ ID NO: 542865 - DNA, 127 bp, Homo sapiens
ataccgagcttagtgtgcggtgtgcatgtctggtgtagtgggtgcttgcttgtccacagtgtgtgctgcgtgttgtgtgctgtgagctgtgtcatgtatgtgctgcgcatagtgtgtgtgctgtgtg

SEQ ID NO: 542866 - DNA, 343 bp, Homo sapiens
gcaacttgagccgcaacaggtggagaagcagcatgttccaactcggaagatacattgaagggggctccggccaccggcgtaatagcagttcaaactaaatttttggtatcaagtccctgaacggaagtatgacgtcgggtccctctgaagtacaattctgagttctcattaaaagaaattggctttcatggtgtgatttcttaatggctatgcttcgagaatcaattggtgtattatgccctttcccccagcatggtagagcaagtctggcgctcacaagcccagtgtgacagtgtcatgatgtagtagtgtcttacgggctttttaataacatcctttggta

SEQ ID NO: 542867 - DNA, 419 bp, Homo sapiens
gtctggttctcctggagctggtttctcgaggctcatgacatgtatagttttacagactgaaagaggaagtaaatgagaatctagctatgttctattaagcgagacattaaaaagatttacaagaaatgcaaaaacaatgacacttttctgactacttttttgctgttgggaaatagttatttttcataaaaaatgctattattggccctgcgcggtggctcacacatgtaattccagcactttgggaggccgaggcgggtggatcacctgaggtcaggagttcaagaccagcctagccaacacggtgaaaccccatctctactaaaaatacaaaaaattagccgggcatgttggtacacgcctgtagtcccagctgctcgggaggctgaggcagaggaatcgcttggacctgggagtca

SEQ ID NO: 542868 - DNA, 128 bp, Homo sapiens
tcggcctcttatcttctaattacatatctttaatgttacggtatacttgtataccatggagaaaataagtgtgtactcccaagtgtctgaaacaaacaaatttatttcaaagtcttgctggtgggaag

SEQ ID NO: 542869 - DNA, 1586 bp, Homo sapiens
cgtctgcggtgccaaggacggctcttggctccttcgggaaatccagccccgttcaccgtggctcctgatgcggctcgcatggctgcagcgacagccgggcttcgagccccgggcaggcgcaccaggcggggggtatgcgagaaaagccgtgagggatgtccggaccgcgtggcgcgcaacgaggaagcgtgctagtccggtacggcacgagtgccagcgcgtgaggaagagggctcgagtagagaagccaagtggccggggtgcaccaggcggagtcaggaccccttggaggaaacccaaccgagtagagcccccaaggggcggggcagaaggccctttcccttttattgacggcgcgttcgacggggggggcgacaaccacggcttaagcggggacagaggttcataacccggtggttggtggcctaacgaattccgttggccacgcttccctgttggggggccactcaattgggagggggtgggcaaatatcagccgcgaggaaacgccagggtgtgtgtgtccattcctttagaacgctcgaggggaattacggcttgtaattaagccgggctggttccgtgtttaccctttcgggggacgagcaataagaggcgggccagaagaggcgcccctttggaagggggggccccaggggttccaaaacttttttgtggacccaataccgcgggggatttgcccccttttgtgggaaccacatttgggacaccttccatagtgtccttcagaaaaaagcggtcgttccaaaagggaagatttcccacctttgcaggcgggggaaaagaccattgtcccaaggattccgcccgcgggtggtaattgcaactttttggggtcttaccccaaattccccccgggggaaaggggcaggggcacgaagcatggtttgtactgtgggttgtattattcctccgcggacaaagaaaccggtttgggctggccttcctttttataggaaagggggggcacttccctgtgggcccttcttcataaacttcccccgcacggggaagggtgtaccgaaagaacccctgtgtttccccaagagaaattagaaaacggcttttttgtgggtgggcgaattacaacacgaatcttggcggagaacaccccccgtgggaattcctattccacgccgccaagaagggatatatcagggcggaaccacattcacggaggaaaaagaaggcgccagggagcaattcttttggcacagccaggagattttatttacgtcggtccaccagcgtcacaaatttatagcgggtttctcgtgtcacaaagaggcccagtaggcccttttttggaggggagaaaataccgtgggcgtgcggcagccacaccacgagaggtattttcctagcaggggtgggaagtcaaaccccctcaagagaggggcgcagcacaaacaactcttcgtgggcgcgagcgatcacaacccacctatctttggtggcctgacacatcacgcggaggacactctactagaaggagagcggcccgcccccacacacgagtcgaagcacacttagtcgttgtcaaccaggcagagagaccactctag

SEQ ID NO: 542870 - DNA, 337 bp, Homo sapiens
gagcggccgcccgggcaggtacaggggaatggaatggaatggaatgcaatggaatggaatcatccgtaatggaatggaaagaaatggaatggaatggaatggaatggaatggaatcaactcgattgcaatcgaatgaaatggaatggaattaacccgaatagaatggaatggaatggaatggaatcaactcgattgcagtcgaatgaaatggaatggaattaacccgaatagaatggaatggaatggaatggaaaggaacggaacggaacggaatggaacggaatggaatggaatggaatggaacggaatggaatggaatggaatggaatggaatca

SEQ ID NO: 542871 - DNA, 87 bp, Homo sapiens
tagaggatcccctatgaacacttttgtaatcactttagttctcatcacctctttgtatacaaaaactactttcaaagcccccccgcc

SEQ ID NO: 542872 - DNA, 264 bp, Homo sapiens
agcagtctacaggaacaggttctagtaaaagtatcactaaggttgaaggcaggagagtaagtctgggactataggttgggagactgtaaggcgtggacaaaagcaagaagagtataagcaaggtaaggaatgaggggaaagtgatgagtatgaaagaggaagtgacctgtgagaatcagacctctggactatggtgacttcgcttctctcctggactcagcacctctttgctgtggtatcccacaagttattactgcttggtgg

SEQ ID NO: 542873 - DNA, 948 bp, Homo sapiens
agtggtttccaccattttttccgggcccccttggatggctgacgctcccgtcttctcccgtcttgagggaggccctttgtctgcgccctttgctccccgggcggatagtgcccctgccgtttttctgccccagcgggtagcccctgcccctgtgtcgagaggcgtttttgtccaaccctcggccctttgtgtggtgcgtccccccgccctctttttgctgcgcgggaccctcctgttcataccacacacgggggtctatactgactccttgtcacacacggggggggttttcccctcccctgcacggggtcctccgctggccccctcctggaggactgactgcagtactttctgtccccccccccctcttcttatgcccgcttgctcgctccccccgcggccccactctactttttctggtcggtcgtgtaggcattattttcgacgacttttttgtgttgccgccgaatctgcagccgttcttccacgatccggccgttcttttttaagaagggggcgagacatatcctactcgtttcactatagggagggcgccccccccaaccaggccctgttattagaggaggggaagacagcccccccccctttctgcggcgtttttcttgtgtgtcgcttcttctctccttggcagccccccacgatgcaatgtggtgggtcccacgccacaccccgtctgtgaagccacctgggggtcacaagttgctcctgggagcacccctcccccccccgagtcagtgtgtctgggaggagaaccctcagcccctcccctgcacggcacccatcttctggtggtatgcactttcccccgcaccaccgccaggaggtgttcccccccttaggagcctttttccccaggaaccccccttttttccctttccttttttaaaccccaaattttttttttttaactttttccttttccttata

SEQ ID NO: 542874 - DNA, 446 bp, Homo sapiens
gtagcaaggaagcagtaagatagagggagggaagggcaggagatatagacaggttagaaagaatatgcgcgtggtgaatataaggaagacgaacagatagataggaaagatgatgaacacgagcagatactggtatagaggtatagaaaaagacacatgcgaagaaggaaagggcagagaggcagcagataagtagaaagagcagacggacgagagatccaggatggaaggcaggagcgaaaaggaatgagcgaagtaggatccaggcaaggtcgggcgagagggattaagcggctttagtgggacgagtaagtgagtagatggacatacacgcacgcgtaagggcggcctgtgaatgtttggcaaacaaggacactcgcgctctctctctctctctctctctctctctatctctctctctctctctcgtgccgaatcctgcagcc

SEQ ID NO: 542875 - DNA, 1250 bp, Homo sapiens
  misc_feature (1146)..(1146): n is a, c, g, or t
catcatttttggggctgcatagtaggattgcaccacctcccccggggggtgtgttgtgcctttattatctcgtcgatggttgttgctttctctccctcctttaccctgccgcccgggtcggaatcactgctcgcgtgcgtcgcgcgaagtctaagtgggtgggccggccccactcctctatttttttttattgtggccctctacctagtcgtggccgcctcctctgacgtatgtgttgtgttcctaccctccatctggcggccgctctgtcggtgtgggctgacatctacctcacccctctctttctctctctgcgagcggggggagccctcgcctctctctcactgctgtggtttccccaccactgctgtttgtgtcctccctctcccgctctctgccgccagatgcaatgatacccttcctccgtgttgccatccctgccggcgctcgcttctctatgaaaaagagagacactgtcgttccccctcctctcctctgcaggtgtgacgcaccacctccgccgcctccgcgtcacgcacttgccttttcggtggcggtcgtcccccacccccccgcggacgggagggtgctttctcgctctcctctttcccccccctctcgtcgcgctgcgagagagagtagtaagggggggcccgacccccccctctcgtgggcgaggtgacactatacgatcgatgcgcgaccccactctcgctccccctctctctttctcactcctgcgccaccgcacacgtgagggcgcctcggcgcgctctctctctattctattgtcttcgctagcgctcgatgccagcgtcctcccaccactctctgtctcaccgagagagagagagagcgccccactctctccgcctctcgcttgtcatctacccgacgcacaccacaccacccgcactcgctctctcgtgtgcgccccgccccacacacaggcgcctctctcttatccgcccacccctcgtgttgtggacggctataatcttctttggtcgctccacccacgcctgcttgcactccgcgcgagcgcgttctcttccaccaaccaccagggtcaggcaggtgtgttgtctgcccagccggtggtgtttgttcagccctccctccgcgtcggtatttgtttttttagantagcgacagttaaatccgtcgccgcctcttttttttttttttctgccccccctttttgggggcaacttcgtgggggggaaaaaaatattttttttttcccccca

SEQ ID NO: 542876 - DNA, 1808 bp, Homo sapiens
cggaacgaaggtaggcgtggtgtgctgctctccgttagtggtacctttgtctctcactgaagcagttgtcgtttctttgtgtggagcaatcggtggtgttctcttgctgctggggatcagccacccagagtgactgtagcgcctgttgctcatgcttctccctcgtctacttgagtggtgggtcgatcggccggtggtggatacacttctctctcgcccgcagataagtcgctgcttggatgtgcgtccccacacaacaccacaccatcggtctggttttttgttggtcgggagaggccccatccacacccaggttgtgtgacctcccctgctaggcacgtttggttcgcgaccacagacagacgggaatgttactccccaggaacgcgggtggtgtatttatctccttgtcgccgttgttgggggtatgtactcccgtcccgtcctccctctcctgtgtggaggtttctctactgatgaggtcactccgttgggggtcggcgctccttccctcttgtggggcggcccacacatatgttagttttctcctccgcgtgtggtgatagttgactgtcgcagcggcgatcagtccatacataataatctacgagggtgcggattacgtactgagttgtgtgtgtgccacagcccacgcgcttttgttctcccatgagacagccaaacaaaatttttgtggtgtgtagtgttcatatacgccggaccggcattcccacgcgcggggggtatgtttgtatgtgttcgacgagagttgttcttctggtggggcgcgctcgctctgtctgctgatttagttgggggccctctcctctccgccccctgaagattatgcggtgttttttatgtttagccccgcggggcatctttattgggtcagcgctttttaagtggtgtcggggtgtgttgaacacacagccgacgccggtgttgtgtgttgggtgagccatagagaactacagctgtgagtaacttttgtgtggcgcgcacacaggggggtcgtcgacccagtgaagttgtggtgggagattttttggcacacccatctagcgctcttgtatatatattggttgtgttgtagttatctgtgtaggggtgttttgtgttttgtgtggcttttttttgttgttacgcttttttttttggcgcgctcgttgaaacctctcacagcgagctgtgtttaataaaactcctgtgggaacccccgtgtaaaaaggggtgtaaccacacacacacttcgcggtttgggatacccgaggcaattctccgcccccaaaggtgtgcaccccacagggtggggccccagagggacactttttggaatgtgcacacacattgggttgtgttggttctgtaaaatatagtcacattgccccaaatattggaagaattggccgtgtgtgtaccaccggaaaagtgcccctctggccactgctctcgatataagccacccccccactttctcctttctaaagaggagaattgggcccacagtgcctgtctgtcccacaagtgccacacacaacaggggagaggtgaataaccacttgcgtcttccgtgtaaatatatagtaaagccaaatattttttaatatcttccccctaataactctttttatatttcttttaatttgaatagatagaacctcttctggccccccctctgccccctcttttttgcccccccacttgagaagtatgaaggcttttggtctccctgggaatggctggagcccacccgggcttaccgtgtaccctgaccttgagacccggttgaaaataaaggccacccc

SEQ ID NO: 542877 - DNA, 723 bp, Homo sapiens
  misc_feature (439)..(439): n is a, c, g, or t
  misc_feature (516)..(516): n is a, c, g, or t
  misc_feature (542)..(542): n is a, c, g, or t
  misc_feature (629)..(629): n is a, c, g, or t
  misc_feature (638)..(638): n is a, c, g, or t
  misc_feature (644)..(644): n is a, c, g, or t
  misc_feature (657)..(657): n is a, c, g, or t
  misc_feature (674)..(674): n is a, c, g, or t
  misc_feature (693)..(693): n is a, c, g, or t
aatccagcaaaacattactaaaacaaagtttgtagcaaggatttcccatttctgctctaaacagtacacttaaaacattctgatgtctcatgtaattctctccccctggccctttttgagtctcctccaaacagtgcaatatgaatgaaaaatcacttttctctaggaaaaactgtgtgcctctagtgaaaggcctaaaattagagcagaagagaaaactaatgcacagcaatccaaaattactgatcactgatttctacttgaaagcagtcacaagttgagcattctattccaaaatctgaaatcaaatccaaaatgctccaagctgaaactttttgagcctgacatgataacacaagtggaaaattcacacctgcgtcatgggacaaagccgaagtcaaaatgcaggccacccacacagtttatttgtgttcccaanggaaaaataaaaaataccttcaggctatatgtttaagtatagatgacacataaatgaattcatgtttagacttaggnccatccccaagatttctcattatgtntatgagaatattccaaatcaaacaaaatatttttccaaatctgaacattctgatcccttttttttggataacggatactcaccttgnttaaatcangctgcnttgcatttggaanggatatgactaaacttnaagtctaacctcattttanacctgaattttggtggaagggcttactggg

SEQ ID NO: 542878 - DNA, 103 bp, Homo sapiens
tgagctggaccgccagcactcttttcttcatcctgtccatcattgtataactatttattttgagacggagtctctctctgtcacccaggatggtgtgcagtgg

SEQ ID NO: 542879 - DNA, 375 bp, Homo sapiens
cgcgaaggctactgtgacttggtctccagctagagccgtctgatgtcacaattcccctccatttcagctgcacagaatgcgagctgaagaactcgtacttgaccctcatgttaacaatgctttaagctgagcaaactagtcgtgaagcactatgactttcacattttggaacgggcaggttctcagtaacagccacctttgggagccttcgcctttatggttcccctgccgtctcccatctttgattggcttggtatcgggagcttctgttaagcattatagagactcctaggatgtgtgttcatggcattacagcttctgaagaaaggccagtgatccagcagagggggaaaaatatgcatttcaccccacatg

SEQ ID NO: 542880 - DNA, 885 bp, Homo sapiens
  misc_feature (1)..(1): n is a, c, g, or t
ncctgtacgtgtggatgatctaagacagactcctggtgtcttagagaccggtctaacaggtgctccttttgggcggtggtcggcatagagcccttgtatgtgcctgtgcggcgtgtaggcgaatattttttgggggccctttgtgcgagcccgccccttgtttgggggaaagcaattgtggtcccacacgccgggggtgtttccaaaagggacctctttggaccgagaatgtggctttgaaagccggggtctcttttcggttatgacagcactggtggcgccaacacactgtgtttcgtaccgagaggtggttcttgttgtttattgcgcccgtgcccggccctctgtggcagaaataacggtctccgggtaaactgcccccgcgcaacgccggttctgctttcttgtgagaagtcaacacgcccgcgggttcgctgcttgtgcacaaccactcggggtcacgtgattggggcgaaaatatcgttattctgtgtggtcagaatcccccgccgtgttccccattccgggatcgcttcaacaataggttgtttcatcttagattttttcctccgataaagtattgctgttgtctcatccgtggttgatcgccccacagaaccctcctcccttgaaaccttccaatccactgtgcttcattgagtgaacatgtcaagatctccttatcctttaccccctgttgaacccccaggccctattctatacacactctcttcagctgccgcatcacataaggcgccaccagcttccaacatcaggagcgaacatatcttgcaacccccaaagagcagtccgcagaaggtgtccccctcccatccaccgattttatgtatggttaaaaaaacttttgtttcaacccccaaaaca

SEQ ID NO: 542881 - DNA, 908 bp, Homo sapiens
  misc_feature (4)..(4): n is a, c, g, or t
  misc_feature (65)..(66): n is a, c, g, or t
  misc_feature (102)..(104): n is a, c, g, or t
  misc_feature (107)..(107): n is a, c, g, or t
  misc_feature (111)..(111): n is a, c, g, or t
  misc_feature (113)..(114): n is a, c, g, or t
  misc_feature (147)..(147): n is a, c, g, or t
  misc_feature (150)..(150): n is a, c, g, or t
  misc_feature (154)..(155): n is a, c, g, or t
  misc_feature (180)..(180): n is a, c, g, or t
  misc_feature (211)..(211): n is a, c, g, or t
  misc_feature (228)..(228): n is a, c, g, or t
  misc_feature (237)..(237): n is a, c, g, or t
  misc_feature (240)..(240): n is a, c, g, or t
  misc_feature (273)..(273): n is a, c, g, or t
  misc_feature (359)..(359): n is a, c, g, or t
  misc_feature (524)..(524): n is a, c, g, or t
  misc_feature (699)..(699): n is a, c, g, or t
  misc_feature (766)..(766): n is a, c, g, or t
  misc_feature (882)..(882): n is a, c, g, or t
tggntttcctttctcatttttgagtagaattggcgctctagtagtcaaaacgcccctcaagttannagcctcccttaattgttcaggatccgctggtggggnnnggngggngnnggcgcacatggtctttcctctggtatttgtttnggncggnnaccttcttgttgggccattgtctgngcaggttttgatggcatgagggatacaatangttggccattgtatganaggggggcngcngggcctgagcttgtgcccttgtcactttctgtntgaggccaggggggtggggcttgatgacatctcctaacaatacccacatgcacatctctgtcatccttaaatcactgagtcttggncttcaggttctccttgtgccggtccacaagggaaccaacccactccaccgttttctgcttggcttcctcccagctgtagagtggcttatacgccaaatctcgctgggccttcttataagagaaggtgaatacgctatttgacaatgtgactatgtggcggttgangggcggtcgataggtgtgaattggcctgagtaggaagctcactatttccagcaggaagccaatccaatacatcagggataaaggaaagctccatctggaatcaaggcggaggccgaactctttgctcagggtgtaattaaggttatcatagctttggtgaggcgtgtcatctganaaatagtagaactgtcctcggatgcttggagccttcttggggtcctgcagggccctcaaggccagantgtgggcccaggccacattgccaacatagactgggttaacagtggagaactttccaacacttgacaggatcccattgttgttcagggcctcgtttatactagcagaaaggaatcgncttccttccccatagatatacatggg

SEQ ID NO: 542882 - DNA, 412 bp, Homo sapiens
gcccataacagagaaataagtaacacctaagtatcagatataaataagcttcagtgtacaggcaataaatatacagaaagctctagtcatagagaaggctctaaggagagagatagataatagtaagggataaaaagaaaggtacgtatcatggagagatcataataaatacttagaataaaaagtaggtaagctttcagtcagggagacaaataagatagtacaataattcctctataatttcctatcagtaatacatccaaataatagtaaaaaccccacagacccctaaacattattactactaatacacttctcaaaacatttacataagtaactcaagcctctaagaggataactccaaaatataacttcatccactagctctagatacgtaaaaccaataaaatcg

SEQ ID NO: 542883 - DNA, 365 bp, Homo sapiens
  misc_feature (4)..(4): n is a, c, g, or t
  misc_feature (9)..(9): n is a, c, g, or t
  misc_feature (50)..(50): n is a, c, g, or t
  misc_feature (99)..(99): n is a, c, g, or t
tggnccccnaaaaaaccatcctagatttttaaagagttcgaaaaaaggantggggcttggtccaaaaagggaaatagggattggggtgcagtggctcanaccctgttaaccccagcacttcggggaggctgaggtggggcagatcacttgagccccaggagttcaaaaccagccctgggcaacacagtaagaccctatcccctacaattaattagttaataagccaggcgtggtgtcatgtgcctgtatgtaatcccagctactcagaaggctgaggtgggaggttcacttgagcctggatatttgaggctgcagtgagctatgatcactccattgcatttcagcctgctcagtagagtgagacc

SEQ ID NO: 542884 - DNA, 170 bp, Homo sapiens
ctgtattaaaaactcacaaatgaggcaagaagacaccttcatgccctttccccaaagccaccctagcattgtgtaataagtcctgtgttagattgggttcccttgataccgactctgagacaggcaggtgcaagaccaggtgtactggggctgctctggggaggaactct

SEQ ID NO: 542885 - DNA, 577 bp, Homo sapiens
  misc_feature (5)..(5): n is a, c, g, or t
  misc_feature (24)..(24): n is a, c, g, or t
  misc_feature (90)..(91): n is a, c, g, or t
  misc_feature (146)..(146): n is a, c, g, or t
  misc_feature (222)..(222): n is a, c, g, or t
tcccnttattacccaaggattganaacccaatatttgggttggttcccaagcctcccaggatattccaagtttttccatggaaatttttnncctactttccccccttatgccccccatttggacttcttgggtttttaatggtagncaggtaagagtagtaagtttctaatcccagaatagttttgaaatatattattgttattatcatcatcatgtagagncagcatctcattctgtcacgtgggctgaagtgcagtggtgtaatcatagcttgcactgcagccttgaactcctaggctcaagggtttcttaagccttagtcttaatatacagctttataagtgtgcattactgttcacagctaactttaaaattgttttttgtaaagacaggatcttactatgttgatcagactggccttgaacccctgggttcaagggatcctcctgccttggtctcccagctactcaggaggcggaggcaggagaatggcgcgaacccgggaggcggagcttgcagtgagccgagatggctccactgcactccagcctgggcgacacagcgagactccgtctc

SEQ ID NO: 542886 - DNA, 243 bp, Homo sapiens
  misc_feature (55)..(55): n is a, c, g, or t
  misc_feature (184)..(184): n is a, c, g, or t
  misc_feature (216)..(216): n is a, c, g, or t
aaaaatcattgaggtcatcagtaaagcaccgtttatccagataacgggcctgggngatcggcgctggtggggcgcgatctgtcgttcaaactgatgaaaattggctatcgcgtggcctgcgaagcgacacgcacgtacaagccaccgtttctcaggcgttgaaaaaaggcgatgtacaaatcgntatctcttacagcggcagtaaaaaagagattntcttgtgcgcagaagcggcacgaaagc

SEQ ID NO: 542887 - DNA, 221 bp, Homo sapiens
cgtttattttactggctgatgctaccgcttctgctccctgcctgtaaaacccttctttcccactgttgctgctcttcttttaagagcacttagcagatgaaataaaccttgggtagctagtctggaaactacttccctcacttttgactactctttttttggggacgacacaaactttcaaacacgaacgacaacagctaccaacaccactttacgacgtc

SEQ ID NO: 542888 - DNA, 237 bp, Homo sapiens
  misc_feature (154)..(154): n is a, c, g, or t
tcacacccatcccctggtgggctcctggacggcctgcacaaatggaccacaaaagggcagaccggaactgcacactctccccacaaaggtatctctgtgtcttactatgaacaaaaacccggcaaaacccagtgccctggtttttccccacccnaaatgaaggatacgctgtattttttgactaatgtccctgccactaggttcataatgaattaaaggttcatgaacgctgcgaga

SEQ ID NO: 542889 - DNA, 241 bp, Homo sapiens
  misc_feature (2)..(2): n is a, c, g, or t
gntctgggttgttgttggattttttttgtttgtttgatttggtttttgtttttcttgccgtgttgcaaaactgtagaaagttgcttattcactggccatgggtccattgaagtctgtgtctcgagtgtccgtttccttctcagaaccatctgcattcttaataactctacgtcctccagaccttctagaaggaacgaaagagttcttcttttcccttcctgagctttgctcttgagtgcgt

SEQ ID NO: 542890 - DNA, 968 bp, Homo sapiens
  misc_feature (36)..(36): n is a, c, g, or t
  misc_feature (65)..(65): n is a, c, g, or t
  misc_feature (69)..(69): n is a, c, g, or t
  misc_feature (91)..(91): n is a, c, g, or t
  misc_feature (110)..(110): n is a, c, g, or t
  misc_feature (120)..(120): n is a, c, g, or t
  misc_feature (124)..(124): n is a, c, g, or t
  misc_feature (159)..(159): n is a, c, g, or t
  misc_feature (162)..(162): n is a, c, g, or t
  misc_feature (177)..(177): n is a, c, g, or t
  misc_feature (181)..(181): n is a, c, g, or t
  misc_feature (190)..(190): n is a, c, g, or t
  misc_feature (194)..(194): n is a, c, g, or t
  misc_feature (213)..(213): n is a, c, g, or t
  misc_feature (222)..(223): n is a, c, g, or t
  misc_feature (234)..(234): n is a, c, g, or t
  misc_feature (249)..(249): n is a, c, g, or t
  misc_feature (269)..(269): n is a, c, g, or t
  misc_feature (286)..(286): n is a, c, g, or t
  misc_feature (314)..(314): n is a, c, g, or t
  misc_feature (340)..(340): n is a, c, g, or t
  misc_feature (393)..(393): n is a, c, g, or t
  misc_feature (410)..(410): n is a, c, g, or t
  misc_feature (412)..(412): n is a, c, g, or t
  misc_feature (436)..(436): n is a, c, g, or t
  misc_feature (469)..(469): n is a, c, g, or t
  misc_feature (563)..(563): n is a, c, g, or t
  misc_feature (603)..(603): n is a, c, g, or t
  misc_feature (623)..(623): n is a, c, g, or t
  misc_feature (669)..(669): n is a, c, g, or t
  misc_feature (681)..(681): n is a, c, g, or t
  misc_feature (761)..(761): n is a, c, g, or t
  misc_feature (810)..(810): n is a, c, g, or t
  misc_feature (892)..(892): n is a, c, g, or t
  misc_feature (897)..(897): n is a, c, g, or t
  misc_feature (951)..(951): n is a, c, g, or t
gcgtgaacattgattgccctggaaaatatatcagtnaggctttcctaccacttctgatgactgcnagancatgaaaatctataatgttttnctcaacaaaaatcacagcnaatgaataanagcnatggccatgaagattaactttttaattagcaaatnatntttctttgttgatgngttnctaagcagncatnatcacttccctctggattnctttggtgnnagtcatgggtngccacatacagctgngttccatgaaggcaggttgntatttatttgcttcttnttccagttttcagatatatctctcttcnatttttgattcctgcagctggcttcnctcctactcctctctctgctcgcagcacgtcgtgccgccagccctttgatgtnttcccaggcccgctgcncntgggcagattccaccgtgcgtgancagatggcaaagcgcaggacaaacttgtccctnaggtgacatggaaccaagtggattttttggcactgtttattctttgcagaagagcttcattcactttgttggaaccctttagccgaaagcaganaagccccagaatgacttccacacagatttcaaagcggggntcctggcgctccagttactnaaactcatgggtacagctggactatgcttgcggatataagcctgcngtcctttgactncatacatcctaaatacaaaccacattttcaaagagcgaaatcttctgcccagtggtatctgccaatgccggtagtcagtnataagccctgaatcctgatggctgtgcttcaggtaagtggggtccagtntaaaggctcccgttaagtctgttctctttttcacccacatggcagaacagtcaaaattcaccaatagccatttgtggggatnaagtngaatgaaatctgcaaactccactccattcagaaggtgccggactcagggcagangaatgcactgcctgcgt

SEQ ID NO: 542891 - DNA, 840 bp, Homo sapiens
  misc_feature (55)..(55): n is a, c, g, or t
  misc_feature (64)..(64): n is a, c, g, or t
  misc_feature (68)..(68): n is a, c, g, or t
  misc_feature (88)..(88): n is a, c, g, or t
  misc_feature (90)..(90): n is a, c, g, or t
  misc_feature (92)..(92): n is a, c, g, or t
  misc_feature (121)..(121): n is a, c, g, or t
  misc_feature (178)..(178): n is a, c, g, or t
  misc_feature (214)..(214): n is a, c, g, or t
  misc_feature (217)..(217): n is a, c, g, or t
  misc_feature (306)..(306): n is a, c, g, or t
  misc_feature (402)..(402): n is a, c, g, or t
  misc_feature (428)..(428): n is a, c, g, or t
  misc_feature (435)..(435): n is a, c, g, or t
  misc_feature (438)..(438): n is a, c, g, or t
  misc_feature (445)..(445): n is a, c, g, or t
  misc_feature (450)..(450): n is a, c, g, or t
  misc_feature (460)..(460): n is a, c, g, or t
  misc_feature (492)..(492): n is a, c, g, or t
  misc_feature (502)..(502): n is a, c, g, or t
  misc_feature (616)..(616): n is a, c, g, or t
  misc_feature (637)..(637): n is a, c, g, or t
  misc_feature (834)..(834): n is a, c, g, or t
ggcaatttggaggcacaggctacttcggagtccatgatatgagatggcgttttanatacatgtnttancttcaagggtttcagctctntncnctgggccatctggatataagtggatagcngtcacaggtatgacgtccactttatccaactgaagaattcctttgtattcagaaacngggaaaaacacctttaagatggttattaccacagcngcncctgtaattccaaccaccatgatgttcaaaaactgaaagaatactgggaaaacgttgctccagaacctacacagatcttttctaaactnttccatccactgacacattaccttatatgaagatggcggctctgctctgagaggagtttcaggtaacttgccaggtaaaacatcttcatctacagnggtttccacattcctgataagatacnggcgagnggnttgcagngaacnaacactttcnttttgggagaggttaggaaggggaaataaaanggcacggtcncgagaaatagagtagagcatgcgttcgtccaaagggaggggataggtggaatggcggaggactccccgggtccgaacgaaaatatcaatttcagggacatccttttgcggaacntgttttccaccaatcgcgacnaccgcgcgcttgaatgacaattagttgcaaactggaaccagatgtcataggccactcatgaactaaaatccttacactgacaattccaaaatattctttttcctccaaattttcaagattttcattcttcactatcaaagtctgacagcttattcgggttacaccactatttacaggtaagtcatttacatacaccngtccac

SEQ ID NO: 542892 - DNA, 236 bp, Homo sapiens
gagaaacgggactagaatctagcctctaaccttttgattagaaaaggttttccttgcttcctatctcaggaatggacgctatcttggacttgttctggctcattggcaagtccaataccaagtttttaatccattgattgccacagagggccaacaagaaccatgactcacccttcacacgcccctggaggcgagtcgttcgtggaggggttcaacggaaggagagcaaatgaacg

SEQ ID NO: 542893 - DNA, 149 bp, Homo sapiens
ggatgagtaagtactgggatgaggaacgtcactgggatgaggaacgtcactgggatgaggaacgtcactgggatgaggaacgtcactgggatgaggaacgtcactgggatgaggaacgtcactgggatgaggattaattatgggaattg

SEQ ID NO: 542894 - DNA, 174 bp, Homo sapiens
  misc_feature (40)..(40): n is a, c, g, or t
atcgtcgtgactgggacgacctgtgcggaggggtcacagnagatgtctcgtggcacctaagaagccacagcatgctctccacagagctgtccactgcaccatgcgcagtacgtgtctcgaccttgtccatgctccttgcctgcaaggcagtaaagtcgagcccagtatcttcta

SEQ ID NO: 542895 - DNA, 276 bp, Homo sapiens
cagcctcagactctgagtagttgggatgcaggtgcctgacaccatgcccggctaagttttctatttttagtagagatggtgtctccctgtgttggccaggctggtcgggggatccctgagctcaagtgatctgccctcttcagcttcccaaagtgctgggattacaggcaagagccaccgcacctggcccagagtttttataaattgatatataatagttgtacatattttttgcatacatgtcatatttagatacctgtatacaatgtatacgat

SEQ ID NO: 542896 - DNA, 272 bp, Homo sapiens
gtatgtgttgtgcatgtcccattataagaagcaatcaatgtcatctatcaactatgatcttctacaattttatttccgtcaactacttctgtggccttgcagctattttcgaaaaggctcaactagtaaggcctcttagccacgagggatcacactatttggggtcacctagccattgaaagcagaaagcaagtagtgacacagctttcccttcaaagagccattgagaaaaattgctccaacaggccctccttctcatactaatgtggaca

SEQ ID NO: 542897 - DNA, 378 bp, Homo sapiens
  misc_feature (7)..(7): n is a, c, g, or t
  misc_feature (38)..(39): n is a, c, g, or t
agggggnggggggggggccggccccttatttccccatnngcccccattttggggcccctttccccttttggggggggggggcccccccgggcccccttttaaaggggggtttttttccccccctggggggggcccccgggggggggggggggaccccccttttttttttgggggcccccccccccctttgggcccaaagcccccggttttttgacccccccgggccggggtcccccccccccggttttttttttggggggggccccccctttttggtttccgggggccctggggggggggggggggggggggttcccccccttcccccccctttttttttttttttgtttctttaaaaaaagggtgccccgggggtga

SEQ ID NO: 542898 - DNA, 520 bp, Homo sapiens
  misc_feature (104)..(105): n is a, c, g, or t
  misc_feature (112)..(112): n is a, c, g, or t
  misc_feature (119)..(119): n is a, c, g, or t
  misc_feature (125)..(125): n is a, c, g, or t
  misc_feature (133)..(133): n is a, c, g, or t
  misc_feature (141)..(141): n is a, c, g, or t
  misc_feature (143)..(143): n is a, c, g, or t
  misc_feature (146)..(146): n is a, c, g, or t
  misc_feature (159)..(159): n is a, c, g, or t
  misc_feature (161)..(161): n is a, c, g, or t
  misc_feature (164)..(164): n is a, c, g, or t
gggagcaccatggatcagacagcatgcccctcgcacaagtggtaaatacacacatgtgcatacacagtgaaatacaccatacacagacacaacaggtctctggnncatgcangccgtcntcctgnactatgcngagccccngnccntggcagtcagcananacnctgtccaggctgaaggccagcacagcatctcctttactgtcctgtgccacctctgccctctctgatcttacccaaaggccaagtacacacagagtcaccagcaataggatacacagaaacagaaaagggcacggcacaatgacaacttcgcggtcataactcccaggaaaaggaaatgctccttgaacccccagccactgaaatccccagtaaggaaacaggacccgcggcacctcacgggccagtgcaaacatccaggcataactgtgccctgacttgtgctttggcccaggtaacccatgagagcactacgtcagcaaatggggggagcagtatactcttggtctaagaatgac

SEQ ID NO: 542899 - DNA, 315 bp, Homo sapiens
cgttctagaggatcaccgaaggccatttcttaccaaaaatcaaaattagctaggcgtggtggctcacgcctgtaatcccagcactttgggaggccgagatgggcagatcacaaggtcaggagattgagaccatccggaaaccctgtttctactaaaaatacaagaattagttgggcgtggtggcatgtgcctgtaatcccagctactggggaggctgaggcaggagaatggcttgaactagggagtcggaggttgcagtgagccaagatcgtgccactgcactccagcctgggcgacagagtgagactccatctc

SEQ ID NO: 542900 - DNA, 432 bp, Homo sapiens
tcacgtccaaacagtcatatcattcttagtttttagtgtgacagtcagaatcattactttgccattagctacctctgcgaaatgagtgattcagaatatttgcgcaggatgcgtgggactactgttctagtagttcgcacatgtctactctggcacttgcaaagtaagtttctgcactgttgttttcttgttcaacaggtgcatgattaccctgaaattcattcacatattgtgccatcacaaactcatgtctttcacttgataaaggttctgctagaacatcaggcaaagttttatgaaccaggcttttcttctgtgaagcagtcccattgaggtgacaatcaaaacctatgttcccaggaagctggaacctctgatcttgaggtccaaagggtcccatagtttcatcaggccacactgttcgagagcata

SEQ ID NO: 542901 - DNA, 349 bp, Homo sapiens
tgcagtccatattcatcttccttcgcaggaaggaggcgagtgataagtccccagagaagtgacgagtctggacttccttcctaggactcagttctgtttcttcatcggtctcaatcactggcagcaggctgcttcactgaccagttacgggctccatcatgaggacattccataggcccacttgatttgaaattatcaatgattattttaacttttatccaaacctttcccagtcattccagtctgaaaggcttaattctctggtattttcacatctttaatgctttgggttaaaaaactataacagtgacatgtgacattttagaattattaatatttccattctaat

SEQ ID NO: 542902 - DNA, 98 bp, Homo sapiens
acccccccccctccccctgggccccccccaacacggtgtcctgccccccagggcctgggtccaggaaaacacgcttgccttccttcccggcagcttca

SEQ ID NO: 542903 - DNA, 1025 bp, Homo sapiens
ctctcgtcgactcggaagattcggagcagtatgggtattaccacacattcattatatgaaagccttccagaatgaatagtgtgtgctgtatccaataacagctggagtcctgagcgatccagcccatgtctgataggtggagatctcagatgcgcatgtccgacaaaaccggggaagagtagtcattcctctgagcgcatgacaaagtcagtcgaatggctcaaacatggtgaccccacaggaatctgaatctgaaggctggagcgtaatgagtggacttgagattctgtgatatacctacaccactcacgttgaaaggtcgaaagcaggagttagtcatgatctagaatggtcatgatctacatggtagtcgcgtgctgtcttgacatcttcctacctccctgctcatcaatgcatgtatgaattaagagcgcttggcatggctgaattccagtttcatcctgtttctatggtttggctcggatatgtcgggtgtagttgctgaagccgatgtttatcgtccgctacaggtagtctatggatttgagctctggtgttgcattcggtctttccgcgttcatcttcttgctcctgtattttctgctgtaattatgtgatcttctgccttccccctgttgcgttcagttgcttccggtgggtttgctgttgacagtttgcagggtagttattaggctggagatgtgtatcttgtctttgtgacacttccggtgtgtccctttccagtcggccgatgttccccactgctcggaaagggcatcgccttggggcgatgctatggggttgccccgggtccctggcctgcgtgcatctccctttggtgccatctggtcctttggccgggactcgagacgggagccctgggcaggtaagccggagtatgcccagattgttgaggtttattccagttcccacaccatcgttcgctccgggacctaaagccgggaggacttaggtttacactctctggtgggagagaaggcgcaatataggtaggggcagcaggg

SEQ ID NO: 542904 - DNA, 467 bp, Homo sapiens
  misc_feature (113)..(113): n is a, c, g, or t
  misc_feature (147)..(147): n is a, c, g, or t
ctggcgcaaaagaagaggttttcccttttttaatgagggggccccactgggggggtgacattttttaaccctataatctggccaatctttgtcactatccagatttcaatttncgggtttgcattgaagtaagaagctgggatgagnaaaatagaccttttttcttaaagccattcgaattcattatttttcccctaatctttcttatgtgaagcagctctccactgccaagtatttgttttgtcatttaaaaaggatttagtgaaattcaagcctgggcaacatggcagaacccattctctggtaaaaatacaaaaattagccaggcgtagcatgtgtaccctctagttctagccacttgtgagactgaggtgaggggatcgcctgagtctgggaagttgaggctccagtgagccgtgtttgtgtcactgcacttcagcctgggtgacaaaatgagaccctgtcta

SEQ ID NO: 542905 - DNA, 2030 bp, Homo sapiens
cccacgcgtccggcagtggctccttgcacagcagctgcacgcgccgtggctccggatctcttcgtctttgcagcgtagcccgagtcggtcagcgccggaggacctcagcagccatgtcgaagccccatagtgaagccgggactgccttcattcagacccagcagctgcacgcagccatggctgacacattcctggagcacatgtgccgcctggacattgattcaccacccatcacagcccggaacactggcatcatctgtaccattggcccagcttcccgatcagtggagacgttgaaggagatgattaagtctggaatgaatgtggctcgtctgaacttctctcatggaactcatgagtaccatgcggagaccatcaagaatgtgcgcacagccacggaaagctttgcttctgaccccatcctctaccgggcccggttgctgtggctctagacactaaaaggacctgagatccgaactgggctcatcaagggcagcggcactgcagaggtggagctgaaagaagggagccactctcaaaatcacgctggataacgcctacatggaaaagtgtgacgagaacatcctgtggctggactacaagaacatctgcaaggtggtggaagtgggcagcaagatctacgtggatgatgggcttatttctctccaggtgaagcagaaaggtgccgacttcctggtgacggaggtggaaaatggtggctccttgggcagcaagaagggtgtgaaccttcctggggctgctgtggacttgcctgctgtgtcggagaaggacatccaggatctgaagtttggggtcgagcaggatgttgatatggtgtttgcgtcattcatccgcaaggcatctgatgtccatgaagttaggaaggtcctgggagagaagggaaagaacatcaagattatcagcaaaatcgagaatcatgagggggttcggaggtttgatgaaatcctggaggccagtgatgggatcatggtggctcgtggtgatctaggcattgagattcctgcagagaaggtcttccttgctcagaagatgatgattggacggtgcaaccgagctgggaagcctgtcatctgtgctactcagatgctggagagcatgatcaagaagccccgccccactcgggctgaaggcagtgatgtggccaatgcagtcctggatggagccgactgcatcatgctgtctggagaaacagccaaaggggactatcctctggaggctgtgcgcatgcagcacctgattgcccgtgaggcagaggctgccatctaccacttgcaattatttgaggaactccgccgctggcgcccattaccagcgaccccacagaagccaccgacgtgggtgccgtggaggctccttcaagtgctgcagtggggccataatcgtcctcaccaagtctggcaggtctgctcaccaggtggccagataccgaccaagtgcccccatcattgctgtgaccctgggaatccccagacagcatccggtcatgtggcccacctgtacctgttggcatcttccctgtgcttggtgcacatggacccatgtccaggatgtgcctgtggcttgaggacgtggacctccgggtgaacttttgccatgaatgtttggcaatgcctgaggcttcttcaagcaagggagatgtgcgtcatatgtgcttgacctggatgtgtgccctggggtcccggatttcaccaagcagccatgcggtgtacgttccttgtgcctgtaattggacccccaagatgtctcctccatcatatgacctagaaccagaacaaacattaacaggacacaaccctcagggcgcgacgaacgacgggagcaagccgggcgggcgcagaaccgaggcgcaggaaagcaaggcaagacggagaagacgacgcgaccgcacagcacaggacagaaagacgagaagagagaaccaggagcgacaccacgggcaggcgagacaagaagagagcgagtacgatcacaatcgacgtcgatcggagtgcacagagcaaagtgaaaga

SEQ ID NO: 542906 - DNA, 162 bp, Homo sapiens
cttctcgttgtggtgtgtgtctgctggaaggtgaaactttcgctatggaggtctagggagggataacatgtttgtggaccagagttttagtaccgaatggggtgggccctggtcggaccggccggcacggccatttcaccgaccttcttccgtgcccgggtt

SEQ ID NO: 542907 - DNA, 1562 bp, Homo sapiens
agggaatatttcctgaagtaagagatttcctcactgggttttaaaggacgcataggagtttgcctggtcaaaatcacgctggataacgcctacatggaaaagtgtgacgagaacatcctgtggctggactacaagaacatctgcaaggtggtggaagtgggcagcaagatctacgtggatgatgggcttatttctctccaggtgaagcagaaaggtgccgacttcctggtgacggaggtggaaaatggtggctccttgggcagcaagaagggtgtgaaccttcctggggctgctgtggacttgcctgctgtgtcggagaaggacatccaggatctgaagtttggggtcgagcaggatgttgatatggtgtttgcgtcattcatccgcaaggcatctgatgtccatgaagttaggaaggtcctgggagagaagggaaagaacatcaagattatcagcaaaatcgagaatcatgagggggttcggaggtttgatgaaatcctggaggccagtgatgggatcatggtggctcgtggtgatctaggcattgagattcctgcagagaaggtcttccttgctcagaagatgatgattggacggtgcaaccgagctgggaagcctgtcatctgtgctactcagatgctggagagcatgatcaagaagccccgccccactcgggctgaaggcagtgatgtggccaatgcagtcctggatggagccgactgcatcatgctgtctggagaaacagccaaaggggactatcctctggaggctgtgcgcatgcagcacctgattgcccgtgaggcagaggctgccatctaccacttgcaattatttgaggaactccgccgctggcgcccattaccagcgaccccacagaagccaccgacgtgggtgccgtggaggctccttcaagtgctgcagtggggccataatcgtcctcaccaagtctggcaggtctgctcaccaggtggccagataccgaccaagtgcccccatcattgctgtgaccctgggaatccccagacagcatccggtcatgtggcccacctgtacctgttggcatcttccctgtgcttggtgcacatggacccatgtccaggatgtgcctgtggcttgaggacgtggacctccgggtgaacttttgccatgaatgtttggcaatgcctgaggcttcttcaagcaagggagatgtgcgtcatatgtgcttgacctggatgtgtgccctggggtcccggatttcaccaagcagccatgcggtgtacgttccttgtgcctgtaattggacccccaagatgtctcctccatcatatgacctagaaccagaacaaacattaacaggacacaaccctcagggcgcgacgaacgacgggagcaagccgggcgggcgcagaaccgaggcgcaggaaagcaaggcaagacggagaagacgacgcgaccgcacagcacaggacagaaagacgagaagagagaaccaggagcgacaccacgggcaggcgagacaagaagagagcgagtacgatcacaatcgacgtcgatcggagtgcacagagcaaagtgaaaga

SEQ ID NO: 542908 - DNA, 257 bp, Homo sapiens
ttttttaacggacagaagtccttgcagctgtcattgctggtggggttattggctttctctttgcaaattttcttatcctgctgttggtgtatcgcctgggaaagaagggtgaaggaagctttgaccttggggaacgcaaaccctccagtggtgcttttccgaaggcacctactaaggggttttttgcgtaaaaccccaacttagtgtctctatttttgggatcactgaacttttcaaaataaagcttttgccttgga

SEQ ID NO: 542909 - DNA, 2226 bp, Homo sapiens
tgtgcacgatcggctgttttgttgctgttccctgagtctggtcagcgccggaggtgatgctggtgcaggatgtgctacgccatcagtccccaccaaggtgccatgtctgcccggctagtgcggaatccctgtgcgctgccgtgccgtgccccggtgcacgcaggcagggctggcgcaggatccatgggcgtctgggatgcagtggatgctcagtggagatggagaacggctacctcactgcctggggcctgctcttcagaagtccccagcgcctgttccttccagatcagggcgtggacctcagcagccatgtcgaagccccatagtgaagccgggactgccttcattcagacccagcagctgcacgcagccatggctgacacattcctggagcacatgtgccgcctggacattgattcaccacccatcacagcccggaacactggcatcatctgtaccattggcccagcttcccgatcagtggagacgttgaaggagatgattaagtctggaatgaatgtggctcgtctgaacttctctcatggaactcatgagtaccatgcggagaccatcaagaatgtgcgcacagccacggaaagctttgcttctgaccccatcctctaccgggcccggttgctgtggctctagacactaaaaggacctgagatccgaactgggctcatcaagggcagcggcactgcagaggtggagctgaaagaagggagccactctcaaaatcacgctggataacgcctacatggaaaagtgtgacgagaacatcctgtggctggactacaagaacatctgcaaggtggtggaagtgggcagcaagatctacgtggatgatgggcttatttctctccaggtgaagcagaaaggtgccgacttcctggtgacggaggtggaaaatggtggctccttgggcagcaagaagggtgtgaaccttcctggggctgctgtggacttgcctgctgtgtcggagaaggacatccaggatctgaagtttggggtcgagcaggatgttgatatggtgtttgcgtcattcatccgcaaggcatctgatgtccatgaagttaggaaggtcctgggagagaagggaaagaacatcaagattatcagcaaaatcgagaatcatgagggggttcggaggtttgatgaaatcctggaggccagtgatgggatcatggtggctcgtggtgatctaggcattgagattcctgcagagaaggtcttccttgctcagaagatgatgattggacggtgcaaccgagctgggaagcctgtcatctgtgctactcagatgctggagagcatgatcaagaagccccgccccactcgggctgaaggcagtgatgtggccaatgcagtcctggatggagccgactgcatcatgctgtctggagaaacagccaaaggggactatcctctggaggctgtgcgcatgcagcacctgattgcccgtgaggcagaggctgccatctaccacttgcaattatttgaggaactccgccgctggcgcccattaccagcgaccccacagaagccaccgacgtgggtgccgtggaggctccttcaagtgctgcagtggggccataatcgtcctcaccaagtctggcaggtctgctcaccaggtggccagataccgaccaagtgcccccatcattgctgtgaccctgggaatccccagacagcatccggtcatgtggcccacctgtacctgttggcatcttccctgtgcttggtgcacatggacccatgtccaggatgtgcctgtggcttgaggacgtggacctccgggtgaacttttgccatgaatgtttggcaatgcctgaggcttcttcaagcaagggagatgtgcgtcatatgtgcttgacctggatgtgtgccctggggtcccggatttcaccaagcagccatgcggtgtacgttccttgtgcctgtaattggacccccaagatgtctcctccatcatatgacctagaaccagaacaaacattaacaggacacaaccctcagggcgcgacgaacgacgggagcaagccgggcgggcgcagaaccgaggcgcaggaaagcaaggcaagacggagaagacgacgcgaccgcacagcacaggacagaaagacgagaagagagaaccaggagcgacaccacgggcaggcgagacaagaagagagcgagtacgatcacaatcgacgtcgatcggagtgcacagagcaaagtgaaaga

SEQ ID NO: 542910 - DNA, 263 bp, Homo sapiens
tcatgaagggagtcctggggaattcctgaaaattttcttccttctgcagaaagttggatgagtcccttagagaaggcatccagagacataaataaactgaatatcatccaatattgattttaggaattgactctaaaactgtgtgcagaatcttgtggggggactgtatattgacactcctgttgtgctatttttcttaattggagtgtatgctgccttttaggtacaatttttgtgtaataaaagccagtgcattgagttta

SEQ ID NO: 542911 - DNA, 312 bp, Homo sapiens
cataaatcaaagagagaaggccaaagcaatgtttgctctctgttaagatatatgttgaaatgaggtagagcatggtaccaagtgcgatagttatctgtgctagatgaagagaacagaagggaaaaagctattataaaatgcagcatagttcggactgcggaaagcatattataaaagaaattttaaaacaatttacaaatgaaggttcatgtgcactaacttgcacacgatcatcataaggcatttctgcagttgctttatcaagacaagcctccccagtcctttacacacgtgctcagggcacaaccacat

SEQ ID NO: 542912 - DNA, 586 bp, Homo sapiens
  misc_feature (16)..(16): n is a, c, g, or t
gcaggctgagtaccgnctcctcggaggtgtatatggagtatcagtcgagacccacggctgctcctgcctactggtctcccgtctcaatgccgagccaaagctggactatactgctgccatctcggctcactgcaacctccctgcctgattctcctgcctcagcctgcggagtgcctgcaattgcaggcgcgcgccgccacgcctgactggttttcgtatttttgtggtggagacggggtttcgcgtgtgttggccgggctggtctccagctcctaaccgcgagtgatccgccagcctcggcctcccgaggtgccgggattgcagagcggagtcgtggttcagctcaggtttgctcagattggctgccccatggcttggacgttggcagtggccgttgaatcttctcggggctccgccgttacaaaaccctgtccacaaaggctccccagtcctgccttgcctttgtggcccgttccgcaatatgtgccggagatttgcgaggccccttcccttgtggcccctggctcgatcacccccggtctggggaacgtgagtgaggccgggttcatttccttgggccccatgg

SEQ ID NO: 542913 - DNA, 1243 bp, Homo sapiens
gagagagagagagagagagagagagagagagagagagagagagggcgtgtgagaccctgtacatatatcctgaaaagtggagggccttcaaggctctcatcggtgctcaatacagcgggggctcagtgtcgcgctgtgctctcgcgcaacacccacactttccattgtgggcacaaacacaagcgcaccctctgaatttctccgctaaatttccgtgccggaaaggtcccagctatgagagggtgatgatggattcgtgtgtgtgctagagagcaacgccgattgcctatcatatgtgacgcaagatgagggagcgtgcgggggaatagctactccaagagagcaggagcccaagattcggtagcacggtgcgcgatgacgcgtgtggcgtgatctccagatagtaagtgccccacaagacatagtactcgtggtgatgcttcccctatctttgaggctaatcagtgcaaccactaaacagacacgagggaccatgatggacgatagctgcatcaaggaagcgacatgctgaaggacagaaacttcgtggcggtcatgcctgagagctgcatctacatctgacaagaccgaacgagcactttcctccttgggtcggcgaagacagccgactgatgacccaatgtggcgtgacctacatcaagaacgatgtcggtcgctagccaaaccccgtagaggtagttgggaccgtcattaataagacagccaagcatgtttacagtaaacgaaacgcacactcttacattagtctccacagcacacaaacgggcaccatctatcacaccataataacaacacaacacccggcactatgagctttcaccaatccagctggcatagactattatcaaagcagccagaagaccacacacgatgtatctagccacggggagccgctacgatcccgtacggcagacgcgacaaacacaggctcggaaaccacggtcggtccgttcgaaaacgacaaaagcaacttcagcgccacccgaacgcacggagaggaagtccagctgacaaacaagcactcggtcgtcaggcaaagcaaacaacccccaaacaccacataaaaaagcacagaggaacacaccccacccacaccaggagacacagcgaagccacagcgcggtcaccacagggggcaaaacgaaagaaccagcgcagacacacacactcacccacgacacgggcgaccgcacccccgccacacaaagccagccgccccaca

SEQ ID NO: 542914 - DNA, 1059 bp, Homo sapiens
tgccaaaccccactctgcatcaactgaacgcaaatcagccacattaaagtgaagctaaggcctcactagagcaatgggacattaaacaccacagaacacttagttaacagctaagcgaccctaatcaacatggcttcaaatctacattctccacgccgaccgtgagaaaaaaggcgggcagaagccccggcaggtgtgacaagctgcttcgttcgaatttgcaattctagatatgaaaatcatcttcggagctggtaaaaagaggtctaacccctgtactttagatttagcacgtccaatgcttcacgtacacccatattacctcaccccacactgatgttcgccgaccgtctgagctattctctacaaaccacaaagaccattggcaacactatagctattattcggcgcatgacctggcagtcctaggcacagctctcaagcctccttcattcgagccgagctgggccagccaggccaaccttctaggtaacgaccacatctacaacgttatcgtcacagcccatgcatttgtaataatcttcttcatagtaatacccatcataatcggaggcttggcaactgactagttcccctagtatcggtgcccccgatatggcgtttacccgcataaacaacataagcttctgactcttactccctcatactctaactctgctcgattgctatagtggaggcgaacacaacacacggtcgaacagcaaacctcccttagcgggacacaaccaacctgtagactccggaaagacacgaaaaaacctaaaacaaaagagaacacaacaaaaggcgacaaagtcacacacccataataacccccgcacacacaaacaaggcaacaagatgcgcacacaagcacataagtaaattgcgacacagagagaacaatcaagcagccgcctataccctaaaccggagggaaagacacaccaccatgggcgatcagagagcggactttccgcgacacaataatagagcaaaaaaagaagaaacacctcacgcattctcactctcgcgccacgtcaaaggcgagggggggat

SEQ ID NO: 542915 - DNA, 1006 bp, Homo sapiens
aacacgaagcaatgtggggcaaagccctagtaacatatgacctcgaaacagcaatcccctcatcaacacgccaggcaggacatcattcaggccttgcagacattgggactctgccatattctttccgtctatttaaccaggattggattatgacactacagcactggtgtcctgaactagaagaacttcattaccaagcagcatggaggaatatgcagtgggaccatagcacttccgtccagcaaagcaagtagacaggaaccagttaccatgaatcattgtacaaatgctctacaatctctaacgagacagagaattctctacatttcatgacaagtctcaaatatgccagagtcaccacgcaacgtggcaagagatgtgtaagcgcagccttgagtctgtgtattcgctctatcccacaacttagccaggttgcaggccatctggagagctggaacaagcactggggacgctttactcacagatcagtcacacataagacaactctctgaagtatatatcacgtggcagcacaacactgcccagacttctccaaggacacgcgatatcagcttctccaggagcctaatcatggcgtcaaaggcaccagacactacgcgagcatacctgactggcaacacggcactgggagcagctcaaaaacgacgctcgtattaacggaccatcctcaccccaaaccacctcaggcacaccgtcactaatactgggccagcaactccacagaaagccacaccaaagccaccccccggaaacgaggcgcaacaccatcaacacaaccgaacacgcagggaacaccaatacaaacgcacacaccaggcaagcagcacaacacgcagagcgacagcccggccacaaaacaaccacagacaaccctgacggccaacaaacacaagaccaccgagacagcacacagggcagcggaacaaaccacgactcacacgcaccacagagtacccaacagacaagagacgcacagaggcaaagc

SEQ ID NO: 542916 - DNA, 442 bp, Homo sapiens
tgcactatctgggactgccctctggttcttacccgctgggataaagtactttgaggcgaaatctgcgtcgtacatagtcgcccaggctgaaacatgcagtggcacaatctcggttactgcaatctttgcctctcaggttcaagtgactctcccacctcagcctcccgagtagctgggattacaggtgcctattactgcgccagctaattatagtattataagtagagacaggggttcaccctcttggccaggctggtcttgaacttgtgacctcatgatccacccgcctcggcctccgaaagtgctaggattacaggcgtgagccaccatgcccggccaaaacaaagttttgactgtgacctgtcacatgacatcagatgtggaattttccacttgttggtgtcatgtcagcactcaaaaagtctctgattttggctgttca

SEQ ID NO: 542917 - DNA, 196 bp, Homo sapiens
  misc_feature (60)..(60): n is a, c, g, or t
  misc_feature (124)..(124): n is a, c, g, or t
  misc_feature (138)..(138): n is a, c, g, or t
agagatcgaagcctcctatctccacatctcttaagaagttgaggggtgggggagagaatnacttctgccttcatctgcagtaacggggggacctatactgacctttccccagccatttagaacnagttctagggtggntggaaaatctccagcagccctgccattatcttccacctcagcaaccacgacctccagt

SEQ ID NO: 542918 - DNA, 376 bp, Homo sapiens
atcgccaacttgtcctttgacatcactggccgctttttggcctcctgtggggaccgggcggtgcggttgtttcacaacactcctggcccccgagccatggtggaggaaatgcagggccccctgaagggggcctccaacgagagcacccgccaaaggttgcagcagcagttgacccaggcccaaaagaccctgaagagcctgggtgccctaaaaaagtgactttgggagggcccggcgcaaaggattgaggaggagggatttggcctcctcatggggctgctgccatttttcctcccaggtggaagcctttcaaaaggagtttcctggtttttttactgggggcccggctttttcccattgaaactacttttgttta

SEQ ID NO: 542919 - DNA, 369 bp, Homo sapiens
tctgagaatcgtgtggaaaaaaacggcctgattttttcaaaccgggggcctgggaccagcttcgagtttgcgcttgcaattgtttaaacccttaatggcaaggaggtggcggctcaagttaaggctccccttgtttttaaaaactagagcagcgaacttcgccgatcccttaaaaaaacaggccgttaggaatcccttttccctgtgttccctttaaacaaaacagtggtaggttaatgtgttcagaagtccctgtcctttctactttttcggaagtatggaagtcccaactacccaaaaattttcagcctcccaattgtgtttatacatttttaagccttgttttcaaaataaacagggcctttagca

SEQ ID NO: 542920 - DNA, 933 bp, Homo sapiens
  misc_feature (145)..(145): n is a, c, g, or t
agcggagggtgcgaacgaccgaggggaggaggcaagaaacgcaggcgcgagcactagctgggtgggcaccatggatggtattaacaccatcgagggggtgaatggcaagcatcctaagtttctgactagccaggaaggcgtcagnatgtatgcactatcgtagcggaactgatgcgcgcttgcgagacaagatcaagttagtacggtgatgataccagagtctgggtccccagggattacacgtgtctgaagcggactgagagtgaggcctctattgtaacgcggtgacgacttccagactgaatctaggaaagaaggagcctgggactccggagcatcgaagtagcagccaatgtttccatctgatcctggcggaaacatgtggggaatcgaagcatagagagatatatgcatggctagtatgggagtaagtgatgatgagtgatatctggaaagcgtctagttggaaaaccttggggacttgttgtagtatagtatgacacagatggcgaatttccatgtaaattcccatatgtacagaagaacaggcgttagacgagcagttcgtgagaaagaagcgatggattcgaggaaagatactgtaggtagagttgggctacgcgtaatgcttggatgaatctgttgacacggcatcaagtagtgatatacggcgaagagctatgcaaactgaaacggggaggcctgtgacgaggaaattcattacctgtgaattcctggaaagacgtggggagcgagaggaggcgttgaaggaaattgattctgaccaaaaaaaaatgcttcaatatgatcttacttttgggaagggagatccagggtggcgaaggaaaagataccattcttgaacaaaaattaacgcattaccattggtgaagggcaagaataattcaaatgagtttctttaatgggatacca

SEQ ID NO: 542921 - DNA, 286 bp, Homo sapiens
  misc_feature (83)..(83): n is a, c, g, or t
aaagcccagctagaatcagagaaaaataggctgtgtaaactggaggatgagaacaatacctaccaggttgaattggaaaaccntaaaagatgaatatgtaagaacacttgaagagacgaggaagaaagacattgttgaatagtcagttagaaatggaaagaatgaaagttgacagaaggagaagcattttactcagaacataaagaaaggacgcagcatttctgttctagcactcacatgtcacgctcaagttcatagtgtgttggatatgcaggactacgacatc

SEQ ID NO: 542922 - DNA, 844 bp, Homo sapiens
ttcgtgccctcgcgtggtgttcgctcctcctctctccgtgtgcttggttgtggtttgctccctgattgtgtttgggacatggaagagaattagtggatgtatcagtctacgacgtgtgctcccgaccctgtgtgtttgatcgttgtgcttcatccaattggggcggggttattccttgtggggtgctcgccgttatatatttcctgccgttgtgatcctctgtgtgtccgcttgctgttgtttgtgggtcgcttttgtgtagttgcgtcctttattgtgtgcttcgcttccgttttctccctcttgtttcgtgcgcgacgctgtcactagtgatcatgatccagtgctagcggccgcaggtggagaccgcgcgcaagatgggcccggtgctgagggcgagatcttccgcgcatggttgtggtggtggcaagtgcttggcagattgcgtgcctgccaggttgtggattagtgcctttccgccacccgccttgtacgagctatcagtgtccccacgcaggcccactgctccaaccccctctttgaggtaaaagtgcctttattgggagacttttgtctgtgacagcctgtccacatcaaacacctcctgggtgtggccccacatatgtgtgtgcctaggtcctccttgttgcacgatcccataggagacacccgttctgactgaaccatgccgcccaccttagtccccaaatgagggaatggggattagatttcagatccaggccctaggttgggacccactcccaatatctcctcggtgtgggtggtggttctatagagggataatgaataataaacattgtttaaatatacgaaaaaaaaaaaa

SEQ ID NO: 542923 - DNA, 745 bp, Homo sapiens
tggtgcacaccgtgtgccctgcacgagtatccacgtcatcaactctctgcacccagggcttcctggcgctcttcttcaggtgacacatggggagtatcaagtcagaagtccgtgagcaagatcaatgccaaggcgcgttgactcgcgtcgaggaggtgcaaggcgtagatcatcctggatctgctgttcatcgacgacggtccacatgctggacatcgagagcttctccttcctcaacccggtccctggagagttacatggcgcctgtcctgatcatggccacctatctcgtggcatcacgcgtaatccggggcaccagctaccagagcctctcactggcaatccccatagacctgctggaccggctgcttatcgtctccacctaccccctactagcgagaaagacaacgaagcagatcctccgcaatccggtgcgaggaagtaagattttgagatgagtgaggacgcctacacggtgctgacccgcattagggctggtagacgtcaattgcgctacgccatcctagctcatcacagctgccagcttggtgtgccggaaacgcaagggtactagaagtgcagtgtgcgatcgacatcaagcgggtctactcactcttcctggatcgagtcccgctccacgcaagtacatgaaggagtaccaggacgccttcctcttcaacgaactcaaaggcgagaaccatgacacctcctgagttggatgtataacccgacgcacctgttgtct

SEQ ID NO: 542924 - DNA, 358 bp, Homo sapiens
  misc_feature (45)..(45): n is a, c, g, or t
  misc_feature (72)..(72): n is a, c, g, or t
  misc_feature (81)..(81): n is a, c, g, or t
  misc_feature (204)..(204): n is a, c, g, or t
  misc_feature (263)..(263): n is a, c, g, or t
gccttctccctccatgaatagggtataaggccccttataaaagancccttcatgccccaggtacgggtggcntgcgcttanaatccccagctacctcagagggctgaggcggaagaatcacttgaggcccaggagtttgagaccagccctggaaaacatagtaagaatccacttctaaaaacttaaaaaaaataaataaattancccggcatggtggcatgtgcctgtagtcccggctactcaggaggctgaggcgggatgancctttgagttaaggagttcgtggcttcattgagctatgatcacatcactgcaccttagcctggatgacacagcaagacctcatttgtaaaatgaa

SEQ ID NO: 542925 - DNA, 189 bp, Homo sapiens
atctgttgttccagatgctcttgaagaggttcagagcctcctgcaggcgcgtgagctggttgtcctcccggatgaccatgtttgagctgctgctggccaccacgaagatgatggcatgcacatcgttgaagcactggattcactttgcgggttcatcgcgctggccacccatacaaactgcgggggtgg

SEQ ID NO: 542926 - DNA, 896 bp, Homo sapiens
gggtctgagctcacctgcccggaagataataagattaaggaactaacacttgaaattgagagactgaagaaacgtctccaacaattggaagtggtcgaaggggatttgatgaagacacggaagatgagtatgatcaggctggaacagacaatttagaactgagcaggataaggctaacttcctctctcaacaactagaggagatcaagcaccaaatgccaagaataaccgccattagagaagggtgaggttgtgagcccaggaacgctgaatctggagacacaagatttcgggtgtggaacggaagctaaacacgtcggagactttaaaagcccgaagtacaaagctcttaaacagagacagattcacgaaacttaattgaaccaacagcaagatccagctttctcaagctcccaggtacgacttatcttgtacttccaaccaaagattagtggaaaagaagaacaataagaaccaacaacaccatggggcgcagggaggtcctcaagtcctgacccaaaagagttgggagctttccaaggggctaacagcagaaggctcttagggccccaatgtgttgactgggacggacagcaatggtggatgttccctggtgacgtcaaacgtgaagtccacaacttgatgcaagacaggcggtgaaggaaggcaagaggggaagaacacggccaggcggtcatcatacgcgaaatcctttccagggacgcaaccagccgtattatggagtaatctcgggcaggggggattggagaacacccggtgaaagaatctactggctagaaaggaatcctcacagagcaaaatgaggccactatgggaacaggcttggcatcacgggagggcacgacggaaaacgggaccccaacagtcaggaaaagc

SEQ ID NO: 542927 - DNA, 502 bp, Homo sapiens
gcagacgggaaccggcaaggcgcccggtcagaagccataagggcggtctgtccgtatggagcgtaaaggacatgggcgataagaaggaaggactgtgttcccaggggaaggagtgaatacatcgggagaggggccgtggaggtatgattagtggctgcttgatcaaaggaatccgttatgacagcaagaatgaaaccttgggtggctcatggtctgtaatcctagcactttgggaggccgaggtgggcagattgcctgagctcaggagttggagaccatcctggggcaaacacagtgaaaccccatctctactaagatacataagtaaataaataaataaaataaaccattagccaggcgtggcagcgtgtgcctgtagtcccagctactcgggaggctgaggcaggagaattgctcaaacctgggaggcggcaggttgcagtgagcacaagatcgtgccactggaccccagcctgggtgacagagcgagactccgtttctt

SEQ ID NO: 542928 - DNA, 177 bp, Homo sapiens
taaaattatagatataactagcacatcatagaaagcccagctcaaagaaaaggtacaaatagtatacagctttaccttcataaagagaagcccacactactacagactaaacatatacacccccaccacatgccagggcacgtgtgatgtaagcacgtacatataattggcccatgc

SEQ ID NO: 542929 - DNA, 496 bp, Homo sapiens
  misc_feature (1)..(1): n is a, c, g, or t
nttgccccctctcttctccccacacagttggtgggaactaccacaaacgtggttttctccttctgctcgcacaagtcacttgctcccacgccctcccgcatcagggtgtgccccacgcttctagaccatgcgggcggtgcgtgctctccccttcgctgcctggcaaaacagtggttcgcacccacgcgcgcggtggggtcttcccacggcacggacactatgcgttggtcgtgcgtaccgctccacgcccgcgtgcgcgtggttgtgttttaaagattggcgcatctttatctcgcgcgcatctagcggcgcatcgctagcgagcgcacaaacacccacggtgtgtttgtcatctcgcctcagtttgggaggaccgcgcgtgtttctcgccgatgttcgctctctctggcccccctcgcgtgtttgtctccactgaccctcctaggccacacatacaggtggcagacccctcccccgctcctaccatgtacccaac

SEQ ID NO: 542930 - DNA, 1373 bp, Homo sapiens
tgggacaggaagtaaaatttattgggtgagtattaaaaggggggcagcactttggaacgcccttctatggattgcagggccccgccatcttgtccccagaagggccacgaacggggggtatgtatcttgaaccccaaagccattctgggtatgagcccgtcttttacagccaccatgttcttcaatattctatcagcctattgagacatcttgtgtgtgagagagccccatcttctctttgagagagatgtgtggagattcttctctggcggggccaggagaaatcttgagagatcttgtggcctctgtgggcagggtggctctccaatccacctatgtgctccctgtgtgtgtcctgtgcgacgcttgtggtgtcgcgggatgtggcactatgtgtatatacactgtgtgcgcccagatgtgtgtgttacaccctgtgtgcccacaggtgtgcccctgtggcggctttctccaaagggccacctctctgacatgtgccctgtgtgtgtgtgagagcgcctgtgtgtcaagtcgccacagagcaaacaggggaacacacacaatctctgtgtgtgtgagaaagtcgcccgagaatatgaccccgtgtgagacatcgcgggcgtgttatgagcgccccgggaaacccccggggtatatagttgtggaaagcgcaatctcttgtgtgccccacacaaagctttttatataccccatgtgtgtaccttatattgtgtgggccgcacccaaaatttctgcggcgacaagacctctcacgaggggggctttgtcgaagaaagtggaacaagggtgatgtccctccaaaattatattctccgagctctgttgagtagcacacgctatgttgttgttgcgctcccacacaataaaggggcggggaaaaagtgttctatgttccccacactttttgtggtgggccccttattatatactccgcgacgcccccccgaggggtttccaaaaaaaaatgtgtggcgaaaaatattcctttgggcggcgacacttcaagcgggggacaccaacccctttctggcgcacagagaaaaccgctggaaagaacctttcggcgggggggtaaaacaggggcatttgagtaattctctttaccaaaagatacccccggtggtttacacccaccaagccgcggggcccggggagggcgagagggtgtgccccccaaattgtggtgatgagcgccccgcagggggaattctctaaaagggcccgggacacccccttttgggggggcctcataattggggggaaagaggacccccacctcctggtgaggagggcactcccccctctttggttgggcacactcgttgtcgacatacgtccgcggggcattgttg

SEQ ID NO: 542931 - DNA, 579 bp, Homo sapiens
ggggttctccgaacggtcttctttccgacagcttgctgccctagaaccagagttggtggctggacctcctgcgtactatccgagtgtgcgaatgcatgtacttctcatttgtttgtctgggcggctcggcctctgcgagagcatgtgggcgagcgtgggtcagtgatggccacttcggggctcagcacagactagcgctatgcccagacttcagactggggaagcaccgcttgggggctgtgacagggccagggaggagcccatgtgcggacagttgatcctgagtatgtgggagctgtgcatgcagacgggagagaggacaggcagtgtcggggccgtggaggcgtcatgtgccatcaagagaacgttctgcagccgaagcctgcgctggaggccctggggtcctgtcctgaacagagaaagtactcggagggtaatcctggtaagcagatactcatggggggagcagaggttggttgaatgaacagtcgaggcttgctgtgccaaggcgccggggcctgtgggcaagccctttgaaccgtggatccttgcacaggtggggaggtcagatggtccatc

SEQ ID NO: 542932 - DNA, 275 bp, Homo sapiens
  misc_feature (44)..(44): n is a, c, g, or t
tgtctttgaaaccccctgacctcaggtgatctgcccaccctcgngcctcccaaagtgttgggattacaggcgtgagccaccggcgcctggccaattattattattttttaagagatagggtctcatcctgtcacccaggctggaatgagtgatatgaatgtagctcactgcagcctcaaactcctgggcttgagtgactgcctgcctgcctcagccttccaagtagccgagactactggtatgagccagtgcaactcagctgattttttaaaaat

SEQ ID NO: 542933 - DNA, 129 bp, Homo sapiens
gaagtgctggcttcctgaaatagatggtccaagatttccttatgttgatttttttaatgctctatctctctctcctgccttcttcttttcctccctacacctttttctcacacacacacacacacacac

SEQ ID NO: 542934 - DNA, 128 bp, Homo sapiens
gggatggaaatgcaggggctgtaggcaggcagccagaggcttatatcgtatatggaaatccatccttaaaaccatcacctctcaatgctctgtctgccatgccaccaaccccagagtgtctggtcttg

SEQ ID NO: 542935 - DNA, 490 bp, Homo sapiens
ccttaccctggcctgtgcctatgggtttgggacagacgtggttgtagcaagggatgcagagggagctggtcaccaggccatggttgggagagtccaccctcgtgtcggaatcagcaatctggggccaaggtaagccacggttgcaggtgggctgggcagggtacatatctttttcccattcttctcatgcactgactctttgcctttccacatagctgtttcctaatggccctgatcctgtattgcttcttctccttccgagattttttgcaggggggaccagaatctccccagttgtgaggagagacgcctccattgaaggaagtagaagagaccatgcctgctccattctctaagacagtgatgaagggctcctctgatagcttcctggaacaggaaatgtccgtctccacagaggaaggggtatccaggagcaaaagtttcaatctctagctcaaagagctgagacacagagctatcttcctccagg

SEQ ID NO: 542936 - DNA, 169 bp, Homo sapiens
aatcgtagcgcaatacgcattcccggactgttggcaggagaagagggttactttgaagatcgtcgccctctcccaactgcgacccttttcggtgacagaggcctcatccgacgtgtcttcttaatgaaaccggcgatgagccttccagtacaaaaattaagtcgactag

SEQ ID NO: 542937 - DNA, 420 bp, Homo sapiens
ttttttttttaaaatgaaaaaagtgcttttttatttgtttgtttgaattcccaggaatcaatcacccaatcagtcaacaaggaagtgatgttcagtctcgtgaatagctccaactcttcagctctccagattttcccaacctccctggccctggatgaactcccggatggcttggttcccattgatcatacccgtcatggggatagccaccttgtcccaatactttcagggcaattgtggccctggtccccaagatttcccagtaacactgcaaaaaaagctctctaataagctaagcgggacatcctgagcacaccaggtcttgctgagagattccacagtgttctggagtaaagcccctgtctgaatctacttcatctacacagcataggttccggctggcaacctgcaatgttgggc

SEQ ID NO: 542938 - DNA, 323 bp, Homo sapiens
  misc_feature (177)..(177): n is a, c, g, or t
  misc_feature (198)..(198): n is a, c, g, or t
  misc_feature (205)..(205): n is a, c, g, or t
  misc_feature (213)..(213): n is a, c, g, or t
  misc_feature (232)..(232): n is a, c, g, or t
  misc_feature (259)..(259): n is a, c, g, or t
  misc_feature (271)..(271): n is a, c, g, or t
tggtggctgtcatgtactctaagtttgagtgtagcccttaggctctttgtgtcctcccctagtcccaagggcaggagggatagcactgttactgtggcagtggccaaggggtctgtccgtatgccctttgggagcctcttcctcagggaaactctgtgtcactaacagtgggtatgnctcagccatggtctggggtgnactgttnctgcattncatgagccatgggccctgncctagtgaagagtaggggtgggggttncctagggtaggnaggggtctgtcactcctgtttgtatggtggttgtggtgtgcctaaaaaaaaa

SEQ ID NO: 542939 - DNA, 1324 bp, Homo sapiens
gctcggctcttcccagtcctctggactaaaatggggaacacattgggcctgtgcaccaagtgggtgactttgcccctgcctgtgagccccctgccgagagtgaacccctgcccaaccctgtgtgagcttcgactgatgcgtgcacctgtctctgcaaagacgcagcagtgccaagttcctgacatggcatgtttgcttggcgagtatcaggggagatgactacacagccactctgaccctagtgaaatcctgacctgatttggggagtcggtgatcatggtttgctcacttcctgcacgagtcctcatcgtcatctggctgggtgctggcgagtgagaggctaggtttatcacctggcgagccagtgcgaagacgtgtgtggcccatcttatgcagcaacatgtgctggtcaactcgtacctcgtgctggaacaccttggcgtacggcagtacagattatgcaaatcgtatggtggtcaatccccgtcggcctgcggggcgcgccccacagtgttcagccacgttacggccaaccgctgcacctagtgtcgcgcgtcacgtgtcgactaccagggtgtatctccagtgagctcttctgcgacgctcgggagaagttagaatggtcgcgcgtgtacgagatggcgggctagctcgcatcgttaccgctgcgtcgtcacgtcgtgcggcgcgccgacacatacaaagttatggggccgcatccgcaggcttagatgccgcgcagacctacctcctgtctacgcgcacgggtggtcgcgctatagttcccgccggcacgtactgagatgtgcgcgcgcgccctggtgccgctctgcccggagtctcgtgtgccctgcgggcggatcgaagagcccagcgccgacgcgagcccgtccgaggacacgcacccctctcgctccctcacgcgagagcggcagcgggcagagcggccgacgggcgcaactcggcccggcaggcccaccgcgaacgcagcccgacacgcggcgacgaccgagacggcggcgagctcacaggcccccccgcggcagccggacgacgccgcgcgcgggcacgacggcgcgcggcagcgggagagccggcaaggctgcgcgacgccgggagcgccggcgcgcgagagtgcggagcgcacggacgcgcgggggacggcgggaagggggagagccgcgcccagcaccacgcgctgacaccagcaaggcggcgcgacggcggaccgggccggagcaggagcggaggaggaggagacggcgccacgcacgcgaggcgacggagacgagggacgagagggggggcgtggcgccggcggcag

SEQ ID NO: 542940 - DNA, 1881 bp, Homo sapiens
ggctcgtctgggagcctggcctgggccgaggtcggtgcgcgcgtgtgcgcgctggggctgtgcggtgtgtgcccgcgccgtgccccccgtgtgtgctgcctgggtggggcgccgggggtgaggtcaccggggggcataagcccttaataacgggcccgggaggctactgcggtggaagcccggccggcagccccgtccgggcccgggccaggttacccgggcgactacacaaaccacaaagggtgcaaccccgggtgggaccccggagacgaccacaccagaaaatatgtgctctacccggggagtgagacccggccacacaaggtcaccccagaaggggagacgcccacaatatgaagcggacacccctatgggagcataggacagcccccccaacaactttaccttggagggagaacacccttaataatagaggctaaggattagagcccacgggcaccgaagtttaggttttagtgtcacaccaatctagcacccccaatgagatccaacctgtggggaggaaaacacggcactaggacccggggtggaatctccacaccgcggtgagcgtacctcttctggtgtaccaaccaacagggcggggcaccttcaccccccaaatttagttctggcgttcatgcaacacgtccacatattgaggctcggttataggagcacgtattatgtgggccacaagcggaaacatttccaggggcgggattccaccaaacgacggccgcgcccaattaaaacaggggcgagaatttatggctgagccagcagacccccttcatatgttgatcgcgcaccacaacgaccgttgttaggcacgaaacgaacaccagaggtcgttgtggtaccatcattcacacaagatcgttgagacctctctcggtaaaacacggggatcccacattgttatgatatggtgggcggcagagcacgagaacaatcgcctttacagcacatttttggcccccccatgagtgtctttggtggccagcaaggcggcactgggggccccccgtctggttatcaaacgacggcgacccgctcgacactttatacaaccgcccggcgcgttgtaattagttgctgtagtgaggcgccccaaaaagaacagtgatacagaaaccggcgctacgccggtgcaagcgactacgaaataccacccaaatgtgttgttgtcaatacttgccgcgcaccactattattaacccctgtgtgacaacaggcgctactaaaccgtggttagacattgtggtggctcccacaacacaaacaagacgttgttggccgcgacacaaagcagcaaaggtcgccagtgtgagcatcccccacacagccgatcgcccagcggcacaccacgcatcacacatcatgcagagctcggacaacgagaaccatagccacaaagcataactccacagcagaggcagacactaccatcgtgcgcacaaacaactactaacgcgcagccgtcacaacgacacgcgaggtagtatacaccgcgactggagcagcgcgcacagacggcggacacactaataagacgacaaggactagtcgcacgcagcaagagaggcagcgcagccactgtcatggcgtgcacactattttttaatcaccaccccgccaggctagaccacaataagattgctgtctcacctcagacctactgttttattttttatctgttttactatttttatttttaatatttatcgtaagagctatgactagcagtgacagccgtaagcgtacgaagacatgctcaccacaactcgacaatagacaccacgcaaacagcgtcagcacgtccagacacgcagagcataccgacgacaccatacacacacgcccaccagaccagaccca

SEQ ID NO: 542941 - DNA, 387 bp, Homo sapiens
  misc_feature (18)..(18): n is a, c, g, or t
  misc_feature (145)..(145): n is a, c, g, or t
  misc_feature (341)..(341): n is a, c, g, or t
  misc_feature (349)..(349): n is a, c, g, or t
  misc_feature (362)..(362): n is a, c, g, or t
taaaaacaaagttgtccnattccgtttttaagtttacttctctttaatcggtctcactttattgaccaggctggtttcgaactcctgggcttaagtgatttctcctgtctcagcttctcaaagtgctgggattacaggcgtgacncttgacacccagcccagaatccagttttaaagagtttattcaagccaaaagctggggaatgggccatctgaggaaacacagactctagggaaaatgggggccagggcctggaagtttaaaagtttaaagtcttgcttacatagggcagaaaggcaaagacattagtaaccttgtaggaacatttcttgtattaacnttttcctntttttaaccttcnttgttttaacatttccatggcaggg

SEQ ID NO: 542942 - DNA, 1683 bp, Homo sapiens
agatgcagcagttgattgatgattagttgtttacatcttctctggacaccaacctcgtgggttgcttctagaatgaaaactcggcggtgcatctctctccctcgcgattgttacaatttacacgggggaggaataataactttcttcaaccacgggagatccactgttgtatactcgcttatggcgctattttttggaggggcactcacctatatagagcacaggtgttgtatactaaaaaaatcaaccggtgggttagatcaccggtgtctccgggaactttttctcccgggggattgtttccgtgtgagatacacaacagagcgtccgtttccgttggtcttggtgatgatgatatactcttgggagactgtctcttccctcatatgatgggagtatactctggggggccctcaccttctaagatgttggccacaaatgaatgtgggctcgttatataagagacacacaccaccacagcggggggggcttccgcccgagataatatagtgaatttgatgcttgctccatatagacacacacggggggtttccttctgggtacatataaaaataaataggggtgatagtatcctcattcgggtggggcaaccctctattgttaagtttgttttcgtataacacaacagcactgttgtagatccttatatgtgtgcccgccgcaaacgaagatttttgtcccttggaggagtttctgtataatttaataattttggcgcccaaacaaaaggggttggtgttgctcaacccggcgagtatttatatacccactagaatccccctcgtctctcatatagtaggtttctcggggggaggcctcttcctgaaatctcactaaaatttgtgagatggagcgccccttctttatagagatgagggtcttctctcgataagatttccctgggaggtctactcgttcgcctcacagtttattcgcctgggggaacaccccgggacctcccgagattcccctagatatgtccccacgtgattttttgtgctggcacaacgagacaccacacggttggtaaaacccacgatattttttctgggagaaaaagtcttttttctctaaaaagaatctcattgtcgagtgagaattttcgtagaaagaagagtttcctcgacactactctttgtttttttttaatatctcgcgtttcttggtgttataaaaacggcccaacactgttcctctctggcgtttacacaaaggtggttttctccgcaaactttggagagggtgtaaagtggaaaatatcttgtgctgtgtgtgcacccacagaagtgtaatatgttttaattcccctataaacacacgggtttggggggggagaaaggcgcctcgcacaaaaactcaaccactctgagaatttgtggaaaacacagcacgccacgaggtggagagtgggagttttattttttcgtgtatttgttgtgtggtttaaaaaaattccccccactgtgaattattgtgaacaccctgtgctttgtggtcacctgtaaacacatttgggcgggtgggaacacgggagggagaaaagtaacacaataagtccacacacatgtccctggcaatctgtttcagagcagtgtgcagaaagtaaagcttttttgtaagaaacgttttatgatttttaaaataaatttaggtgaaccctta

SEQ ID NO: 542943 - DNA, 951 bp, Homo sapiens
ccatactagatcttgccgccgcgaggcacgggggcctagccctactagtctcaatctccaacacatatggcctagactacgtacgataacctaaacctactccaagctaagacttaatcgtcccaacaattatattactaccacggacatgactttccaaaaaacgacataatgtgaatcaacacaaccacccacagccgtaattattagcatcatccctctactattttattaaccaaatcaacaacaacctatttagctgttccggccaaacttttcctccgacgcgcataataaacccccttcctaatactaactaactgatccgtacgccctcacggatcaatggcaagccaacgccacgttatccagtgaaccagtatcacgaaaaaaaatctactctctatactaatctccctacgaaatctccttaattataacattgacagccagcagaactaatcagtatgttgatatcttcttcgaaaccacaccttatccccacttggctatcatcacccgatgaggcaacaggcagaagcctgaaacgcaggcacatacttcctattctacagcctagtaggtcccttccgcctactcatcgcactgatttacactcacaagccctaggtcataaagattctatatcactctcactgccgaagaagtatcaaaaatcctgagcaagcaattaatatgatagcttaacaatagtttatagtaagatactcttggaggacttcagtatgagtcctaaggcatgttggaagccccatggtggtaaagtctgcgggggatcttaaaaggggaggttaataggcaagtcatttacccgaaaaaatggtaccttttggatctagggatataaggctggtggaaagacaagggggtttaaaatacgcgaaggttaaccggaagggagtaaagaaaatagagaaaaagggtcggaag

SEQ ID NO: 542944 - DNA, 137 bp, Homo sapiens
acatatgacgccggtggggatagcgatgattctggtcgcggcggtgcaatatgcacgtgtgtctacgtctattcctcactgtaaatcatcatggtgtgctcacacgcatcacacaccactaggcacgccaattgcat

SEQ ID NO: 542945 - DNA, 284 bp, Homo sapiens
ccctaggcgcacttctggatgtcggttatggtttctgttagagcacaggactctcgcgcctgctgtccccggcctgcagtttcagtgaagggatctctgcaccgtcaacttccctggctatcaagccatcctcccacctcagcctccccggcagctgggaccacatgcgcccgccatcacgtccggccgatttgtaaaatttccttccgtagagaccgtgaccctgccccgtggcccaggccggtctcgaactcctggaccctagcgatcctcctgcctgggtc

SEQ ID NO: 542946 - DNA, 142 bp, Homo sapiens
gcccatgctgcccaactcatgtgacttcacacctatgtatcatcttggcacagagacccaacaataaatacacattaactgcttatacaaggcctcctcaataactccaggatcatatcacacttgagccttcccactatct

SEQ ID NO: 542947 - DNA, 129 bp, Homo sapiens
  misc_feature (7)..(7): n is a, c, g, or t
ctcctgnggcggtggcgtccaacccgatgacgagtacctgactgcccaacggagcactggtggcaaacctgtgccccgggccgtccccgtcgtggcaggcgacatcaatgacgatgccgttctctatca

SEQ ID NO: 542948 - DNA, 713 bp, Homo sapiens
atcaaagtagcttactatatctaaactgtaaaaccatatagtttctcctgaacacctgctttccttctgggagtctggaattttggtatgtgccaggcagagactacctttgtgaccagctcccagtaaaaaccccaggcactcagtctctaacaagcttttgctggttgacagtgtttcacaagtgctgttacaactggttgctgggagaattaagctcatcctctgtgattccactggcggaggattcttggaagcttgcacttagtttcccctgacttcaccccatgtgtcttttttcctttgctgattttgttttgtatcctttcactgtaataaatcatggccgtgagcagaactgtaaaaaaaaacacaaaaacaaaaaaaaaaaaagggggggctccaaaaattatcccccgggggccccacaaaagcgtaccacgactgtttcttttgtacacaaagtgtgcccctattgatgaagagactcgtatttaaaacatatttgcaacagctatccgtgctgtcaaaagcaaagccttggccgcggcaaaacaatgtacgacgctcgactcttcatagtagcagcgaccaccattattcatgcggggtctgcgacaatacttggccaaccctcaccatcactacatgttaaacgctccattgatgaactataatgtcagagcgttctgcttgtgttcacaacgccaata

SEQ ID NO: 542949 - DNA, 341 bp, Homo sapiens
gcgtcgacatgtgatgaggattcgctcgttctttaaggaaatttaaattttctttttacggccaggcgcagtggctcacgcctgtaatcccagcactttgggaggctgagacaggcagatcacaaggtcaggagatcaagaccatcctggctaacacggtgaaaccccgtctctactaaaaaaacaaaaaataagccgggcatggtggtgggcacctgtagtcccagctactccggaggctgaggcaggagaatggcaggaacccaggaggtggagctggcagtgagctgagatcacgccactgcactgtagcctgggcgacagagcgagactctgtctca

SEQ ID NO: 542950 - DNA, 345 bp, Homo sapiens
gggattctgaggcagcgataggaggacagagcgcctcccgaagcgcgccaggtgagcgggcacggaggacggcgaggaggacgaggagatgattgagagcatcgagaacctggaggatctcaaaggccactctgtgcgcgagtgggtgagcatggggggcccccgggctgaagatccaccaccgcttcaagaacttcctgcgcactcacgtcgacagccacggccacaaacgtcttcaaggagcgcatcagcgaacatgtgcaaagagcaaccgtgagagccctggtggtgaactaatgaggaacttggcagccaggggagcacgcggctggcttacagcacatg

SEQ ID NO: 542951 - DNA, 263 bp, Homo sapiens
aatcagctcgcccaattacggatgcactggcactgtgggtgtgcgattattccatcctgttcctgagacaatacagcacgaccgctggcgggtttccccttgattgtccagcctcgcatatcgggaagcacacccgatggatacgcgacagcaagttttgggtaggctgatttgtcaaacgcctgcccctgcatcaggacgtagccagacggaacgatatctgatggccacgggatcggcgcacctgccggaaaggccgaatt

SEQ ID NO: 542952 - DNA, 429 bp, Homo sapiens
  misc_feature (13)..(13): n is a, c, g, or t
  misc_feature (22)..(23): n is a, c, g, or t
  misc_feature (25)..(25): n is a, c, g, or t
  misc_feature (27)..(27): n is a, c, g, or t
  misc_feature (41)..(41): n is a, c, g, or t
  misc_feature (233)..(233): n is a, c, g, or t
  misc_feature (235)..(236): n is a, c, g, or t
tgtttcggaggcnagcggggcnngncntgtgacaactgccngtagacctggggctgctgaacccagtcccgatggcaccaccggccacacctacaaccagtatacacagagatacaatcagagaacaaacactaacgtaaattgccccattgagtgcttcatgccgctagatgtgcaagctgacagagacgattctcgagagtaatctttccagccccacccgtacaagtgtntnnctaccaaggtcaatccacaccccagtgatgttagcagaccctccatctttgagtggtcctttcacccttaagccttttgctctggagccatgttctcagcttcagacaatttacagcttctccaagcatcgcccgtggattgttttgagacttctctcctcaatggtgacagttggtcacctgttctgcttca

SEQ ID NO: 542953 - DNA, 333 bp, Homo sapiens
ttttgcgggttaataaggacttaaactggtacccaagtcagaaagactctgcctctaattttttggggcttggggatgaaaataaagtgttacacccagtgtttgtcccccacagtttgtggggcaaaaagacccttcctgggactgaattttcaatttgaagcactgttgttcaaagatttcccttttgggtttgacaaaaaaaaacaaaacccttatttattgcatttttttgggttacaaacattgccctcactaatcaatggacatttcagcatttcattactaattttgagaaaaggcccccatggaatttaataaaaatattattga

SEQ ID NO: 542954 - DNA, 1753 bp, Homo sapiens
agcgggggcgagcgctgcggcagcggtgcgtgcgcggaccgcggtcagtcccgaacaaacggagcaggggcgccgccgcagggacccgccacccacctcccgggggcccgcgcagcggcctctcgctctactgccacccatgaccgccaacggcacagcccgacggcggctgcacgactccacgctctcgggccctccactcacacctggcgcgccaagcacacgctagccgtggatcgcgccccgcacggccaagctctcctgcgcggctctcccacacggcggctgcacagctgccaggtctcaggccctaggtcgacgcgcccctgccacaccgcactacgcacacgtccacgcaactccttgcgccactgccctgcgcacggcctacgctctcctccctcgtaccgcgcacgtggcctgagtgccactgccacgccagtgctcttgctcgcttagctcctctagtcccgtcctatcgcctctatccccctcgtcgcgtccctggcgttatcccctagacgcccgcgcacgcgcatcatacgcgacagcagcgtcacagcggctgcaacccatgcccgcagcccgccgcagggccttgcccccgatgactccgcgccgacacccgtgagcccggcttctcttcccccttcctactttccgcctgggctcggtcctaccgctacccggctacccgtgcctccgctctatggggattccggctcttgtcgccaggtgttccccctgtcacgcggtcaccgctcctctactccgtgtcgccacggcccgtttcaaccgctctctccgcactgactcggctgacacgagtctccgggaaggcggacagccccgcgccccgttgttctcgccgttgtactcttcttcctgtcctggtccgaatggcgcacccgtgtcgtcttgtgtccttcacgcggcaccacctcggagccctgcgccgggcacaatgtcataaataataggtgcacttgagcacggacacagtgacacacgggaatatgtgtcgcaaccgcccagaccgtttacacaggaccctacccatagtgtggtacctaaatcccccaccccccattatctatacggcggggcgcttccagatggaatcccgagaacctatcgccgttctaactcccagatcgtggtacgctggaagatctacccaataacccgctcccacccagggtacttcttacaataaccggggccgcaggggccgccatgtacagctccggtagtcccggcgtccctaaattcccacccgctttgggcatacgagcacgcccaggctccctggcgactcgcgtgtgggctcgctccagggagcggccacccccccgcggcccaacactcgccgtgtactaccctcgcctaaacgcgtcaccgcggaccaccgccagggaccatgtggttcggcaacatgccccccacgggcgtcgccgcggatacaaacccccggggcctttggggccacccccctcctcccacttggagcgtcgatgcggtcgcgtacctcgccggtgcatttttcccaggatcactaacctccctgtttttccggcgacgacgacttcttcctcacgttctgtacccgctaaccccgccgccctttatccgcggacacgccacccgcatttatttactcctcgcagtaaggctcggacgacaacactcctcccgaccaatggtcgactcgtggtctgccctcgtattcaagccaactcgcgctcctgcgcga

SEQ ID NO: 542955 - DNA, 498 bp, Homo sapiens
  misc_feature (344)..(344): n is a, c, g, or t
  misc_feature (356)..(356): n is a, c, g, or t
  misc_feature (407)..(407): n is a, c, g, or t
  misc_feature (418)..(418): n is a, c, g, or t
  misc_feature (438)..(438): n is a, c, g, or t
  misc_feature (450)..(450): n is a, c, g, or t
  misc_feature (472)..(472): n is a, c, g, or t
  misc_feature (497)..(497): n is a, c, g, or t
agagagctaaccatgagcttcaataccctgccatagataaataaataaataaataaattcttttccccgctctccaacaggggttctgccttctaaacactacattttgaagcatatgcttcccaagcttttctcatagcttcacatgacgataacaacaaaggaaatttaatataaatatcaaagtctccctgtaggtttcctttctcttctagtgaacaggtcccactcccatgacaagctcccaaagggaaaaaattgtccaaggctagagaaaagtaacttgcatagctgttccaacacaagctcccagggccttcccagagtccacggtttgagtcttncaaaattgctgntggaaaggcttgcaggatgagtccaacttggacttgggggttacaggtatncttaccaattnccaacctttttgttaacctnttattatattcnacaattcaagggccatgggggnaggcccatttatcaatttccatggnc

SEQ ID NO: 542956 - DNA, 173 bp, Homo sapiens
taatacaggcgtatattgggacttgtctaggttcttaacatgttcatatacattatagaaacaattggtcagtttccataaaaacaaaaaaatagatccgggaaattggactaggatggcctgaatttatagagcaattgggagagacggacattttaacgacatggtgatta

SEQ ID NO: 542957 - DNA, 575 bp, Homo sapiens
aacatggagaaaccccgtctccactaaaatacaaaattagctgggcgtgggggcgcatgcctgtaatcacagctgcaggagaatcgcttgaacctgggaggtggaggttgtggtgaaccaagactgcaccattgcactgcagcctgggcaacgagagtgaaactctgtctcaaaaaaaaaaaaccaaaaaacaaaaaacaataacaaatatgggccaagatgtttacaaactgggaacccttaggacaccgtgggtagaaatggtaaaacaattcagccaccgtgaaacagttctggggggctcctccaaaagttaaagagaatggtcatatgatcaagcaactggcacttctaagaagacacccaaaagaactcaaagcaggtattcaaacaattattggtacacaagtgttcacagaactattcatggtagccaaaatgtgtcaacaacccaaatatttatcacctgatgaataaccaaatggtgggtgtattcacatctgggctgactgaaatattattcagccataaaaaagaatgaagtgctgtacatgcaccacttaatgaaccttgaa

SEQ ID NO: 542958 - DNA, 286 bp, Homo sapiens
aaagccctccttgaccccaaccccagccccttccccagggggtggtagcccagggaggcttttggttttattcaggagagcctcatttgatatgcttttaaagtaatgagttaaaatgttagcccatatgaaccttttttatgtgaaatattagatttccggtccttcccttgttttttattatatttttaggggggatgctatgtgccataggatgcgatgtttttttccctcccctgcccctttgttacccggggttggattaaaagcctgggtttttggctta

SEQ ID NO: 542959 - DNA, 628 bp, Homo sapiens
ttagagttggccttccaacacagtggcaaaactggtccaagagccgtacaagctggccattcgaactcaacctcgggtgaccaagtccgcctgagcctaaggccatttgccaagccctggccaccggcctcacttgtttgccttgcttctcctaccagaaggcccagcatccccaaaggatttcttagaagcactgcccaagccaaagagcctcctttcctttgtccaaacagccctgcaaagccccaacaagccgaaagattgtcatgtgtcccctcaaaagatcggaagattgcgagtatctcggagcacacgctctactccaggttccttcatgagagccccataccccccatgctgatggcggcctctatctgaaagtccgtggctccctggtccatgttagcactcaccatgtaagccatggactcagttacatactgcagcataaccatccgtgccagcttctcctggatcagcccaaagttgtgaattttctccccaatctgggtacgattagtggcatgatctacctggaagagggtccacacatcccgctgtggttcagtgtggttctgcagtctccctaggagagggtctgggcttgcgccagaggtatgggttttgc

SEQ ID NO: 542960 - DNA, 319 bp, Homo sapiens
  misc_feature (78)..(78): n is a, c, g, or t
  misc_feature (107)..(107): n is a, c, g, or t
  misc_feature (111)..(111): n is a, c, g, or t
  misc_feature (129)..(129): n is a, c, g, or t
gtatgaagaagagtaagggagcagagggttaggacttcaggaacttagtattctggaataaggaatgaatcaactganctgggccagcaggtttgtaactaaatgtnactngcctttctcacccagttnatcagtctcggtacttgtttccctttttgaaacaagtgtctgggttaactaattctgtatatggttgtgctaaattcatagcaggtgccttattcttggcttttagtcaaaccattccatatcagaattttccttggtttaccatagatctttggcttcaagttgttgttggtgttttttaatgtacaat

SEQ ID NO: 542961 - DNA, 302 bp, Homo sapiens
taattgtgaaataataattttaaggatcttacaggtattacattaaaaagatactatgactgccacctgccatttaccttctaataaccctgccatgtggttggcagaacagagatggatatagtacgcctcagcaagaaatattttagtgtgggtttttggttttttcggttactagaatttcagtggatagaggggatagtggttcgaccttttatctttttaatgggacgtcagccagtttttggtaaagttacttcactgtgtaattggttgagatcctcgatttccacctttgccga

SEQ ID NO: 542962 - DNA, 412 bp, Homo sapiens
  misc_feature (73)..(73): n is a, c, g, or t
  misc_feature (128)..(128): n is a, c, g, or t
  misc_feature (134)..(134): n is a, c, g, or t
  misc_feature (152)..(152): n is a, c, g, or t
  misc_feature (167)..(167): n is a, c, g, or t
  misc_feature (209)..(210): n is a, c, g, or t
  misc_feature (214)..(214): n is a, c, g, or t
  misc_feature (218)..(220): n is a, c, g, or t
  misc_feature (226)..(226): n is a, c, g, or t
  misc_feature (228)..(228): n is a, c, g, or t
  misc_feature (234)..(234): n is a, c, g, or t
  misc_feature (246)..(246): n is a, c, g, or t
  misc_feature (288)..(288): n is a, c, g, or t
  misc_feature (301)..(301): n is a, c, g, or t
  misc_feature (311)..(311): n is a, c, g, or t
  misc_feature (323)..(323): n is a, c, g, or t
  misc_feature (331)..(331): n is a, c, g, or t
  misc_feature (335)..(335): n is a, c, g, or t
  misc_feature (339)..(339): n is a, c, g, or t
  misc_feature (343)..(343): n is a, c, g, or t
  misc_feature (351)..(351): n is a, c, g, or t
  misc_feature (355)..(355): n is a, c, g, or t
  misc_feature (361)..(361): n is a, c, g, or t
  misc_feature (375)..(375): n is a, c, g, or t
  misc_feature (397)..(397): n is a, c, g, or t
ccccgctttcttgctgttaattcaacagtgacacaaataagtttatgtgcccttaataccaggtgggcaccanacgctacatgctcccgaagtgctggacgatagcctgaacaaaaaccacttccagncctacntcatggctgacatctacngcttcggcctaatcntttgggagatggctcgtcgttgtatcacatgagggatcgtgnnagantacnnnttgccntnttacancatggtaccgantgatccgtcatacgaagatatgcgtgaggttgtgtgtgtcanacgtttgcggccnattgtgtctnatcggtggaacngtgatgantgtntacnagcngttttgangctnatgtcngaatgctgggcccncaatccagcctccagactcacngcattgagaattaag

SEQ ID NO: 542963 - DNA, 629 bp, Homo sapiens
  misc_feature (551)..(551): n is a, c, g, or t
taccggtaattggcctaaatatatggttttaatcctttaataaaggtttatcccattaatcctaggggttcatttaattagttaacagaccagactttcttctagggctttcaggaggcattccagttttaatattttccaggaggcaaatgggccacttaaatccatcttggtacccataggcttaatagggccatattaatcaacacctttttaccatcattccttcctttaatatttaatggaaaggattttcttagccggaattggcataaatattcaccttgggttttctctggccatgagtttggaggtttggtttggataatttcctttaaaggaatcgtgaattaatcttcatatataaggttggcggaatccatggggttcctctttggaagggtttaatcatacctaagggcctgatatccagtggcctcttcctagaatatattaataccattaattaaatttttaaattttatgggcagctggaatatcttaaataatacctctggcctaaatcctatcattaagtggaaatccttggnagcacttaataatttggttatggcaacttttcgggttgctggaacattgtagccgagctcttgccgtcccttctttgg

SEQ ID NO: 542964 - DNA, 285 bp, Homo sapiens
  misc_feature (1)..(1): n is a, c, g, or t
  misc_feature (42)..(42): n is a, c, g, or t
  misc_feature (52)..(52): n is a, c, g, or t
  misc_feature (54)..(54): n is a, c, g, or t
  misc_feature (136)..(136): n is a, c, g, or t
  misc_feature (172)..(172): n is a, c, g, or t
  misc_feature (207)..(207): n is a, c, g, or t
  misc_feature (240)..(240): n is a, c, g, or t
  misc_feature (261)..(261): n is a, c, g, or t
  misc_feature (268)..(268): n is a, c, g, or t
ntgccggcagttccatcggtggaacgcacaagattgggagantcacagggcngnatgcgcgggacctttgtttgagggaagtgccccagcaatcgtctttctccagatgatgccagttttgtggatgcattcatanctttaccgggagcacatgggcctgagcgtgggcatnaacagccataggacactatgacttctatcccaacnggggctccttccagctggctgcacttcctaganctctacagacatatttccaanacggctnaatggcaatcacccaga

SEQ ID NO: 542965 - DNA, 605 bp, Homo sapiens
ctgaagattcagtttaatgagttttcctagggagcaactaagtaagaaacataatgccaacagctggccagtaattagtgttgtgcacttcatgtccattaatcaatgttctcaatagtactttataaattagtgaggattaagagaaatctaggagaattttgcatttcatgctatcagcaaacagatattttcttgccaaagtcaaaagtaaagagaaatagtgatgagagcgttgaacgacaggcttatttttaagaaataaagactatttttaacatgggtttccttattgaaaaatcagtgtatttagtcataaaacaccatcgagttaagaataattgaacaataaagtttgcttgcagatgcacgttttcaaattataatctcatttcaatttactaacgttctcagtccgtttgttataattgttccttgtttgcagtgtaacgtttaattatctgcatttatcttttttcctagttttactaatactaatgttgatttcttaaaattcagtgagatataggataaaataatgctttgagaagaatgtttaatacgaaaattaaaataactttttctggcaagaaaaaataaacagg

SEQ ID NO: 542966 - DNA, 1093 bp, Homo sapiens
tgggccagtttttttttaattggtaaagctctgccataaatcttctagccgtgtgccaaggtgtcaccgtggccaaatctccgcaccaggtgtgtggtccggtgtgtacgccaggcaaaccaagatgttctgggccatcaggacaagaccagggccaggggagggtggcactggggtgtgggtttctggctctggctggctgggtatctggataatctttctgggtcttacagagttcaactctctcacaagagtggtctctttctcccctctctataaaactcgccagagaactctgtgtgagagtgcggtggggcgcctgtgtgtggcacgagcccaacacacaaagccagagtgttagcgggttatgaggcgctgtgtacacgccacagaggggggcgtgtgtgaatgtgaagtgtcgtccccacaccaactcttgagcgcgtgtgtataagaggtgtgttgtgtcggcttctgcgtgtgtgagagactactcccaatacacgtgtggccgcgtgtgccaatctctcttggcgcctctccgagaagagccccacgagagaggtgtactcccactctgtgtgagagagagaaacagagtcgtcacccgcggtgtgtgtctcagagaaagtagaccctgtgtgtgtgtgtcgccccagagtgtgtggtgtggtggctctcttcagaacctgtgtggcgaaagtgattagagacccaggagggtgtctcccatttactctgttgtgatcaccagcagtcttttgggtctcccccagaaggcccccacggagggggaagacacggacagtgaaaaagaggggggtctgtgcctgtgcggtggtgaggtgcccgaaaaaaacgcgggtcacacccaagagacaaaaccccccgacctttcgggaaaagtggtgggcactccactaaaaactcgcgggggaaaacgaggggggatattttgggcgaccacacaccgccacgaggggataatctcccaagatacaggccgtggaaagggggagtaaaaaacatctcggagagaaccccaatggagaaaccacacttttgcgcaggtttggtcacagaaagggagaag

SEQ ID NO: 542967 - DNA, 113 bp, Homo sapiens
ccaatgctagcactagagggtagatttagccacaaaagtccatccatctatgctgcttccacagagaaaacattttctcctttcctcctcttgaacttttacataatatcctc

SEQ ID NO: 542968 - DNA, 418 bp, Homo sapiens
  misc_feature (416)..(416): n is a, c, g, or t
ttcttgggcacctgctgggatcagcccccatctgactggatggtgatacttgctttagcagacatgaccccagggaaaggcccatttttgcccagaatttacacaggtcacaaagagcagctgtagaatgcatagcctattgtgataccatgagggactaagtaccaaccccatgaagtcctcaagcaggggccttcacccctttcccaggaccttcacgttctcctttctttctccaatggtgatttacagatgtgtttttctgtatttgggaaaaagtctcagaattagcttaaatgagccagggacaatggctcatgtctaaatcccagaactttgggaggccgaggtgggtggatcacttggatccaggagtacaggaccagcctgggcaacatggtaaaaccccatctctntg

SEQ ID NO: 542969 - DNA, 123 bp, Homo sapiens
cggacactaacattaagaaaggtctactttactagaaatttggtttaaaacatacaagttaaaatcagcggcggagcaggggggtcacgcctataatcttagctactcgggagggggggggaa

SEQ ID NO: 542970 - DNA, 1646 bp, Homo sapiens
agcgggttctggcagcccattccgagactagcggaggcgggcagggagggtatataagcgttggcggagcgtcggttgtagcactctgcgcgcccgctcttctgctgctgtttgtctacttcctcctgcttccccgccgccgccgccgccatcatgagggaaatcgtgcacttgcaggccgggcagtgcggcaaccaaatcggcgccaagttttgggaggtgatcagcgatgagcacggcatcgaccccacgggcacctaccacggggacagcgacctgcagctggaacgcatcaacgtgtactacaatgaggccaccggcggcaagtacgtgccccgcgccgtgctcgtggatctggagcccggcaccatggactccgtgcgctcggggcccttcgggcagatcttccggccggacaacttcgttttcggtcagagtggtgctgggaacaactgggccaaggggcactacacagaaggcgcggagctggtggactcggtgctggatgttgtgagaaaggaggctgagagctgtgactgcctgcagggtttccagctgacccactccctgggtggggggactgggtctgggatgggtaccctcctcatcagcaagatccgggaggagtacccagacaggatcatgaacacgtttagtgtggtgccttcgcccaaagtgtcagacacagtggtggagccctacaacgccaccctctcagtccaccagctcgtagaaaacacagacgagacctactgcattgataacgaagctctctacgacatttgcttcagaaccctaaagctgaccacgcccacctatggtgacctgaaccacctggtgtctgctaccatgagtggggtcaccacctgcctgcgcttcccaggccagctcaatgctgacctgcggaagctggctgtgaacatggtcccgtttccccggctgcacttcttcatgcccggctttgccccactgaccagccggggcagccagcagtaccgggcgctgaccgtgcccgagctcacccagcagatgtttgatgccaagaacatgatggctgcctgcgacccccgccatggccgctacctgacggttgccgccgtgttcaggggccgcatgtccatgaaggaggtggatgagcaaatgcttaatgtccaaaacaaaaacagcagctattttgttgagtggatccccaacaatgtgaaaacggctgtctgtgacatcccacctcgggggctaaaaatgtccgccaccttcattggcaacagcacggccatccaggagctgttcaagcgcatctccgagcagttcacggccatgttccggcgcaaggccttcctgcactggtacacgggcgagggcatggacgagatggagttcaccgaggccgagagcaacatgaatgacctggtgtccgagtaccagcagtaccaggatgccacagccgaggaggagggcgagttcgaggaggaggctgaggaggaggtggcctagagccttcagtcactggggaaagcagggaagcagtgtgaactctttattcactcccagcctgtcctgtggcctgtcccactgtgtgcacttgctgttttccctgtccacatccatgctgtacagacaccaccattaaagcattttcatagtgaaaa

SEQ ID NO: 542971 - DNA, 394 bp, Homo sapiens
  misc_feature (173)..(173): n is a, c, g, or t
  misc_feature (185)..(185): n is a, c, g, or t
  misc_feature (223)..(223): n is a, c, g, or t
  misc_feature (288)..(289): n is a, c, g, or t
gcactctgaggatcgcgttagtgacacaggtgagggcaccatcaatttcctgcaagattcctgacagtcaaggtgaggagatgcctgaaggacaggagacactcacaggaggccctggagacagatgtgcctcacaggcattcctgaggaccctgtggcctggcagcacagangactgggtgaanaacagaaccttgtgaaatctgcaagttctgcgcgctgnccgttgtctggtgtctgtgaaagcaaaagttgtccaagaaggggcccgctgtggaagccttctgnnagagcggttaggggaacggggggccccaacggtcctccccggaggggctggaagacagaaggcaaggcccgtgccccccacggcccaagagtaaggcgaggaagg

SEQ ID NO: 542972 - DNA, 870 bp, Homo sapiens
gtaaatatgttctatggaatgtggtggttccgtttcaaggatccagagaggaatgcttgtcagtatgtatactagtttctgattgataatacagccgtaacgaatgaatttgctattggccacgttcataaaagtatatatatttatatattgagctgtagactaaattttcaatgtaaaatatagcatggaaatttcgtgtgaacgcatttagacgaataacgtgacgtgacctgatttccagttaccaccaaatactatggggtggatgtccttacaaacaggtttctcctacatgttcacaacacaactgtcagcgagtagcgtcgtagtgcccgactaataccctgttactgtctaatcctcagaccccattacaagatccctgggcacatctgacagttaagctagccctgatgtgtaggttaccttcttcactctactctgactccaacgagctcatgcttggccaccgtcattcttggatgccatccctgggctctgatctagtccctagattatcatccatttcacataggacagctgctgctcatccttcctgggttaaaaccacatgggtgctcacaccagtctgctcaggagggtctgaagtccaacttgcggtatcacggcggtgatgccctttttcatctgtgcttgggttctgcaacaatttctgtggtggactccttctcctggttctttgggttggatacctggcaccttggagccctctaatacagattgccctttcagctataaaccgcagaaatccacaggaatgaatctttacatgcaatccttgatccatgctgggcatggcttactggggtccttccatagctgaggggttagacccaggatgataaa

SEQ ID NO: 542973 - DNA, 170 bp, Homo sapiens
actagtccaggtgggctagtaaatggtaaatctagggctgggaacagatgttacctcaaagccaatgtcttaatcgaagtgaggttgtttcaccttatcttttcgagtttctcctcaaaattcaattttctataggacttccgtgagtttcacaaactgtataggataat

SEQ ID NO: 542974 - DNA, 1449 bp, Homo sapiens
  misc_feature (5)..(5): n is a, c, g, or t
  misc_feature (13)..(13): n is a, c, g, or t
ttccnctagtttnaatgcccttttggagcactctgcgcgcccgctcttctgctgctgtttgtctacttcctcctgcttccccgccgccgccgccgccatcatgagggaaatcgtgcacttgcaggccgggcagtgcggcaaccaaatcggcgccaagttttgggaggtgatcagcgatgagcacggcatcgaccccacgggcacctaccacggggacagcgacctgcagctggaacgcatcaacgtgtactacaatgaggccaccggcggcaagtacgtgccccgcgccgtgctcgtggatctggagcccggcaccatggactccgtgcgctcggggcccttcgggcagatcttccagctgacccactccctgggtggggggactgggtctgggatgggtaccctcctcatcagcaagatccgggaggagtacccagacaggatcatgaacacgtttagtgtggtgccttcgcccaaagtgtcagacacagtggtggagccctacaacgccaccctctcagtccaccagctcgtagaaaacacagacgagacctactgcattgataacgaagctctctacgacatttgcttcagaaccctaaagctgaccacgcccacctatggtgacctgaaccacctggtgtctgctaccatgagtggggtcaccacctgcctgcgcttcccaggccagctcaatgctgacctgcggaagctggctgtgaacatggtcccgtttccccggctgcacttcttcatgcccggctttgccccactgaccagccggggcagccagcagtaccgggcgctgaccgtgcccgagctcacccagcagatgtttgatgccaagaacatgatggctgcctgcgacccccgccatggccgctacctgacggttgccgccgtgttcaggggccgcatgtccatgaaggaggtggatgagcaaatgcttaatgtccaaaacaaaaacagcagctattttgttgagtggatccccaacaatgtgaaaacggctgtctgtgacatcccacctcgggggctaaaaatgtccgccaccttcattggcaacagcacggccatccaggagctgttcaagcgcatctccgagcagttcacggccatgttccggcgcaaggccttcctgcactggtacacgggcgagggcatggacgagatggagttcaccgaggccgagagcaacatgaatgacctggtgtccgagtaccagcagtaccaggatgccacagccgaggaggagggcgagttcgaggaggaggctgaggaggaggtggcctagagccttcagtcactggggaaagcagggaagcagtgtgaactctttattcactcccagcctgtcctgtggcctgtcccactgtgtgcacttgctgttttccctgtccacatccatgctgtacagacaccaccattaaagcattttcatagtgaaaa

SEQ ID NO: 542975 - DNA, 966 bp, Homo sapiens
  misc_feature (45)..(45): n is a, c, g, or t
  misc_feature (48)..(48): n is a, c, g, or t
  misc_feature (866)..(866): n is a, c, g, or t
  misc_feature (907)..(907): n is a, c, g, or t
  misc_feature (929)..(929): n is a, c, g, or t
atagacaatgcccgacaacactatcaggctaggtacgagctgggngtnaatcggacgagggctgtttgtctacttcctcctgcttccccgccgccgccgccgccatcatgagggaaatcgtgcacttgcaggccgggcagtgcggcaaccaaatcggcgccaagttttgggaggtgatcagcgatgagcacggcatcgaccccacgggcacctaccacggggacagcgacctgcagctggaacgcatcaacgtgtactacaatgaggccaccggcggcaagtacgtgccccgcgccgtgctcgtggatctggagcccggcaccatggactccgtgcgctcggggcccttcgggcagatcttccggccggacaacttcgttttcggtcagagtggtgctgggaacaactgggccaaggggcactacacagaaggcgcggagctggtggactcggtgctggatgttgtgagaaaggaggctgagagctgtgactgcctgcagggtttccagctgacccactccctgggtggggggactgggtctgggatgggtaccctcctcatcagcaagatccgggaggagtacccagacaggatcatgaacacgtttagtgtggtgccttcgcccaaagtgtcagacacagtggtggagccctacaacgccaccctctcagtccaccagctcgtagaaaacacagacgagacctactgcattgataacgaagctctctacgacatttgcttcagaaccctaaagctgaccacgcccacctatggtgacctgaaccacctggtgtctgctaccatgagtggggtcacacctggctgcgcttccaggccagtcatgtgcctgggaagtggtgggacntggccgtccccggtgcttttatgccgggttgcccctgaccncgggggccagccggggggcggncgcccccaatggggcaaatgggccggcccggcgccgg

SEQ ID NO: 542976 - DNA, 945 bp, Homo sapiens
  misc_feature (898)..(898): n is a, c, g, or t
  misc_feature (903)..(904): n is a, c, g, or t
ggcagtacaggctggtgtgaatcggacgaggctcttctgctgctgtttgtctacttcctcctgcttccccgccgccgccgccgccatcatgagggaaatcgtgcacttgcaggccgggcagtgcggcaaccaaatcggcgccaagttttgggaggtgatcagcgatgagcacggcatcgaccccacgggcacctaccacggggacagcgacctgcagctggaacgcatcaacgtgtactacaatgaggccaccggcggcaagtacgtgccccgcgccgtgctcgtggatctggagcccggcaccatggactccgtgcgctcggggcccttcgggcagatcttccggccggacaacttcgttttcggtcagagtggtgctgggaacaactgggccaaggggcactacacagaaggcgcggagctggtggactcggtgctggatgttgtgagaaaggaggctgagagctgtgactgcctgcagggtttccagctgacccactccctgggtggggggactgggtctgggatgggtaccctcctcatcagcaagatccgggaggagtacccagacaggatcatgaacacgtttagtgtggtgccttcgcccaaagtgtcagacacagtggtggagccctacaacgccaccctctcagtccaccagctcgtagaaaacacagacgagacctactgcattgataacgaagctctctacgacatttgcttcagaaacctaaagctgacacgccactatggtgacctgaacacctggtggtctgctccatgagtggggtcccactgctgggcttcccaggcagtcaatgtgactgggaactggtgtgacatggccgtcccggtgcttttagccggttgccctggcaccgggccgacgggggcggcnccccnntttgcaaagtttcgacccgggaaggcgtgggcagggccttg

SEQ ID NO: 542977 - DNA, 1041 bp, Homo sapiens
  misc_feature (12)..(12): n is a, c, g, or t
  misc_feature (923)..(923): n is a, c, g, or t
acgtgtcagtanccccggtttatgtagcgaggcctgggtggcgctacttcctcctgcttcccccgccgccgccgccgccatcatgagggaaatcgtgcacttgcaggccgggcagtgcggcaaccaaatcggcgccaagttttgggaggtgatcagcgatgagcacggcatcgaccccacgggcacctaccacggggacagcgacctgcagctggaacgcatcaacgtgtactacaatgaggccaccggcggcaagtacgtgccccgcgccgtgctcgtggatctggagcccggcaccatggactccgtgcgctcggggcccttcgggcagatcttccggccggacaacttcgttttcggtcagagtggtgctgggaacaactgggccaaggggcactacacagaaggcgcggagctggtggactcggtgctggatgttgtgagaaaggaggctgagagctgtgactgcctgcagggtttccagctgacccactccctgggtggggggactgggtctgggatgggtaccctcctcatcagcaagatccgggaggagtacccagacaggatcatgaacacgtttagtgtggtgccttcgcccaaagtgtcagacacagtggtggagccctacaacgccaccctctcagtccaccagctcgtagaaaacacagacgagacctactgcattgataacgaagctctctacgacatttgcttcagaaacctaaagctgacacgcccacctatggtgactgaacacctggtgtctgtaccatgagtggggtcccacctgctgggcttccaggcagtcatgtgacctgggaagctggtgtgaaatggtccgttcccgggtgccttcttcatgcccggtttggcccctggacagcgggcggccgcagaccggggctgacggccgatcaccngattttgtccccactttggtggtggtaccgcagggcgcactatcgtgcgcggtaggcgcgcctaaggggggccctttccacaaccgttggcccccagacggttcccccgagcgccggg

SEQ ID NO: 542978 - DNA, 700 bp, Homo sapiens
gaaggaaatagcattatgtaatgaggattactgcattaaagcgagaatacctaatatgtgaagattacaagtaattctgggtggcgccaagaaactctgcagaattaacagtaatacaggtatcgttctcgagctgtcccatgggactgttatatcaacctcaagattacaggaacgtttaaagtgaagatatcgatcattgtttgcagactgtatatcacatatcaaggatggctgtattgtctggcgaccaagtactataaactgcgttcacccattcaggaatactatctcacaatcaacagatgaagtactattacgccatgtaagataacgagtgattgattattttagtagagcctgttggacaatagtggagatgctacacaaagcagaaatagtccatggtgacttgagtccaaggtgtctgattctcagaatgcagaatccacagatccctatgattgtaagcaagaacaatcaagctttgacacgatagtggacttgttcctacaggtgtcgaccttagggtgcagctggatgtcacaaacctcagcggctttcggactgaacagatcctggaaggacagaagatcctggctaactgtagcttctccctaccaggtagacctgttcggtatagcagattaagcacgttacactatcgtgcaaggaacacctacaggatctactgagatga

SEQ ID NO: 542979 - DNA, 162 bp, Homo sapiens
attggtggacgaacattgtgacatcccatctttacattaaatttttaaaaaattagcaaggcatggtggtgcacacctgatagtctcagctacttggctgagataggatccctgcgagtctagagggttcaaggactgcagatgagctcgtgatattgtgcc

SEQ ID NO: 542980 - DNA, 873 bp, Homo sapiens
ctcgcaactaacctcctccactcaccacatcccacacagcctccgcaacttacgggctaggtagcgaggcctgggtgtgggtttgtctacttcctcctgcttccccgccgccgccgccgccatcatgagggaaatcgtgcacttgcaggccgggcagtgcggcaaccaaatcggcgccaagttttgggaggtgatcagcgatgagcacggcatcgaccccacgggcacctaccacggggacagcgacctgcagctggaacgcatcaacgtgtactacaatgaggccaccggcggcaagtacgtgccccgcgccgtgctcgtggatctggagcccggcaccatggactccgtgcgctcggggcccttcgggcagatcttccggccggacaacttcgttttcggtcagagtggtgctgggaacaactgggccaaggggcactacacagaaggcgcggagctggtggactcggtgctggatgttgtgagaaaggaggctgagagctgtgactgcctgcagggtttccagctgacccactccctgggtggggggactgggtctgggatgggtaccctcctcatcagcaagatccgggaggagtacccagacaggatcatgaacacgtttagtgtggtgccttcgcccaaagtgtcagacacagtggtggagccctacaacgccaccctctcagtccaccagctcgtagaaaacacagacgagacctactgcattgataacgaagctctctacgacatttgcttcagaaacctaaagctgacacgccaaccatggtgactgaccaccggggcggtccagggggggccccggcggggtccaggcggcagcgacgggggggggaacggcgccgggggaac

SEQ ID NO: 542981 - DNA, 726 bp, Homo sapiens
agcaaaaacgactaaagaagcttcgtggaaaggagaaaccaaaaaaaaaaaaaaaaaaaaaaaaaaaaaatttgggggcggcccgggccccggcgaaaaagacttgttcaagaacaccaatcgcgttgtggggcgcgcgggggccccaaggagaggtaagaggagacacacgtgggccaaagagcgggttccccataaggaaacaccgcgggccagaggcaatgagggtggcgcgggattctcccgacccaaataaaaaaagagcgccgcgggggggaaaagcgagagagggtttgggaaaaaaatccacgaagagggggttcgcgaggagggcacaacaagcgggggacactataataacacagggggcgagctcccaagagggagacctgcgaagtattacaaaatatataccgcgcccacggcaccgcgggggggcgaacaaacaagaggagacgacaaaaacaaaagaggaacgaacaaaagaaaaaaaaaacgaaacgagaaaaaaaaagacggaagaaagcacaaagtcaaccacaaaagtcgagcacagggccacaagacgacccatgcgagcaacacaaagcgcaacaagggcagacaccagtgacacgtaccgaacacccagccggacgcaccaagcaccacaaccacaaacgacgaacaaacgacgaccaaccaagcagaacatcgagaagaacaggagacaagacacagcgaggg

SEQ ID NO: 542982 - DNA, 317 bp, Homo sapiens
  misc_feature (21)..(21): n is a, c, g, or t
  misc_feature (114)..(114): n is a, c, g, or t
  misc_feature (122)..(122): n is a, c, g, or t
  misc_feature (143)..(143): n is a, c, g, or t
tgggggagagagatttggaanaggaggaggaggaggagaaggaggagagagaggggaagagataaagtgggtgtgtggcctccttgggtcctctgtttgaccctttggggccantgggccantgccattggacaggaggaggntgaggaggaggtggcctagagccttcagtcactggggaaagcagggaagcagtgtgaactctttattcactcccagcctgtcctgtggcctgtcccactgtgtgcacttgctgttttccctgtccacatccatgctgtacagacaccaccattaaagcattttcatagtgaaaa

SEQ ID NO: 542983 - DNA, 2177 bp, Homo sapiens
agcgggttctggcagcccattccgagactagcggaggcgggcagggagggtatataagcgttggcggagcgtcggttgtagcactctgcgcgcccgctcttctgctgctgtttgtctacttcctcctgcttccccgccgccgccgccgccatcatgagggaaatcgtgcacttgcaggccgggcagtgcggcaaccaaatcggcgccaagttttgggaggtgatcagcgatgagcacggcatcgaccccacgggcacctaccacggggacagcgacctgcagctggaacgcatcaacgtgtactacaatgaggccaccggcggcaagtacgtgccccgcgccgtgctcgtggatctggagcccggcaccatggactccgtgcgctcggggcccttcgggcagatcttccggccggacaacttcgttttcggtcagagtggtgctgggaacaactgggccaaggggcactacacagaaggcgcggagctggtggactcggtgctggatgttgtgagaaaggaggctgagagctgtgactgcctgcagggtttccagctgacccactccctgggtggggggactgggtctgggatgggtaccctcctcatcagcaagatccgggaggagtacccagacaggatcatgaacacgtttagtgtggtgccttcgcccaaagtgtcagacacagtggtggagccctacaacgccaccctctcagtccaccagctcgtagaaaacacagacgagacctactgcattgataacgaagctctctacgacatttgcttcagaaccctaaagctgaccacgcccacctatggtgacctgaaccacctggtgtctgctaccatgagtggggtcaccacctgcctgcgcttcccaggccagctcaatgctgacctgcggaagctggctgtgaacatggtcccgtttccccggctgcacttcttcatgcccggctttgccccactgaccagccggggcagccagcagtaccgggcgctgaccgtgcccgagctcacccagcagatgtttgatgccaagaacatgatggctgcctgcgacccccgccatggccgctacctgacggttgccgccgtgttcaggggccgcatgtccatgaaggaggtggatgagcaaatgcttaatgtccaaaacaaaaacagcagctattttgttgagtggatccccaacaatgtgaaaacggctgtctgtgacatcccacctcgggggctaaaaatgtccgccaccttcattggcaacagcacggccatccaggagctgttcaagcgcatctccgagcagttcacggccatgttccggcgcaaggccttcctgcactggtacacgggcgagggcatggacgagatggagttcaccgaggccgagagcaacatgaatgacctggtgtccgagtaccagcagtaccaggatgccacagccgaggaggagggcgagttcgaggaggaggctgaggaggaggtggcctagagccttcagtcactggggaaagcagggaagcagtgtgaactctttattcactcccagcctgtcctgtggcctgtcccactgtgtgcacttgctgttttccctgtccacatccatgctgtacagacaccaccattaaagcattttcatagtgaaaacaaaaaaaaaaaaaaaaaaaaaaaaaaaaaaaaaaaaaaaagggggggggggcgccaaaaaaattccccggggggggccccaaattttggcgccgtcccccttttttgttggccaaggggggccccaaaaaggcgaggcgcgttataaccaaggccagagcgcacccgcggccgcgccgagtgcaacaaaaacgcctcgtgcgcgcggtggcaacaagcgtgcggtgacggggggaaaccctttgcggggcgaggacgccccccctacctctcgggggcgggcgagcaccacaattttcggcggcgccacaccatctcccctaagcgaacggtatatacaccggccctctcagcggagaaattctcaaacatcttcaaggcagcgatactcggcggggtcacccccccaagcggagcataatcgcgttcgaccgttaagaaacgtctgcgcacccacggacattagactgtcggcgacactattttatccgcgagcgacggttataaacgcctacctcagcgcaccgccct

SEQ ID NO: 542984 - DNA, 293 bp, Homo sapiens
atgattacgctccgcagacgtatgctgcctatatgttccagcagaatctactcttccatacttaattcttttttgaaatatcttaaataatgaaacattcctttataacttcttaacagtgtcaaaactggggtagaagggattttattttttcccaaaagggttccatctttgctatctgttgatcagccttagaaaatctaagtatgatcaataaattttaatggttgatggcatcctgtgtcagctggagtagttggttgtgaatattaaaacctagtactattttccct

SEQ ID NO: 542985 - DNA, 370 bp, Homo sapiens
  misc_feature (292)..(292): n is a, c, g, or t
  misc_feature (362)..(362): n is a, c, g, or t
gtgatttcaggtgatttcattgtgcaaatgtcatagaatatacttacacaaaactaggtggtacacacctaggccatatggtacgggctattgctcctagactacaaatctgtatagcgtgttactgtactgtaggcaattgtaacacagtggtaagtatttgtgcatctaaacatatctaaacatagaaaaggtacagtaaaatacaatattattatcttatgaaaccactactgtatatggggatctgtcatcaacaggaaatgtctttatgtgggcacatggactgganttacatccaaaccttagggttccattggctgtgtggaatcaggggacctcttatggtttaaaagggcacngtttgggg

SEQ ID NO: 542986 - DNA, 1856 bp, Homo sapiens
  misc_feature (1659)..(1659): n is a, c, g, or t
  misc_feature (1665)..(1665): n is a, c, g, or t
  misc_feature (1671)..(1671): n is a, c, g, or t
agcgggttctggcagcccattccgagactagcggaggcgggcagggagggtatataagcgttggcggagcgtcggttgtagcactctgcgcgcccgctcttctgctgctgtttgtctacttcctcctgcttccccgccgccgccgccgccatcatgagggaaatcgtgcacttgcaggccgggcagtgcggcaaccaaatcggcgccaagttttgggaggtgatcagcgatgagcacggcatcgaccccacgggcacctaccacggggacagcgacctgcagctggaacgcatcaacgtgtactacaatgaggccaccggcggcaagtacgtgccccgcgccgtgctcgtggatctggagcccggcaccatggactccgtgcgctcggggcccttcgggcagatcttccggccggacaacttcgttttcggtcagagtggtgctgggaacaactgggccaaggggcactacacagaaggcgcggagctggtggactcggtgctggatgttgtgagaaaggaggctgagagctgtgactgcctgcagggtttccagctgacccactccctgggtggggggactgggtctgggatgggtaccctcctcatcagcaagatccgggaggagtacccagacaggatcatgaacacgtttagtgtggtgccttcgcccaaagtgtcagacacagtggtggagccctacaacgccaccctctcagtccaccagctcgtagaaaacacagacgagacctactgcattgataacgaagctctctacgacatttgcttcagaaccctaaagctgaccacgcccacctatggtgacctgaaccacctggtgtctgctaccatgagtggggtcaccacctgcctgcgcttcccaggccagctcaatgctgacctgcggaagctggctgtgaacatggtcccgtttccccggctgcacttcttcatgcccggctttgccccactgaccagccggggcagccagcagtaccgggcgctgaccgtgcccgagctcacccagcagatgtttgatgccaagaacatgatggctgcctgcgacccccgccatggccgctacctgacggttgccgccgtgttcaggggccgcatgtccatgaaggaggtggatgagcaaatgcttaatgtccaaaacaaaaacagcagctattttgttgagtggatccccaacaatgtgaaaacggctgtctgtgacatcccacctcgggggctaaaaatgtccgccaccttcattggcaacagcacggccatccaggagctgttcaagcgcatctccgagcagttcacggccatgttccggcgcaaggccttcctgcactggtacacgggcgagggcatggacgagatggagttcaccgaggccgagagcaacatgaatgacctggtgtccgagtaccagcagtaccaggatgccacagccgaggaggagggcgagttcgaggaggaggctgaggaggaggtggcctagagccttcagtcactggggaaagcagggaagcagtgtgaactctttattcactcccagcctgtcctgtggcctgtcccactgtgtgcacttgctgttttccctgtccacatccatgctgtacagacaccaccattaaagcattttcatagtgaaaaaaatcaacacatncgaccncacaanaaaccacaagcggggagaacattaggcgacgcgcgcggccaaaaaaacgcgcccagcaaacgggccccccgcgccaacagaggccacacgggacgcaagacacagggcagcacaggggggcaacatcgcggagcaccacacaagcgacgagcgaacagtacgaaccgcgggggaaccggccgaaa

SEQ ID NO: 542987 - DNA, 1668 bp, Homo sapiens
agcgggttctggcagcccattccgagactagcggaggcgggcagggagggtatataagcgttggcggagcgtcggttgtagcactctgcgcgcccgctcttctgctgctgtttgtctacttcctcctgcttccccgccgccgccgccgccatcatgagggaaatcgtgcacttgcaggccgggcagtgcggcaaccaaatcggcgccaagttttgggaggtgatcagcgatgagcacggcatcgaccccacgggcacctaccacggggacagcgacctgcagctggaacgcatcaacgtgtactacaatgaggccaccggcggcaagtacgtgccccgcgccgtgctcgtggatctggagcccggcaccatggactccgtgcgctcggggcccttcgggcagatcttccggccggacaacttcgttttcggtcagagtggtgctgggaacaactgggccaaggggcactacacagaaggcgcggagctggtggactcggtgctggatgttgtgagaaaggaggctgagagctgtgactgcctgcagggtttccagctgacccactccctgggtggggggactgggtctgggatgggtaccctcctcatcagcaagatccgggaggagtacccagacaggatcatgaacacgtttagtgtggtgccttcgcccaaagtgtcagacacagtggtggagccctacaacgccaccctctcagtccaccagctcgtagaaaacacagacgagacctactgcattgataacgaagctctctacgacatttgcttcagaaccctaaagctgaccacgcccacctatggtgacctgaaccacctggtgtctgctaccatgagtggggtcaccacctgcctgcgcttcccaggccagctcaatgctgacctgcggaagctggctgtgaacatggtcccgtttccccggctgcacttcttcatgcccggctttgccccactgaccagccggggcagccagcagtaccgggcgctgaccgtgcccgagctcacccagcagatgtttgatgccaagaacatgatggctgcctgcgacccccgccatggccgctacctgacggttgccgccgtgttcaggggccgcatgtccatgaaggaggtggatgagcaaatgcttaatgtccaaaacaaaaacagcagctattttgttgagtggatccccaacaatgtgaaaacggctgtctgtgacatcccacctcgggggctaaaaatgtccgccaccttcattggcaacagcacggccatccaggagctgttcaagcgcatctccgagcagttcacggccatgttccggcgcaaggccttcctgcactggtacacgggcgagggcatggacgagatggagttcaccgaggccgagagcaacatgaatgacctggtgtccgagtaccagcagtaccaggatgccacagccgaggaggagggcgagttcgaggaggaggctgaggaggaggtggcctagagccttcagtcactggggaaagcagggaagcagtgtgaactctttattcactcccagcctgtcctgtggcctgtcccactgtgtgcacttgctgttttccctgtccacatccataaccgggagcaccaccataagatgggaggggtggggcggggttggggtggtggggggtggtgg

SEQ ID NO: 542988 - DNA, 382 bp, Homo sapiens
  misc_feature (20)..(20): n is a, c, g, or t
  misc_feature (40)..(40): n is a, c, g, or t
  misc_feature (73)..(73): n is a, c, g, or t
  misc_feature (109)..(109): n is a, c, g, or t
  misc_feature (151)..(151): n is a, c, g, or t
  misc_feature (160)..(160): n is a, c, g, or t
  misc_feature (176)..(176): n is a, c, g, or t
caaaagcccctttggcagtnggtcccccccccacccgaanggcccacccccagtcaacctacttttccgcctntctgtggcctatacgttagatttggaccttcagaantcctagagtttgaaataaataggcccatataatatgcactcnttttgtgtnctgactttttttttgncttaacatgatgcttttgaaacccacccatgttgagattcatccatgttatcatgtgtatcaataataagttcctttttattgctgaatagtattctagtatatagatataccacaatttgtttagctgttcacctattgatggacatttaggttgtttcaagttttgatctattatgaataaagctgctatatatataaatcaca

SEQ ID NO: 542989 - DNA, 861 bp, Homo sapiens
  misc_feature (622)..(622): n is a, c, g, or t
gactctgttccacattgcataacagggacccctaccatggtggagaccatcaaagatccctcgccacatcagctgtcttggctggatcactgtcatgtctctcaggtcatctttaccagtgtgggcaagttctactatccctggaggggacgtcacaatgtcattatagcttcaccgcagcatttcatccctacgtgcgaaaagcgatgggattggcatctcttagaggtgggagtggagagacaacggcccgttggagtcttcacacgcttcactgtggagtatactttgcccattgacctaacacaatcaaactcagctaaaacagctaggatagtcccagttcactagcttactagcctgcccaaggtagtgactgaagtattgaccagttctgctgatgtggatgcaaggcatggtgtggataccgggggtagcaaagatatgccttatcacaattccgtcccagaaaatgaggaagtacatctctggtgagtaaaccactcagggaagcaggtggaagagcatggagcagcacaatgcagggaggtgtgaagacgatacaccagggagctgatggacacaggtgtatcaggcctcccagaaaagcaagagcgtcagnacacttcaggggctggaactccaaaaggcaagcccggagggagcctgaagaaaccctacaggcggctctgctcacagcagtggcccggtacactgacagaaaccgacgcgccatgggcgggcacagctgggtcacctggagagaccacccgcaagagtcctcccacactccggacgcgcggatcccacgggccactttggccacgtggtcccccgcaatgagctcggcccgctttcggc

SEQ ID NO: 542990 - DNA, 422 bp, Homo sapiens
  misc_feature (1)..(1): n is a, c, g, or t
  misc_feature (3)..(4): n is a, c, g, or t
  misc_feature (6)..(6): n is a, c, g, or t
  misc_feature (38)..(38): n is a, c, g, or t
ncnngngcccggggagtcccgggggaatttaaaatccngcctcagccaacccagtagcagggatcacaagtgtgcacccccacgcccagccaaatacaggatacataggagagaaggggcttctgcatggtggccaggcaggccgtgaacaaccgaccaaagggaccacccggccaaggactaccgaagcgctgggaagacaggcgtgagccaccatgcccggcccactcaccatatatttcctgaacttcagtcatatgtgacgcagggaagacacacgaacagaaaaatcagggagatggagacggagctaaccacggaagccgaaaatagacggacagatggcccaaggcacaataatccggggaacacacaatcaggcaaccgaacctgacagggaaaacccggctgaaccaccccca

SEQ ID NO: 542991 - DNA, 288 bp, Homo sapiens
ccccggcccccccacccctccctcagcccaccagggtccagggagatgttcgttctcgctttaagtcaggagtcacaaatgacttttttttttcaattaaggaaaaaagctccatctcttacctttcaacatgcacccagatcccccgcccctagcccgtggccccaccgctgatgctaacgacagtaatgatagcttactcttgctaactcgagaaacccattctttaatgtaatgtaatgatatgcgtttacttgtattataaagtgccctgatattaaaaaagat

SEQ ID NO: 542992 - DNA, 338 bp, Homo sapiens
  misc_feature (274)..(274): n is a, c, g, or t
  misc_feature (320)..(320): n is a, c, g, or t
cttaatattcattcatttatcagatatttattgagcccctactattttccaggtactaatctaggtactgggaatacagaaacaatgtgaagtccttggcccctatattctactcaattagaaagacaattatgggccaggtgtggtggctcacgcttgtaatcccagcactttgggaggctgagttgggtggattaccctcaggagttcaagaccagcatggccaacatggtgaaaccccatctgtactaaaaatacaaaaattagccaggtntggttgtctgtgcctgtactctcagatactcggggaggctgaggcnggagaatttgctttgaac

SEQ ID NO: 542993 - DNA, 480 bp, Homo sapiens
gagactcttcaataagaggagagtggttaccctgggaaaccagttcacataaatgaagaatgctgtttggtcatttatggtcctggcccttgccccttgttctttctttgtgaagtgttcagatgagcgttttctttcatcttttagttgctcctttaaagctccaagtgatttttttaaacactgtgaagccctcacaatcaattgcttaaaatgtttctagaaattcctggtatcacttaaaaatagcttccgttttgtgctctagaaggttattgttgctgagtgccagcagctacattttagaattaaggcaggtttggccagattggtgtgcagtgtggagatgaagaatcccacccctgcaagacggagccacataagaagccagccgggggaacagatcactgtagccatctctgaaaagtgacagcgctaaatccttgtcctgcctttcttctctttccttccagtttttta

SEQ ID NO: 542994 - DNA, 1191 bp, Homo sapiens
  misc_feature (547)..(547): n is a, c, g, or t
  misc_feature (596)..(596): n is a, c, g, or t
  misc_feature (638)..(638): n is a, c, g, or t
gaacaaattcagaaagcaggaggcttgaaaacctccagtatcataattgctctgacagatggcaagttggacggtctggtgccatcatatgcagagaaagaggcaaagatatccaggtcacttggggctagtgtttattgtgttggtgtccttgattttgaacaagcacagcttgaaagaactgctgattccaaggagcaagttttccctgtcaaaggtggatttcaggctcttaaagcgaactaattaattctatactagctcagtcatgtactgaaatcctagaatggcagccctcaagtgtctgctgtgggggaggaatttcagattgtcttaagtggaacgaggattcatgctgggcagtcggaatggcagtgttctctgcacttacactgtaaatgaaacatatacaacgagtgtaaaaccagtaagtgtacagcttaattctatgctttgtcctgcacctatcctgaataaagctggagaaactcttgatgtttcagtgagctttaatggaggaaaatctgtcatttcaggatcattaatngtcacagccacagaatgttctaacgggatcgcagcatcattgttatttnggtgttactgctactcctggggatcggtttgatgtggtggtntggcccctttgctgcaaagtggttattaaggatcctccagccacaccccccctgcaccaaaagaggaggaagaagaacctttgcctactaaaaagtggccaaactgtggatgcttcctattatggtggtcgaggggttggaggacattaagaaacgcaaatggaggtacgttggggtgataaaggatctactgagtgaaggtgccaggctaggagaaagccaaaaaatgctgtggctgaagattcctgaagaaacagagggaacccatcaggcctagaccactcgaccaaaccatacacagcctcctcagacaaaatggtacaccccaattaagggtcgtcttgattgctcctatgggctttgttagaggcggcagtatgaacccggggttccttttgattgcgacctcaggaagggagatgagggcccgggtgcataaacttctcccgagttcccatctccagtaaacaggggaagcagggaagaccaagaagggtacgaagattgggcacatattccacattagctgattttccaaccacaactgccacaa

SEQ ID NO: 542995 - DNA, 197 bp, Homo sapiens
  misc_feature (72)..(72): n is a, c, g, or t
acgactcttccagaggcacagcacagcaggctccggccttgcctggcacaggcctggagtgtcctcctttcnggcccctgacagaaccgggggctcagggcagcaggccgctgggccagaaggagatggggagcccacggacacccctaaagcctacagtattctaccatgcccctaggcgcagggcagcagggcag

SEQ ID NO: 542996 - DNA, 177 bp, Homo sapiens
tacttttccacatggatatagggggttgatgtggagagctaaggaccaggactgcctccacaagacaggatgtggattatctgcccaaggagcctagtgagttaaaaatgtcaagtacggatagagcccggtggctcacacctgtagtcccagctactcgggaggctgaggcaggag
